United States Patent Application Publication US 2011/0177960 A1 - sequence listing, part 11

SEQ ID NO: 168391 - DNA, 25 bp, Artificial
  probe
  misc_feature (1)..(25): SEQ ID NO: 5662; WAN024DR4_at; Start 31; Stop 55
aactattttggctttatttccagag

SEQ ID NO: 168392 - DNA, 25 bp, Artificial
  probe
  misc_feature (1)..(25): SEQ ID NO: 5662; WAN024DR4_at; Start 35; Stop 59
attttggctttatttccagagtatt

SEQ ID NO: 168393 - DNA, 25 bp, Artificial
  probe
  misc_feature (1)..(25): SEQ ID NO: 5662; WAN024DR4_at; Start 45; Stop 69
tatttccagagtattttatggtaaa

SEQ ID NO: 168394 - DNA, 25 bp, Artificial
  probe
  misc_feature (1)..(25): SEQ ID NO: 5662; WAN024DR4_at; Start 56; Stop 80
tattttatggtaaaatgaagagtaa

SEQ ID NO: 168395 - DNA, 25 bp, Artificial
  probe
  misc_feature (1)..(25): SEQ ID NO: 5662; WAN024DR4_at; Start 12; Stop 36
ttctctaccaactcccaataactat

SEQ ID NO: 168396 - DNA, 25 bp, Artificial
  probe
  misc_feature (1)..(25): SEQ ID NO: 5662; WAN024DR4_at; Start 63; Stop 87
tggtaaaatgaagagtaataatatt

SEQ ID NO: 168397 - DNA, 25 bp, Artificial
  probe
  misc_feature (1)..(25): SEQ ID NO: 5662; WAN024DR4_at; Start 48; Stop 72
ttccagagtattttatggtaaaatg

SEQ ID NO: 168398 - DNA, 25 bp, Artificial
  probe
  misc_feature (1)..(25): SEQ ID NO: 5662; WAN024DR4_at; Start 32; Stop 56
actattttggctttatttccagagt

SEQ ID NO: 168399 - DNA, 25 bp, Artificial
  probe
  misc_feature (1)..(25): SEQ ID NO: 5662; WAN024DR4_at; Start 8; Stop 32
tttcttctctaccaactcccaataa

SEQ ID NO: 168400 - DNA, 25 bp, Artificial
  probe
  misc_feature (1)..(25): SEQ ID NO: 5662; WAN024DR4_at; Start 51; Stop 75
cagagtattttatggtaaaatgaag

SEQ ID NO: 168401 - DNA, 25 bp, Artificial
  probe
  misc_feature (1)..(25): SEQ ID NO: 5662; WAN024DR4_at; Start 30; Stop 54
taactattttggctttatttccaga

SEQ ID NO: 168402 - DNA, 25 bp, Artificial
  probe
  misc_feature (1)..(25): SEQ ID NO: 5662; WAN024DR4_at; Start 23; Stop 47
ctcccaataactattttggctttat

SEQ ID NO: 168403 - DNA, 25 bp, Artificial
  probe
  misc_feature (1)..(25): SEQ ID NO: 5662; WAN024DR4_at; Start 58; Stop 82
ttttatggtaaaatgaagagtaata

SEQ ID NO: 168404 - DNA, 25 bp, Artificial
  probe
  misc_feature (1)..(25): SEQ ID NO: 7312; WAN024DR5_at; Start 55; Stop 79
cgtaaaggcaccgaagggcaaggca

SEQ ID NO: 168405 - DNA, 25 bp, Artificial
  probe
  misc_feature (1)..(25): SEQ ID NO: 7312; WAN024DR5_at; Start 21; Stop 45
ccatgactgtaaatggacggaactc

SEQ ID NO: 168406 - DNA, 25 bp, Artificial
  probe
  misc_feature (1)..(25): SEQ ID NO: 7312; WAN024DR5_at; Start 62; Stop 86
gcaccgaagggcaaggcaggcaact

SEQ ID NO: 168407 - DNA, 25 bp, Artificial
  probe
  misc_feature (1)..(25): SEQ ID NO: 7312; WAN024DR5_at; Start 42; Stop 66
actctggagagaccgtaaaggcacc

SEQ ID NO: 168408 - DNA, 25 bp, Artificial
  probe
  misc_feature (1)..(25): SEQ ID NO: 7312; WAN024DR5_at; Start 88; Stop 112
ctcaaactctcaggtaaaaggacag

SEQ ID NO: 168409 - DNA, 25 bp, Artificial
  probe
  misc_feature (1)..(25): SEQ ID NO: 7312; WAN024DR5_at; Start 44; Stop 68
tctggagagaccgtaaaggcaccga

SEQ ID NO: 168410 - DNA, 25 bp, Artificial
  probe
  misc_feature (1)..(25): SEQ ID NO: 7312; WAN024DR5_at; Start 30; Stop 54
taaatggacggaactctggagagac

SEQ ID NO: 168411 - DNA, 25 bp, Artificial
  probe
  misc_feature (1)..(25): SEQ ID NO: 7312; WAN024DR5_at; Start 32; Stop 56
aatggacggaactctggagagaccg

SEQ ID NO: 168412 - DNA, 25 bp, Artificial
  probe
  misc_feature (1)..(25): SEQ ID NO: 7312; WAN024DR5_at; Start 40; Stop 64
gaactctggagagaccgtaaaggca

SEQ ID NO: 168413 - DNA, 25 bp, Artificial
  probe
  misc_feature (1)..(25): SEQ ID NO: 7312; WAN024DR5_at; Start 36; Stop 60
gacggaactctggagagaccgtaaa

SEQ ID NO: 168414 - DNA, 25 bp, Artificial
  probe
  misc_feature (1)..(25): SEQ ID NO: 7312; WAN024DR5_at; Start 80; Stop 104
ggcaactgctcaaactctcaggtaa

SEQ ID NO: 168415 - DNA, 25 bp, Artificial
  probe
  misc_feature (1)..(25): SEQ ID NO: 7312; WAN024DR5_at; Start 68; Stop 92
aagggcaaggcaggcaactgctcaa

SEQ ID NO: 168416 - DNA, 25 bp, Artificial
  probe
  misc_feature (1)..(25): SEQ ID NO: 7312; WAN024DR5_at; Start 67; Stop 91
gaagggcaaggcaggcaactgctca

SEQ ID NO: 168417 - DNA, 25 bp, Artificial
  probe
  misc_feature (1)..(25): SEQ ID NO: 7312; WAN024DR5_at; Start 17; Stop 41
ttttccatgactgtaaatggacgga

SEQ ID NO: 168418 - DNA, 25 bp, Artificial
  probe
  misc_feature (1)..(25): SEQ ID NO: 7312; WAN024DR5_at; Start 24; Stop 48
tgactgtaaatggacggaactctgg

SEQ ID NO: 168419 - DNA, 25 bp, Artificial
  probe
  misc_feature (1)..(25): SEQ ID NO: 7312; WAN024DR5_at; Start 22; Stop 46
catgactgtaaatggacggaactct

SEQ ID NO: 168420 - DNA, 25 bp, Artificial
  probe
  misc_feature (1)..(25): SEQ ID NO: 7312; WAN024DR5_at; Start 25; Stop 49
gactgtaaatggacggaactctgga

SEQ ID NO: 168421 - DNA, 25 bp, Artificial
  probe
  misc_feature (1)..(25): SEQ ID NO: 7312; WAN024DR5_at; Start 96; Stop 120
ctcaggtaaaaggacagagctagga

SEQ ID NO: 168422 - DNA, 25 bp, Artificial
  probe
  misc_feature (1)..(25): SEQ ID NO: 7312; WAN024DR5_at; Start 15; Stop 39
gattttccatgactgtaaatggacg

SEQ ID NO: 168423 - DNA, 25 bp, Artificial
  probe
  misc_feature (1)..(25): SEQ ID NO: 7312; WAN024DR5_at; Start 86; Stop 110
tgctcaaactctcaggtaaaaggac

SEQ ID NO: 168424 - DNA, 25 bp, Artificial
  probe
  misc_feature (1)..(25): SEQ ID NO: 7312; WAN024DR5_at; Start 77; Stop 101
gcaggcaactgctcaaactctcagg

SEQ ID NO: 168425 - DNA, 25 bp, Artificial
  probe
  misc_feature (1)..(25): SEQ ID NO: 7312; WAN024DR5_at; Start 73; Stop 97
caaggcaggcaactgctcaaactct

SEQ ID NO: 168426 - DNA, 25 bp, Artificial
  probe
  misc_feature (1)..(25): SEQ ID NO: 7312; WAN024DR5_at; Start 26; Stop 50
actgtaaatggacggaactctggag

SEQ ID NO: 168427 - DNA, 25 bp, Artificial
  probe
  misc_feature (1)..(25): SEQ ID NO: 7312; WAN024DR5_at; Start 71; Stop 95
ggcaaggcaggcaactgctcaaact

SEQ ID NO: 168428 - DNA, 25 bp, Artificial
  probe
  misc_feature (1)..(25): SEQ ID NO: 7312; WAN024DR5_at; Start 34; Stop 58
tggacggaactctggagagaccgta

SEQ ID NO: 168429 - DNA, 25 bp, Artificial
  probe
  misc_feature (1)..(25): SEQ ID NO: 7312; WAN024DR5_at; Start 76; Stop 100
ggcaggcaactgctcaaactctcag

SEQ ID NO: 168430 - DNA, 25 bp, Artificial
  probe
  misc_feature (1)..(25): SEQ ID NO: 7312; WAN024DR5_at; Start 28; Stop 52
tgtaaatggacggaactctggagag

SEQ ID NO: 168431 - DNA, 25 bp, Artificial
  probe
  misc_feature (1)..(25): SEQ ID NO: 7312; WAN024DR5_at; Start 64; Stop 88
accgaagggcaaggcaggcaactgc

SEQ ID NO: 168432 - DNA, 25 bp, Artificial
  probe
  misc_feature (1)..(25): SEQ ID NO: 7312; WAN024DR5_at; Start 90; Stop 114
caaactctcaggtaaaaggacagag

SEQ ID NO: 168433 - DNA, 25 bp, Artificial
  probe
  misc_feature (1)..(25): SEQ ID NO: 7312; WAN024DR5_at; Start 92; Stop 116
aactctcaggtaaaaggacagagct

SEQ ID NO: 168434 - DNA, 25 bp, Artificial
  probe
  misc_feature (1)..(25): SEQ ID NO: 7312; WAN024DR5_at; Start 9; Stop 33
tcgtttgattttccatgactgtaaa

SEQ ID NO: 168435 - DNA, 25 bp, Artificial
  probe
  misc_feature (1)..(25): SEQ ID NO: 7312; WAN024DR5_at; Start 95; Stop 119
tctcaggtaaaaggacagagctagg

SEQ ID NO: 168436 - DNA, 25 bp, Artificial
  probe
  misc_feature (1)..(25): SEQ ID NO: 7312; WAN024DR5_at; Start 46; Stop 70
tggagagaccgtaaaggcaccgaag

SEQ ID NO: 168437 - DNA, 25 bp, Artificial
  probe
  misc_feature (1)..(25): SEQ ID NO: 7312; WAN024DR5_at; Start 82; Stop 106
caactgctcaaactctcaggtaaaa

SEQ ID NO: 168438 - DNA, 25 bp, Artificial
  probe
  misc_feature (1)..(25): SEQ ID NO: 5103; WAN024DR6_at; Start 40; Stop 64
gtctctccagagttccgtccattta

SEQ ID NO: 168439 - DNA, 25 bp, Artificial
  probe
  misc_feature (1)..(25): SEQ ID NO: 5103; WAN024DR6_at; Start 63; Stop 87
tacagtcatggaaaatcaaacgatt

SEQ ID NO: 168440 - DNA, 25 bp, Artificial
  probe
  misc_feature (1)..(25): SEQ ID NO: 5103; WAN024DR6_at; Start 58; Stop 82
ccatttacagtcatggaaaatcaaa

SEQ ID NO: 168441 - DNA, 25 bp, Artificial
  probe
  misc_feature (1)..(25): SEQ ID NO: 5103; WAN024DR6_at; Start 28; Stop 52
ggtgcctttacggtctctccagagt

SEQ ID NO: 168442 - DNA, 25 bp, Artificial
  probe
  misc_feature (1)..(25): SEQ ID NO: 5103; WAN024DR6_at; Start 59; Stop 83
catttacagtcatggaaaatcaaac

SEQ ID NO: 168443 - DNA, 25 bp, Artificial
  probe
  misc_feature (1)..(25): SEQ ID NO: 5103; WAN024DR6_at; Start 29; Stop 53
gtgcctttacggtctctccagagtt

SEQ ID NO: 168444 - DNA, 25 bp, Artificial
  probe
  misc_feature (1)..(25): SEQ ID NO: 5103; WAN024DR6_at; Start 2; Stop 26
tgagcagttgcctgccttgcccctt

SEQ ID NO: 168445 - DNA, 25 bp, Artificial
  probe
  misc_feature (1)..(25): SEQ ID NO: 5103; WAN024DR6_at; Start 49; Stop 73
gagttccgtccatttacagtcatgg

SEQ ID NO: 168446 - DNA, 25 bp, Artificial
  probe
  misc_feature (1)..(25): SEQ ID NO: 5103; WAN024DR6_at; Start 53; Stop 77
tccgtccatttacagtcatggaaaa

SEQ ID NO: 168447 - DNA, 25 bp, Artificial
  probe
  misc_feature (1)..(25): SEQ ID NO: 5103; WAN024DR6_at; Start 26; Stop 50
tcggtgcctttacggtctctccaga

SEQ ID NO: 168448 - DNA, 25 bp, Artificial
  probe
  misc_feature (1)..(25): SEQ ID NO: 5103; WAN024DR6_at; Start 30; Stop 54
tgcctttacggtctctccagagttc

SEQ ID NO: 168449 - DNA, 25 bp, Artificial
  probe
  misc_feature (1)..(25): SEQ ID NO: 5103; WAN024DR6_at; Start 42; Stop 66
ctctccagagttccgtccatttaca

SEQ ID NO: 168450 - DNA, 25 bp, Artificial
  probe
  misc_feature (1)..(25): SEQ ID NO: 5103; WAN024DR6_at; Start 48; Stop 72
agagttccgtccatttacagtcatg

SEQ ID NO: 168451 - DNA, 25 bp, Artificial
  probe
  misc_feature (1)..(25): SEQ ID NO: 5103; WAN024DR6_at; Start 55; Stop 79
cgtccatttacagtcatggaaaatc

SEQ ID NO: 168452 - DNA, 25 bp, Artificial
  probe
  misc_feature (1)..(25): SEQ ID NO: 5103; WAN024DR6_at; Start 61; Stop 85
tttacagtcatggaaaatcaaacga

SEQ ID NO: 168453 - DNA, 25 bp, Artificial
  probe
  misc_feature (1)..(25): SEQ ID NO: 5103; WAN024DR6_at; Start 32; Stop 56
cctttacggtctctccagagttccg

SEQ ID NO: 168454 - DNA, 25 bp, Artificial
  probe
  misc_feature (1)..(25): SEQ ID NO: 5103; WAN024DR6_at; Start 83; Stop 107
cgattccccacttctatctaactaa

SEQ ID NO: 168455 - DNA, 25 bp, Artificial
  probe
  misc_feature (1)..(25): SEQ ID NO: 5103; WAN024DR6_at; Start 46; Stop 70
ccagagttccgtccatttacagtca

SEQ ID NO: 168456 - DNA, 25 bp, Artificial
  probe
  misc_feature (1)..(25): SEQ ID NO: 5103; WAN024DR6_at; Start 39; Stop 63
ggtctctccagagttccgtccattt

SEQ ID NO: 168457 - DNA, 25 bp, Artificial
  probe
  misc_feature (1)..(25): SEQ ID NO: 5103; WAN024DR6_at; Start 45; Stop 69
tccagagttccgtccatttacagtc

SEQ ID NO: 168458 - DNA, 25 bp, Artificial
  probe
  misc_feature (1)..(25): SEQ ID NO: 5103; WAN024DR6_at; Start 41; Stop 65
tctctccagagttccgtccatttac

SEQ ID NO: 168459 - DNA, 25 bp, Artificial
  probe
  misc_feature (1)..(25): SEQ ID NO: 5103; WAN024DR6_at; Start 50; Stop 74
agttccgtccatttacagtcatgga

SEQ ID NO: 168460 - DNA, 25 bp, Artificial
  probe
  misc_feature (1)..(25): SEQ ID NO: 5103; WAN024DR6_at; Start 1; Stop 25
ttgagcagttgcctgccttgcccct

SEQ ID NO: 168461 - DNA, 25 bp, Artificial
  probe
  misc_feature (1)..(25): SEQ ID NO: 5103; WAN024DR6_at; Start 75; Stop 99
aaatcaaacgattccccacttctat

SEQ ID NO: 168462 - DNA, 25 bp, Artificial
  probe
  misc_feature (1)..(25): SEQ ID NO: 5103; WAN024DR6_at; Start 44; Stop 68
ctccagagttccgtccatttacagt

SEQ ID NO: 168463 - DNA, 25 bp, Artificial
  probe
  misc_feature (1)..(25): SEQ ID NO: 5103; WAN024DR6_at; Start 51; Stop 75
gttccgtccatttacagtcatggaa

SEQ ID NO: 168464 - DNA, 25 bp, Artificial
  probe
  misc_feature (1)..(25): SEQ ID NO: 5103; WAN024DR6_at; Start 36; Stop 60
tacggtctctccagagttccgtcca

SEQ ID NO: 168465 - DNA, 25 bp, Artificial
  probe
  misc_feature (1)..(25): SEQ ID NO: 5103; WAN024DR6_at; Start 84; Stop 108
gattccccacttctatctaactaat

SEQ ID NO: 168466 - DNA, 25 bp, Artificial
  probe
  misc_feature (1)..(25): SEQ ID NO: 5103; WAN024DR6_at; Start 7; Stop 31
agttgcctgccttgccccttcggtg

SEQ ID NO: 168467 - DNA, 25 bp, Artificial
  probe
  misc_feature (1)..(25): SEQ ID NO: 5103; WAN024DR6_at; Start 47; Stop 71
cagagttccgtccatttacagtcat

SEQ ID NO: 168468 - DNA, 25 bp, Artificial
  probe
  misc_feature (1)..(25): SEQ ID NO: 5103; WAN024DR6_at; Start 34; Stop 58
tttacggtctctccagagttccgtc

SEQ ID NO: 168469 - DNA, 25 bp, Artificial
  probe
  misc_feature (1)..(25): SEQ ID NO: 5103; WAN024DR6_at; Start 25; Stop 49
ttcggtgcctttacggtctctccag

SEQ ID NO: 168470 - DNA, 25 bp, Artificial
  probe
  misc_feature (1)..(25): SEQ ID NO: 5103; WAN024DR6_at; Start 79; Stop 103
caaacgattccccacttctatctaa

SEQ ID NO: 168471 - DNA, 25 bp, Artificial
  probe
  misc_feature (1)..(25): SEQ ID NO: 5103; WAN024DR6_at; Start 24; Stop 48
cttcggtgcctttacggtctctcca

SEQ ID NO: 168472 - DNA, 25 bp, Artificial
  probe
  misc_feature (1)..(25): SEQ ID NO: 3464; WAN024DR7_at; Start 109; Stop 133
ctttttgtcagaatagagaaaattt

SEQ ID NO: 168473 - DNA, 25 bp, Artificial
  probe
  misc_feature (1)..(25): SEQ ID NO: 3464; WAN024DR7_at; Start 12; Stop 36
tataagaaaggatttagtatttctc

SEQ ID NO: 168474 - DNA, 25 bp, Artificial
  probe
  misc_feature (1)..(25): SEQ ID NO: 3464; WAN024DR7_at; Start 104; Stop 128
agcctctttttgtcagaatagagaa

SEQ ID NO: 168475 - DNA, 25 bp, Artificial
  probe
  misc_feature (1)..(25): SEQ ID NO: 3464; WAN024DR7_at; Start 57; Stop 81
tacatttgtaaagaaagattctaaa

SEQ ID NO: 168476 - DNA, 25 bp, Artificial
  probe
  misc_feature (1)..(25): SEQ ID NO: 3464; WAN024DR7_at; Start 67; Stop 91
aagaaagattctaaatgtactgacc

SEQ ID NO: 168477 - DNA, 25 bp, Artificial
  probe
  misc_feature (1)..(25): SEQ ID NO: 3464; WAN024DR7_at; Start 107; Stop 131
ctctttttgtcagaatagagaaaat

SEQ ID NO: 168478 - DNA, 25 bp, Artificial
  probe
  misc_feature (1)..(25): SEQ ID NO: 3464; WAN024DR7_at; Start 1; Stop 25
ctgttgcaaaatataagaaaggatt

SEQ ID NO: 168479 - DNA, 25 bp, Artificial
  probe
  misc_feature (1)..(25): SEQ ID NO: 3464; WAN024DR7_at; Start 112; Stop 136
tttgtcagaatagagaaaatttttg

SEQ ID NO: 168480 - DNA, 25 bp, Artificial
  probe
  misc_feature (1)..(25): SEQ ID NO: 3464; WAN024DR7_at; Start 22; Stop 46
gatttagtatttctcttgaatgctg

SEQ ID NO: 168481 - DNA, 25 bp, Artificial
  probe
  misc_feature (1)..(25): SEQ ID NO: 3464; WAN024DR7_at; Start 103; Stop 127
gagcctctttttgtcagaatagaga

SEQ ID NO: 168482 - DNA, 25 bp, Artificial
  probe
  misc_feature (1)..(25): SEQ ID NO: 3464; WAN024DR7_at; Start 43; Stop 67
gctgaatccttttttacatttgtaa

SEQ ID NO: 168483 - DNA, 25 bp, Artificial
  probe
  misc_feature (1)..(25): SEQ ID NO: 3464; WAN024DR7_at; Start 35; Stop 59
tcttgaatgctgaatccttttttac

SEQ ID NO: 168484 - DNA, 25 bp, Artificial
  probe
  misc_feature (1)..(25): SEQ ID NO: 3464; WAN024DR7_at; Start 5; Stop 29
tgcaaaatataagaaaggatttagt

SEQ ID NO: 168485 - DNA, 25 bp, Artificial
  probe
  misc_feature (1)..(25): SEQ ID NO: 3464; WAN024DR7_at; Start 55; Stop 79
tttacatttgtaaagaaagattcta

SEQ ID NO: 168486 - DNA, 25 bp, Artificial
  probe
  misc_feature (1)..(25): SEQ ID NO: 3464; WAN024DR7_at; Start 28; Stop 52
gtatttctcttgaatgctgaatcct

SEQ ID NO: 168487 - DNA, 25 bp, Artificial
  probe
  misc_feature (1)..(25): SEQ ID NO: 3464; WAN024DR7_at; Start 2; Stop 26
tgttgcaaaatataagaaaggattt

SEQ ID NO: 168488 - DNA, 25 bp, Artificial
  probe
  misc_feature (1)..(25): SEQ ID NO: 3464; WAN024DR7_at; Start 17; Stop 41
gaaaggatttagtatttctcttgaa

SEQ ID NO: 168489 - DNA, 25 bp, Artificial
  probe
  misc_feature (1)..(25): SEQ ID NO: 3464; WAN024DR7_at; Start 38; Stop 62
tgaatgctgaatccttttttacatt

SEQ ID NO: 168490 - DNA, 25 bp, Artificial
  probe
  misc_feature (1)..(25): SEQ ID NO: 3464; WAN024DR7_at; Start 68; Stop 92
agaaagattctaaatgtactgaccc

SEQ ID NO: 168491 - DNA, 25 bp, Artificial
  probe
  misc_feature (1)..(25): SEQ ID NO: 3464; WAN024DR7_at; Start 36; Stop 60
cttgaatgctgaatccttttttaca

SEQ ID NO: 168492 - DNA, 25 bp, Artificial
  probe
  misc_feature (1)..(25): SEQ ID NO: 3464; WAN024DR7_at; Start 20; Stop 44
aggatttagtatttctcttgaatgc

SEQ ID NO: 168493 - DNA, 25 bp, Artificial
  probe
  misc_feature (1)..(25): SEQ ID NO: 3464; WAN024DR7_at; Start 27; Stop 51
agtatttctcttgaatgctgaatcc

SEQ ID NO: 168494 - DNA, 25 bp, Artificial
  probe
  misc_feature (1)..(25): SEQ ID NO: 3464; WAN024DR7_at; Start 31; Stop 55
tttctcttgaatgctgaatcctttt

SEQ ID NO: 168495 - DNA, 25 bp, Artificial
  probe
  misc_feature (1)..(25): SEQ ID NO: 3464; WAN024DR7_at; Start 73; Stop 97
gattctaaatgtactgacccccaaa

SEQ ID NO: 168496 - DNA, 25 bp, Artificial
  probe
  misc_feature (1)..(25): SEQ ID NO: 3464; WAN024DR7_at; Start 29; Stop 53
tatttctcttgaatgctgaatcctt

SEQ ID NO: 168497 - DNA, 25 bp, Artificial
  probe
  misc_feature (1)..(25): SEQ ID NO: 3464; WAN024DR7_at; Start 26; Stop 50
tagtatttctcttgaatgctgaatc

SEQ ID NO: 168498 - DNA, 25 bp, Artificial
  probe
  misc_feature (1)..(25): SEQ ID NO: 3464; WAN024DR7_at; Start 24; Stop 48
tttagtatttctcttgaatgctgaa

SEQ ID NO: 168499 - DNA, 25 bp, Artificial
  probe
  misc_feature (1)..(25): SEQ ID NO: 3464; WAN024DR7_at; Start 71; Stop 95
aagattctaaatgtactgaccccca

SEQ ID NO: 168500 - DNA, 25 bp, Artificial
  probe
  misc_feature (1)..(25): SEQ ID NO: 3464; WAN024DR7_at; Start 114; Stop 138
tgtcagaatagagaaaatttttgtt

SEQ ID NO: 168501 - DNA, 25 bp, Artificial
  probe
  misc_feature (1)..(25): SEQ ID NO: 3464; WAN024DR7_at; Start 105; Stop 129
gcctctttttgtcagaatagagaaa

SEQ ID NO: 168502 - DNA, 25 bp, Artificial
  probe
  misc_feature (1)..(25): SEQ ID NO: 3464; WAN024DR7_at; Start 106; Stop 130
cctctttttgtcagaatagagaaaa

SEQ ID NO: 168503 - DNA, 25 bp, Artificial
  probe
  misc_feature (1)..(25): SEQ ID NO: 3464; WAN024DR7_at; Start 33; Stop 57
tctcttgaatgctgaatcctttttt

SEQ ID NO: 168504 - DNA, 25 bp, Artificial
  probe
  misc_feature (1)..(25): SEQ ID NO: 3464; WAN024DR7_at; Start 116; Stop 140
tcagaatagagaaaatttttgttaa

SEQ ID NO: 168505 - DNA, 25 bp, Artificial
  probe
  misc_feature (1)..(25): SEQ ID NO: 3464; WAN024DR7_at; Start 69; Stop 93
gaaagattctaaatgtactgacccc

SEQ ID NO: 168506 - DNA, 25 bp, Artificial
  probe
  misc_feature (1)..(25): SEQ ID NO: 5857; WAN024DR8_at; Start 79; Stop 103
gcactttcagaggaaggagtatttt

SEQ ID NO: 168507 - DNA, 25 bp, Artificial
  probe
  misc_feature (1)..(25): SEQ ID NO: 5857; WAN024DR8_at; Start 76; Stop 100
attgcactttcagaggaaggagtat

SEQ ID NO: 168508 - DNA, 25 bp, Artificial
  probe
  misc_feature (1)..(25): SEQ ID NO: 5857; WAN024DR8_at; Start 78; Stop 102
tgcactttcagaggaaggagtattt

SEQ ID NO: 168509 - DNA, 25 bp, Artificial
  probe
  misc_feature (1)..(25): SEQ ID NO: 5857; WAN024DR8_at; Start 77; Stop 101
ttgcactttcagaggaaggagtatt

SEQ ID NO: 168510 - DNA, 25 bp, Artificial
  probe
  misc_feature (1)..(25): SEQ ID NO: 5857; WAN024DR8_at; Start 80; Stop 104
cactttcagaggaaggagtattttt

SEQ ID NO: 168511 - DNA, 25 bp, Artificial
  probe
  misc_feature (1)..(25): SEQ ID NO: 4307; WAN024DRB_at; Start 57; Stop 81
aaaatatcttgacaagcaagggaaa

SEQ ID NO: 168512 - DNA, 25 bp, Artificial
  probe
  misc_feature (1)..(25): SEQ ID NO: 4307; WAN024DRB_at; Start 58; Stop 82
aaatatcttgacaagcaagggaaaa

SEQ ID NO: 168513 - DNA, 25 bp, Artificial
  probe
  misc_feature (1)..(25): SEQ ID NO: 4307; WAN024DRB_at; Start 16; Stop 40
tttattcagaaattgatctctaaca

SEQ ID NO: 168514 - DNA, 25 bp, Artificial
  probe
  misc_feature (1)..(25): SEQ ID NO: 4307; WAN024DRB_at; Start 13; Stop 37
atttttattcagaaattgatctcta

SEQ ID NO: 168515 - DNA, 25 bp, Artificial
  probe
  misc_feature (1)..(25): SEQ ID NO: 4307; WAN024DRB_at; Start 66; Stop 90
tgacaagcaagggaaaattttgtta

SEQ ID NO: 168516 - DNA, 25 bp, Artificial
  probe
  misc_feature (1)..(25): SEQ ID NO: 4307; WAN024DRB_at; Start 54; Stop 78
agaaaaatatcttgacaagcaaggg

SEQ ID NO: 168517 - DNA, 25 bp, Artificial
  probe
  misc_feature (1)..(25): SEQ ID NO: 4307; WAN024DRB_at; Start 61; Stop 85
tatcttgacaagcaagggaaaattt

SEQ ID NO: 168518 - DNA, 25 bp, Artificial
  probe
  misc_feature (1)..(25): SEQ ID NO: 4307; WAN024DRB_at; Start 60; Stop 84
atatcttgacaagcaagggaaaatt

SEQ ID NO: 168519 - DNA, 25 bp, Artificial
  probe
  misc_feature (1)..(25): SEQ ID NO: 4307; WAN024DRB_at; Start 17; Stop 41
ttattcagaaattgatctctaacat

SEQ ID NO: 168520 - DNA, 25 bp, Artificial
  probe
  misc_feature (1)..(25): SEQ ID NO: 4307; WAN024DRB_at; Start 18; Stop 42
tattcagaaattgatctctaacatt

SEQ ID NO: 168521 - DNA, 25 bp, Artificial
  probe
  misc_feature (1)..(25): SEQ ID NO: 4307; WAN024DRB_at; Start 14; Stop 38
tttttattcagaaattgatctctaa

SEQ ID NO: 168522 - DNA, 25 bp, Artificial
  probe
  misc_feature (1)..(25): SEQ ID NO: 4307; WAN024DRB_at; Start 62; Stop 86
atcttgacaagcaagggaaaatttt

SEQ ID NO: 168523 - DNA, 25 bp, Artificial
  probe
  misc_feature (1)..(25): SEQ ID NO: 4307; WAN024DRB_at; Start 23; Stop 47
agaaattgatctctaacattaccaa

SEQ ID NO: 168524 - DNA, 25 bp, Artificial
  probe
  misc_feature (1)..(25): SEQ ID NO: 4307; WAN024DRB_at; Start 20; Stop 44
ttcagaaattgatctctaacattac

SEQ ID NO: 168525 - DNA, 25 bp, Artificial
  probe
  misc_feature (1)..(25): SEQ ID NO: 4307; WAN024DRB_at; Start 25; Stop 49
aaattgatctctaacattaccaata

SEQ ID NO: 168526 - DNA, 25 bp, Artificial
  probe
  misc_feature (1)..(25): SEQ ID NO: 4307; WAN024DRB_at; Start 55; Stop 79
gaaaaatatcttgacaagcaaggga

SEQ ID NO: 168527 - DNA, 25 bp, Artificial
  probe
  misc_feature (1)..(25): SEQ ID NO: 4307; WAN024DRB_at; Start 15; Stop 39
ttttattcagaaattgatctctaac

SEQ ID NO: 168528 - DNA, 25 bp, Artificial
  probe
  misc_feature (1)..(25): SEQ ID NO: 4307; WAN024DRB_at; Start 64; Stop 88
cttgacaagcaagggaaaattttgt

SEQ ID NO: 168529 - DNA, 25 bp, Artificial
  probe
  misc_feature (1)..(25): SEQ ID NO: 4307; WAN024DRB_at; Start 21; Stop 45
tcagaaattgatctctaacattacc

SEQ ID NO: 168530 - DNA, 25 bp, Artificial
  probe
  misc_feature (1)..(25): SEQ ID NO: 4307; WAN024DRB_at; Start 22; Stop 46
cagaaattgatctctaacattacca

SEQ ID NO: 168531 - DNA, 25 bp, Artificial
  probe
  misc_feature (1)..(25): SEQ ID NO: 4307; WAN024DRB_at; Start 28; Stop 52
ttgatctctaacattaccaataaaa

SEQ ID NO: 168532 - DNA, 25 bp, Artificial
  probe
  misc_feature (1)..(25): SEQ ID NO: 4307; WAN024DRB_at; Start 56; Stop 80
aaaaatatcttgacaagcaagggaa

SEQ ID NO: 168533 - DNA, 25 bp, Artificial
  probe
  misc_feature (1)..(25): SEQ ID NO: 4307; WAN024DRB_at; Start 12; Stop 36
tatttttattcagaaattgatctct

SEQ ID NO: 168534 - DNA, 25 bp, Artificial
  probe
  misc_feature (1)..(25): SEQ ID NO: 4307; WAN024DRB_at; Start 63; Stop 87
tcttgacaagcaagggaaaattttg

SEQ ID NO: 168535 - DNA, 25 bp, Artificial
  probe
  misc_feature (1)..(25): SEQ ID NO: 4307; WAN024DRB_at; Start 53; Stop 77
aagaaaaatatcttgacaagcaagg

SEQ ID NO: 168536 - DNA, 25 bp, Artificial
  probe
  misc_feature (1)..(25): SEQ ID NO: 4307; WAN024DRB_at; Start 8; Stop 32
cagctatttttattcagaaattgat

SEQ ID NO: 168537 - DNA, 25 bp, Artificial
  probe
  misc_feature (1)..(25): SEQ ID NO: 4307; WAN024DRB_at; Start 27; Stop 51
attgatctctaacattaccaataaa

SEQ ID NO: 168538 - DNA, 25 bp, Artificial
  probe
  misc_feature (1)..(25): SEQ ID NO: 4307; WAN024DRB_at; Start 52; Stop 76
aaagaaaaatatcttgacaagcaag

SEQ ID NO: 168539 - DNA, 25 bp, Artificial
  probe
  misc_feature (1)..(25): SEQ ID NO: 4307; WAN024DRB_at; Start 26; Stop 50
aattgatctctaacattaccaataa

SEQ ID NO: 168540 - DNA, 25 bp, Artificial
  probe
  misc_feature (1)..(25): SEQ ID NO: 4307; WAN024DRB_at; Start 10; Stop 34
gctatttttattcagaaattgatct

SEQ ID NO: 168541 - DNA, 25 bp, Artificial
  probe
  misc_feature (1)..(25): SEQ ID NO: 4307; WAN024DRB_at; Start 59; Stop 83
aatatcttgacaagcaagggaaaat

SEQ ID NO: 168542 - DNA, 25 bp, Artificial
  probe
  misc_feature (1)..(25): SEQ ID NO: 4307; WAN024DRB_at; Start 11; Stop 35
ctatttttattcagaaattgatctc

SEQ ID NO: 168543 - DNA, 25 bp, Artificial
  probe
  misc_feature (1)..(25): SEQ ID NO: 4307; WAN024DRB_at; Start 24; Stop 48
gaaattgatctctaacattaccaat

SEQ ID NO: 168544 - DNA, 25 bp, Artificial
  probe
  misc_feature (1)..(25): SEQ ID NO: 4307; WAN024DRB_at; Start 9; Stop 33
agctatttttattcagaaattgatc

SEQ ID NO: 168545 - DNA, 25 bp, Artificial
  probe
  misc_feature (1)..(25): SEQ ID NO: 1753; WAN024DRC_at; Start 46; Stop 70
ggtgtcgttcttcgtatagtcgata

SEQ ID NO: 168546 - DNA, 25 bp, Artificial
  probe
  misc_feature (1)..(25): SEQ ID NO: 1753; WAN024DRC_at; Start 39; Stop 63
tgtggtcggtgtcgttcttcgtata

SEQ ID NO: 168547 - DNA, 25 bp, Artificial
  probe
  misc_feature (1)..(25): SEQ ID NO: 1753; WAN024DRC_at; Start 58; Stop 82
cgtatagtcgataaatggctaaaca

SEQ ID NO: 168548 - DNA, 25 bp, Artificial
  probe
  misc_feature (1)..(25): SEQ ID NO: 1753; WAN024DRC_at; Start 31; Stop 55
ggaccaattgtggtcggtgtcgttc

SEQ ID NO: 168549 - DNA, 25 bp, Artificial
  probe
  misc_feature (1)..(25): SEQ ID NO: 1753; WAN024DRC_at; Start 54; Stop 78
tcttcgtatagtcgataaatggcta

SEQ ID NO: 168550 - DNA, 25 bp, Artificial
  probe
  misc_feature (1)..(25): SEQ ID NO: 1753; WAN024DRC_at; Start 33; Stop 57
accaattgtggtcggtgtcgttctt

SEQ ID NO: 168551 - DNA, 25 bp, Artificial
  probe
  misc_feature (1)..(25): SEQ ID NO: 1753; WAN024DRC_at; Start 53; Stop 77
ttcttcgtatagtcgataaatggct

SEQ ID NO: 168552 - DNA, 25 bp, Artificial
  probe
  misc_feature (1)..(25): SEQ ID NO: 1753; WAN024DRC_at; Start 42; Stop 66
ggtcggtgtcgttcttcgtatagtc

SEQ ID NO: 168553 - DNA, 25 bp, Artificial
  probe
  misc_feature (1)..(25): SEQ ID NO: 1753; WAN024DRC_at; Start 41; Stop 65
tggtcggtgtcgttcttcgtatagt

SEQ ID NO: 168554 - DNA, 25 bp, Artificial
  probe
  misc_feature (1)..(25): SEQ ID NO: 1753; WAN024DRC_at; Start 35; Stop 59
caattgtggtcggtgtcgttcttcg

SEQ ID NO: 168555 - DNA, 25 bp, Artificial
  probe
  misc_feature (1)..(25): SEQ ID NO: 1753; WAN024DRC_at; Start 36; Stop 60
aattgtggtcggtgtcgttcttcgt

SEQ ID NO: 168556 - DNA, 25 bp, Artificial
  probe
  misc_feature (1)..(25): SEQ ID NO: 1753; WAN024DRC_at; Start 37; Stop 61
attgtggtcggtgtcgttcttcgta

SEQ ID NO: 168557 - DNA, 25 bp, Artificial
  probe
  misc_feature (1)..(25): SEQ ID NO: 1753; WAN024DRC_at; Start 29; Stop 53
tcggaccaattgtggtcggtgtcgt

SEQ ID NO: 168558 - DNA, 25 bp, Artificial
  probe
  misc_feature (1)..(25): SEQ ID NO: 1753; WAN024DRC_at; Start 43; Stop 67
gtcggtgtcgttcttcgtatagtcg

SEQ ID NO: 168559 - DNA, 25 bp, Artificial
  probe
  misc_feature (1)..(25): SEQ ID NO: 1753; WAN024DRC_at; Start 47; Stop 71
gtgtcgttcttcgtatagtcgataa

SEQ ID NO: 168560 - DNA, 25 bp, Artificial
  probe
  misc_feature (1)..(25): SEQ ID NO: 1753; WAN024DRC_at; Start 38; Stop 62
ttgtggtcggtgtcgttcttcgtat

SEQ ID NO: 168561 - DNA, 25 bp, Artificial
  probe
  misc_feature (1)..(25): SEQ ID NO: 1753; WAN024DRC_at; Start 52; Stop 76
gttcttcgtatagtcgataaatggc

SEQ ID NO: 168562 - DNA, 25 bp, Artificial
  probe
  misc_feature (1)..(25): SEQ ID NO: 1753; WAN024DRC_at; Start 62; Stop 86
tagtcgataaatggctaaacaagga

SEQ ID NO: 168563 - DNA, 25 bp, Artificial
  probe
  misc_feature (1)..(25): SEQ ID NO: 1753; WAN024DRC_at; Start 61; Stop 85
atagtcgataaatggctaaacaagg

SEQ ID NO: 168564 - DNA, 25 bp, Artificial
  probe
  misc_feature (1)..(25): SEQ ID NO: 1753; WAN024DRC_at; Start 51; Stop 75
cgttcttcgtatagtcgataaatgg

SEQ ID NO: 168565 - DNA, 25 bp, Artificial
  probe
  misc_feature (1)..(25): SEQ ID NO: 1753; WAN024DRC_at; Start 57; Stop 81
tcgtatagtcgataaatggctaaac

SEQ ID NO: 168566 - DNA, 25 bp, Artificial
  probe
  misc_feature (1)..(25): SEQ ID NO: 1753; WAN024DRC_at; Start 56; Stop 80
ttcgtatagtcgataaatggctaaa

SEQ ID NO: 168567 - DNA, 25 bp, Artificial
  probe
  misc_feature (1)..(25): SEQ ID NO: 1753; WAN024DRC_at; Start 60; Stop 84
tatagtcgataaatggctaaacaag

SEQ ID NO: 168568 - DNA, 25 bp, Artificial
  probe
  misc_feature (1)..(25): SEQ ID NO: 1753; WAN024DRC_at; Start 30; Stop 54
cggaccaattgtggtcggtgtcgtt

SEQ ID NO: 168569 - DNA, 25 bp, Artificial
  probe
  misc_feature (1)..(25): SEQ ID NO: 1753; WAN024DRC_at; Start 50; Stop 74
tcgttcttcgtatagtcgataaatg

SEQ ID NO: 168570 - DNA, 25 bp, Artificial
  probe
  misc_feature (1)..(25): SEQ ID NO: 1753; WAN024DRC_at; Start 2; Stop 26
tgatggaattagtactcaaaactat

SEQ ID NO: 168571 - DNA, 25 bp, Artificial
  probe
  misc_feature (1)..(25): SEQ ID NO: 1753; WAN024DRC_at; Start 28; Stop 52
atcggaccaattgtggtcggtgtcg

SEQ ID NO: 168572 - DNA, 25 bp, Artificial
  probe
  misc_feature (1)..(25): SEQ ID NO: 1753; WAN024DRC_at; Start 49; Stop 73
gtcgttcttcgtatagtcgataaat

SEQ ID NO: 168573 - DNA, 25 bp, Artificial
  probe
  misc_feature (1)..(25): SEQ ID NO: 1753; WAN024DRC_at; Start 40; Stop 64
gtggtcggtgtcgttcttcgtatag

SEQ ID NO: 168574 - DNA, 25 bp, Artificial
  probe
  misc_feature (1)..(25): SEQ ID NO: 1753; WAN024DRC_at; Start 48; Stop 72
tgtcgttcttcgtatagtcgataaa

SEQ ID NO: 168575 - DNA, 25 bp, Artificial
  probe
  misc_feature (1)..(25): SEQ ID NO: 1753; WAN024DRC_at; Start 32; Stop 56
gaccaattgtggtcggtgtcgttct

SEQ ID NO: 168576 - DNA, 25 bp, Artificial
  probe
  misc_feature (1)..(25): SEQ ID NO: 1753; WAN024DRC_at; Start 45; Stop 69
cggtgtcgttcttcgtatagtcgat

SEQ ID NO: 168577 - DNA, 25 bp, Artificial
  probe
  misc_feature (1)..(25): SEQ ID NO: 1753; WAN024DRC_at; Start 55; Stop 79
cttcgtatagtcgataaatggctaa

SEQ ID NO: 168578 - DNA, 25 bp, Artificial
  probe
  misc_feature (1)..(25): SEQ ID NO: 1753; WAN024DRC_at; Start 44; Stop 68
tcggtgtcgttcttcgtatagtcga

SEQ ID NO: 168579 - DNA, 25 bp, Artificial
  probe
  misc_feature (1)..(25): SEQ ID NO: 2478; WAN024DRD_at; Start 5; Stop 29
ctaaacaaggacaaatagtgtcaaa

SEQ ID NO: 168580 - DNA, 25 bp, Artificial
  probe
  misc_feature (1)..(25): SEQ ID NO: 2478; WAN024DRD_at; Start 10; Stop 34
caaggacaaatagtgtcaaaaaaga

SEQ ID NO: 168581 - DNA, 25 bp, Artificial
  probe
  misc_feature (1)..(25): SEQ ID NO: 2478; WAN024DRD_at; Start 9; Stop 33
acaaggacaaatagtgtcaaaaaag

SEQ ID NO: 168582 - DNA, 25 bp, Artificial
  probe
  misc_feature (1)..(25): SEQ ID NO: 2478; WAN024DRD_at; Start 47; Stop 71
ttggtcgtgagcttggggtcttttc

SEQ ID NO: 168583 - DNA, 25 bp, Artificial
  probe
  misc_feature (1)..(25): SEQ ID NO: 2478; WAN024DRD_at; Start 40; Stop 64
agcttatttggtcgtgagcttgggg

SEQ ID NO: 168584 - DNA, 25 bp, Artificial
  probe
  misc_feature (1)..(25): SEQ ID NO: 2478; WAN024DRD_at; Start 49; Stop 73
ggtcgtgagcttggggtcttttcta

SEQ ID NO: 168585 - DNA, 25 bp, Artificial
  probe
  misc_feature (1)..(25): SEQ ID NO: 2478; WAN024DRD_at; Start 51; Stop 75
tcgtgagcttggggtcttttctagc

SEQ ID NO: 168586 - DNA, 25 bp, Artificial
  probe
  misc_feature (1)..(25): SEQ ID NO: 2478; WAN024DRD_at; Start 41; Stop 65
gcttatttggtcgtgagcttggggt

SEQ ID NO: 168587 - DNA, 25 bp, Artificial
  probe
  misc_feature (1)..(25): SEQ ID NO: 2478; WAN024DRD_at; Start 53; Stop 77
gtgagcttggggtcttttctagcct

SEQ ID NO: 168588 - DNA, 25 bp, Artificial
  probe
  misc_feature (1)..(25): SEQ ID NO: 2478; WAN024DRD_at; Start 42; Stop 66
cttatttggtcgtgagcttggggtc

SEQ ID NO: 168589 - DNA, 25 bp, Artificial
  probe
  misc_feature (1)..(25): SEQ ID NO: 2478; WAN024DRD_at; Start 48; Stop 72
tggtcgtgagcttggggtcttttct

SEQ ID NO: 168590 - DNA, 25 bp, Artificial
  probe
  misc_feature (1)..(25): SEQ ID NO: 2478; WAN024DRD_at; Start 45; Stop 69
atttggtcgtgagcttggggtcttt

SEQ ID NO: 168591 - DNA, 25 bp, Artificial
  probe
  misc_feature (1)..(25): SEQ ID NO: 2478; WAN024DRD_at; Start 44; Stop 68
tatttggtcgtgagcttggggtctt

SEQ ID NO: 168592 - DNA, 25 bp, Artificial
  probe
  misc_feature (1)..(25): SEQ ID NO: 2478; WAN024DRD_at; Start 52; Stop 76
cgtgagcttggggtcttttctagcc

SEQ ID NO: 168593 - DNA, 25 bp, Artificial
  probe
  misc_feature (1)..(25): SEQ ID NO: 2478; WAN024DRD_at; Start 43; Stop 67
ttatttggtcgtgagcttggggtct

SEQ ID NO: 168594 - DNA, 25 bp, Artificial
  probe
  misc_feature (1)..(25): SEQ ID NO: 2478; WAN024DRD_at; Start 6; Stop 30
taaacaaggacaaatagtgtcaaaa

SEQ ID NO: 168595 - DNA, 25 bp, Artificial
  probe
  misc_feature (1)..(25): SEQ ID NO: 2478; WAN024DRD_at; Start 50; Stop 74
gtcgtgagcttggggtcttttctag

SEQ ID NO: 168596 - DNA, 25 bp, Artificial
  probe
  misc_feature (1)..(25): SEQ ID NO: 2478; WAN024DRD_at; Start 39; Stop 63
aagcttatttggtcgtgagcttggg

SEQ ID NO: 168597 - DNA, 25 bp, Artificial
  probe
  misc_feature (1)..(25): SEQ ID NO: 2478; WAN024DRD_at; Start 38; Stop 62
caagcttatttggtcgtgagcttgg

SEQ ID NO: 168598 - DNA, 25 bp, Artificial
  probe
  misc_feature (1)..(25): SEQ ID NO: 2478; WAN024DRD_at; Start 54; Stop 78
tgagcttggggtcttttctagccta

SEQ ID NO: 168599 - DNA, 25 bp, Artificial
  probe
  misc_feature (1)..(25): SEQ ID NO: 5585; WAN024DRE_at; Start 79; Stop 103
aataactacatgatacaagacgaaa

SEQ ID NO: 168600 - DNA, 25 bp, Artificial
  probe
  misc_feature (1)..(25): SEQ ID NO: 5585; WAN024DRE_at; Start 70; Stop 94
tctttatttaataactacatgatac

SEQ ID NO: 168601 - DNA, 25 bp, Artificial
  probe
  misc_feature (1)..(25): SEQ ID NO: 5585; WAN024DRE_at; Start 67; Stop 91
aggtctttatttaataactacatga

SEQ ID NO: 168602 - DNA, 25 bp, Artificial
  probe
  misc_feature (1)..(25): SEQ ID NO: 5585; WAN024DRE_at; Start 71; Stop 95
ctttatttaataactacatgataca

SEQ ID NO: 168603 - DNA, 25 bp, Artificial
  probe
  misc_feature (1)..(25): SEQ ID NO: 5585; WAN024DRE_at; Start 69; Stop 93
gtctttatttaataactacatgata

SEQ ID NO: 168604 - DNA, 25 bp, Artificial
  probe
  misc_feature (1)..(25): SEQ ID NO: 5585; WAN024DRE_at; Start 80; Stop 104
ataactacatgatacaagacgaaac

SEQ ID NO: 168605 - DNA, 25 bp, Artificial
  probe
  misc_feature (1)..(25): SEQ ID NO: 5585; WAN024DRE_at; Start 74; Stop 98
tatttaataactacatgatacaaga

SEQ ID NO: 168606 - DNA, 25 bp, Artificial
  probe
  misc_feature (1)..(25): SEQ ID NO: 5585; WAN024DRE_at; Start 81; Stop 105
taactacatgatacaagacgaaact

SEQ ID NO: 168607 - DNA, 25 bp, Artificial
  probe
  misc_feature (1)..(25): SEQ ID NO: 5585; WAN024DRE_at; Start 75; Stop 99
atttaataactacatgatacaagac

SEQ ID NO: 168608 - DNA, 25 bp, Artificial
  probe
  misc_feature (1)..(25): SEQ ID NO: 5585; WAN024DRE_at; Start 4; Stop 28
ggtggagttaagggagattattatg

SEQ ID NO: 168609 - DNA, 25 bp, Artificial
  probe
  misc_feature (1)..(25): SEQ ID NO: 5585; WAN024DRE_at; Start 68; Stop 92
ggtctttatttaataactacatgat

SEQ ID NO: 168610 - DNA, 25 bp, Artificial
  probe
  misc_feature (1)..(25): SEQ ID NO: 5585; WAN024DRE_at; Start 72; Stop 96
tttatttaataactacatgatacaa

SEQ ID NO: 168611 - DNA, 25 bp, Artificial
  probe
  misc_feature (1)..(25): SEQ ID NO: 5585; WAN024DRE_at; Start 77; Stop 101
ttaataactacatgatacaagacga

SEQ ID NO: 168612 - DNA, 25 bp, Artificial
  probe
  misc_feature (1)..(25): SEQ ID NO: 5585; WAN024DRE_at; Start 76; Stop 100
tttaataactacatgatacaagacg

SEQ ID NO: 168613 - DNA, 25 bp, Artificial
  probe
  misc_feature (1)..(25): SEQ ID NO: 5585; WAN024DRE_at; Start 2; Stop 26
tgggtggagttaagggagattatta

SEQ ID NO: 168614 - DNA, 25 bp, Artificial
  probe
  misc_feature (1)..(25): SEQ ID NO: 5585; WAN024DRE_at; Start 78; Stop 102
taataactacatgatacaagacgaa

SEQ ID NO: 168615 - DNA, 25 bp, Artificial
  probe
  misc_feature (1)..(25): SEQ ID NO: 5585; WAN024DRE_at; Start 73; Stop 97
ttatttaataactacatgatacaag

SEQ ID NO: 168616 - DNA, 25 bp, Artificial
  probe
  misc_feature (1)..(25): SEQ ID NO: 5233; WAN024DRF_at; Start 20; Stop 44
tttctcccttatcggcgctagcatt

SEQ ID NO: 168617 - DNA, 25 bp, Artificial
  probe
  misc_feature (1)..(25): SEQ ID NO: 5233; WAN024DRF_at; Start 30; Stop 54
atcggcgctagcattttacaaaaga

SEQ ID NO: 168618 - DNA, 25 bp, Artificial
  probe
  misc_feature (1)..(25): SEQ ID NO: 5233; WAN024DRF_at; Start 1; Stop 25
ttgatgggggagacaaccttttctc

SEQ ID NO: 168619 - DNA, 25 bp, Artificial
  probe
  misc_feature (1)..(25): SEQ ID NO: 5233; WAN024DRF_at; Start 33; Stop 57
ggcgctagcattttacaaaagagga

SEQ ID NO: 168620 - DNA, 25 bp, Artificial
  probe
  misc_feature (1)..(25): SEQ ID NO: 5233; WAN024DRF_at; Start 37; Stop 61
ctagcattttacaaaagaggagaaa

SEQ ID NO: 168621 - DNA, 25 bp, Artificial
  probe
  misc_feature (1)..(25): SEQ ID NO: 5233; WAN024DRF_at; Start 28; Stop 52
ttatcggcgctagcattttacaaaa

SEQ ID NO: 168622 - DNA, 25 bp, Artificial
  probe
  misc_feature (1)..(25): SEQ ID NO: 5233; WAN024DRF_at; Start 2; Stop 26
tgatgggggagacaaccttttctcc

SEQ ID NO: 168623 - DNA, 25 bp, Artificial
  probe
  misc_feature (1)..(25): SEQ ID NO: 5233; WAN024DRF_at; Start 25; Stop 49
cccttatcggcgctagcattttaca

SEQ ID NO: 168624 - DNA, 25 bp, Artificial
  probe
  misc_feature (1)..(25): SEQ ID NO: 5233; WAN024DRF_at; Start 38; Stop 62
tagcattttacaaaagaggagaaaa

SEQ ID NO: 168625 - DNA, 25 bp, Artificial
  probe
  misc_feature (1)..(25): SEQ ID NO: 5233; WAN024DRF_at; Start 27; Stop 51
cttatcggcgctagcattttacaaa

SEQ ID NO: 168626 - DNA, 25 bp, Artificial
  probe
  misc_feature (1)..(25): SEQ ID NO: 5233; WAN024DRF_at; Start 26; Stop 50
ccttatcggcgctagcattttacaa

SEQ ID NO: 168627 - DNA, 25 bp, Artificial
  probe
  misc_feature (1)..(25): SEQ ID NO: 5233; WAN024DRF_at; Start 16; Stop 40
accttttctcccttatcggcgctag

SEQ ID NO: 168628 - DNA, 25 bp, Artificial
  probe
  misc_feature (1)..(25): SEQ ID NO: 5233; WAN024DRF_at; Start 17; Stop 41
ccttttctcccttatcggcgctagc

SEQ ID NO: 168629 - DNA, 25 bp, Artificial
  probe
  misc_feature (1)..(25): SEQ ID NO: 5233; WAN024DRF_at; Start 32; Stop 56
cggcgctagcattttacaaaagagg

SEQ ID NO: 168630 - DNA, 25 bp, Artificial
  probe
  misc_feature (1)..(25): SEQ ID NO: 5233; WAN024DRF_at; Start 36; Stop 60
gctagcattttacaaaagaggagaa

SEQ ID NO: 168631 - DNA, 25 bp, Artificial
  probe
  misc_feature (1)..(25): SEQ ID NO: 5233; WAN024DRF_at; Start 40; Stop 64
gcattttacaaaagaggagaaaata

SEQ ID NO: 168632 - DNA, 25 bp, Artificial
  probe
  misc_feature (1)..(25): SEQ ID NO: 5233; WAN024DRF_at; Start 22; Stop 46
tctcccttatcggcgctagcatttt

SEQ ID NO: 168633 - DNA, 25 bp, Artificial
  probe
  misc_feature (1)..(25): SEQ ID NO: 5233; WAN024DRF_at; Start 31; Stop 55
tcggcgctagcattttacaaaagag

SEQ ID NO: 168634 - DNA, 25 bp, Artificial
  probe
  misc_feature (1)..(25): SEQ ID NO: 5233; WAN024DRF_at; Start 21; Stop 45
ttctcccttatcggcgctagcattt

SEQ ID NO: 168635 - DNA, 25 bp, Artificial
  probe
  misc_feature (1)..(25): SEQ ID NO: 5233; WAN024DRF_at; Start 23; Stop 47
ctcccttatcggcgctagcatttta

SEQ ID NO: 168636 - DNA, 25 bp, Artificial
  probe
  misc_feature (1)..(25): SEQ ID NO: 5233; WAN024DRF_at; Start 19; Stop 43
ttttctcccttatcggcgctagcat

SEQ ID NO: 168637 - DNA, 25 bp, Artificial
  probe
  misc_feature (1)..(25): SEQ ID NO: 5233; WAN024DRF_at; Start 18; Stop 42
cttttctcccttatcggcgctagca

SEQ ID NO: 168638 - DNA, 25 bp, Artificial
  probe
  misc_feature (1)..(25): SEQ ID NO: 5233; WAN024DRF_at; Start 35; Stop 59
cgctagcattttacaaaagaggaga

SEQ ID NO: 168639 - DNA, 25 bp, Artificial
  probe
  misc_feature (1)..(25): SEQ ID NO: 5233; WAN024DRF_at; Start 14; Stop 38
caaccttttctcccttatcggcgct

SEQ ID NO: 168640 - DNA, 25 bp, Artificial
  probe
  misc_feature (1)..(25): SEQ ID NO: 5233; WAN024DRF_at; Start 34; Stop 58
gcgctagcattttacaaaagaggag

SEQ ID NO: 168641 - DNA, 25 bp, Artificial
  probe
  misc_feature (1)..(25): SEQ ID NO: 5233; WAN024DRF_at; Start 39; Stop 63
agcattttacaaaagaggagaaaat

SEQ ID NO: 168642 - DNA, 25 bp, Artificial
  probe
  misc_feature (1)..(25): SEQ ID NO: 5233; WAN024DRF_at; Start 29; Stop 53
tatcggcgctagcattttacaaaag

SEQ ID NO: 168643 - DNA, 25 bp, Artificial
  probe
  misc_feature (1)..(25): SEQ ID NO: 5233; WAN024DRF_at; Start 24; Stop 48
tcccttatcggcgctagcattttac

SEQ ID NO: 168644 - DNA, 25 bp, Artificial
  probe
  misc_feature (1)..(25): SEQ ID NO: 2477; WAN024DRG_at; Start 246; Stop 270
tggtgtaacaaaagcatcttggtaa

SEQ ID NO: 168645 - DNA, 25 bp, Artificial
  probe
  misc_feature (1)..(25): SEQ ID NO: 2477; WAN024DRG_at; Start 243; Stop 267
tcctggtgtaacaaaagcatcttgg

SEQ ID NO: 168646 - DNA, 25 bp, Artificial
  probe
  misc_feature (1)..(25): SEQ ID NO: 2477; WAN024DRG_at; Start 189; Stop 213
caaatttggtctgagtcgtatcgct

SEQ ID NO: 168647 - DNA, 25 bp, Artificial
  probe
  misc_feature (1)..(25): SEQ ID NO: 2477; WAN024DRG_at; Start 55; Stop 79
cgttatgctgaaaaacgtgctgcat

SEQ ID NO: 168648 - DNA, 25 bp, Artificial
  probe
  misc_feature (1)..(25): SEQ ID NO: 2477; WAN024DRG_at; Start 209; Stop 233
tcgcttttcgcgaacttgcgcataa

SEQ ID NO: 168649 - DNA, 25 bp, Artificial
  probe
  misc_feature (1)..(25): SEQ ID NO: 2477; WAN024DRG_at; Start 231; Stop 255
taaaggtcaaattcctggtgtaaca

SEQ ID NO: 168650 - DNA, 25 bp, Artificial
  probe
  misc_feature (1)..(25): SEQ ID NO: 2477; WAN024DRG_at; Start 20; Stop 44
tagctagagaggctaaacgccaaaa

SEQ ID NO: 168651 - DNA, 25 bp, Artificial
  probe
  misc_feature (1)..(25): SEQ ID NO: 2477; WAN024DRG_at; Start 217; Stop 241
cgcgaacttgcgcataaaggtcaaa

SEQ ID NO: 168652 - DNA, 25 bp, Artificial
  probe
  misc_feature (1)..(25): SEQ ID NO: 2477; WAN024DRG_at; Start 173; Stop 197
cacattcagtttaccgcaaatttgg

SEQ ID NO: 168653 - DNA, 25 bp, Artificial
  probe
  misc_feature (1)..(25): SEQ ID NO: 2477; WAN024DRG_at; Start 17; Stop 41
tggtagctagagaggctaaacgcca

SEQ ID NO: 168654 - DNA, 25 bp, Artificial
  probe
  misc_feature (1)..(25): SEQ ID NO: 2477; WAN024DRG_at; Start 166; Stop 190
gggcgcccacattcagtttaccgca

SEQ ID NO: 168655 - DNA, 25 bp, Artificial
  probe
  misc_feature (1)..(25): SEQ ID NO: 2477; WAN024DRG_at; Start 65; Stop 89
aaaaacgtgctgcattaaaggcggc

SEQ ID NO: 168656 - DNA, 25 bp, Artificial
  probe
  misc_feature (1)..(25): SEQ ID NO: 2477; WAN024DRG_at; Start 37; Stop 61
cgccaaaaaattgttgaccgttatg

SEQ ID NO: 168657 - DNA, 25 bp, Artificial
  probe
  misc_feature (1)..(25): SEQ ID NO: 2477; WAN024DRG_at; Start 179; Stop 203
cagtttaccgcaaatttggtctgag

SEQ ID NO: 168658 - DNA, 25 bp, Artificial
  probe
  misc_feature (1)..(25): SEQ ID NO: 2477; WAN024DRG_at; Start 196; Stop 220
ggtctgagtcgtatcgcttttcgcg

SEQ ID NO: 168659 - DNA, 25 bp, Artificial
  probe
  misc_feature (1)..(25): SEQ ID NO: 2477; WAN024DRG_at; Start 224; Stop 248
ttgcgcataaaggtcaaattcctgg

SEQ ID NO: 168660 - DNA, 25 bp, Artificial
  probe
  misc_feature (1)..(25): SEQ ID NO: 2477; WAN024DRG_at; Start 8; Stop 32
aaaaatcaatggtagctagagaggc

SEQ ID NO: 168661 - DNA, 25 bp, Artificial
  probe
  misc_feature (1)..(25): SEQ ID NO: 2477; WAN024DRG_at; Start 104; Stop 128
gtttatctaaattacctcgcaacgc

SEQ ID NO: 168662 - DNA, 25 bp, Artificial
  probe
  misc_feature (1)..(25): SEQ ID NO: 2477; WAN024DRG_at; Start 134; Stop 158
cgactcgtttacataatcgttgtag

SEQ ID NO: 168663 - DNA, 25 bp, Artificial
  probe
  misc_feature (1)..(25): SEQ ID NO: 2477; WAN024DRG_at; Start 200; Stop 224
tgagtcgtatcgcttttcgcgaact

SEQ ID NO: 168664 - DNA, 25 bp, Artificial
  probe
  misc_feature (1)..(25): SEQ ID NO: 2477; WAN024DRG_at; Start 236; Stop 260
gtcaaattcctggtgtaacaaaagc

SEQ ID NO: 168665 - DNA, 25 bp, Artificial
  probe
  misc_feature (1)..(25): SEQ ID NO: 2477; WAN024DRG_at; Start 2; Stop 26
tggctaaaaaatcaatggtagctag

SEQ ID NO: 168666 - DNA, 25 bp, Artificial
  probe
  misc_feature (1)..(25): SEQ ID NO: 2477; WAN024DRG_at; Start 100; Stop 124
gaaggtttatctaaattacctcgca

SEQ ID NO: 168667 - DNA, 25 bp, Artificial
  probe
  misc_feature (1)..(25): SEQ ID NO: 2477; WAN024DRG_at; Start 48; Stop 72
tgttgaccgttatgctgaaaaacgt

SEQ ID NO: 168668 - DNA, 25 bp, Artificial
  probe
  misc_feature (1)..(25): SEQ ID NO: 2477; WAN024DRG_at; Start 52; Stop 76
gaccgttatgctgaaaaacgtgctg

SEQ ID NO: 168669 - DNA, 25 bp, Artificial
  probe
  misc_feature (1)..(25): SEQ ID NO: 2477; WAN024DRG_at; Start 227; Stop 251
cgcataaaggtcaaattcctggtgt

SEQ ID NO: 168670 - DNA, 25 bp, Artificial
  probe
  misc_feature (1)..(25): SEQ ID NO: 2477; WAN024DRG_at; Start 186; Stop 210
ccgcaaatttggtctgagtcgtatc

SEQ ID NO: 168671 - DNA, 25 bp, Artificial
  probe
  misc_feature (1)..(25): SEQ ID NO: 2477; WAN024DRG_at; Start 88; Stop 112
gcaggggactacgaaggtttatcta

SEQ ID NO: 168672 - DNA, 25 bp, Artificial
  probe
  misc_feature (1)..(25): SEQ ID NO: 2477; WAN024DRG_at; Start 42; Stop 66
aaaaattgttgaccgttatgctgaa

SEQ ID NO: 168673 - DNA, 25 bp, Artificial
  probe
  misc_feature (1)..(25): SEQ ID NO: 2477; WAN024DRG_at; Start 13; Stop 37
tcaatggtagctagagaggctaaac

SEQ ID NO: 168674 - DNA, 25 bp, Artificial
  probe
  misc_feature (1)..(25): SEQ ID NO: 2477; WAN024DRG_at; Start 131; Stop 155
caccgactcgtttacataatcgttg

SEQ ID NO: 168675 - DNA, 25 bp, Artificial
  probe
  misc_feature (1)..(25): SEQ ID NO: 2477; WAN024DRG_at; Start 204; Stop 228
tcgtatcgcttttcgcgaacttgcg

SEQ ID NO: 168676 - DNA, 25 bp, Artificial
  probe
  misc_feature (1)..(25): SEQ ID NO: 2477; WAN024DRG_at; Start 23; Stop 47
ctagagaggctaaacgccaaaaaat

SEQ ID NO: 168677 - DNA, 25 bp, Artificial
  probe
  misc_feature (1)..(25): SEQ ID NO: 2477; WAN024DRG_at; Start 68; Stop 92
aacgtgctgcattaaaggcggcagg

SEQ ID NO: 168678 - DNA, 25 bp, Artificial
  probe
  misc_feature (1)..(25): SEQ ID NO: 3837; WAN024DRH_at; Start 83; Stop 107
tcttaaattaccaagatgcttttgt

SEQ ID NO: 168679 - DNA, 25 bp, Artificial
  probe
  misc_feature (1)..(25): SEQ ID NO: 3837; WAN024DRH_at; Start 82; Stop 106
atcttaaattaccaagatgcttttg

SEQ ID NO: 168680 - DNA, 25 bp, Artificial
  probe
  misc_feature (1)..(25): SEQ ID NO: 3837; WAN024DRH_at; Start 91; Stop 115
taccaagatgcttttgttacaccag

SEQ ID NO: 168681 - DNA, 25 bp, Artificial
  probe
  misc_feature (1)..(25): SEQ ID NO: 3837; WAN024DRH_at; Start 90; Stop 114
ttaccaagatgcttttgttacacca

SEQ ID NO: 168682 - DNA, 25 bp, Artificial
  probe
  misc_feature (1)..(25): SEQ ID NO: 3837; WAN024DRH_at; Start 88; Stop 112
aattaccaagatgcttttgttacac

SEQ ID NO: 168683 - DNA, 25 bp, Artificial
  probe
  misc_feature (1)..(25): SEQ ID NO: 3837; WAN024DRH_at; Start 77; Stop 101
ttgatatcttaaattaccaagatgc

SEQ ID NO: 168684 - DNA, 25 bp, Artificial
  probe
  misc_feature (1)..(25): SEQ ID NO: 3837; WAN024DRH_at; Start 81; Stop 105
tatcttaaattaccaagatgctttt

SEQ ID NO: 168685 - DNA, 25 bp, Artificial
  probe
  misc_feature (1)..(25): SEQ ID NO: 3837; WAN024DRH_at; Start 93; Stop 117
ccaagatgcttttgttacaccagga

SEQ ID NO: 168686 - DNA, 25 bp, Artificial
  probe
  misc_feature (1)..(25): SEQ ID NO: 3837; WAN024DRH_at; Start 80; Stop 104
atatcttaaattaccaagatgcttt

SEQ ID NO: 168687 - DNA, 25 bp, Artificial
  probe
  misc_feature (1)..(25): SEQ ID NO: 3837; WAN024DRH_at; Start 76; Stop 100
cttgatatcttaaattaccaagatg

SEQ ID NO: 168688 - DNA, 25 bp, Artificial
  probe
  misc_feature (1)..(25): SEQ ID NO: 3837; WAN024DRH_at; Start 89; Stop 113
attaccaagatgcttttgttacacc

SEQ ID NO: 168689 - DNA, 25 bp, Artificial
  probe
  misc_feature (1)..(25): SEQ ID NO: 3837; WAN024DRH_at; Start 92; Stop 116
accaagatgcttttgttacaccagg

SEQ ID NO: 168690 - DNA, 25 bp, Artificial
  probe
  misc_feature (1)..(25): SEQ ID NO: 3837; WAN024DRH_at; Start 87; Stop 111
aaattaccaagatgcttttgttaca

SEQ ID NO: 168691 - DNA, 25 bp, Artificial
  probe
  misc_feature (1)..(25): SEQ ID NO: 3837; WAN024DRH_at; Start 94; Stop 118
caagatgcttttgttacaccaggaa

SEQ ID NO: 168692 - DNA, 25 bp, Artificial
  probe
  misc_feature (1)..(25): SEQ ID NO: 3837; WAN024DRH_at; Start 96; Stop 120
agatgcttttgttacaccaggaatt

SEQ ID NO: 168693 - DNA, 25 bp, Artificial
  probe
  misc_feature (1)..(25): SEQ ID NO: 3837; WAN024DRH_at; Start 84; Stop 108
cttaaattaccaagatgcttttgtt

SEQ ID NO: 168694 - DNA, 25 bp, Artificial
  probe
  misc_feature (1)..(25): SEQ ID NO: 3837; WAN024DRH_at; Start 85; Stop 109
ttaaattaccaagatgcttttgtta

SEQ ID NO: 168695 - DNA, 25 bp, Artificial
  probe
  misc_feature (1)..(25): SEQ ID NO: 3837; WAN024DRH_at; Start 95; Stop 119
aagatgcttttgttacaccaggaat

SEQ ID NO: 168696 - DNA, 25 bp, Artificial
  probe
  misc_feature (1)..(25): SEQ ID NO: 3837; WAN024DRH_at; Start 86; Stop 110
taaattaccaagatgcttttgttac

SEQ ID NO: 168697 - DNA, 25 bp, Artificial
  probe
  misc_feature (1)..(25): SEQ ID NO: 3837; WAN024DRH_at; Start 79; Stop 103
gatatcttaaattaccaagatgctt

SEQ ID NO: 168698 - DNA, 25 bp, Artificial
  probe
  misc_feature (1)..(25): SEQ ID NO: 3837; WAN024DRH_at; Start 78; Stop 102
tgatatcttaaattaccaagatgct

SEQ ID NO: 168699 - DNA, 25 bp, Artificial
  probe
  misc_feature (1)..(25): SEQ ID NO: 2523; WAN024DRI_at; Start 72; Stop 96
tggagctggtaagaaagaacgcttg

SEQ ID NO: 168700 - DNA, 25 bp, Artificial
  probe
  misc_feature (1)..(25): SEQ ID NO: 2523; WAN024DRI_at; Start 63; Stop 87
ctctaaaggtggagctggtaagaaa

SEQ ID NO: 168701 - DNA, 25 bp, Artificial
  probe
  misc_feature (1)..(25): SEQ ID NO: 2523; WAN024DRI_at; Start 76; Stop 100
gctggtaagaaagaacgcttgctta

SEQ ID NO: 168702 - DNA, 25 bp, Artificial
  probe
  misc_feature (1)..(25): SEQ ID NO: 2523; WAN024DRI_at; Start 39; Stop 63
agtgacccgttatcacgagaaacac

SEQ ID NO: 168703 - DNA, 25 bp, Artificial
  probe
  misc_feature (1)..(25): SEQ ID NO: 2523; WAN024DRI_at; Start 84; Stop 108
gaaagaacgcttgcttagcttcaga

SEQ ID NO: 168704 - DNA, 25 bp, Artificial
  probe
  misc_feature (1)..(25): SEQ ID NO: 2523; WAN024DRI_at; Start 101; Stop 125
gcttcagagaacaatttttaaacaa

SEQ ID NO: 168705 - DNA, 25 bp, Artificial
  probe
  misc_feature (1)..(25): SEQ ID NO: 2523; WAN024DRI_at; Start 89; Stop 113
aacgcttgcttagcttcagagaaca

SEQ ID NO: 168706 - DNA, 25 bp, Artificial
  probe
  misc_feature (1)..(25): SEQ ID NO: 2523; WAN024DRI_at; Start 32; Stop 56
gcgcacaagtgacccgttatcacga

SEQ ID NO: 168707 - DNA, 25 bp, Artificial
  probe
  misc_feature (1)..(25): SEQ ID NO: 2523; WAN024DRI_at; Start 51; Stop 75
tcacgagaaacactctaaaggtgga

SEQ ID NO: 168708 - DNA, 25 bp, Artificial
  probe
  misc_feature (1)..(25): SEQ ID NO: 2523; WAN024DRI_at; Start 47; Stop 71
gttatcacgagaaacactctaaagg

SEQ ID NO: 168709 - DNA, 25 bp, Artificial
  probe
  misc_feature (1)..(25): SEQ ID NO: 2523; WAN024DRI_at; Start 61; Stop 85
cactctaaaggtggagctggtaaga

SEQ ID NO: 168710 - DNA, 25 bp, Artificial
  probe
  misc_feature (1)..(25): SEQ ID NO: 2523; WAN024DRI_at; Start 35; Stop 59
cacaagtgacccgttatcacgagaa

SEQ ID NO: 168711 - DNA, 25 bp, Artificial
  probe
  misc_feature (1)..(25): SEQ ID NO: 2523; WAN024DRI_at; Start 49; Stop 73
tatcacgagaaacactctaaaggtg

SEQ ID NO: 168712 - DNA, 25 bp, Artificial
  probe
  misc_feature (1)..(25): SEQ ID NO: 2523; WAN024DRI_at; Start 53; Stop 77
acgagaaacactctaaaggtggagc

SEQ ID NO: 168713 - DNA, 25 bp, Artificial
  probe
  misc_feature (1)..(25): SEQ ID NO: 2523; WAN024DRI_at; Start 55; Stop 79
gagaaacactctaaaggtggagctg

SEQ ID NO: 168714 - DNA, 25 bp, Artificial
  probe
  misc_feature (1)..(25): SEQ ID NO: 2523; WAN024DRI_at; Start 74; Stop 98
gagctggtaagaaagaacgcttgct

SEQ ID NO: 168715 - DNA, 25 bp, Artificial
  probe
  misc_feature (1)..(25): SEQ ID NO: 2523; WAN024DRI_at; Start 104; Stop 128
tcagagaacaatttttaaacaagaa

SEQ ID NO: 168716 - DNA, 25 bp, Artificial
  probe
  misc_feature (1)..(25): SEQ ID NO: 2523; WAN024DRI_at; Start 86; Stop 110
aagaacgcttgcttagcttcagaga

SEQ ID NO: 168717 - DNA, 25 bp, Artificial
  probe
  misc_feature (1)..(25): SEQ ID NO: 2523; WAN024DRI_at; Start 5; Stop 29
gaaaatatcaactagacgataaggg

SEQ ID NO: 168718 - DNA, 25 bp, Artificial
  probe
  misc_feature (1)..(25): SEQ ID NO: 2523; WAN024DRI_at; Start 44; Stop 68
cccgttatcacgagaaacactctaa

SEQ ID NO: 168719 - DNA, 25 bp, Artificial
  probe
  misc_feature (1)..(25): SEQ ID NO: 2523; WAN024DRI_at; Start 78; Stop 102
tggtaagaaagaacgcttgcttagc

SEQ ID NO: 168720 - DNA, 25 bp, Artificial
  probe
  misc_feature (1)..(25): SEQ ID NO: 2523; WAN024DRI_at; Start 28; Stop 52
gggcgcgcacaagtgacccgttatc

SEQ ID NO: 168721 - DNA, 25 bp, Artificial
  probe
  misc_feature (1)..(25): SEQ ID NO: 2523; WAN024DRI_at; Start 13; Stop 37
caactagacgataaggggcgcgcac

SEQ ID NO: 168722 - DNA, 25 bp, Artificial
  probe
  misc_feature (1)..(25): SEQ ID NO: 2523; WAN024DRI_at; Start 92; Stop 116
gcttgcttagcttcagagaacaatt

SEQ ID NO: 168723 - DNA, 25 bp, Artificial
  probe
  misc_feature (1)..(25): SEQ ID NO: 2523; WAN024DRI_at; Start 2; Stop 26
tgggaaaatatcaactagacgataa

SEQ ID NO: 168724 - DNA, 25 bp, Artificial
  probe
  misc_feature (1)..(25): SEQ ID NO: 2523; WAN024DRI_at; Start 81; Stop 105
taagaaagaacgcttgcttagcttc

SEQ ID NO: 168725 - DNA, 25 bp, Artificial
  probe
  misc_feature (1)..(25): SEQ ID NO: 2523; WAN024DRI_at; Start 59; Stop 83
aacactctaaaggtggagctggtaa

SEQ ID NO: 168726 - DNA, 25 bp, Artificial
  probe
  misc_feature (1)..(25): SEQ ID NO: 2523; WAN024DRI_at; Start 42; Stop 66
gacccgttatcacgagaaacactct

SEQ ID NO: 168727 - DNA, 25 bp, Artificial
  probe
  misc_feature (1)..(25): SEQ ID NO: 2523; WAN024DRI_at; Start 88; Stop 112
gaacgcttgcttagcttcagagaac

SEQ ID NO: 168728 - DNA, 25 bp, Artificial
  probe
  misc_feature (1)..(25): SEQ ID NO: 2523; WAN024DRI_at; Start 29; Stop 53
ggcgcgcacaagtgacccgttatca

SEQ ID NO: 168729 - DNA, 25 bp, Artificial
  probe
  misc_feature (1)..(25): SEQ ID NO: 2523; WAN024DRI_at; Start 37; Stop 61
caagtgacccgttatcacgagaaac

SEQ ID NO: 168730 - DNA, 25 bp, Artificial
  probe
  misc_feature (1)..(25): SEQ ID NO: 2523; WAN024DRI_at; Start 57; Stop 81
gaaacactctaaaggtggagctggt

SEQ ID NO: 168731 - DNA, 25 bp, Artificial
  probe
  misc_feature (1)..(25): SEQ ID NO: 2523; WAN024DRI_at; Start 96; Stop 120
gcttagcttcagagaacaattttta

SEQ ID NO: 168732 - DNA, 25 bp, Artificial
  probe
  misc_feature (1)..(25): SEQ ID NO: 2523; WAN024DRI_at; Start 66; Stop 90
taaaggtggagctggtaagaaagaa

SEQ ID NO: 168733 - DNA, 25 bp, Artificial
  probe
  misc_feature (1)..(25): SEQ ID NO: 7045; WAN024DRJ_at; Start 193; Stop 217
aaaaaactcgattcagaacgagata

SEQ ID NO: 168734 - DNA, 25 bp, Artificial
  probe
  misc_feature (1)..(25): SEQ ID NO: 7045; WAN024DRJ_at; Start 514; Stop 538
aagccgacagaaccaggagaaaagg

SEQ ID NO: 168735 - DNA, 25 bp, Artificial
  probe
  misc_feature (1)..(25): SEQ ID NO: 7045; WAN024DRJ_at; Start 284; Stop 308
aaaagcgacatacaattactgtagc

SEQ ID NO: 168736 - DNA, 25 bp, Artificial
  probe
  misc_feature (1)..(25): SEQ ID NO: 7045; WAN024DRJ_at; Start 356; Stop 380
tagttgaatcaacctcagaaagcca

SEQ ID NO: 168737 - DNA, 25 bp, Artificial
  probe
  misc_feature (1)..(25): SEQ ID NO: 7045; WAN024DRJ_at; Start 268; Stop 292
tatgcaaaatcaactaaaaagcgac

SEQ ID NO: 168738 - DNA, 25 bp, Artificial
  probe
  misc_feature (1)..(25): SEQ ID NO: 7045; WAN024DRJ_at; Start 468; Stop 492
agactcttccactaaaccggaagct

SEQ ID NO: 168739 - DNA, 25 bp, Artificial
  probe
  misc_feature (1)..(25): SEQ ID NO: 7045; WAN024DRJ_at; Start 466; Stop 490
tcagactcttccactaaaccggaag

SEQ ID NO: 168740 - DNA, 25 bp, Artificial
  probe
  misc_feature (1)..(25): SEQ ID NO: 7045; WAN024DRJ_at; Start 304; Stop 328
gtagctctagttaacgagttgaaca

SEQ ID NO: 168741 - DNA, 25 bp, Artificial
  probe
  misc_feature (1)..(25): SEQ ID NO: 7045; WAN024DRJ_at; Start 368; Stop 392
cctcagaaagccaactacagatact

SEQ ID NO: 168742 - DNA, 25 bp, Artificial
  probe
  misc_feature (1)..(25): SEQ ID NO: 7045; WAN024DRJ_at; Start 190; Stop 214
cctaaaaaactcgattcagaacgag

SEQ ID NO: 168743 - DNA, 25 bp, Artificial
  probe
  misc_feature (1)..(25): SEQ ID NO: 7045; WAN024DRJ_at; Start 309; Stop 333
tctagttaacgagttgaacaacatt

SEQ ID NO: 168744 - DNA, 25 bp, Artificial
  probe
  misc_feature (1)..(25): SEQ ID NO: 7045; WAN024DRJ_at; Start 372; Stop 396
agaaagccaactacagatactgatg

SEQ ID NO: 168745 - DNA, 25 bp, Artificial
  probe
  misc_feature (1)..(25): SEQ ID NO: 7045; WAN024DRJ_at; Start 288; Stop 312
gcgacatacaattactgtagctcta

SEQ ID NO: 168746 - DNA, 25 bp, Artificial
  probe
  misc_feature (1)..(25): SEQ ID NO: 7045; WAN024DRJ_at; Start 259; Stop 283
ggtgagagctatgcaaaatcaacta

SEQ ID NO: 168747 - DNA, 25 bp, Artificial
  probe
  misc_feature (1)..(25): SEQ ID NO: 7045; WAN024DRJ_at; Start 270; Stop 294
tgcaaaatcaactaaaaagcgacat

SEQ ID NO: 168748 - DNA, 25 bp, Artificial
  probe
  misc_feature (1)..(25): SEQ ID NO: 7045; WAN024DRJ_at; Start 307; Stop 331
gctctagttaacgagttgaacaaca

SEQ ID NO: 168749 - DNA, 25 bp, Artificial
  probe
  misc_feature (1)..(25): SEQ ID NO: 7045; WAN024DRJ_at; Start 281; Stop 305
ctaaaaagcgacatacaattactgt

SEQ ID NO: 168750 - DNA, 25 bp, Artificial
  probe
  misc_feature (1)..(25): SEQ ID NO: 7045; WAN024DRJ_at; Start 278; Stop 302
caactaaaaagcgacatacaattac

SEQ ID NO: 168751 - DNA, 25 bp, Artificial
  probe
  misc_feature (1)..(25): SEQ ID NO: 7045; WAN024DRJ_at; Start 248; Stop 272
aaaaaatagtgggtgagagctatgc

SEQ ID NO: 168752 - DNA, 25 bp, Artificial
  probe
  misc_feature (1)..(25): SEQ ID NO: 7045; WAN024DRJ_at; Start 398; Stop 422
tggagagtcgatcaaaagtagatga

SEQ ID NO: 168753 - DNA, 25 bp, Artificial
  probe
  misc_feature (1)..(25): SEQ ID NO: 7045; WAN024DRJ_at; Start 357; Stop 381
agttgaatcaacctcagaaagccaa

SEQ ID NO: 168754 - DNA, 25 bp, Artificial
  probe
  misc_feature (1)..(25): SEQ ID NO: 7045; WAN024DRJ_at; Start 262; Stop 286
gagagctatgcaaaatcaactaaaa

SEQ ID NO: 168755 - DNA, 25 bp, Artificial
  probe
  misc_feature (1)..(25): SEQ ID NO: 7045; WAN024DRJ_at; Start 221; Stop 245
caaggaaagaggtcgaggaatatgt

SEQ ID NO: 168756 - DNA, 25 bp, Artificial
  probe
  misc_feature (1)..(25): SEQ ID NO: 7045; WAN024DRJ_at; Start 254; Stop 278
tagtgggtgagagctatgcaaaatc

SEQ ID NO: 168757 - DNA, 25 bp, Artificial
  probe
  misc_feature (1)..(25): SEQ ID NO: 7045; WAN024DRJ_at; Start 318; Stop 342
cgagttgaacaacattaagaacgag

SEQ ID NO: 168758 - DNA, 25 bp, Artificial
  probe
  misc_feature (1)..(25): SEQ ID NO: 7045; WAN024DRJ_at; Start 360; Stop 384
tgaatcaacctcagaaagccaacta

SEQ ID NO: 168759 - DNA, 25 bp, Artificial
  probe
  misc_feature (1)..(25): SEQ ID NO: 7045; WAN024DRJ_at; Start 462; Stop 486
aagttcagactcttccactaaaccg

SEQ ID NO: 168760 - DNA, 25 bp, Artificial
  probe
  misc_feature (1)..(25): SEQ ID NO: 7045; WAN024DRJ_at; Start 257; Stop 281
tgggtgagagctatgcaaaatcaac

SEQ ID NO: 168761 - DNA, 25 bp, Artificial
  probe
  misc_feature (1)..(25): SEQ ID NO: 7045; WAN024DRJ_at; Start 272; Stop 296
caaaatcaactaaaaagcgacatac

SEQ ID NO: 168762 - DNA, 25 bp, Artificial
  probe
  misc_feature (1)..(25): SEQ ID NO: 7045; WAN024DRJ_at; Start 250; Stop 274
aaaatagtgggtgagagctatgcaa

SEQ ID NO: 168763 - DNA, 25 bp, Artificial
  probe
  misc_feature (1)..(25): SEQ ID NO: 7045; WAN024DRJ_at; Start 321; Stop 345
gttgaacaacattaagaacgagtat

SEQ ID NO: 168764 - DNA, 25 bp, Artificial
  probe
  misc_feature (1)..(25): SEQ ID NO: 7045; WAN024DRJ_at; Start 225; Stop 249
gaaagaggtcgaggaatatgtaaaa

SEQ ID NO: 168765 - DNA, 25 bp, Artificial
  probe
  misc_feature (1)..(25): SEQ ID NO: 7045; WAN024DRJ_at; Start 513; Stop 537
caagccgacagaaccaggagaaaag

SEQ ID NO: 168766 - DNA, 25 bp, Artificial
  probe
  misc_feature (1)..(25): SEQ ID NO: 7045; WAN024DRJ_at; Start 464; Stop 488
gttcagactcttccactaaaccgga

SEQ ID NO: 168767 - DNA, 25 bp, Artificial
  probe
  misc_feature (1)..(25): SEQ ID NO: 7042; WAN024DRM_at; Start 132; Stop 156
cccagtagccacttcttctaataag

SEQ ID NO: 168768 - DNA, 25 bp, Artificial
  probe
  misc_feature (1)..(25): SEQ ID NO: 7042; WAN024DRM_at; Start 131; Stop 155
ccccagtagccacttcttctaataa

SEQ ID NO: 168769 - DNA, 25 bp, Artificial
  probe
  misc_feature (1)..(25): SEQ ID NO: 7042; WAN024DRM_at; Start 256; Stop 280
ctcgccttaaacataaagttgagcg

SEQ ID NO: 168770 - DNA, 25 bp, Artificial
  probe
  misc_feature (1)..(25): SEQ ID NO: 7042; WAN024DRM_at; Start 133; Stop 157
ccagtagccacttcttctaataagg

SEQ ID NO: 168771 - DNA, 25 bp, Artificial
  probe
  misc_feature (1)..(25): SEQ ID NO: 7042; WAN024DRM_at; Start 212; Stop 236
taaacaaaatgatccaattagataa

SEQ ID NO: 168772 - DNA, 25 bp, Artificial
  probe
  misc_feature (1)..(25): SEQ ID NO: 7042; WAN024DRM_at; Start 134; Stop 158
cagtagccacttcttctaataaggc

SEQ ID NO: 168773 - DNA, 25 bp, Artificial
  probe
  misc_feature (1)..(25): SEQ ID NO: 6470; WAN024DRN_at; Start 520; Stop 544
gaagctcttgcagacttggatgaga

SEQ ID NO: 168774 - DNA, 25 bp, Artificial
  probe
  misc_feature (1)..(25): SEQ ID NO: 6470; WAN024DRN_at; Start 717; Stop 741
ccaggcgctctatgagtcaactcaa

SEQ ID NO: 168775 - DNA, 25 bp, Artificial
  probe
  misc_feature (1)..(25): SEQ ID NO: 6470; WAN024DRN_at; Start 826; Stop 850
tcagatctggatgataaaatcgcag

SEQ ID NO: 168776 - DNA, 25 bp, Artificial
  probe
  misc_feature (1)..(25): SEQ ID NO: 6470; WAN024DRN_at; Start 650; Stop 674
cacttggtgagtcaaatgagcttac

SEQ ID NO: 168777 - DNA, 25 bp, Artificial
  probe
  misc_feature (1)..(25): SEQ ID NO: 6470; WAN024DRN_at; Start 109; Stop 133
gcggcagaaaaagctccaacttacg

SEQ ID NO: 168778 - DNA, 25 bp, Artificial
  probe
  misc_feature (1)..(25): SEQ ID NO: 6470; WAN024DRN_at; Start 702; Stop 726
taatcatgatgagttccaggcgctc

SEQ ID NO: 168779 - DNA, 25 bp, Artificial
  probe
  misc_feature (1)..(25): SEQ ID NO: 6470; WAN024DRN_at; Start 901; Stop 925
tattggacttcaggtgatgaggaca

SEQ ID NO: 168780 - DNA, 25 bp, Artificial
  probe
  misc_feature (1)..(25): SEQ ID NO: 6470; WAN024DRN_at; Start 340; Stop 364
gctagtcaaattggacgatcagttg

SEQ ID NO: 168781 - DNA, 25 bp, Artificial
  probe
  misc_feature (1)..(25): SEQ ID NO: 6470; WAN024DRN_at; Start 173; Stop 197
caattgcagcaattggcaaacgcac

SEQ ID NO: 168782 - DNA, 25 bp, Artificial
  probe
  misc_feature (1)..(25): SEQ ID NO: 6470; WAN024DRN_at; Start 745; Stop 769
caaatcgaagagttgaaagactaca

SEQ ID NO: 168783 - DNA, 25 bp, Artificial
  probe
  misc_feature (1)..(25): SEQ ID NO: 6470; WAN024DRN_at; Start 864; Stop 888
gcttgctgactcacaaaatggagag

SEQ ID NO: 168784 - DNA, 25 bp, Artificial
  probe
  misc_feature (1)..(25): SEQ ID NO: 6470; WAN024DRN_at; Start 538; Stop 562
gatgagaaagcggaaaaggttagca

SEQ ID NO: 168785 - DNA, 25 bp, Artificial
  probe
  misc_feature (1)..(25): SEQ ID NO: 6470; WAN024DRN_at; Start 70; Stop 94
tctcagcctgcttcggtgagagcag

SEQ ID NO: 168786 - DNA, 25 bp, Artificial
  probe
  misc_feature (1)..(25): SEQ ID NO: 6470; WAN024DRN_at; Start 324; Stop 348
cgcagcagctgatggagctagtcaa

SEQ ID NO: 168787 - DNA, 25 bp, Artificial
  probe
  misc_feature (1)..(25): SEQ ID NO: 6470; WAN024DRN_at; Start 279; Stop 303
caaagacgaggttcttacagtggac

SEQ ID NO: 168788 - DNA, 25 bp, Artificial
  probe
  misc_feature (1)..(25): SEQ ID NO: 6470; WAN024DRN_at; Start 504; Stop 528
tgtccaaaaagcaagggaagctctt

SEQ ID NO: 168789 - DNA, 25 bp, Artificial
  probe
  misc_feature (1)..(25): SEQ ID NO: 6470; WAN024DRN_at; Start 448; Stop 472
gatgaccaaaaacaagccattaatg

SEQ ID NO: 168790 - DNA, 25 bp, Artificial
  probe
  misc_feature (1)..(25): SEQ ID NO: 6470; WAN024DRN_at; Start 294; Stop 318
tacagtggacgatgtcttgacagaa

SEQ ID NO: 168791 - DNA, 25 bp, Artificial
  probe
  misc_feature (1)..(25): SEQ ID NO: 6470; WAN024DRN_at; Start 677; Stop 701
gacgcctggcaacagagtattctaa

SEQ ID NO: 168792 - DNA, 25 bp, Artificial
  probe
  misc_feature (1)..(25): SEQ ID NO: 6470; WAN024DRN_at; Start 929; Stop 953
tagaaaagcttcaagcagagcaaga

SEQ ID NO: 168793 - DNA, 25 bp, Artificial
  probe
  misc_feature (1)..(25): SEQ ID NO: 6470; WAN024DRN_at; Start 730; Stop 754
gagtcaactcaagaacaaatcgaag

SEQ ID NO: 168794 - DNA, 25 bp, Artificial
  probe
  misc_feature (1)..(25): SEQ ID NO: 6470; WAN024DRN_at; Start 201; Stop 225
cttaacagatgaacaaaaaggagca

SEQ ID NO: 168795 - DNA, 25 bp, Artificial
  probe
  misc_feature (1)..(25): SEQ ID NO: 6470; WAN024DRN_at; Start 634; Stop 658
gatgaagcagttaaatcacttggtg

SEQ ID NO: 168796 - DNA, 25 bp, Artificial
  probe
  misc_feature (1)..(25): SEQ ID NO: 6470; WAN024DRN_at; Start 766; Stop 790
tacaacgaacaaatctctgaaggag

SEQ ID NO: 168797 - DNA, 25 bp, Artificial
  probe
  misc_feature (1)..(25): SEQ ID NO: 6470; WAN024DRN_at; Start 433; Stop 457
gctcaagacctaacagatgaccaaa

SEQ ID NO: 168798 - DNA, 25 bp, Artificial
  probe
  misc_feature (1)..(25): SEQ ID NO: 6470; WAN024DRN_at; Start 308; Stop 332
tcttgacagaactaaacgcagcagc

SEQ ID NO: 168799 - DNA, 25 bp, Artificial
  probe
  misc_feature (1)..(25): SEQ ID NO: 6470; WAN024DRN_at; Start 663; Stop 687
aaatgagcttactcgacgcctggca

SEQ ID NO: 168800 - DNA, 25 bp, Artificial
  probe
  misc_feature (1)..(25): SEQ ID NO: 6470; WAN024DRN_at; Start 845; Stop 869
tcgcagaagcggagaaaaagcttgc

SEQ ID NO: 168801 - DNA, 25 bp, Artificial
  probe
  misc_feature (1)..(25): SEQ ID NO: 6470; WAN024DRN_at; Start 186; Stop 210
tggcaaacgcacagacttaacagat

SEQ ID NO: 168802 - DNA, 25 bp, Artificial
  probe
  misc_feature (1)..(25): SEQ ID NO: 6470; WAN024DRN_at; Start 409; Stop 433
gataatgctaattcaggttccgaag

SEQ ID NO: 168803 - DNA, 25 bp, Artificial
  probe
  misc_feature (1)..(25): SEQ ID NO: 6470; WAN024DRN_at; Start 133; Stop 157
gatgatttactgaagcttttgaagg

SEQ ID NO: 168804 - DNA, 25 bp, Artificial
  probe
  misc_feature (1)..(25): SEQ ID NO: 6470; WAN024DRN_at; Start 787; Stop 811
ggagaagaaactcttatccttgcga

SEQ ID NO: 168805 - DNA, 25 bp, Artificial
  probe
  misc_feature (1)..(25): SEQ ID NO: 6470; WAN024DRN_at; Start 485; Stop 509
aatttgccaagcgtgatgatgtcca

SEQ ID NO: 168806 - DNA, 25 bp, Artificial
  probe
  misc_feature (1)..(25): SEQ ID NO: 6470; WAN024DRN_at; Start 94; Stop 118
gaaggtgctcaacctgcggcagaaa

SEQ ID NO: 168807 - DNA, 25 bp, Artificial
  probe
  misc_feature (1)..(25): SEQ ID NO: 6469; WAN024DRO_at; Start 97; Stop 121
gaagctcctgtagctaaccagtcta

SEQ ID NO: 168808 - DNA, 25 bp, Artificial
  probe
  misc_feature (1)..(25): SEQ ID NO: 6469; WAN024DRO_at; Start 242; Stop 266
ctgaggcaaaagcggaaaaagaaag

SEQ ID NO: 168809 - DNA, 25 bp, Artificial
  probe
  misc_feature (1)..(25): SEQ ID NO: 6469; WAN024DRO_at; Start 98; Stop 122
aagctcctgtagctaaccagtctaa

SEQ ID NO: 168810 - DNA, 25 bp, Artificial
  probe
  misc_feature (1)..(25): SEQ ID NO: 6469; WAN024DRO_at; Start 243; Stop 267
tgaggcaaaagcggaaaaagaaaga

SEQ ID NO: 168811 - DNA, 25 bp, Artificial
  probe
  misc_feature (1)..(25): SEQ ID NO: 6469; WAN024DRO_at; Start 99; Stop 123
agctcctgtagctaaccagtctaaa

SEQ ID NO: 168812 - DNA, 25 bp, Artificial
  probe
  misc_feature (1)..(25): SEQ ID NO: 7046; WAN024DRP_at; Start 125; Stop 149
gtgagaatacccccaaggttacatc

SEQ ID NO: 168813 - DNA, 25 bp, Artificial
  probe
  misc_feature (1)..(25): SEQ ID NO: 7046; WAN024DRP_at; Start 124; Stop 148
agtgagaatacccccaaggttacat

SEQ ID NO: 168814 - DNA, 25 bp, Artificial
  probe
  misc_feature (1)..(25): SEQ ID NO: 7046; WAN024DRP_at; Start 126; Stop 150
tgagaatacccccaaggttacatct

SEQ ID NO: 168815 - DNA, 25 bp, Artificial
  probe
  misc_feature (1)..(25): SEQ ID NO: 7046; WAN024DRP_at; Start 127; Stop 151
gagaatacccccaaggttacatcta

SEQ ID NO: 168816 - DNA, 25 bp, Artificial
  probe
  misc_feature (1)..(25): SEQ ID NO: 6474; WAN024DRQ_at; Start 347; Stop 371
gcaacaaagccgaagcagctaagat

SEQ ID NO: 168817 - DNA, 25 bp, Artificial
  probe
  misc_feature (1)..(25): SEQ ID NO: 6474; WAN024DRQ_at; Start 852; Stop 876
tgtagaagactactctaccgaaggt

SEQ ID NO: 168818 - DNA, 25 bp, Artificial
  probe
  misc_feature (1)..(25): SEQ ID NO: 6474; WAN024DRQ_at; Start 963; Stop 987
agctgaagagccatcgcaaccagag

SEQ ID NO: 168819 - DNA, 25 bp, Artificial
  probe
  misc_feature (1)..(25): SEQ ID NO: 6474; WAN024DRQ_at; Start 329; Stop 353
tagcttatcaacgagctagcaacaa

SEQ ID NO: 168820 - DNA, 25 bp, Artificial
  probe
  misc_feature (1)..(25): SEQ ID NO: 6474; WAN024DRQ_at; Start 520; Stop 544
aaagcagcagaagctaaagccaaat

SEQ ID NO: 168821 - DNA, 25 bp, Artificial
  probe
  misc_feature (1)..(25): SEQ ID NO: 6474; WAN024DRQ_at; Start 389; Stop 413
gacgcgaaaatgaggcgagagctaa

SEQ ID NO: 168822 - DNA, 25 bp, Artificial
  probe
  misc_feature (1)..(25): SEQ ID NO: 6474; WAN024DRQ_at; Start 970; Stop 994
gagccatcgcaaccagagaagccag

SEQ ID NO: 168823 - DNA, 25 bp, Artificial
  probe
  misc_feature (1)..(25): SEQ ID NO: 6474; WAN024DRQ_at; Start 262; Stop 286
gcagagctagaaaaagaagcttctg

SEQ ID NO: 168824 - DNA, 25 bp, Artificial
  probe
  misc_feature (1)..(25): SEQ ID NO: 6474; WAN024DRQ_at; Start 566; Stop 590
ctactgaagccaaaccccaagtgga

SEQ ID NO: 168825 - DNA, 25 bp, Artificial
  probe
  misc_feature (1)..(25): SEQ ID NO: 6474; WAN024DRQ_at; Start 447; Stop 471
tgaaccagaacagttagctgagact

SEQ ID NO: 168826 - DNA, 25 bp, Artificial
  probe
  misc_feature (1)..(25): SEQ ID NO: 6474; WAN024DRQ_at; Start 832; Stop 856
gctgttgaagaaaacaataatgtag

SEQ ID NO: 168827 - DNA, 25 bp, Artificial
  probe
  misc_feature (1)..(25): SEQ ID NO: 6474; WAN024DRQ_at; Start 808; Stop 832
gcaaaacttgaagatcaactcaaag

SEQ ID NO: 168828 - DNA, 25 bp, Artificial
  probe
  misc_feature (1)..(25): SEQ ID NO: 6474; WAN024DRQ_at; Start 253; Stop 277
gaagagaaagcagagctagaaaaag

SEQ ID NO: 168829 - DNA, 25 bp, Artificial
  probe
  misc_feature (1)..(25): SEQ ID NO: 6474; WAN024DRQ_at; Start 186; Stop 210
agctaaaaaagctttagaggaagca

SEQ ID NO: 168830 - DNA, 25 bp, Artificial
  probe
  misc_feature (1)..(25): SEQ ID NO: 6474; WAN024DRQ_at; Start 374; Stop 398
tagaagaggctcagagacgcgaaaa

SEQ ID NO: 168831 - DNA, 25 bp, Artificial
  probe
  misc_feature (1)..(25): SEQ ID NO: 6474; WAN024DRQ_at; Start 574; Stop 598
gccaaaccccaagtggatgctgaag

SEQ ID NO: 168832 - DNA, 25 bp, Artificial
  probe
  misc_feature (1)..(25): SEQ ID NO: 6474; WAN024DRQ_at; Start 351; Stop 375
caaagccgaagcagctaagatgata

SEQ ID NO: 168833 - DNA, 25 bp, Artificial
  probe
  misc_feature (1)..(25): SEQ ID NO: 6474; WAN024DRQ_at; Start 382; Stop 406
gctcagagacgcgaaaatgaggcga

SEQ ID NO: 168834 - DNA, 25 bp, Artificial
  probe
  misc_feature (1)..(25): SEQ ID NO: 6474; WAN024DRQ_at; Start 951; Stop 975
gccagaaaaatcagctgaagagcca

SEQ ID NO: 168835 - DNA, 25 bp, Artificial
  probe
  misc_feature (1)..(25): SEQ ID NO: 6474; WAN024DRQ_at; Start 334; Stop 358
tatcaacgagctagcaacaaagccg

SEQ ID NO: 168836 - DNA, 25 bp, Artificial
  probe
  misc_feature (1)..(25): SEQ ID NO: 6474; WAN024DRQ_at; Start 202; Stop 226
gaggaagcaaaagttgcgcaaaaaa

SEQ ID NO: 168837 - DNA, 25 bp, Artificial
  probe
  misc_feature (1)..(25): SEQ ID NO: 6474; WAN024DRQ_at; Start 847; Stop 871
aataatgtagaagactactctaccg

SEQ ID NO: 168838 - DNA, 25 bp, Artificial
  probe
  misc_feature (1)..(25): SEQ ID NO: 6474; WAN024DRQ_at; Start 407; Stop 431
gagctaaatttactactattcgaac

SEQ ID NO: 168839 - DNA, 25 bp, Artificial
  probe
  misc_feature (1)..(25): SEQ ID NO: 6474; WAN024DRQ_at; Start 823; Stop 847
caactcaaagctgttgaagaaaaca

SEQ ID NO: 168840 - DNA, 25 bp, Artificial
  probe
  misc_feature (1)..(25): SEQ ID NO: 6474; WAN024DRQ_at; Start 955; Stop 979
gaaaaatcagctgaagagccatcgc

SEQ ID NO: 168841 - DNA, 25 bp, Artificial
  probe
  misc_feature (1)..(25): SEQ ID NO: 6474; WAN024DRQ_at; Start 272; Stop 296
aaaaagaagcttctgaagcgatagc

SEQ ID NO: 168842 - DNA, 25 bp, Artificial
  probe
  misc_feature (1)..(25): SEQ ID NO: 6474; WAN024DRQ_at; Start 399; Stop 423
tgaggcgagagctaaatttactact

SEQ ID NO: 168843 - DNA, 25 bp, Artificial
  probe
  misc_feature (1)..(25): SEQ ID NO: 6474; WAN024DRQ_at; Start 523; Stop 547
gcagcagaagctaaagccaaattag

SEQ ID NO: 168844 - DNA, 25 bp, Artificial
  probe
  misc_feature (1)..(25): SEQ ID NO: 6474; WAN024DRQ_at; Start 340; Stop 364
cgagctagcaacaaagccgaagcag

SEQ ID NO: 168845 - DNA, 25 bp, Artificial
  probe
  misc_feature (1)..(25): SEQ ID NO: 6474; WAN024DRQ_at; Start 817; Stop 841
gaagatcaactcaaagctgttgaag

SEQ ID NO: 168846 - DNA, 25 bp, Artificial
  probe
  misc_feature (1)..(25): SEQ ID NO: 6474; WAN024DRQ_at; Start 362; Stop 386
cagctaagatgatagaagaggctca

SEQ ID NO: 168847 - DNA, 25 bp, Artificial
  probe
  misc_feature (1)..(25): SEQ ID NO: 6474; WAN024DRQ_at; Start 369; Stop 393
gatgatagaagaggctcagagacgc

SEQ ID NO: 168848 - DNA, 25 bp, Artificial
  probe
  misc_feature (1)..(25): SEQ ID NO: 6474; WAN024DRQ_at; Start 859; Stop 883
gactactctaccgaaggtttagaga

SEQ ID NO: 168849 - DNA, 25 bp, Artificial
  probe
  misc_feature (1)..(25): SEQ ID NO: 6474; WAN024DRQ_at; Start 878; Stop 902
tagagaaaactattgctgctaaaaa

SEQ ID NO: 168850 - DNA, 25 bp, Artificial
  probe
  misc_feature (1)..(25): SEQ ID NO: 7041; WAN024DRR_at; Start 200; Stop 224
aaggaaaacaacatagagaaatcga

SEQ ID NO: 168851 - DNA, 25 bp, Artificial
  probe
  misc_feature (1)..(25): SEQ ID NO: 7041; WAN024DRR_at; Start 137; Stop 161
gtagcccctgttcgtctagtgaggc

SEQ ID NO: 168852 - DNA, 25 bp, Artificial
  probe
  misc_feature (1)..(25): SEQ ID NO: 7041; WAN024DRR_at; Start 223; Stop 247
gatttagaccgaaataaggcaaaga

SEQ ID NO: 168853 - DNA, 25 bp, Artificial
  probe
  misc_feature (1)..(25): SEQ ID NO: 7041; WAN024DRR_at; Start 106; Stop 130
catgcgacggcagaaggaggtaact

SEQ ID NO: 168854 - DNA, 25 bp, Artificial
  probe
  misc_feature (1)..(25): SEQ ID NO: 7041; WAN024DRR_at; Start 233; Stop 257
gaaataaggcaaagaaagcgatcga

SEQ ID NO: 168855 - DNA, 25 bp, Artificial
  probe
  misc_feature (1)..(25): SEQ ID NO: 7041; WAN024DRR_at; Start 132; Stop 156
cccaagtagcccctgttcgtctagt

SEQ ID NO: 168856 - DNA, 25 bp, Artificial
  probe
  misc_feature (1)..(25): SEQ ID NO: 7041; WAN024DRR_at; Start 111; Stop 135
gacggcagaaggaggtaactaccca

SEQ ID NO: 168857 - DNA, 25 bp, Artificial
  probe
  misc_feature (1)..(25): SEQ ID NO: 7041; WAN024DRR_at; Start 139; Stop 163
agcccctgttcgtctagtgaggcaa

SEQ ID NO: 168858 - DNA, 25 bp, Artificial
  probe
  misc_feature (1)..(25): SEQ ID NO: 7041; WAN024DRR_at; Start 205; Stop 229
aaacaacatagagaaatcgatttag

SEQ ID NO: 168859 - DNA, 25 bp, Artificial
  probe
  misc_feature (1)..(25): SEQ ID NO: 7041; WAN024DRR_at; Start 140; Stop 164
gcccctgttcgtctagtgaggcaaa

SEQ ID NO: 168860 - DNA, 25 bp, Artificial
  probe
  misc_feature (1)..(25): SEQ ID NO: 7041; WAN024DRR_at; Start 227; Stop 251
tagaccgaaataaggcaaagaaagc

SEQ ID NO: 168861 - DNA, 25 bp, Artificial
  probe
  misc_feature (1)..(25): SEQ ID NO: 7041; WAN024DRR_at; Start 141; Stop 165
cccctgttcgtctagtgaggcaaat

SEQ ID NO: 168862 - DNA, 25 bp, Artificial
  probe
  misc_feature (1)..(25): SEQ ID NO: 7041; WAN024DRR_at; Start 116; Stop 140
cagaaggaggtaactacccaagtag

SEQ ID NO: 168863 - DNA, 25 bp, Artificial
  probe
  misc_feature (1)..(25): SEQ ID NO: 7041; WAN024DRR_at; Start 142; Stop 166
ccctgttcgtctagtgaggcaaata

SEQ ID NO: 168864 - DNA, 25 bp, Artificial
  probe
  misc_feature (1)..(25): SEQ ID NO: 7041; WAN024DRR_at; Start 138; Stop 162
tagcccctgttcgtctagtgaggca

SEQ ID NO: 168865 - DNA, 25 bp, Artificial
  probe
  misc_feature (1)..(25): SEQ ID NO: 7041; WAN024DRR_at; Start 108; Stop 132
tgcgacggcagaaggaggtaactac

SEQ ID NO: 168866 - DNA, 25 bp, Artificial
  probe
  misc_feature (1)..(25): SEQ ID NO: 7041; WAN024DRR_at; Start 143; Stop 167
cctgttcgtctagtgaggcaaataa

SEQ ID NO: 168867 - DNA, 25 bp, Artificial
  probe
  misc_feature (1)..(25): SEQ ID NO: 7041; WAN024DRR_at; Start 240; Stop 264
ggcaaagaaagcgatcgatgaatat

SEQ ID NO: 168868 - DNA, 25 bp, Artificial
  probe
  misc_feature (1)..(25): SEQ ID NO: 7041; WAN024DRR_at; Start 202; Stop 226
ggaaaacaacatagagaaatcgatt

SEQ ID NO: 168869 - DNA, 25 bp, Artificial
  probe
  misc_feature (1)..(25): SEQ ID NO: 7041; WAN024DRR_at; Start 134; Stop 158
caagtagcccctgttcgtctagtga

SEQ ID NO: 168870 - DNA, 25 bp, Artificial
  probe
  misc_feature (1)..(25): SEQ ID NO: 7041; WAN024DRR_at; Start 113; Stop 137
cggcagaaggaggtaactacccaag

SEQ ID NO: 168871 - DNA, 25 bp, Artificial
  probe
  misc_feature (1)..(25): SEQ ID NO: 7041; WAN024DRR_at; Start 135; Stop 159
aagtagcccctgttcgtctagtgag

SEQ ID NO: 168872 - DNA, 25 bp, Artificial
  probe
  misc_feature (1)..(25): SEQ ID NO: 7041; WAN024DRR_at; Start 235; Stop 259
aataaggcaaagaaagcgatcgatg

SEQ ID NO: 168873 - DNA, 25 bp, Artificial
  probe
  misc_feature (1)..(25): SEQ ID NO: 7041; WAN024DRR_at; Start 242; Stop 266
caaagaaagcgatcgatgaatatat

SEQ ID NO: 168874 - DNA, 25 bp, Artificial
  probe
  misc_feature (1)..(25): SEQ ID NO: 7041; WAN024DRR_at; Start 244; Stop 268
aagaaagcgatcgatgaatatatag

SEQ ID NO: 168875 - DNA, 25 bp, Artificial
  probe
  misc_feature (1)..(25): SEQ ID NO: 7041; WAN024DRR_at; Start 188; Stop 212
aagctgctgaacaaggaaaacaaca

SEQ ID NO: 168876 - DNA, 25 bp, Artificial
  probe
  misc_feature (1)..(25): SEQ ID NO: 7041; WAN024DRR_at; Start 145; Stop 169
tgttcgtctagtgaggcaaataaaa

SEQ ID NO: 168877 - DNA, 25 bp, Artificial
  probe
  misc_feature (1)..(25): SEQ ID NO: 7041; WAN024DRR_at; Start 237; Stop 261
taaggcaaagaaagcgatcgatgaa

SEQ ID NO: 168878 - DNA, 25 bp, Artificial
  probe
  misc_feature (1)..(25): SEQ ID NO: 7041; WAN024DRR_at; Start 136; Stop 160
agtagcccctgttcgtctagtgagg

SEQ ID NO: 168879 - DNA, 25 bp, Artificial
  probe
  misc_feature (1)..(25): SEQ ID NO: 7041; WAN024DRR_at; Start 231; Stop 255
ccgaaataaggcaaagaaagcgatc

SEQ ID NO: 168880 - DNA, 25 bp, Artificial
  probe
  misc_feature (1)..(25): SEQ ID NO: 7041; WAN024DRR_at; Start 115; Stop 139
gcagaaggaggtaactacccaagta

SEQ ID NO: 168881 - DNA, 25 bp, Artificial
  probe
  misc_feature (1)..(25): SEQ ID NO: 7041; WAN024DRR_at; Start 105; Stop 129
tcatgcgacggcagaaggaggtaac

SEQ ID NO: 168882 - DNA, 25 bp, Artificial
  probe
  misc_feature (1)..(25): SEQ ID NO: 7041; WAN024DRR_at; Start 109; Stop 133
gcgacggcagaaggaggtaactacc

SEQ ID NO: 168883 - DNA, 25 bp, Artificial
  probe
  misc_feature (1)..(25): SEQ ID NO: 7041; WAN024DRR_at; Start 147; Stop 171
ttcgtctagtgaggcaaataaaagt

SEQ ID NO: 168884 - DNA, 25 bp, Artificial
  probe
  misc_feature (1)..(25): SEQ ID NO: 6471; WAN024DRS_at; Start 317; Stop 341
cgtatgtagaatatagagaagcgaa

SEQ ID NO: 168885 - DNA, 25 bp, Artificial
  probe
  misc_feature (1)..(25): SEQ ID NO: 6471; WAN024DRS_at; Start 339; Stop 363
gaaagataaagctagcgctgagaaa

SEQ ID NO: 168886 - DNA, 25 bp, Artificial
  probe
  misc_feature (1)..(25): SEQ ID NO: 6471; WAN024DRS_at; Start 337; Stop 361
gcgaaagataaagctagcgctgaga

SEQ ID NO: 168887 - DNA, 25 bp, Artificial
  probe
  misc_feature (1)..(25): SEQ ID NO: 6471; WAN024DRS_at; Start 398; Stop 422
cgaacaaaaaatttaatgaggagca

SEQ ID NO: 168888 - DNA, 25 bp, Artificial
  probe
  misc_feature (1)..(25): SEQ ID NO: 6471; WAN024DRS_at; Start 315; Stop 339
ggcgtatgtagaatatagagaagcg

SEQ ID NO: 168889 - DNA, 25 bp, Artificial
  probe
  misc_feature (1)..(25): SEQ ID NO: 6471; WAN024DRS_at; Start 366; Stop 390
gattgaagaagcaaaacgaaaacaa

SEQ ID NO: 168890 - DNA, 25 bp, Artificial
  probe
  misc_feature (1)..(25): SEQ ID NO: 6471; WAN024DRS_at; Start 406; Stop 430
aaatttaatgaggagcaagcaaaag

SEQ ID NO: 168891 - DNA, 25 bp, Artificial
  probe
  misc_feature (1)..(25): SEQ ID NO: 6471; WAN024DRS_at; Start 542; Stop 566
tagagaaaaataaaatacttgaaca

SEQ ID NO: 168892 - DNA, 25 bp, Artificial
  probe
  misc_feature (1)..(25): SEQ ID NO: 6471; WAN024DRS_at; Start 298; Stop 322
aatttggcagttcaaaaggcgtatg

SEQ ID NO: 168893 - DNA, 25 bp, Artificial
  probe
  misc_feature (1)..(25): SEQ ID NO: 6471; WAN024DRS_at; Start 296; Stop 320
cgaatttggcagttcaaaaggcgta

SEQ ID NO: 168894 - DNA, 25 bp, Artificial
  probe
  misc_feature (1)..(25): SEQ ID NO: 6471; WAN024DRS_at; Start 354; Stop 378
cgctgagaaaaagattgaagaagca

SEQ ID NO: 168895 - DNA, 25 bp, Artificial
  probe
  misc_feature (1)..(25): SEQ ID NO: 6471; WAN024DRS_at; Start 559; Stop 583
cttgaacaagatgctgaaaacgaaa

SEQ ID NO: 168896 - DNA, 25 bp, Artificial
  probe
  misc_feature (1)..(25): SEQ ID NO: 6471; WAN024DRS_at; Start 349; Stop 373
gctagcgctgagaaaaagattgaag

SEQ ID NO: 168897 - DNA, 25 bp, Artificial
  probe
  misc_feature (1)..(25): SEQ ID NO: 6471; WAN024DRS_at; Start 360; Stop 384
gaaaaagattgaagaagcaaaacga

SEQ ID NO: 168898 - DNA, 25 bp, Artificial
  probe
  misc_feature (1)..(25): SEQ ID NO: 6471; WAN024DRS_at; Start 341; Stop 365
aagataaagctagcgctgagaaaaa

SEQ ID NO: 168899 - DNA, 25 bp, Artificial
  probe
  misc_feature (1)..(25): SEQ ID NO: 6471; WAN024DRS_at; Start 334; Stop 358
gaagcgaaagataaagctagcgctg

SEQ ID NO: 168900 - DNA, 25 bp, Artificial
  probe
  misc_feature (1)..(25): SEQ ID NO: 6471; WAN024DRS_at; Start 570; Stop 594
tgctgaaaacgaaaagaaaattgac

SEQ ID NO: 168901 - DNA, 25 bp, Artificial
  probe
  misc_feature (1)..(25): SEQ ID NO: 6471; WAN024DRS_at; Start 345; Stop 369
taaagctagcgctgagaaaaagatt

SEQ ID NO: 168902 - DNA, 25 bp, Artificial
  probe
  misc_feature (1)..(25): SEQ ID NO: 6471; WAN024DRS_at; Start 303; Stop 327
ggcagttcaaaaggcgtatgtagaa

SEQ ID NO: 168903 - DNA, 25 bp, Artificial
  probe
  misc_feature (1)..(25): SEQ ID NO: 6471; WAN024DRS_at; Start 557; Stop 581
tacttgaacaagatgctgaaaacga

SEQ ID NO: 168904 - DNA, 25 bp, Artificial
  probe
  misc_feature (1)..(25): SEQ ID NO: 6471; WAN024DRS_at; Start 418; Stop 442
gagcaagcaaaagtagttcctgaag

SEQ ID NO: 168905 - DNA, 25 bp, Artificial
  probe
  misc_feature (1)..(25): SEQ ID NO: 6471; WAN024DRS_at; Start 565; Stop 589
caagatgctgaaaacgaaaagaaaa

SEQ ID NO: 168906 - DNA, 25 bp, Artificial
  probe
  misc_feature (1)..(25): SEQ ID NO: 6471; WAN024DRS_at; Start 330; Stop 354
tagagaagcgaaagataaagctagc

SEQ ID NO: 168907 - DNA, 25 bp, Artificial
  probe
  misc_feature (1)..(25): SEQ ID NO: 6471; WAN024DRS_at; Start 412; Stop 436
aatgaggagcaagcaaaagtagttc

SEQ ID NO: 168908 - DNA, 25 bp, Artificial
  probe
  misc_feature (1)..(25): SEQ ID NO: 6471; WAN024DRS_at; Start 409; Stop 433
tttaatgaggagcaagcaaaagtag

SEQ ID NO: 168909 - DNA, 25 bp, Artificial
  probe
  misc_feature (1)..(25): SEQ ID NO: 6471; WAN024DRS_at; Start 562; Stop 586
gaacaagatgctgaaaacgaaaaga

SEQ ID NO: 168910 - DNA, 25 bp, Artificial
  probe
  misc_feature (1)..(25): SEQ ID NO: 6471; WAN024DRS_at; Start 402; Stop 426
caaaaaatttaatgaggagcaagca

SEQ ID NO: 168911 - DNA, 25 bp, Artificial
  probe
  misc_feature (1)..(25): SEQ ID NO: 6471; WAN024DRS_at; Start 310; Stop 334
caaaaggcgtatgtagaatatagag

SEQ ID NO: 168912 - DNA, 25 bp, Artificial
  probe
  misc_feature (1)..(25): SEQ ID NO: 6471; WAN024DRS_at; Start 332; Stop 356
gagaagcgaaagataaagctagcgc

SEQ ID NO: 168913 - DNA, 25 bp, Artificial
  probe
  misc_feature (1)..(25): SEQ ID NO: 6471; WAN024DRS_at; Start 347; Stop 371
aagctagcgctgagaaaaagattga

SEQ ID NO: 168914 - DNA, 25 bp, Artificial
  probe
  misc_feature (1)..(25): SEQ ID NO: 6471; WAN024DRS_at; Start 301; Stop 325
ttggcagttcaaaaggcgtatgtag

SEQ ID NO: 168915 - DNA, 25 bp, Artificial
  probe
  misc_feature (1)..(25): SEQ ID NO: 6471; WAN024DRS_at; Start 351; Stop 375
tagcgctgagaaaaagattgaagaa

SEQ ID NO: 168916 - DNA, 25 bp, Artificial
  probe
  misc_feature (1)..(25): SEQ ID NO: 6471; WAN024DRS_at; Start 321; Stop 345
tgtagaatatagagaagcgaaagat

SEQ ID NO: 168917 - DNA, 25 bp, Artificial
  probe
  misc_feature (1)..(25): SEQ ID NO: 6471; WAN024DRS_at; Start 414; Stop 438
tgaggagcaagcaaaagtagttcct

SEQ ID NO: 168918 - DNA, 25 bp, Artificial
  probe
  misc_feature (1)..(25): SEQ ID NO: 7044; WAN024DRT_at; Start 305; Stop 329
taagtgttttaaagtcgaaatctga

SEQ ID NO: 168919 - DNA, 25 bp, Artificial
  probe
  misc_feature (1)..(25): SEQ ID NO: 7044; WAN024DRT_at; Start 321; Stop 345
gaaatctgagttgacgttagaaaca

SEQ ID NO: 168920 - DNA, 25 bp, Artificial
  probe
  misc_feature (1)..(25): SEQ ID NO: 7044; WAN024DRT_at; Start 101; Stop 125
tagttcatgcagaagacgttggtgg

SEQ ID NO: 168921 - DNA, 25 bp, Artificial
  probe
  misc_feature (1)..(25): SEQ ID NO: 7044; WAN024DRT_at; Start 103; Stop 127
gttcatgcagaagacgttggtggta

SEQ ID NO: 168922 - DNA, 25 bp, Artificial
  probe
  misc_feature (1)..(25): SEQ ID NO: 7044; WAN024DRT_at; Start 104; Stop 128
ttcatgcagaagacgttggtggtag

SEQ ID NO: 168923 - DNA, 25 bp, Artificial
  probe
  misc_feature (1)..(25): SEQ ID NO: 7044; WAN024DRT_at; Start 198; Stop 222
tctagaagaaatgttgagtgggatc

SEQ ID NO: 168924 - DNA, 25 bp, Artificial
  probe
  misc_feature (1)..(25): SEQ ID NO: 7044; WAN024DRT_at; Start 97; Stop 121
ggagtagttcatgcagaagacgttg

SEQ ID NO: 168925 - DNA, 25 bp, Artificial
  probe
  misc_feature (1)..(25): SEQ ID NO: 7044; WAN024DRT_at; Start 350; Stop 374
aagagttgctgtcaaaaaccaaagc

SEQ ID NO: 168926 - DNA, 25 bp, Artificial
  probe
  misc_feature (1)..(25): SEQ ID NO: 7044; WAN024DRT_at; Start 349; Stop 373
aaagagttgctgtcaaaaaccaaag

SEQ ID NO: 168927 - DNA, 25 bp, Artificial
  probe
  misc_feature (1)..(25): SEQ ID NO: 7044; WAN024DRT_at; Start 265; Stop 289
ctaaagttgagcaaaattcaaacga

SEQ ID NO: 168928 - DNA, 25 bp, Artificial
  probe
  misc_feature (1)..(25): SEQ ID NO: 7044; WAN024DRT_at; Start 355; Stop 379
ttgctgtcaaaaaccaaagcagagt

SEQ ID NO: 168929 - DNA, 25 bp, Artificial
  probe
  misc_feature (1)..(25): SEQ ID NO: 7044; WAN024DRT_at; Start 353; Stop 377
agttgctgtcaaaaaccaaagcaga

SEQ ID NO: 168930 - DNA, 25 bp, Artificial
  probe
  misc_feature (1)..(25): SEQ ID NO: 7044; WAN024DRT_at; Start 323; Stop 347
aatctgagttgacgttagaaacaaa

SEQ ID NO: 168931 - DNA, 25 bp, Artificial
  probe
  misc_feature (1)..(25): SEQ ID NO: 7044; WAN024DRT_at; Start 318; Stop 342
gtcgaaatctgagttgacgttagaa

SEQ ID NO: 168932 - DNA, 25 bp, Artificial
  probe
  misc_feature (1)..(25): SEQ ID NO: 7044; WAN024DRT_at; Start 196; Stop 220
catctagaagaaatgttgagtggga

SEQ ID NO: 168933 - DNA, 25 bp, Artificial
  probe
  misc_feature (1)..(25): SEQ ID NO: 7044; WAN024DRT_at; Start 309; Stop 333
tgttttaaagtcgaaatctgagttg

SEQ ID NO: 168934 - DNA, 25 bp, Artificial
  probe
  misc_feature (1)..(25): SEQ ID NO: 7044; WAN024DRT_at; Start 306; Stop 330
aagtgttttaaagtcgaaatctgag

SEQ ID NO: 168935 - DNA, 25 bp, Artificial
  probe
  misc_feature (1)..(25): SEQ ID NO: 7044; WAN024DRT_at; Start 356; Stop 380
tgctgtcaaaaaccaaagcagagtt

SEQ ID NO: 168936 - DNA, 25 bp, Artificial
  probe
  misc_feature (1)..(25): SEQ ID NO: 7044; WAN024DRT_at; Start 358; Stop 382
ctgtcaaaaaccaaagcagagttag

SEQ ID NO: 168937 - DNA, 25 bp, Artificial
  probe
  misc_feature (1)..(25): SEQ ID NO: 7044; WAN024DRT_at; Start 319; Stop 343
tcgaaatctgagttgacgttagaaa

SEQ ID NO: 168938 - DNA, 25 bp, Artificial
  probe
  misc_feature (1)..(25): SEQ ID NO: 7044; WAN024DRT_at; Start 100; Stop 124
gtagttcatgcagaagacgttggtg

SEQ ID NO: 168939 - DNA, 25 bp, Artificial
  probe
  misc_feature (1)..(25): SEQ ID NO: 7044; WAN024DRT_at; Start 351; Stop 375
agagttgctgtcaaaaaccaaagca

SEQ ID NO: 168940 - DNA, 25 bp, Artificial
  probe
  misc_feature (1)..(25): SEQ ID NO: 7044; WAN024DRT_at; Start 357; Stop 381
gctgtcaaaaaccaaagcagagtta

SEQ ID NO: 168941 - DNA, 25 bp, Artificial
  probe
  misc_feature (1)..(25): SEQ ID NO: 7044; WAN024DRT_at; Start 296; Stop 320
tgcgtgaattaagtgttttaaagtc

SEQ ID NO: 168942 - DNA, 25 bp, Artificial
  probe
  misc_feature (1)..(25): SEQ ID NO: 7044; WAN024DRT_at; Start 99; Stop 123
agtagttcatgcagaagacgttggt

SEQ ID NO: 168943 - DNA, 25 bp, Artificial
  probe
  misc_feature (1)..(25): SEQ ID NO: 7044; WAN024DRT_at; Start 312; Stop 336
tttaaagtcgaaatctgagttgacg

SEQ ID NO: 168944 - DNA, 25 bp, Artificial
  probe
  misc_feature (1)..(25): SEQ ID NO: 7044; WAN024DRT_at; Start 359; Stop 383
tgtcaaaaaccaaagcagagttaga

SEQ ID NO: 168945 - DNA, 25 bp, Artificial
  probe
  misc_feature (1)..(25): SEQ ID NO: 7044; WAN024DRT_at; Start 102; Stop 126
agttcatgcagaagacgttggtggt

SEQ ID NO: 168946 - DNA, 25 bp, Artificial
  probe
  misc_feature (1)..(25): SEQ ID NO: 7044; WAN024DRT_at; Start 320; Stop 344
cgaaatctgagttgacgttagaaac

SEQ ID NO: 168947 - DNA, 25 bp, Artificial
  probe
  misc_feature (1)..(25): SEQ ID NO: 7044; WAN024DRT_at; Start 322; Stop 346
aaatctgagttgacgttagaaacaa

SEQ ID NO: 168948 - DNA, 25 bp, Artificial
  probe
  misc_feature (1)..(25): SEQ ID NO: 7044; WAN024DRT_at; Start 352; Stop 376
gagttgctgtcaaaaaccaaagcag

SEQ ID NO: 168949 - DNA, 25 bp, Artificial
  probe
  misc_feature (1)..(25): SEQ ID NO: 7044; WAN024DRT_at; Start 194; Stop 218
cgcatctagaagaaatgttgagtgg

SEQ ID NO: 168950 - DNA, 25 bp, Artificial
  probe
  misc_feature (1)..(25): SEQ ID NO: 7044; WAN024DRT_at; Start 354; Stop 378
gttgctgtcaaaaaccaaagcagag

SEQ ID NO: 168951 - DNA, 25 bp, Artificial
  probe
  misc_feature (1)..(25): SEQ ID NO: 7044; WAN024DRT_at; Start 199; Stop 223
ctagaagaaatgttgagtgggatcc

SEQ ID NO: 168952 - DNA, 25 bp, Artificial
  probe
  misc_feature (1)..(25): SEQ ID NO: 6473; WAN024DRU_at; Start 326; Stop 350
tggttaaatatattaaatatacacg

SEQ ID NO: 168953 - DNA, 25 bp, Artificial
  probe
  misc_feature (1)..(25): SEQ ID NO: 6473; WAN024DRU_at; Start 365; Stop 389
caaaaagaactgaagctgagaaagt

SEQ ID NO: 168954 - DNA, 25 bp, Artificial
  probe
  misc_feature (1)..(25): SEQ ID NO: 6473; WAN024DRU_at; Start 172; Stop 196
aaagcagcagaagacgctcaaagag

SEQ ID NO: 168955 - DNA, 25 bp, Artificial
  probe
  misc_feature (1)..(25): SEQ ID NO: 6473; WAN024DRU_at; Start 357; Stop 381
taattcaacaaaaagaactgaagct

SEQ ID NO: 168956 - DNA, 25 bp, Artificial
  probe
  misc_feature (1)..(25): SEQ ID NO: 6473; WAN024DRU_at; Start 382; Stop 406
gagaaagtaatgactgcagctaaga

SEQ ID NO: 168957 - DNA, 25 bp, Artificial
  probe
  misc_feature (1)..(25): SEQ ID NO: 6473; WAN024DRU_at; Start 384; Stop 408
gaaagtaatgactgcagctaagaaa

SEQ ID NO: 168958 - DNA, 25 bp, Artificial
  probe
  misc_feature (1)..(25): SEQ ID NO: 6473; WAN024DRU_at; Start 401; Stop 425
ctaagaaagagcatgagaaaaaaca

SEQ ID NO: 168959 - DNA, 25 bp, Artificial
  probe
  misc_feature (1)..(25): SEQ ID NO: 6473; WAN024DRU_at; Start 141; Stop 165
tgcagcagtgaaaaatgctacagct

SEQ ID NO: 168960 - DNA, 25 bp, Artificial
  probe
  misc_feature (1)..(25): SEQ ID NO: 6473; WAN024DRU_at; Start 149; Stop 173
tgaaaaatgctacagctgcaaaaaa

SEQ ID NO: 168961 - DNA, 25 bp, Artificial
  probe
  misc_feature (1)..(25): SEQ ID NO: 6473; WAN024DRU_at; Start 186; Stop 210
cgctcaaagagctttagatgaagca

SEQ ID NO: 168962 - DNA, 25 bp, Artificial
  probe
  misc_feature (1)..(25): SEQ ID NO: 6473; WAN024DRU_at; Start 408; Stop 432
agagcatgagaaaaaacaaacagaa

SEQ ID NO: 168963 - DNA, 25 bp, Artificial
  probe
  misc_feature (1)..(25): SEQ ID NO: 6473; WAN024DRU_at; Start 435; Stop 459
tgctaaagttctcgcaaaggtaatt

SEQ ID NO: 168964 - DNA, 25 bp, Artificial
  probe
  misc_feature (1)..(25): SEQ ID NO: 6473; WAN024DRU_at; Start 393; Stop 417
gactgcagctaagaaagagcatgag

SEQ ID NO: 168965 - DNA, 25 bp, Artificial
  probe
  misc_feature (1)..(25): SEQ ID NO: 6473; WAN024DRU_at; Start 389; Stop 413
taatgactgcagctaagaaagagca

SEQ ID NO: 168966 - DNA, 25 bp, Artificial
  probe
  misc_feature (1)..(25): SEQ ID NO: 6473; WAN024DRU_at; Start 156; Stop 180
tgctacagctgcaaaaaaagcagca

SEQ ID NO: 168967 - DNA, 25 bp, Artificial
  probe
  misc_feature (1)..(25): SEQ ID NO: 6473; WAN024DRU_at; Start 371; Stop 395
gaactgaagctgagaaagtaatgac

SEQ ID NO: 168968 - DNA, 25 bp, Artificial
  probe
  misc_feature (1)..(25): SEQ ID NO: 6473; WAN024DRU_at; Start 181; Stop 205
gaagacgctcaaagagctttagatg

SEQ ID NO: 168969 - DNA, 25 bp, Artificial
  probe
  misc_feature (1)..(25): SEQ ID NO: 6473; WAN024DRU_at; Start 143; Stop 167
cagcagtgaaaaatgctacagctgc

SEQ ID NO: 168970 - DNA, 25 bp, Artificial
  probe
  misc_feature (1)..(25): SEQ ID NO: 6473; WAN024DRU_at; Start 380; Stop 404
ctgagaaagtaatgactgcagctaa

SEQ ID NO: 168971 - DNA, 25 bp, Artificial
  probe
  misc_feature (1)..(25): SEQ ID NO: 6473; WAN024DRU_at; Start 374; Stop 398
ctgaagctgagaaagtaatgactgc

SEQ ID NO: 168972 - DNA, 25 bp, Artificial
  probe
  misc_feature (1)..(25): SEQ ID NO: 6473; WAN024DRU_at; Start 376; Stop 400
gaagctgagaaagtaatgactgcag

SEQ ID NO: 168973 - DNA, 25 bp, Artificial
  probe
  misc_feature (1)..(25): SEQ ID NO: 6473; WAN024DRU_at; Start 361; Stop 385
tcaacaaaaagaactgaagctgaga

SEQ ID NO: 168974 - DNA, 25 bp, Artificial
  probe
  misc_feature (1)..(25): SEQ ID NO: 6473; WAN024DRU_at; Start 176; Stop 200
cagcagaagacgctcaaagagcttt

SEQ ID NO: 168975 - DNA, 25 bp, Artificial
  probe
  misc_feature (1)..(25): SEQ ID NO: 6473; WAN024DRU_at; Start 430; Stop 454
gaacttgctaaagttctcgcaaagg

SEQ ID NO: 168976 - DNA, 25 bp, Artificial
  probe
  misc_feature (1)..(25): SEQ ID NO: 6473; WAN024DRU_at; Start 178; Stop 202
gcagaagacgctcaaagagctttag

SEQ ID NO: 168977 - DNA, 25 bp, Artificial
  probe
  misc_feature (1)..(25): SEQ ID NO: 6473; WAN024DRU_at; Start 194; Stop 218
gagctttagatgaagcaaaagctgc

SEQ ID NO: 168978 - DNA, 25 bp, Artificial
  probe
  misc_feature (1)..(25): SEQ ID NO: 6473; WAN024DRU_at; Start 190; Stop 214
caaagagctttagatgaagcaaaag

SEQ ID NO: 168979 - DNA, 25 bp, Artificial
  probe
  misc_feature (1)..(25): SEQ ID NO: 6473; WAN024DRU_at; Start 341; Stop 365
aatatacacgtgaaaataattcaac

SEQ ID NO: 168980 - DNA, 25 bp, Artificial
  probe
  misc_feature (1)..(25): SEQ ID NO: 6473; WAN024DRU_at; Start 174; Stop 198
agcagcagaagacgctcaaagagct

SEQ ID NO: 168981 - DNA, 25 bp, Artificial
  probe
  misc_feature (1)..(25): SEQ ID NO: 6473; WAN024DRU_at; Start 396; Stop 420
tgcagctaagaaagagcatgagaaa

SEQ ID NO: 168982 - DNA, 25 bp, Artificial
  probe
  misc_feature (1)..(25): SEQ ID NO: 6473; WAN024DRU_at; Start 146; Stop 170
cagtgaaaaatgctacagctgcaaa

SEQ ID NO: 168983 - DNA, 25 bp, Artificial
  probe
  misc_feature (1)..(25): SEQ ID NO: 6473; WAN024DRU_at; Start 405; Stop 429
gaaagagcatgagaaaaaacaaaca

SEQ ID NO: 168984 - DNA, 25 bp, Artificial
  probe
  misc_feature (1)..(25): SEQ ID NO: 6473; WAN024DRU_at; Start 170; Stop 194
aaaaagcagcagaagacgctcaaag

SEQ ID NO: 168985 - DNA, 25 bp, Artificial
  probe
  misc_feature (1)..(25): SEQ ID NO: 6473; WAN024DRU_at; Start 392; Stop 416
tgactgcagctaagaaagagcatga

SEQ ID NO: 168986 - DNA, 25 bp, Artificial
  probe
  misc_feature (1)..(25): SEQ ID NO: 6475; WAN024DRV_at; Start 441; Stop 465
agaggcggaagcgaattttaatacg

SEQ ID NO: 168987 - DNA, 25 bp, Artificial
  probe
  misc_feature (1)..(25): SEQ ID NO: 6475; WAN024DRV_at; Start 346; Stop 370
gaacttagtgaaagtccagacagaa

SEQ ID NO: 168988 - DNA, 25 bp, Artificial
  probe
  misc_feature (1)..(25): SEQ ID NO: 6475; WAN024DRV_at; Start 386; Stop 410
gaaagaaattagctgatgcattatc

SEQ ID NO: 168989 - DNA, 25 bp, Artificial
  probe
  misc_feature (1)..(25): SEQ ID NO: 6475; WAN024DRV_at; Start 380; Stop 404
ctgctagaaagaaattagctgatgc

SEQ ID NO: 168990 - DNA, 25 bp, Artificial
  probe
  misc_feature (1)..(25): SEQ ID NO: 6475; WAN024DRV_at; Start 482; Stop 506
ttcccaaagaaactgagttagctgt

SEQ ID NO: 168991 - DNA, 25 bp, Artificial
  probe
  misc_feature (1)..(25): SEQ ID NO: 6475; WAN024DRV_at; Start 344; Stop 368
gagaacttagtgaaagtccagacag

SEQ ID NO: 168992 - DNA, 25 bp, Artificial
  probe
  misc_feature (1)..(25): SEQ ID NO: 6475; WAN024DRV_at; Start 295; Stop 319
gcaaatttagaacttcaaaaagctc

SEQ ID NO: 168993 - DNA, 25 bp, Artificial
  probe
  misc_feature (1)..(25): SEQ ID NO: 6475; WAN024DRV_at; Start 414; Stop 438
tattggagaggtagagttaaaacaa

SEQ ID NO: 168994 - DNA, 25 bp, Artificial
  probe
  misc_feature (1)..(25): SEQ ID NO: 6475; WAN024DRV_at; Start 526; Stop 550
gaagctaaaaaagaagcagaagtag

SEQ ID NO: 168995 - DNA, 25 bp, Artificial
  probe
  misc_feature (1)..(25): SEQ ID NO: 6475; WAN024DRV_at; Start 358; Stop 382
agtccagacagaagaaaatctgctg

SEQ ID NO: 168996 - DNA, 25 bp, Artificial
  probe
  misc_feature (1)..(25): SEQ ID NO: 6475; WAN024DRV_at; Start 338; Stop 362
cacaaagagaacttagtgaaagtcc

SEQ ID NO: 168997 - DNA, 25 bp, Artificial
  probe
  misc_feature (1)..(25): SEQ ID NO: 6475; WAN024DRV_at; Start 400; Stop 424
gatgcattatcttatattggagagg

SEQ ID NO: 168998 - DNA, 25 bp, Artificial
  probe
  misc_feature (1)..(25): SEQ ID NO: 6475; WAN024DRV_at; Start 397; Stop 421
gctgatgcattatcttatattggag

SEQ ID NO: 168999 - DNA, 25 bp, Artificial
  probe
  misc_feature (1)..(25): SEQ ID NO: 6475; WAN024DRV_at; Start 307; Stop 331
cttcaaaaagctcatgtaaaatatc

SEQ ID NO: 169000 - DNA, 25 bp, Artificial
  probe
  misc_feature (1)..(25): SEQ ID NO: 6475; WAN024DRV_at; Start 340; Stop 364
caaagagaacttagtgaaagtccag

SEQ ID NO: 169001 - DNA, 25 bp, Artificial
  probe
  misc_feature (1)..(25): SEQ ID NO: 6475; WAN024DRV_at; Start 409; Stop 433
tcttatattggagaggtagagttaa

SEQ ID NO: 169002 - DNA, 25 bp, Artificial
  probe
  misc_feature (1)..(25): SEQ ID NO: 6475; WAN024DRV_at; Start 300; Stop 324
tttagaacttcaaaaagctcatgta

SEQ ID NO: 169003 - DNA, 25 bp, Artificial
  probe
  misc_feature (1)..(25): SEQ ID NO: 6475; WAN024DRV_at; Start 288; Stop 312
tcaaaaagcaaatttagaacttcaa

SEQ ID NO: 169004 - DNA, 25 bp, Artificial
  probe
  misc_feature (1)..(25): SEQ ID NO: 6475; WAN024DRV_at; Start 536; Stop 560
aagaagcagaagtagctaagaaaaa

SEQ ID NO: 169005 - DNA, 25 bp, Artificial
  probe
  misc_feature (1)..(25): SEQ ID NO: 6475; WAN024DRV_at; Start 376; Stop 400
tctgctgctagaaagaaattagctg

SEQ ID NO: 169006 - DNA, 25 bp, Artificial
  probe
  misc_feature (1)..(25): SEQ ID NO: 6475; WAN024DRV_at; Start 330; Stop 354
tcaaaaagcacaaagagaacttagt

SEQ ID NO: 169007 - DNA, 25 bp, Artificial
  probe
  misc_feature (1)..(25): SEQ ID NO: 6475; WAN024DRV_at; Start 349; Stop 373
cttagtgaaagtccagacagaagaa

SEQ ID NO: 169008 - DNA, 25 bp, Artificial
  probe
  misc_feature (1)..(25): SEQ ID NO: 6475; WAN024DRV_at; Start 451; Stop 475
gcgaattttaatacggaacaagcaa

SEQ ID NO: 169009 - DNA, 25 bp, Artificial
  probe
  misc_feature (1)..(25): SEQ ID NO: 6475; WAN024DRV_at; Start 486; Stop 510
caaagaaactgagttagctgttact

SEQ ID NO: 169010 - DNA, 25 bp, Artificial
  probe
  misc_feature (1)..(25): SEQ ID NO: 6475; WAN024DRV_at; Start 364; Stop 388
gacagaagaaaatctgctgctagaa

SEQ ID NO: 169011 - DNA, 25 bp, Artificial
  probe
  misc_feature (1)..(25): SEQ ID NO: 6475; WAN024DRV_at; Start 479; Stop 503
taattcccaaagaaactgagttagc

SEQ ID NO: 169012 - DNA, 25 bp, Artificial
  probe
  misc_feature (1)..(25): SEQ ID NO: 6475; WAN024DRV_at; Start 371; Stop 395
gaaaatctgctgctagaaagaaatt

SEQ ID NO: 169013 - DNA, 25 bp, Artificial
  probe
  misc_feature (1)..(25): SEQ ID NO: 6475; WAN024DRV_at; Start 354; Stop 378
tgaaagtccagacagaagaaaatct

SEQ ID NO: 169014 - DNA, 25 bp, Artificial
  probe
  misc_feature (1)..(25): SEQ ID NO: 6475; WAN024DRV_at; Start 404; Stop 428
cattatcttatattggagaggtaga

SEQ ID NO: 169015 - DNA, 25 bp, Artificial
  probe
  misc_feature (1)..(25): SEQ ID NO: 6475; WAN024DRV_at; Start 316; Stop 340
gctcatgtaaaatatcaaaaagcac

SEQ ID NO: 169016 - DNA, 25 bp, Artificial
  probe
  misc_feature (1)..(25): SEQ ID NO: 6475; WAN024DRV_at; Start 368; Stop 392
gaagaaaatctgctgctagaaagaa

SEQ ID NO: 169017 - DNA, 25 bp, Artificial
  probe
  misc_feature (1)..(25): SEQ ID NO: 6475; WAN024DRV_at; Start 322; Stop 346
gtaaaatatcaaaaagcacaaagag

SEQ ID NO: 169018 - DNA, 25 bp, Artificial
  probe
  misc_feature (1)..(25): SEQ ID NO: 6475; WAN024DRV_at; Start 533; Stop 557
aaaaagaagcagaagtagctaagaa

SEQ ID NO: 169019 - DNA, 25 bp, Artificial
  probe
  misc_feature (1)..(25): SEQ ID NO: 6475; WAN024DRV_at; Start 360; Stop 384
tccagacagaagaaaatctgctgct

SEQ ID NO: 169020 - DNA, 25 bp, Artificial
  probe
  misc_feature (1)..(25): SEQ ID NO: 6481; WAN024DRW_at; Start 377; Stop 401
aatcccgcagagaagctgagaaaaa

SEQ ID NO: 169021 - DNA, 25 bp, Artificial
  probe
  misc_feature (1)..(25): SEQ ID NO: 6481; WAN024DRW_at; Start 370; Stop 394
tgggaaaaatcccgcagagaagctg

SEQ ID NO: 169022 - DNA, 25 bp, Artificial
  probe
  misc_feature (1)..(25): SEQ ID NO: 6481; WAN024DRW_at; Start 306; Stop 330
cagaggaagcttcaaaaaagcggtc

SEQ ID NO: 169023 - DNA, 25 bp, Artificial
  probe
  misc_feature (1)..(25): SEQ ID NO: 6481; WAN024DRW_at; Start 338; Stop 362
atataactgttatcagaaattcaca

SEQ ID NO: 169024 - DNA, 25 bp, Artificial
  probe
  misc_feature (1)..(25): SEQ ID NO: 6481; WAN024DRW_at; Start 375; Stop 399
aaaatcccgcagagaagctgagaaa

SEQ ID NO: 169025 - DNA, 25 bp, Artificial
  probe
  misc_feature (1)..(25): SEQ ID NO: 6481; WAN024DRW_at; Start 376; Stop 400
aaatcccgcagagaagctgagaaaa

SEQ ID NO: 169026 - DNA, 25 bp, Artificial
  probe
  misc_feature (1)..(25): SEQ ID NO: 6481; WAN024DRW_at; Start 304; Stop 328
aacagaggaagcttcaaaaaagcgg

SEQ ID NO: 169027 - DNA, 25 bp, Artificial
  probe
  misc_feature (1)..(25): SEQ ID NO: 6481; WAN024DRW_at; Start 373; Stop 397
gaaaaatcccgcagagaagctgaga

SEQ ID NO: 169028 - DNA, 25 bp, Artificial
  probe
  misc_feature (1)..(25): SEQ ID NO: 6481; WAN024DRW_at; Start 335; Stop 359
ataatataactgttatcagaaattc

SEQ ID NO: 169029 - DNA, 25 bp, Artificial
  probe
  misc_feature (1)..(25): SEQ ID NO: 6481; WAN024DRW_at; Start 336; Stop 360
taatataactgttatcagaaattca

SEQ ID NO: 169030 - DNA, 25 bp, Artificial
  probe
  misc_feature (1)..(25): SEQ ID NO: 6481; WAN024DRW_at; Start 340; Stop 364
ataactgttatcagaaattcacaac

SEQ ID NO: 169031 - DNA, 25 bp, Artificial
  probe
  misc_feature (1)..(25): SEQ ID NO: 6481; WAN024DRW_at; Start 371; Stop 395
gggaaaaatcccgcagagaagctga

SEQ ID NO: 169032 - DNA, 25 bp, Artificial
  probe
  misc_feature (1)..(25): SEQ ID NO: 6481; WAN024DRW_at; Start 298; Stop 322
aaggccaacagaggaagcttcaaaa

SEQ ID NO: 169033 - DNA, 25 bp, Artificial
  probe
  misc_feature (1)..(25): SEQ ID NO: 6481; WAN024DRW_at; Start 343; Stop 367
actgttatcagaaattcacaacgaa

SEQ ID NO: 169034 - DNA, 25 bp, Artificial
  probe
  misc_feature (1)..(25): SEQ ID NO: 6481; WAN024DRW_at; Start 296; Stop 320
ctaaggccaacagaggaagcttcaa

SEQ ID NO: 169035 - DNA, 25 bp, Artificial
  probe
  misc_feature (1)..(25): SEQ ID NO: 6481; WAN024DRW_at; Start 372; Stop 396
ggaaaaatcccgcagagaagctgag

SEQ ID NO: 169036 - DNA, 25 bp, Artificial
  probe
  misc_feature (1)..(25): SEQ ID NO: 6481; WAN024DRW_at; Start 334; Stop 358
gataatataactgttatcagaaatt

SEQ ID NO: 169037 - DNA, 25 bp, Artificial
  probe
  misc_feature (1)..(25): SEQ ID NO: 6481; WAN024DRW_at; Start 369; Stop 393
gtgggaaaaatcccgcagagaagct

SEQ ID NO: 169038 - DNA, 25 bp, Artificial
  probe
  misc_feature (1)..(25): SEQ ID NO: 6481; WAN024DRW_at; Start 192; Stop 216
aaaagttttaggtgaagcagaagct

SEQ ID NO: 169039 - DNA, 25 bp, Artificial
  probe
  misc_feature (1)..(25): SEQ ID NO: 6481; WAN024DRW_at; Start 341; Stop 365
taactgttatcagaaattcacaacg

SEQ ID NO: 169040 - DNA, 25 bp, Artificial
  probe
  misc_feature (1)..(25): SEQ ID NO: 6481; WAN024DRW_at; Start 193; Stop 217
aaagttttaggtgaagcagaagctg

SEQ ID NO: 169041 - DNA, 25 bp, Artificial
  probe
  misc_feature (1)..(25): SEQ ID NO: 6481; WAN024DRW_at; Start 195; Stop 219
agttttaggtgaagcagaagctgct

SEQ ID NO: 169042 - DNA, 25 bp, Artificial
  probe
  misc_feature (1)..(25): SEQ ID NO: 6481; WAN024DRW_at; Start 196; Stop 220
gttttaggtgaagcagaagctgctc

SEQ ID NO: 169043 - DNA, 25 bp, Artificial
  probe
  misc_feature (1)..(25): SEQ ID NO: 6481; WAN024DRW_at; Start 342; Stop 366
aactgttatcagaaattcacaacga

SEQ ID NO: 169044 - DNA, 25 bp, Artificial
  probe
  misc_feature (1)..(25): SEQ ID NO: 6481; WAN024DRW_at; Start 194; Stop 218
aagttttaggtgaagcagaagctgc

SEQ ID NO: 169045 - DNA, 25 bp, Artificial
  probe
  misc_feature (1)..(25): SEQ ID NO: 6481; WAN024DRW_at; Start 337; Stop 361
aatataactgttatcagaaattcac

SEQ ID NO: 169046 - DNA, 25 bp, Artificial
  probe
  misc_feature (1)..(25): SEQ ID NO: 6481; WAN024DRW_at; Start 339; Stop 363
tataactgttatcagaaattcacaa

SEQ ID NO: 169047 - DNA, 25 bp, Artificial
  probe
  misc_feature (1)..(25): SEQ ID NO: 6481; WAN024DRW_at; Start 297; Stop 321
taaggccaacagaggaagcttcaaa

SEQ ID NO: 169048 - DNA, 25 bp, Artificial
  probe
  misc_feature (1)..(25): SEQ ID NO: 6481; WAN024DRW_at; Start 367; Stop 391
aagtgggaaaaatcccgcagagaag

SEQ ID NO: 169049 - DNA, 25 bp, Artificial
  probe
  misc_feature (1)..(25): SEQ ID NO: 6481; WAN024DRW_at; Start 305; Stop 329
acagaggaagcttcaaaaaagcggt

SEQ ID NO: 169050 - DNA, 25 bp, Artificial
  probe
  misc_feature (1)..(25): SEQ ID NO: 6481; WAN024DRW_at; Start 368; Stop 392
agtgggaaaaatcccgcagagaagc

SEQ ID NO: 169051 - DNA, 25 bp, Artificial
  probe
  misc_feature (1)..(25): SEQ ID NO: 6481; WAN024DRW_at; Start 344; Stop 368
ctgttatcagaaattcacaacgaaa

SEQ ID NO: 169052 - DNA, 25 bp, Artificial
  probe
  misc_feature (1)..(25): SEQ ID NO: 6481; WAN024DRW_at; Start 295; Stop 319
gctaaggccaacagaggaagcttca

SEQ ID NO: 169053 - DNA, 25 bp, Artificial
  probe
  misc_feature (1)..(25): SEQ ID NO: 7043; WAN024DRX_at; Start 352; Stop 376
ttgccgtcaaaagctaaagcagagt

SEQ ID NO: 169054 - DNA, 25 bp, Artificial
  probe
  misc_feature (1)..(25): SEQ ID NO: 7043; WAN024DRX_at; Start 353; Stop 377
tgccgtcaaaagctaaagcagagtt

SEQ ID NO: 169055 - DNA, 25 bp, Artificial
  probe
  misc_feature (1)..(25): SEQ ID NO: 7043; WAN024DRX_at; Start 304; Stop 328
tatgaattagaagttaatgttttat

SEQ ID NO: 169056 - DNA, 25 bp, Artificial
  probe
  misc_feature (1)..(25): SEQ ID NO: 7043; WAN024DRX_at; Start 350; Stop 374
agttgccgtcaaaagctaaagcaga

SEQ ID NO: 169057 - DNA, 25 bp, Artificial
  probe
  misc_feature (1)..(25): SEQ ID NO: 7043; WAN024DRX_at; Start 354; Stop 378
gccgtcaaaagctaaagcagagtta

SEQ ID NO: 169058 - DNA, 25 bp, Artificial
  probe
  misc_feature (1)..(25): SEQ ID NO: 7043; WAN024DRX_at; Start 351; Stop 375
gttgccgtcaaaagctaaagcagag

SEQ ID NO: 169059 - DNA, 25 bp, Artificial
  probe
  misc_feature (1)..(25): SEQ ID NO: 7043; WAN024DRX_at; Start 356; Stop 380
cgtcaaaagctaaagcagagttaga

SEQ ID NO: 169060 - DNA, 25 bp, Artificial
  probe
  misc_feature (1)..(25): SEQ ID NO: 7043; WAN024DRX_at; Start 355; Stop 379
ccgtcaaaagctaaagcagagttag

SEQ ID NO: 169061 - DNA, 25 bp, Artificial
  probe
  misc_feature (1)..(25): SEQ ID NO: 7043; WAN024DRX_at; Start 349; Stop 373
gagttgccgtcaaaagctaaagcag

SEQ ID NO: 169062 - DNA, 25 bp, Artificial
  probe
  misc_feature (1)..(25): SEQ ID NO: 6250; WAN024DRY_at; Start 32; Stop 56
aattaaaagaagctgaagttgctaa

SEQ ID NO: 169063 - DNA, 25 bp, Artificial
  probe
  misc_feature (1)..(25): SEQ ID NO: 6250; WAN024DRY_at; Start 33; Stop 57
attaaaagaagctgaagttgctaaa

SEQ ID NO: 169064 - DNA, 25 bp, Artificial
  probe
  misc_feature (1)..(25): SEQ ID NO: 6250; WAN024DRY_at; Start 40; Stop 64
gaagctgaagttgctaaaaaagtag

SEQ ID NO: 169065 - DNA, 25 bp, Artificial
  probe
  misc_feature (1)..(25): SEQ ID NO: 6250; WAN024DRY_at; Start 39; Stop 63
agaagctgaagttgctaaaaaagta

SEQ ID NO: 169066 - DNA, 25 bp, Artificial
  probe
  misc_feature (1)..(25): SEQ ID NO: 6250; WAN024DRY_at; Start 43; Stop 67
gctgaagttgctaaaaaagtagaag

SEQ ID NO: 169067 - DNA, 25 bp, Artificial
  probe
  misc_feature (1)..(25): SEQ ID NO: 6250; WAN024DRY_at; Start 37; Stop 61
aaagaagctgaagttgctaaaaaag

SEQ ID NO: 169068 - DNA, 25 bp, Artificial
  probe
  misc_feature (1)..(25): SEQ ID NO: 6250; WAN024DRY_at; Start 38; Stop 62
aagaagctgaagttgctaaaaaagt

SEQ ID NO: 169069 - DNA, 25 bp, Artificial
  probe
  misc_feature (1)..(25): SEQ ID NO: 6250; WAN024DRY_at; Start 42; Stop 66
agctgaagttgctaaaaaagtagaa

SEQ ID NO: 169070 - DNA, 25 bp, Artificial
  probe
  misc_feature (1)..(25): SEQ ID NO: 6250; WAN024DRY_at; Start 35; Stop 59
taaaagaagctgaagttgctaaaaa

SEQ ID NO: 169071 - DNA, 25 bp, Artificial
  probe
  misc_feature (1)..(25): SEQ ID NO: 6250; WAN024DRY_at; Start 34; Stop 58
ttaaaagaagctgaagttgctaaaa

SEQ ID NO: 169072 - DNA, 25 bp, Artificial
  probe
  misc_feature (1)..(25): SEQ ID NO: 6250; WAN024DRY_at; Start 41; Stop 65
aagctgaagttgctaaaaaagtaga

SEQ ID NO: 169073 - DNA, 25 bp, Artificial
  probe
  misc_feature (1)..(25): SEQ ID NO: 6477; WAN024DRZ_at; Start 631; Stop 655
acagaactcaaagggattgatgaat

SEQ ID NO: 169074 - DNA, 25 bp, Artificial
  probe
  misc_feature (1)..(25): SEQ ID NO: 6477; WAN024DRZ_at; Start 423; Stop 447
gatcgtggttcctagttcgcaacag

SEQ ID NO: 169075 - DNA, 25 bp, Artificial
  probe
  misc_feature (1)..(25): SEQ ID NO: 6477; WAN024DRZ_at; Start 348; Stop 372
gattgagaaacaagcagacgcagct

SEQ ID NO: 169076 - DNA, 25 bp, Artificial
  probe
  misc_feature (1)..(25): SEQ ID NO: 6477; WAN024DRZ_at; Start 418; Stop 442
caagagatcgtggttcctagttcgc

SEQ ID NO: 169077 - DNA, 25 bp, Artificial
  probe
  misc_feature (1)..(25): SEQ ID NO: 6477; WAN024DRZ_at; Start 274; Stop 298
caaaaagcaaatttgaaatatcaac

SEQ ID NO: 169078 - DNA, 25 bp, Artificial
  probe
  misc_feature (1)..(25): SEQ ID NO: 6477; WAN024DRZ_at; Start 621; Stop 645
tagactagaaacagaactcaaaggg

SEQ ID NO: 169079 - DNA, 25 bp, Artificial
  probe
  misc_feature (1)..(25): SEQ ID NO: 6477; WAN024DRZ_at; Start 803; Stop 827
tagaatatttcaaaaaaaccgatgc

SEQ ID NO: 169080 - DNA, 25 bp, Artificial
  probe
  misc_feature (1)..(25): SEQ ID NO: 6477; WAN024DRZ_at; Start 817; Stop 841
aaaaccgatgctgagcaaactgaac

SEQ ID NO: 169081 - DNA, 25 bp, Artificial
  probe
  misc_feature (1)..(25): SEQ ID NO: 6477; WAN024DRZ_at; Start 948; Stop 972
agaaactccagctccagcaccaaaa

SEQ ID NO: 169082 - DNA, 25 bp, Artificial
  probe
  misc_feature (1)..(25): SEQ ID NO: 6477; WAN024DRZ_at; Start 720; Stop 744
acgaactaaactatcaacacttgaa

SEQ ID NO: 169083 - DNA, 25 bp, Artificial
  probe
  misc_feature (1)..(25): SEQ ID NO: 6477; WAN024DRZ_at; Start 299; Stop 323
tactgttgcagaagtatgttagcga

SEQ ID NO: 169084 - DNA, 25 bp, Artificial
  probe
  misc_feature (1)..(25): SEQ ID NO: 6477; WAN024DRZ_at; Start 823; Stop 847
gatgctgagcaaactgaacaatacc

SEQ ID NO: 169085 - DNA, 25 bp, Artificial
  probe
  misc_feature (1)..(25): SEQ ID NO: 6477; WAN024DRZ_at; Start 934; Stop 958
gaaaaaccagctgaagaaactccag

SEQ ID NO: 169086 - DNA, 25 bp, Artificial
  probe
  misc_feature (1)..(25): SEQ ID NO: 6477; WAN024DRZ_at; Start 447; Stop 471
gttagaagtaactagacgaaaagca

SEQ ID NO: 169087 - DNA, 25 bp, Artificial
  probe
  misc_feature (1)..(25): SEQ ID NO: 6477; WAN024DRZ_at; Start 963; Stop 987
agcaccaaaaccagagcaaccagct

SEQ ID NO: 169088 - DNA, 25 bp, Artificial
  probe
  misc_feature (1)..(25): SEQ ID NO: 6477; WAN024DRZ_at; Start 306; Stop 330
gcagaagtatgttagcgaaagtgat

SEQ ID NO: 169089 - DNA, 25 bp, Artificial
  probe
  misc_feature (1)..(25): SEQ ID NO: 6477; WAN024DRZ_at; Start 432; Stop 456
tcctagttcgcaacagttagaagta

SEQ ID NO: 169090 - DNA, 25 bp, Artificial
  probe
  misc_feature (1)..(25): SEQ ID NO: 6477; WAN024DRZ_at; Start 428; Stop 452
tggttcctagttcgcaacagttaga

SEQ ID NO: 169091 - DNA, 25 bp, Artificial
  probe
  misc_feature (1)..(25): SEQ ID NO: 6477; WAN024DRZ_at; Start 342; Stop 366
aaaggagattgagaaacaagcagac

SEQ ID NO: 169092 - DNA, 25 bp, Artificial
  probe
  misc_feature (1)..(25): SEQ ID NO: 6477; WAN024DRZ_at; Start 403; Stop 427
cttaataagattagacaagagatcg

SEQ ID NO: 169093 - DNA, 25 bp, Artificial
  probe
  misc_feature (1)..(25): SEQ ID NO: 6477; WAN024DRZ_at; Start 366; Stop 390
cgcagctaagaaagaaaatgagata

SEQ ID NO: 169094 - DNA, 25 bp, Artificial
  probe
  misc_feature (1)..(25): SEQ ID NO: 6477; WAN024DRZ_at; Start 715; Stop 739
gccaaacgaactaaactatcaacac

SEQ ID NO: 169095 - DNA, 25 bp, Artificial
  probe
  misc_feature (1)..(25): SEQ ID NO: 6477; WAN024DRZ_at; Start 826; Stop 850
gctgagcaaactgaacaataccttg

SEQ ID NO: 169096 - DNA, 25 bp, Artificial
  probe
  misc_feature (1)..(25): SEQ ID NO: 6477; WAN024DRZ_at; Start 943; Stop 967
gctgaagaaactccagctccagcac

SEQ ID NO: 169097 - DNA, 25 bp, Artificial
  probe
  misc_feature (1)..(25): SEQ ID NO: 6477; WAN024DRZ_at; Start 361; Stop 385
gcagacgcagctaagaaagaaaatg

SEQ ID NO: 169098 - DNA, 25 bp, Artificial
  probe
  misc_feature (1)..(25): SEQ ID NO: 6477; WAN024DRZ_at; Start 318; Stop 342
tagcgaaagtgatggaaagaaaaaa

SEQ ID NO: 169099 - DNA, 25 bp, Artificial
  probe
  misc_feature (1)..(25): SEQ ID NO: 6477; WAN024DRZ_at; Start 856; Stop 880
gctgaaaaagacttagctgataaaa

SEQ ID NO: 169100 - DNA, 25 bp, Artificial
  probe
  misc_feature (1)..(25): SEQ ID NO: 6477; WAN024DRZ_at; Start 354; Stop 378
gaaacaagcagacgcagctaagaaa

SEQ ID NO: 169101 - DNA, 25 bp, Artificial
  probe
  misc_feature (1)..(25): SEQ ID NO: 6477; WAN024DRZ_at; Start 625; Stop 649
ctagaaacagaactcaaagggattg

SEQ ID NO: 169102 - DNA, 25 bp, Artificial
  probe
  misc_feature (1)..(25): SEQ ID NO: 6477; WAN024DRZ_at; Start 439; Stop 463
tcgcaacagttagaagtaactagac

SEQ ID NO: 169103 - DNA, 25 bp, Artificial
  probe
  misc_feature (1)..(25): SEQ ID NO: 6477; WAN024DRZ_at; Start 288; Stop 312
gaaatatcaactactgttgcagaag

SEQ ID NO: 169104 - DNA, 25 bp, Artificial
  probe
  misc_feature (1)..(25): SEQ ID NO: 6477; WAN024DRZ_at; Start 413; Stop 437
ttagacaagagatcgtggttcctag

SEQ ID NO: 169105 - DNA, 25 bp, Artificial
  probe
  misc_feature (1)..(25): SEQ ID NO: 6477; WAN024DRZ_at; Start 871; Stop 895
gctgataaaaaagctgaattggaga

SEQ ID NO: 169106 - DNA, 25 bp, Artificial
  probe
  misc_feature (1)..(25): SEQ ID NO: 6477; WAN024DRZ_at; Start 613; Stop 637
gaagtttatagactagaaacagaac

SEQ ID NO: 169107 - DNA, 25 bp, Artificial
  probe
  misc_feature (1)..(25): SEQ ID NO: 6297; WAN024DS2_s_at; Start 358; Stop 382
caagctgaacaatatcttgttgcag

SEQ ID NO: 169108 - DNA, 25 bp, Artificial
  probe
  misc_feature (1)..(25): SEQ ID NO: 6297; WAN024DS2_s_at; Start 90; Stop 114
ggatgctgaaaaatatgctcttgaa

SEQ ID NO: 169109 - DNA, 25 bp, Artificial
  probe
  misc_feature (1)..(25): SEQ ID NO: 6297; WAN024DS2_s_at; Start 365; Stop 389
aacaatatcttgttgcagctaaaaa

SEQ ID NO: 169110 - DNA, 25 bp, Artificial
  probe
  misc_feature (1)..(25): SEQ ID NO: 6297; WAN024DS2_s_at; Start 99; Stop 123
aaaatatgctcttgaagctaaaatc

SEQ ID NO: 169111 - DNA, 25 bp, Artificial
  probe
  misc_feature (1)..(25): SEQ ID NO: 6297; WAN024DS2_s_at; Start 371; Stop 395
atcttgttgcagctaaaaaagactt

SEQ ID NO: 169112 - DNA, 25 bp, Artificial
  probe
  misc_feature (1)..(25): SEQ ID NO: 6297; WAN024DS2_s_at; Start 89; Stop 113
tggatgctgaaaaatatgctcttga

SEQ ID NO: 169113 - DNA, 25 bp, Artificial
  probe
  misc_feature (1)..(25): SEQ ID NO: 6297; WAN024DS2_s_at; Start 126; Stop 150
tgagttggaatatgaagttcaggga

SEQ ID NO: 169114 - DNA, 25 bp, Artificial
  probe
  misc_feature (1)..(25): SEQ ID NO: 6297; WAN024DS2_s_at; Start 369; Stop 393
atatcttgttgcagctaaaaaagac

SEQ ID NO: 169115 - DNA, 25 bp, Artificial
  probe
  misc_feature (1)..(25): SEQ ID NO: 6297; WAN024DS2_s_at; Start 94; Stop 118
gctgaaaaatatgctcttgaagcta

SEQ ID NO: 169116 - DNA, 25 bp, Artificial
  probe
  misc_feature (1)..(25): SEQ ID NO: 6297; WAN024DS2_s_at; Start 361; Stop 385
gctgaacaatatcttgttgcagcta

SEQ ID NO: 169117 - DNA, 25 bp, Artificial
  probe
  misc_feature (1)..(25): SEQ ID NO: 6297; WAN024DS2_s_at; Start 97; Stop 121
gaaaaatatgctcttgaagctaaaa

SEQ ID NO: 169118 - DNA, 25 bp, Artificial
  probe
  misc_feature (1)..(25): SEQ ID NO: 6297; WAN024DS2_s_at; Start 375; Stop 399
tgttgcagctaaaaaagacttagat

SEQ ID NO: 169119 - DNA, 25 bp, Artificial
  probe
  misc_feature (1)..(25): SEQ ID NO: 6297; WAN024DS2_s_at; Start 378; Stop 402
tgcagctaaaaaagacttagatgct

SEQ ID NO: 169120 - DNA, 25 bp, Artificial
  probe
  misc_feature (1)..(25): SEQ ID NO: 6297; WAN024DS2_s_at; Start 96; Stop 120
tgaaaaatatgctcttgaagctaaa

SEQ ID NO: 169121 - DNA, 25 bp, Artificial
  probe
  misc_feature (1)..(25): SEQ ID NO: 6297; WAN024DS2_s_at; Start 380; Stop 404
cagctaaaaaagacttagatgctaa

SEQ ID NO: 169122 - DNA, 25 bp, Artificial
  probe
  misc_feature (1)..(25): SEQ ID NO: 6297; WAN024DS2_s_at; Start 367; Stop 391
caatatcttgttgcagctaaaaaag

SEQ ID NO: 169123 - DNA, 25 bp, Artificial
  probe
  misc_feature (1)..(25): SEQ ID NO: 6297; WAN024DS2_s_at; Start 379; Stop 403
gcagctaaaaaagacttagatgcta

SEQ ID NO: 169124 - DNA, 25 bp, Artificial
  probe
  misc_feature (1)..(25): SEQ ID NO: 6297; WAN024DS2_s_at; Start 127; Stop 151
gagttggaatatgaagttcagggac

SEQ ID NO: 169125 - DNA, 25 bp, Artificial
  probe
  misc_feature (1)..(25): SEQ ID NO: 6297; WAN024DS2_s_at; Start 93; Stop 117
tgctgaaaaatatgctcttgaagct

SEQ ID NO: 169126 - DNA, 25 bp, Artificial
  probe
  misc_feature (1)..(25): SEQ ID NO: 6297; WAN024DS2_s_at; Start 357; Stop 381
gcaagctgaacaatatcttgttgca

SEQ ID NO: 169127 - DNA, 25 bp, Artificial
  probe
  misc_feature (1)..(25): SEQ ID NO: 6297; WAN024DS2_s_at; Start 359; Stop 383
aagctgaacaatatcttgttgcagc

SEQ ID NO: 169128 - DNA, 25 bp, Artificial
  probe
  misc_feature (1)..(25): SEQ ID NO: 6297; WAN024DS2_s_at; Start 377; Stop 401
ttgcagctaaaaaagacttagatgc

SEQ ID NO: 169129 - DNA, 25 bp, Artificial
  probe
  misc_feature (1)..(25): SEQ ID NO: 6297; WAN024DS2_s_at; Start 376; Stop 400
gttgcagctaaaaaagacttagatg

SEQ ID NO: 169130 - DNA, 25 bp, Artificial
  probe
  misc_feature (1)..(25): SEQ ID NO: 6297; WAN024DS2_s_at; Start 370; Stop 394
tatcttgttgcagctaaaaaagact

SEQ ID NO: 169131 - DNA, 25 bp, Artificial
  probe
  misc_feature (1)..(25): SEQ ID NO: 6297; WAN024DS2_s_at; Start 92; Stop 116
atgctgaaaaatatgctcttgaagc

SEQ ID NO: 169132 - DNA, 25 bp, Artificial
  probe
  misc_feature (1)..(25): SEQ ID NO: 6297; WAN024DS2_s_at; Start 374; Stop 398
ttgttgcagctaaaaaagacttaga

SEQ ID NO: 169133 - DNA, 25 bp, Artificial
  probe
  misc_feature (1)..(25): SEQ ID NO: 6297; WAN024DS2_s_at; Start 95; Stop 119
ctgaaaaatatgctcttgaagctaa

SEQ ID NO: 169134 - DNA, 25 bp, Artificial
  probe
  misc_feature (1)..(25): SEQ ID NO: 6297; WAN024DS2_s_at; Start 130; Stop 154
ttggaatatgaagttcagggactag

SEQ ID NO: 169135 - DNA, 25 bp, Artificial
  probe
  misc_feature (1)..(25): SEQ ID NO: 6297; WAN024DS2_s_at; Start 125; Stop 149
ctgagttggaatatgaagttcaggg

SEQ ID NO: 169136 - DNA, 25 bp, Artificial
  probe
  misc_feature (1)..(25): SEQ ID NO: 6297; WAN024DS2_s_at; Start 364; Stop 388
gaacaatatcttgttgcagctaaaa

SEQ ID NO: 169137 - DNA, 25 bp, Artificial
  probe
  misc_feature (1)..(25): SEQ ID NO: 6297; WAN024DS2_s_at; Start 88; Stop 112
gtggatgctgaaaaatatgctcttg

SEQ ID NO: 169138 - DNA, 25 bp, Artificial
  probe
  misc_feature (1)..(25): SEQ ID NO: 6297; WAN024DS2_s_at; Start 363; Stop 387
tgaacaatatcttgttgcagctaaa

SEQ ID NO: 169139 - DNA, 25 bp, Artificial
  probe
  misc_feature (1)..(25): SEQ ID NO: 6297; WAN024DS2_s_at; Start 382; Stop 406
gctaaaaaagacttagatgctaaaa

SEQ ID NO: 169140 - DNA, 25 bp, Artificial
  probe
  misc_feature (1)..(25): SEQ ID NO: 6297; WAN024DS2_s_at; Start 129; Stop 153
gttggaatatgaagttcagggacta

SEQ ID NO: 169141 - DNA, 25 bp, Artificial
  probe
  misc_feature (1)..(25): SEQ ID NO: 7025; WAN024DS3_at; Start 978; Stop 1002
gctaattaaaaagctgggagacatt

SEQ ID NO: 169142 - DNA, 25 bp, Artificial
  probe
  misc_feature (1)..(25): SEQ ID NO: 7025; WAN024DS3_at; Start 304; Stop 328
gaagagtaccggaagaaaattgatg

SEQ ID NO: 169143 - DNA, 25 bp, Artificial
  probe
  misc_feature (1)..(25): SEQ ID NO: 7025; WAN024DS3_at; Start 588; Stop 612
accaaagacttcgaatgattcagtg

SEQ ID NO: 169144 - DNA, 25 bp, Artificial
  probe
  misc_feature (1)..(25): SEQ ID NO: 7025; WAN024DS3_at; Start 861; Stop 885
gcgaggaattgacttagaacgaacg

SEQ ID NO: 169145 - DNA, 25 bp, Artificial
  probe
  misc_feature (1)..(25): SEQ ID NO: 7025; WAN024DS3_at; Start 418; Stop 442
tccagctctgagcaaaatggtcatg

SEQ ID NO: 169146 - DNA, 25 bp, Artificial
  probe
  misc_feature (1)..(25): SEQ ID NO: 7025; WAN024DS3_at; Start 187; Stop 211
gctgctgaacaagctatcgttagtt

SEQ ID NO: 169147 - DNA, 25 bp, Artificial
  probe
  misc_feature (1)..(25): SEQ ID NO: 7025; WAN024DS3_at; Start 762; Stop 786
taaaaggatgtgtgatgaggcttcg

SEQ ID NO: 169148 - DNA, 25 bp, Artificial
  probe
  misc_feature (1)..(25): SEQ ID NO: 7025; WAN024DS3_at; Start 364; Stop 388
caagagggacaaacgaagctagatg

SEQ ID NO: 169149 - DNA, 25 bp, Artificial
  probe
  misc_feature (1)..(25): SEQ ID NO: 7025; WAN024DS3_at; Start 777; Stop 801
tgaggcttcgagtaaagaaaacgtg

SEQ ID NO: 169150 - DNA, 25 bp, Artificial
  probe
  misc_feature (1)..(25): SEQ ID NO: 7025; WAN024DS3_at; Start 721; Stop 745
gcagatcttttaagagaatccaaag

SEQ ID NO: 169151 - DNA, 25 bp, Artificial
  probe
  misc_feature (1)..(25): SEQ ID NO: 7025; WAN024DS3_at; Start 462; Stop 486
tcgaaatgatggtgtacagggagat

SEQ ID NO: 169152 - DNA, 25 bp, Artificial
  probe
  misc_feature (1)..(25): SEQ ID NO: 7025; WAN024DS3_at; Start 320; Stop 344
aaattgatggagcttctgatagaga

SEQ ID NO: 169153 - DNA, 25 bp, Artificial
  probe
  misc_feature (1)..(25): SEQ ID NO: 7025; WAN024DS3_at; Start 222; Stop 246
tatgactagtcttctaaatgatgga

SEQ ID NO: 169154 - DNA, 25 bp, Artificial
  probe
  misc_feature (1)..(25): SEQ ID NO: 7025; WAN024DS3_at; Start 478; Stop 502
cagggagatgattcttcagtagggc

SEQ ID NO: 169155 - DNA, 25 bp, Artificial
  probe
  misc_feature (1)..(25): SEQ ID NO: 7025; WAN024DS3_at; Start 646; Stop 670
gaaactgctaaaacaactttgaaca

SEQ ID NO: 169156 - DNA, 25 bp, Artificial
  probe
  misc_feature (1)..(25): SEQ ID NO: 7025; WAN024DS3_at; Start 350; Stop 374
tagagaaactgcagcaagagggaca

SEQ ID NO: 169157 - DNA, 25 bp, Artificial
  probe
  misc_feature (1)..(25): SEQ ID NO: 7025; WAN024DS3_at; Start 271; Stop 295
gaagagcttctcaagcgagctaagg

SEQ ID NO: 169158 - DNA, 25 bp, Artificial
  probe
  misc_feature (1)..(25): SEQ ID NO: 7025; WAN024DS3_at; Start 955; Stop 979
gagcaacatatcaatactgtagagc

SEQ ID NO: 169159 - DNA, 25 bp, Artificial
  probe
  misc_feature (1)..(25): SEQ ID NO: 7025; WAN024DS3_at; Start 541; Stop 565
gaatctgtaccaccaacagcatctg

SEQ ID NO: 169160 - DNA, 25 bp, Artificial
  probe
  misc_feature (1)..(25): SEQ ID NO: 7025; WAN024DS3_at; Start 604; Stop 628
gattcagtgaattctctggagagag

SEQ ID NO: 169161 - DNA, 25 bp, Artificial
  probe
  misc_feature (1)..(25): SEQ ID NO: 7025; WAN024DS3_at; Start 173; Stop 197
tagaacgtaggaaagctgctgaaca

SEQ ID NO: 169162 - DNA, 25 bp, Artificial
  probe
  misc_feature (1)..(25): SEQ ID NO: 7025; WAN024DS3_at; Start 557; Stop 581
cagcatctggtgagacggattcccc

SEQ ID NO: 169163 - DNA, 25 bp, Artificial
  probe
  misc_feature (1)..(25): SEQ ID NO: 7025; WAN024DS3_at; Start 450; Stop 474
taaggatccctctcgaaatgatggt

SEQ ID NO: 169164 - DNA, 25 bp, Artificial
  probe
  misc_feature (1)..(25): SEQ ID NO: 7025; WAN024DS3_at; Start 739; Stop 763
tccaaagaatctgtagagaagtata

SEQ ID NO: 169165 - DNA, 25 bp, Artificial
  probe
  misc_feature (1)..(25): SEQ ID NO: 7025; WAN024DS3_at; Start 511; Stop 535
cagccaggcgcatctaatcaaaaaa

SEQ ID NO: 169166 - DNA, 25 bp, Artificial
  probe
  misc_feature (1)..(25): SEQ ID NO: 7025; WAN024DS3_at; Start 377; Stop 401
cgaagctagatgaattggtagacaa

SEQ ID NO: 169167 - DNA, 25 bp, Artificial
  probe
  misc_feature (1)..(25): SEQ ID NO: 7025; WAN024DS3_at; Start 618; Stop 642
tctggagagagagcttaaagaagtt

SEQ ID NO: 169168 - DNA, 25 bp, Artificial
  probe
  misc_feature (1)..(25): SEQ ID NO: 7025; WAN024DS3_at; Start 492; Stop 516
ttcagtagggcaaggagaacagcca

SEQ ID NO: 169169 - DNA, 25 bp, Artificial
  probe
  misc_feature (1)..(25): SEQ ID NO: 7025; WAN024DS3_at; Start 991; Stop 1015
ctgggagacattaagcgaacgtatt

SEQ ID NO: 169170 - DNA, 25 bp, Artificial
  probe
  misc_feature (1)..(25): SEQ ID NO: 7025; WAN024DS3_at; Start 433; Stop 457
aatggtcatgctactcctaaggatc

SEQ ID NO: 169171 - DNA, 25 bp, Artificial
  probe
  misc_feature (1)..(25): SEQ ID NO: 7025; WAN024DS3_at; Start 685; Stop 709
cgtttaaaacaggagaatccaggag

SEQ ID NO: 169172 - DNA, 25 bp, Artificial
  probe
  misc_feature (1)..(25): SEQ ID NO: 7025; WAN024DS3_at; Start 256; Stop 280
tctgattctagatttgaagagcttc

SEQ ID NO: 169173 - DNA, 25 bp, Artificial
  probe
  misc_feature (1)..(25): SEQ ID NO: 7025; WAN024DS3_at; Start 289; Stop 313
gctaagggaattgtagaagagtacc

SEQ ID NO: 169174 - DNA, 25 bp, Artificial
  probe
  misc_feature (1)..(25): SEQ ID NO: 7025; WAN024DS3_at; Start 406; Stop 430
aaaaaagggttgtccagctctgagc

SEQ ID NO: 169175 - DNA, 25 bp, Artificial
  probe
  misc_feature (1)..(25): SEQ ID NO: 6296; WAN024DS4_at; Start 319; Stop 343
gatgaggctgagaaagagtataaga

SEQ ID NO: 169176 - DNA, 25 bp, Artificial
  probe
  misc_feature (1)..(25): SEQ ID NO: 6296; WAN024DS4_at; Start 304; Stop 328
gctaagaaagcaatggatgaggctg

SEQ ID NO: 169177 - DNA, 25 bp, Artificial
  probe
  misc_feature (1)..(25): SEQ ID NO: 6296; WAN024DS4_at; Start 116; Stop 140
aagctgctaagaaggaatatgagga

SEQ ID NO: 169178 - DNA, 25 bp, Artificial
  probe
  misc_feature (1)..(25): SEQ ID NO: 6296; WAN024DS4_at; Start 573; Stop 597
gaaactagaaaaagctctcaaagag

SEQ ID NO: 169179 - DNA, 25 bp, Artificial
  probe
  misc_feature (1)..(25): SEQ ID NO: 6296; WAN024DS4_at; Start 263; Stop 287
ttaaatatatacgtgaaaatgatcc

SEQ ID NO: 169180 - DNA, 25 bp, Artificial
  probe
  misc_feature (1)..(25): SEQ ID NO: 6296; WAN024DS4_at; Start 351; Stop 375
aacggaatttgctgaagttcgtgca

SEQ ID NO: 169181 - DNA, 25 bp, Artificial
  probe
  misc_feature (1)..(25): SEQ ID NO: 6296; WAN024DS4_at; Start 118; Stop 142
gctgctaagaaggaatatgaggacg

SEQ ID NO: 169182 - DNA, 25 bp, Artificial
  probe
  misc_feature (1)..(25): SEQ ID NO: 6296; WAN024DS4_at; Start 347; Stop 371
aacaaacggaatttgctgaagttcg

SEQ ID NO: 169183 - DNA, 25 bp, Artificial
  probe
  misc_feature (1)..(25): SEQ ID NO: 6296; WAN024DS4_at; Start 311; Stop 335
aagcaatggatgaggctgagaaaga

SEQ ID NO: 169184 - DNA, 25 bp, Artificial
  probe
  misc_feature (1)..(25): SEQ ID NO: 6296; WAN024DS4_at; Start 349; Stop 373
caaacggaatttgctgaagttcgtg

SEQ ID NO: 169185 - DNA, 25 bp, Artificial
  probe
  misc_feature (1)..(25): SEQ ID NO: 6296; WAN024DS4_at; Start 575; Stop 599
aactagaaaaagctctcaaagagat

SEQ ID NO: 169186 - DNA, 25 bp, Artificial
  probe
  misc_feature (1)..(25): SEQ ID NO: 6296; WAN024DS4_at; Start 322; Stop 346
gaggctgagaaagagtataagaaaa

SEQ ID NO: 169187 - DNA, 25 bp, Artificial
  probe
  misc_feature (1)..(25): SEQ ID NO: 6296; WAN024DS4_at; Start 266; Stop 290
aatatatacgtgaaaatgatccaac

SEQ ID NO: 169188 - DNA, 25 bp, Artificial
  probe
  misc_feature (1)..(25): SEQ ID NO: 6296; WAN024DS4_at; Start 134; Stop 158
atgaggacggaaaagctgctcagaa

SEQ ID NO: 169189 - DNA, 25 bp, Artificial
  probe
  misc_feature (1)..(25): SEQ ID NO: 6296; WAN024DS4_at; Start 131; Stop 155
aatatgaggacggaaaagctgctca

SEQ ID NO: 169190 - DNA, 25 bp, Artificial
  probe
  misc_feature (1)..(25): SEQ ID NO: 6296; WAN024DS4_at; Start 361; Stop 385
gctgaagttcgtgcaaaggtaattc

SEQ ID NO: 169191 - DNA, 25 bp, Artificial
  probe
  misc_feature (1)..(25): SEQ ID NO: 6296; WAN024DS4_at; Start 301; Stop 325
gaagctaagaaagcaatggatgagg

SEQ ID NO: 169192 - DNA, 25 bp, Artificial
  probe
  misc_feature (1)..(25): SEQ ID NO: 6296; WAN024DS4_at; Start 355; Stop 379
gaatttgctgaagttcgtgcaaagg

SEQ ID NO: 169193 - DNA, 25 bp, Artificial
  probe
  misc_feature (1)..(25): SEQ ID NO: 6296; WAN024DS4_at; Start 282; Stop 306
tgatccaacaaaaaaagctgaagct

SEQ ID NO: 169194 - DNA, 25 bp, Artificial
  probe
  misc_feature (1)..(25): SEQ ID NO: 6296; WAN024DS4_at; Start 120; Stop 144
tgctaagaaggaatatgaggacgga

SEQ ID NO: 169195 - DNA, 25 bp, Artificial
  probe
  misc_feature (1)..(25): SEQ ID NO: 6296; WAN024DS4_at; Start 363; Stop 387
tgaagttcgtgcaaaggtaattcct

SEQ ID NO: 169196 - DNA, 25 bp, Artificial
  probe
  misc_feature (1)..(25): SEQ ID NO: 6296; WAN024DS4_at; Start 309; Stop 333
gaaagcaatggatgaggctgagaaa

SEQ ID NO: 169197 - DNA, 25 bp, Artificial
  probe
  misc_feature (1)..(25): SEQ ID NO: 6296; WAN024DS4_at; Start 295; Stop 319
aaagctgaagctaagaaagcaatgg

SEQ ID NO: 169198 - DNA, 25 bp, Artificial
  probe
  misc_feature (1)..(25): SEQ ID NO: 6296; WAN024DS4_at; Start 559; Stop 583
gaacatgaagttcagaaactagaaa

SEQ ID NO: 169199 - DNA, 25 bp, Artificial
  probe
  misc_feature (1)..(25): SEQ ID NO: 6296; WAN024DS4_at; Start 550; Stop 574
gctgaattggaacatgaagttcaga

SEQ ID NO: 169200 - DNA, 25 bp, Artificial
  probe
  misc_feature (1)..(25): SEQ ID NO: 6296; WAN024DS4_at; Start 272; Stop 296
tacgtgaaaatgatccaacaaaaaa

SEQ ID NO: 169201 - DNA, 25 bp, Artificial
  probe
  misc_feature (1)..(25): SEQ ID NO: 6296; WAN024DS4_at; Start 306; Stop 330
taagaaagcaatggatgaggctgag

SEQ ID NO: 169202 - DNA, 25 bp, Artificial
  probe
  misc_feature (1)..(25): SEQ ID NO: 6296; WAN024DS4_at; Start 326; Stop 350
ctgagaaagagtataagaaaaaaca

SEQ ID NO: 169203 - DNA, 25 bp, Artificial
  probe
  misc_feature (1)..(25): SEQ ID NO: 6296; WAN024DS4_at; Start 133; Stop 157
tatgaggacggaaaagctgctcaga

SEQ ID NO: 169204 - DNA, 25 bp, Artificial
  probe
  misc_feature (1)..(25): SEQ ID NO: 6296; WAN024DS4_at; Start 553; Stop 577
gaattggaacatgaagttcagaaac

SEQ ID NO: 169205 - DNA, 25 bp, Artificial
  probe
  misc_feature (1)..(25): SEQ ID NO: 6296; WAN024DS4_at; Start 315; Stop 339
aatggatgaggctgagaaagagtat

SEQ ID NO: 169206 - DNA, 25 bp, Artificial
  probe
  misc_feature (1)..(25): SEQ ID NO: 6296; WAN024DS4_at; Start 268; Stop 292
tatatacgtgaaaatgatccaacaa

SEQ ID NO: 169207 - DNA, 25 bp, Artificial
  probe
  misc_feature (1)..(25): SEQ ID NO: 6296; WAN024DS4_at; Start 568; Stop 592
gttcagaaactagaaaaagctctca

SEQ ID NO: 169208 - DNA, 25 bp, Artificial
  probe
  misc_feature (1)..(25): SEQ ID NO: 6296; WAN024DS4_at; Start 298; Stop 322
gctgaagctaagaaagcaatggatg

SEQ ID NO: 169209 - DNA, 25 bp, Artificial
  probe
  misc_feature (1)..(25): SEQ ID NO: 6478; WAN024DS5_at; Start 271; Stop 295
gaaaaagcagcgtctgaagagatgg

SEQ ID NO: 169210 - DNA, 25 bp, Artificial
  probe
  misc_feature (1)..(25): SEQ ID NO: 6478; WAN024DS5_at; Start 351; Stop 375
caaagccgcaaaagacgcagcagat

SEQ ID NO: 169211 - DNA, 25 bp, Artificial
  probe
  misc_feature (1)..(25): SEQ ID NO: 6478; WAN024DS5_at; Start 325; Stop 349
tatctagcctatcaacaagctacag

SEQ ID NO: 169212 - DNA, 25 bp, Artificial
  probe
  misc_feature (1)..(25): SEQ ID NO: 6478; WAN024DS5_at; Start 300; Stop 324
ggcagtggcagcagttcaacaagcg

SEQ ID NO: 169213 - DNA, 25 bp, Artificial
  probe
  misc_feature (1)..(25): SEQ ID NO: 6478; WAN024DS5_at; Start 364; Stop 388
gacgcagcagataagatgatagatg

SEQ ID NO: 169214 - DNA, 25 bp, Artificial
  probe
  misc_feature (1)..(25): SEQ ID NO: 6478; WAN024DS5_at; Start 368; Stop 392
cagcagataagatgatagatgaagc

SEQ ID NO: 169215 - DNA, 25 bp, Artificial
  probe
  misc_feature (1)..(25): SEQ ID NO: 6478; WAN024DS5_at; Start 356; Stop 380
ccgcaaaagacgcagcagataagat

SEQ ID NO: 169216 - DNA, 25 bp, Artificial
  probe
  misc_feature (1)..(25): SEQ ID NO: 6478; WAN024DS5_at; Start 385; Stop 409
gatgaagctaagaaacgcgaagaag

SEQ ID NO: 169217 - DNA, 25 bp, Artificial
  probe
  misc_feature (1)..(25): SEQ ID NO: 6478; WAN024DS5_at; Start 400; Stop 424
cgcgaagaagaggcaaaaactaaat

SEQ ID NO: 169218 - DNA, 25 bp, Artificial
  probe
  misc_feature (1)..(25): SEQ ID NO: 6478; WAN024DS5_at; Start 331; Stop 355
gcctatcaacaagctacagacaaag

SEQ ID NO: 169219 - DNA, 25 bp, Artificial
  probe
  misc_feature (1)..(25): SEQ ID NO: 6478; WAN024DS5_at; Start 417; Stop 441
aactaaatttaatactgttcgagca

SEQ ID NO: 169220 - DNA, 25 bp, Artificial
  probe
  misc_feature (1)..(25): SEQ ID NO: 6478; WAN024DS5_at; Start 278; Stop 302
cagcgtctgaagagatggataaggc

SEQ ID NO: 169221 - DNA, 25 bp, Artificial
  probe
  misc_feature (1)..(25): SEQ ID NO: 6478; WAN024DS5_at; Start 393; Stop 417
taagaaacgcgaagaagaggcaaaa

SEQ ID NO: 169222 - DNA, 25 bp, Artificial
  probe
  misc_feature (1)..(25): SEQ ID NO: 6478; WAN024DS5_at; Start 256; Stop 280
gagaaagccgcgctagaaaaagcag

SEQ ID NO: 169223 - DNA, 25 bp, Artificial
  probe
  misc_feature (1)..(25): SEQ ID NO: 6478; WAN024DS5_at; Start 305; Stop 329
tggcagcagttcaacaagcgtatct

SEQ ID NO: 169224 - DNA, 25 bp, Artificial
  probe
  misc_feature (1)..(25): SEQ ID NO: 6478; WAN024DS5_at; Start 267; Stop 291
gctagaaaaagcagcgtctgaagag

SEQ ID NO: 169225 - DNA, 25 bp, Artificial
  probe
  misc_feature (1)..(25): SEQ ID NO: 6478; WAN024DS5_at; Start 370; Stop 394
gcagataagatgatagatgaagcta

SEQ ID NO: 169226 - DNA, 25 bp, Artificial
  probe
  misc_feature (1)..(25): SEQ ID NO: 6478; WAN024DS5_at; Start 359; Stop 383
caaaagacgcagcagataagatgat

SEQ ID NO: 169227 - DNA, 25 bp, Artificial
  probe
  misc_feature (1)..(25): SEQ ID NO: 6478; WAN024DS5_at; Start 302; Stop 326
cagtggcagcagttcaacaagcgta

SEQ ID NO: 169228 - DNA, 25 bp, Artificial
  probe
  misc_feature (1)..(25): SEQ ID NO: 6478; WAN024DS5_at; Start 293; Stop 317
tggataaggcagtggcagcagttca

SEQ ID NO: 169229 - DNA, 25 bp, Artificial
  probe
  misc_feature (1)..(25): SEQ ID NO: 6478; WAN024DS5_at; Start 262; Stop 286
gccgcgctagaaaaagcagcgtctg

SEQ ID NO: 169230 - DNA, 25 bp, Artificial
  probe
  misc_feature (1)..(25): SEQ ID NO: 6478; WAN024DS5_at; Start 281; Stop 305
cgtctgaagagatggataaggcagt

SEQ ID NO: 169231 - DNA, 25 bp, Artificial
  probe
  misc_feature (1)..(25): SEQ ID NO: 6478; WAN024DS5_at; Start 348; Stop 372
agacaaagccgcaaaagacgcagca

SEQ ID NO: 169232 - DNA, 25 bp, Artificial
  probe
  misc_feature (1)..(25): SEQ ID NO: 6478; WAN024DS5_at; Start 310; Stop 334
gcagttcaacaagcgtatctagcct

SEQ ID NO: 169233 - DNA, 25 bp, Artificial
  probe
  misc_feature (1)..(25): SEQ ID NO: 6478; WAN024DS5_at; Start 258; Stop 282
gaaagccgcgctagaaaaagcagcg

SEQ ID NO: 169234 - DNA, 25 bp, Artificial
  probe
  misc_feature (1)..(25): SEQ ID NO: 6478; WAN024DS5_at; Start 340; Stop 364
caagctacagacaaagccgcaaaag

SEQ ID NO: 169235 - DNA, 25 bp, Artificial
  probe
  misc_feature (1)..(25): SEQ ID NO: 6478; WAN024DS5_at; Start 343; Stop 367
gctacagacaaagccgcaaaagacg

SEQ ID NO: 169236 - DNA, 25 bp, Artificial
  probe
  misc_feature (1)..(25): SEQ ID NO: 6478; WAN024DS5_at; Start 336; Stop 360
tcaacaagctacagacaaagccgca

SEQ ID NO: 169237 - DNA, 25 bp, Artificial
  probe
  misc_feature (1)..(25): SEQ ID NO: 6478; WAN024DS5_at; Start 334; Stop 358
tatcaacaagctacagacaaagccg

SEQ ID NO: 169238 - DNA, 25 bp, Artificial
  probe
  misc_feature (1)..(25): SEQ ID NO: 6478; WAN024DS5_at; Start 308; Stop 332
cagcagttcaacaagcgtatctagc

SEQ ID NO: 169239 - DNA, 25 bp, Artificial
  probe
  misc_feature (1)..(25): SEQ ID NO: 6478; WAN024DS5_at; Start 421; Stop 445
aaatttaatactgttcgagcaatgg

SEQ ID NO: 169240 - DNA, 25 bp, Artificial
  probe
  misc_feature (1)..(25): SEQ ID NO: 6478; WAN024DS5_at; Start 319; Stop 343
caagcgtatctagcctatcaacaag

SEQ ID NO: 169241 - DNA, 25 bp, Artificial
  probe
  misc_feature (1)..(25): SEQ ID NO: 6478; WAN024DS5_at; Start 391; Stop 415
gctaagaaacgcgaagaagaggcaa

SEQ ID NO: 169242 - DNA, 25 bp, Artificial
  probe
  misc_feature (1)..(25): SEQ ID NO: 6478; WAN024DS5_at; Start 297; Stop 321
taaggcagtggcagcagttcaacaa

SEQ ID NO: 169243 - DNA, 25 bp, Artificial
  probe
  misc_feature (1)..(25): SEQ ID NO: 6480; WAN024DS6_at; Start 139; Stop 163
gatgcagcaatggaaaaatataaag

SEQ ID NO: 169244 - DNA, 25 bp, Artificial
  probe
  misc_feature (1)..(25): SEQ ID NO: 6480; WAN024DS6_at; Start 367; Stop 391
gaaatgaacgaagctaagcaagagg

SEQ ID NO: 169245 - DNA, 25 bp, Artificial
  probe
  misc_feature (1)..(25): SEQ ID NO: 6480; WAN024DS6_at; Start 339; Stop 363
taaggaaaaaatagctaaagctgag

SEQ ID NO: 169246 - DNA, 25 bp, Artificial
  probe
  misc_feature (1)..(25): SEQ ID NO: 6480; WAN024DS6_at; Start 375; Stop 399
cgaagctaagcaagaggaagacaaa

SEQ ID NO: 169247 - DNA, 25 bp, Artificial
  probe
  misc_feature (1)..(25): SEQ ID NO: 6480; WAN024DS6_at; Start 265; Stop 289
gaaagacaacaagctgcaactctga

SEQ ID NO: 169248 - DNA, 25 bp, Artificial
  probe
  misc_feature (1)..(25): SEQ ID NO: 6480; WAN024DS6_at; Start 258; Stop 282
ggcttctgaaagacaacaagctgca

SEQ ID NO: 169249 - DNA, 25 bp, Artificial
  probe
  misc_feature (1)..(25): SEQ ID NO: 6480; WAN024DS6_at; Start 363; Stop 387
gaaagaaatgaacgaagctaagcaa

SEQ ID NO: 169250 - DNA, 25 bp, Artificial
  probe
  misc_feature (1)..(25): SEQ ID NO: 6480; WAN024DS6_at; Start 280; Stop 304
gcaactctgaaatatcaactaaagt

SEQ ID NO: 169251 - DNA, 25 bp, Artificial
  probe
  misc_feature (1)..(25): SEQ ID NO: 6480; WAN024DS6_at; Start 427; Stop 451
gcaaaagtaattcctagcgatagag

SEQ ID NO: 169252 - DNA, 25 bp, Artificial
  probe
  misc_feature (1)..(25): SEQ ID NO: 6480; WAN024DS6_at; Start 535; Stop 559
aaagtggatgcagccaaacaaaaag

SEQ ID NO: 169253 - DNA, 25 bp, Artificial
  probe
  misc_feature (1)..(25): SEQ ID NO: 6480; WAN024DS6_at; Start 156; Stop 180
atataaagctgctgaggaagactta

SEQ ID NO: 169254 - DNA, 25 bp, Artificial
  probe
  misc_feature (1)..(25): SEQ ID NO: 6480; WAN024DS6_at; Start 149; Stop 173
tggaaaaatataaagctgctgagga

SEQ ID NO: 169255 - DNA, 25 bp, Artificial
  probe
  misc_feature (1)..(25): SEQ ID NO: 6480; WAN024DS6_at; Start 262; Stop 286
tctgaaagacaacaagctgcaactc

SEQ ID NO: 169256 - DNA, 25 bp, Artificial
  probe
  misc_feature (1)..(25): SEQ ID NO: 6480; WAN024DS6_at; Start 372; Stop 396
gaacgaagctaagcaagaggaagac

SEQ ID NO: 169257 - DNA, 25 bp, Artificial
  probe
  misc_feature (1)..(25): SEQ ID NO: 6480; WAN024DS6_at; Start 301; Stop 325
aagttgcgtgaatatcttaaatata

SEQ ID NO: 169258 - DNA, 25 bp, Artificial
  probe
  misc_feature (1)..(25): SEQ ID NO: 6480; WAN024DS6_at; Start 277; Stop 301
gctgcaactctgaaatatcaactaa

SEQ ID NO: 169259 - DNA, 25 bp, Artificial
  probe
  misc_feature (1)..(25): SEQ ID NO: 6480; WAN024DS6_at; Start 439; Stop 463
cctagcgatagagaattagaaaaaa

SEQ ID NO: 169260 - DNA, 25 bp, Artificial
  probe
  misc_feature (1)..(25): SEQ ID NO: 6480; WAN024DS6_at; Start 533; Stop 557
aaaaagtggatgcagccaaacaaaa

SEQ ID NO: 169261 - DNA, 25 bp, Artificial
  probe
  misc_feature (1)..(25): SEQ ID NO: 6480; WAN024DS6_at; Start 429; Stop 453
aaaagtaattcctagcgatagagaa

SEQ ID NO: 169262 - DNA, 25 bp, Artificial
  probe
  misc_feature (1)..(25): SEQ ID NO: 6480; WAN024DS6_at; Start 405; Stop 429
ggcaaaccttaataaagttctcgca

SEQ ID NO: 169263 - DNA, 25 bp, Artificial
  probe
  misc_feature (1)..(25): SEQ ID NO: 6480; WAN024DS6_at; Start 253; Stop 277
gaagaggcttctgaaagacaacaag

SEQ ID NO: 169264 - DNA, 25 bp, Artificial
  probe
  misc_feature (1)..(25): SEQ ID NO: 6480; WAN024DS6_at; Start 385; Stop 409
caagaggaagacaaagaaaaggcaa

SEQ ID NO: 169265 - DNA, 25 bp, Artificial
  probe
  misc_feature (1)..(25): SEQ ID NO: 6480; WAN024DS6_at; Start 307; Stop 331
cgtgaatatcttaaatatatacaag

SEQ ID NO: 169266 - DNA, 25 bp, Artificial
  probe
  misc_feature (1)..(25): SEQ ID NO: 6480; WAN024DS6_at; Start 153; Stop 177
aaaatataaagctgctgaggaagac

SEQ ID NO: 169267 - DNA, 25 bp, Artificial
  probe
  misc_feature (1)..(25): SEQ ID NO: 6480; WAN024DS6_at; Start 443; Stop 467
gcgatagagaattagaaaaaactag

SEQ ID NO: 169268 - DNA, 25 bp, Artificial
  probe
  misc_feature (1)..(25): SEQ ID NO: 6480; WAN024DS6_at; Start 467; Stop 491
gacaagaagcagaaaaggctaaaaa

SEQ ID NO: 169269 - DNA, 25 bp, Artificial
  probe
  misc_feature (1)..(25): SEQ ID NO: 6480; WAN024DS6_at; Start 461; Stop 485
aaactagacaagaagcagaaaaggc

SEQ ID NO: 169270 - DNA, 25 bp, Artificial
  probe
  misc_feature (1)..(25): SEQ ID NO: 6480; WAN024DS6_at; Start 457; Stop 481
gaaaaaactagacaagaagcagaaa

SEQ ID NO: 169271 - DNA, 25 bp, Artificial
  probe
  misc_feature (1)..(25): SEQ ID NO: 6480; WAN024DS6_at; Start 146; Stop 170
caatggaaaaatataaagctgctga

SEQ ID NO: 169272 - DNA, 25 bp, Artificial
  probe
  misc_feature (1)..(25): SEQ ID NO: 6480; WAN024DS6_at; Start 267; Stop 291
aagacaacaagctgcaactctgaaa

SEQ ID NO: 169273 - DNA, 25 bp, Artificial
  probe
  misc_feature (1)..(25): SEQ ID NO: 6480; WAN024DS6_at; Start 343; Stop 367
gaaaaaatagctaaagctgagaaag

SEQ ID NO: 169274 - DNA, 25 bp, Artificial
  probe
  misc_feature (1)..(25): SEQ ID NO: 6480; WAN024DS6_at; Start 359; Stop 383
ctgagaaagaaatgaacgaagctaa

SEQ ID NO: 169275 - DNA, 25 bp, Artificial
  probe
  misc_feature (1)..(25): SEQ ID NO: 6480; WAN024DS6_at; Start 379; Stop 403
gctaagcaagaggaagacaaagaaa

SEQ ID NO: 169276 - DNA, 25 bp, Artificial
  probe
  misc_feature (1)..(25): SEQ ID NO: 6480; WAN024DS6_at; Start 243; Stop 267
gaaagaaacagaagaggcttctgaa

SEQ ID NO: 169277 - DNA, 25 bp, Artificial
  probe
  misc_feature (1)..(25): SEQ ID NO: 6472; WAN024DS7_at; Start 326; Stop 350
caggcgacagaagtaagattcagaa

SEQ ID NO: 169278 - DNA, 25 bp, Artificial
  probe
  misc_feature (1)..(25): SEQ ID NO: 6472; WAN024DS7_at; Start 319; Stop 343
cagaaaacaggcgacagaagtaaga

SEQ ID NO: 169279 - DNA, 25 bp, Artificial
  probe
  misc_feature (1)..(25): SEQ ID NO: 6472; WAN024DS7_at; Start 277; Stop 301
aaagcaaatctgcagtatcaactaa

SEQ ID NO: 169280 - DNA, 25 bp, Artificial
  probe
  misc_feature (1)..(25): SEQ ID NO: 6472; WAN024DS7_at; Start 829; Stop 853
gcattatatcttgaagctgcagaaa

SEQ ID NO: 169281 - DNA, 25 bp, Artificial
  probe
  misc_feature (1)..(25): SEQ ID NO: 6472; WAN024DS7_at; Start 397; Stop 421
tttgataaggttagaggaaaggtga

SEQ ID NO: 169282 - DNA, 25 bp, Artificial
  probe
  misc_feature (1)..(25): SEQ ID NO: 6472; WAN024DS7_at; Start 364; Stop 388
gctgaaaaaaaacataagaatgcaa

SEQ ID NO: 169283 - DNA, 25 bp, Artificial
  probe
  misc_feature (1)..(25): SEQ ID NO: 6472; WAN024DS7_at; Start 337; Stop 361
agtaagattcagaaagaaatggagg

SEQ ID NO: 169284 - DNA, 25 bp, Artificial
  probe
  misc_feature (1)..(25): SEQ ID NO: 6472; WAN024DS7_at; Start 305; Stop 329
tgcgtgaatatattcagaaaacagg

SEQ ID NO: 169285 - DNA, 25 bp, Artificial
  probe
  misc_feature (1)..(25): SEQ ID NO: 6472; WAN024DS7_at; Start 823; Stop 847
tattctgcattatatcttgaagctg

SEQ ID NO: 169286 - DNA, 25 bp, Artificial
  probe
  misc_feature (1)..(25): SEQ ID NO: 6472; WAN024DS7_at; Start 438; Stop 462
gttaaaagagactagacgaaaagca

SEQ ID NO: 169287 - DNA, 25 bp, Artificial
  probe
  misc_feature (1)..(25): SEQ ID NO: 6472; WAN024DS7_at; Start 408; Stop 432
tagaggaaaggtgattcctagcgcg

SEQ ID NO: 169288 - DNA, 25 bp, Artificial
  probe
  misc_feature (1)..(25): SEQ ID NO: 6472; WAN024DS7_at; Start 311; Stop 335
aatatattcagaaaacaggcgacag

SEQ ID NO: 169289 - DNA, 25 bp, Artificial
  probe
  misc_feature (1)..(25): SEQ ID NO: 6472; WAN024DS7_at; Start 280; Stop 304
gcaaatctgcagtatcaactaaagt

SEQ ID NO: 169290 - DNA, 25 bp, Artificial
  probe
  misc_feature (1)..(25): SEQ ID NO: 6472; WAN024DS7_at; Start 315; Stop 339
tattcagaaaacaggcgacagaagt

SEQ ID NO: 169291 - DNA, 25 bp, Artificial
  probe
  misc_feature (1)..(25): SEQ ID NO: 6472; WAN024DS7_at; Start 358; Stop 382
gaggaagctgaaaaaaaacataaga

SEQ ID NO: 169292 - DNA, 25 bp, Artificial
  probe
  misc_feature (1)..(25): SEQ ID NO: 6472; WAN024DS7_at; Start 407; Stop 431
ttagaggaaaggtgattcctagcgc

SEQ ID NO: 169293 - DNA, 25 bp, Artificial
  probe
  misc_feature (1)..(25): SEQ ID NO: 6472; WAN024DS7_at; Start 330; Stop 354
cgacagaagtaagattcagaaagaa

SEQ ID NO: 169294 - DNA, 25 bp, Artificial
  probe
  misc_feature (1)..(25): SEQ ID NO: 6472; WAN024DS7_at; Start 309; Stop 333
tgaatatattcagaaaacaggcgac

SEQ ID NO: 169295 - DNA, 25 bp, Artificial
  probe
  misc_feature (1)..(25): SEQ ID NO: 6472; WAN024DS7_at; Start 333; Stop 357
cagaagtaagattcagaaagaaatg

SEQ ID NO: 169296 - DNA, 25 bp, Artificial
  probe
  misc_feature (1)..(25): SEQ ID NO: 6472; WAN024DS7_at; Start 826; Stop 850
tctgcattatatcttgaagctgcag

SEQ ID NO: 169297 - DNA, 25 bp, Artificial
  probe
  misc_feature (1)..(25): SEQ ID NO: 6472; WAN024DS7_at; Start 433; Stop 457
gaagagttaaaagagactagacgaa

SEQ ID NO: 169298 - DNA, 25 bp, Artificial
  probe
  misc_feature (1)..(25): SEQ ID NO: 6472; WAN024DS7_at; Start 837; Stop 861
tcttgaagctgcagaaaaagattta

SEQ ID NO: 169299 - DNA, 25 bp, Artificial
  probe
  misc_feature (1)..(25): SEQ ID NO: 6472; WAN024DS7_at; Start 282; Stop 306
aaatctgcagtatcaactaaagttg

SEQ ID NO: 169300 - DNA, 25 bp, Artificial
  probe
  misc_feature (1)..(25): SEQ ID NO: 6472; WAN024DS7_at; Start 322; Stop 346
aaaacaggcgacagaagtaagattc

SEQ ID NO: 169301 - DNA, 25 bp, Artificial
  probe
  misc_feature (1)..(25): SEQ ID NO: 6472; WAN024DS7_at; Start 274; Stop 298
caaaaagcaaatctgcagtatcaac

SEQ ID NO: 169302 - DNA, 25 bp, Artificial
  probe
  misc_feature (1)..(25): SEQ ID NO: 6472; WAN024DS7_at; Start 833; Stop 857
tatatcttgaagctgcagaaaaaga

SEQ ID NO: 169303 - DNA, 25 bp, Artificial
  probe
  misc_feature (1)..(25): SEQ ID NO: 6472; WAN024DS7_at; Start 400; Stop 424
gataaggttagaggaaaggtgattc

SEQ ID NO: 169304 - DNA, 25 bp, Artificial
  probe
  misc_feature (1)..(25): SEQ ID NO: 6472; WAN024DS7_at; Start 328; Stop 352
ggcgacagaagtaagattcagaaag

SEQ ID NO: 169305 - DNA, 25 bp, Artificial
  probe
  misc_feature (1)..(25): SEQ ID NO: 6472; WAN024DS7_at; Start 411; Stop 435
aggaaaggtgattcctagcgcggaa

SEQ ID NO: 169306 - DNA, 25 bp, Artificial
  probe
  misc_feature (1)..(25): SEQ ID NO: 6472; WAN024DS7_at; Start 321; Stop 345
gaaaacaggcgacagaagtaagatt

SEQ ID NO: 169307 - DNA, 25 bp, Artificial
  probe
  misc_feature (1)..(25): SEQ ID NO: 6472; WAN024DS7_at; Start 324; Stop 348
aacaggcgacagaagtaagattcag

SEQ ID NO: 169308 - DNA, 25 bp, Artificial
  probe
  misc_feature (1)..(25): SEQ ID NO: 6472; WAN024DS7_at; Start 271; Stop 295
gaacaaaaagcaaatctgcagtatc

SEQ ID NO: 169309 - DNA, 25 bp, Artificial
  probe
  misc_feature (1)..(25): SEQ ID NO: 6472; WAN024DS7_at; Start 431; Stop 455
cggaagagttaaaagagactagacg

SEQ ID NO: 169310 - DNA, 25 bp, Artificial
  probe
  misc_feature (1)..(25): SEQ ID NO: 6472; WAN024DS7_at; Start 313; Stop 337
tatattcagaaaacaggcgacagaa

SEQ ID NO: 169311 - DNA, 25 bp, Artificial
  probe
  misc_feature (1)..(25): SEQ ID NO: 6479; WAN024DS8_at; Start 376; Stop 400
gcagatgcgcaaaaaaaaatagatg

SEQ ID NO: 169312 - DNA, 25 bp, Artificial
  probe
  misc_feature (1)..(25): SEQ ID NO: 6479; WAN024DS8_at; Start 507; Stop 531
agctaaagcagaagaggcagtggct

SEQ ID NO: 169313 - DNA, 25 bp, Artificial
  probe
  misc_feature (1)..(25): SEQ ID NO: 6479; WAN024DS8_at; Start 323; Stop 347
tagaatatggagaagctaataagaa

SEQ ID NO: 169314 - DNA, 25 bp, Artificial
  probe
  misc_feature (1)..(25): SEQ ID NO: 6479; WAN024DS8_at; Start 354; Stop 378
taaggaccgtgagaaaaaattagca

SEQ ID NO: 169315 - DNA, 25 bp, Artificial
  probe
  misc_feature (1)..(25): SEQ ID NO: 6479; WAN024DS8_at; Start 524; Stop 548
cagtggctaaggaaaaatctgataa

SEQ ID NO: 169316 - DNA, 25 bp, Artificial
  probe
  misc_feature (1)..(25): SEQ ID NO: 6479; WAN024DS8_at; Start 522; Stop 546
ggcagtggctaaggaaaaatctgat

SEQ ID NO: 169317 - DNA, 25 bp, Artificial
  probe
  misc_feature (1)..(25): SEQ ID NO: 6479; WAN024DS8_at; Start 515; Stop 539
cagaagaggcagtggctaaggaaaa

SEQ ID NO: 169318 - DNA, 25 bp, Artificial
  probe
  misc_feature (1)..(25): SEQ ID NO: 6479; WAN024DS8_at; Start 416; Stop 440
taaccaaagctaaaaatgagtttca

SEQ ID NO: 169319 - DNA, 25 bp, Artificial
  probe
  misc_feature (1)..(25): SEQ ID NO: 6479; WAN024DS8_at; Start 282; Stop 306
gaaggtaaacgatgctactttagag

SEQ ID NO: 169320 - DNA, 25 bp, Artificial
  probe
  misc_feature (1)..(25): SEQ ID NO: 6479; WAN024DS8_at; Start 366; Stop 390
gaaaaaattagcagatgcgcaaaaa

SEQ ID NO: 169321 - DNA, 25 bp, Artificial
  probe
  misc_feature (1)..(25): SEQ ID NO: 6479; WAN024DS8_at; Start 397; Stop 421
gatgaagcgcaggaaaaactaacca

SEQ ID NO: 169322 - DNA, 25 bp, Artificial
  probe
  misc_feature (1)..(25): SEQ ID NO: 6479; WAN024DS8_at; Start 277; Stop 301
tctaggaaggtaaacgatgctactt

SEQ ID NO: 169323 - DNA, 25 bp, Artificial
  probe
  misc_feature (1)..(25): SEQ ID NO: 6479; WAN024DS8_at; Start 510; Stop 534
taaagcagaagaggcagtggctaag

SEQ ID NO: 169324 - DNA, 25 bp, Artificial
  probe
  misc_feature (1)..(25): SEQ ID NO: 6479; WAN024DS8_at; Start 252; Stop 276
gaaaggcgcgctagaagaagaaact

SEQ ID NO: 169325 - DNA, 25 bp, Artificial
  probe
  misc_feature (1)..(25): SEQ ID NO: 6479; WAN024DS8_at; Start 256; Stop 280
ggcgcgctagaagaagaaacttcta

SEQ ID NO: 169326 - DNA, 25 bp, Artificial
  probe
  misc_feature (1)..(25): SEQ ID NO: 6479; WAN024DS8_at; Start 391; Stop 415
aaaatagatgaagcgcaggaaaaac

SEQ ID NO: 169327 - DNA, 25 bp, Artificial
  probe
  misc_feature (1)..(25): SEQ ID NO: 6479; WAN024DS8_at; Start 433; Stop 457
gagtttcaatctgttcgagcaatgg

SEQ ID NO: 169328 - DNA, 25 bp, Artificial
  probe
  misc_feature (1)..(25): SEQ ID NO: 6479; WAN024DS8_at; Start 295; Stop 319
gctactttagaggtacaaaacgcat

SEQ ID NO: 169329 - DNA, 25 bp, Artificial
  probe
  misc_feature (1)..(25): SEQ ID NO: 6479; WAN024DS8_at; Start 310; Stop 334
caaaacgcatatgtagaatatggag

SEQ ID NO: 169330 - DNA, 25 bp, Artificial
  probe
  misc_feature (1)..(25): SEQ ID NO: 6479; WAN024DS8_at; Start 363; Stop 387
tgagaaaaaattagcagatgcgcaa

SEQ ID NO: 169331 - DNA, 25 bp, Artificial
  probe
  misc_feature (1)..(25): SEQ ID NO: 6479; WAN024DS8_at; Start 518; Stop 542
aagaggcagtggctaaggaaaaatc

SEQ ID NO: 169332 - DNA, 25 bp, Artificial
  probe
  misc_feature (1)..(25): SEQ ID NO: 6479; WAN024DS8_at; Start 287; Stop 311
taaacgatgctactttagaggtaca

SEQ ID NO: 169333 - DNA, 25 bp, Artificial
  probe
  misc_feature (1)..(25): SEQ ID NO: 6479; WAN024DS8_at; Start 575; Stop 599
aaaaaagagtagaggcagaagaagc

SEQ ID NO: 169334 - DNA, 25 bp, Artificial
  probe
  misc_feature (1)..(25): SEQ ID NO: 6479; WAN024DS8_at; Start 403; Stop 427
gcgcaggaaaaactaaccaaagcta

SEQ ID NO: 169335 - DNA, 25 bp, Artificial
  probe
  misc_feature (1)..(25): SEQ ID NO: 6479; WAN024DS8_at; Start 563; Stop 587
tagaagtagcgaaaaaaagagtaga

SEQ ID NO: 169336 - DNA, 25 bp, Artificial
  probe
  misc_feature (1)..(25): SEQ ID NO: 6479; WAN024DS8_at; Start 273; Stop 297
aacttctaggaaggtaaacgatgct

SEQ ID NO: 169337 - DNA, 25 bp, Artificial
  probe
  misc_feature (1)..(25): SEQ ID NO: 6479; WAN024DS8_at; Start 360; Stop 384
ccgtgagaaaaaattagcagatgcg

SEQ ID NO: 169338 - DNA, 25 bp, Artificial
  probe
  misc_feature (1)..(25): SEQ ID NO: 6479; WAN024DS8_at; Start 399; Stop 423
tgaagcgcaggaaaaactaaccaaa

SEQ ID NO: 169339 - DNA, 25 bp, Artificial
  probe
  misc_feature (1)..(25): SEQ ID NO: 6479; WAN024DS8_at; Start 429; Stop 453
aaatgagtttcaatctgttcgagca

SEQ ID NO: 169340 - DNA, 25 bp, Artificial
  probe
  misc_feature (1)..(25): SEQ ID NO: 6479; WAN024DS8_at; Start 315; Stop 339
cgcatatgtagaatatggagaagct

SEQ ID NO: 169341 - DNA, 25 bp, Artificial
  probe
  misc_feature (1)..(25): SEQ ID NO: 6479; WAN024DS8_at; Start 292; Stop 316
gatgctactttagaggtacaaaacg

SEQ ID NO: 169342 - DNA, 25 bp, Artificial
  probe
  misc_feature (1)..(25): SEQ ID NO: 6479; WAN024DS8_at; Start 329; Stop 353
atggagaagctaataagaaaaaagg

SEQ ID NO: 169343 - DNA, 25 bp, Artificial
  probe
  misc_feature (1)..(25): SEQ ID NO: 6479; WAN024DS8_at; Start 258; Stop 282
cgcgctagaagaagaaacttctagg

SEQ ID NO: 169344 - DNA, 25 bp, Artificial
  probe
  misc_feature (1)..(25): SEQ ID NO: 6479; WAN024DS8_at; Start 299; Stop 323
ctttagaggtacaaaacgcatatgt

SEQ ID NO: 169345 - DNA, 25 bp, Artificial
  probe
  misc_feature (1)..(25): SEQ ID NO: 6476; WAN024DS9_at; Start 162; Stop 186
tgacgctgctaagaaggattacgac

SEQ ID NO: 169346 - DNA, 25 bp, Artificial
  probe
  misc_feature (1)..(25): SEQ ID NO: 6476; WAN024DS9_at; Start 332; Stop 356
taactgctatcagaaatcacaacga

SEQ ID NO: 169347 - DNA, 25 bp, Artificial
  probe
  misc_feature (1)..(25): SEQ ID NO: 6476; WAN024DS9_at; Start 149; Stop 173
caaaagcaaaatatgacgctgctaa

SEQ ID NO: 169348 - DNA, 25 bp, Artificial
  probe
  misc_feature (1)..(25): SEQ ID NO: 6476; WAN024DS9_at; Start 457; Stop 481
cctgaaccagatgagttagctaaaa

SEQ ID NO: 169349 - DNA, 25 bp, Artificial
  probe
  misc_feature (1)..(25): SEQ ID NO: 6476; WAN024DS9_at; Start 460; Stop 484
gaaccagatgagttagctaaaactc

SEQ ID NO: 169350 - DNA, 25 bp, Artificial
  probe
  misc_feature (1)..(25): SEQ ID NO: 6476; WAN024DS9_at; Start 152; Stop 176
aagcaaaatatgacgctgctaagaa

SEQ ID NO: 169351 - DNA, 25 bp, Artificial
  probe
  misc_feature (1)..(25): SEQ ID NO: 6476; WAN024DS9_at; Start 459; Stop 483
tgaaccagatgagttagctaaaact

SEQ ID NO: 169352 - DNA, 25 bp, Artificial
  probe
  misc_feature (1)..(25): SEQ ID NO: 6476; WAN024DS9_at; Start 333; Stop 357
aactgctatcagaaatcacaacgaa

SEQ ID NO: 169353 - DNA, 25 bp, Artificial
  probe
  misc_feature (1)..(25): SEQ ID NO: 6476; WAN024DS9_at; Start 464; Stop 488
cagatgagttagctaaaactcagaa

SEQ ID NO: 169354 - DNA, 25 bp, Artificial
  probe
  misc_feature (1)..(25): SEQ ID NO: 6476; WAN024DS9_at; Start 427; Stop 451
tttgatactattcaaacaacaatag

SEQ ID NO: 169355 - DNA, 25 bp, Artificial
  probe
  misc_feature (1)..(25): SEQ ID NO: 6476; WAN024DS9_at; Start 145; Stop 169
gaagcaaaagcaaaatatgacgctg

SEQ ID NO: 169356 - DNA, 25 bp, Artificial
  probe
  misc_feature (1)..(25): SEQ ID NO: 6476; WAN024DS9_at; Start 163; Stop 187
gacgctgctaagaaggattacgacg

SEQ ID NO: 169357 - DNA, 25 bp, Artificial
  probe
  misc_feature (1)..(25): SEQ ID NO: 6476; WAN024DS9_at; Start 164; Stop 188
acgctgctaagaaggattacgacga

SEQ ID NO: 169358 - DNA, 25 bp, Artificial
  probe
  misc_feature (1)..(25): SEQ ID NO: 6476; WAN024DS9_at; Start 328; Stop 352
tatataactgctatcagaaatcaca

SEQ ID NO: 169359 - DNA, 25 bp, Artificial
  probe
  misc_feature (1)..(25): SEQ ID NO: 6476; WAN024DS9_at; Start 165; Stop 189
cgctgctaagaaggattacgacgaa

SEQ ID NO: 169360 - DNA, 25 bp, Artificial
  probe
  misc_feature (1)..(25): SEQ ID NO: 6476; WAN024DS9_at; Start 151; Stop 175
aaagcaaaatatgacgctgctaaga

SEQ ID NO: 169361 - DNA, 25 bp, Artificial
  probe
  misc_feature (1)..(25): SEQ ID NO: 6476; WAN024DS9_at; Start 362; Stop 386
ggaaaaaatccgcagaagaagctga

SEQ ID NO: 169362 - DNA, 25 bp, Artificial
  probe
  misc_feature (1)..(25): SEQ ID NO: 6476; WAN024DS9_at; Start 466; Stop 490
gatgagttagctaaaactcagaaaa

SEQ ID NO: 169363 - DNA, 25 bp, Artificial
  probe
  misc_feature (1)..(25): SEQ ID NO: 6476; WAN024DS9_at; Start 463; Stop 487
ccagatgagttagctaaaactcaga

SEQ ID NO: 169364 - DNA, 25 bp, Artificial
  probe
  misc_feature (1)..(25): SEQ ID NO: 6476; WAN024DS9_at; Start 325; Stop 349
gattatataactgctatcagaaatc

SEQ ID NO: 169365 - DNA, 25 bp, Artificial
  probe
  misc_feature (1)..(25): SEQ ID NO: 6476; WAN024DS9_at; Start 359; Stop 383
gtgggaaaaaatccgcagaagaagc

SEQ ID NO: 169366 - DNA, 25 bp, Artificial
  probe
  misc_feature (1)..(25): SEQ ID NO: 6476; WAN024DS9_at; Start 161; Stop 185
atgacgctgctaagaaggattacga

SEQ ID NO: 169367 - DNA, 25 bp, Artificial
  probe
  misc_feature (1)..(25): SEQ ID NO: 6476; WAN024DS9_at; Start 430; Stop 454
gatactattcaaacaacaatagtag

SEQ ID NO: 169368 - DNA, 25 bp, Artificial
  probe
  misc_feature (1)..(25): SEQ ID NO: 6476; WAN024DS9_at; Start 148; Stop 172
gcaaaagcaaaatatgacgctgcta

SEQ ID NO: 169369 - DNA, 25 bp, Artificial
  probe
  misc_feature (1)..(25): SEQ ID NO: 6476; WAN024DS9_at; Start 159; Stop 183
atatgacgctgctaagaaggattac

SEQ ID NO: 169370 - DNA, 25 bp, Artificial
  probe
  misc_feature (1)..(25): SEQ ID NO: 6476; WAN024DS9_at; Start 471; Stop 495
gttagctaaaactcagaaaaaagca

SEQ ID NO: 169371 - DNA, 25 bp, Artificial
  probe
  misc_feature (1)..(25): SEQ ID NO: 6476; WAN024DS9_at; Start 330; Stop 354
tataactgctatcagaaatcacaac

SEQ ID NO: 169372 - DNA, 25 bp, Artificial
  probe
  misc_feature (1)..(25): SEQ ID NO: 6476; WAN024DS9_at; Start 363; Stop 387
gaaaaaatccgcagaagaagctgag

SEQ ID NO: 169373 - DNA, 25 bp, Artificial
  probe
  misc_feature (1)..(25): SEQ ID NO: 6476; WAN024DS9_at; Start 150; Stop 174
aaaagcaaaatatgacgctgctaag

SEQ ID NO: 169374 - DNA, 25 bp, Artificial
  probe
  misc_feature (1)..(25): SEQ ID NO: 6476; WAN024DS9_at; Start 146; Stop 170
aagcaaaagcaaaatatgacgctgc

SEQ ID NO: 169375 - DNA, 25 bp, Artificial
  probe
  misc_feature (1)..(25): SEQ ID NO: 6476; WAN024DS9_at; Start 160; Stop 184
tatgacgctgctaagaaggattacg

SEQ ID NO: 169376 - DNA, 25 bp, Artificial
  probe
  misc_feature (1)..(25): SEQ ID NO: 6476; WAN024DS9_at; Start 334; Stop 358
actgctatcagaaatcacaacgaaa

SEQ ID NO: 169377 - DNA, 25 bp, Artificial
  probe
  misc_feature (1)..(25): SEQ ID NO: 6476; WAN024DS9_at; Start 472; Stop 496
ttagctaaaactcagaaaaaagcag

SEQ ID NO: 169378 - DNA, 25 bp, Artificial
  probe
  misc_feature (1)..(25): SEQ ID NO: 6476; WAN024DS9_at; Start 458; Stop 482
ctgaaccagatgagttagctaaaac

SEQ ID NO: 169379 - DNA, 25 bp, Artificial
  probe
  misc_feature (1)..(25): SEQ ID NO: 1179; WAN024DSA_at; Start 283; Stop 307
aaattgaatgatgtggcgcttgttg

SEQ ID NO: 169380 - DNA, 25 bp, Artificial
  probe
  misc_feature (1)..(25): SEQ ID NO: 1179; WAN024DSA_at; Start 351; Stop 375
tagtaaatataaatctgacgctgaa

SEQ ID NO: 169381 - DNA, 25 bp, Artificial
  probe
  misc_feature (1)..(25): SEQ ID NO: 1179; WAN024DSA_at; Start 259; Stop 283
cgaaaagaagcagaagcatctcaaa

SEQ ID NO: 169382 - DNA, 25 bp, Artificial
  probe
  misc_feature (1)..(25): SEQ ID NO: 1179; WAN024DSA_at; Start 414; Stop 438
gaaggctaggaaagagcaacaggac

SEQ ID NO: 169383 - DNA, 25 bp, Artificial
  probe
  misc_feature (1)..(25): SEQ ID NO: 1179; WAN024DSA_at; Start 430; Stop 454
caacaggacttgcaaaataaattta

SEQ ID NO: 169384 - DNA, 25 bp, Artificial
  probe
  misc_feature (1)..(25): SEQ ID NO: 1179; WAN024DSA_at; Start 420; Stop 444
taggaaagagcaacaggacttgcaa

SEQ ID NO: 169385 - DNA, 25 bp, Artificial
  probe
  misc_feature (1)..(25): SEQ ID NO: 1179; WAN024DSA_at; Start 396; Stop 420
ggtcgactctaaaatagagaaggct

SEQ ID NO: 169386 - DNA, 25 bp, Artificial
  probe
  misc_feature (1)..(25): SEQ ID NO: 1179; WAN024DSA_at; Start 379; Stop 403
cagaaaaaattaacagaggtcgact

SEQ ID NO: 169387 - DNA, 25 bp, Artificial
  probe
  misc_feature (1)..(25): SEQ ID NO: 1179; WAN024DSA_at; Start 242; Stop 266
gaactgaggagaaagctcgaaaaga

SEQ ID NO: 169388 - DNA, 25 bp, Artificial
  probe
  misc_feature (1)..(25): SEQ ID NO: 1179; WAN024DSA_at; Start 265; Stop 289
gaagcagaagcatctcaaaaattga

SEQ ID NO: 169389 - DNA, 25 bp, Artificial
  probe
  misc_feature (1)..(25): SEQ ID NO: 1179; WAN024DSA_at; Start 417; Stop 441
ggctaggaaagagcaacaggacttg

SEQ ID NO: 169390 - DNA, 25 bp, Artificial
  probe
  misc_feature (1)..(25): SEQ ID NO: 1179; WAN024DSA_at; Start 297; Stop 321
ggcgcttgttgttcaaaatgcatat

SEQ ID NO: 169391 - DNA, 25 bp, Artificial
  probe
  misc_feature (1)..(25): SEQ ID NO: 1179; WAN024DSA_at; Start 330; Stop 354
ccgagaagttcaaaatcaacgtagt

SEQ ID NO: 169392 - DNA, 25 bp, Artificial
  probe
  misc_feature (1)..(25): SEQ ID NO: 1179; WAN024DSA_at; Start 402; Stop 426
ctctaaaatagagaaggctaggaaa

SEQ ID NO: 169393 - DNA, 25 bp, Artificial
  probe
  misc_feature (1)..(25): SEQ ID NO: 1179; WAN024DSA_at; Start 280; Stop 304
caaaaattgaatgatgtggcgcttg

SEQ ID NO: 169394 - DNA, 25 bp, Artificial
  probe
  misc_feature (1)..(25): SEQ ID NO: 1179; WAN024DSA_at; Start 360; Stop 384
taaatctgacgctgaatatcagaaa

SEQ ID NO: 169395 - DNA, 25 bp, Artificial
  probe
  misc_feature (1)..(25): SEQ ID NO: 1179; WAN024DSA_at; Start 445; Stop 469
aataaatttaatgaagtaagagcag

SEQ ID NO: 169396 - DNA, 25 bp, Artificial
  probe
  misc_feature (1)..(25): SEQ ID NO: 1179; WAN024DSA_at; Start 450; Stop 474
atttaatgaagtaagagcagttgta

SEQ ID NO: 169397 - DNA, 25 bp, Artificial
  probe
  misc_feature (1)..(25): SEQ ID NO: 1179; WAN024DSA_at; Start 315; Stop 339
tgcatataaagagtaccgagaagtt

SEQ ID NO: 169398 - DNA, 25 bp, Artificial
  probe
  misc_feature (1)..(25): SEQ ID NO: 1179; WAN024DSA_at; Start 365; Stop 389
ctgacgctgaatatcagaaaaaatt

SEQ ID NO: 169399 - DNA, 25 bp, Artificial
  probe
  misc_feature (1)..(25): SEQ ID NO: 1179; WAN024DSA_at; Start 389; Stop 413
taacagaggtcgactctaaaataga

SEQ ID NO: 169400 - DNA, 25 bp, Artificial
  probe
  misc_feature (1)..(25): SEQ ID NO: 1179; WAN024DSA_at; Start 246; Stop 270
tgaggagaaagctcgaaaagaagca

SEQ ID NO: 169401 - DNA, 25 bp, Artificial
  probe
  misc_feature (1)..(25): SEQ ID NO: 1179; WAN024DSA_at; Start 317; Stop 341
catataaagagtaccgagaagttca

SEQ ID NO: 169402 - DNA, 25 bp, Artificial
  probe
  misc_feature (1)..(25): SEQ ID NO: 1179; WAN024DSA_at; Start 256; Stop 280
gctcgaaaagaagcagaagcatctc

SEQ ID NO: 169403 - DNA, 25 bp, Artificial
  probe
  misc_feature (1)..(25): SEQ ID NO: 1179; WAN024DSA_at; Start 332; Stop 356
gagaagttcaaaatcaacgtagtaa

SEQ ID NO: 169404 - DNA, 25 bp, Artificial
  probe
  misc_feature (1)..(25): SEQ ID NO: 1179; WAN024DSA_at; Start 410; Stop 434
tagagaaggctaggaaagagcaaca

SEQ ID NO: 169405 - DNA, 25 bp, Artificial
  probe
  misc_feature (1)..(25): SEQ ID NO: 1179; WAN024DSA_at; Start 325; Stop 349
gagtaccgagaagttcaaaatcaac

SEQ ID NO: 169406 - DNA, 25 bp, Artificial
  probe
  misc_feature (1)..(25): SEQ ID NO: 1179; WAN024DSA_at; Start 423; Stop 447
gaaagagcaacaggacttgcaaaat

SEQ ID NO: 169407 - DNA, 25 bp, Artificial
  probe
  misc_feature (1)..(25): SEQ ID NO: 1179; WAN024DSA_at; Start 289; Stop 313
aatgatgtggcgcttgttgttcaaa

SEQ ID NO: 169408 - DNA, 25 bp, Artificial
  probe
  misc_feature (1)..(25): SEQ ID NO: 1179; WAN024DSA_at; Start 277; Stop 301
tctcaaaaattgaatgatgtggcgc

SEQ ID NO: 169409 - DNA, 25 bp, Artificial
  probe
  misc_feature (1)..(25): SEQ ID NO: 1179; WAN024DSA_at; Start 346; Stop 370
caacgtagtaaatataaatctgacg

SEQ ID NO: 169410 - DNA, 25 bp, Artificial
  probe
  misc_feature (1)..(25): SEQ ID NO: 1179; WAN024DSA_at; Start 252; Stop 276
gaaagctcgaaaagaagcagaagca

SEQ ID NO: 169411 - DNA, 25 bp, Artificial
  probe
  misc_feature (1)..(25): SEQ ID NO: 1179; WAN024DSA_at; Start 294; Stop 318
tgtggcgcttgttgttcaaaatgca

SEQ ID NO: 169412 - DNA, 25 bp, Artificial
  probe
  misc_feature (1)..(25): SEQ ID NO: 1179; WAN024DSA_at; Start 310; Stop 334
caaaatgcatataaagagtaccgag

SEQ ID NO: 169413 - DNA, 25 bp, Artificial
  probe
  misc_feature (1)..(25): SEQ ID NO: 1177; WAN024DSB_at; Start 342; Stop 366
cgaaagtcagagaaaagaggcagat

SEQ ID NO: 169414 - DNA, 25 bp, Artificial
  probe
  misc_feature (1)..(25): SEQ ID NO: 1177; WAN024DSB_at; Start 345; Stop 369
aagtcagagaaaagaggcagataag

SEQ ID NO: 169415 - DNA, 25 bp, Artificial
  probe
  misc_feature (1)..(25): SEQ ID NO: 1177; WAN024DSB_at; Start 853; Stop 877
gctgagttggataaaaaagctgatg

SEQ ID NO: 169416 - DNA, 25 bp, Artificial
  probe
  misc_feature (1)..(25): SEQ ID NO: 1177; WAN024DSB_at; Start 334; Stop 358
gctagcaacgaaagtcagagaaaag

SEQ ID NO: 169417 - DNA, 25 bp, Artificial
  probe
  misc_feature (1)..(25): SEQ ID NO: 1177; WAN024DSB_at; Start 402; Stop 426
ggcggaagctgcatttgctactatt

SEQ ID NO: 169418 - DNA, 25 bp, Artificial
  probe
  misc_feature (1)..(25): SEQ ID NO: 1177; WAN024DSB_at; Start 397; Stop 421
gatgaggcggaagctgcatttgcta

SEQ ID NO: 169419 - DNA, 25 bp, Artificial
  probe
  misc_feature (1)..(25): SEQ ID NO: 1177; WAN024DSB_at; Start 372; Stop 396
gataaaagaagctacgcaacgcaaa

SEQ ID NO: 169420 - DNA, 25 bp, Artificial
  probe
  misc_feature (1)..(25): SEQ ID NO: 1177; WAN024DSB_at; Start 369; Stop 393
gaagataaaagaagctacgcaacgc

SEQ ID NO: 169421 - DNA, 25 bp, Artificial
  probe
  misc_feature (1)..(25): SEQ ID NO: 1177; WAN024DSB_at; Start 395; Stop 419
aagatgaggcggaagctgcatttgc

SEQ ID NO: 169422 - DNA, 25 bp, Artificial
  probe
  misc_feature (1)..(25): SEQ ID NO: 1177; WAN024DSB_at; Start 339; Stop 363
caacgaaagtcagagaaaagaggca

SEQ ID NO: 169423 - DNA, 25 bp, Artificial
  probe
  misc_feature (1)..(25): SEQ ID NO: 1177; WAN024DSB_at; Start 384; Stop 408
tacgcaacgcaaagatgaggcggaa

SEQ ID NO: 169424 - DNA, 25 bp, Artificial
  probe
  misc_feature (1)..(25): SEQ ID NO: 1177; WAN024DSB_at; Start 388; Stop 412
caacgcaaagatgaggcggaagctg

SEQ ID NO: 169425 - DNA, 25 bp, Artificial
  probe
  misc_feature (1)..(25): SEQ ID NO: 1177; WAN024DSB_at; Start 871; Stop 895
gctgatgaacttcaaaataaagttg

SEQ ID NO: 169426 - DNA, 25 bp, Artificial
  probe
  misc_feature (1)..(25): SEQ ID NO: 1177; WAN024DSB_at; Start 348; Stop 372
tcagagaaaagaggcagataagaag

SEQ ID NO: 169427 - DNA, 25 bp, Artificial
  probe
  misc_feature (1)..(25): SEQ ID NO: 1177; WAN024DSB_at; Start 861; Stop 885
ggataaaaaagctgatgaacttcaa

SEQ ID NO: 169428 - DNA, 25 bp, Artificial
  probe
  misc_feature (1)..(25): SEQ ID NO: 1177; WAN024DSB_at; Start 374; Stop 398
taaaagaagctacgcaacgcaaaga

SEQ ID NO: 169429 - DNA, 25 bp, Artificial
  probe
  misc_feature (1)..(25): SEQ ID NO: 1177; WAN024DSB_at; Start 845; Stop 869
cagaagaagctgagttggataaaaa

SEQ ID NO: 169430 - DNA, 25 bp, Artificial
  probe
  misc_feature (1)..(25): SEQ ID NO: 1177; WAN024DSB_at; Start 832; Stop 856
ttagataaagaagcagaagaagctg

SEQ ID NO: 169431 - DNA, 25 bp, Artificial
  probe
  misc_feature (1)..(25): SEQ ID NO: 1177; WAN024DSB_at; Start 379; Stop 403
gaagctacgcaacgcaaagatgagg

SEQ ID NO: 169432 - DNA, 25 bp, Artificial
  probe
  misc_feature (1)..(25): SEQ ID NO: 1177; WAN024DSB_at; Start 376; Stop 400
aaagaagctacgcaacgcaaagatg

SEQ ID NO: 169433 - DNA, 25 bp, Artificial
  probe
  misc_feature (1)..(25): SEQ ID NO: 1177; WAN024DSB_at; Start 406; Stop 430
gaagctgcatttgctactattcgaa

SEQ ID NO: 169434 - DNA, 25 bp, Artificial
  probe
  misc_feature (1)..(25): SEQ ID NO: 1177; WAN024DSB_at; Start 409; Stop 433
gctgcatttgctactattcgaacaa

SEQ ID NO: 169435 - DNA, 25 bp, Artificial
  probe
  misc_feature (1)..(25): SEQ ID NO: 1177; WAN024DSB_at; Start 874; Stop 898
gatgaacttcaaaataaagttgctg

SEQ ID NO: 169436 - DNA, 25 bp, Artificial
  probe
  misc_feature (1)..(25): SEQ ID NO: 1177; WAN024DSB_at; Start 330; Stop 354
acaagctagcaacgaaagtcagaga

SEQ ID NO: 169437 - DNA, 25 bp, Artificial
  probe
  misc_feature (1)..(25): SEQ ID NO: 1177; WAN024DSB_at; Start 864; Stop 888
taaaaaagctgatgaacttcaaaat

SEQ ID NO: 169438 - DNA, 25 bp, Artificial
  probe
  misc_feature (1)..(25): SEQ ID NO: 1177; WAN024DSB_at; Start 382; Stop 406
gctacgcaacgcaaagatgaggcgg

SEQ ID NO: 169439 - DNA, 25 bp, Artificial
  probe
  misc_feature (1)..(25): SEQ ID NO: 1177; WAN024DSB_at; Start 390; Stop 414
acgcaaagatgaggcggaagctgca

SEQ ID NO: 169440 - DNA, 25 bp, Artificial
  probe
  misc_feature (1)..(25): SEQ ID NO: 1177; WAN024DSB_at; Start 331; Stop 355
caagctagcaacgaaagtcagagaa

SEQ ID NO: 169441 - DNA, 25 bp, Artificial
  probe
  misc_feature (1)..(25): SEQ ID NO: 1177; WAN024DSB_at; Start 360; Stop 384
ggcagataagaagataaaagaagct

SEQ ID NO: 169442 - DNA, 25 bp, Artificial
  probe
  misc_feature (1)..(25): SEQ ID NO: 1177; WAN024DSB_at; Start 386; Stop 410
cgcaacgcaaagatgaggcggaagc

SEQ ID NO: 169443 - DNA, 25 bp, Artificial
  probe
  misc_feature (1)..(25): SEQ ID NO: 1177; WAN024DSB_at; Start 364; Stop 388
gataagaagataaaagaagctacgc

SEQ ID NO: 169444 - DNA, 25 bp, Artificial
  probe
  misc_feature (1)..(25): SEQ ID NO: 1177; WAN024DSB_at; Start 400; Stop 424
gaggcggaagctgcatttgctacta

SEQ ID NO: 169445 - DNA, 25 bp, Artificial
  probe
  misc_feature (1)..(25): SEQ ID NO: 1177; WAN024DSB_at; Start 336; Stop 360
tagcaacgaaagtcagagaaaagag

SEQ ID NO: 169446 - DNA, 25 bp, Artificial
  probe
  misc_feature (1)..(25): SEQ ID NO: 1177; WAN024DSB_at; Start 856; Stop 880
gagttggataaaaaagctgatgaac

SEQ ID NO: 169447 - DNA, 25 bp, Artificial
  probe
  misc_feature (1)..(25): SEQ ID NO: 3102; WAN024DSC_at; Start 191; Stop 215
tcgatttagaacgagataaggtaaa

SEQ ID NO: 169448 - DNA, 25 bp, Artificial
  probe
  misc_feature (1)..(25): SEQ ID NO: 3102; WAN024DSC_at; Start 347; Stop 371
taattcaatcaacctcaacatacga

SEQ ID NO: 169449 - DNA, 25 bp, Artificial
  probe
  misc_feature (1)..(25): SEQ ID NO: 3102; WAN024DSC_at; Start 364; Stop 388
acatacgaagaactacagaaactga

SEQ ID NO: 169450 - DNA, 25 bp, Artificial
  probe
  misc_feature (1)..(25): SEQ ID NO: 3102; WAN024DSC_at; Start 1077; Stop 1101
tgaggtcagagattatgcaataaaa

SEQ ID NO: 169451 - DNA, 25 bp, Artificial
  probe
  misc_feature (1)..(25): SEQ ID NO: 3102; WAN024DSC_at; Start 946; Stop 970
gacttccgtccagctttcaataaaa

SEQ ID NO: 169452 - DNA, 25 bp, Artificial
  probe
  misc_feature (1)..(25): SEQ ID NO: 3102; WAN024DSC_at; Start 851; Stop 875
cagcgacttcagagcaaggtaaacc

SEQ ID NO: 169453 - DNA, 25 bp, Artificial
  probe
  misc_feature (1)..(25): SEQ ID NO: 3102; WAN024DSC_at; Start 975; Stop 999
gcagatggtagccattcaagaatcc

SEQ ID NO: 169454 - DNA, 25 bp, Artificial
  probe
  misc_feature (1)..(25): SEQ ID NO: 3102; WAN024DSC_at; Start 898; Stop 922
gctcttggagagcaagcaacacctg

SEQ ID NO: 169455 - DNA, 25 bp, Artificial
  probe
  misc_feature (1)..(25): SEQ ID NO: 3102; WAN024DSC_at; Start 257; Stop 281
tctattcaaaatcaactaaaagtcg

SEQ ID NO: 169456 - DNA, 25 bp, Artificial
  probe
  misc_feature (1)..(25): SEQ ID NO: 3102; WAN024DSC_at; Start 1111; Stop 1135
gaaaacaagaaacttctatcacaga

SEQ ID NO: 169457 - DNA, 25 bp, Artificial
  probe
  misc_feature (1)..(25): SEQ ID NO: 3102; WAN024DSC_at; Start 827; Stop 851
tgaaggaagctgttgaaaagaatgc

SEQ ID NO: 169458 - DNA, 25 bp, Artificial
  probe
  misc_feature (1)..(25): SEQ ID NO: 3102; WAN024DSC_at; Start 272; Stop 296
ctaaaagtcgacataagaagactgt

SEQ ID NO: 169459 - DNA, 25 bp, Artificial
  probe
  misc_feature (1)..(25): SEQ ID NO: 3102; WAN024DSC_at; Start 1092; Stop 1116
tgcaataaaagttgtttctgaaaac

SEQ ID NO: 169460 - DNA, 25 bp, Artificial
  probe
  misc_feature (1)..(25): SEQ ID NO: 3102; WAN024DSC_at; Start 288; Stop 312
gaagactgtagatatagttaacaag

SEQ ID NO: 169461 - DNA, 25 bp, Artificial
  probe
  misc_feature (1)..(25): SEQ ID NO: 3102; WAN024DSC_at; Start 733; Stop 757
caagcagaagcggaagttgagagta

SEQ ID NO: 169462 - DNA, 25 bp, Artificial
  probe
  misc_feature (1)..(25): SEQ ID NO: 3102; WAN024DSC_at; Start 709; Stop 733
tctcgagacgagaaaaaaattaagc

SEQ ID NO: 169463 - DNA, 25 bp, Artificial
  probe
  misc_feature (1)..(25): SEQ ID NO: 3102; WAN024DSC_at; Start 939; Stop 963
tgaaaaagacttccgtccagctttc

SEQ ID NO: 169464 - DNA, 25 bp, Artificial
  probe
  misc_feature (1)..(25): SEQ ID NO: 3102; WAN024DSC_at; Start 457; Stop 481
agttcaggctcttccacggaaccgg

SEQ ID NO: 169465 - DNA, 25 bp, Artificial
  probe
  misc_feature (1)..(25): SEQ ID NO: 3102; WAN024DSC_at; Start 202; Stop 226
cgagataaggtaaagaaagaggtca

SEQ ID NO: 169466 - DNA, 25 bp, Artificial
  probe
  misc_feature (1)..(25): SEQ ID NO: 3102; WAN024DSC_at; Start 392; Stop 416
tggagagtcaatcagaagtagataa

SEQ ID NO: 169467 - DNA, 25 bp, Artificial
  probe
  misc_feature (1)..(25): SEQ ID NO: 3102; WAN024DSC_at; Start 811; Stop 835
gaagaagaagctaagttgaaggaag

SEQ ID NO: 169468 - DNA, 25 bp, Artificial
  probe
  misc_feature (1)..(25): SEQ ID NO: 3102; WAN024DSC_at; Start 724; Stop 748
aaaattaagcaagcagaagcggaag

SEQ ID NO: 169469 - DNA, 25 bp, Artificial
  probe
  misc_feature (1)..(25): SEQ ID NO: 3102; WAN024DSC_at; Start 1239; Stop 1263
gcagccggaaaatccagagcatcaa

SEQ ID NO: 169470 - DNA, 25 bp, Artificial
  probe
  misc_feature (1)..(25): SEQ ID NO: 3102; WAN024DSC_at; Start 461; Stop 485
caggctcttccacggaaccggaagc

SEQ ID NO: 169471 - DNA, 25 bp, Artificial
  probe
  misc_feature (1)..(25): SEQ ID NO: 3102; WAN024DSC_at; Start 215; Stop 239
agaaagaggtcagggaatataaaga

SEQ ID NO: 169472 - DNA, 25 bp, Artificial
  probe
  misc_feature (1)..(25): SEQ ID NO: 3102; WAN024DSC_at; Start 743; Stop 767
cggaagttgagagtaaacaagctga

SEQ ID NO: 169473 - DNA, 25 bp, Artificial
  probe
  misc_feature (1)..(25): SEQ ID NO: 3102; WAN024DSC_at; Start 841; Stop 865
gaaaagaatgcagcgacttcagagc

SEQ ID NO: 169474 - DNA, 25 bp, Artificial
  probe
  misc_feature (1)..(25): SEQ ID NO: 3102; WAN024DSC_at; Start 357; Stop 381
aacctcaacatacgaagaactacag

SEQ ID NO: 169475 - DNA, 25 bp, Artificial
  probe
  misc_feature (1)..(25): SEQ ID NO: 3102; WAN024DSC_at; Start 1269; Stop 1293
aacaactccagctccggataccaaa

SEQ ID NO: 169476 - DNA, 25 bp, Artificial
  probe
  misc_feature (1)..(25): SEQ ID NO: 3102; WAN024DSC_at; Start 249; Stop 273
gaaagagctctattcaaaatcaact

SEQ ID NO: 169477 - DNA, 25 bp, Artificial
  probe
  misc_feature (1)..(25): SEQ ID NO: 3102; WAN024DSC_at; Start 404; Stop 428
cagaagtagataaagctgtgtctga

SEQ ID NO: 169478 - DNA, 25 bp, Artificial
  probe
  misc_feature (1)..(25): SEQ ID NO: 3102; WAN024DSC_at; Start 981; Stop 1005
ggtagccattcaagaatccttgaac

SEQ ID NO: 169479 - DNA, 25 bp, Artificial
  probe
  misc_feature (1)..(25): SEQ ID NO: 3102; WAN024DSC_at; Start 1062; Stop 1086
tggaaatgcctataatgaggtcaga

SEQ ID NO: 169480 - DNA, 25 bp, Artificial
  probe
  misc_feature (1)..(25): SEQ ID NO: 3102; WAN024DSC_at; Start 309; Stop 333
caagttgcaaaacattaataacgag

SEQ ID NO: 169481 - DNA, 25 bp, Artificial
  probe
  misc_feature (1)..(25): SEQ ID NO: 2274; WAN024DSD_at; Start 476; Stop 500
ggatcctccactaaaccagaaactc

SEQ ID NO: 169482 - DNA, 25 bp, Artificial
  probe
  misc_feature (1)..(25): SEQ ID NO: 2274; WAN024DSD_at; Start 477; Stop 501
gatcctccactaaaccagaaactcc

SEQ ID NO: 169483 - DNA, 25 bp, Artificial
  probe
  misc_feature (1)..(25): SEQ ID NO: 2274; WAN024DSD_at; Start 1; Stop 25
atggagaatatagacatgtttaaat

SEQ ID NO: 169484 - DNA, 25 bp, Artificial
  probe
  misc_feature (1)..(25): SEQ ID NO: 2274; WAN024DSD_at; Start 473; Stop 497
tcaggatcctccactaaaccagaaa

SEQ ID NO: 169485 - DNA, 25 bp, Artificial
  probe
  misc_feature (1)..(25): SEQ ID NO: 2274; WAN024DSD_at; Start 6; Stop 30
gaatatagacatgtttaaatcaaat

SEQ ID NO: 169486 - DNA, 25 bp, Artificial
  probe
  misc_feature (1)..(25): SEQ ID NO: 2274; WAN024DSD_at; Start 475; Stop 499
aggatcctccactaaaccagaaact

SEQ ID NO: 169487 - DNA, 25 bp, Artificial
  probe
  misc_feature (1)..(25): SEQ ID NO: 2274; WAN024DSD_at; Start 474; Stop 498
caggatcctccactaaaccagaaac

SEQ ID NO: 169488 - DNA, 25 bp, Artificial
  probe
  misc_feature (1)..(25): SEQ ID NO: 2274; WAN024DSD_at; Start 483; Stop 507
ccactaaaccagaaactccgcagcc

SEQ ID NO: 169489 - DNA, 25 bp, Artificial
  probe
  misc_feature (1)..(25): SEQ ID NO: 2274; WAN024DSD_at; Start 486; Stop 510
ctaaaccagaaactccgcagccgga

SEQ ID NO: 169490 - DNA, 25 bp, Artificial
  probe
  misc_feature (1)..(25): SEQ ID NO: 2274; WAN024DSD_at; Start 3; Stop 27
ggagaatatagacatgtttaaatca

SEQ ID NO: 169491 - DNA, 25 bp, Artificial
  probe
  misc_feature (1)..(25): SEQ ID NO: 2274; WAN024DSD_at; Start 487; Stop 511
taaaccagaaactccgcagccggaa

SEQ ID NO: 169492 - DNA, 25 bp, Artificial
  probe
  misc_feature (1)..(25): SEQ ID NO: 2274; WAN024DSD_at; Start 481; Stop 505
ctccactaaaccagaaactccgcag

SEQ ID NO: 169493 - DNA, 25 bp, Artificial
  probe
  misc_feature (1)..(25): SEQ ID NO: 2274; WAN024DSD_at; Start 485; Stop 509
actaaaccagaaactccgcagccgg

SEQ ID NO: 169494 - DNA, 25 bp, Artificial
  probe
  misc_feature (1)..(25): SEQ ID NO: 2274; WAN024DSD_at; Start 484; Stop 508
cactaaaccagaaactccgcagccg

SEQ ID NO: 169495 - DNA, 25 bp, Artificial
  probe
  misc_feature (1)..(25): SEQ ID NO: 2274; WAN024DSD_at; Start 482; Stop 506
tccactaaaccagaaactccgcagc

SEQ ID NO: 169496 - DNA, 25 bp, Artificial
  probe
  misc_feature (1)..(25): SEQ ID NO: 2274; WAN024DSD_at; Start 472; Stop 496
ttcaggatcctccactaaaccagaa

SEQ ID NO: 169497 - DNA, 25 bp, Artificial
  probe
  misc_feature (1)..(25): SEQ ID NO: 2274; WAN024DSD_at; Start 480; Stop 504
cctccactaaaccagaaactccgca

SEQ ID NO: 169498 - DNA, 25 bp, Artificial
  probe
  misc_feature (1)..(25): SEQ ID NO: 2274; WAN024DSD_at; Start 2; Stop 26
tggagaatatagacatgtttaaatc

SEQ ID NO: 169499 - DNA, 25 bp, Artificial
  probe
  misc_feature (1)..(25): SEQ ID NO: 2274; WAN024DSD_at; Start 479; Stop 503
tcctccactaaaccagaaactccgc

SEQ ID NO: 169500 - DNA, 25 bp, Artificial
  probe
  misc_feature (1)..(25): SEQ ID NO: 2274; WAN024DSD_at; Start 4; Stop 28
gagaatatagacatgtttaaatcaa

SEQ ID NO: 169501 - DNA, 25 bp, Artificial
  probe
  misc_feature (1)..(25): SEQ ID NO: 2274; WAN024DSD_at; Start 469; Stop 493
aagttcaggatcctccactaaacca

SEQ ID NO: 169502 - DNA, 25 bp, Artificial
  probe
  misc_feature (1)..(25): SEQ ID NO: 2274; WAN024DSD_at; Start 478; Stop 502
atcctccactaaaccagaaactccg

SEQ ID NO: 169503 - DNA, 25 bp, Artificial
  probe
  misc_feature (1)..(25): SEQ ID NO: 2274; WAN024DSD_at; Start 5; Stop 29
agaatatagacatgtttaaatcaaa

SEQ ID NO: 169504 - DNA, 25 bp, Artificial
  probe
  misc_feature (1)..(25): SEQ ID NO: 2274; WAN024DSD_at; Start 470; Stop 494
agttcaggatcctccactaaaccag

SEQ ID NO: 169505 - DNA, 25 bp, Artificial
  probe
  misc_feature (1)..(25): SEQ ID NO: 2274; WAN024DSD_at; Start 490; Stop 514
accagaaactccgcagccggaaaat

SEQ ID NO: 169506 - DNA, 25 bp, Artificial
  probe
  misc_feature (1)..(25): SEQ ID NO: 2274; WAN024DSD_at; Start 471; Stop 495
gttcaggatcctccactaaaccaga

SEQ ID NO: 169507 - DNA, 25 bp, Artificial
  probe
  misc_feature (1)..(25): SEQ ID NO: 3095; WAN024DSF_at; Start 986; Stop 1010
cccaaccaggaggacaagcaggtgg

SEQ ID NO: 169508 - DNA, 25 bp, Artificial
  probe
  misc_feature (1)..(25): SEQ ID NO: 3095; WAN024DSF_at; Start 1000; Stop 1024
caagcaggtggttcaatggttgtac

SEQ ID NO: 169509 - DNA, 25 bp, Artificial
  probe
  misc_feature (1)..(25): SEQ ID NO: 3095; WAN024DSF_at; Start 723; Stop 747
gagagaacttaaggaaacgatagac

SEQ ID NO: 169510 - DNA, 25 bp, Artificial
  probe
  misc_feature (1)..(25): SEQ ID NO: 3095; WAN024DSF_at; Start 1069; Stop 1093
caaaaggcgaccgaagctgaaaaga

SEQ ID NO: 169511 - DNA, 25 bp, Artificial
  probe
  misc_feature (1)..(25): SEQ ID NO: 3095; WAN024DSF_at; Start 877; Stop 901
gatgcttcagataaaaaatcggtag

SEQ ID NO: 169512 - DNA, 25 bp, Artificial
  probe
  misc_feature (1)..(25): SEQ ID NO: 3095; WAN024DSF_at; Start 1461; Stop 1485
tgctatagcaacatacatgagcaag

SEQ ID NO: 169513 - DNA, 25 bp, Artificial
  probe
  misc_feature (1)..(25): SEQ ID NO: 3095; WAN024DSF_at; Start 1057; Stop 1081
caaagtccaggacaaaaggcgaccg

SEQ ID NO: 169514 - DNA, 25 bp, Artificial
  probe
  misc_feature (1)..(25): SEQ ID NO: 3095; WAN024DSF_at; Start 1126; Stop 1150
gaagccttgaacaaactagacgatg

SEQ ID NO: 169515 - DNA, 25 bp, Artificial
  probe
  misc_feature (1)..(25): SEQ ID NO: 3095; WAN024DSF_at; Start 707; Stop 731
cgcaagtaggcgattcgagagaact

SEQ ID NO: 169516 - DNA, 25 bp, Artificial
  probe
  misc_feature (1)..(25): SEQ ID NO: 3095; WAN024DSF_at; Start 1207; Stop 1231
aatgagactagaacttatgcgaaag

SEQ ID NO: 169517 - DNA, 25 bp, Artificial
  probe
  misc_feature (1)..(25): SEQ ID NO: 3095; WAN024DSF_at; Start 1014; Stop 1038
aatggttgtaccaccggtgacgcaa

SEQ ID NO: 169518 - DNA, 25 bp, Artificial
  probe
  misc_feature (1)..(25): SEQ ID NO: 3095; WAN024DSF_at; Start 942; Stop 966
tatcgtgactcaccaaaatagagaa

SEQ ID NO: 169519 - DNA, 25 bp, Artificial
  probe
  misc_feature (1)..(25): SEQ ID NO: 3095; WAN024DSF_at; Start 815; Stop 839
ggtttgcagatcttcttatggatgc

SEQ ID NO: 169520 - DNA, 25 bp, Artificial
  probe
  misc_feature (1)..(25): SEQ ID NO: 3095; WAN024DSF_at; Start 1418; Stop 1442
caagcgtaccagatattaatcagga

SEQ ID NO: 169521 - DNA, 25 bp, Artificial
  probe
  misc_feature (1)..(25): SEQ ID NO: 3095; WAN024DSF_at; Start 757; Stop 781
gaaactctgtctacctatatggtaa

SEQ ID NO: 169522 - DNA, 25 bp, Artificial
  probe
  misc_feature (1)..(25): SEQ ID NO: 3095; WAN024DSF_at; Start 916; Stop 940
gaagcagaaggaaaaatagagtctc

SEQ ID NO: 169523 - DNA, 25 bp, Artificial
  probe
  misc_feature (1)..(25): SEQ ID NO: 3095; WAN024DSF_at; Start 519; Stop 543
tgcacaagctcaagtccaaatacct

SEQ ID NO: 169524 - DNA, 25 bp, Artificial
  probe
  misc_feature (1)..(25): SEQ ID NO: 3095; WAN024DSF_at; Start 461; Stop 485
caatcgaactggaaattgcggaagc

SEQ ID NO: 169525 - DNA, 25 bp, Artificial
  probe
  misc_feature (1)..(25): SEQ ID NO: 3095; WAN024DSF_at; Start 896; Stop 920
cggtagaagacttgcgaaaggaagc

SEQ ID NO: 169526 - DNA, 25 bp, Artificial
  probe
  misc_feature (1)..(25): SEQ ID NO: 3095; WAN024DSF_at; Start 1142; Stop 1166
tagacgatgaaacaaagactgttcc

SEQ ID NO: 169527 - DNA, 25 bp, Artificial
  probe
  misc_feature (1)..(25): SEQ ID NO: 3095; WAN024DSF_at; Start 500; Stop 524
ccaaggcagagcttgagcttgcaca

SEQ ID NO: 169528 - DNA, 25 bp, Artificial
  probe
  misc_feature (1)..(25): SEQ ID NO: 3095; WAN024DSF_at; Start 567; Stop 591
tgctaaagctaaagtagaagctgct

SEQ ID NO: 169529 - DNA, 25 bp, Artificial
  probe
  misc_feature (1)..(25): SEQ ID NO: 3095; WAN024DSF_at; Start 694; Stop 718
cgaagaaattctccgcaagtaggcg

SEQ ID NO: 169530 - DNA, 25 bp, Artificial
  probe
  misc_feature (1)..(25): SEQ ID NO: 3095; WAN024DSF_at; Start 675; Stop 699
aacgccaaaatctagagtgcgaaga

SEQ ID NO: 169531 - DNA, 25 bp, Artificial
  probe
  misc_feature (1)..(25): SEQ ID NO: 3095; WAN024DSF_at; Start 741; Stop 765
gatagacaaagcgaaagaaactctg

SEQ ID NO: 169532 - DNA, 25 bp, Artificial
  probe
  misc_feature (1)..(25): SEQ ID NO: 3095; WAN024DSF_at; Start 1110; Stop 1134
gattcgtcaattccaagaagccttg

SEQ ID NO: 169533 - DNA, 25 bp, Artificial
  probe
  misc_feature (1)..(25): SEQ ID NO: 3095; WAN024DSF_at; Start 1236; Stop 1260
tgttgacaagagcaagaagcttcta

SEQ ID NO: 169534 - DNA, 25 bp, Artificial
  probe
  misc_feature (1)..(25): SEQ ID NO: 3095; WAN024DSF_at; Start 960; Stop 984
tagagaaaaagaaaaccaaccagca

SEQ ID NO: 169535 - DNA, 25 bp, Artificial
  probe
  misc_feature (1)..(25): SEQ ID NO: 3095; WAN024DSF_at; Start 656; Stop 680
tagataactcaaccaaagaaacgcc

SEQ ID NO: 169536 - DNA, 25 bp, Artificial
  probe
  misc_feature (1)..(25): SEQ ID NO: 3095; WAN024DSF_at; Start 783; Stop 807
tcgtttaacgaagctggatccatct

SEQ ID NO: 169537 - DNA, 25 bp, Artificial
  probe
  misc_feature (1)..(25): SEQ ID NO: 3095; WAN024DSF_at; Start 1387; Stop 1411
gagccaaaaccacaaccagagggtg

SEQ ID NO: 169538 - DNA, 25 bp, Artificial
  probe
  misc_feature (1)..(25): SEQ ID NO: 3095; WAN024DSF_at; Start 861; Stop 885
caagacaaaattagaggatgcttca

SEQ ID NO: 169539 - DNA, 25 bp, Artificial
  probe
  misc_feature (1)..(25): SEQ ID NO: 3095; WAN024DSF_at; Start 252; Stop 276
gttgcaagacattaagagaacgtat

SEQ ID NO: 169540 - DNA, 25 bp, Artificial
  probe
  misc_feature (1)..(25): SEQ ID NO: 3095; WAN024DSF_at; Start 1403; Stop 1427
cagagggtgagaaaccaagcgtacc

SEQ ID NO: 169541 - DNA, 25 bp, Artificial
  probe
  misc_feature (1)..(25): SEQ ID NO: 1183; WAN024DSG_at; Start 401; Stop 425
cagaaaaagcagaaaaggagaagaa

SEQ ID NO: 169542 - DNA, 25 bp, Artificial
  probe
  misc_feature (1)..(25): SEQ ID NO: 1183; WAN024DSG_at; Start 390; Stop 414
gttagaagaagcagaaaaagcagaa

SEQ ID NO: 169543 - DNA, 25 bp, Artificial
  probe
  misc_feature (1)..(25): SEQ ID NO: 1183; WAN024DSG_at; Start 294; Stop 318
tcaggcggctaatcttaaatctcag

SEQ ID NO: 169544 - DNA, 25 bp, Artificial
  probe
  misc_feature (1)..(25): SEQ ID NO: 1183; WAN024DSG_at; Start 904; Stop 928
gctgaagaagacttagctgctaaac

SEQ ID NO: 169545 - DNA, 25 bp, Artificial
  probe
  misc_feature (1)..(25): SEQ ID NO: 1183; WAN024DSG_at; Start 340; Stop 364
gctgctcaaagagaaggtaatccta

SEQ ID NO: 169546 - DNA, 25 bp, Artificial
  probe
  misc_feature (1)..(25): SEQ ID NO: 1183; WAN024DSG_at; Start 309; Stop 333
taaatctcagcaagcattagttgaa

SEQ ID NO: 169547 - DNA, 25 bp, Artificial
  probe
  misc_feature (1)..(25): SEQ ID NO: 1183; WAN024DSG_at; Start 343; Stop 367
gctcaaagagaaggtaatcctaaaa

SEQ ID NO: 169548 - DNA, 25 bp, Artificial
  probe
  misc_feature (1)..(25): SEQ ID NO: 1183; WAN024DSG_at; Start 430; Stop 454
gaatttgataaagcacaggcagtgg

SEQ ID NO: 169549 - DNA, 25 bp, Artificial
  probe
  misc_feature (1)..(25): SEQ ID NO: 1183; WAN024DSG_at; Start 262; Stop 286
gctgctgcggtaaagaaaattgatg

SEQ ID NO: 169550 - DNA, 25 bp, Artificial
  probe
  misc_feature (1)..(25): SEQ ID NO: 1183; WAN024DSG_at; Start 300; Stop 324
ggctaatcttaaatctcagcaagca

SEQ ID NO: 169551 - DNA, 25 bp, Artificial
  probe
  misc_feature (1)..(25): SEQ ID NO: 1183; WAN024DSG_at; Start 380; Stop 404
cgcaagccaagttagaagaagcaga

SEQ ID NO: 169552 - DNA, 25 bp, Artificial
  probe
  misc_feature (1)..(25): SEQ ID NO: 1183; WAN024DSG_at; Start 313; Stop 337
tctcagcaagcattagttgaattct

SEQ ID NO: 169553 - DNA, 25 bp, Artificial
  probe
  misc_feature (1)..(25): SEQ ID NO: 1183; WAN024DSG_at; Start 297; Stop 321
ggcggctaatcttaaatctcagcaa

SEQ ID NO: 169554 - DNA, 25 bp, Artificial
  probe
  misc_feature (1)..(25): SEQ ID NO: 1183; WAN024DSG_at; Start 376; Stop 400
gctgcgcaagccaagttagaagaag

SEQ ID NO: 169555 - DNA, 25 bp, Artificial
  probe
  misc_feature (1)..(25): SEQ ID NO: 1183; WAN024DSG_at; Start 444; Stop 468
acaggcagtggtagttcctgaagca

SEQ ID NO: 169556 - DNA, 25 bp, Artificial
  probe
  misc_feature (1)..(25): SEQ ID NO: 1183; WAN024DSG_at; Start 323; Stop 347
cattagttgaattcttagctgctca

SEQ ID NO: 169557 - DNA, 25 bp, Artificial
  probe
  misc_feature (1)..(25): SEQ ID NO: 1183; WAN024DSG_at; Start 910; Stop 934
gaagacttagctgctaaacaagctg

SEQ ID NO: 169558 - DNA, 25 bp, Artificial
  probe
  misc_feature (1)..(25): SEQ ID NO: 1183; WAN024DSG_at; Start 256; Stop 280
aagaaagctgctgcggtaaagaaaa

SEQ ID NO: 169559 - DNA, 25 bp, Artificial
  probe
  misc_feature (1)..(25): SEQ ID NO: 1183; WAN024DSG_at; Start 253; Stop 277
gaaaagaaagctgctgcggtaaaga

SEQ ID NO: 169560 - DNA, 25 bp, Artificial
  probe
  misc_feature (1)..(25): SEQ ID NO: 1183; WAN024DSG_at; Start 283; Stop 307
gatgaagaacatcaggcggctaatc

SEQ ID NO: 169561 - DNA, 25 bp, Artificial
  probe
  misc_feature (1)..(25): SEQ ID NO: 1183; WAN024DSG_at; Start 386; Stop 410
ccaagttagaagaagcagaaaaagc

SEQ ID NO: 169562 - DNA, 25 bp, Artificial
  probe
  misc_feature (1)..(25): SEQ ID NO: 1183; WAN024DSG_at; Start 371; Stop 395
aaaaagctgcgcaagccaagttaga

SEQ ID NO: 169563 - DNA, 25 bp, Artificial
  probe
  misc_feature (1)..(25): SEQ ID NO: 1183; WAN024DSG_at; Start 248; Stop 272
aaactgaaaagaaagctgctgcggt

SEQ ID NO: 169564 - DNA, 25 bp, Artificial
  probe
  misc_feature (1)..(25): SEQ ID NO: 1183; WAN024DSG_at; Start 265; Stop 289
gctgcggtaaagaaaattgatgaag

SEQ ID NO: 169565 - DNA, 25 bp, Artificial
  probe
  misc_feature (1)..(25): SEQ ID NO: 1183; WAN024DSG_at; Start 243; Stop 267
gaagaaaactgaaaagaaagctgct

SEQ ID NO: 169566 - DNA, 25 bp, Artificial
  probe
  misc_feature (1)..(25): SEQ ID NO: 1183; WAN024DSG_at; Start 335; Stop 359
tcttagctgctcaaagagaaggtaa

SEQ ID NO: 169567 - DNA, 25 bp, Artificial
  probe
  misc_feature (1)..(25): SEQ ID NO: 1183; WAN024DSG_at; Start 364; Stop 388
aaaaagaaaaaagctgcgcaagcca

SEQ ID NO: 169568 - DNA, 25 bp, Artificial
  probe
  misc_feature (1)..(25): SEQ ID NO: 1183; WAN024DSG_at; Start 278; Stop 302
aaattgatgaagaacatcaggcggc

SEQ ID NO: 169569 - DNA, 25 bp, Artificial
  probe
  misc_feature (1)..(25): SEQ ID NO: 1183; WAN024DSG_at; Start 438; Stop 462
taaagcacaggcagtggtagttcct

SEQ ID NO: 169570 - DNA, 25 bp, Artificial
  probe
  misc_feature (1)..(25): SEQ ID NO: 1183; WAN024DSG_at; Start 246; Stop 270
gaaaactgaaaagaaagctgctgcg

SEQ ID NO: 169571 - DNA, 25 bp, Artificial
  probe
  misc_feature (1)..(25): SEQ ID NO: 1183; WAN024DSG_at; Start 433; Stop 457
tttgataaagcacaggcagtggtag

SEQ ID NO: 169572 - DNA, 25 bp, Artificial
  probe
  misc_feature (1)..(25): SEQ ID NO: 1183; WAN024DSG_at; Start 425; Stop 449
aaaaggaatttgataaagcacaggc

SEQ ID NO: 169573 - DNA, 25 bp, Artificial
  probe
  misc_feature (1)..(25): SEQ ID NO: 1183; WAN024DSG_at; Start 292; Stop 316
catcaggcggctaatcttaaatctc

SEQ ID NO: 169574 - DNA, 25 bp, Artificial
  probe
  misc_feature (1)..(25): SEQ ID NO: 1183; WAN024DSG_at; Start 331; Stop 355
gaattcttagctgctcaaagagaag

SEQ ID NO: 169575 - DNA, 25 bp, Artificial
  probe
  misc_feature (1)..(25): SEQ ID NO: 1182; WAN024DSH_at; Start 292; Stop 316
gccacagaagtgcatcaaaaagcat

SEQ ID NO: 169576 - DNA, 25 bp, Artificial
  probe
  misc_feature (1)..(25): SEQ ID NO: 1182; WAN024DSH_at; Start 384; Stop 408
caataaagatctcgctgaagcagat

SEQ ID NO: 169577 - DNA, 25 bp, Artificial
  probe
  misc_feature (1)..(25): SEQ ID NO: 1182; WAN024DSH_at; Start 274; Stop 298
gcagcagacttgaacgaagccacag

SEQ ID NO: 169578 - DNA, 25 bp, Artificial
  probe
  misc_feature (1)..(25): SEQ ID NO: 1182; WAN024DSH_at; Start 335; Stop 359
ttcaacgagcaaaagattcaaaaaa

SEQ ID NO: 169579 - DNA, 25 bp, Artificial
  probe
  misc_feature (1)..(25): SEQ ID NO: 1182; WAN024DSH_at; Start 285; Stop 309
gaacgaagccacagaagtgcatcaa

SEQ ID NO: 169580 - DNA, 25 bp, Artificial
  probe
  misc_feature (1)..(25): SEQ ID NO: 1182; WAN024DSH_at; Start 271; Stop 295
gcagcagcagacttgaacgaagcca

SEQ ID NO: 169581 - DNA, 25 bp, Artificial
  probe
  misc_feature (1)..(25): SEQ ID NO: 1182; WAN024DSH_at; Start 382; Stop 406
tacaataaagatctcgctgaagcag

SEQ ID NO: 169582 - DNA, 25 bp, Artificial
  probe
  misc_feature (1)..(25): SEQ ID NO: 1182; WAN024DSH_at; Start 254; Stop 278
ccgaaaatgaaaaaaaggcagcagc

SEQ ID NO: 169583 - DNA, 25 bp, Artificial
  probe
  misc_feature (1)..(25): SEQ ID NO: 1182; WAN024DSH_at; Start 265; Stop 289
aaaaaggcagcagcagacttgaacg

SEQ ID NO: 169584 - DNA, 25 bp, Artificial
  probe
  misc_feature (1)..(25): SEQ ID NO: 1182; WAN024DSH_at; Start 240; Stop 264
aactgaagagaaagccgaaaatgaa

SEQ ID NO: 169585 - DNA, 25 bp, Artificial
  probe
  misc_feature (1)..(25): SEQ ID NO: 1182; WAN024DSH_at; Start 454; Stop 478
aaattttatgctgtaagagcagttg

SEQ ID NO: 169586 - DNA, 25 bp, Artificial
  probe
  misc_feature (1)..(25): SEQ ID NO: 1182; WAN024DSH_at; Start 429; Stop 453
aacagtattagatgaaaagcaatct

SEQ ID NO: 169587 - DNA, 25 bp, Artificial
  probe
  misc_feature (1)..(25): SEQ ID NO: 1182; WAN024DSH_at; Start 304; Stop 328
catcaaaaagcatatgtaaggtatt

SEQ ID NO: 169588 - DNA, 25 bp, Artificial
  probe
  misc_feature (1)..(25): SEQ ID NO: 1182; WAN024DSH_at; Start 331; Stop 355
gaaattcaacgagcaaaagattcaa

SEQ ID NO: 169589 - DNA, 25 bp, Artificial
  probe
  misc_feature (1)..(25): SEQ ID NO: 1182; WAN024DSH_at; Start 451; Stop 475
tctaaattttatgctgtaagagcag

SEQ ID NO: 169590 - DNA, 25 bp, Artificial
  probe
  misc_feature (1)..(25): SEQ ID NO: 1182; WAN024DSH_at; Start 320; Stop 344
taaggtattttgaaattcaacgagc

SEQ ID NO: 169591 - DNA, 25 bp, Artificial
  probe
  misc_feature (1)..(25): SEQ ID NO: 1182; WAN024DSH_at; Start 301; Stop 325
gtgcatcaaaaagcatatgtaaggt

SEQ ID NO: 169592 - DNA, 25 bp, Artificial
  probe
  misc_feature (1)..(25): SEQ ID NO: 1182; WAN024DSH_at; Start 280; Stop 304
gacttgaacgaagccacagaagtgc

SEQ ID NO: 169593 - DNA, 25 bp, Artificial
  probe
  misc_feature (1)..(25): SEQ ID NO: 1182; WAN024DSH_at; Start 296; Stop 320
cagaagtgcatcaaaaagcatatgt

SEQ ID NO: 169594 - DNA, 25 bp, Artificial
  probe
  misc_feature (1)..(25): SEQ ID NO: 1182; WAN024DSH_at; Start 416; Stop 440
taaaggatacaaaaacagtattaga

SEQ ID NO: 169595 - DNA, 25 bp, Artificial
  probe
  misc_feature (1)..(25): SEQ ID NO: 1182; WAN024DSH_at; Start 283; Stop 307
ttgaacgaagccacagaagtgcatc

SEQ ID NO: 169596 - DNA, 25 bp, Artificial
  probe
  misc_feature (1)..(25): SEQ ID NO: 1182; WAN024DSH_at; Start 289; Stop 313
gaagccacagaagtgcatcaaaaag

SEQ ID NO: 169597 - DNA, 25 bp, Artificial
  probe
  misc_feature (1)..(25): SEQ ID NO: 1182; WAN024DSH_at; Start 403; Stop 427
gcagatcaaaaaataaaggatacaa

SEQ ID NO: 169598 - DNA, 25 bp, Artificial
  probe
  misc_feature (1)..(25): SEQ ID NO: 1182; WAN024DSH_at; Start 372; Stop 396
tcgtgataagtacaataaagatctc

SEQ ID NO: 169599 - DNA, 25 bp, Artificial
  probe
  misc_feature (1)..(25): SEQ ID NO: 1182; WAN024DSH_at; Start 442; Stop 466
gaaaagcaatctaaattttatgctg

SEQ ID NO: 169600 - DNA, 25 bp, Artificial
  probe
  misc_feature (1)..(25): SEQ ID NO: 1182; WAN024DSH_at; Start 277; Stop 301
gcagacttgaacgaagccacagaag

SEQ ID NO: 169601 - DNA, 25 bp, Artificial
  probe
  misc_feature (1)..(25): SEQ ID NO: 1182; WAN024DSH_at; Start 376; Stop 400
gataagtacaataaagatctcgctg

SEQ ID NO: 169602 - DNA, 25 bp, Artificial
  probe
  misc_feature (1)..(25): SEQ ID NO: 1182; WAN024DSH_at; Start 393; Stop 417
tctcgctgaagcagatcaaaaaata

SEQ ID NO: 169603 - DNA, 25 bp, Artificial
  probe
  misc_feature (1)..(25): SEQ ID NO: 1182; WAN024DSH_at; Start 387; Stop 411
taaagatctcgctgaagcagatcaa

SEQ ID NO: 169604 - DNA, 25 bp, Artificial
  probe
  misc_feature (1)..(25): SEQ ID NO: 1182; WAN024DSH_at; Start 361; Stop 385
tataaaaataatcgtgataagtaca

SEQ ID NO: 169605 - DNA, 25 bp, Artificial
  probe
  misc_feature (1)..(25): SEQ ID NO: 1182; WAN024DSH_at; Start 268; Stop 292
aaggcagcagcagacttgaacgaag

SEQ ID NO: 169606 - DNA, 25 bp, Artificial
  probe
  misc_feature (1)..(25): SEQ ID NO: 1182; WAN024DSH_at; Start 397; Stop 421
gctgaagcagatcaaaaaataaagg

SEQ ID NO: 169607 - DNA, 25 bp, Artificial
  probe
  misc_feature (1)..(25): SEQ ID NO: 1182; WAN024DSH_at; Start 425; Stop 449
caaaaacagtattagatgaaaagca

SEQ ID NO: 169608 - DNA, 25 bp, Artificial
  probe
  misc_feature (1)..(25): SEQ ID NO: 1182; WAN024DSH_at; Start 329; Stop 353
ttgaaattcaacgagcaaaagattc

SEQ ID NO: 169609 - DNA, 25 bp, Artificial
  probe
  misc_feature (1)..(25): SEQ ID NO: 1180; WAN024DSI_at; Start 378; Stop 402
taataaaaaattagcagaggcgcaa

SEQ ID NO: 169610 - DNA, 25 bp, Artificial
  probe
  misc_feature (1)..(25): SEQ ID NO: 1180; WAN024DSI_at; Start 299; Stop 323
gtttagcggtacaaaaagcatatgt

SEQ ID NO: 169611 - DNA, 25 bp, Artificial
  probe
  misc_feature (1)..(25): SEQ ID NO: 1180; WAN024DSI_at; Start 289; Stop 313
gacgatgctagtttagcggtacaaa

SEQ ID NO: 169612 - DNA, 25 bp, Artificial
  probe
  misc_feature (1)..(25): SEQ ID NO: 1180; WAN024DSI_at; Start 360; Stop 384
cagaaatcggagtgattataataaa

SEQ ID NO: 169613 - DNA, 25 bp, Artificial
  probe
  misc_feature (1)..(25): SEQ ID NO: 1180; WAN024DSI_at; Start 282; Stop 306
gaaagtagacgatgctagtttagcg

SEQ ID NO: 169614 - DNA, 25 bp, Artificial
  probe
  misc_feature (1)..(25): SEQ ID NO: 1180; WAN024DSI_at; Start 1017; Stop 1041
tactacaaaagctgaattggaaaaa

SEQ ID NO: 169615 - DNA, 25 bp, Artificial
  probe
  misc_feature (1)..(25): SEQ ID NO: 1180; WAN024DSI_at; Start 243; Stop 267
aactgaagagaaagcgaaaaaagag

SEQ ID NO: 169616 - DNA, 25 bp, Artificial
  probe
  misc_feature (1)..(25): SEQ ID NO: 1180; WAN024DSI_at; Start 349; Stop 373
cgtagtaattacagaaatcggagtg

SEQ ID NO: 169617 - DNA, 25 bp, Artificial
  probe
  misc_feature (1)..(25): SEQ ID NO: 1180; WAN024DSI_at; Start 1063; Stop 1087
gctcttaatgagttaggccctgatg

SEQ ID NO: 169618 - DNA, 25 bp, Artificial
  probe
  misc_feature (1)..(25): SEQ ID NO: 1180; WAN024DSI_at; Start 865; Stop 889
gataaagaagctgctgaagctgagt

SEQ ID NO: 169619 - DNA, 25 bp, Artificial
  probe
  misc_feature (1)..(25): SEQ ID NO: 1180; WAN024DSI_at; Start 395; Stop 419
aggcgcaagtaaaaatagatgaagc

SEQ ID NO: 169620 - DNA, 25 bp, Artificial
  probe
  misc_feature (1)..(25): SEQ ID NO: 1180; WAN024DSI_at; Start 1057; Stop 1081
gatgcagctcttaatgagttaggcc

SEQ ID NO: 169621 - DNA, 25 bp, Artificial
  probe
  misc_feature (1)..(25): SEQ ID NO: 1180; WAN024DSI_at; Start 1066; Stop 1090
cttaatgagttaggccctgatggag

SEQ ID NO: 169622 - DNA, 25 bp, Artificial
  probe
  misc_feature (1)..(25): SEQ ID NO: 1180; WAN024DSI_at; Start 389; Stop 413
tagcagaggcgcaagtaaaaataga

SEQ ID NO: 169623 - DNA, 25 bp, Artificial
  probe
  misc_feature (1)..(25): SEQ ID NO: 1180; WAN024DSI_at; Start 410; Stop 434
tagatgaagcgaataaaaaactaac

SEQ ID NO: 169624 - DNA, 25 bp, Artificial
  probe
  misc_feature (1)..(25): SEQ ID NO: 1180; WAN024DSI_at; Start 529; Stop 553
gcagaagaagtagtagctaagaaaa

SEQ ID NO: 169625 - DNA, 25 bp, Artificial
  probe
  misc_feature (1)..(25): SEQ ID NO: 1180; WAN024DSI_at; Start 1071; Stop 1095
tgagttaggccctgatggagatgaa

SEQ ID NO: 169626 - DNA, 25 bp, Artificial
  probe
  misc_feature (1)..(25): SEQ ID NO: 1180; WAN024DSI_at; Start 392; Stop 416
cagaggcgcaagtaaaaatagatga

SEQ ID NO: 169627 - DNA, 25 bp, Artificial
  probe
  misc_feature (1)..(25): SEQ ID NO: 1180; WAN024DSI_at; Start 426; Stop 450
aaaactaaccgcagctaataatgag

SEQ ID NO: 169628 - DNA, 25 bp, Artificial
  probe
  misc_feature (1)..(25): SEQ ID NO: 1180; WAN024DSI_at; Start 316; Stop 340
gcatatgtagaatatagaaaagttc

SEQ ID NO: 169629 - DNA, 25 bp, Artificial
  probe
  misc_feature (1)..(25): SEQ ID NO: 1180; WAN024DSI_at; Start 434; Stop 458
ccgcagctaataatgagtttaaaac

SEQ ID NO: 169630 - DNA, 25 bp, Artificial
  probe
  misc_feature (1)..(25): SEQ ID NO: 1180; WAN024DSI_at; Start 295; Stop 319
gctagtttagcggtacaaaaagcat

SEQ ID NO: 169631 - DNA, 25 bp, Artificial
  probe
  misc_feature (1)..(25): SEQ ID NO: 1180; WAN024DSI_at; Start 272; Stop 296
aagctgctaagaaagtagacgatgc

SEQ ID NO: 169632 - DNA, 25 bp, Artificial
  probe
  misc_feature (1)..(25): SEQ ID NO: 1180; WAN024DSI_at; Start 276; Stop 300
tgctaagaaagtagacgatgctagt

SEQ ID NO: 169633 - DNA, 25 bp, Artificial
  probe
  misc_feature (1)..(25): SEQ ID NO: 1180; WAN024DSI_at; Start 1013; Stop 1037
tagctactacaaaagctgaattgga

SEQ ID NO: 169634 - DNA, 25 bp, Artificial
  probe
  misc_feature (1)..(25): SEQ ID NO: 1180; WAN024DSI_at; Start 418; Stop 442
gcgaataaaaaactaaccgcagcta

SEQ ID NO: 169635 - DNA, 25 bp, Artificial
  probe
  misc_feature (1)..(25): SEQ ID NO: 1180; WAN024DSI_at; Start 862; Stop 886
ttagataaagaagctgctgaagctg

SEQ ID NO: 169636 - DNA, 25 bp, Artificial
  probe
  misc_feature (1)..(25): SEQ ID NO: 1180; WAN024DSI_at; Start 330; Stop 354
tagaaaagttcaagaatctcgtagt

SEQ ID NO: 169637 - DNA, 25 bp, Artificial
  probe
  misc_feature (1)..(25): SEQ ID NO: 1180; WAN024DSI_at; Start 381; Stop 405
taaaaaattagcagaggcgcaagta

SEQ ID NO: 169638 - DNA, 25 bp, Artificial
  probe
  misc_feature (1)..(25): SEQ ID NO: 1180; WAN024DSI_at; Start 256; Stop 280
gcgaaaaaagagaaagaagctgcta

SEQ ID NO: 169639 - DNA, 25 bp, Artificial
  probe
  misc_feature (1)..(25): SEQ ID NO: 1180; WAN024DSI_at; Start 1040; Stop 1064
aaactcaaaaagaattagatgcagc

SEQ ID NO: 169640 - DNA, 25 bp, Artificial
  probe
  misc_feature (1)..(25): SEQ ID NO: 1180; WAN024DSI_at; Start 448; Stop 472
gagtttaaaactgtaagagcagttg

SEQ ID NO: 169641 - DNA, 25 bp, Artificial
  probe
  misc_feature (1)..(25): SEQ ID NO: 1180; WAN024DSI_at; Start 1045; Stop 1069
caaaaagaattagatgcagctctta

SEQ ID NO: 169642 - DNA, 25 bp, Artificial
  probe
  misc_feature (1)..(25): SEQ ID NO: 1180; WAN024DSI_at; Start 340; Stop 364
caagaatctcgtagtaattacagaa

SEQ ID NO: 169643 - DNA, 25 bp, Artificial
  probe
  misc_feature (1)..(25): SEQ ID NO: 1181; WAN024DSJ_at; Start 264; Stop 288
aaagcttgttcaaaaagcggatgaa

SEQ ID NO: 169644 - DNA, 25 bp, Artificial
  probe
  misc_feature (1)..(25): SEQ ID NO: 1181; WAN024DSJ_at; Start 187; Stop 211
gctaagaaagatttagaagaagcaa

SEQ ID NO: 169645 - DNA, 25 bp, Artificial
  probe
  misc_feature (1)..(25): SEQ ID NO: 1181; WAN024DSJ_at; Start 176; Stop 200
aatacgaagaagctaagaaagattt

SEQ ID NO: 169646 - DNA, 25 bp, Artificial
  probe
  misc_feature (1)..(25): SEQ ID NO: 1181; WAN024DSJ_at; Start 251; Stop 275
ctgaagagaaagcaaagcttgttca

SEQ ID NO: 169647 - DNA, 25 bp, Artificial
  probe
  misc_feature (1)..(25): SEQ ID NO: 1181; WAN024DSJ_at; Start 403; Stop 427
aaagatgcattagctcatattgatg

SEQ ID NO: 169648 - DNA, 25 bp, Artificial
  probe
  misc_feature (1)..(25): SEQ ID NO: 1181; WAN024DSJ_at; Start 265; Stop 289
aagcttgttcaaaaagcggatgaag

SEQ ID NO: 169649 - DNA, 25 bp, Artificial
  probe
  misc_feature (1)..(25): SEQ ID NO: 1181; WAN024DSJ_at; Start 258; Stop 282
gaaagcaaagcttgttcaaaaagcg

SEQ ID NO: 169650 - DNA, 25 bp, Artificial
  probe
  misc_feature (1)..(25): SEQ ID NO: 1181; WAN024DSJ_at; Start 406; Stop 430
gatgcattagctcatattgatgagg

SEQ ID NO: 169651 - DNA, 25 bp, Artificial
  probe
  misc_feature (1)..(25): SEQ ID NO: 1181; WAN024DSJ_at; Start 261; Stop 285
agcaaagcttgttcaaaaagcggat

SEQ ID NO: 169652 - DNA, 25 bp, Artificial
  probe
  misc_feature (1)..(25): SEQ ID NO: 1181; WAN024DSJ_at; Start 260; Stop 284
aagcaaagcttgttcaaaaagcgga

SEQ ID NO: 169653 - DNA, 25 bp, Artificial
  probe
  misc_feature (1)..(25): SEQ ID NO: 1181; WAN024DSJ_at; Start 385; Stop 409
gccgctcaacagaaattaaaagatg

SEQ ID NO: 169654 - DNA, 25 bp, Artificial
  probe
  misc_feature (1)..(25): SEQ ID NO: 1181; WAN024DSJ_at; Start 394; Stop 418
cagaaattaaaagatgcattagctc

SEQ ID NO: 169655 - DNA, 25 bp, Artificial
  probe
  misc_feature (1)..(25): SEQ ID NO: 1181; WAN024DSJ_at; Start 173; Stop 197
aagaatacgaagaagctaagaaaga

SEQ ID NO: 169656 - DNA, 25 bp, Artificial
  probe
  misc_feature (1)..(25): SEQ ID NO: 1181; WAN024DSJ_at; Start 391; Stop 415
caacagaaattaaaagatgcattag

SEQ ID NO: 169657 - DNA, 25 bp, Artificial
  probe
  misc_feature (1)..(25): SEQ ID NO: 1181; WAN024DSJ_at; Start 262; Stop 286
gcaaagcttgttcaaaaagcggatg

SEQ ID NO: 169658 - DNA, 25 bp, Artificial
  probe
  misc_feature (1)..(25): SEQ ID NO: 1181; WAN024DSJ_at; Start 253; Stop 277
gaagagaaagcaaagcttgttcaaa

SEQ ID NO: 169659 - DNA, 25 bp, Artificial
  probe
  misc_feature (1)..(25): SEQ ID NO: 1181; WAN024DSJ_at; Start 401; Stop 425
taaaagatgcattagctcatattga

SEQ ID NO: 169660 - DNA, 25 bp, Artificial
  probe
  misc_feature (1)..(25): SEQ ID NO: 1181; WAN024DSJ_at; Start 387; Stop 411
cgctcaacagaaattaaaagatgca

SEQ ID NO: 169661 - DNA, 25 bp, Artificial
  probe
  misc_feature (1)..(25): SEQ ID NO: 1181; WAN024DSJ_at; Start 404; Stop 428
aagatgcattagctcatattgatga

SEQ ID NO: 169662 - DNA, 25 bp, Artificial
  probe
  misc_feature (1)..(25): SEQ ID NO: 1181; WAN024DSJ_at; Start 259; Stop 283
aaagcaaagcttgttcaaaaagcgg

SEQ ID NO: 169663 - DNA, 25 bp, Artificial
  probe
  misc_feature (1)..(25): SEQ ID NO: 1181; WAN024DSJ_at; Start 384; Stop 408
tgccgctcaacagaaattaaaagat

SEQ ID NO: 169664 - DNA, 25 bp, Artificial
  probe
  misc_feature (1)..(25): SEQ ID NO: 1181; WAN024DSJ_at; Start 252; Stop 276
tgaagagaaagcaaagcttgttcaa

SEQ ID NO: 169665 - DNA, 25 bp, Artificial
  probe
  misc_feature (1)..(25): SEQ ID NO: 1181; WAN024DSJ_at; Start 263; Stop 287
caaagcttgttcaaaaagcggatga

SEQ ID NO: 169666 - DNA, 25 bp, Artificial
  probe
  misc_feature (1)..(25): SEQ ID NO: 1181; WAN024DSJ_at; Start 386; Stop 410
ccgctcaacagaaattaaaagatgc

SEQ ID NO: 169667 - DNA, 25 bp, Artificial
  probe
  misc_feature (1)..(25): SEQ ID NO: 1181; WAN024DSJ_at; Start 388; Stop 412
gctcaacagaaattaaaagatgcat

SEQ ID NO: 169668 - DNA, 25 bp, Artificial
  probe
  misc_feature (1)..(25): SEQ ID NO: 1181; WAN024DSJ_at; Start 334; Stop 358
ctccgagaagcacaagaacaattga

SEQ ID NO: 169669 - DNA, 25 bp, Artificial
  probe
  misc_feature (1)..(25): SEQ ID NO: 1181; WAN024DSJ_at; Start 333; Stop 357
actccgagaagcacaagaacaattg

SEQ ID NO: 169670 - DNA, 25 bp, Artificial
  probe
  misc_feature (1)..(25): SEQ ID NO: 1181; WAN024DSJ_at; Start 267; Stop 291
gcttgttcaaaaagcggatgaagag

SEQ ID NO: 169671 - DNA, 25 bp, Artificial
  probe
  misc_feature (1)..(25): SEQ ID NO: 1181; WAN024DSJ_at; Start 389; Stop 413
ctcaacagaaattaaaagatgcatt

SEQ ID NO: 169672 - DNA, 25 bp, Artificial
  probe
  misc_feature (1)..(25): SEQ ID NO: 1181; WAN024DSJ_at; Start 250; Stop 274
actgaagagaaagcaaagcttgttc

SEQ ID NO: 169673 - DNA, 25 bp, Artificial
  probe
  misc_feature (1)..(25): SEQ ID NO: 1181; WAN024DSJ_at; Start 278; Stop 302
aagcggatgaagagcgtcaaaaagc

SEQ ID NO: 169674 - DNA, 25 bp, Artificial
  probe
  misc_feature (1)..(25): SEQ ID NO: 1181; WAN024DSJ_at; Start 175; Stop 199
gaatacgaagaagctaagaaagatt

SEQ ID NO: 169675 - DNA, 25 bp, Artificial
  probe
  misc_feature (1)..(25): SEQ ID NO: 1181; WAN024DSJ_at; Start 171; Stop 195
gaaagaatacgaagaagctaagaaa

SEQ ID NO: 169676 - DNA, 25 bp, Artificial
  probe
  misc_feature (1)..(25): SEQ ID NO: 1181; WAN024DSJ_at; Start 396; Stop 420
gaaattaaaagatgcattagctcat

SEQ ID NO: 169677 - DNA, 25 bp, Artificial
  probe
  misc_feature (1)..(25): SEQ ID NO: 1178; WAN024DSL_at; Start 379; Stop 403
aaagataaggaaaaacaagcagaat

SEQ ID NO: 169678 - DNA, 25 bp, Artificial
  probe
  misc_feature (1)..(25): SEQ ID NO: 1178; WAN024DSL_at; Start 330; Stop 354
cctctcaaatagttctgtgttaaag

SEQ ID NO: 169679 - DNA, 25 bp, Artificial
  probe
  misc_feature (1)..(25): SEQ ID NO: 1178; WAN024DSL_at; Start 343; Stop 367
tctgtgttaaagaaagaaatggagg

SEQ ID NO: 169680 - DNA, 25 bp, Artificial
  probe
  misc_feature (1)..(25): SEQ ID NO: 1178; WAN024DSL_at; Start 313; Stop 337
tatcttgacggaaggaacctctcaa

SEQ ID NO: 169681 - DNA, 25 bp, Artificial
  probe
  misc_feature (1)..(25): SEQ ID NO: 1178; WAN024DSL_at; Start 423; Stop 447
gatagtggttcctaacccgcaagag

SEQ ID NO: 169682 - DNA, 25 bp, Artificial
  probe
  misc_feature (1)..(25): SEQ ID NO: 1178; WAN024DSL_at; Start 490; Stop 514
gaatcaggacttgttaaaagagtag

SEQ ID NO: 169683 - DNA, 25 bp, Artificial
  probe
  misc_feature (1)..(25): SEQ ID NO: 1178; WAN024DSL_at; Start 259; Stop 283
gcttctctagagcaacaagaagcaa

SEQ ID NO: 169684 - DNA, 25 bp, Artificial
  probe
  misc_feature (1)..(25): SEQ ID NO: 1178; WAN024DSL_at; Start 610; Stop 634
aatgaagttcataaactagaacaaa

SEQ ID NO: 169685 - DNA, 25 bp, Artificial
  probe
  misc_feature (1)..(25): SEQ ID NO: 1178; WAN024DSL_at; Start 225; Stop 249
gagaattgaggagaaagcggcaaaa

SEQ ID NO: 169686 - DNA, 25 bp, Artificial
  probe
  misc_feature (1)..(25): SEQ ID NO: 1178; WAN024DSL_at; Start 322; Stop 346
ggaaggaacctctcaaatagttctg

SEQ ID NO: 169687 - DNA, 25 bp, Artificial
  probe
  misc_feature (1)..(25): SEQ ID NO: 1178; WAN024DSL_at; Start 262; Stop 286
tctctagagcaacaagaagcaaata

SEQ ID NO: 169688 - DNA, 25 bp, Artificial
  probe
  misc_feature (1)..(25): SEQ ID NO: 1178; WAN024DSL_at; Start 318; Stop 342
tgacggaaggaacctctcaaatagt

SEQ ID NO: 169689 - DNA, 25 bp, Artificial
  probe
  misc_feature (1)..(25): SEQ ID NO: 1178; WAN024DSL_at; Start 202; Stop 226
gaaaaatatgccgattatcagagga

SEQ ID NO: 169690 - DNA, 25 bp, Artificial
  probe
  misc_feature (1)..(25): SEQ ID NO: 1178; WAN024DSL_at; Start 438; Stop 462
cccgcaagagttagaaatggctaga

SEQ ID NO: 169691 - DNA, 25 bp, Artificial
  probe
  misc_feature (1)..(25): SEQ ID NO: 1178; WAN024DSL_at; Start 285; Stop 309
taaggactatcaattaaagttgaag

SEQ ID NO: 169692 - DNA, 25 bp, Artificial
  probe
  misc_feature (1)..(25): SEQ ID NO: 1178; WAN024DSL_at; Start 191; Stop 215
aacgtgcgcaggaaaaatatgccga

SEQ ID NO: 169693 - DNA, 25 bp, Artificial
  probe
  misc_feature (1)..(25): SEQ ID NO: 1178; WAN024DSL_at; Start 442; Stop 466
caagagttagaaatggctagacgaa

SEQ ID NO: 169694 - DNA, 25 bp, Artificial
  probe
  misc_feature (1)..(25): SEQ ID NO: 1178; WAN024DSL_at; Start 435; Stop 459
taacccgcaagagttagaaatggct

SEQ ID NO: 169695 - DNA, 25 bp, Artificial
  probe
  misc_feature (1)..(25): SEQ ID NO: 1178; WAN024DSL_at; Start 449; Stop 473
tagaaatggctagacgaaaatcaga

SEQ ID NO: 169696 - DNA, 25 bp, Artificial
  probe
  misc_feature (1)..(25): SEQ ID NO: 1178; WAN024DSL_at; Start 208; Stop 232
tatgccgattatcagaggagaattg

SEQ ID NO: 169697 - DNA, 25 bp, Artificial
  probe
  misc_feature (1)..(25): SEQ ID NO: 1178; WAN024DSL_at; Start 228; Stop 252
aattgaggagaaagcggcaaaagaa

SEQ ID NO: 169698 - DNA, 25 bp, Artificial
  probe
  misc_feature (1)..(25): SEQ ID NO: 1178; WAN024DSL_at; Start 403; Stop 427
tttaataagattagacgagagatag

SEQ ID NO: 169699 - DNA, 25 bp, Artificial
  probe
  misc_feature (1)..(25): SEQ ID NO: 1178; WAN024DSL_at; Start 419; Stop 443
gagagatagtggttcctaacccgca

SEQ ID NO: 169700 - DNA, 25 bp, Artificial
  probe
  misc_feature (1)..(25): SEQ ID NO: 1178; WAN024DSL_at; Start 482; Stop 506
aagcaaaagaatcaggacttgttaa

SEQ ID NO: 169701 - DNA, 25 bp, Artificial
  probe
  misc_feature (1)..(25): SEQ ID NO: 1178; WAN024DSL_at; Start 197; Stop 221
cgcaggaaaaatatgccgattatca

SEQ ID NO: 169702 - DNA, 25 bp, Artificial
  probe
  misc_feature (1)..(25): SEQ ID NO: 1178; WAN024DSL_at; Start 416; Stop 440
gacgagagatagtggttcctaaccc

SEQ ID NO: 169703 - DNA, 25 bp, Artificial
  probe
  misc_feature (1)..(25): SEQ ID NO: 1178; WAN024DSL_at; Start 309; Stop 333
gaaatatcttgacggaaggaacctc

SEQ ID NO: 169704 - DNA, 25 bp, Artificial
  probe
  misc_feature (1)..(25): SEQ ID NO: 1178; WAN024DSL_at; Start 193; Stop 217
cgtgcgcaggaaaaatatgccgatt

SEQ ID NO: 169705 - DNA, 25 bp, Artificial
  probe
  misc_feature (1)..(25): SEQ ID NO: 1178; WAN024DSL_at; Start 299; Stop 323
taaagttgaagaaatatcttgacgg

SEQ ID NO: 169706 - DNA, 25 bp, Artificial
  probe
  misc_feature (1)..(25): SEQ ID NO: 1178; WAN024DSL_at; Start 274; Stop 298
caagaagcaaataaggactatcaat

SEQ ID NO: 169707 - DNA, 25 bp, Artificial
  probe
  misc_feature (1)..(25): SEQ ID NO: 1178; WAN024DSL_at; Start 270; Stop 294
gcaacaagaagcaaataaggactat

SEQ ID NO: 169708 - DNA, 25 bp, Artificial
  probe
  misc_feature (1)..(25): SEQ ID NO: 1178; WAN024DSL_at; Start 456; Stop 480
ggctagacgaaaatcagaagtggct

SEQ ID NO: 169709 - DNA, 25 bp, Artificial
  probe
  misc_feature (1)..(25): SEQ ID NO: 1178; WAN024DSL_at; Start 212; Stop 236
ccgattatcagaggagaattgagga

SEQ ID NO: 169710 - DNA, 25 bp, Artificial
  probe
  misc_feature (1)..(25): SEQ ID NO: 1178; WAN024DSL_at; Start 388; Stop 412
gaaaaacaagcagaatttaataaga

SEQ ID NO: 169711 - DNA, 25 bp, Artificial
  probe
  misc_feature (1)..(25): SEQ ID NO: 3096; WAN024DSM_at; Start 426; Stop 450
taaaaaggccccatcttcttcgtca

SEQ ID NO: 169712 - DNA, 25 bp, Artificial
  probe
  misc_feature (1)..(25): SEQ ID NO: 3096; WAN024DSM_at; Start 165; Stop 189
aagtcagacagaacaaggagaaatc

SEQ ID NO: 169713 - DNA, 25 bp, Artificial
  probe
  misc_feature (1)..(25): SEQ ID NO: 3096; WAN024DSM_at; Start 178; Stop 202
caaggagaaatcaatatagaacgag

SEQ ID NO: 169714 - DNA, 25 bp, Artificial
  probe
  misc_feature (1)..(25): SEQ ID NO: 3096; WAN024DSM_at; Start 748; Stop 772
agtgaagaaactgaggctacaaggt

SEQ ID NO: 169715 - DNA, 25 bp, Artificial
  probe
  misc_feature (1)..(25): SEQ ID NO: 3096; WAN024DSM_at; Start 238; Stop 262
aaaaaagtgagtgagatctatacaa

SEQ ID NO: 169716 - DNA, 25 bp, Artificial
  probe
  misc_feature (1)..(25): SEQ ID NO: 3096; WAN024DSM_at; Start 258; Stop 282
tacaaaattagagagagatagacat

SEQ ID NO: 169717 - DNA, 25 bp, Artificial
  probe
  misc_feature (1)..(25): SEQ ID NO: 3096; WAN024DSM_at; Start 215; Stop 239
cagcggtcagtgaatataaagaaaa

SEQ ID NO: 169718 - DNA, 25 bp, Artificial
  probe
  misc_feature (1)..(25): SEQ ID NO: 3096; WAN024DSM_at; Start 202; Stop 226
gataaggcaaagacagcggtcagtg

SEQ ID NO: 169719 - DNA, 25 bp, Artificial
  probe
  misc_feature (1)..(25): SEQ ID NO: 3096; WAN024DSM_at; Start 285; Stop 309
agatactgtagatctagttaacaag

SEQ ID NO: 169720 - DNA, 25 bp, Artificial
  probe
  misc_feature (1)..(25): SEQ ID NO: 3096; WAN024DSM_at; Start 246; Stop 270
gagtgagatctatacaaaattagag

SEQ ID NO: 169721 - DNA, 25 bp, Artificial
  probe
  misc_feature (1)..(25): SEQ ID NO: 3096; WAN024DSM_at; Start 371; Stop 395
tacagggacttattacaacaagtcg

SEQ ID NO: 169722 - DNA, 25 bp, Artificial
  probe
  misc_feature (1)..(25): SEQ ID NO: 3096; WAN024DSM_at; Start 366; Stop 390
cgaaatacagggacttattacaaca

SEQ ID NO: 169723 - DNA, 25 bp, Artificial
  probe
  misc_feature (1)..(25): SEQ ID NO: 3096; WAN024DSM_at; Start 197; Stop 221
aacgagataaggcaaagacagcggt

SEQ ID NO: 169724 - DNA, 25 bp, Artificial
  probe
  misc_feature (1)..(25): SEQ ID NO: 3096; WAN024DSM_at; Start 383; Stop 407
ttacaacaagtcgatcaaaactaga

SEQ ID NO: 169725 - DNA, 25 bp, Artificial
  probe
  misc_feature (1)..(25): SEQ ID NO: 3096; WAN024DSM_at; Start 743; Stop 767
ttgagagtgaagaaactgaggctac

SEQ ID NO: 169726 - DNA, 25 bp, Artificial
  probe
  misc_feature (1)..(25): SEQ ID NO: 3096; WAN024DSM_at; Start 854; Stop 878
aaccagctgaacaacaagctgaaga

SEQ ID NO: 169727 - DNA, 25 bp, Artificial
  probe
  misc_feature (1)..(25): SEQ ID NO: 3096; WAN024DSM_at; Start 278; Stop 302
gacataaagatactgtagatctagt

SEQ ID NO: 169728 - DNA, 25 bp, Artificial
  probe
  misc_feature (1)..(25): SEQ ID NO: 3096; WAN024DSM_at; Start 168; Stop 192
tcagacagaacaaggagaaatcaat

SEQ ID NO: 169729 - DNA, 25 bp, Artificial
  probe
  misc_feature (1)..(25): SEQ ID NO: 3096; WAN024DSM_at; Start 213; Stop 237
gacagcggtcagtgaatataaagaa

SEQ ID NO: 169730 - DNA, 25 bp, Artificial
  probe
  misc_feature (1)..(25): SEQ ID NO: 3096; WAN024DSM_at; Start 272; Stop 296
gagatagacataaagatactgtaga

SEQ ID NO: 169731 - DNA, 25 bp, Artificial
  probe
  misc_feature (1)..(25): SEQ ID NO: 3096; WAN024DSM_at; Start 266; Stop 290
tagagagagatagacataaagatac

SEQ ID NO: 169732 - DNA, 25 bp, Artificial
  probe
  misc_feature (1)..(25): SEQ ID NO: 3096; WAN024DSM_at; Start 730; Stop 754
gcaaaagcgaaagttgagagtgaag

SEQ ID NO: 169733 - DNA, 25 bp, Artificial
  probe
  misc_feature (1)..(25): SEQ ID NO: 3096; WAN024DSM_at; Start 416; Stop 440
tgtctaaatataaaaaggccccatc

SEQ ID NO: 169734 - DNA, 25 bp, Artificial
  probe
  misc_feature (1)..(25): SEQ ID NO: 3096; WAN024DSM_at; Start 412; Stop 436
gctgtgtctaaatataaaaaggccc

SEQ ID NO: 169735 - DNA, 25 bp, Artificial
  probe
  misc_feature (1)..(25): SEQ ID NO: 3096; WAN024DSM_at; Start 173; Stop 197
cagaacaaggagaaatcaatataga

SEQ ID NO: 169736 - DNA, 25 bp, Artificial
  probe
  misc_feature (1)..(25): SEQ ID NO: 3096; WAN024DSM_at; Start 208; Stop 232
gcaaagacagcggtcagtgaatata

SEQ ID NO: 169737 - DNA, 25 bp, Artificial
  probe
  misc_feature (1)..(25): SEQ ID NO: 3096; WAN024DSM_at; Start 185; Stop 209
aaatcaatatagaacgagataaggc

SEQ ID NO: 169738 - DNA, 25 bp, Artificial
  probe
  misc_feature (1)..(25): SEQ ID NO: 3096; WAN024DSM_at; Start 386; Stop 410
caacaagtcgatcaaaactagatga

SEQ ID NO: 169739 - DNA, 25 bp, Artificial
  probe
  misc_feature (1)..(25): SEQ ID NO: 3096; WAN024DSM_at; Start 734; Stop 758
aagcgaaagttgagagtgaagaaac

SEQ ID NO: 169740 - DNA, 25 bp, Artificial
  probe
  misc_feature (1)..(25): SEQ ID NO: 3096; WAN024DSM_at; Start 375; Stop 399
gggacttattacaacaagtcgatca

SEQ ID NO: 169741 - DNA, 25 bp, Artificial
  probe
  misc_feature (1)..(25): SEQ ID NO: 3096; WAN024DSM_at; Start 745; Stop 769
gagagtgaagaaactgaggctacaa

SEQ ID NO: 169742 - DNA, 25 bp, Artificial
  probe
  misc_feature (1)..(25): SEQ ID NO: 3096; WAN024DSM_at; Start 309; Stop 333
gttgcaagagattaagaacgagtat

SEQ ID NO: 169743 - DNA, 25 bp, Artificial
  probe
  misc_feature (1)..(25): SEQ ID NO: 3096; WAN024DSM_at; Start 204; Stop 228
taaggcaaagacagcggtcagtgaa

SEQ ID NO: 169744 - DNA, 25 bp, Artificial
  probe
  misc_feature (1)..(25): SEQ ID NO: 3096; WAN024DSM_at; Start 199; Stop 223
cgagataaggcaaagacagcggtca

SEQ ID NO: 169745 - DNA, 25 bp, Artificial
  probe
  misc_feature (1)..(25): SEQ ID NO: 3094; WAN024DSN_at; Start 885; Stop 909
tagcgtaggtgaagaaactcttcca

SEQ ID NO: 169746 - DNA, 25 bp, Artificial
  probe
  misc_feature (1)..(25): SEQ ID NO: 3094; WAN024DSN_at; Start 772; Stop 796
caaaaagtggatactaaagagcaag

SEQ ID NO: 169747 - DNA, 25 bp, Artificial
  probe
  misc_feature (1)..(25): SEQ ID NO: 3094; WAN024DSN_at; Start 815; Stop 839
caaaacgaggagtttctggagagct

SEQ ID NO: 169748 - DNA, 25 bp, Artificial
  probe
  misc_feature (1)..(25): SEQ ID NO: 3094; WAN024DSN_at; Start 883; Stop 907
tctagcgtaggtgaagaaactcttc

SEQ ID NO: 169749 - DNA, 25 bp, Artificial
  probe
  misc_feature (1)..(25): SEQ ID NO: 3094; WAN024DSN_at; Start 227; Stop 251
gtgagatccaagaatatataaaaaa

SEQ ID NO: 169750 - DNA, 25 bp, Artificial
  probe
  misc_feature (1)..(25): SEQ ID NO: 3094; WAN024DSN_at; Start 858; Stop 882
agaaaatgatgcgaagtcttcagat

SEQ ID NO: 169751 - DNA, 25 bp, Artificial
  probe
  misc_feature (1)..(25): SEQ ID NO: 3094; WAN024DSN_at; Start 908; Stop 932
caagcccatcccttaatatggcaaa

SEQ ID NO: 169752 - DNA, 25 bp, Artificial
  probe
  misc_feature (1)..(25): SEQ ID NO: 3094; WAN024DSN_at; Start 821; Stop 845
gaggagtttctggagagctagcaac

SEQ ID NO: 169753 - DNA, 25 bp, Artificial
  probe
  misc_feature (1)..(25): SEQ ID NO: 3094; WAN024DSN_at; Start 865; Stop 889
gatgcgaagtcttcagattctagcg

SEQ ID NO: 169754 - DNA, 25 bp, Artificial
  probe
  misc_feature (1)..(25): SEQ ID NO: 3094; WAN024DSN_at; Start 869; Stop 893
cgaagtcttcagattctagcgtagg

SEQ ID NO: 169755 - DNA, 25 bp, Artificial
  probe
  misc_feature (1)..(25): SEQ ID NO: 3094; WAN024DSN_at; Start 903; Stop 927
tcttccaagcccatcccttaatatg

SEQ ID NO: 169756 - DNA, 25 bp, Artificial
  probe
  misc_feature (1)..(25): SEQ ID NO: 3094; WAN024DSN_at; Start 224; Stop 248
tgagtgagatccaagaatatataaa

SEQ ID NO: 169757 - DNA, 25 bp, Artificial
  probe
  misc_feature (1)..(25): SEQ ID NO: 3094; WAN024DSN_at; Start 914; Stop 938
catcccttaatatggcaaatgaaag

SEQ ID NO: 169758 - DNA, 25 bp, Artificial
  probe
  misc_feature (1)..(25): SEQ ID NO: 3094; WAN024DSN_at; Start 852; Stop 876
taaaaaagaaaatgatgcgaagtct

SEQ ID NO: 169759 - DNA, 25 bp, Artificial
  probe
  misc_feature (1)..(25): SEQ ID NO: 3094; WAN024DSN_at; Start 826; Stop 850
gtttctggagagctagcaacacctg

SEQ ID NO: 169760 - DNA, 25 bp, Artificial
  probe
  misc_feature (1)..(25): SEQ ID NO: 3094; WAN024DSN_at; Start 949; Stop 973
cataggaaagatgtcgatgaatata

SEQ ID NO: 169761 - DNA, 25 bp, Artificial
  probe
  misc_feature (1)..(25): SEQ ID NO: 3094; WAN024DSN_at; Start 461; Stop 485
tagcagaagctaaacaaaaagccaa

SEQ ID NO: 169762 - DNA, 25 bp, Artificial
  probe
  misc_feature (1)..(25): SEQ ID NO: 3094; WAN024DSN_at; Start 824; Stop 848
gagtttctggagagctagcaacacc

SEQ ID NO: 169763 - DNA, 25 bp, Artificial
  probe
  misc_feature (1)..(25): SEQ ID NO: 3094; WAN024DSN_at; Start 108; Stop 132
tgcgacggagaatgagggaattacc

SEQ ID NO: 169764 - DNA, 25 bp, Artificial
  probe
  misc_feature (1)..(25): SEQ ID NO: 3094; WAN024DSN_at; Start 856; Stop 880
aaagaaaatgatgcgaagtcttcag

SEQ ID NO: 169765 - DNA, 25 bp, Artificial
  probe
  misc_feature (1)..(25): SEQ ID NO: 3094; WAN024DSN_at; Start 819; Stop 843
acgaggagtttctggagagctagca

SEQ ID NO: 169766 - DNA, 25 bp, Artificial
  probe
  misc_feature (1)..(25): SEQ ID NO: 3094; WAN024DSN_at; Start 888; Stop 912
cgtaggtgaagaaactcttccaagc

SEQ ID NO: 169767 - DNA, 25 bp, Artificial
  probe
  misc_feature (1)..(25): SEQ ID NO: 3094; WAN024DSN_at; Start 944; Stop 968
cagaacataggaaagatgtcgatga

SEQ ID NO: 169768 - DNA, 25 bp, Artificial
  probe
  misc_feature (1)..(25): SEQ ID NO: 3094; WAN024DSN_at; Start 951; Stop 975
taggaaagatgtcgatgaatatata

SEQ ID NO: 169769 - DNA, 25 bp, Artificial
  probe
  misc_feature (1)..(25): SEQ ID NO: 3094; WAN024DSN_at; Start 110; Stop 134
cgacggagaatgagggaattaccca

SEQ ID NO: 169770 - DNA, 25 bp, Artificial
  probe
  misc_feature (1)..(25): SEQ ID NO: 3094; WAN024DSN_at; Start 71; Stop 95
tagtagttgctagtcttgttatggg

SEQ ID NO: 169771 - DNA, 25 bp, Artificial
  probe
  misc_feature (1)..(25): SEQ ID NO: 3094; WAN024DSN_at; Start 114; Stop 138
ggagaatgagggaattacccaagta

SEQ ID NO: 169772 - DNA, 25 bp, Artificial
  probe
  misc_feature (1)..(25): SEQ ID NO: 3094; WAN024DSN_at; Start 106; Stop 130
catgcgacggagaatgagggaatta

SEQ ID NO: 169773 - DNA, 25 bp, Artificial
  probe
  misc_feature (1)..(25): SEQ ID NO: 3094; WAN024DSN_at; Start 779; Stop 803
tggatactaaagagcaaggtaaacc

SEQ ID NO: 169774 - DNA, 25 bp, Artificial
  probe
  misc_feature (1)..(25): SEQ ID NO: 3094; WAN024DSN_at; Start 848; Stop 872
ctgataaaaaagaaaatgatgcgaa

SEQ ID NO: 169775 - DNA, 25 bp, Artificial
  probe
  misc_feature (1)..(25): SEQ ID NO: 3094; WAN024DSN_at; Start 872; Stop 896
agtcttcagattctagcgtaggtga

SEQ ID NO: 169776 - DNA, 25 bp, Artificial
  probe
  misc_feature (1)..(25): SEQ ID NO: 3094; WAN024DSN_at; Start 104; Stop 128
ttcatgcgacggagaatgagggaat

SEQ ID NO: 169777 - DNA, 25 bp, Artificial
  probe
  misc_feature (1)..(25): SEQ ID NO: 3094; WAN024DSN_at; Start 911; Stop 935
gcccatcccttaatatggcaaatga

SEQ ID NO: 169778 - DNA, 25 bp, Artificial
  probe
  misc_feature (1)..(25): SEQ ID NO: 3094; WAN024DSN_at; Start 878; Stop 902
cagattctagcgtaggtgaagaaac

SEQ ID NO: 169779 - DNA, 25 bp, Artificial
  probe
  misc_feature (1)..(25): SEQ ID NO: 3093; WAN024DSO_s_at; Start 26; Stop 50
aagtacattattcaattcgtaaatt

SEQ ID NO: 169780 - DNA, 25 bp, Artificial
  probe
  misc_feature (1)..(25): SEQ ID NO: 3093; WAN024DSO_s_at; Start 30; Stop 54
acattattcaattcgtaaatttagt

SEQ ID NO: 169781 - DNA, 25 bp, Artificial
  probe
  misc_feature (1)..(25): SEQ ID NO: 3093; WAN024DSO_s_at; Start 27; Stop 51
agtacattattcaattcgtaaattt

SEQ ID NO: 169782 - DNA, 25 bp, Artificial
  probe
  misc_feature (1)..(25): SEQ ID NO: 3093; WAN024DSO_s_at; Start 21; Stop 45
aagaaaagtacattattcaattcgt

SEQ ID NO: 169783 - DNA, 25 bp, Artificial
  probe
  misc_feature (1)..(25): SEQ ID NO: 3093; WAN024DSO_s_at; Start 19; Stop 43
gaaagaaaagtacattattcaattc

SEQ ID NO: 169784 - DNA, 25 bp, Artificial
  probe
  misc_feature (1)..(25): SEQ ID NO: 3093; WAN024DSO_s_at; Start 23; Stop 47
gaaaagtacattattcaattcgtaa

SEQ ID NO: 169785 - DNA, 25 bp, Artificial
  probe
  misc_feature (1)..(25): SEQ ID NO: 3093; WAN024DSO_s_at; Start 28; Stop 52
gtacattattcaattcgtaaattta

SEQ ID NO: 169786 - DNA, 25 bp, Artificial
  probe
  misc_feature (1)..(25): SEQ ID NO: 3093; WAN024DSO_s_at; Start 25; Stop 49
aaagtacattattcaattcgtaaat

SEQ ID NO: 169787 - DNA, 25 bp, Artificial
  probe
  misc_feature (1)..(25): SEQ ID NO: 3093; WAN024DSO_s_at; Start 22; Stop 46
agaaaagtacattattcaattcgta

SEQ ID NO: 169788 - DNA, 25 bp, Artificial
  probe
  misc_feature (1)..(25): SEQ ID NO: 3093; WAN024DSO_s_at; Start 20; Stop 44
aaagaaaagtacattattcaattcg

SEQ ID NO: 169789 - DNA, 25 bp, Artificial
  probe
  misc_feature (1)..(25): SEQ ID NO: 3093; WAN024DSO_s_at; Start 29; Stop 53
tacattattcaattcgtaaatttag

SEQ ID NO: 169790 - DNA, 25 bp, Artificial
  probe
  misc_feature (1)..(25): SEQ ID NO: 3091; WAN024DSP_at; Start 679; Stop 703
tcaacgcaaaaagcccaactacaga

SEQ ID NO: 169791 - DNA, 25 bp, Artificial
  probe
  misc_feature (1)..(25): SEQ ID NO: 3091; WAN024DSP_at; Start 531; Stop 555
gaaggcaaaggctgcagttactgaa

SEQ ID NO: 169792 - DNA, 25 bp, Artificial
  probe
  misc_feature (1)..(25): SEQ ID NO: 3091; WAN024DSP_at; Start 756; Stop 780
aaatggcttatcttcttcgtcgaat

SEQ ID NO: 169793 - DNA, 25 bp, Artificial
  probe
  misc_feature (1)..(25): SEQ ID NO: 3091; WAN024DSP_at; Start 761; Stop 785
gcttatcttcttcgtcgaattcagg

SEQ ID NO: 169794 - DNA, 25 bp, Artificial
  probe
  misc_feature (1)..(25): SEQ ID NO: 3091; WAN024DSP_at; Start 324; Stop 348
ttcaaaagagaagtcgacagctgag

SEQ ID NO: 169795 - DNA, 25 bp, Artificial
  probe
  misc_feature (1)..(25): SEQ ID NO: 3091; WAN024DSP_at; Start 517; Stop 541
gatttagatcgaaagaaggcaaagg

SEQ ID NO: 169796 - DNA, 25 bp, Artificial
  probe
  misc_feature (1)..(25): SEQ ID NO: 3091; WAN024DSP_at; Start 753; Stop 777
taaaaatggcttatcttcttcgtcg

SEQ ID NO: 169797 - DNA, 25 bp, Artificial
  probe
  misc_feature (1)..(25): SEQ ID NO: 3091; WAN024DSP_at; Start 771; Stop 795
ttcgtcgaattcaggctcctccact

SEQ ID NO: 169798 - DNA, 25 bp, Artificial
  probe
  misc_feature (1)..(25): SEQ ID NO: 3091; WAN024DSP_at; Start 703; Stop 727
aaactgatcgcagaaagtcaatcaa

SEQ ID NO: 169799 - DNA, 25 bp, Artificial
  probe
  misc_feature (1)..(25): SEQ ID NO: 3091; WAN024DSP_at; Start 609; Stop 633
tacccatactgtagagttaattaaa

SEQ ID NO: 169800 - DNA, 25 bp, Artificial
  probe
  misc_feature (1)..(25): SEQ ID NO: 3091; WAN024DSP_at; Start 684; Stop 708
gcaaaaagcccaactacagaaactg

SEQ ID NO: 169801 - DNA, 25 bp, Artificial
  probe
  misc_feature (1)..(25): SEQ ID NO: 3091; WAN024DSP_at; Start 603; Stop 627
gcaacatacccatactgtagagtta

SEQ ID NO: 169802 - DNA, 25 bp, Artificial
  probe
  misc_feature (1)..(25): SEQ ID NO: 3091; WAN024DSP_at; Start 664; Stop 688
cataagttagatgaatcaacgcaaa

SEQ ID NO: 169803 - DNA, 25 bp, Artificial
  probe
  misc_feature (1)..(25): SEQ ID NO: 3091; WAN024DSP_at; Start 525; Stop 549
tcgaaagaaggcaaaggctgcagtt

SEQ ID NO: 169804 - DNA, 25 bp, Artificial
  probe
  misc_feature (1)..(25): SEQ ID NO: 3091; WAN024DSP_at; Start 321; Stop 345
tgtttcaaaagagaagtcgacagct

SEQ ID NO: 169805 - DNA, 25 bp, Artificial
  probe
  misc_feature (1)..(25): SEQ ID NO: 3091; WAN024DSP_at; Start 527; Stop 551
gaaagaaggcaaaggctgcagttac

SEQ ID NO: 169806 - DNA, 25 bp, Artificial
  probe
  misc_feature (1)..(25): SEQ ID NO: 3091; WAN024DSP_at; Start 534; Stop 558
ggcaaaggctgcagttactgaacat

SEQ ID NO: 169807 - DNA, 25 bp, Artificial
  probe
  misc_feature (1)..(25): SEQ ID NO: 3091; WAN024DSP_at; Start 309; Stop 333
gcgtggattaagtgtttcaaaagag

SEQ ID NO: 169808 - DNA, 25 bp, Artificial
  probe
  misc_feature (1)..(25): SEQ ID NO: 3091; WAN024DSP_at; Start 499; Stop 523
cataaggggcgagaaatcgatttag

SEQ ID NO: 169809 - DNA, 25 bp, Artificial
  probe
  misc_feature (1)..(25): SEQ ID NO: 3091; WAN024DSP_at; Start 540; Stop 564
ggctgcagttactgaacatctaaaa

SEQ ID NO: 169810 - DNA, 25 bp, Artificial
  probe
  misc_feature (1)..(25): SEQ ID NO: 3091; WAN024DSP_at; Start 562; Stop 586
aaaaaattattgaatgacatcgaga

SEQ ID NO: 169811 - DNA, 25 bp, Artificial
  probe
  misc_feature (1)..(25): SEQ ID NO: 3091; WAN024DSP_at; Start 536; Stop 560
caaaggctgcagttactgaacatct

SEQ ID NO: 169812 - DNA, 25 bp, Artificial
  probe
  misc_feature (1)..(25): SEQ ID NO: 3091; WAN024DSP_at; Start 601; Stop 625
gagcaacatacccatactgtagagt

SEQ ID NO: 169813 - DNA, 25 bp, Artificial
  probe
  misc_feature (1)..(25): SEQ ID NO: 3091; WAN024DSP_at; Start 569; Stop 593
tattgaatgacatcgagaaaaattt

SEQ ID NO: 169814 - DNA, 25 bp, Artificial
  probe
  misc_feature (1)..(25): SEQ ID NO: 3091; WAN024DSP_at; Start 661; Stop 685
ttgcataagttagatgaatcaacgc

SEQ ID NO: 169815 - DNA, 25 bp, Artificial
  probe
  misc_feature (1)..(25): SEQ ID NO: 3091; WAN024DSP_at; Start 775; Stop 799
tcgaattcaggctcctccactaaac

SEQ ID NO: 169816 - DNA, 25 bp, Artificial
  probe
  misc_feature (1)..(25): SEQ ID NO: 3091; WAN024DSP_at; Start 774; Stop 798
gtcgaattcaggctcctccactaaa

SEQ ID NO: 169817 - DNA, 25 bp, Artificial
  probe
  misc_feature (1)..(25): SEQ ID NO: 3091; WAN024DSP_at; Start 701; Stop 725
agaaactgatcgcagaaagtcaatc

SEQ ID NO: 169818 - DNA, 25 bp, Artificial
  probe
  misc_feature (1)..(25): SEQ ID NO: 3091; WAN024DSP_at; Start 652; Stop 676
aaaacgtatttgcataagttagatg

SEQ ID NO: 169819 - DNA, 25 bp, Artificial
  probe
  misc_feature (1)..(25): SEQ ID NO: 3091; WAN024DSP_at; Start 613; Stop 637
catactgtagagttaattaaaaact

SEQ ID NO: 169820 - DNA, 25 bp, Artificial
  probe
  misc_feature (1)..(25): SEQ ID NO: 3091; WAN024DSP_at; Start 697; Stop 721
ctacagaaactgatcgcagaaagtc

SEQ ID NO: 169821 - DNA, 25 bp, Artificial
  probe
  misc_feature (1)..(25): SEQ ID NO: 3091; WAN024DSP_at; Start 542; Stop 566
ctgcagttactgaacatctaaaaaa

SEQ ID NO: 169822 - DNA, 25 bp, Artificial
  probe
  misc_feature (1)..(25): SEQ ID NO: 3091; WAN024DSP_at; Start 521; Stop 545
tagatcgaaagaaggcaaaggctgc

SEQ ID NO: 169823 - DNA, 25 bp, Artificial
  probe
  misc_feature (1)..(25): SEQ ID NO: 3091; WAN024DSP_at; Start 769; Stop 793
tcttcgtcgaattcaggctcctcca

SEQ ID NO: 169824 - DNA, 25 bp, Artificial
  probe
  misc_feature (1)..(25): SEQ ID NO: 3097; WAN024DSQ_at; Start 254; Stop 278
tcgccttcaacaaaaagttgagcag

SEQ ID NO: 169825 - DNA, 25 bp, Artificial
  probe
  misc_feature (1)..(25): SEQ ID NO: 3097; WAN024DSQ_at; Start 305; Stop 329
aaaagaagttgaaagctgagttggc

SEQ ID NO: 169826 - DNA, 25 bp, Artificial
  probe
  misc_feature (1)..(25): SEQ ID NO: 3097; WAN024DSQ_at; Start 380; Stop 404
tcaagacagatcgtgaagaagctga

SEQ ID NO: 169827 - DNA, 25 bp, Artificial
  probe
  misc_feature (1)..(25): SEQ ID NO: 3097; WAN024DSQ_at; Start 255; Stop 279
cgccttcaacaaaaagttgagcaga

SEQ ID NO: 169828 - DNA, 25 bp, Artificial
  probe
  misc_feature (1)..(25): SEQ ID NO: 3097; WAN024DSQ_at; Start 385; Stop 409
acagatcgtgaagaagctgagctaa

SEQ ID NO: 169829 - DNA, 25 bp, Artificial
  probe
  misc_feature (1)..(25): SEQ ID NO: 3097; WAN024DSQ_at; Start 256; Stop 280
gccttcaacaaaaagttgagcagaa

SEQ ID NO: 169830 - DNA, 25 bp, Artificial
  probe
  misc_feature (1)..(25): SEQ ID NO: 3097; WAN024DSQ_at; Start 253; Stop 277
ctcgccttcaacaaaaagttgagca

SEQ ID NO: 169831 - DNA, 25 bp, Artificial
  probe
  misc_feature (1)..(25): SEQ ID NO: 3097; WAN024DSQ_at; Start 307; Stop 331
aagaagttgaaagctgagttggcaa

SEQ ID NO: 169832 - DNA, 25 bp, Artificial
  probe
  misc_feature (1)..(25): SEQ ID NO: 3097; WAN024DSQ_at; Start 387; Stop 411
agatcgtgaagaagctgagctaaag

SEQ ID NO: 169833 - DNA, 25 bp, Artificial
  probe
  misc_feature (1)..(25): SEQ ID NO: 3097; WAN024DSQ_at; Start 379; Stop 403
atcaagacagatcgtgaagaagctg

SEQ ID NO: 169834 - DNA, 25 bp, Artificial
  probe
  misc_feature (1)..(25): SEQ ID NO: 3097; WAN024DSQ_at; Start 384; Stop 408
gacagatcgtgaagaagctgagcta

SEQ ID NO: 169835 - DNA, 25 bp, Artificial
  probe
  misc_feature (1)..(25): SEQ ID NO: 3097; WAN024DSQ_at; Start 393; Stop 417
tgaagaagctgagctaaaggttaaa

SEQ ID NO: 169836 - DNA, 25 bp, Artificial
  probe
  misc_feature (1)..(25): SEQ ID NO: 3097; WAN024DSQ_at; Start 303; Stop 327
aaaaaagaagttgaaagctgagttg

SEQ ID NO: 169837 - DNA, 25 bp, Artificial
  probe
  misc_feature (1)..(25): SEQ ID NO: 3097; WAN024DSQ_at; Start 382; Stop 406
aagacagatcgtgaagaagctgagc

SEQ ID NO: 169838 - DNA, 25 bp, Artificial
  probe
  misc_feature (1)..(25): SEQ ID NO: 3097; WAN024DSQ_at; Start 390; Stop 414
tcgtgaagaagctgagctaaaggtt

SEQ ID NO: 169839 - DNA, 25 bp, Artificial
  probe
  misc_feature (1)..(25): SEQ ID NO: 3097; WAN024DSQ_at; Start 306; Stop 330
aaagaagttgaaagctgagttggca

SEQ ID NO: 169840 - DNA, 25 bp, Artificial
  probe
  misc_feature (1)..(25): SEQ ID NO: 3097; WAN024DSQ_at; Start 386; Stop 410
cagatcgtgaagaagctgagctaaa

SEQ ID NO: 169841 - DNA, 25 bp, Artificial
  probe
  misc_feature (1)..(25): SEQ ID NO: 3097; WAN024DSQ_at; Start 383; Stop 407
agacagatcgtgaagaagctgagct

SEQ ID NO: 169842 - DNA, 25 bp, Artificial
  probe
  misc_feature (1)..(25): SEQ ID NO: 3097; WAN024DSQ_at; Start 257; Stop 281
ccttcaacaaaaagttgagcagaat

SEQ ID NO: 169843 - DNA, 25 bp, Artificial
  probe
  misc_feature (1)..(25): SEQ ID NO: 3097; WAN024DSQ_at; Start 308; Stop 332
agaagttgaaagctgagttggcaaa

SEQ ID NO: 169844 - DNA, 25 bp, Artificial
  probe
  misc_feature (1)..(25): SEQ ID NO: 3097; WAN024DSQ_at; Start 381; Stop 405
caagacagatcgtgaagaagctgag

SEQ ID NO: 169845 - DNA, 25 bp, Artificial
  probe
  misc_feature (1)..(25): SEQ ID NO: 3097; WAN024DSQ_at; Start 391; Stop 415
cgtgaagaagctgagctaaaggtta

SEQ ID NO: 169846 - DNA, 25 bp, Artificial
  probe
  misc_feature (1)..(25): SEQ ID NO: 3097; WAN024DSQ_at; Start 389; Stop 413
atcgtgaagaagctgagctaaaggt

SEQ ID NO: 169847 - DNA, 25 bp, Artificial
  probe
  misc_feature (1)..(25): SEQ ID NO: 3097; WAN024DSQ_at; Start 388; Stop 412
gatcgtgaagaagctgagctaaagg

SEQ ID NO: 169848 - DNA, 25 bp, Artificial
  probe
  misc_feature (1)..(25): SEQ ID NO: 3097; WAN024DSQ_at; Start 304; Stop 328
aaaaagaagttgaaagctgagttgg

SEQ ID NO: 169849 - DNA, 25 bp, Artificial
  probe
  misc_feature (1)..(25): SEQ ID NO: 3097; WAN024DSQ_at; Start 394; Stop 418
gaagaagctgagctaaaggttaaaa

SEQ ID NO: 169850 - DNA, 25 bp, Artificial
  probe
  misc_feature (1)..(25): SEQ ID NO: 3097; WAN024DSQ_at; Start 392; Stop 416
gtgaagaagctgagctaaaggttaa

SEQ ID NO: 169851 - DNA, 25 bp, Artificial
  probe
  misc_feature (1)..(25): SEQ ID NO: 3092; WAN024DSR_at; Start 604; Stop 628
aacgagggcacaattaagcaagcaa

SEQ ID NO: 169852 - DNA, 25 bp, Artificial
  probe
  misc_feature (1)..(25): SEQ ID NO: 3092; WAN024DSR_at; Start 597; Stop 621
atttcgaaacgagggcacaattaag

SEQ ID NO: 169853 - DNA, 25 bp, Artificial
  probe
  misc_feature (1)..(25): SEQ ID NO: 3092; WAN024DSR_at; Start 838; Stop 862
gaaaaaacagatgatcaacaagctg

SEQ ID NO: 169854 - DNA, 25 bp, Artificial
  probe
  misc_feature (1)..(25): SEQ ID NO: 3092; WAN024DSR_at; Start 771; Stop 795
agcgccggctactcaaccagaaaaa

SEQ ID NO: 169855 - DNA, 25 bp, Artificial
  probe
  misc_feature (1)..(25): SEQ ID NO: 3092; WAN024DSR_at; Start 796; Stop 820
ccagctccaaaaccagagaagccag

SEQ ID NO: 169856 - DNA, 25 bp, Artificial
  probe
  misc_feature (1)..(25): SEQ ID NO: 3092; WAN024DSR_at; Start 772; Stop 796
gcgccggctactcaaccagaaaaac

SEQ ID NO: 169857 - DNA, 25 bp, Artificial
  probe
  misc_feature (1)..(25): SEQ ID NO: 3092; WAN024DSR_at; Start 593; Stop 617
aagaatttcgaaacgagggcacaat

SEQ ID NO: 169858 - DNA, 25 bp, Artificial
  probe
  misc_feature (1)..(25): SEQ ID NO: 3092; WAN024DSR_at; Start 841; Stop 865
aaaacagatgatcaacaagctgaag

SEQ ID NO: 169859 - DNA, 25 bp, Artificial
  probe
  misc_feature (1)..(25): SEQ ID NO: 3092; WAN024DSR_at; Start 792; Stop 816
aaaaccagctccaaaaccagagaag

SEQ ID NO: 169860 - DNA, 25 bp, Artificial
  probe
  misc_feature (1)..(25): SEQ ID NO: 3092; WAN024DSR_at; Start 843; Stop 867
aacagatgatcaacaagctgaagaa

SEQ ID NO: 169861 - DNA, 25 bp, Artificial
  probe
  misc_feature (1)..(25): SEQ ID NO: 3092; WAN024DSR_at; Start 790; Stop 814
gaaaaaccagctccaaaaccagaga

SEQ ID NO: 169862 - DNA, 25 bp, Artificial
  probe
  misc_feature (1)..(25): SEQ ID NO: 3092; WAN024DSR_at; Start 148; Stop 172
tctaatatggcaaagacagaacata

SEQ ID NO: 169863 - DNA, 25 bp, Artificial
  probe
  misc_feature (1)..(25): SEQ ID NO: 3092; WAN024DSR_at; Start 595; Stop 619
gaatttcgaaacgagggcacaatta

SEQ ID NO: 169864 - DNA, 25 bp, Artificial
  probe
  misc_feature (1)..(25): SEQ ID NO: 3092; WAN024DSR_at; Start 150; Stop 174
taatatggcaaagacagaacatagg

SEQ ID NO: 169865 - DNA, 25 bp, Artificial
  probe
  misc_feature (1)..(25): SEQ ID NO: 3092; WAN024DSR_at; Start 826; Stop 850
caaccaaaagcagaaaaaacagatg

SEQ ID NO: 169866 - DNA, 25 bp, Artificial
  probe
  misc_feature (1)..(25): SEQ ID NO: 3092; WAN024DSR_at; Start 591; Stop 615
taaagaatttcgaaacgagggcaca

SEQ ID NO: 169867 - DNA, 25 bp, Artificial
  probe
  misc_feature (1)..(25): SEQ ID NO: 3092; WAN024DSR_at; Start 832; Stop 856
aaagcagaaaaaacagatgatcaac

SEQ ID NO: 169868 - DNA, 25 bp, Artificial
  probe
  misc_feature (1)..(25): SEQ ID NO: 3092; WAN024DSR_at; Start 822; Stop 846
tgaacaaccaaaagcagaaaaaaca

SEQ ID NO: 169869 - DNA, 25 bp, Artificial
  probe
  misc_feature (1)..(25): SEQ ID NO: 3092; WAN024DSR_at; Start 753; Stop 777
agctgaacaaccacaaccagcgccg

SEQ ID NO: 169870 - DNA, 25 bp, Artificial
  probe
  misc_feature (1)..(25): SEQ ID NO: 3092; WAN024DSR_at; Start 830; Stop 854
caaaagcagaaaaaacagatgatca

SEQ ID NO: 169871 - DNA, 25 bp, Artificial
  probe
  misc_feature (1)..(25): SEQ ID NO: 3092; WAN024DSR_at; Start 589; Stop 613
gctaaagaatttcgaaacgagggca

SEQ ID NO: 169872 - DNA, 25 bp, Artificial
  probe
  misc_feature (1)..(25): SEQ ID NO: 3092; WAN024DSR_at; Start 820; Stop 844
gctgaacaaccaaaagcagaaaaaa

SEQ ID NO: 169873 - DNA, 25 bp, Artificial
  probe
  misc_feature (1)..(25): SEQ ID NO: 3092; WAN024DSR_at; Start 777; Stop 801
ggctactcaaccagaaaaaccagct

SEQ ID NO: 169874 - DNA, 25 bp, Artificial
  probe
  misc_feature (1)..(25): SEQ ID NO: 3092; WAN024DSR_at; Start 794; Stop 818
aaccagctccaaaaccagagaagcc

SEQ ID NO: 169875 - DNA, 25 bp, Artificial
  probe
  misc_feature (1)..(25): SEQ ID NO: 3092; WAN024DSR_at; Start 756; Stop 780
tgaacaaccacaaccagcgccggct

SEQ ID NO: 169876 - DNA, 25 bp, Artificial
  probe
  misc_feature (1)..(25): SEQ ID NO: 3092; WAN024DSR_at; Start 151; Stop 175
aatatggcaaagacagaacatagga

SEQ ID NO: 169877 - DNA, 25 bp, Artificial
  probe
  misc_feature (1)..(25): SEQ ID NO: 3092; WAN024DSR_at; Start 774; Stop 798
gccggctactcaaccagaaaaacca

SEQ ID NO: 169878 - DNA, 25 bp, Artificial
  probe
  misc_feature (1)..(25): SEQ ID NO: 3092; WAN024DSR_at; Start 601; Stop 625
cgaaacgagggcacaattaagcaag

SEQ ID NO: 169879 - DNA, 25 bp, Artificial
  probe
  misc_feature (1)..(25): SEQ ID NO: 3092; WAN024DSR_at; Start 147; Stop 171
ttctaatatggcaaagacagaacat

SEQ ID NO: 169880 - DNA, 25 bp, Artificial
  probe
  misc_feature (1)..(25): SEQ ID NO: 3092; WAN024DSR_at; Start 775; Stop 799
ccggctactcaaccagaaaaaccag

SEQ ID NO: 169881 - DNA, 25 bp, Artificial
  probe
  misc_feature (1)..(25): SEQ ID NO: 3092; WAN024DSR_at; Start 835; Stop 859
gcagaaaaaacagatgatcaacaag

SEQ ID NO: 169882 - DNA, 25 bp, Artificial
  probe
  misc_feature (1)..(25): SEQ ID NO: 3092; WAN024DSR_at; Start 976; Stop 1000
gaaaacggtatgtggtacttctaca

SEQ ID NO: 169883 - DNA, 25 bp, Artificial
  probe
  misc_feature (1)..(25): SEQ ID NO: 3092; WAN024DSR_at; Start 605; Stop 629
acgagggcacaattaagcaagcaaa

SEQ ID NO: 169884 - DNA, 25 bp, Artificial
  probe
  misc_feature (1)..(25): SEQ ID NO: 3092; WAN024DSR_at; Start 829; Stop 853
ccaaaagcagaaaaaacagatgatc

SEQ ID NO: 169885 - DNA, 25 bp, Artificial
  probe
  misc_feature (1)..(25): SEQ ID NO: 7084; WAN024DST_at; Start 143; Stop 167
ccaagaaaatttcaagtacgcgaat

SEQ ID NO: 169886 - DNA, 25 bp, Artificial
  probe
  misc_feature (1)..(25): SEQ ID NO: 7084; WAN024DST_at; Start 373; Stop 397
ccatttgctactaaatatgaagcag

SEQ ID NO: 169887 - DNA, 25 bp, Artificial
  probe
  misc_feature (1)..(25): SEQ ID NO: 7084; WAN024DST_at; Start 37; Stop 61
caatatgtcagagatgatactagag

SEQ ID NO: 169888 - DNA, 25 bp, Artificial
  probe
  misc_feature (1)..(25): SEQ ID NO: 7084; WAN024DST_at; Start 561; Stop 585
caagccccaagttcttgtccaagaa

SEQ ID NO: 169889 - DNA, 25 bp, Artificial
  probe
  misc_feature (1)..(25): SEQ ID NO: 7084; WAN024DST_at; Start 52; Stop 76
gatactagagataaagaagagggaa

SEQ ID NO: 169890 - DNA, 25 bp, Artificial
  probe
  misc_feature (1)..(25): SEQ ID NO: 7084; WAN024DST_at; Start 625; Stop 649
gataaaagtcaagaagtagaagaag

SEQ ID NO: 169891 - DNA, 25 bp, Artificial
  probe
  misc_feature (1)..(25): SEQ ID NO: 7084; WAN024DST_at; Start 22; Stop 46
gctgctgatgggattcaatatgtca

SEQ ID NO: 169892 - DNA, 25 bp, Artificial
  probe
  misc_feature (1)..(25): SEQ ID NO: 7084; WAN024DST_at; Start 330; Stop 354
tatcaaagttccagctaaaagcaag

SEQ ID NO: 169893 - DNA, 25 bp, Artificial
  probe
  misc_feature (1)..(25): SEQ ID NO: 7084; WAN024DST_at; Start 101; Stop 125
gggatattattgtaaaagtagcgac

SEQ ID NO: 169894 - DNA, 25 bp, Artificial
  probe
  misc_feature (1)..(25): SEQ ID NO: 7084; WAN024DST_at; Start 427; Stop 451
gagattactctaggaaagaatggga

SEQ ID NO: 169895 - DNA, 25 bp, Artificial
  probe
  misc_feature (1)..(25): SEQ ID NO: 7084; WAN024DST_at; Start 340; Stop 364
ccagctaaaagcaaggttgaagaag

SEQ ID NO: 169896 - DNA, 25 bp, Artificial
  probe
  misc_feature (1)..(25): SEQ ID NO: 7084; WAN024DST_at; Start 595; Stop 619
gaaacagaatatctcgatggcccaa

SEQ ID NO: 169897 - DNA, 25 bp, Artificial
  probe
  misc_feature (1)..(25): SEQ ID NO: 7084; WAN024DST_at; Start 529; Stop 553
gactctcaaacaagagttgttaaaa

SEQ ID NO: 169898 - DNA, 25 bp, Artificial
  probe
  misc_feature (1)..(25): SEQ ID NO: 7084; WAN024DST_at; Start 224; Stop 248
gagaggatggctatgtaactacgac

SEQ ID NO: 169899 - DNA, 25 bp, Artificial
  probe
  misc_feature (1)..(25): SEQ ID NO: 7084; WAN024DST_at; Start 77; Stop 101
tagagtatgatgacgctgacaatgg

SEQ ID NO: 169900 - DNA, 25 bp, Artificial
  probe
  misc_feature (1)..(25): SEQ ID NO: 7084; WAN024DST_at; Start 499; Stop 523
gtaactgagagtactttaagtcaaa

SEQ ID NO: 169901 - DNA, 25 bp, Artificial
  probe
  misc_feature (1)..(25): SEQ ID NO: 7084; WAN024DST_at; Start 411; Stop 435
tgcaggacaggagcaagagattact

SEQ ID NO: 169902 - DNA, 25 bp, Artificial
  probe
  misc_feature (1)..(25): SEQ ID NO: 7084; WAN024DST_at; Start 246; Stop 270
gacaaggacctacgatgttaatcca

SEQ ID NO: 169903 - DNA, 25 bp, Artificial
  probe
  misc_feature (1)..(25): SEQ ID NO: 7084; WAN024DST_at; Start 159; Stop 183
tacgcgaattcgttatgaaaaagat

SEQ ID NO: 169904 - DNA, 25 bp, Artificial
  probe
  misc_feature (1)..(25): SEQ ID NO: 7084; WAN024DST_at; Start 397; Stop 421
gacaatgacctttctgcaggacagg

SEQ ID NO: 169905 - DNA, 25 bp, Artificial
  probe
  misc_feature (1)..(25): SEQ ID NO: 7084; WAN024DST_at; Start 193; Stop 217
gaccgtagtgaaaatcctgttacaa

SEQ ID NO: 169906 - DNA, 25 bp, Artificial
  probe
  misc_feature (1)..(25): SEQ ID NO: 7084; WAN024DST_at; Start 210; Stop 234
tgttacaattgatggagaggatggc

SEQ ID NO: 169907 - DNA, 25 bp, Artificial
  probe
  misc_feature (1)..(25): SEQ ID NO: 7084; WAN024DST_at; Start 297; Stop 321
tactgttgatagaaaagaagccacg

SEQ ID NO: 169908 - DNA, 25 bp, Artificial
  probe
  misc_feature (1)..(25): SEQ ID NO: 7084; WAN024DST_at; Start 8; Stop 32
caagttttgttcatgctgctgatgg

SEQ ID NO: 169909 - DNA, 25 bp, Artificial
  probe
  misc_feature (1)..(25): SEQ ID NO: 7084; WAN024DST_at; Start 235; Stop 259
tatgtaactacgacaaggacctacg

SEQ ID NO: 169910 - DNA, 25 bp, Artificial
  probe
  misc_feature (1)..(25): SEQ ID NO: 7084; WAN024DST_at; Start 479; Stop 503
tagatggaaagagtggacaagtaac

SEQ ID NO: 169911 - DNA, 25 bp, Artificial
  probe
  misc_feature (1)..(25): SEQ ID NO: 7084; WAN024DST_at; Start 178; Stop 202
aaagatgaaacaaaagaccgtagtg

SEQ ID NO: 169912 - DNA, 25 bp, Artificial
  probe
  misc_feature (1)..(25): SEQ ID NO: 7084; WAN024DST_at; Start 444; Stop 468
gaatgggaaaacagttacaacgata

SEQ ID NO: 169913 - DNA, 25 bp, Artificial
  probe
  misc_feature (1)..(25): SEQ ID NO: 7084; WAN024DST_at; Start 383; Stop 407
ctaaatatgaagcagacaatgacct

SEQ ID NO: 169914 - DNA, 25 bp, Artificial
  probe
  misc_feature (1)..(25): SEQ ID NO: 7084; WAN024DST_at; Start 641; Stop 665
tagaagaagtaggagaaattggtaa

SEQ ID NO: 169915 - DNA, 25 bp, Artificial
  probe
  misc_feature (1)..(25): SEQ ID NO: 7084; WAN024DST_at; Start 282; Stop 306
tgttaccgaacaggttactgttgat

SEQ ID NO: 169916 - DNA, 25 bp, Artificial
  probe
  misc_feature (1)..(25): SEQ ID NO: 7084; WAN024DST_at; Start 313; Stop 337
gaagccacggatacagttatcaaag

SEQ ID NO: 169917 - DNA, 25 bp, Artificial
  probe
  misc_feature (1)..(25): SEQ ID NO: 7084; WAN024DST_at; Start 255; Stop 279
ctacgatgttaatccagagactggt

SEQ ID NO: 169918 - DNA, 25 bp, Artificial
  probe
  misc_feature (1)..(25): SEQ ID NO: 7084; WAN024DST_at; Start 610; Stop 634
gatggcccaactcttgataaaagtc

SEQ ID NO: 169919 - DNA, 25 bp, Artificial
  probe
  misc_feature (1)..(25): SEQ ID NO: 7589; WAN024DSU_at; Start 260; Stop 284
cttgtttgagagtcttctttttgac

SEQ ID NO: 169920 - DNA, 25 bp, Artificial
  probe
  misc_feature (1)..(25): SEQ ID NO: 7589; WAN024DSU_at; Start 211; Stop 235
tggaatttcttggacaagaacttgg

SEQ ID NO: 169921 - DNA, 25 bp, Artificial
  probe
  misc_feature (1)..(25): SEQ ID NO: 7589; WAN024DSU_at; Start 154; Stop 178
ttctcctacttcttgacctttatca

SEQ ID NO: 169922 - DNA, 25 bp, Artificial
  probe
  misc_feature (1)..(25): SEQ ID NO: 7589; WAN024DSU_at; Start 218; Stop 242
tcttggacaagaacttggggcttgg

SEQ ID NO: 169923 - DNA, 25 bp, Artificial
  probe
  misc_feature (1)..(25): SEQ ID NO: 7589; WAN024DSU_at; Start 120; Stop 144
cagcatagattgtagtaagagtaat

SEQ ID NO: 169924 - DNA, 25 bp, Artificial
  probe
  misc_feature (1)..(25): SEQ ID NO: 7589; WAN024DSU_at; Start 92; Stop 116
tcttcaattgttccatcacgttcat

SEQ ID NO: 169925 - DNA, 25 bp, Artificial
  probe
  misc_feature (1)..(25): SEQ ID NO: 7589; WAN024DSU_at; Start 184; Stop 208
tgggtcatcgagatattctgtttcg

SEQ ID NO: 169926 - DNA, 25 bp, Artificial
  probe
  misc_feature (1)..(25): SEQ ID NO: 7589; WAN024DSU_at; Start 11; Stop 35
acaacaactttttcaggttctctcg

SEQ ID NO: 169927 - DNA, 25 bp, Artificial
  probe
  misc_feature (1)..(25): SEQ ID NO: 7589; WAN024DSU_at; Start 252; Stop 276
taacaactcttgtttgagagtcttc

SEQ ID NO: 169928 - DNA, 25 bp, Artificial
  probe
  misc_feature (1)..(25): SEQ ID NO: 7589; WAN024DSU_at; Start 58; Stop 82
taccatctctttagtaatttgacga

SEQ ID NO: 169929 - DNA, 25 bp, Artificial
  probe
  misc_feature (1)..(25): SEQ ID NO: 7589; WAN024DSU_at; Start 3; Stop 27
gctcaggaacaacaactttttcagg

SEQ ID NO: 169930 - DNA, 25 bp, Artificial
  probe
  misc_feature (1)..(25): SEQ ID NO: 7589; WAN024DSU_at; Start 40; Stop 64
tctccttatacgtctttttaccatc

SEQ ID NO: 169931 - DNA, 25 bp, Artificial
  probe
  misc_feature (1)..(25): SEQ ID NO: 7589; WAN024DSU_at; Start 170; Stop 194
cctttatcaagagttgggtcatcga

SEQ ID NO: 169932 - DNA, 25 bp, Artificial
  probe
  misc_feature (1)..(25): SEQ ID NO: 7589; WAN024DSU_at; Start 108; Stop 132
cacgttcatctacagcatagattgt

SEQ ID NO: 169933 - DNA, 25 bp, Artificial
  probe
  misc_feature (1)..(25): SEQ ID NO: 7589; WAN024DSU_at; Start 81; Stop 105
gagaagtagtttcttcaattgttcc

SEQ ID NO: 169934 - DNA, 25 bp, Artificial
  probe
  misc_feature (1)..(25): SEQ ID NO: 7589; WAN024DSU_at; Start 47; Stop 71
atacgtctttttaccatctctttag

SEQ ID NO: 169935 - DNA, 25 bp, Artificial
  probe
  misc_feature (1)..(25): SEQ ID NO: 7589; WAN024DSU_at; Start 127; Stop 151
gattgtagtaagagtaattttacca

SEQ ID NO: 169936 - DNA, 25 bp, Artificial
  probe
  misc_feature (1)..(25): SEQ ID NO: 7589; WAN024DSU_at; Start 147; Stop 171
taccaatttctcctacttcttgacc

SEQ ID NO: 169937 - DNA, 25 bp, Artificial
  probe
  misc_feature (1)..(25): SEQ ID NO: 7589; WAN024DSU_at; Start 165; Stop 189
cttgacctttatcaagagttgggtc

SEQ ID NO: 169938 - DNA, 25 bp, Artificial
  probe
  misc_feature (1)..(25): SEQ ID NO: 7589; WAN024DSU_at; Start 103; Stop 127
tccatcacgttcatctacagcatag

SEQ ID NO: 169939 - DNA, 25 bp, Artificial
  probe
  misc_feature (1)..(25): SEQ ID NO: 7589; WAN024DSU_at; Start 114; Stop 138
catctacagcatagattgtagtaag

SEQ ID NO: 169940 - DNA, 25 bp, Artificial
  probe
  misc_feature (1)..(25): SEQ ID NO: 7589; WAN024DSU_at; Start 201; Stop 225
ctgtttcgattggaatttcttggac

SEQ ID NO: 169941 - DNA, 25 bp, Artificial
  probe
  misc_feature (1)..(25): SEQ ID NO: 7589; WAN024DSU_at; Start 87; Stop 111
tagtttcttcaattgttccatcacg

SEQ ID NO: 169942 - DNA, 25 bp, Artificial
  probe
  misc_feature (1)..(25): SEQ ID NO: 7589; WAN024DSU_at; Start 177; Stop 201
caagagttgggtcatcgagatattc

SEQ ID NO: 169943 - DNA, 25 bp, Artificial
  probe
  misc_feature (1)..(25): SEQ ID NO: 7589; WAN024DSU_at; Start 180; Stop 204
gagttgggtcatcgagatattctgt

SEQ ID NO: 169944 - DNA, 25 bp, Artificial
  probe
  misc_feature (1)..(25): SEQ ID NO: 7589; WAN024DSU_at; Start 73; Stop 97
aatttgacgagaagtagtttcttca

SEQ ID NO: 169945 - DNA, 25 bp, Artificial
  probe
  misc_feature (1)..(25): SEQ ID NO: 7589; WAN024DSU_at; Start 100; Stop 124
tgttccatcacgttcatctacagca

SEQ ID NO: 169946 - DNA, 25 bp, Artificial
  probe
  misc_feature (1)..(25): SEQ ID NO: 7589; WAN024DSU_at; Start 192; Stop 216
cgagatattctgtttcgattggaat

SEQ ID NO: 169947 - DNA, 25 bp, Artificial
  probe
  misc_feature (1)..(25): SEQ ID NO: 7589; WAN024DSU_at; Start 173; Stop 197
ttatcaagagttgggtcatcgagat

SEQ ID NO: 169948 - DNA, 25 bp, Artificial
  probe
  misc_feature (1)..(25): SEQ ID NO: 7589; WAN024DSU_at; Start 207; Stop 231
cgattggaatttcttggacaagaac

SEQ ID NO: 169949 - DNA, 25 bp, Artificial
  probe
  misc_feature (1)..(25): SEQ ID NO: 7589; WAN024DSU_at; Start 25; Stop 49
aggttctctcgtccctctccttata

SEQ ID NO: 169950 - DNA, 25 bp, Artificial
  probe
  misc_feature (1)..(25): SEQ ID NO: 7589; WAN024DSU_at; Start 69; Stop 93
tagtaatttgacgagaagtagtttc

SEQ ID NO: 169951 - DNA, 25 bp, Artificial
  probe
  misc_feature (1)..(25): SEQ ID NO: 7589; WAN024DSU_at; Start 96; Stop 120
caattgttccatcacgttcatctac

SEQ ID NO: 169952 - DNA, 25 bp, Artificial
  probe
  misc_feature (1)..(25): SEQ ID NO: 7589; WAN024DSU_at; Start 19; Stop 43
tttttcaggttctctcgtccctctc

SEQ ID NO: 169953 - DNA, 25 bp, Artificial
  probe
  misc_feature (1)..(25): SEQ ID NO: 2847; WAN024DSV_at; Start 152; Stop 176
cagaagaagacgaagacggacaagt

SEQ ID NO: 169954 - DNA, 25 bp, Artificial
  probe
  misc_feature (1)..(25): SEQ ID NO: 2847; WAN024DSV_at; Start 169; Stop 193
ggacaagttgaaatccaagcttact

SEQ ID NO: 169955 - DNA, 25 bp, Artificial
  probe
  misc_feature (1)..(25): SEQ ID NO: 2847; WAN024DSV_at; Start 52; Stop 76
gtagatgagcaaggaaatgaaacct

SEQ ID NO: 169956 - DNA, 25 bp, Artificial
  probe
  misc_feature (1)..(25): SEQ ID NO: 2847; WAN024DSV_at; Start 82; Stop 106
gaaatccttttgacaattgatggaa

SEQ ID NO: 169957 - DNA, 25 bp, Artificial
  probe
  misc_feature (1)..(25): SEQ ID NO: 2847; WAN024DSV_at; Start 230; Stop 254
tgcaaccaatcccagaagactcaga

SEQ ID NO: 169958 - DNA, 25 bp, Artificial
  probe
  misc_feature (1)..(25): SEQ ID NO: 2847; WAN024DSV_at; Start 239; Stop 263
tcccagaagactcagaagacgaatg

SEQ ID NO: 169959 - DNA, 25 bp, Artificial
  probe
  misc_feature (1)..(25): SEQ ID NO: 2847; WAN024DSV_at; Start 34; Stop 58
cgtgaactaatcacactagtagatg

SEQ ID NO: 169960 - DNA, 25 bp, Artificial
  probe
  misc_feature (1)..(25): SEQ ID NO: 2847; WAN024DSV_at; Start 220; Stop 244
gaaggcgaattgcaaccaatcccag

SEQ ID NO: 169961 - DNA, 25 bp, Artificial
  probe
  misc_feature (1)..(25): SEQ ID NO: 2847; WAN024DSV_at; Start 45; Stop 69
cacactagtagatgagcaaggaaat

SEQ ID NO: 169962 - DNA, 25 bp, Artificial
  probe
  misc_feature (1)..(25): SEQ ID NO: 2847; WAN024DSV_at; Start 174; Stop 198
agttgaaatccaagcttactcattc

SEQ ID NO: 169963 - DNA, 25 bp, Artificial
  probe
  misc_feature (1)..(25): SEQ ID NO: 2847; WAN024DSV_at; Start 130; Stop 154
gttcttctagtaccagttaacgcag

SEQ ID NO: 169964 - DNA, 25 bp, Artificial
  probe
  misc_feature (1)..(25): SEQ ID NO: 2847; WAN024DSV_at; Start 140; Stop 164
taccagttaacgcagaagaagacga

SEQ ID NO: 169965 - DNA, 25 bp, Artificial
  probe
  misc_feature (1)..(25): SEQ ID NO: 2847; WAN024DSV_at; Start 12; Stop 36
tcataaccacgaccacgaagaacgt

SEQ ID NO: 169966 - DNA, 25 bp, Artificial
  probe
  misc_feature (1)..(25): SEQ ID NO: 2847; WAN024DSV_at; Start 146; Stop 170
ttaacgcagaagaagacgaagacgg

SEQ ID NO: 169967 - DNA, 25 bp, Artificial
  probe
  misc_feature (1)..(25): SEQ ID NO: 2847; WAN024DSV_at; Start 226; Stop 250
gaattgcaaccaatcccagaagact

SEQ ID NO: 169968 - DNA, 25 bp, Artificial
  probe
  misc_feature (1)..(25): SEQ ID NO: 2847; WAN024DSV_at; Start 15; Stop 39
taaccacgaccacgaagaacgtgaa

SEQ ID NO: 169969 - DNA, 25 bp, Artificial
  probe
  misc_feature (1)..(25): SEQ ID NO: 2847; WAN024DSV_at; Start 2; Stop 26
tgtcacacgatcataaccacgacca

SEQ ID NO: 169970 - DNA, 25 bp, Artificial
  probe
  misc_feature (1)..(25): SEQ ID NO: 2847; WAN024DSV_at; Start 244; Stop 268
gaagactcagaagacgaatggaaca

SEQ ID NO: 169971 - DNA, 25 bp, Artificial
  probe
  misc_feature (1)..(25): SEQ ID NO: 2847; WAN024DSV_at; Start 21; Stop 45
cgaccacgaagaacgtgaactaatc

SEQ ID NO: 169972 - DNA, 25 bp, Artificial
  probe
  misc_feature (1)..(25): SEQ ID NO: 2847; WAN024DSV_at; Start 99; Stop 123
tgatggaaaagaagaatttggtaaa

SEQ ID NO: 169973 - DNA, 25 bp, Artificial
  probe
  misc_feature (1)..(25): SEQ ID NO: 2847; WAN024DSV_at; Start 251; Stop 275
cagaagacgaatggaacatgattga

SEQ ID NO: 169974 - DNA, 25 bp, Artificial
  probe
  misc_feature (1)..(25): SEQ ID NO: 2847; WAN024DSV_at; Start 9; Stop 33
cgatcataaccacgaccacgaagaa

SEQ ID NO: 169975 - DNA, 25 bp, Artificial
  probe
  misc_feature (1)..(25): SEQ ID NO: 2847; WAN024DSV_at; Start 160; Stop 184
gacgaagacggacaagttgaaatcc

SEQ ID NO: 169976 - DNA, 25 bp, Artificial
  probe
  misc_feature (1)..(25): SEQ ID NO: 2847; WAN024DSV_at; Start 215; Stop 239
gaacagaaggcgaattgcaaccaat

SEQ ID NO: 169977 - DNA, 25 bp, Artificial
  probe
  misc_feature (1)..(25): SEQ ID NO: 2847; WAN024DSV_at; Start 74; Stop 98
ccttgtttgaaatccttttgacaat

SEQ ID NO: 169978 - DNA, 25 bp, Artificial
  probe
  misc_feature (1)..(25): SEQ ID NO: 2847; WAN024DSV_at; Start 121; Stop 145
aaaaactatgttcttctagtaccag

SEQ ID NO: 169979 - DNA, 25 bp, Artificial
  probe
  misc_feature (1)..(25): SEQ ID NO: 2847; WAN024DSV_at; Start 236; Stop 260
caatcccagaagactcagaagacga

SEQ ID NO: 169980 - DNA, 25 bp, Artificial
  probe
  misc_feature (1)..(25): SEQ ID NO: 2847; WAN024DSV_at; Start 208; Stop 232
gaagatggaacagaaggcgaattgc

SEQ ID NO: 169981 - DNA, 25 bp, Artificial
  probe
  misc_feature (1)..(25): SEQ ID NO: 2847; WAN024DSV_at; Start 137; Stop 161
tagtaccagttaacgcagaagaaga

SEQ ID NO: 169982 - DNA, 25 bp, Artificial
  probe
  misc_feature (1)..(25): SEQ ID NO: 2847; WAN024DSV_at; Start 247; Stop 271
gactcagaagacgaatggaacatga

SEQ ID NO: 169983 - DNA, 25 bp, Artificial
  probe
  misc_feature (1)..(25): SEQ ID NO: 2847; WAN024DSV_at; Start 28; Stop 52
gaagaacgtgaactaatcacactag

SEQ ID NO: 169984 - DNA, 25 bp, Artificial
  probe
  misc_feature (1)..(25): SEQ ID NO: 2847; WAN024DSV_at; Start 60; Stop 84
gcaaggaaatgaaaccttgtttgaa

SEQ ID NO: 169985 - DNA, 25 bp, Artificial
  probe
  misc_feature (1)..(25): SEQ ID NO: 2847; WAN024DSV_at; Start 41; Stop 65
taatcacactagtagatgagcaagg

SEQ ID NO: 169986 - DNA, 25 bp, Artificial
  probe
  misc_feature (1)..(25): SEQ ID NO: 2847; WAN024DSV_at; Start 166; Stop 190
gacggacaagttgaaatccaagctt

SEQ ID NO: 169987 - DNA, 25 bp, Artificial
  probe
  misc_feature (1)..(25): SEQ ID NO: 4941; WAN024DSW_at; Start 147; Stop 171
gtggacgtttttagcctgacgctaa

SEQ ID NO: 169988 - DNA, 25 bp, Artificial
  probe
  misc_feature (1)..(25): SEQ ID NO: 4941; WAN024DSW_at; Start 20; Stop 44
ctttatggaggagtgatacagtctg

SEQ ID NO: 169989 - DNA, 25 bp, Artificial
  probe
  misc_feature (1)..(25): SEQ ID NO: 4941; WAN024DSW_at; Start 19; Stop 43
gctttatggaggagtgatacagtct

SEQ ID NO: 169990 - DNA, 25 bp, Artificial
  probe
  misc_feature (1)..(25): SEQ ID NO: 4941; WAN024DSW_at; Start 124; Stop 148
ataagagagaactggtaagtccagt

SEQ ID NO: 169991 - DNA, 25 bp, Artificial
  probe
  misc_feature (1)..(25): SEQ ID NO: 4941; WAN024DSW_at; Start 131; Stop 155
agaactggtaagtccagtggacgtt

SEQ ID NO: 169992 - DNA, 25 bp, Artificial
  probe
  misc_feature (1)..(25): SEQ ID NO: 4941; WAN024DSW_at; Start 145; Stop 169
cagtggacgtttttagcctgacgct

SEQ ID NO: 169993 - DNA, 25 bp, Artificial
  probe
  misc_feature (1)..(25): SEQ ID NO: 4941; WAN024DSW_at; Start 122; Stop 146
aaataagagagaactggtaagtcca

SEQ ID NO: 169994 - DNA, 25 bp, Artificial
  probe
  misc_feature (1)..(25): SEQ ID NO: 4941; WAN024DSW_at; Start 130; Stop 154
gagaactggtaagtccagtggacgt

SEQ ID NO: 169995 - DNA, 25 bp, Artificial
  probe
  misc_feature (1)..(25): SEQ ID NO: 4941; WAN024DSW_at; Start 22; Stop 46
ttatggaggagtgatacagtctggg

SEQ ID NO: 169996 - DNA, 25 bp, Artificial
  probe
  misc_feature (1)..(25): SEQ ID NO: 4941; WAN024DSW_at; Start 143; Stop 167
tccagtggacgtttttagcctgacg

SEQ ID NO: 169997 - DNA, 25 bp, Artificial
  probe
  misc_feature (1)..(25): SEQ ID NO: 4941; WAN024DSW_at; Start 128; Stop 152
gagagaactggtaagtccagtggac

SEQ ID NO: 169998 - DNA, 25 bp, Artificial
  probe
  misc_feature (1)..(25): SEQ ID NO: 4941; WAN024DSW_at; Start 142; Stop 166
gtccagtggacgtttttagcctgac

SEQ ID NO: 169999 - DNA, 25 bp, Artificial
  probe
  misc_feature (1)..(25): SEQ ID NO: 4941; WAN024DSW_at; Start 18; Stop 42
agctttatggaggagtgatacagtc

SEQ ID NO: 170000 - DNA, 25 bp, Artificial
  probe
  misc_feature (1)..(25): SEQ ID NO: 4941; WAN024DSW_at; Start 123; Stop 147
aataagagagaactggtaagtccag

SEQ ID NO: 170001 - DNA, 25 bp, Artificial
  probe
  misc_feature (1)..(25): SEQ ID NO: 4941; WAN024DSW_at; Start 126; Stop 150
aagagagaactggtaagtccagtgg

SEQ ID NO: 170002 - DNA, 25 bp, Artificial
  probe
  misc_feature (1)..(25): SEQ ID NO: 4941; WAN024DSW_at; Start 148; Stop 172
tggacgtttttagcctgacgctaaa

SEQ ID NO: 170003 - DNA, 25 bp, Artificial
  probe
  misc_feature (1)..(25): SEQ ID NO: 4941; WAN024DSW_at; Start 144; Stop 168
ccagtggacgtttttagcctgacgc

SEQ ID NO: 170004 - DNA, 25 bp, Artificial
  probe
  misc_feature (1)..(25): SEQ ID NO: 4941; WAN024DSW_at; Start 120; Stop 144
ttaaataagagagaactggtaagtc

SEQ ID NO: 170005 - DNA, 25 bp, Artificial
  probe
  misc_feature (1)..(25): SEQ ID NO: 4941; WAN024DSW_at; Start 146; Stop 170
agtggacgtttttagcctgacgcta

SEQ ID NO: 170006 - DNA, 25 bp, Artificial
  probe
  misc_feature (1)..(25): SEQ ID NO: 4941; WAN024DSW_at; Start 121; Stop 145
taaataagagagaactggtaagtcc

SEQ ID NO: 170007 - DNA, 25 bp, Artificial
  probe
  misc_feature (1)..(25): SEQ ID NO: 4941; WAN024DSW_at; Start 125; Stop 149
taagagagaactggtaagtccagtg

SEQ ID NO: 170008 - DNA, 25 bp, Artificial
  probe
  misc_feature (1)..(25): SEQ ID NO: 4941; WAN024DSW_at; Start 21; Stop 45
tttatggaggagtgatacagtctgg

SEQ ID NO: 170009 - DNA, 25 bp, Artificial
  probe
  misc_feature (1)..(25): SEQ ID NO: 4941; WAN024DSW_at; Start 129; Stop 153
agagaactggtaagtccagtggacg

SEQ ID NO: 170010 - DNA, 25 bp, Artificial
  probe
  misc_feature (1)..(25): SEQ ID NO: 4941; WAN024DSW_at; Start 127; Stop 151
agagagaactggtaagtccagtgga

SEQ ID NO: 170011 - DNA, 25 bp, Artificial
  probe
  misc_feature (1)..(25): SEQ ID NO: 3993; WAN024DSX_at; Start 123; Stop 147
tttttagcccatattcacattcact

SEQ ID NO: 170012 - DNA, 25 bp, Artificial
  probe
  misc_feature (1)..(25): SEQ ID NO: 3993; WAN024DSX_at; Start 54; Stop 78
tggaacgtccagtgaacatttttac

SEQ ID NO: 170013 - DNA, 25 bp, Artificial
  probe
  misc_feature (1)..(25): SEQ ID NO: 3993; WAN024DSX_at; Start 105; Stop 129
tggaacgtccagtggatgtttttag

SEQ ID NO: 170014 - DNA, 25 bp, Artificial
  probe
  misc_feature (1)..(25): SEQ ID NO: 3993; WAN024DSX_at; Start 122; Stop 146
gtttttagcccatattcacattcac

SEQ ID NO: 170015 - DNA, 25 bp, Artificial
  probe
  misc_feature (1)..(25): SEQ ID NO: 3993; WAN024DSX_at; Start 104; Stop 128
ttggaacgtccagtggatgttttta

SEQ ID NO: 170016 - DNA, 25 bp, Artificial
  probe
  misc_feature (1)..(25): SEQ ID NO: 3993; WAN024DSX_at; Start 53; Stop 77
ttggaacgtccagtgaacattttta

SEQ ID NO: 170017 - DNA, 25 bp, Artificial
  probe
  misc_feature (1)..(25): SEQ ID NO: 3993; WAN024DSX_at; Start 112; Stop 136
tccagtggatgtttttagcccatat

SEQ ID NO: 170018 - DNA, 25 bp, Artificial
  probe
  misc_feature (1)..(25): SEQ ID NO: 3993; WAN024DSX_at; Start 107; Stop 131
gaacgtccagtggatgtttttagcc

SEQ ID NO: 170019 - DNA, 25 bp, Artificial
  probe
  misc_feature (1)..(25): SEQ ID NO: 3993; WAN024DSX_at; Start 114; Stop 138
cagtggatgtttttagcccatattc

SEQ ID NO: 170020 - DNA, 25 bp, Artificial
  probe
  misc_feature (1)..(25): SEQ ID NO: 3993; WAN024DSX_at; Start 110; Stop 134
cgtccagtggatgtttttagcccat

SEQ ID NO: 170021 - DNA, 25 bp, Artificial
  probe
  misc_feature (1)..(25): SEQ ID NO: 3993; WAN024DSX_at; Start 119; Stop 143
gatgtttttagcccatattcacatt

SEQ ID NO: 170022 - DNA, 25 bp, Artificial
  probe
  misc_feature (1)..(25): SEQ ID NO: 3993; WAN024DSX_at; Start 113; Stop 137
ccagtggatgtttttagcccatatt

SEQ ID NO: 170023 - DNA, 25 bp, Artificial
  probe
  misc_feature (1)..(25): SEQ ID NO: 3993; WAN024DSX_at; Start 109; Stop 133
acgtccagtggatgtttttagccca

SEQ ID NO: 170024 - DNA, 25 bp, Artificial
  probe
  misc_feature (1)..(25): SEQ ID NO: 3993; WAN024DSX_at; Start 115; Stop 139
agtggatgtttttagcccatattca

SEQ ID NO: 170025 - DNA, 25 bp, Artificial
  probe
  misc_feature (1)..(25): SEQ ID NO: 3993; WAN024DSX_at; Start 106; Stop 130
ggaacgtccagtggatgtttttagc

SEQ ID NO: 170026 - DNA, 25 bp, Artificial
  probe
  misc_feature (1)..(25): SEQ ID NO: 3993; WAN024DSX_at; Start 121; Stop 145
tgtttttagcccatattcacattca

SEQ ID NO: 170027 - DNA, 25 bp, Artificial
  probe
  misc_feature (1)..(25): SEQ ID NO: 3993; WAN024DSX_at; Start 124; Stop 148
ttttagcccatattcacattcacta

SEQ ID NO: 170028 - DNA, 25 bp, Artificial
  probe
  misc_feature (1)..(25): SEQ ID NO: 3993; WAN024DSX_at; Start 117; Stop 141
tggatgtttttagcccatattcaca

SEQ ID NO: 170029 - DNA, 25 bp, Artificial
  probe
  misc_feature (1)..(25): SEQ ID NO: 3993; WAN024DSX_at; Start 116; Stop 140
gtggatgtttttagcccatattcac

SEQ ID NO: 170030 - DNA, 25 bp, Artificial
  probe
  misc_feature (1)..(25): SEQ ID NO: 3993; WAN024DSX_at; Start 120; Stop 144
atgtttttagcccatattcacattc

SEQ ID NO: 170031 - DNA, 25 bp, Artificial
  probe
  misc_feature (1)..(25): SEQ ID NO: 3993; WAN024DSX_at; Start 111; Stop 135
gtccagtggatgtttttagcccata

SEQ ID NO: 170032 - DNA, 25 bp, Artificial
  probe
  misc_feature (1)..(25): SEQ ID NO: 3993; WAN024DSX_at; Start 118; Stop 142
ggatgtttttagcccatattcacat

SEQ ID NO: 170033 - DNA, 25 bp, Artificial
  probe
  misc_feature (1)..(25): SEQ ID NO: 1943; WAN024DSY_at; Start 19; Stop 43
gtgcagctctataaacatcaaggct

SEQ ID NO: 170034 - DNA, 25 bp, Artificial
  probe
  misc_feature (1)..(25): SEQ ID NO: 1943; WAN024DSY_at; Start 46; Stop 70
gagcacttcccagtcttattctatt

SEQ ID NO: 170035 - DNA, 25 bp, Artificial
  probe
  misc_feature (1)..(25): SEQ ID NO: 1943; WAN024DSY_at; Start 28; Stop 52
tataaacatcaaggctgggagcact

SEQ ID NO: 170036 - DNA, 25 bp, Artificial
  probe
  misc_feature (1)..(25): SEQ ID NO: 1943; WAN024DSY_at; Start 40; Stop 64
ggctgggagcacttcccagtcttat

SEQ ID NO: 170037 - DNA, 25 bp, Artificial
  probe
  misc_feature (1)..(25): SEQ ID NO: 1943; WAN024DSY_at; Start 43; Stop 67
tgggagcacttcccagtcttattct

SEQ ID NO: 170038 - DNA, 25 bp, Artificial
  probe
  misc_feature (1)..(25): SEQ ID NO: 1943; WAN024DSY_at; Start 34; Stop 58
catcaaggctgggagcacttcccag

SEQ ID NO: 170039 - DNA, 25 bp, Artificial
  probe
  misc_feature (1)..(25): SEQ ID NO: 1943; WAN024DSY_at; Start 38; Stop 62
aaggctgggagcacttcccagtctt

SEQ ID NO: 170040 - DNA, 25 bp, Artificial
  probe
  misc_feature (1)..(25): SEQ ID NO: 1943; WAN024DSY_at; Start 20; Stop 44
tgcagctctataaacatcaaggctg

SEQ ID NO: 170041 - DNA, 25 bp, Artificial
  probe
  misc_feature (1)..(25): SEQ ID NO: 1943; WAN024DSY_at; Start 37; Stop 61
caaggctgggagcacttcccagtct

SEQ ID NO: 170042 - DNA, 25 bp, Artificial
  probe
  misc_feature (1)..(25): SEQ ID NO: 1943; WAN024DSY_at; Start 27; Stop 51
ctataaacatcaaggctgggagcac

SEQ ID NO: 170043 - DNA, 25 bp, Artificial
  probe
  misc_feature (1)..(25): SEQ ID NO: 1943; WAN024DSY_at; Start 21; Stop 45
gcagctctataaacatcaaggctgg

SEQ ID NO: 170044 - DNA, 25 bp, Artificial
  probe
  misc_feature (1)..(25): SEQ ID NO: 1943; WAN024DSY_at; Start 23; Stop 47
agctctataaacatcaaggctggga

SEQ ID NO: 170045 - DNA, 25 bp, Artificial
  probe
  misc_feature (1)..(25): SEQ ID NO: 1943; WAN024DSY_at; Start 42; Stop 66
ctgggagcacttcccagtcttattc

SEQ ID NO: 170046 - DNA, 25 bp, Artificial
  probe
  misc_feature (1)..(25): SEQ ID NO: 1943; WAN024DSY_at; Start 22; Stop 46
cagctctataaacatcaaggctggg

SEQ ID NO: 170047 - DNA, 25 bp, Artificial
  probe
  misc_feature (1)..(25): SEQ ID NO: 1943; WAN024DSY_at; Start 31; Stop 55
aaacatcaaggctgggagcacttcc

SEQ ID NO: 170048 - DNA, 25 bp, Artificial
  probe
  misc_feature (1)..(25): SEQ ID NO: 1943; WAN024DSY_at; Start 45; Stop 69
ggagcacttcccagtcttattctat

SEQ ID NO: 170049 - DNA, 25 bp, Artificial
  probe
  misc_feature (1)..(25): SEQ ID NO: 1943; WAN024DSY_at; Start 49; Stop 73
cacttcccagtcttattctatttta

SEQ ID NO: 170050 - DNA, 25 bp, Artificial
  probe
  misc_feature (1)..(25): SEQ ID NO: 1943; WAN024DSY_at; Start 39; Stop 63
aggctgggagcacttcccagtctta

SEQ ID NO: 170051 - DNA, 25 bp, Artificial
  probe
  misc_feature (1)..(25): SEQ ID NO: 1943; WAN024DSY_at; Start 30; Stop 54
taaacatcaaggctgggagcacttc

SEQ ID NO: 170052 - DNA, 25 bp, Artificial
  probe
  misc_feature (1)..(25): SEQ ID NO: 1943; WAN024DSY_at; Start 18; Stop 42
cgtgcagctctataaacatcaaggc

SEQ ID NO: 170053 - DNA, 25 bp, Artificial
  probe
  misc_feature (1)..(25): SEQ ID NO: 1943; WAN024DSY_at; Start 25; Stop 49
ctctataaacatcaaggctgggagc

SEQ ID NO: 170054 - DNA, 25 bp, Artificial
  probe
  misc_feature (1)..(25): SEQ ID NO: 1943; WAN024DSY_at; Start 56; Stop 80
cagtcttattctattttaatttcaa

SEQ ID NO: 170055 - DNA, 25 bp, Artificial
  probe
  misc_feature (1)..(25): SEQ ID NO: 1943; WAN024DSY_at; Start 33; Stop 57
acatcaaggctgggagcacttccca

SEQ ID NO: 170056 - DNA, 25 bp, Artificial
  probe
  misc_feature (1)..(25): SEQ ID NO: 1943; WAN024DSY_at; Start 35; Stop 59
atcaaggctgggagcacttcccagt

SEQ ID NO: 170057 - DNA, 25 bp, Artificial
  probe
  misc_feature (1)..(25): SEQ ID NO: 1943; WAN024DSY_at; Start 41; Stop 65
gctgggagcacttcccagtcttatt

SEQ ID NO: 170058 - DNA, 25 bp, Artificial
  probe
  misc_feature (1)..(25): SEQ ID NO: 1943; WAN024DSY_at; Start 44; Stop 68
gggagcacttcccagtcttattcta

SEQ ID NO: 170059 - DNA, 25 bp, Artificial
  probe
  misc_feature (1)..(25): SEQ ID NO: 1943; WAN024DSY_at; Start 36; Stop 60
tcaaggctgggagcacttcccagtc

SEQ ID NO: 170060 - DNA, 25 bp, Artificial
  probe
  misc_feature (1)..(25): SEQ ID NO: 1943; WAN024DSY_at; Start 47; Stop 71
agcacttcccagtcttattctattt

SEQ ID NO: 170061 - DNA, 25 bp, Artificial
  probe
  misc_feature (1)..(25): SEQ ID NO: 1943; WAN024DSY_at; Start 26; Stop 50
tctataaacatcaaggctgggagca

SEQ ID NO: 170062 - DNA, 25 bp, Artificial
  probe
  misc_feature (1)..(25): SEQ ID NO: 1943; WAN024DSY_at; Start 24; Stop 48
gctctataaacatcaaggctgggag

SEQ ID NO: 170063 - DNA, 25 bp, Artificial
  probe
  misc_feature (1)..(25): SEQ ID NO: 1943; WAN024DSY_at; Start 51; Stop 75
cttcccagtcttattctattttaat

SEQ ID NO: 170064 - DNA, 25 bp, Artificial
  probe
  misc_feature (1)..(25): SEQ ID NO: 1943; WAN024DSY_at; Start 48; Stop 72
gcacttcccagtcttattctatttt

SEQ ID NO: 170065 - DNA, 25 bp, Artificial
  probe
  misc_feature (1)..(25): SEQ ID NO: 1943; WAN024DSY_at; Start 32; Stop 56
aacatcaaggctgggagcacttccc

SEQ ID NO: 170066 - DNA, 25 bp, Artificial
  probe
  misc_feature (1)..(25): SEQ ID NO: 1943; WAN024DSY_at; Start 55; Stop 79
ccagtcttattctattttaatttca

SEQ ID NO: 170067 - DNA, 25 bp, Artificial
  probe
  misc_feature (1)..(25): SEQ ID NO: 1776; WAN024DSZ_at; Start 3; Stop 27
gattaaaatttatacagtctcaagt

SEQ ID NO: 170068 - DNA, 25 bp, Artificial
  probe
  misc_feature (1)..(25): SEQ ID NO: 1776; WAN024DSZ_at; Start 118; Stop 142
gaagaattactggatattctaacca

SEQ ID NO: 170069 - DNA, 25 bp, Artificial
  probe
  misc_feature (1)..(25): SEQ ID NO: 1776; WAN024DSZ_at; Start 155; Stop 179
gaatagccagcatcgtttcgtctaa

SEQ ID NO: 170070 - DNA, 25 bp, Artificial
  probe
  misc_feature (1)..(25): SEQ ID NO: 1776; WAN024DSZ_at; Start 239; Stop 263
tcaatctgattatggaaacaccgag

SEQ ID NO: 170071 - DNA, 25 bp, Artificial
  probe
  misc_feature (1)..(25): SEQ ID NO: 1776; WAN024DSZ_at; Start 353; Stop 377
tccgtaatgtagaaaatgcagaagc

SEQ ID NO: 170072 - DNA, 25 bp, Artificial
  probe
  misc_feature (1)..(25): SEQ ID NO: 1776; WAN024DSZ_at; Start 269; Stop 293
taaagagcccaatccttgtagatga

SEQ ID NO: 170073 - DNA, 25 bp, Artificial
  probe
  misc_feature (1)..(25): SEQ ID NO: 1776; WAN024DSZ_at; Start 257; Stop 281
caccgagaattttaaagagcccaat

SEQ ID NO: 170074 - DNA, 25 bp, Artificial
  probe
  misc_feature (1)..(25): SEQ ID NO: 1776; WAN024DSZ_at; Start 315; Stop 339
caaggaagacgatattcgtgccttc

SEQ ID NO: 170075 - DNA, 25 bp, Artificial
  probe
  misc_feature (1)..(25): SEQ ID NO: 1776; WAN024DSZ_at; Start 175; Stop 199
tctaaaaatcgctatgccaaagccc

SEQ ID NO: 170076 - DNA, 25 bp, Artificial
  probe
  misc_feature (1)..(25): SEQ ID NO: 1776; WAN024DSZ_at; Start 146; Stop 170
cagataacggaatagccagcatcgt

SEQ ID NO: 170077 - DNA, 25 bp, Artificial
  probe
  misc_feature (1)..(25): SEQ ID NO: 1776; WAN024DSZ_at; Start 107; Stop 131
gaattacgagagaagaattactgga

SEQ ID NO: 170078 - DNA, 25 bp, Artificial
  probe
  misc_feature (1)..(25): SEQ ID NO: 1776; WAN024DSZ_at; Start 222; Stop 246
gagtgtcaatgaagttctcaatctg

SEQ ID NO: 170079 - DNA, 25 bp, Artificial
  probe
  misc_feature (1)..(25): SEQ ID NO: 1776; WAN024DSZ_at; Start 94; Stop 118
cttggtaaagaaggaattacgagag

SEQ ID NO: 170080 - DNA, 25 bp, Artificial
  probe
  misc_feature (1)..(25): SEQ ID NO: 1776; WAN024DSZ_at; Start 56; Stop 80
ggctcaatgcccaccagttaagtta

SEQ ID NO: 170081 - DNA, 25 bp, Artificial
  probe
  misc_feature (1)..(25): SEQ ID NO: 1776; WAN024DSZ_at; Start 289; Stop 313
gatgaaaaacgcctgcaagttggct

SEQ ID NO: 170082 - DNA, 25 bp, Artificial
  probe
  misc_feature (1)..(25): SEQ ID NO: 1776; WAN024DSZ_at; Start 197; Stop 221
cccttggagtggatattgaagattt

SEQ ID NO: 170083 - DNA, 25 bp, Artificial
  probe
  misc_feature (1)..(25): SEQ ID NO: 1776; WAN024DSZ_at; Start 357; Stop 381
taatgtagaaaatgcagaagcacgt

SEQ ID NO: 170084 - DNA, 25 bp, Artificial
  probe
  misc_feature (1)..(25): SEQ ID NO: 1776; WAN024DSZ_at; Start 132; Stop 156
tattctaaccaaaacagataacgga

SEQ ID NO: 170085 - DNA, 25 bp, Artificial
  probe
  misc_feature (1)..(25): SEQ ID NO: 1776; WAN024DSZ_at; Start 214; Stop 238
gaagatttgagtgtcaatgaagttc

SEQ ID NO: 170086 - DNA, 25 bp, Artificial
  probe
  misc_feature (1)..(25): SEQ ID NO: 1776; WAN024DSZ_at; Start 61; Stop 85
aatgcccaccagttaagttataaag

SEQ ID NO: 170087 - DNA, 25 bp, Artificial
  probe
  misc_feature (1)..(25): SEQ ID NO: 1776; WAN024DSZ_at; Start 243; Stop 267
tctgattatggaaacaccgagaatt

SEQ ID NO: 170088 - DNA, 25 bp, Artificial
  probe
  misc_feature (1)..(25): SEQ ID NO: 1776; WAN024DSZ_at; Start 191; Stop 215
ccaaagcccttggagtggatattga

SEQ ID NO: 170089 - DNA, 25 bp, Artificial
  probe
  misc_feature (1)..(25): SEQ ID NO: 1776; WAN024DSZ_at; Start 43; Stop 67
aaagcaaaaacctggctcaatgccc

SEQ ID NO: 170090 - DNA, 25 bp, Artificial
  probe
  misc_feature (1)..(25): SEQ ID NO: 1776; WAN024DSZ_at; Start 296; Stop 320
aacgcctgcaagttggctacaagga

SEQ ID NO: 170091 - DNA, 25 bp, Artificial
  probe
  misc_feature (1)..(25): SEQ ID NO: 1776; WAN024DSZ_at; Start 308; Stop 332
ttggctacaaggaagacgatattcg

SEQ ID NO: 170092 - DNA, 25 bp, Artificial
  probe
  misc_feature (1)..(25): SEQ ID NO: 1776; WAN024DSZ_at; Start 341; Stop 365
taccacgctctgtccgtaatgtaga

SEQ ID NO: 170093 - DNA, 25 bp, Artificial
  probe
  misc_feature (1)..(25): SEQ ID NO: 1776; WAN024DSZ_at; Start 281; Stop 305
tccttgtagatgaaaaacgcctgca

SEQ ID NO: 170094 - DNA, 25 bp, Artificial
  probe
  misc_feature (1)..(25): SEQ ID NO: 1776; WAN024DSZ_at; Start 37; Stop 61
tgtaaaaaagcaaaaacctggctca

SEQ ID NO: 170095 - DNA, 25 bp, Artificial
  probe
  misc_feature (1)..(25): SEQ ID NO: 1776; WAN024DSZ_at; Start 344; Stop 368
cacgctctgtccgtaatgtagaaaa

SEQ ID NO: 170096 - DNA, 25 bp, Artificial
  probe
  misc_feature (1)..(25): SEQ ID NO: 1776; WAN024DSZ_at; Start 141; Stop 165
caaaacagataacggaatagccagc

SEQ ID NO: 170097 - DNA, 25 bp, Artificial
  probe
  misc_feature (1)..(25): SEQ ID NO: 1776; WAN024DSZ_at; Start 325; Stop 349
gatattcgtgccttcctaccacgct

SEQ ID NO: 170098 - DNA, 25 bp, Artificial
  probe
  misc_feature (1)..(25): SEQ ID NO: 1776; WAN024DSZ_at; Start 168; Stop 192
cgtttcgtctaaaaatcgctatgcc

SEQ ID NO: 170099 - DNA, 25 bp, Artificial
  probe
  misc_feature (1)..(25): SEQ ID NO: 1776; WAN024DSZ_at; Start 181; Stop 205
aatcgctatgccaaagcccttggag

SEQ ID NO: 170100 - DNA, 25 bp, Artificial
  probe
  misc_feature (1)..(25): SEQ ID NO: 1776; WAN024DSZ_at; Start 11; Stop 35
tttatacagtctcaagttgtactag

SEQ ID NO: 170101 - DNA, 25 bp, Artificial
  probe
  misc_feature (1)..(25): SEQ ID NO: 615; WAN024DT2_at; Start 436; Stop 460
gattttcaagttctggatgtcaaga

SEQ ID NO: 170102 - DNA, 25 bp, Artificial
  probe
  misc_feature (1)..(25): SEQ ID NO: 615; WAN024DT2_at; Start 132; Stop 156
tgctgagaagaatacagttgtaact

SEQ ID NO: 170103 - DNA, 25 bp, Artificial
  probe
  misc_feature (1)..(25): SEQ ID NO: 615; WAN024DT2_at; Start 67; Stop 91
gaaactggaccagctacaaaaacag

SEQ ID NO: 170104 - DNA, 25 bp, Artificial
  probe
  misc_feature (1)..(25): SEQ ID NO: 615; WAN024DT2_at; Start 365; Stop 389
gtaaattggcaggtttcaaacttga

SEQ ID NO: 170105 - DNA, 25 bp, Artificial
  probe
  misc_feature (1)..(25): SEQ ID NO: 615; WAN024DT2_at; Start 504; Stop 528
tcttttgaaaaatgaaccaagcaaa

SEQ ID NO: 170106 - DNA, 25 bp, Artificial
  probe
  misc_feature (1)..(25): SEQ ID NO: 615; WAN024DT2_at; Start 256; Stop 280
cgtccagtctctgatgagttgaaga

SEQ ID NO: 170107 - DNA, 25 bp, Artificial
  probe
  misc_feature (1)..(25): SEQ ID NO: 615; WAN024DT2_at; Start 422; Stop 446
caacgactagttttgattttcaagt

SEQ ID NO: 170108 - DNA, 25 bp, Artificial
  probe
  misc_feature (1)..(25): SEQ ID NO: 615; WAN024DT2_at; Start 525; Stop 549
caaatatatttcagatagattggca

SEQ ID NO: 170109 - DNA, 25 bp, Artificial
  probe
  misc_feature (1)..(25): SEQ ID NO: 615; WAN024DT2_at; Start 22; Stop 46
agtctagctttcctttttgtcctgg

SEQ ID NO: 170110 - DNA, 25 bp, Artificial
  probe
  misc_feature (1)..(25): SEQ ID NO: 615; WAN024DT2_at; Start 388; Stop 412
gaaacaaaactattgagcgcaacgg

SEQ ID NO: 170111 - DNA, 25 bp, Artificial
  probe
  misc_feature (1)..(25): SEQ ID NO: 615; WAN024DT2_at; Start 198; Stop 222
gacacaaacaattacttacaaagac

SEQ ID NO: 170112 - DNA, 25 bp, Artificial
  probe
  misc_feature (1)..(25): SEQ ID NO: 615; WAN024DT2_at; Start 446; Stop 470
ttctggatgtcaagaaggcttccca

SEQ ID NO: 170113 - DNA, 25 bp, Artificial
  probe
  misc_feature (1)..(25): SEQ ID NO: 615; WAN024DT2_at; Start 117; Stop 141
gccagttattgaaaatgctgagaag

SEQ ID NO: 170114 - DNA, 25 bp, Artificial
  probe
  misc_feature (1)..(25): SEQ ID NO: 615; WAN024DT2_at; Start 74; Stop 98
gaccagctacaaaaacagaaaaaga

SEQ ID NO: 170115 - DNA, 25 bp, Artificial
  probe
  misc_feature (1)..(25): SEQ ID NO: 615; WAN024DT2_at; Start 243; Stop 267
tatccaacaaaaacgtccagtctct

SEQ ID NO: 170116 - DNA, 25 bp, Artificial
  probe
  misc_feature (1)..(25): SEQ ID NO: 615; WAN024DT2_at; Start 52; Stop 76
tgcggacagaaaaaagaaactggac

SEQ ID NO: 170117 - DNA, 25 bp, Artificial
  probe
  misc_feature (1)..(25): SEQ ID NO: 615; WAN024DT2_at; Start 395; Stop 419
aactattgagcgcaacggaacttca

SEQ ID NO: 170118 - DNA, 25 bp, Artificial
  probe
  misc_feature (1)..(25): SEQ ID NO: 615; WAN024DT2_at; Start 11; Stop 35
tagttcttgttagtctagctttcct

SEQ ID NO: 170119 - DNA, 25 bp, Artificial
  probe
  misc_feature (1)..(25): SEQ ID NO: 615; WAN024DT2_at; Start 276; Stop 300
gaagacttatattgaccaacatgga

SEQ ID NO: 170120 - DNA, 25 bp, Artificial
  probe
  misc_feature (1)..(25): SEQ ID NO: 615; WAN024DT2_at; Start 41; Stop 65
tcctggttggttgcggacagaaaaa

SEQ ID NO: 170121 - DNA, 25 bp, Artificial
  probe
  misc_feature (1)..(25): SEQ ID NO: 615; WAN024DT2_at; Start 455; Stop 479
tcaagaaggcttcccagttggaaca

SEQ ID NO: 170122 - DNA, 25 bp, Artificial
  probe
  misc_feature (1)..(25): SEQ ID NO: 615; WAN024DT2_at; Start 108; Stop 132
gtcggcattgccagttattgaaaat

SEQ ID NO: 170123 - DNA, 25 bp, Artificial
  probe
  misc_feature (1)..(25): SEQ ID NO: 615; WAN024DT2_at; Start 150; Stop 174
tgtaactaagactttggtcttgccc

SEQ ID NO: 170124 - DNA, 25 bp, Artificial
  probe
  misc_feature (1)..(25): SEQ ID NO: 615; WAN024DT2_at; Start 178; Stop 202
tcagatgatggtagccagcagacac

SEQ ID NO: 170125 - DNA, 25 bp, Artificial
  probe
  misc_feature (1)..(25): SEQ ID NO: 615; WAN024DT2_at; Start 407; Stop 431
caacggaacttcaaacaacgactag

SEQ ID NO: 170126 - DNA, 25 bp, Artificial
  probe
  misc_feature (1)..(25): SEQ ID NO: 615; WAN024DT2_at; Start 304; Stop 328
gaggaaactcaaaaagctcttcttg

SEQ ID NO: 170127 - DNA, 25 bp, Artificial
  probe
  misc_feature (1)..(25): SEQ ID NO: 615; WAN024DT2_at; Start 97; Stop 121
gatacgcttcagtcggcattgccag

SEQ ID NO: 170128 - DNA, 25 bp, Artificial
  probe
  misc_feature (1)..(25): SEQ ID NO: 615; WAN024DT2_at; Start 343; Stop 367
gataagtctatcattgaagctcgta

SEQ ID NO: 170129 - DNA, 25 bp, Artificial
  probe
  misc_feature (1)..(25): SEQ ID NO: 615; WAN024DT2_at; Start 187; Stop 211
ggtagccagcagacacaaacaatta

SEQ ID NO: 170130 - DNA, 25 bp, Artificial
  probe
  misc_feature (1)..(25): SEQ ID NO: 615; WAN024DT2_at; Start 214; Stop 238
tacaaagacaagacttttttgagtc

SEQ ID NO: 170131 - DNA, 25 bp, Artificial
  probe
  misc_feature (1)..(25): SEQ ID NO: 615; WAN024DT2_at; Start 478; Stop 502
catctgaagaatattggtttggaaa

SEQ ID NO: 170132 - DNA, 25 bp, Artificial
  probe
  misc_feature (1)..(25): SEQ ID NO: 615; WAN024DT2_at; Start 89; Stop 113
cagaaaaagatacgcttcagtcggc

SEQ ID NO: 170133 - DNA, 25 bp, Artificial
  probe
  misc_feature (1)..(25): SEQ ID NO: 615; WAN024DT2_at; Start 463; Stop 487
gcttcccagttggaacatctgaaga

SEQ ID NO: 170134 - DNA, 25 bp, Artificial
  probe
  misc_feature (1)..(25): SEQ ID NO: 615; WAN024DT2_at; Start 354; Stop 378
cattgaagctcgtaaattggcaggt

SEQ ID NO: 170135 - DNA, 25 bp, Artificial
  probe
  misc_feature (1)..(25): SEQ ID NO: 6944; WAN024DT3_at; Start 33; Stop 57
cagtttagtctattataccataaaa

SEQ ID NO: 170136 - DNA, 25 bp, Artificial
  probe
  misc_feature (1)..(25): SEQ ID NO: 6944; WAN024DT3_at; Start 7; Stop 31
ctacccctttcgctacatgttacta

SEQ ID NO: 170137 - DNA, 25 bp, Artificial
  probe
  misc_feature (1)..(25): SEQ ID NO: 6944; WAN024DT3_at; Start 17; Stop 41
cgctacatgttactatcagtttagt

SEQ ID NO: 170138 - DNA, 25 bp, Artificial
  probe
  misc_feature (1)..(25): SEQ ID NO: 6944; WAN024DT3_at; Start 49; Stop 73
accataaaaaacatccgacttgcga

SEQ ID NO: 170139 - DNA, 25 bp, Artificial
  probe
  misc_feature (1)..(25): SEQ ID NO: 6944; WAN024DT3_at; Start 22; Stop 46
catgttactatcagtttagtctatt

SEQ ID NO: 170140 - DNA, 25 bp, Artificial
  probe
  misc_feature (1)..(25): SEQ ID NO: 6944; WAN024DT3_at; Start 9; Stop 33
acccctttcgctacatgttactatc

SEQ ID NO: 170141 - DNA, 25 bp, Artificial
  probe
  misc_feature (1)..(25): SEQ ID NO: 6944; WAN024DT3_at; Start 28; Stop 52
actatcagtttagtctattatacca

SEQ ID NO: 170142 - DNA, 25 bp, Artificial
  probe
  misc_feature (1)..(25): SEQ ID NO: 6944; WAN024DT3_at; Start 18; Stop 42
gctacatgttactatcagtttagtc

SEQ ID NO: 170143 - DNA, 25 bp, Artificial
  probe
  misc_feature (1)..(25): SEQ ID NO: 6944; WAN024DT3_at; Start 44; Stop 68
attataccataaaaaacatccgact

SEQ ID NO: 170144 - DNA, 25 bp, Artificial
  probe
  misc_feature (1)..(25): SEQ ID NO: 6944; WAN024DT3_at; Start 47; Stop 71
ataccataaaaaacatccgacttgc

SEQ ID NO: 170145 - DNA, 25 bp, Artificial
  probe
  misc_feature (1)..(25): SEQ ID NO: 6944; WAN024DT3_at; Start 43; Stop 67
tattataccataaaaaacatccgac

SEQ ID NO: 170146 - DNA, 25 bp, Artificial
  probe
  misc_feature (1)..(25): SEQ ID NO: 6944; WAN024DT3_at; Start 2; Stop 26
tgtacctacccctttcgctacatgt

SEQ ID NO: 170147 - DNA, 25 bp, Artificial
  probe
  misc_feature (1)..(25): SEQ ID NO: 6944; WAN024DT3_at; Start 30; Stop 54
tatcagtttagtctattataccata

SEQ ID NO: 170148 - DNA, 25 bp, Artificial
  probe
  misc_feature (1)..(25): SEQ ID NO: 6944; WAN024DT3_at; Start 10; Stop 34
cccctttcgctacatgttactatca

SEQ ID NO: 170149 - DNA, 25 bp, Artificial
  probe
  misc_feature (1)..(25): SEQ ID NO: 6944; WAN024DT3_at; Start 57; Stop 81
aaacatccgacttgcgacctatttt

SEQ ID NO: 170150 - DNA, 25 bp, Artificial
  probe
  misc_feature (1)..(25): SEQ ID NO: 6944; WAN024DT3_at; Start 50; Stop 74
ccataaaaaacatccgacttgcgac

SEQ ID NO: 170151 - DNA, 25 bp, Artificial
  probe
  misc_feature (1)..(25): SEQ ID NO: 6944; WAN024DT3_at; Start 46; Stop 70
tataccataaaaaacatccgacttg

SEQ ID NO: 170152 - DNA, 25 bp, Artificial
  probe
  misc_feature (1)..(25): SEQ ID NO: 6944; WAN024DT3_at; Start 13; Stop 37
ctttcgctacatgttactatcagtt

SEQ ID NO: 170153 - DNA, 25 bp, Artificial
  probe
  misc_feature (1)..(25): SEQ ID NO: 6944; WAN024DT3_at; Start 14; Stop 38
tttcgctacatgttactatcagttt

SEQ ID NO: 170154 - DNA, 25 bp, Artificial
  probe
  misc_feature (1)..(25): SEQ ID NO: 6944; WAN024DT3_at; Start 53; Stop 77
taaaaaacatccgacttgcgaccta

SEQ ID NO: 170155 - DNA, 25 bp, Artificial
  probe
  misc_feature (1)..(25): SEQ ID NO: 6944; WAN024DT3_at; Start 8; Stop 32
tacccctttcgctacatgttactat

SEQ ID NO: 170156 - DNA, 25 bp, Artificial
  probe
  misc_feature (1)..(25): SEQ ID NO: 6944; WAN024DT3_at; Start 54; Stop 78
aaaaaacatccgacttgcgacctat

SEQ ID NO: 170157 - DNA, 25 bp, Artificial
  probe
  misc_feature (1)..(25): SEQ ID NO: 6944; WAN024DT3_at; Start 20; Stop 44
tacatgttactatcagtttagtcta

SEQ ID NO: 170158 - DNA, 25 bp, Artificial
  probe
  misc_feature (1)..(25): SEQ ID NO: 6944; WAN024DT3_at; Start 32; Stop 56
tcagtttagtctattataccataaa

SEQ ID NO: 170159 - DNA, 25 bp, Artificial
  probe
  misc_feature (1)..(25): SEQ ID NO: 6944; WAN024DT3_at; Start 51; Stop 75
cataaaaaacatccgacttgcgacc

SEQ ID NO: 170160 - DNA, 25 bp, Artificial
  probe
  misc_feature (1)..(25): SEQ ID NO: 6944; WAN024DT3_at; Start 55; Stop 79
aaaaacatccgacttgcgacctatt

SEQ ID NO: 170161 - DNA, 25 bp, Artificial
  probe
  misc_feature (1)..(25): SEQ ID NO: 6944; WAN024DT3_at; Start 15; Stop 39
ttcgctacatgttactatcagttta

SEQ ID NO: 170162 - DNA, 25 bp, Artificial
  probe
  misc_feature (1)..(25): SEQ ID NO: 6944; WAN024DT3_at; Start 48; Stop 72
taccataaaaaacatccgacttgcg

SEQ ID NO: 170163 - DNA, 25 bp, Artificial
  probe
  misc_feature (1)..(25): SEQ ID NO: 6944; WAN024DT3_at; Start 56; Stop 80
aaaacatccgacttgcgacctattt

SEQ ID NO: 170164 - DNA, 25 bp, Artificial
  probe
  misc_feature (1)..(25): SEQ ID NO: 6944; WAN024DT3_at; Start 12; Stop 36
cctttcgctacatgttactatcagt

SEQ ID NO: 170165 - DNA, 25 bp, Artificial
  probe
  misc_feature (1)..(25): SEQ ID NO: 6944; WAN024DT3_at; Start 4; Stop 28
tacctacccctttcgctacatgtta

SEQ ID NO: 170166 - DNA, 25 bp, Artificial
  probe
  misc_feature (1)..(25): SEQ ID NO: 6944; WAN024DT3_at; Start 16; Stop 40
tcgctacatgttactatcagtttag

SEQ ID NO: 170167 - DNA, 25 bp, Artificial
  probe
  misc_feature (1)..(25): SEQ ID NO: 6944; WAN024DT3_at; Start 11; Stop 35
ccctttcgctacatgttactatcag

SEQ ID NO: 170168 - DNA, 25 bp, Artificial
  probe
  misc_feature (1)..(25): SEQ ID NO: 6944; WAN024DT3_at; Start 27; Stop 51
tactatcagtttagtctattatacc

SEQ ID NO: 170169 - DNA, 25 bp, Artificial
  probe
  misc_feature (1)..(25): SEQ ID NO: 5697; WAN024DT4_at; Start 73; Stop 97
ttttatggtataatagacctaacta

SEQ ID NO: 170170 - DNA, 25 bp, Artificial
  probe
  misc_feature (1)..(25): SEQ ID NO: 5697; WAN024DT4_at; Start 56; Stop 80
gtcgcaagtcggatgttttttatgg

SEQ ID NO: 170171 - DNA, 25 bp, Artificial
  probe
  misc_feature (1)..(25): SEQ ID NO: 5697; WAN024DT4_at; Start 58; Stop 82
cgcaagtcggatgttttttatggta

SEQ ID NO: 170172 - DNA, 25 bp, Artificial
  probe
  misc_feature (1)..(25): SEQ ID NO: 5697; WAN024DT4_at; Start 75; Stop 99
ttatggtataatagacctaactaat

SEQ ID NO: 170173 - DNA, 25 bp, Artificial
  probe
  misc_feature (1)..(25): SEQ ID NO: 5697; WAN024DT4_at; Start 67; Stop 91
gatgttttttatggtataatagacc

SEQ ID NO: 170174 - DNA, 25 bp, Artificial
  probe
  misc_feature (1)..(25): SEQ ID NO: 5697; WAN024DT4_at; Start 51; Stop 75
aataggtcgcaagtcggatgttttt

SEQ ID NO: 170175 - DNA, 25 bp, Artificial
  probe
  misc_feature (1)..(25): SEQ ID NO: 5697; WAN024DT4_at; Start 48; Stop 72
aaaaataggtcgcaagtcggatgtt

SEQ ID NO: 170176 - DNA, 25 bp, Artificial
  probe
  misc_feature (1)..(25): SEQ ID NO: 5697; WAN024DT4_at; Start 52; Stop 76
ataggtcgcaagtcggatgtttttt

SEQ ID NO: 170177 - DNA, 25 bp, Artificial
  probe
  misc_feature (1)..(25): SEQ ID NO: 5697; WAN024DT4_at; Start 60; Stop 84
caagtcggatgttttttatggtata

SEQ ID NO: 170178 - DNA, 25 bp, Artificial
  probe
  misc_feature (1)..(25): SEQ ID NO: 5697; WAN024DT4_at; Start 57; Stop 81
tcgcaagtcggatgttttttatggt

SEQ ID NO: 170179 - DNA, 25 bp, Artificial
  probe
  misc_feature (1)..(25): SEQ ID NO: 5697; WAN024DT4_at; Start 69; Stop 93
tgttttttatggtataatagaccta

SEQ ID NO: 170180 - DNA, 25 bp, Artificial
  probe
  misc_feature (1)..(25): SEQ ID NO: 5697; WAN024DT4_at; Start 45; Stop 69
attaaaaataggtcgcaagtcggat

SEQ ID NO: 170181 - DNA, 25 bp, Artificial
  probe
  misc_feature (1)..(25): SEQ ID NO: 5697; WAN024DT4_at; Start 54; Stop 78
aggtcgcaagtcggatgttttttat

SEQ ID NO: 170182 - DNA, 25 bp, Artificial
  probe
  misc_feature (1)..(25): SEQ ID NO: 5697; WAN024DT4_at; Start 49; Stop 73
aaaataggtcgcaagtcggatgttt

SEQ ID NO: 170183 - DNA, 25 bp, Artificial
  probe
  misc_feature (1)..(25): SEQ ID NO: 5697; WAN024DT4_at; Start 74; Stop 98
tttatggtataatagacctaactaa

SEQ ID NO: 170184 - DNA, 25 bp, Artificial
  probe
  misc_feature (1)..(25): SEQ ID NO: 5697; WAN024DT4_at; Start 59; Stop 83
gcaagtcggatgttttttatggtat

SEQ ID NO: 170185 - DNA, 25 bp, Artificial
  probe
  misc_feature (1)..(25): SEQ ID NO: 5697; WAN024DT4_at; Start 47; Stop 71
taaaaataggtcgcaagtcggatgt

SEQ ID NO: 170186 - DNA, 25 bp, Artificial
  probe
  misc_feature (1)..(25): SEQ ID NO: 5697; WAN024DT4_at; Start 50; Stop 74
aaataggtcgcaagtcggatgtttt

SEQ ID NO: 170187 - DNA, 25 bp, Artificial
  probe
  misc_feature (1)..(25): SEQ ID NO: 5697; WAN024DT4_at; Start 46; Stop 70
ttaaaaataggtcgcaagtcggatg

SEQ ID NO: 170188 - DNA, 25 bp, Artificial
  probe
  misc_feature (1)..(25): SEQ ID NO: 5697; WAN024DT4_at; Start 62; Stop 86
agtcggatgttttttatggtataat

SEQ ID NO: 170189 - DNA, 25 bp, Artificial
  probe
  misc_feature (1)..(25): SEQ ID NO: 5697; WAN024DT4_at; Start 64; Stop 88
tcggatgttttttatggtataatag

SEQ ID NO: 170190 - DNA, 25 bp, Artificial
  probe
  misc_feature (1)..(25): SEQ ID NO: 5697; WAN024DT4_at; Start 65; Stop 89
cggatgttttttatggtataataga

SEQ ID NO: 170191 - DNA, 25 bp, Artificial
  probe
  misc_feature (1)..(25): SEQ ID NO: 5697; WAN024DT4_at; Start 63; Stop 87
gtcggatgttttttatggtataata

SEQ ID NO: 170192 - DNA, 25 bp, Artificial
  probe
  misc_feature (1)..(25): SEQ ID NO: 5697; WAN024DT4_at; Start 68; Stop 92
atgttttttatggtataatagacct

SEQ ID NO: 170193 - DNA, 25 bp, Artificial
  probe
  misc_feature (1)..(25): SEQ ID NO: 5697; WAN024DT4_at; Start 2; Stop 26
tgtcaagaaaaaagtacgaaaatga

SEQ ID NO: 170194 - DNA, 25 bp, Artificial
  probe
  misc_feature (1)..(25): SEQ ID NO: 5697; WAN024DT4_at; Start 53; Stop 77
taggtcgcaagtcggatgtttttta

SEQ ID NO: 170195 - DNA, 25 bp, Artificial
  probe
  misc_feature (1)..(25): SEQ ID NO: 5697; WAN024DT4_at; Start 66; Stop 90
ggatgttttttatggtataatagac

SEQ ID NO: 170196 - DNA, 25 bp, Artificial
  probe
  misc_feature (1)..(25): SEQ ID NO: 5697; WAN024DT4_at; Start 55; Stop 79
ggtcgcaagtcggatgttttttatg

SEQ ID NO: 170197 - DNA, 25 bp, Artificial
  probe
  misc_feature (1)..(25): SEQ ID NO: 6754; WAN024DT5_at; Start 36; Stop 60
tagcctctcttttatagagaatagc

SEQ ID NO: 170198 - DNA, 25 bp, Artificial
  probe
  misc_feature (1)..(25): SEQ ID NO: 6754; WAN024DT5_at; Start 101; Stop 125
tggaggtagaaaatccagtggaaag

SEQ ID NO: 170199 - DNA, 25 bp, Artificial
  probe
  misc_feature (1)..(25): SEQ ID NO: 6754; WAN024DT5_at; Start 119; Stop 143
tggaaagggaaccaaccagcaagag

SEQ ID NO: 170200 - DNA, 25 bp, Artificial
  probe
  misc_feature (1)..(25): SEQ ID NO: 6754; WAN024DT5_at; Start 115; Stop 139
ccagtggaaagggaaccaaccagca

SEQ ID NO: 170201 - DNA, 25 bp, Artificial
  probe
  misc_feature (1)..(25): SEQ ID NO: 6754; WAN024DT5_at; Start 125; Stop 149
gggaaccaaccagcaagagttgcct

SEQ ID NO: 170202 - DNA, 25 bp, Artificial
  probe
  misc_feature (1)..(25): SEQ ID NO: 6754; WAN024DT5_at; Start 122; Stop 146
aaagggaaccaaccagcaagagttg

SEQ ID NO: 170203 - DNA, 25 bp, Artificial
  probe
  misc_feature (1)..(25): SEQ ID NO: 6754; WAN024DT5_at; Start 76; Stop 100
gacaatcgcaaactcgataatgagc

SEQ ID NO: 170204 - DNA, 25 bp, Artificial
  probe
  misc_feature (1)..(25): SEQ ID NO: 6754; WAN024DT5_at; Start 89; Stop 113
tcgataatgagctggaggtagaaaa

SEQ ID NO: 170205 - DNA, 25 bp, Artificial
  probe
  misc_feature (1)..(25): SEQ ID NO: 6754; WAN024DT5_at; Start 93; Stop 117
taatgagctggaggtagaaaatcca

SEQ ID NO: 170206 - DNA, 25 bp, Artificial
  probe
  misc_feature (1)..(25): SEQ ID NO: 6754; WAN024DT5_at; Start 132; Stop 156
aaccagcaagagttgcctaactaat

SEQ ID NO: 170207 - DNA, 25 bp, Artificial
  probe
  misc_feature (1)..(25): SEQ ID NO: 6754; WAN024DT5_at; Start 3; Stop 27
gctccaagagttgattgatgtgatc

SEQ ID NO: 170208 - DNA, 25 bp, Artificial
  probe
  misc_feature (1)..(25): SEQ ID NO: 6754; WAN024DT5_at; Start 21; Stop 45
tgtgatctacttttttagcctctct

SEQ ID NO: 170209 - DNA, 25 bp, Artificial
  probe
  misc_feature (1)..(25): SEQ ID NO: 6754; WAN024DT5_at; Start 15; Stop 39
gattgatgtgatctacttttttagc

SEQ ID NO: 170210 - DNA, 25 bp, Artificial
  probe
  misc_feature (1)..(25): SEQ ID NO: 6754; WAN024DT5_at; Start 47; Stop 71
ttatagagaatagcccagatgatga

SEQ ID NO: 170211 - DNA, 25 bp, Artificial
  probe
  misc_feature (1)..(25): SEQ ID NO: 6754; WAN024DT5_at; Start 84; Stop 108
caaactcgataatgagctggaggta

SEQ ID NO: 170212 - DNA, 25 bp, Artificial
  probe
  misc_feature (1)..(25): SEQ ID NO: 6754; WAN024DT5_at; Start 81; Stop 105
tcgcaaactcgataatgagctggag

SEQ ID NO: 170213 - DNA, 25 bp, Artificial
  probe
  misc_feature (1)..(25): SEQ ID NO: 6754; WAN024DT5_at; Start 113; Stop 137
atccagtggaaagggaaccaaccag

SEQ ID NO: 170214 - DNA, 25 bp, Artificial
  probe
  misc_feature (1)..(25): SEQ ID NO: 6754; WAN024DT5_at; Start 61; Stop 85
ccagatgatgagatagacaatcgca

SEQ ID NO: 170215 - DNA, 25 bp, Artificial
  probe
  misc_feature (1)..(25): SEQ ID NO: 6754; WAN024DT5_at; Start 127; Stop 151
gaaccaaccagcaagagttgcctaa

SEQ ID NO: 170216 - DNA, 25 bp, Artificial
  probe
  misc_feature (1)..(25): SEQ ID NO: 6754; WAN024DT5_at; Start 44; Stop 68
cttttatagagaatagcccagatga

SEQ ID NO: 170217 - DNA, 25 bp, Artificial
  probe
  misc_feature (1)..(25): SEQ ID NO: 6754; WAN024DT5_at; Start 70; Stop 94
gagatagacaatcgcaaactcgata

SEQ ID NO: 170218 - DNA, 25 bp, Artificial
  probe
  misc_feature (1)..(25): SEQ ID NO: 6754; WAN024DT5_at; Start 72; Stop 96
gatagacaatcgcaaactcgataat

SEQ ID NO: 170219 - DNA, 25 bp, Artificial
  probe
  misc_feature (1)..(25): SEQ ID NO: 6754; WAN024DT5_at; Start 67; Stop 91
gatgagatagacaatcgcaaactcg

SEQ ID NO: 170220 - DNA, 25 bp, Artificial
  probe
  misc_feature (1)..(25): SEQ ID NO: 6754; WAN024DT5_at; Start 42; Stop 66
ctcttttatagagaatagcccagat

SEQ ID NO: 170221 - DNA, 25 bp, Artificial
  probe
  misc_feature (1)..(25): SEQ ID NO: 6754; WAN024DT5_at; Start 99; Stop 123
gctggaggtagaaaatccagtggaa

SEQ ID NO: 170222 - DNA, 25 bp, Artificial
  probe
  misc_feature (1)..(25): SEQ ID NO: 6754; WAN024DT5_at; Start 19; Stop 43
gatgtgatctacttttttagcctct

SEQ ID NO: 170223 - DNA, 25 bp, Artificial
  probe
  misc_feature (1)..(25): SEQ ID NO: 6754; WAN024DT5_at; Start 64; Stop 88
gatgatgagatagacaatcgcaaac

SEQ ID NO: 170224 - DNA, 25 bp, Artificial
  probe
  misc_feature (1)..(25): SEQ ID NO: 6754; WAN024DT5_at; Start 130; Stop 154
ccaaccagcaagagttgcctaacta

SEQ ID NO: 170225 - DNA, 25 bp, Artificial
  probe
  misc_feature (1)..(25): SEQ ID NO: 6754; WAN024DT5_at; Start 59; Stop 83
gcccagatgatgagatagacaatcg

SEQ ID NO: 170226 - DNA, 25 bp, Artificial
  probe
  misc_feature (1)..(25): SEQ ID NO: 6754; WAN024DT5_at; Start 116; Stop 140
cagtggaaagggaaccaaccagcaa

SEQ ID NO: 170227 - DNA, 25 bp, Artificial
  probe
  misc_feature (1)..(25): SEQ ID NO: 6754; WAN024DT5_at; Start 6; Stop 30
ccaagagttgattgatgtgatctac

SEQ ID NO: 170228 - DNA, 25 bp, Artificial
  probe
  misc_feature (1)..(25): SEQ ID NO: 6754; WAN024DT5_at; Start 96; Stop 120
tgagctggaggtagaaaatccagtg

SEQ ID NO: 170229 - DNA, 25 bp, Artificial
  probe
  misc_feature (1)..(25): SEQ ID NO: 6754; WAN024DT5_at; Start 87; Stop 111
actcgataatgagctggaggtagaa

SEQ ID NO: 170230 - DNA, 25 bp, Artificial
  probe
  misc_feature (1)..(25): SEQ ID NO: 6754; WAN024DT5_at; Start 78; Stop 102
caatcgcaaactcgataatgagctg

SEQ ID NO: 170231 - DNA, 25 bp, Artificial
  probe
  misc_feature (1)..(25): SEQ ID NO: 4058; WAN024DT6_s_at; Start 3; Stop 27
gcagcaggataaagaaaaaccgaga

SEQ ID NO: 170232 - DNA, 25 bp, Artificial
  probe
  misc_feature (1)..(25): SEQ ID NO: 4058; WAN024DT6_s_at; Start 26; Stop 50
gaagtttctttctcggatttgctta

SEQ ID NO: 170233 - DNA, 25 bp, Artificial
  probe
  misc_feature (1)..(25): SEQ ID NO: 4058; WAN024DT6_s_at; Start 27; Stop 51
aagtttctttctcggatttgcttat

SEQ ID NO: 170234 - DNA, 25 bp, Artificial
  probe
  misc_feature (1)..(25): SEQ ID NO: 4058; WAN024DT6_s_at; Start 25; Stop 49
agaagtttctttctcggatttgctt

SEQ ID NO: 170235 - DNA, 25 bp, Artificial
  probe
  misc_feature (1)..(25): SEQ ID NO: 4058; WAN024DT6_s_at; Start 30; Stop 54
tttctttctcggatttgcttattat

SEQ ID NO: 170236 - DNA, 25 bp, Artificial
  probe
  misc_feature (1)..(25): SEQ ID NO: 4058; WAN024DT6_s_at; Start 34; Stop 58
tttctcggatttgcttattatgagg

SEQ ID NO: 170237 - DNA, 25 bp, Artificial
  probe
  misc_feature (1)..(25): SEQ ID NO: 4058; WAN024DT6_s_at; Start 24; Stop 48
gagaagtttctttctcggatttgct

SEQ ID NO: 170238 - DNA, 25 bp, Artificial
  probe
  misc_feature (1)..(25): SEQ ID NO: 4058; WAN024DT6_s_at; Start 35; Stop 59
ttctcggatttgcttattatgaggt

SEQ ID NO: 170239 - DNA, 25 bp, Artificial
  probe
  misc_feature (1)..(25): SEQ ID NO: 4058; WAN024DT6_s_at; Start 23; Stop 47
cgagaagtttctttctcggatttgc

SEQ ID NO: 170240 - DNA, 25 bp, Artificial
  probe
  misc_feature (1)..(25): SEQ ID NO: 4058; WAN024DT6_s_at; Start 4; Stop 28
cagcaggataaagaaaaaccgagaa

SEQ ID NO: 170241 - DNA, 25 bp, Artificial
  probe
  misc_feature (1)..(25): SEQ ID NO: 4058; WAN024DT6_s_at; Start 31; Stop 55
ttctttctcggatttgcttattatg

SEQ ID NO: 170242 - DNA, 25 bp, Artificial
  probe
  misc_feature (1)..(25): SEQ ID NO: 4058; WAN024DT6_s_at; Start 22; Stop 46
ccgagaagtttctttctcggatttg

SEQ ID NO: 170243 - DNA, 25 bp, Artificial
  probe
  misc_feature (1)..(25): SEQ ID NO: 4058; WAN024DT6_s_at; Start 32; Stop 56
tctttctcggatttgcttattatga

SEQ ID NO: 170244 - DNA, 25 bp, Artificial
  probe
  misc_feature (1)..(25): SEQ ID NO: 4058; WAN024DT6_s_at; Start 1; Stop 25
gtgcagcaggataaagaaaaaccga

SEQ ID NO: 170245 - DNA, 25 bp, Artificial
  probe
  misc_feature (1)..(25): SEQ ID NO: 4058; WAN024DT6_s_at; Start 28; Stop 52
agtttctttctcggatttgcttatt

SEQ ID NO: 170246 - DNA, 25 bp, Artificial
  probe
  misc_feature (1)..(25): SEQ ID NO: 4058; WAN024DT6_s_at; Start 5; Stop 29
agcaggataaagaaaaaccgagaag

SEQ ID NO: 170247 - DNA, 25 bp, Artificial
  probe
  misc_feature (1)..(25): SEQ ID NO: 4058; WAN024DT6_s_at; Start 33; Stop 57
ctttctcggatttgcttattatgag

SEQ ID NO: 170248 - DNA, 25 bp, Artificial
  probe
  misc_feature (1)..(25): SEQ ID NO: 4058; WAN024DT6_s_at; Start 29; Stop 53
gtttctttctcggatttgcttatta

SEQ ID NO: 170249 - DNA, 25 bp, Artificial
  probe
  misc_feature (1)..(25): SEQ ID NO: 4058; WAN024DT6_s_at; Start 2; Stop 26
tgcagcaggataaagaaaaaccgag

SEQ ID NO: 170250 - DNA, 25 bp, Artificial
  probe
  misc_feature (1)..(25): SEQ ID NO: 632; WAN024DT7_at; Start 149; Stop 173
ttcacggtgccctggtcttgctcta

SEQ ID NO: 170251 - DNA, 25 bp, Artificial
  probe
  misc_feature (1)..(25): SEQ ID NO: 632; WAN024DT7_at; Start 289; Stop 313
ggctttgtcccactagcaactcttg

SEQ ID NO: 170252 - DNA, 25 bp, Artificial
  probe
  misc_feature (1)..(25): SEQ ID NO: 632; WAN024DT7_at; Start 376; Stop 400
tatctcatcatctgggctattctct

SEQ ID NO: 170253 - DNA, 25 bp, Artificial
  probe
  misc_feature (1)..(25): SEQ ID NO: 632; WAN024DT7_at; Start 249; Stop 273
gcttcgtgccactctgactcatttc

SEQ ID NO: 170254 - DNA, 25 bp, Artificial
  probe
  misc_feature (1)..(25): SEQ ID NO: 632; WAN024DT7_at; Start 264; Stop 288
gactcatttcttccttatgctggct

SEQ ID NO: 170255 - DNA, 25 bp, Artificial
  probe
  misc_feature (1)..(25): SEQ ID NO: 632; WAN024DT7_at; Start 343; Stop 367
tacctccagctcattatcgagtttg

SEQ ID NO: 170256 - DNA, 25 bp, Artificial
  probe
  misc_feature (1)..(25): SEQ ID NO: 632; WAN024DT7_at; Start 421; Stop 445
gtagatcacatcaatcaactcttgg

SEQ ID NO: 170257 - DNA, 25 bp, Artificial
  probe
  misc_feature (1)..(25): SEQ ID NO: 632; WAN024DT7_at; Start 302; Stop 326
tagcaactcttgctggttggttccc

SEQ ID NO: 170258 - DNA, 25 bp, Artificial
  probe
  misc_feature (1)..(25): SEQ ID NO: 632; WAN024DT7_at; Start 168; Stop 192
gctctactgcacacttatctgggca

SEQ ID NO: 170259 - DNA, 25 bp, Artificial
  probe
  misc_feature (1)..(25): SEQ ID NO: 632; WAN024DT7_at; Start 284; Stop 308
tggctggctttgtcccactagcaac

SEQ ID NO: 170260 - DNA, 25 bp, Artificial
  probe
  misc_feature (1)..(25): SEQ ID NO: 632; WAN024DT7_at; Start 33; Stop 57
cggtgttcttatcggcctcatcctc

SEQ ID NO: 170261 - DNA, 25 bp, Artificial
  probe
  misc_feature (1)..(25): SEQ ID NO: 632; WAN024DT7_at; Start 5; Stop 29
aaaaacaagtatttcacgatgcagc

SEQ ID NO: 170262 - DNA, 25 bp, Artificial
  probe
  misc_feature (1)..(25): SEQ ID NO: 632; WAN024DT7_at; Start 369; Stop 393
gattgtctatctcatcatctgggct

SEQ ID NO: 170263 - DNA, 25 bp, Artificial
  probe
  misc_feature (1)..(25): SEQ ID NO: 632; WAN024DT7_at; Start 275; Stop 299
tccttatgctggctggctttgtccc

SEQ ID NO: 170264 - DNA, 25 bp, Artificial
  probe
  misc_feature (1)..(25): SEQ ID NO: 632; WAN024DT7_at; Start 84; Stop 108
accaaatacctacgcaccactaaat

SEQ ID NO: 170265 - DNA, 25 bp, Artificial
  probe
  misc_feature (1)..(25): SEQ ID NO: 632; WAN024DT7_at; Start 383; Stop 407
tcatctgggctattctctataaaag

SEQ ID NO: 170266 - DNA, 25 bp, Artificial
  probe
  misc_feature (1)..(25): SEQ ID NO: 632; WAN024DT7_at; Start 349; Stop 373
cagctcattatcgagtttgcgattg

SEQ ID NO: 170267 - DNA, 25 bp, Artificial
  probe
  misc_feature (1)..(25): SEQ ID NO: 632; WAN024DT7_at; Start 361; Stop 385
gagtttgcgattgtctatctcatca

SEQ ID NO: 170268 - DNA, 25 bp, Artificial
  probe
  misc_feature (1)..(25): SEQ ID NO: 632; WAN024DT7_at; Start 232; Stop 256
agccgtgactggagcatgcttcgtg

SEQ ID NO: 170269 - DNA, 25 bp, Artificial
  probe
  misc_feature (1)..(25): SEQ ID NO: 632; WAN024DT7_at; Start 132; Stop 156
gatggatcagcatcaggttcacggt

SEQ ID NO: 170270 - DNA, 25 bp, Artificial
  probe
  misc_feature (1)..(25): SEQ ID NO: 632; WAN024DT7_at; Start 328; Stop 352
ttccactggattttctacctccagc

SEQ ID NO: 170271 - DNA, 25 bp, Artificial
  probe
  misc_feature (1)..(25): SEQ ID NO: 632; WAN024DT7_at; Start 242; Stop 266
ggagcatgcttcgtgccactctgac

SEQ ID NO: 170272 - DNA, 25 bp, Artificial
  probe
  misc_feature (1)..(25): SEQ ID NO: 632; WAN024DT7_at; Start 154; Stop 178
ggtgccctggtcttgctctactgca

SEQ ID NO: 170273 - DNA, 25 bp, Artificial
  probe
  misc_feature (1)..(25): SEQ ID NO: 632; WAN024DT7_at; Start 237; Stop 261
tgactggagcatgcttcgtgccact

SEQ ID NO: 170274 - DNA, 25 bp, Artificial
  probe
  misc_feature (1)..(25): SEQ ID NO: 632; WAN024DT7_at; Start 204; Stop 228
gctcttcaactttggcaaccgctta

SEQ ID NO: 170275 - DNA, 25 bp, Artificial
  probe
  misc_feature (1)..(25): SEQ ID NO: 632; WAN024DT7_at; Start 124; Stop 148
ggccaagtgatggatcagcatcagg

SEQ ID NO: 170276 - DNA, 25 bp, Artificial
  probe
  misc_feature (1)..(25): SEQ ID NO: 632; WAN024DT7_at; Start 62; Stop 86
tcctcttttcactcatttatgcacc

SEQ ID NO: 170277 - DNA, 25 bp, Artificial
  probe
  misc_feature (1)..(25): SEQ ID NO: 632; WAN024DT7_at; Start 432; Stop 456
caatcaactcttggagcatagaaaa

SEQ ID NO: 170278 - DNA, 25 bp, Artificial
  probe
  misc_feature (1)..(25): SEQ ID NO: 632; WAN024DT7_at; Start 195; Stop 219
catcggtatgctcttcaactttggc

SEQ ID NO: 170279 - DNA, 25 bp, Artificial
  probe
  misc_feature (1)..(25): SEQ ID NO: 632; WAN024DT7_at; Start 136; Stop 160
gatcagcatcaggttcacggtgccc

SEQ ID NO: 170280 - DNA, 25 bp, Artificial
  probe
  misc_feature (1)..(25): SEQ ID NO: 632; WAN024DT7_at; Start 407; Stop 431
gagaggctaaaaaagtagatcacat

SEQ ID NO: 170281 - DNA, 25 bp, Artificial
  probe
  misc_feature (1)..(25): SEQ ID NO: 632; WAN024DT7_at; Start 391; Stop 415
gctattctctataaaagagaggcta

SEQ ID NO: 170282 - DNA, 25 bp, Artificial
  probe
  misc_feature (1)..(25): SEQ ID NO: 632; WAN024DT7_at; Start 144; Stop 168
tcaggttcacggtgccctggtcttg

SEQ ID NO: 170283 - DNA, 25 bp, Artificial
  probe
  misc_feature (1)..(25): SEQ ID NO: 632; WAN024DT7_at; Start 77; Stop 101
tttatgcaccaaatacctacgcacc

SEQ ID NO: 170284 - DNA, 25 bp, Artificial
  probe
  misc_feature (1)..(25): SEQ ID NO: 3413; WAN024DT8_at; Start 30; Stop 54
cgttccagtggctgttccccaagct

SEQ ID NO: 170285 - DNA, 25 bp, Artificial
  probe
  misc_feature (1)..(25): SEQ ID NO: 3413; WAN024DT8_at; Start 28; Stop 52
atcgttccagtggctgttccccaag

SEQ ID NO: 170286 - DNA, 25 bp, Artificial
  probe
  misc_feature (1)..(25): SEQ ID NO: 3413; WAN024DT8_at; Start 45; Stop 69
tccccaagctcgtgtactgcccaaa

SEQ ID NO: 170287 - DNA, 25 bp, Artificial
  probe
  misc_feature (1)..(25): SEQ ID NO: 3413; WAN024DT8_at; Start 29; Stop 53
tcgttccagtggctgttccccaagc

SEQ ID NO: 170288 - DNA, 25 bp, Artificial
  probe
  misc_feature (1)..(25): SEQ ID NO: 3413; WAN024DT8_at; Start 50; Stop 74
aagctcgtgtactgcccaaaaaagt

SEQ ID NO: 170289 - DNA, 25 bp, Artificial
  probe
  misc_feature (1)..(25): SEQ ID NO: 3413; WAN024DT8_at; Start 43; Stop 67
gttccccaagctcgtgtactgccca

SEQ ID NO: 170290 - DNA, 25 bp, Artificial
  probe
  misc_feature (1)..(25): SEQ ID NO: 3413; WAN024DT8_at; Start 47; Stop 71
cccaagctcgtgtactgcccaaaaa

SEQ ID NO: 170291 - DNA, 25 bp, Artificial
  probe
  misc_feature (1)..(25): SEQ ID NO: 3413; WAN024DT8_at; Start 42; Stop 66
tgttccccaagctcgtgtactgccc

SEQ ID NO: 170292 - DNA, 25 bp, Artificial
  probe
  misc_feature (1)..(25): SEQ ID NO: 3413; WAN024DT8_at; Start 34; Stop 58
ccagtggctgttccccaagctcgtg

SEQ ID NO: 170293 - DNA, 25 bp, Artificial
  probe
  misc_feature (1)..(25): SEQ ID NO: 3413; WAN024DT8_at; Start 51; Stop 75
agctcgtgtactgcccaaaaaagtt

SEQ ID NO: 170294 - DNA, 25 bp, Artificial
  probe
  misc_feature (1)..(25): SEQ ID NO: 3413; WAN024DT8_at; Start 26; Stop 50
tcatcgttccagtggctgttcccca

SEQ ID NO: 170295 - DNA, 25 bp, Artificial
  probe
  misc_feature (1)..(25): SEQ ID NO: 3413; WAN024DT8_at; Start 36; Stop 60
agtggctgttccccaagctcgtgta

SEQ ID NO: 170296 - DNA, 25 bp, Artificial
  probe
  misc_feature (1)..(25): SEQ ID NO: 3413; WAN024DT8_at; Start 41; Stop 65
ctgttccccaagctcgtgtactgcc

SEQ ID NO: 170297 - DNA, 25 bp, Artificial
  probe
  misc_feature (1)..(25): SEQ ID NO: 3413; WAN024DT8_at; Start 44; Stop 68
ttccccaagctcgtgtactgcccaa

SEQ ID NO: 170298 - DNA, 25 bp, Artificial
  probe
  misc_feature (1)..(25): SEQ ID NO: 3413; WAN024DT8_at; Start 49; Stop 73
caagctcgtgtactgcccaaaaaag

SEQ ID NO: 170299 - DNA, 25 bp, Artificial
  probe
  misc_feature (1)..(25): SEQ ID NO: 3413; WAN024DT8_at; Start 33; Stop 57
tccagtggctgttccccaagctcgt

SEQ ID NO: 170300 - DNA, 25 bp, Artificial
  probe
  misc_feature (1)..(25): SEQ ID NO: 3413; WAN024DT8_at; Start 46; Stop 70
ccccaagctcgtgtactgcccaaaa

SEQ ID NO: 170301 - DNA, 25 bp, Artificial
  probe
  misc_feature (1)..(25): SEQ ID NO: 3413; WAN024DT8_at; Start 27; Stop 51
catcgttccagtggctgttccccaa

SEQ ID NO: 170302 - DNA, 25 bp, Artificial
  probe
  misc_feature (1)..(25): SEQ ID NO: 3413; WAN024DT8_at; Start 39; Stop 63
ggctgttccccaagctcgtgtactg

SEQ ID NO: 170303 - DNA, 25 bp, Artificial
  probe
  misc_feature (1)..(25): SEQ ID NO: 3413; WAN024DT8_at; Start 38; Stop 62
tggctgttccccaagctcgtgtact

SEQ ID NO: 170304 - DNA, 25 bp, Artificial
  probe
  misc_feature (1)..(25): SEQ ID NO: 3413; WAN024DT8_at; Start 48; Stop 72
ccaagctcgtgtactgcccaaaaaa

SEQ ID NO: 170305 - DNA, 25 bp, Artificial
  probe
  misc_feature (1)..(25): SEQ ID NO: 3413; WAN024DT8_at; Start 37; Stop 61
gtggctgttccccaagctcgtgtac

SEQ ID NO: 170306 - DNA, 25 bp, Artificial
  probe
  misc_feature (1)..(25): SEQ ID NO: 3413; WAN024DT8_at; Start 35; Stop 59
cagtggctgttccccaagctcgtgt

SEQ ID NO: 170307 - DNA, 25 bp, Artificial
  probe
  misc_feature (1)..(25): SEQ ID NO: 3413; WAN024DT8_at; Start 31; Stop 55
gttccagtggctgttccccaagctc

SEQ ID NO: 170308 - DNA, 25 bp, Artificial
  probe
  misc_feature (1)..(25): SEQ ID NO: 3413; WAN024DT8_at; Start 40; Stop 64
gctgttccccaagctcgtgtactgc

SEQ ID NO: 170309 - DNA, 25 bp, Artificial
  probe
  misc_feature (1)..(25): SEQ ID NO: 3413; WAN024DT8_at; Start 32; Stop 56
ttccagtggctgttccccaagctcg

SEQ ID NO: 170310 - DNA, 25 bp, Artificial
  probe
  misc_feature (1)..(25): SEQ ID NO: 5744; WAN024DT9_at; Start 43; Stop 67
ttttctttgcccccagacaagagtg

SEQ ID NO: 170311 - DNA, 25 bp, Artificial
  probe
  misc_feature (1)..(25): SEQ ID NO: 5744; WAN024DT9_at; Start 32; Stop 56
gcacatgggaattttctttgccccc

SEQ ID NO: 170312 - DNA, 25 bp, Artificial
  probe
  misc_feature (1)..(25): SEQ ID NO: 5744; WAN024DT9_at; Start 31; Stop 55
ggcacatgggaattttctttgcccc

SEQ ID NO: 170313 - DNA, 25 bp, Artificial
  probe
  misc_feature (1)..(25): SEQ ID NO: 5744; WAN024DT9_at; Start 29; Stop 53
ctggcacatgggaattttctttgcc

SEQ ID NO: 170314 - DNA, 25 bp, Artificial
  probe
  misc_feature (1)..(25): SEQ ID NO: 5744; WAN024DT9_at; Start 49; Stop 73
ttgcccccagacaagagtgccctca

SEQ ID NO: 170315 - DNA, 25 bp, Artificial
  probe
  misc_feature (1)..(25): SEQ ID NO: 5744; WAN024DT9_at; Start 37; Stop 61
tgggaattttctttgcccccagaca

SEQ ID NO: 170316 - DNA, 25 bp, Artificial
  probe
  misc_feature (1)..(25): SEQ ID NO: 5744; WAN024DT9_at; Start 17; Stop 41
atactacaaaagctggcacatggga

SEQ ID NO: 170317 - DNA, 25 bp, Artificial
  probe
  misc_feature (1)..(25): SEQ ID NO: 5744; WAN024DT9_at; Start 21; Stop 45
tacaaaagctggcacatgggaattt

SEQ ID NO: 170318 - DNA, 25 bp, Artificial
  probe
  misc_feature (1)..(25): SEQ ID NO: 5744; WAN024DT9_at; Start 28; Stop 52
gctggcacatgggaattttctttgc

SEQ ID NO: 170319 - DNA, 25 bp, Artificial
  probe
  misc_feature (1)..(25): SEQ ID NO: 5744; WAN024DT9_at; Start 50; Stop 74
tgcccccagacaagagtgccctcac

SEQ ID NO: 170320 - DNA, 25 bp, Artificial
  probe
  misc_feature (1)..(25): SEQ ID NO: 5744; WAN024DT9_at; Start 18; Stop 42
tactacaaaagctggcacatgggaa

SEQ ID NO: 170321 - DNA, 25 bp, Artificial
  probe
  misc_feature (1)..(25): SEQ ID NO: 5744; WAN024DT9_at; Start 15; Stop 39
ttatactacaaaagctggcacatgg

SEQ ID NO: 170322 - DNA, 25 bp, Artificial
  probe
  misc_feature (1)..(25): SEQ ID NO: 5744; WAN024DT9_at; Start 33; Stop 57
cacatgggaattttctttgccccca

SEQ ID NO: 170323 - DNA, 25 bp, Artificial
  probe
  misc_feature (1)..(25): SEQ ID NO: 5744; WAN024DT9_at; Start 30; Stop 54
tggcacatgggaattttctttgccc

SEQ ID NO: 170324 - DNA, 25 bp, Artificial
  probe
  misc_feature (1)..(25): SEQ ID NO: 5744; WAN024DT9_at; Start 35; Stop 59
catgggaattttctttgcccccaga

SEQ ID NO: 170325 - DNA, 25 bp, Artificial
  probe
  misc_feature (1)..(25): SEQ ID NO: 5744; WAN024DT9_at; Start 48; Stop 72
tttgcccccagacaagagtgccctc

SEQ ID NO: 170326 - DNA, 25 bp, Artificial
  probe
  misc_feature (1)..(25): SEQ ID NO: 5744; WAN024DT9_at; Start 22; Stop 46
acaaaagctggcacatgggaatttt

SEQ ID NO: 170327 - DNA, 25 bp, Artificial
  probe
  misc_feature (1)..(25): SEQ ID NO: 5744; WAN024DT9_at; Start 44; Stop 68
tttctttgcccccagacaagagtgc

SEQ ID NO: 170328 - DNA, 25 bp, Artificial
  probe
  misc_feature (1)..(25): SEQ ID NO: 5744; WAN024DT9_at; Start 23; Stop 47
caaaagctggcacatgggaattttc

SEQ ID NO: 170329 - DNA, 25 bp, Artificial
  probe
  misc_feature (1)..(25): SEQ ID NO: 5744; WAN024DT9_at; Start 26; Stop 50
aagctggcacatgggaattttcttt

SEQ ID NO: 170330 - DNA, 25 bp, Artificial
  probe
  misc_feature (1)..(25): SEQ ID NO: 5744; WAN024DT9_at; Start 41; Stop 65
aattttctttgcccccagacaagag

SEQ ID NO: 170331 - DNA, 25 bp, Artificial
  probe
  misc_feature (1)..(25): SEQ ID NO: 5744; WAN024DT9_at; Start 16; Stop 40
tatactacaaaagctggcacatggg

SEQ ID NO: 170332 - DNA, 25 bp, Artificial
  probe
  misc_feature (1)..(25): SEQ ID NO: 5744; WAN024DT9_at; Start 46; Stop 70
tctttgcccccagacaagagtgccc

SEQ ID NO: 170333 - DNA, 25 bp, Artificial
  probe
  misc_feature (1)..(25): SEQ ID NO: 5744; WAN024DT9_at; Start 47; Stop 71
ctttgcccccagacaagagtgccct

SEQ ID NO: 170334 - DNA, 25 bp, Artificial
  probe
  misc_feature (1)..(25): SEQ ID NO: 5744; WAN024DT9_at; Start 20; Stop 44
ctacaaaagctggcacatgggaatt

SEQ ID NO: 170335 - DNA, 25 bp, Artificial
  probe
  misc_feature (1)..(25): SEQ ID NO: 5744; WAN024DT9_at; Start 34; Stop 58
acatgggaattttctttgcccccag

SEQ ID NO: 170336 - DNA, 25 bp, Artificial
  probe
  misc_feature (1)..(25): SEQ ID NO: 5744; WAN024DT9_at; Start 19; Stop 43
actacaaaagctggcacatgggaat

SEQ ID NO: 170337 - DNA, 25 bp, Artificial
  probe
  misc_feature (1)..(25): SEQ ID NO: 5744; WAN024DT9_at; Start 51; Stop 75
gcccccagacaagagtgccctcact

SEQ ID NO: 170338 - DNA, 25 bp, Artificial
  probe
  misc_feature (1)..(25): SEQ ID NO: 5744; WAN024DT9_at; Start 25; Stop 49
aaagctggcacatgggaattttctt

SEQ ID NO: 170339 - DNA, 25 bp, Artificial
  probe
  misc_feature (1)..(25): SEQ ID NO: 5744; WAN024DT9_at; Start 45; Stop 69
ttctttgcccccagacaagagtgcc

SEQ ID NO: 170340 - DNA, 25 bp, Artificial
  probe
  misc_feature (1)..(25): SEQ ID NO: 5744; WAN024DT9_at; Start 27; Stop 51
agctggcacatgggaattttctttg

SEQ ID NO: 170341 - DNA, 25 bp, Artificial
  probe
  misc_feature (1)..(25): SEQ ID NO: 5744; WAN024DT9_at; Start 42; Stop 66
attttctttgcccccagacaagagt

SEQ ID NO: 170342 - DNA, 25 bp, Artificial
  probe
  misc_feature (1)..(25): SEQ ID NO: 5744; WAN024DT9_at; Start 40; Stop 64
gaattttctttgcccccagacaaga

SEQ ID NO: 170343 - DNA, 25 bp, Artificial
  probe
  misc_feature (1)..(25): SEQ ID NO: 5744; WAN024DT9_at; Start 24; Stop 48
aaaagctggcacatgggaattttct

SEQ ID NO: 170344 - DNA, 25 bp, Artificial
  probe
  misc_feature (1)..(25): SEQ ID NO: 3425; WAN024DTA_at; Start 83; Stop 107
ccagccttggtcactatggagaatc

SEQ ID NO: 170345 - DNA, 25 bp, Artificial
  probe
  misc_feature (1)..(25): SEQ ID NO: 3425; WAN024DTA_at; Start 52; Stop 76
ggaaccgatgataagaatcgtgttg

SEQ ID NO: 170346 - DNA, 25 bp, Artificial
  probe
  misc_feature (1)..(25): SEQ ID NO: 3425; WAN024DTA_at; Start 81; Stop 105
tgccagccttggtcactatggagaa

SEQ ID NO: 170347 - DNA, 25 bp, Artificial
  probe
  misc_feature (1)..(25): SEQ ID NO: 3425; WAN024DTA_at; Start 104; Stop 128
aatcgtattctcgtagtgcttctct

SEQ ID NO: 170348 - DNA, 25 bp, Artificial
  probe
  misc_feature (1)..(25): SEQ ID NO: 3425; WAN024DTA_at; Start 82; Stop 106
gccagccttggtcactatggagaat

SEQ ID NO: 170349 - DNA, 25 bp, Artificial
  probe
  misc_feature (1)..(25): SEQ ID NO: 3425; WAN024DTA_at; Start 84; Stop 108
cagccttggtcactatggagaatcg

SEQ ID NO: 170350 - DNA, 25 bp, Artificial
  probe
  misc_feature (1)..(25): SEQ ID NO: 3425; WAN024DTA_at; Start 89; Stop 113
ttggtcactatggagaatcgtattc

SEQ ID NO: 170351 - DNA, 25 bp, Artificial
  probe
  misc_feature (1)..(25): SEQ ID NO: 3425; WAN024DTA_at; Start 92; Stop 116
gtcactatggagaatcgtattctcg

SEQ ID NO: 170352 - DNA, 25 bp, Artificial
  probe
  misc_feature (1)..(25): SEQ ID NO: 3425; WAN024DTA_at; Start 18; Stop 42
cgtgacatggatgcttgaattccct

SEQ ID NO: 170353 - DNA, 25 bp, Artificial
  probe
  misc_feature (1)..(25): SEQ ID NO: 3425; WAN024DTA_at; Start 80; Stop 104
ttgccagccttggtcactatggaga

SEQ ID NO: 170354 - DNA, 25 bp, Artificial
  probe
  misc_feature (1)..(25): SEQ ID NO: 3425; WAN024DTA_at; Start 50; Stop 74
taggaaccgatgataagaatcgtgt

SEQ ID NO: 170355 - DNA, 25 bp, Artificial
  probe
  misc_feature (1)..(25): SEQ ID NO: 3425; WAN024DTA_at; Start 7; Stop 31
tgtttcccttacgtgacatggatgc

SEQ ID NO: 170356 - DNA, 25 bp, Artificial
  probe
  misc_feature (1)..(25): SEQ ID NO: 3425; WAN024DTA_at; Start 78; Stop 102
tattgccagccttggtcactatgga

SEQ ID NO: 170357 - DNA, 25 bp, Artificial
  probe
  misc_feature (1)..(25): SEQ ID NO: 3425; WAN024DTA_at; Start 99; Stop 123
tggagaatcgtattctcgtagtgct

SEQ ID NO: 170358 - DNA, 25 bp, Artificial
  probe
  misc_feature (1)..(25): SEQ ID NO: 3425; WAN024DTA_at; Start 10; Stop 34
ttcccttacgtgacatggatgcttg

SEQ ID NO: 170359 - DNA, 25 bp, Artificial
  probe
  misc_feature (1)..(25): SEQ ID NO: 3425; WAN024DTA_at; Start 86; Stop 110
gccttggtcactatggagaatcgta

SEQ ID NO: 170360 - DNA, 25 bp, Artificial
  probe
  misc_feature (1)..(25): SEQ ID NO: 3425; WAN024DTA_at; Start 94; Stop 118
cactatggagaatcgtattctcgta

SEQ ID NO: 170361 - DNA, 25 bp, Artificial
  probe
  misc_feature (1)..(25): SEQ ID NO: 3425; WAN024DTA_at; Start 2; Stop 26
tgggctgtttcccttacgtgacatg

SEQ ID NO: 170362 - DNA, 25 bp, Artificial
  probe
  misc_feature (1)..(25): SEQ ID NO: 3425; WAN024DTA_at; Start 4; Stop 28
ggctgtttcccttacgtgacatgga

SEQ ID NO: 170363 - DNA, 25 bp, Artificial
  probe
  misc_feature (1)..(25): SEQ ID NO: 3425; WAN024DTA_at; Start 3; Stop 27
gggctgtttcccttacgtgacatgg

SEQ ID NO: 170364 - DNA, 25 bp, Artificial
  probe
  misc_feature (1)..(25): SEQ ID NO: 3425; WAN024DTA_at; Start 16; Stop 40
tacgtgacatggatgcttgaattcc

SEQ ID NO: 170365 - DNA, 25 bp, Artificial
  probe
  misc_feature (1)..(25): SEQ ID NO: 3425; WAN024DTA_at; Start 20; Stop 44
tgacatggatgcttgaattccctta

SEQ ID NO: 170366 - DNA, 25 bp, Artificial
  probe
  misc_feature (1)..(25): SEQ ID NO: 3425; WAN024DTA_at; Start 103; Stop 127
gaatcgtattctcgtagtgcttctc

SEQ ID NO: 170367 - DNA, 25 bp, Artificial
  probe
  misc_feature (1)..(25): SEQ ID NO: 3425; WAN024DTA_at; Start 79; Stop 103
attgccagccttggtcactatggag

SEQ ID NO: 170368 - DNA, 25 bp, Artificial
  probe
  misc_feature (1)..(25): SEQ ID NO: 3425; WAN024DTA_at; Start 87; Stop 111
ccttggtcactatggagaatcgtat

SEQ ID NO: 170369 - DNA, 25 bp, Artificial
  probe
  misc_feature (1)..(25): SEQ ID NO: 3425; WAN024DTA_at; Start 5; Stop 29
gctgtttcccttacgtgacatggat

SEQ ID NO: 170370 - DNA, 25 bp, Artificial
  probe
  misc_feature (1)..(25): SEQ ID NO: 3425; WAN024DTA_at; Start 101; Stop 125
gagaatcgtattctcgtagtgcttc

SEQ ID NO: 170371 - DNA, 25 bp, Artificial
  probe
  misc_feature (1)..(25): SEQ ID NO: 3425; WAN024DTA_at; Start 12; Stop 36
cccttacgtgacatggatgcttgaa

SEQ ID NO: 170372 - DNA, 25 bp, Artificial
  probe
  misc_feature (1)..(25): SEQ ID NO: 3425; WAN024DTA_at; Start 8; Stop 32
gtttcccttacgtgacatggatgct

SEQ ID NO: 170373 - DNA, 25 bp, Artificial
  probe
  misc_feature (1)..(25): SEQ ID NO: 3425; WAN024DTA_at; Start 90; Stop 114
tggtcactatggagaatcgtattct

SEQ ID NO: 170374 - DNA, 25 bp, Artificial
  probe
  misc_feature (1)..(25): SEQ ID NO: 3425; WAN024DTA_at; Start 11; Stop 35
tcccttacgtgacatggatgcttga

SEQ ID NO: 170375 - DNA, 25 bp, Artificial
  probe
  misc_feature (1)..(25): SEQ ID NO: 3425; WAN024DTA_at; Start 48; Stop 72
tctaggaaccgatgataagaatcgt

SEQ ID NO: 170376 - DNA, 25 bp, Artificial
  probe
  misc_feature (1)..(25): SEQ ID NO: 3425; WAN024DTA_at; Start 13; Stop 37
ccttacgtgacatggatgcttgaat

SEQ ID NO: 170377 - DNA, 25 bp, Artificial
  probe
  misc_feature (1)..(25): SEQ ID NO: 3425; WAN024DTA_at; Start 46; Stop 70
tctctaggaaccgatgataagaatc

SEQ ID NO: 170378 - DNA, 25 bp, Artificial
  probe
  misc_feature (1)..(25): SEQ ID NO: 5972; WAN024DTB_at; Start 36; Stop 60
cgtaagaagccgacgacgtatcatt

SEQ ID NO: 170379 - DNA, 25 bp, Artificial
  probe
  misc_feature (1)..(25): SEQ ID NO: 5972; WAN024DTB_at; Start 52; Stop 76
cgtatcattttgatttttgaagagt

SEQ ID NO: 170380 - DNA, 25 bp, Artificial
  probe
  misc_feature (1)..(25): SEQ ID NO: 5972; WAN024DTB_at; Start 29; Stop 53
actcattcgtaagaagccgacgacg

SEQ ID NO: 170381 - DNA, 25 bp, Artificial
  probe
  misc_feature (1)..(25): SEQ ID NO: 5972; WAN024DTB_at; Start 44; Stop 68
gccgacgacgtatcattttgatttt

SEQ ID NO: 170382 - DNA, 25 bp, Artificial
  probe
  misc_feature (1)..(25): SEQ ID NO: 5972; WAN024DTB_at; Start 14; Stop 38
aaagccaagctttgaactcattcgt

SEQ ID NO: 170383 - DNA, 25 bp, Artificial
  probe
  misc_feature (1)..(25): SEQ ID NO: 5972; WAN024DTB_at; Start 35; Stop 59
tcgtaagaagccgacgacgtatcat

SEQ ID NO: 170384 - DNA, 25 bp, Artificial
  probe
  misc_feature (1)..(25): SEQ ID NO: 5972; WAN024DTB_at; Start 43; Stop 67
agccgacgacgtatcattttgattt

SEQ ID NO: 170385 - DNA, 25 bp, Artificial
  probe
  misc_feature (1)..(25): SEQ ID NO: 5972; WAN024DTB_at; Start 27; Stop 51
gaactcattcgtaagaagccgacga

SEQ ID NO: 170386 - DNA, 25 bp, Artificial
  probe
  misc_feature (1)..(25): SEQ ID NO: 5972; WAN024DTB_at; Start 13; Stop 37
caaagccaagctttgaactcattcg

SEQ ID NO: 170387 - DNA, 25 bp, Artificial
  probe
  misc_feature (1)..(25): SEQ ID NO: 5972; WAN024DTB_at; Start 30; Stop 54
ctcattcgtaagaagccgacgacgt

SEQ ID NO: 170388 - DNA, 25 bp, Artificial
  probe
  misc_feature (1)..(25): SEQ ID NO: 5972; WAN024DTB_at; Start 41; Stop 65
gaagccgacgacgtatcattttgat

SEQ ID NO: 170389 - DNA, 25 bp, Artificial
  probe
  misc_feature (1)..(25): SEQ ID NO: 5972; WAN024DTB_at; Start 28; Stop 52
aactcattcgtaagaagccgacgac

SEQ ID NO: 170390 - DNA, 25 bp, Artificial
  probe
  misc_feature (1)..(25): SEQ ID NO: 5972; WAN024DTB_at; Start 49; Stop 73
cgacgtatcattttgatttttgaag

SEQ ID NO: 170391 - DNA, 25 bp, Artificial
  probe
  misc_feature (1)..(25): SEQ ID NO: 5972; WAN024DTB_at; Start 47; Stop 71
gacgacgtatcattttgatttttga

SEQ ID NO: 170392 - DNA, 25 bp, Artificial
  probe
  misc_feature (1)..(25): SEQ ID NO: 5972; WAN024DTB_at; Start 40; Stop 64
agaagccgacgacgtatcattttga

SEQ ID NO: 170393 - DNA, 25 bp, Artificial
  probe
  misc_feature (1)..(25): SEQ ID NO: 5972; WAN024DTB_at; Start 38; Stop 62
taagaagccgacgacgtatcatttt

SEQ ID NO: 170394 - DNA, 25 bp, Artificial
  probe
  misc_feature (1)..(25): SEQ ID NO: 5972; WAN024DTB_at; Start 37; Stop 61
gtaagaagccgacgacgtatcattt

SEQ ID NO: 170395 - DNA, 25 bp, Artificial
  probe
  misc_feature (1)..(25): SEQ ID NO: 5972; WAN024DTB_at; Start 25; Stop 49
ttgaactcattcgtaagaagccgac

SEQ ID NO: 170396 - DNA, 25 bp, Artificial
  probe
  misc_feature (1)..(25): SEQ ID NO: 5972; WAN024DTB_at; Start 42; Stop 66
aagccgacgacgtatcattttgatt

SEQ ID NO: 170397 - DNA, 25 bp, Artificial
  probe
  misc_feature (1)..(25): SEQ ID NO: 5972; WAN024DTB_at; Start 24; Stop 48
tttgaactcattcgtaagaagccga

SEQ ID NO: 170398 - DNA, 25 bp, Artificial
  probe
  misc_feature (1)..(25): SEQ ID NO: 5972; WAN024DTB_at; Start 32; Stop 56
cattcgtaagaagccgacgacgtat

SEQ ID NO: 170399 - DNA, 25 bp, Artificial
  probe
  misc_feature (1)..(25): SEQ ID NO: 5972; WAN024DTB_at; Start 15; Stop 39
aagccaagctttgaactcattcgta

SEQ ID NO: 170400 - DNA, 25 bp, Artificial
  probe
  misc_feature (1)..(25): SEQ ID NO: 5972; WAN024DTB_at; Start 9; Stop 33
gaatcaaagccaagctttgaactca

SEQ ID NO: 170401 - DNA, 25 bp, Artificial
  probe
  misc_feature (1)..(25): SEQ ID NO: 5972; WAN024DTB_at; Start 3; Stop 27
ggagatgaatcaaagccaagctttg

SEQ ID NO: 170402 - DNA, 25 bp, Artificial
  probe
  misc_feature (1)..(25): SEQ ID NO: 5972; WAN024DTB_at; Start 19; Stop 43
caagctttgaactcattcgtaagaa

SEQ ID NO: 170403 - DNA, 25 bp, Artificial
  probe
  misc_feature (1)..(25): SEQ ID NO: 5972; WAN024DTB_at; Start 4; Stop 28
gagatgaatcaaagccaagctttga

SEQ ID NO: 170404 - DNA, 25 bp, Artificial
  probe
  misc_feature (1)..(25): SEQ ID NO: 5972; WAN024DTB_at; Start 31; Stop 55
tcattcgtaagaagccgacgacgta

SEQ ID NO: 170405 - DNA, 25 bp, Artificial
  probe
  misc_feature (1)..(25): SEQ ID NO: 5972; WAN024DTB_at; Start 26; Stop 50
tgaactcattcgtaagaagccgacg

SEQ ID NO: 170406 - DNA, 25 bp, Artificial
  probe
  misc_feature (1)..(25): SEQ ID NO: 5972; WAN024DTB_at; Start 23; Stop 47
ctttgaactcattcgtaagaagccg

SEQ ID NO: 170407 - DNA, 25 bp, Artificial
  probe
  misc_feature (1)..(25): SEQ ID NO: 5972; WAN024DTB_at; Start 18; Stop 42
ccaagctttgaactcattcgtaaga

SEQ ID NO: 170408 - DNA, 25 bp, Artificial
  probe
  misc_feature (1)..(25): SEQ ID NO: 5972; WAN024DTB_at; Start 17; Stop 41
gccaagctttgaactcattcgtaag

SEQ ID NO: 170409 - DNA, 25 bp, Artificial
  probe
  misc_feature (1)..(25): SEQ ID NO: 5972; WAN024DTB_at; Start 20; Stop 44
aagctttgaactcattcgtaagaag

SEQ ID NO: 170410 - DNA, 25 bp, Artificial
  probe
  misc_feature (1)..(25): SEQ ID NO: 5972; WAN024DTB_at; Start 39; Stop 63
aagaagccgacgacgtatcattttg

SEQ ID NO: 170411 - DNA, 25 bp, Artificial
  probe
  misc_feature (1)..(25): SEQ ID NO: 5972; WAN024DTB_at; Start 2; Stop 26
tggagatgaatcaaagccaagcttt

SEQ ID NO: 170412 - DNA, 25 bp, Artificial
  probe
  misc_feature (1)..(25): SEQ ID NO: 4889; WAN024DTC_at; Start 49; Stop 73
gtatttatgctatttttctctggaa

SEQ ID NO: 170413 - DNA, 25 bp, Artificial
  probe
  misc_feature (1)..(25): SEQ ID NO: 4889; WAN024DTC_at; Start 69; Stop 93
tggaaaacatgagtattcagccagt

SEQ ID NO: 170414 - DNA, 25 bp, Artificial
  probe
  misc_feature (1)..(25): SEQ ID NO: 4889; WAN024DTC_at; Start 15; Stop 39
cctagaaatgctacataaaatgtca

SEQ ID NO: 170415 - DNA, 25 bp, Artificial
  probe
  misc_feature (1)..(25): SEQ ID NO: 4889; WAN024DTC_at; Start 105; Stop 129
gaatgaactcattttccctcgccca

SEQ ID NO: 170416 - DNA, 25 bp, Artificial
  probe
  misc_feature (1)..(25): SEQ ID NO: 4889; WAN024DTC_at; Start 92; Stop 116
gtcaaaaggagctgaatgaactcat

SEQ ID NO: 170417 - DNA, 25 bp, Artificial
  probe
  misc_feature (1)..(25): SEQ ID NO: 4889; WAN024DTC_at; Start 108; Stop 132
tgaactcattttccctcgcccaatt

SEQ ID NO: 170418 - DNA, 25 bp, Artificial
  probe
  misc_feature (1)..(25): SEQ ID NO: 4889; WAN024DTC_at; Start 47; Stop 71
gcgtatttatgctatttttctctgg

SEQ ID NO: 170419 - DNA, 25 bp, Artificial
  probe
  misc_feature (1)..(25): SEQ ID NO: 4889; WAN024DTC_at; Start 80; Stop 104
agtattcagccagtcaaaaggagct

SEQ ID NO: 170420 - DNA, 25 bp, Artificial
  probe
  misc_feature (1)..(25): SEQ ID NO: 4889; WAN024DTC_at; Start 12; Stop 36
aaacctagaaatgctacataaaatg

SEQ ID NO: 170421 - DNA, 25 bp, Artificial
  probe
  misc_feature (1)..(25): SEQ ID NO: 4889; WAN024DTC_at; Start 30; Stop 54
taaaatgtcattcctaggcgtattt

SEQ ID NO: 170422 - DNA, 25 bp, Artificial
  probe
  misc_feature (1)..(25): SEQ ID NO: 4889; WAN024DTC_at; Start 82; Stop 106
tattcagccagtcaaaaggagctga

SEQ ID NO: 170423 - DNA, 25 bp, Artificial
  probe
  misc_feature (1)..(25): SEQ ID NO: 4889; WAN024DTC_at; Start 94; Stop 118
caaaaggagctgaatgaactcattt

SEQ ID NO: 170424 - DNA, 25 bp, Artificial
  probe
  misc_feature (1)..(25): SEQ ID NO: 4889; WAN024DTC_at; Start 28; Stop 52
cataaaatgtcattcctaggcgtat

SEQ ID NO: 170425 - DNA, 25 bp, Artificial
  probe
  misc_feature (1)..(25): SEQ ID NO: 4889; WAN024DTC_at; Start 99; Stop 123
ggagctgaatgaactcattttccct

SEQ ID NO: 170426 - DNA, 25 bp, Artificial
  probe
  misc_feature (1)..(25): SEQ ID NO: 4889; WAN024DTC_at; Start 67; Stop 91
tctggaaaacatgagtattcagcca

SEQ ID NO: 170427 - DNA, 25 bp, Artificial
  probe
  misc_feature (1)..(25): SEQ ID NO: 4889; WAN024DTC_at; Start 97; Stop 121
aaggagctgaatgaactcattttcc

SEQ ID NO: 170428 - DNA, 25 bp, Artificial
  probe
  misc_feature (1)..(25): SEQ ID NO: 4889; WAN024DTC_at; Start 86; Stop 110
cagccagtcaaaaggagctgaatga

SEQ ID NO: 170429 - DNA, 25 bp, Artificial
  probe
  misc_feature (1)..(25): SEQ ID NO: 4889; WAN024DTC_at; Start 19; Stop 43
gaaatgctacataaaatgtcattcc

SEQ ID NO: 170430 - DNA, 25 bp, Artificial
  probe
  misc_feature (1)..(25): SEQ ID NO: 4889; WAN024DTC_at; Start 23; Stop 47
tgctacataaaatgtcattcctagg

SEQ ID NO: 170431 - DNA, 25 bp, Artificial
  probe
  misc_feature (1)..(25): SEQ ID NO: 4889; WAN024DTC_at; Start 65; Stop 89
tctctggaaaacatgagtattcagc

SEQ ID NO: 170432 - DNA, 25 bp, Artificial
  probe
  misc_feature (1)..(25): SEQ ID NO: 4889; WAN024DTC_at; Start 88; Stop 112
gccagtcaaaaggagctgaatgaac

SEQ ID NO: 170433 - DNA, 25 bp, Artificial
  probe
  misc_feature (1)..(25): SEQ ID NO: 4889; WAN024DTC_at; Start 78; Stop 102
tgagtattcagccagtcaaaaggag

SEQ ID NO: 170434 - DNA, 25 bp, Artificial
  probe
  misc_feature (1)..(25): SEQ ID NO: 4889; WAN024DTC_at; Start 85; Stop 109
tcagccagtcaaaaggagctgaatg

SEQ ID NO: 170435 - DNA, 25 bp, Artificial
  probe
  misc_feature (1)..(25): SEQ ID NO: 4889; WAN024DTC_at; Start 81; Stop 105
gtattcagccagtcaaaaggagctg

SEQ ID NO: 170436 - DNA, 25 bp, Artificial
  probe
  misc_feature (1)..(25): SEQ ID NO: 4889; WAN024DTC_at; Start 73; Stop 97
aaacatgagtattcagccagtcaaa

SEQ ID NO: 170437 - DNA, 25 bp, Artificial
  probe
  misc_feature (1)..(25): SEQ ID NO: 4889; WAN024DTC_at; Start 106; Stop 130
aatgaactcattttccctcgcccaa

SEQ ID NO: 170438 - DNA, 25 bp, Artificial
  probe
  misc_feature (1)..(25): SEQ ID NO: 4889; WAN024DTC_at; Start 57; Stop 81
gctatttttctctggaaaacatgag

SEQ ID NO: 170439 - DNA, 25 bp, Artificial
  probe
  misc_feature (1)..(25): SEQ ID NO: 4889; WAN024DTC_at; Start 79; Stop 103
gagtattcagccagtcaaaaggagc

SEQ ID NO: 170440 - DNA, 25 bp, Artificial
  probe
  misc_feature (1)..(25): SEQ ID NO: 4889; WAN024DTC_at; Start 102; Stop 126
gctgaatgaactcattttccctcgc

SEQ ID NO: 170441 - DNA, 25 bp, Artificial
  probe
  misc_feature (1)..(25): SEQ ID NO: 4889; WAN024DTC_at; Start 90; Stop 114
cagtcaaaaggagctgaatgaactc

SEQ ID NO: 170442 - DNA, 25 bp, Artificial
  probe
  misc_feature (1)..(25): SEQ ID NO: 4889; WAN024DTC_at; Start 71; Stop 95
gaaaacatgagtattcagccagtca

SEQ ID NO: 170443 - DNA, 25 bp, Artificial
  probe
  misc_feature (1)..(25): SEQ ID NO: 4889; WAN024DTC_at; Start 62; Stop 86
ttttctctggaaaacatgagtattc

SEQ ID NO: 170444 - DNA, 25 bp, Artificial
  probe
  misc_feature (1)..(25): SEQ ID NO: 4889; WAN024DTC_at; Start 70; Stop 94
ggaaaacatgagtattcagccagtc

SEQ ID NO: 170445 - DNA, 25 bp, Artificial
  probe
  misc_feature (1)..(25): SEQ ID NO: 4889; WAN024DTC_at; Start 76; Stop 100
catgagtattcagccagtcaaaagg

SEQ ID NO: 170446 - DNA, 25 bp, Artificial
  probe
  misc_feature (1)..(25): SEQ ID NO: 1840; WAN024DTD_at; Start 261; Stop 285
ttttgccctgattgatgatgaaacg

SEQ ID NO: 170447 - DNA, 25 bp, Artificial
  probe
  misc_feature (1)..(25): SEQ ID NO: 1840; WAN024DTD_at; Start 355; Stop 379
gaagagattttagagagagtaggtt

SEQ ID NO: 170448 - DNA, 25 bp, Artificial
  probe
  misc_feature (1)..(25): SEQ ID NO: 1840; WAN024DTD_at; Start 342; Stop 366
gctcaaaaaggtggaagagatttta

SEQ ID NO: 170449 - DNA, 25 bp, Artificial
  probe
  misc_feature (1)..(25): SEQ ID NO: 1840; WAN024DTD_at; Start 467; Stop 491
gccagctgattttagccgatgaacc

SEQ ID NO: 170450 - DNA, 25 bp, Artificial
  probe
  misc_feature (1)..(25): SEQ ID NO: 1840; WAN024DTD_at; Start 131; Stop 155
taaatttattgggtttgatagatgg

SEQ ID NO: 170451 - DNA, 25 bp, Artificial
  probe
  misc_feature (1)..(25): SEQ ID NO: 1840; WAN024DTD_at; Start 160; Stop 184
tatagcggacggtatgagatttttg

SEQ ID NO: 170452 - DNA, 25 bp, Artificial
  probe
  misc_feature (1)..(25): SEQ ID NO: 1840; WAN024DTD_at; Start 216; Stop 240
gtcgcaaacaataatccgtgaacat

SEQ ID NO: 170453 - DNA, 25 bp, Artificial
  probe
  misc_feature (1)..(25): SEQ ID NO: 1840; WAN024DTD_at; Start 299; Stop 323
tcatgctggcgctgaaatatgtgaa

SEQ ID NO: 170454 - DNA, 25 bp, Artificial
  probe
  misc_feature (1)..(25): SEQ ID NO: 1840; WAN024DTD_at; Start 502; Stop 526
ctggatcctgaaaatagagatttgg

SEQ ID NO: 170455 - DNA, 25 bp, Artificial
  probe
  misc_feature (1)..(25): SEQ ID NO: 1840; WAN024DTD_at; Start 289; Stop 313
gagtacaatctcatgctggcgctga

SEQ ID NO: 170456 - DNA, 25 bp, Artificial
  probe
  misc_feature (1)..(25): SEQ ID NO: 1840; WAN024DTD_at; Start 420; Stop 444
gggcgaacaacaacgaattgcagtt

SEQ ID NO: 170457 - DNA, 25 bp, Artificial
  probe
  misc_feature (1)..(25): SEQ ID NO: 1840; WAN024DTD_at; Start 50; Stop 74
tggataacttatctctcaggattga

SEQ ID NO: 170458 - DNA, 25 bp, Artificial
  probe
  misc_feature (1)..(25): SEQ ID NO: 1840; WAN024DTD_at; Start 199; Stop 223
gcggttaattctgctaagtcgcaaa

SEQ ID NO: 170459 - DNA, 25 bp, Artificial
  probe
  misc_feature (1)..(25): SEQ ID NO: 1840; WAN024DTD_at; Start 579; Stop 603
gacccacgatgcttatgtagcccaa

SEQ ID NO: 170460 - DNA, 25 bp, Artificial
  probe
  misc_feature (1)..(25): SEQ ID NO: 1840; WAN024DTD_at; Start 56; Stop 80
acttatctctcaggattgatcaggg

SEQ ID NO: 170461 - DNA, 25 bp, Artificial
  probe
  misc_feature (1)..(25): SEQ ID NO: 1840; WAN024DTD_at; Start 308; Stop 332
cgctgaaatatgtgaaattgcctaa

SEQ ID NO: 170462 - DNA, 25 bp, Artificial
  probe
  misc_feature (1)..(25): SEQ ID NO: 1840; WAN024DTD_at; Start 590; Stop 614
cttatgtagcccaacaatgtcatcg

SEQ ID NO: 170463 - DNA, 25 bp, Artificial
  probe
  misc_feature (1)..(25): SEQ ID NO: 1840; WAN024DTD_at; Start 508; Stop 532
cctgaaaatagagatttggtcttga

SEQ ID NO: 170464 - DNA, 25 bp, Artificial
  probe
  misc_feature (1)..(25): SEQ ID NO: 1840; WAN024DTD_at; Start 38; Stop 62
gaaaagtgattttggataacttatc

SEQ ID NO: 170465 - DNA, 25 bp, Artificial
  probe
  misc_feature (1)..(25): SEQ ID NO: 1840; WAN024DTD_at; Start 184; Stop 208
ggtcagacaaatctagcggttaatt

SEQ ID NO: 170466 - DNA, 25 bp, Artificial
  probe
  misc_feature (1)..(25): SEQ ID NO: 1840; WAN024DTD_at; Start 520; Stop 544
gatttggtcttgaagtttctcttag

SEQ ID NO: 170467 - DNA, 25 bp, Artificial
  probe
  misc_feature (1)..(25): SEQ ID NO: 1840; WAN024DTD_at; Start 211; Stop 235
gctaagtcgcaaacaataatccgtg

SEQ ID NO: 170468 - DNA, 25 bp, Artificial
  probe
  misc_feature (1)..(25): SEQ ID NO: 1840; WAN024DTD_at; Start 276; Stop 300
tgatgaaacggtcgagtacaatctc

SEQ ID NO: 170469 - DNA, 25 bp, Artificial
  probe
  misc_feature (1)..(25): SEQ ID NO: 1840; WAN024DTD_at; Start 323; Stop 347
aattgcctaagaaagacaagctcaa

SEQ ID NO: 170470 - DNA, 25 bp, Artificial
  probe
  misc_feature (1)..(25): SEQ ID NO: 1840; WAN024DTD_at; Start 533; Stop 557
agtttctcttagagatgaatcgaga

SEQ ID NO: 170471 - DNA, 25 bp, Artificial
  probe
  misc_feature (1)..(25): SEQ ID NO: 1840; WAN024DTD_at; Start 169; Stop 193
cggtatgagatttttggtcagacaa

SEQ ID NO: 170472 - DNA, 25 bp, Artificial
  probe
  misc_feature (1)..(25): SEQ ID NO: 1840; WAN024DTD_at; Start 385; Stop 409
gctactttgcatcaaagggtctccg

SEQ ID NO: 170473 - DNA, 25 bp, Artificial
  probe
  misc_feature (1)..(25): SEQ ID NO: 1840; WAN024DTD_at; Start 430; Stop 454
caacgaattgcagttgctagagcca

SEQ ID NO: 170474 - DNA, 25 bp, Artificial
  probe
  misc_feature (1)..(25): SEQ ID NO: 1840; WAN024DTD_at; Start 247; Stop 271
tatctgtttcaaaattttgccctga

SEQ ID NO: 170475 - DNA, 25 bp, Artificial
  probe
  misc_feature (1)..(25): SEQ ID NO: 1840; WAN024DTD_at; Start 334; Stop 358
aaagacaagctcaaaaaggtggaag

SEQ ID NO: 170476 - DNA, 25 bp, Artificial
  probe
  misc_feature (1)..(25): SEQ ID NO: 1840; WAN024DTD_at; Start 146; Stop 170
tgatagatggtgattatagcggacg

SEQ ID NO: 170477 - DNA, 25 bp, Artificial
  probe
  misc_feature (1)..(25): SEQ ID NO: 1840; WAN024DTD_at; Start 228; Stop 252
aatccgtgaacatatctcttatctg

SEQ ID NO: 170478 - DNA, 25 bp, Artificial
  probe
  misc_feature (1)..(25): SEQ ID NO: 1840; WAN024DTD_at; Start 458; Stop 482
taaaacccagccagctgattttagc

SEQ ID NO: 170479 - DNA, 25 bp, Artificial
  probe
  misc_feature (1)..(25): SEQ ID NO: 1840; WAN024DTD_at; Start 280; Stop 304
gaaacggtcgagtacaatctcatgc

SEQ ID NO: 170480 - DNA, 25 bp, Artificial
  probe
  misc_feature (1)..(25): SEQ ID NO: 2689; WAN024DTE_at; Start 22; Stop 46
gaaaacatggatatctatatccttg

SEQ ID NO: 170481 - DNA, 25 bp, Artificial
  probe
  misc_feature (1)..(25): SEQ ID NO: 2689; WAN024DTE_at; Start 44; Stop 68
ttgtgccaaaaaaaccactgccctc

SEQ ID NO: 170482 - DNA, 25 bp, Artificial
  probe
  misc_feature (1)..(25): SEQ ID NO: 2689; WAN024DTE_at; Start 14; Stop 38
ggacaagagaaaacatggatatcta

SEQ ID NO: 170483 - DNA, 25 bp, Artificial
  probe
  misc_feature (1)..(25): SEQ ID NO: 2689; WAN024DTE_at; Start 71; Stop 95
cagaccaacctgaggaaagcagtga

SEQ ID NO: 170484 - DNA, 25 bp, Artificial
  probe
  misc_feature (1)..(25): SEQ ID NO: 2689; WAN024DTE_at; Start 67; Stop 91
tccccagaccaacctgaggaaagca

SEQ ID NO: 170485 - DNA, 25 bp, Artificial
  probe
  misc_feature (1)..(25): SEQ ID NO: 2689; WAN024DTE_at; Start 39; Stop 63
tatccttgtgccaaaaaaaccactg

SEQ ID NO: 170486 - DNA, 25 bp, Artificial
  probe
  misc_feature (1)..(25): SEQ ID NO: 2689; WAN024DTE_at; Start 74; Stop 98
accaacctgaggaaagcagtgattc

SEQ ID NO: 170487 - DNA, 25 bp, Artificial
  probe
  misc_feature (1)..(25): SEQ ID NO: 2689; WAN024DTE_at; Start 70; Stop 94
ccagaccaacctgaggaaagcagtg

SEQ ID NO: 170488 - DNA, 25 bp, Artificial
  probe
  misc_feature (1)..(25): SEQ ID NO: 2689; WAN024DTE_at; Start 75; Stop 99
ccaacctgaggaaagcagtgattct

SEQ ID NO: 170489 - DNA, 25 bp, Artificial
  probe
  misc_feature (1)..(25): SEQ ID NO: 2689; WAN024DTE_at; Start 9; Stop 33
aataaggacaagagaaaacatggat

SEQ ID NO: 170490 - DNA, 25 bp, Artificial
  probe
  misc_feature (1)..(25): SEQ ID NO: 2689; WAN024DTE_at; Start 41; Stop 65
tccttgtgccaaaaaaaccactgcc

SEQ ID NO: 170491 - DNA, 25 bp, Artificial
  probe
  misc_feature (1)..(25): SEQ ID NO: 2689; WAN024DTE_at; Start 32; Stop 56
atatctatatccttgtgccaaaaaa

SEQ ID NO: 170492 - DNA, 25 bp, Artificial
  probe
  misc_feature (1)..(25): SEQ ID NO: 2689; WAN024DTE_at; Start 87; Stop 111
aagcagtgattcttattttaggagt

SEQ ID NO: 170493 - DNA, 25 bp, Artificial
  probe
  misc_feature (1)..(25): SEQ ID NO: 2689; WAN024DTE_at; Start 8; Stop 32
aaataaggacaagagaaaacatgga

SEQ ID NO: 170494 - DNA, 25 bp, Artificial
  probe
  misc_feature (1)..(25): SEQ ID NO: 2689; WAN024DTE_at; Start 80; Stop 104
ctgaggaaagcagtgattcttattt

SEQ ID NO: 170495 - DNA, 25 bp, Artificial
  probe
  misc_feature (1)..(25): SEQ ID NO: 2689; WAN024DTE_at; Start 77; Stop 101
aacctgaggaaagcagtgattctta

SEQ ID NO: 170496 - DNA, 25 bp, Artificial
  probe
  misc_feature (1)..(25): SEQ ID NO: 2689; WAN024DTE_at; Start 12; Stop 36
aaggacaagagaaaacatggatatc

SEQ ID NO: 170497 - DNA, 25 bp, Artificial
  probe
  misc_feature (1)..(25): SEQ ID NO: 2689; WAN024DTE_at; Start 72; Stop 96
agaccaacctgaggaaagcagtgat

SEQ ID NO: 170498 - DNA, 25 bp, Artificial
  probe
  misc_feature (1)..(25): SEQ ID NO: 2689; WAN024DTE_at; Start 29; Stop 53
tggatatctatatccttgtgccaaa

SEQ ID NO: 170499 - DNA, 25 bp, Artificial
  probe
  misc_feature (1)..(25): SEQ ID NO: 2689; WAN024DTE_at; Start 11; Stop 35
taaggacaagagaaaacatggatat

SEQ ID NO: 170500 - DNA, 25 bp, Artificial
  probe
  misc_feature (1)..(25): SEQ ID NO: 2689; WAN024DTE_at; Start 82; Stop 106
gaggaaagcagtgattcttatttta

SEQ ID NO: 170501 - DNA, 25 bp, Artificial
  probe
  misc_feature (1)..(25): SEQ ID NO: 2689; WAN024DTE_at; Start 76; Stop 100
caacctgaggaaagcagtgattctt

SEQ ID NO: 170502 - DNA, 25 bp, Artificial
  probe
  misc_feature (1)..(25): SEQ ID NO: 2689; WAN024DTE_at; Start 30; Stop 54
ggatatctatatccttgtgccaaaa

SEQ ID NO: 170503 - DNA, 25 bp, Artificial
  probe
  misc_feature (1)..(25): SEQ ID NO: 2689; WAN024DTE_at; Start 6; Stop 30
taaaataaggacaagagaaaacatg

SEQ ID NO: 170504 - DNA, 25 bp, Artificial
  probe
  misc_feature (1)..(25): SEQ ID NO: 2689; WAN024DTE_at; Start 20; Stop 44
gagaaaacatggatatctatatcct

SEQ ID NO: 170505 - DNA, 25 bp, Artificial
  probe
  misc_feature (1)..(25): SEQ ID NO: 2689; WAN024DTE_at; Start 15; Stop 39
gacaagagaaaacatggatatctat

SEQ ID NO: 170506 - DNA, 25 bp, Artificial
  probe
  misc_feature (1)..(25): SEQ ID NO: 2689; WAN024DTE_at; Start 31; Stop 55
gatatctatatccttgtgccaaaaa

SEQ ID NO: 170507 - DNA, 25 bp, Artificial
  probe
  misc_feature (1)..(25): SEQ ID NO: 2689; WAN024DTE_at; Start 17; Stop 41
caagagaaaacatggatatctatat

SEQ ID NO: 170508 - DNA, 25 bp, Artificial
  probe
  misc_feature (1)..(25): SEQ ID NO: 2689; WAN024DTE_at; Start 79; Stop 103
cctgaggaaagcagtgattcttatt

SEQ ID NO: 170509 - DNA, 25 bp, Artificial
  probe
  misc_feature (1)..(25): SEQ ID NO: 2689; WAN024DTE_at; Start 68; Stop 92
ccccagaccaacctgaggaaagcag

SEQ ID NO: 170510 - DNA, 25 bp, Artificial
  probe
  misc_feature (1)..(25): SEQ ID NO: 2689; WAN024DTE_at; Start 27; Stop 51
catggatatctatatccttgtgcca

SEQ ID NO: 170511 - DNA, 25 bp, Artificial
  probe
  misc_feature (1)..(25): SEQ ID NO: 2689; WAN024DTE_at; Start 73; Stop 97
gaccaacctgaggaaagcagtgatt

SEQ ID NO: 170512 - DNA, 25 bp, Artificial
  probe
  misc_feature (1)..(25): SEQ ID NO: 2689; WAN024DTE_at; Start 85; Stop 109
gaaagcagtgattcttattttagga

SEQ ID NO: 170513 - DNA, 25 bp, Artificial
  probe
  misc_feature (1)..(25): SEQ ID NO: 2689; WAN024DTE_at; Start 69; Stop 93
cccagaccaacctgaggaaagcagt

SEQ ID NO: 170514 - DNA, 25 bp, Artificial
  probe
  misc_feature (1)..(25): SEQ ID NO: 3107; WAN024DTF_at; Start 83; Stop 107
tttctcaagcaggtatactagtgct

SEQ ID NO: 170515 - DNA, 25 bp, Artificial
  probe
  misc_feature (1)..(25): SEQ ID NO: 3107; WAN024DTF_at; Start 59; Stop 83
tccagtcaaataaattgcattcgtt

SEQ ID NO: 170516 - DNA, 25 bp, Artificial
  probe
  misc_feature (1)..(25): SEQ ID NO: 3107; WAN024DTF_at; Start 78; Stop 102
ttcgttttctcaagcaggtatacta

SEQ ID NO: 170517 - DNA, 25 bp, Artificial
  probe
  misc_feature (1)..(25): SEQ ID NO: 3107; WAN024DTF_at; Start 79; Stop 103
tcgttttctcaagcaggtatactag

SEQ ID NO: 170518 - DNA, 25 bp, Artificial
  probe
  misc_feature (1)..(25): SEQ ID NO: 3107; WAN024DTF_at; Start 39; Stop 63
ttcgagaaccctctacaatttccag

SEQ ID NO: 170519 - DNA, 25 bp, Artificial
  probe
  misc_feature (1)..(25): SEQ ID NO: 3107; WAN024DTF_at; Start 77; Stop 101
attcgttttctcaagcaggtatact

SEQ ID NO: 170520 - DNA, 25 bp, Artificial
  probe
  misc_feature (1)..(25): SEQ ID NO: 3107; WAN024DTF_at; Start 43; Stop 67
agaaccctctacaatttccagtcaa

SEQ ID NO: 170521 - DNA, 25 bp, Artificial
  probe
  misc_feature (1)..(25): SEQ ID NO: 3107; WAN024DTF_at; Start 71; Stop 95
aattgcattcgttttctcaagcagg

SEQ ID NO: 170522 - DNA, 25 bp, Artificial
  probe
  misc_feature (1)..(25): SEQ ID NO: 3107; WAN024DTF_at; Start 52; Stop 76
tacaatttccagtcaaataaattgc

SEQ ID NO: 170523 - DNA, 25 bp, Artificial
  probe
  misc_feature (1)..(25): SEQ ID NO: 3107; WAN024DTF_at; Start 65; Stop 89
caaataaattgcattcgttttctca

SEQ ID NO: 170524 - DNA, 25 bp, Artificial
  probe
  misc_feature (1)..(25): SEQ ID NO: 3107; WAN024DTF_at; Start 82; Stop 106
ttttctcaagcaggtatactagtgc

SEQ ID NO: 170525 - DNA, 25 bp, Artificial
  probe
  misc_feature (1)..(25): SEQ ID NO: 3107; WAN024DTF_at; Start 45; Stop 69
aaccctctacaatttccagtcaaat

SEQ ID NO: 170526 - DNA, 25 bp, Artificial
  probe
  misc_feature (1)..(25): SEQ ID NO: 3107; WAN024DTF_at; Start 72; Stop 96
attgcattcgttttctcaagcaggt

SEQ ID NO: 170527 - DNA, 25 bp, Artificial
  probe
  misc_feature (1)..(25): SEQ ID NO: 3107; WAN024DTF_at; Start 60; Stop 84
ccagtcaaataaattgcattcgttt

SEQ ID NO: 170528 - DNA, 25 bp, Artificial
  probe
  misc_feature (1)..(25): SEQ ID NO: 3107; WAN024DTF_at; Start 69; Stop 93
taaattgcattcgttttctcaagca

SEQ ID NO: 170529 - DNA, 25 bp, Artificial
  probe
  misc_feature (1)..(25): SEQ ID NO: 3107; WAN024DTF_at; Start 61; Stop 85
cagtcaaataaattgcattcgtttt

SEQ ID NO: 170530 - DNA, 25 bp, Artificial
  probe
  misc_feature (1)..(25): SEQ ID NO: 3107; WAN024DTF_at; Start 75; Stop 99
gcattcgttttctcaagcaggtata

SEQ ID NO: 170531 - DNA, 25 bp, Artificial
  probe
  misc_feature (1)..(25): SEQ ID NO: 3107; WAN024DTF_at; Start 84; Stop 108
ttctcaagcaggtatactagtgcta

SEQ ID NO: 170532 - DNA, 25 bp, Artificial
  probe
  misc_feature (1)..(25): SEQ ID NO: 3107; WAN024DTF_at; Start 67; Stop 91
aataaattgcattcgttttctcaag

SEQ ID NO: 170533 - DNA, 25 bp, Artificial
  probe
  misc_feature (1)..(25): SEQ ID NO: 3107; WAN024DTF_at; Start 41; Stop 65
cgagaaccctctacaatttccagtc

SEQ ID NO: 170534 - DNA, 25 bp, Artificial
  probe
  misc_feature (1)..(25): SEQ ID NO: 3107; WAN024DTF_at; Start 81; Stop 105
gttttctcaagcaggtatactagtg

SEQ ID NO: 170535 - DNA, 25 bp, Artificial
  probe
  misc_feature (1)..(25): SEQ ID NO: 3107; WAN024DTF_at; Start 40; Stop 64
tcgagaaccctctacaatttccagt

SEQ ID NO: 170536 - DNA, 25 bp, Artificial
  probe
  misc_feature (1)..(25): SEQ ID NO: 3107; WAN024DTF_at; Start 44; Stop 68
gaaccctctacaatttccagtcaaa

SEQ ID NO: 170537 - DNA, 25 bp, Artificial
  probe
  misc_feature (1)..(25): SEQ ID NO: 3107; WAN024DTF_at; Start 76; Stop 100
cattcgttttctcaagcaggtatac

SEQ ID NO: 170538 - DNA, 25 bp, Artificial
  probe
  misc_feature (1)..(25): SEQ ID NO: 3107; WAN024DTF_at; Start 42; Stop 66
gagaaccctctacaatttccagtca

SEQ ID NO: 170539 - DNA, 25 bp, Artificial
  probe
  misc_feature (1)..(25): SEQ ID NO: 3107; WAN024DTF_at; Start 58; Stop 82
ttccagtcaaataaattgcattcgt

SEQ ID NO: 170540 - DNA, 25 bp, Artificial
  probe
  misc_feature (1)..(25): SEQ ID NO: 3107; WAN024DTF_at; Start 38; Stop 62
tttcgagaaccctctacaatttcca

SEQ ID NO: 170541 - DNA, 25 bp, Artificial
  probe
  misc_feature (1)..(25): SEQ ID NO: 3107; WAN024DTF_at; Start 80; Stop 104
cgttttctcaagcaggtatactagt

SEQ ID NO: 170542 - DNA, 25 bp, Artificial
  probe
  misc_feature (1)..(25): SEQ ID NO: 3107; WAN024DTF_at; Start 48; Stop 72
cctctacaatttccagtcaaataaa

SEQ ID NO: 170543 - DNA, 25 bp, Artificial
  probe
  misc_feature (1)..(25): SEQ ID NO: 3107; WAN024DTF_at; Start 70; Stop 94
aaattgcattcgttttctcaagcag

SEQ ID NO: 170544 - DNA, 25 bp, Artificial
  probe
  misc_feature (1)..(25): SEQ ID NO: 3107; WAN024DTF_at; Start 73; Stop 97
ttgcattcgttttctcaagcaggta

SEQ ID NO: 170545 - DNA, 25 bp, Artificial
  probe
  misc_feature (1)..(25): SEQ ID NO: 3107; WAN024DTF_at; Start 74; Stop 98
tgcattcgttttctcaagcaggtat

SEQ ID NO: 170546 - DNA, 25 bp, Artificial
  probe
  misc_feature (1)..(25): SEQ ID NO: 3107; WAN024DTF_at; Start 8; Stop 32
ctcttgtccttattttaaccattca

SEQ ID NO: 170547 - DNA, 25 bp, Artificial
  probe
  misc_feature (1)..(25): SEQ ID NO: 3107; WAN024DTF_at; Start 54; Stop 78
caatttccagtcaaataaattgcat

SEQ ID NO: 170548 - DNA, 25 bp, Artificial
  probe
  misc_feature (1)..(25): SEQ ID NO: 5223; WAN024DTG_at; Start 38; Stop 62
tgtcttctagtaaaagttcttcaaa

SEQ ID NO: 170549 - DNA, 25 bp, Artificial
  probe
  misc_feature (1)..(25): SEQ ID NO: 5223; WAN024DTG_at; Start 22; Stop 46
agagacagaagccccttgtcttcta

SEQ ID NO: 170550 - DNA, 25 bp, Artificial
  probe
  misc_feature (1)..(25): SEQ ID NO: 5223; WAN024DTG_at; Start 12; Stop 36
gatggcaaatagagacagaagcccc

SEQ ID NO: 170551 - DNA, 25 bp, Artificial
  probe
  misc_feature (1)..(25): SEQ ID NO: 5223; WAN024DTG_at; Start 56; Stop 80
cttcaaaggctggactttatggtaa

SEQ ID NO: 170552 - DNA, 25 bp, Artificial
  probe
  misc_feature (1)..(25): SEQ ID NO: 5223; WAN024DTG_at; Start 45; Stop 69
tagtaaaagttcttcaaaggctgga

SEQ ID NO: 170553 - DNA, 25 bp, Artificial
  probe
  misc_feature (1)..(25): SEQ ID NO: 5223; WAN024DTG_at; Start 20; Stop 44
atagagacagaagccccttgtcttc

SEQ ID NO: 170554 - DNA, 25 bp, Artificial
  probe
  misc_feature (1)..(25): SEQ ID NO: 5223; WAN024DTG_at; Start 17; Stop 41
caaatagagacagaagccccttgtc

SEQ ID NO: 170555 - DNA, 25 bp, Artificial
  probe
  misc_feature (1)..(25): SEQ ID NO: 5223; WAN024DTG_at; Start 53; Stop 77
gttcttcaaaggctggactttatgg

SEQ ID NO: 170556 - DNA, 25 bp, Artificial
  probe
  misc_feature (1)..(25): SEQ ID NO: 5223; WAN024DTG_at; Start 26; Stop 50
acagaagccccttgtcttctagtaa

SEQ ID NO: 170557 - DNA, 25 bp, Artificial
  probe
  misc_feature (1)..(25): SEQ ID NO: 5223; WAN024DTG_at; Start 43; Stop 67
tctagtaaaagttcttcaaaggctg

SEQ ID NO: 170558 - DNA, 25 bp, Artificial
  probe
  misc_feature (1)..(25): SEQ ID NO: 5223; WAN024DTG_at; Start 14; Stop 38
tggcaaatagagacagaagcccctt

SEQ ID NO: 170559 - DNA, 25 bp, Artificial
  probe
  misc_feature (1)..(25): SEQ ID NO: 5223; WAN024DTG_at; Start 21; Stop 45
tagagacagaagccccttgtcttct

SEQ ID NO: 170560 - DNA, 25 bp, Artificial
  probe
  misc_feature (1)..(25): SEQ ID NO: 5223; WAN024DTG_at; Start 61; Stop 85
aaggctggactttatggtaaaatag

SEQ ID NO: 170561 - DNA, 25 bp, Artificial
  probe
  misc_feature (1)..(25): SEQ ID NO: 5223; WAN024DTG_at; Start 24; Stop 48
agacagaagccccttgtcttctagt

SEQ ID NO: 170562 - DNA, 25 bp, Artificial
  probe
  misc_feature (1)..(25): SEQ ID NO: 5223; WAN024DTG_at; Start 18; Stop 42
aaatagagacagaagccccttgtct

SEQ ID NO: 170563 - DNA, 25 bp, Artificial
  probe
  misc_feature (1)..(25): SEQ ID NO: 5223; WAN024DTG_at; Start 51; Stop 75
aagttcttcaaaggctggactttat

SEQ ID NO: 170564 - DNA, 25 bp, Artificial
  probe
  misc_feature (1)..(25): SEQ ID NO: 5223; WAN024DTG_at; Start 11; Stop 35
agatggcaaatagagacagaagccc

SEQ ID NO: 170565 - DNA, 25 bp, Artificial
  probe
  misc_feature (1)..(25): SEQ ID NO: 5223; WAN024DTG_at; Start 13; Stop 37
atggcaaatagagacagaagcccct

SEQ ID NO: 170566 - DNA, 25 bp, Artificial
  probe
  misc_feature (1)..(25): SEQ ID NO: 5223; WAN024DTG_at; Start 90; Stop 114
aagtgacaagagagagctaactaat

SEQ ID NO: 170567 - DNA, 25 bp, Artificial
  probe
  misc_feature (1)..(25): SEQ ID NO: 5223; WAN024DTG_at; Start 58; Stop 82
tcaaaggctggactttatggtaaaa

SEQ ID NO: 170568 - DNA, 25 bp, Artificial
  probe
  misc_feature (1)..(25): SEQ ID NO: 5223; WAN024DTG_at; Start 10; Stop 34
aagatggcaaatagagacagaagcc

SEQ ID NO: 170569 - DNA, 25 bp, Artificial
  probe
  misc_feature (1)..(25): SEQ ID NO: 5223; WAN024DTG_at; Start 16; Stop 40
gcaaatagagacagaagccccttgt

SEQ ID NO: 170570 - DNA, 25 bp, Artificial
  probe
  misc_feature (1)..(25): SEQ ID NO: 5223; WAN024DTG_at; Start 55; Stop 79
tcttcaaaggctggactttatggta

SEQ ID NO: 170571 - DNA, 25 bp, Artificial
  probe
  misc_feature (1)..(25): SEQ ID NO: 5223; WAN024DTG_at; Start 57; Stop 81
ttcaaaggctggactttatggtaaa

SEQ ID NO: 170572 - DNA, 25 bp, Artificial
  probe
  misc_feature (1)..(25): SEQ ID NO: 5223; WAN024DTG_at; Start 44; Stop 68
ctagtaaaagttcttcaaaggctgg

SEQ ID NO: 170573 - DNA, 25 bp, Artificial
  probe
  misc_feature (1)..(25): SEQ ID NO: 5223; WAN024DTG_at; Start 54; Stop 78
ttcttcaaaggctggactttatggt

SEQ ID NO: 170574 - DNA, 25 bp, Artificial
  probe
  misc_feature (1)..(25): SEQ ID NO: 5223; WAN024DTG_at; Start 27; Stop 51
cagaagccccttgtcttctagtaaa

SEQ ID NO: 170575 - DNA, 25 bp, Artificial
  probe
  misc_feature (1)..(25): SEQ ID NO: 5223; WAN024DTG_at; Start 89; Stop 113
gaagtgacaagagagagctaactaa

SEQ ID NO: 170576 - DNA, 25 bp, Artificial
  probe
  misc_feature (1)..(25): SEQ ID NO: 5223; WAN024DTG_at; Start 19; Stop 43
aatagagacagaagccccttgtctt

SEQ ID NO: 170577 - DNA, 25 bp, Artificial
  probe
  misc_feature (1)..(25): SEQ ID NO: 5223; WAN024DTG_at; Start 36; Stop 60
cttgtcttctagtaaaagttcttca

SEQ ID NO: 170578 - DNA, 25 bp, Artificial
  probe
  misc_feature (1)..(25): SEQ ID NO: 5223; WAN024DTG_at; Start 59; Stop 83
caaaggctggactttatggtaaaat

SEQ ID NO: 170579 - DNA, 25 bp, Artificial
  probe
  misc_feature (1)..(25): SEQ ID NO: 5223; WAN024DTG_at; Start 37; Stop 61
ttgtcttctagtaaaagttcttcaa

SEQ ID NO: 170580 - DNA, 25 bp, Artificial
  probe
  misc_feature (1)..(25): SEQ ID NO: 5223; WAN024DTG_at; Start 15; Stop 39
ggcaaatagagacagaagccccttg

SEQ ID NO: 170581 - DNA, 25 bp, Artificial
  probe
  misc_feature (1)..(25): SEQ ID NO: 5223; WAN024DTG_at; Start 25; Stop 49
gacagaagccccttgtcttctagta

SEQ ID NO: 170582 - DNA, 25 bp, Artificial
  probe
  misc_feature (1)..(25): SEQ ID NO: 3408; WAN024DTH_at; Start 42; Stop 66
tttgcgcagctatatcgcagagcct

SEQ ID NO: 170583 - DNA, 25 bp, Artificial
  probe
  misc_feature (1)..(25): SEQ ID NO: 3408; WAN024DTH_at; Start 26; Stop 50
tcagctgccacagtggtttgcgcag

SEQ ID NO: 170584 - DNA, 25 bp, Artificial
  probe
  misc_feature (1)..(25): SEQ ID NO: 3408; WAN024DTH_at; Start 132; Stop 156
taacccagaaggagtagaatatgga

SEQ ID NO: 170585 - DNA, 25 bp, Artificial
  probe
  misc_feature (1)..(25): SEQ ID NO: 3408; WAN024DTH_at; Start 103; Stop 127
gacggcgcttattcactatacaaaa

SEQ ID NO: 170586 - DNA, 25 bp, Artificial
  probe
  misc_feature (1)..(25): SEQ ID NO: 3408; WAN024DTH_at; Start 23; Stop 47
tcgtcagctgccacagtggtttgcg

SEQ ID NO: 170587 - DNA, 25 bp, Artificial
  probe
  misc_feature (1)..(25): SEQ ID NO: 3408; WAN024DTH_at; Start 6; Stop 30
caaaaaacaagcctacatcgtcagc

SEQ ID NO: 170588 - DNA, 25 bp, Artificial
  probe
  misc_feature (1)..(25): SEQ ID NO: 3408; WAN024DTH_at; Start 99; Stop 123
ccttgacggcgcttattcactatac

SEQ ID NO: 170589 - DNA, 25 bp, Artificial
  probe
  misc_feature (1)..(25): SEQ ID NO: 3408; WAN024DTH_at; Start 67; Stop 91
atcctcaagcaagcaggatttaccg

SEQ ID NO: 170590 - DNA, 25 bp, Artificial
  probe
  misc_feature (1)..(25): SEQ ID NO: 3408; WAN024DTH_at; Start 33; Stop 57
ccacagtggtttgcgcagctatatc

SEQ ID NO: 170591 - DNA, 25 bp, Artificial
  probe
  misc_feature (1)..(25): SEQ ID NO: 3408; WAN024DTH_at; Start 36; Stop 60
cagtggtttgcgcagctatatcgca

SEQ ID NO: 170592 - DNA, 25 bp, Artificial
  probe
  misc_feature (1)..(25): SEQ ID NO: 3408; WAN024DTH_at; Start 40; Stop 64
ggtttgcgcagctatatcgcagagc

SEQ ID NO: 170593 - DNA, 25 bp, Artificial
  probe
  misc_feature (1)..(25): SEQ ID NO: 3408; WAN024DTH_at; Start 135; Stop 159
cccagaaggagtagaatatggaaac

SEQ ID NO: 170594 - DNA, 25 bp, Artificial
  probe
  misc_feature (1)..(25): SEQ ID NO: 3408; WAN024DTH_at; Start 9; Stop 33
aaaacaagcctacatcgtcagctgc

SEQ ID NO: 170595 - DNA, 25 bp, Artificial
  probe
  misc_feature (1)..(25): SEQ ID NO: 3408; WAN024DTH_at; Start 2; Stop 26
tggacaaaaaacaagcctacatcgt

SEQ ID NO: 170596 - DNA, 25 bp, Artificial
  probe
  misc_feature (1)..(25): SEQ ID NO: 3408; WAN024DTH_at; Start 93; Stop 117
ccaaaaccttgacggcgcttattca

SEQ ID NO: 170597 - DNA, 25 bp, Artificial
  probe
  misc_feature (1)..(25): SEQ ID NO: 3408; WAN024DTH_at; Start 56; Stop 80
tcgcagagcctatcctcaagcaagc

SEQ ID NO: 170598 - DNA, 25 bp, Artificial
  probe
  misc_feature (1)..(25): SEQ ID NO: 3408; WAN024DTH_at; Start 45; Stop 69
gcgcagctatatcgcagagcctatc

SEQ ID NO: 170599 - DNA, 25 bp, Artificial
  probe
  misc_feature (1)..(25): SEQ ID NO: 3408; WAN024DTH_at; Start 63; Stop 87
gcctatcctcaagcaagcaggattt

SEQ ID NO: 170600 - DNA, 25 bp, Artificial
  probe
  misc_feature (1)..(25): SEQ ID NO: 3408; WAN024DTH_at; Start 54; Stop 78
tatcgcagagcctatcctcaagcaa

SEQ ID NO: 170601 - DNA, 25 bp, Artificial
  probe
  misc_feature (1)..(25): SEQ ID NO: 3408; WAN024DTH_at; Start 106; Stop 130
ggcgcttattcactatacaaaatgg

SEQ ID NO: 170602 - DNA, 25 bp, Artificial
  probe
  misc_feature (1)..(25): SEQ ID NO: 3408; WAN024DTH_at; Start 59; Stop 83
cagagcctatcctcaagcaagcagg

SEQ ID NO: 170603 - DNA, 25 bp, Artificial
  probe
  misc_feature (1)..(25): SEQ ID NO: 3408; WAN024DTH_at; Start 38; Stop 62
gtggtttgcgcagctatatcgcaga

SEQ ID NO: 170604 - DNA, 25 bp, Artificial
  probe
  misc_feature (1)..(25): SEQ ID NO: 3408; WAN024DTH_at; Start 16; Stop 40
gcctacatcgtcagctgccacagtg

SEQ ID NO: 170605 - DNA, 25 bp, Artificial
  probe
  misc_feature (1)..(25): SEQ ID NO: 3408; WAN024DTH_at; Start 14; Stop 38
aagcctacatcgtcagctgccacag

SEQ ID NO: 170606 - DNA, 25 bp, Artificial
  probe
  misc_feature (1)..(25): SEQ ID NO: 3408; WAN024DTH_at; Start 58; Stop 82
gcagagcctatcctcaagcaagcag

SEQ ID NO: 170607 - DNA, 25 bp, Artificial
  probe
  misc_feature (1)..(25): SEQ ID NO: 3408; WAN024DTH_at; Start 1; Stop 25
ctggacaaaaaacaagcctacatcg

SEQ ID NO: 170608 - DNA, 25 bp, Artificial
  probe
  misc_feature (1)..(25): SEQ ID NO: 3408; WAN024DTH_at; Start 47; Stop 71
gcagctatatcgcagagcctatcct

SEQ ID NO: 170609 - DNA, 25 bp, Artificial
  probe
  misc_feature (1)..(25): SEQ ID NO: 3408; WAN024DTH_at; Start 19; Stop 43
tacatcgtcagctgccacagtggtt

SEQ ID NO: 170610 - DNA, 25 bp, Artificial
  probe
  misc_feature (1)..(25): SEQ ID NO: 3408; WAN024DTH_at; Start 61; Stop 85
gagcctatcctcaagcaagcaggat

SEQ ID NO: 170611 - DNA, 25 bp, Artificial
  probe
  misc_feature (1)..(25): SEQ ID NO: 3408; WAN024DTH_at; Start 31; Stop 55
tgccacagtggtttgcgcagctata

SEQ ID NO: 170612 - DNA, 25 bp, Artificial
  probe
  misc_feature (1)..(25): SEQ ID NO: 3408; WAN024DTH_at; Start 20; Stop 44
acatcgtcagctgccacagtggttt

SEQ ID NO: 170613 - DNA, 25 bp, Artificial
  probe
  misc_feature (1)..(25): SEQ ID NO: 3408; WAN024DTH_at; Start 11; Stop 35
aacaagcctacatcgtcagctgcca

SEQ ID NO: 170614 - DNA, 25 bp, Artificial
  probe
  misc_feature (1)..(25): SEQ ID NO: 3408; WAN024DTH_at; Start 50; Stop 74
gctatatcgcagagcctatcctcaa

SEQ ID NO: 170615 - DNA, 25 bp, Artificial
  probe
  misc_feature (1)..(25): SEQ ID NO: 3408; WAN024DTH_at; Start 102; Stop 126
tgacggcgcttattcactatacaaa

SEQ ID NO: 170616 - DNA, 25 bp, Artificial
  probe
  misc_feature (1)..(25): SEQ ID NO: 5171; WAN024DTI_at; Start 11; Stop 35
atgagcaatccctatatcgcttaat

SEQ ID NO: 170617 - DNA, 25 bp, Artificial
  probe
  misc_feature (1)..(25): SEQ ID NO: 5171; WAN024DTI_at; Start 5; Stop 29
taaaatatgagcaatccctatatcg

SEQ ID NO: 170618 - DNA, 25 bp, Artificial
  probe
  misc_feature (1)..(25): SEQ ID NO: 5171; WAN024DTI_at; Start 9; Stop 33
atatgagcaatccctatatcgctta

SEQ ID NO: 170619 - DNA, 25 bp, Artificial
  probe
  misc_feature (1)..(25): SEQ ID NO: 5171; WAN024DTI_at; Start 2; Stop 26
tgataaaatatgagcaatccctata

SEQ ID NO: 170620 - DNA, 25 bp, Artificial
  probe
  misc_feature (1)..(25): SEQ ID NO: 5171; WAN024DTI_at; Start 17; Stop 41
aatccctatatcgcttaatttttca

SEQ ID NO: 170621 - DNA, 25 bp, Artificial
  probe
  misc_feature (1)..(25): SEQ ID NO: 5171; WAN024DTI_at; Start 8; Stop 32
aatatgagcaatccctatatcgctt

SEQ ID NO: 170622 - DNA, 25 bp, Artificial
  probe
  misc_feature (1)..(25): SEQ ID NO: 5171; WAN024DTI_at; Start 90; Stop 114
ttatggtaaaattttctatggagaa

SEQ ID NO: 170623 - DNA, 25 bp, Artificial
  probe
  misc_feature (1)..(25): SEQ ID NO: 5171; WAN024DTI_at; Start 12; Stop 36
tgagcaatccctatatcgcttaatt

SEQ ID NO: 170624 - DNA, 25 bp, Artificial
  probe
  misc_feature (1)..(25): SEQ ID NO: 5171; WAN024DTI_at; Start 7; Stop 31
aaatatgagcaatccctatatcgct

SEQ ID NO: 170625 - DNA, 25 bp, Artificial
  probe
  misc_feature (1)..(25): SEQ ID NO: 5171; WAN024DTI_at; Start 89; Stop 113
tttatggtaaaattttctatggaga

SEQ ID NO: 170626 - DNA, 25 bp, Artificial
  probe
  misc_feature (1)..(25): SEQ ID NO: 5171; WAN024DTI_at; Start 6; Stop 30
aaaatatgagcaatccctatatcgc

SEQ ID NO: 170627 - DNA, 25 bp, Artificial
  probe
  misc_feature (1)..(25): SEQ ID NO: 5171; WAN024DTI_at; Start 14; Stop 38
agcaatccctatatcgcttaatttt

SEQ ID NO: 170628 - DNA, 25 bp, Artificial
  probe
  misc_feature (1)..(25): SEQ ID NO: 5171; WAN024DTI_at; Start 92; Stop 116
atggtaaaattttctatggagaagg

SEQ ID NO: 170629 - DNA, 25 bp, Artificial
  probe
  misc_feature (1)..(25): SEQ ID NO: 5171; WAN024DTI_at; Start 15; Stop 39
gcaatccctatatcgcttaattttt

SEQ ID NO: 170630 - DNA, 25 bp, Artificial
  probe
  misc_feature (1)..(25): SEQ ID NO: 5171; WAN024DTI_at; Start 16; Stop 40
caatccctatatcgcttaatttttc

SEQ ID NO: 170631 - DNA, 25 bp, Artificial
  probe
  misc_feature (1)..(25): SEQ ID NO: 5171; WAN024DTI_at; Start 4; Stop 28
ataaaatatgagcaatccctatatc

SEQ ID NO: 170632 - DNA, 25 bp, Artificial
  probe
  misc_feature (1)..(25): SEQ ID NO: 5171; WAN024DTI_at; Start 13; Stop 37
gagcaatccctatatcgcttaattt

SEQ ID NO: 170633 - DNA, 25 bp, Artificial
  probe
  misc_feature (1)..(25): SEQ ID NO: 5171; WAN024DTI_at; Start 93; Stop 117
tggtaaaattttctatggagaagga

SEQ ID NO: 170634 - DNA, 25 bp, Artificial
  probe
  misc_feature (1)..(25): SEQ ID NO: 5171; WAN024DTI_at; Start 3; Stop 27
gataaaatatgagcaatccctatat

SEQ ID NO: 170635 - DNA, 25 bp, Artificial
  probe
  misc_feature (1)..(25): SEQ ID NO: 5171; WAN024DTI_at; Start 10; Stop 34
tatgagcaatccctatatcgcttaa

SEQ ID NO: 170636 - DNA, 25 bp, Artificial
  probe
  misc_feature (1)..(25): SEQ ID NO: 5171; WAN024DTI_at; Start 1; Stop 25
ttgataaaatatgagcaatccctat

SEQ ID NO: 170637 - DNA, 25 bp, Artificial
  probe
  misc_feature (1)..(25): SEQ ID NO: 5171; WAN024DTI_at; Start 91; Stop 115
tatggtaaaattttctatggagaag

SEQ ID NO: 170638 - DNA, 25 bp, Artificial
  probe
  misc_feature (1)..(25): SEQ ID NO: 5554; WAN024DTJ_at; Start 4; Stop 28
ggaattgccatatttttacctctat

SEQ ID NO: 170639 - DNA, 25 bp, Artificial
  probe
  misc_feature (1)..(25): SEQ ID NO: 5554; WAN024DTJ_at; Start 33; Stop 57
cttcttccatagaaaattttaccat

SEQ ID NO: 170640 - DNA, 25 bp, Artificial
  probe
  misc_feature (1)..(25): SEQ ID NO: 5554; WAN024DTJ_at; Start 19; Stop 43
ttacctctattttccttcttccata

SEQ ID NO: 170641 - DNA, 25 bp, Artificial
  probe
  misc_feature (1)..(25): SEQ ID NO: 5554; WAN024DTJ_at; Start 2; Stop 26
tgggaattgccatatttttacctct

SEQ ID NO: 170642 - DNA, 25 bp, Artificial
  probe
  misc_feature (1)..(25): SEQ ID NO: 5554; WAN024DTJ_at; Start 3; Stop 27
gggaattgccatatttttacctcta

SEQ ID NO: 170643 - DNA, 25 bp, Artificial
  probe
  misc_feature (1)..(25): SEQ ID NO: 5554; WAN024DTJ_at; Start 6; Stop 30
aattgccatatttttacctctattt

SEQ ID NO: 170644 - DNA, 25 bp, Artificial
  probe
  misc_feature (1)..(25): SEQ ID NO: 5554; WAN024DTJ_at; Start 24; Stop 48
tctattttccttcttccatagaaaa

SEQ ID NO: 170645 - DNA, 25 bp, Artificial
  probe
  misc_feature (1)..(25): SEQ ID NO: 5554; WAN024DTJ_at; Start 25; Stop 49
ctattttccttcttccatagaaaat

SEQ ID NO: 170646 - DNA, 25 bp, Artificial
  probe
  misc_feature (1)..(25): SEQ ID NO: 5554; WAN024DTJ_at; Start 22; Stop 46
cctctattttccttcttccatagaa

SEQ ID NO: 170647 - DNA, 25 bp, Artificial
  probe
  misc_feature (1)..(25): SEQ ID NO: 5554; WAN024DTJ_at; Start 1; Stop 25
ttgggaattgccatatttttacctc

SEQ ID NO: 170648 - DNA, 25 bp, Artificial
  probe
  misc_feature (1)..(25): SEQ ID NO: 5554; WAN024DTJ_at; Start 20; Stop 44
tacctctattttccttcttccatag

SEQ ID NO: 170649 - DNA, 25 bp, Artificial
  probe
  misc_feature (1)..(25): SEQ ID NO: 5554; WAN024DTJ_at; Start 34; Stop 58
ttcttccatagaaaattttaccata

SEQ ID NO: 170650 - DNA, 25 bp, Artificial
  probe
  misc_feature (1)..(25): SEQ ID NO: 5554; WAN024DTJ_at; Start 7; Stop 31
attgccatatttttacctctatttt

SEQ ID NO: 170651 - DNA, 25 bp, Artificial
  probe
  misc_feature (1)..(25): SEQ ID NO: 5554; WAN024DTJ_at; Start 23; Stop 47
ctctattttccttcttccatagaaa

SEQ ID NO: 170652 - DNA, 25 bp, Artificial
  probe
  misc_feature (1)..(25): SEQ ID NO: 5554; WAN024DTJ_at; Start 9; Stop 33
tgccatatttttacctctattttcc

SEQ ID NO: 170653 - DNA, 25 bp, Artificial
  probe
  misc_feature (1)..(25): SEQ ID NO: 5554; WAN024DTJ_at; Start 5; Stop 29
gaattgccatatttttacctctatt

SEQ ID NO: 170654 - DNA, 25 bp, Artificial
  probe
  misc_feature (1)..(25): SEQ ID NO: 5554; WAN024DTJ_at; Start 35; Stop 59
tcttccatagaaaattttaccataa

SEQ ID NO: 170655 - DNA, 25 bp, Artificial
  probe
  misc_feature (1)..(25): SEQ ID NO: 5554; WAN024DTJ_at; Start 21; Stop 45
acctctattttccttcttccataga

SEQ ID NO: 170656 - DNA, 25 bp, Artificial
  probe
  misc_feature (1)..(25): SEQ ID NO: 5554; WAN024DTJ_at; Start 8; Stop 32
ttgccatatttttacctctattttc

SEQ ID NO: 170657 - DNA, 25 bp, Artificial
  probe
  misc_feature (1)..(25): SEQ ID NO: 3780; WAN024DTK_at; Start 112; Stop 136
catgcttattgctttgttgagaaac

SEQ ID NO: 170658 - DNA, 25 bp, Artificial
  probe
  misc_feature (1)..(25): SEQ ID NO: 3780; WAN024DTK_at; Start 44; Stop 68
tggagttggaaacagagttgccttt

SEQ ID NO: 170659 - DNA, 25 bp, Artificial
  probe
  misc_feature (1)..(25): SEQ ID NO: 3780; WAN024DTK_at; Start 60; Stop 84
gttgcctttagcgattccagtggtt

SEQ ID NO: 170660 - DNA, 25 bp, Artificial
  probe
  misc_feature (1)..(25): SEQ ID NO: 3780; WAN024DTK_at; Start 54; Stop 78
aacagagttgcctttagcgattcca

SEQ ID NO: 170661 - DNA, 25 bp, Artificial
  probe
  misc_feature (1)..(25): SEQ ID NO: 3780; WAN024DTK_at; Start 77; Stop 101
cagtggttacggctattgctctcta

SEQ ID NO: 170662 - DNA, 25 bp, Artificial
  probe
  misc_feature (1)..(25): SEQ ID NO: 3780; WAN024DTK_at; Start 46; Stop 70
gagttggaaacagagttgcctttag

SEQ ID NO: 170663 - DNA, 25 bp, Artificial
  probe
  misc_feature (1)..(25): SEQ ID NO: 3780; WAN024DTK_at; Start 33; Stop 57
ctctccttttgtggagttggaaaca

SEQ ID NO: 170664 - DNA, 25 bp, Artificial
  probe
  misc_feature (1)..(25): SEQ ID NO: 3780; WAN024DTK_at; Start 66; Stop 90
tttagcgattccagtggttacggct

SEQ ID NO: 170665 - DNA, 25 bp, Artificial
  probe
  misc_feature (1)..(25): SEQ ID NO: 3780; WAN024DTK_at; Start 42; Stop 66
tgtggagttggaaacagagttgcct

SEQ ID NO: 170666 - DNA, 25 bp, Artificial
  probe
  misc_feature (1)..(25): SEQ ID NO: 3780; WAN024DTK_at; Start 74; Stop 98
ttccagtggttacggctattgctct

SEQ ID NO: 170667 - DNA, 25 bp, Artificial
  probe
  misc_feature (1)..(25): SEQ ID NO: 3780; WAN024DTK_at; Start 58; Stop 82
gagttgcctttagcgattccagtgg

SEQ ID NO: 170668 - DNA, 25 bp, Artificial
  probe
  misc_feature (1)..(25): SEQ ID NO: 3780; WAN024DTK_at; Start 118; Stop 142
tattgctttgttgagaaacacaatg

SEQ ID NO: 170669 - DNA, 25 bp, Artificial
  probe
  misc_feature (1)..(25): SEQ ID NO: 3780; WAN024DTK_at; Start 72; Stop 96
gattccagtggttacggctattgct

SEQ ID NO: 170670 - DNA, 25 bp, Artificial
  probe
  misc_feature (1)..(25): SEQ ID NO: 3780; WAN024DTK_at; Start 132; Stop 156
gaaacacaatgagttgatgacccta

SEQ ID NO: 170671 - DNA, 25 bp, Artificial
  probe
  misc_feature (1)..(25): SEQ ID NO: 3780; WAN024DTK_at; Start 37; Stop 61
ccttttgtggagttggaaacagagt

SEQ ID NO: 170672 - DNA, 25 bp, Artificial
  probe
  misc_feature (1)..(25): SEQ ID NO: 3780; WAN024DTK_at; Start 68; Stop 92
tagcgattccagtggttacggctat

SEQ ID NO: 170673 - DNA, 25 bp, Artificial
  probe
  misc_feature (1)..(25): SEQ ID NO: 3780; WAN024DTK_at; Start 49; Stop 73
ttggaaacagagttgcctttagcga

SEQ ID NO: 170674 - DNA, 25 bp, Artificial
  probe
  misc_feature (1)..(25): SEQ ID NO: 3780; WAN024DTK_at; Start 62; Stop 86
tgcctttagcgattccagtggttac

SEQ ID NO: 170675 - DNA, 25 bp, Artificial
  probe
  misc_feature (1)..(25): SEQ ID NO: 3780; WAN024DTK_at; Start 36; Stop 60
tccttttgtggagttggaaacagag

SEQ ID NO: 170676 - DNA, 25 bp, Artificial
  probe
  misc_feature (1)..(25): SEQ ID NO: 3780; WAN024DTK_at; Start 63; Stop 87
gcctttagcgattccagtggttacg

SEQ ID NO: 170677 - DNA, 25 bp, Artificial
  probe
  misc_feature (1)..(25): SEQ ID NO: 3780; WAN024DTK_at; Start 80; Stop 104
tggttacggctattgctctctatgg

SEQ ID NO: 170678 - DNA, 25 bp, Artificial
  probe
  misc_feature (1)..(25): SEQ ID NO: 3780; WAN024DTK_at; Start 130; Stop 154
gagaaacacaatgagttgatgaccc

SEQ ID NO: 170679 - DNA, 25 bp, Artificial
  probe
  misc_feature (1)..(25): SEQ ID NO: 3780; WAN024DTK_at; Start 71; Stop 95
cgattccagtggttacggctattgc

SEQ ID NO: 170680 - DNA, 25 bp, Artificial
  probe
  misc_feature (1)..(25): SEQ ID NO: 3780; WAN024DTK_at; Start 65; Stop 89
ctttagcgattccagtggttacggc

SEQ ID NO: 170681 - DNA, 25 bp, Artificial
  probe
  misc_feature (1)..(25): SEQ ID NO: 3780; WAN024DTK_at; Start 51; Stop 75
ggaaacagagttgcctttagcgatt

SEQ ID NO: 170682 - DNA, 25 bp, Artificial
  probe
  misc_feature (1)..(25): SEQ ID NO: 3780; WAN024DTK_at; Start 115; Stop 139
gcttattgctttgttgagaaacaca

SEQ ID NO: 170683 - DNA, 25 bp, Artificial
  probe
  misc_feature (1)..(25): SEQ ID NO: 3780; WAN024DTK_at; Start 82; Stop 106
gttacggctattgctctctatggtt

SEQ ID NO: 170684 - DNA, 25 bp, Artificial
  probe
  misc_feature (1)..(25): SEQ ID NO: 3780; WAN024DTK_at; Start 30; Stop 54
taactctccttttgtggagttggaa

SEQ ID NO: 170685 - DNA, 25 bp, Artificial
  probe
  misc_feature (1)..(25): SEQ ID NO: 3780; WAN024DTK_at; Start 126; Stop 150
tgttgagaaacacaatgagttgatg

SEQ ID NO: 170686 - DNA, 25 bp, Artificial
  probe
  misc_feature (1)..(25): SEQ ID NO: 3780; WAN024DTK_at; Start 53; Stop 77
aaacagagttgcctttagcgattcc

SEQ ID NO: 170687 - DNA, 25 bp, Artificial
  probe
  misc_feature (1)..(25): SEQ ID NO: 3780; WAN024DTK_at; Start 55; Stop 79
acagagttgcctttagcgattccag

SEQ ID NO: 170688 - DNA, 25 bp, Artificial
  probe
  misc_feature (1)..(25): SEQ ID NO: 3780; WAN024DTK_at; Start 41; Stop 65
ttgtggagttggaaacagagttgcc

SEQ ID NO: 170689 - DNA, 25 bp, Artificial
  probe
  misc_feature (1)..(25): SEQ ID NO: 3780; WAN024DTK_at; Start 56; Stop 80
cagagttgcctttagcgattccagt

SEQ ID NO: 170690 - DNA, 25 bp, Artificial
  probe
  misc_feature (1)..(25): SEQ ID NO: 3780; WAN024DTK_at; Start 122; Stop 146
gctttgttgagaaacacaatgagtt

SEQ ID NO: 170691 - DNA, 25 bp, Artificial
  probe
  misc_feature (1)..(25): SEQ ID NO: 4252; WAN024DTL_s_at; Start 144; Stop 168
tttacatgattccggctctttattt

SEQ ID NO: 170692 - DNA, 25 bp, Artificial
  probe
  misc_feature (1)..(25): SEQ ID NO: 4252; WAN024DTL_s_at; Start 135; Stop 159
tagctctcttttacatgattccggc

SEQ ID NO: 170693 - DNA, 25 bp, Artificial
  probe
  misc_feature (1)..(25): SEQ ID NO: 4252; WAN024DTL_s_at; Start 141; Stop 165
tcttttacatgattccggctcttta

SEQ ID NO: 170694 - DNA, 25 bp, Artificial
  probe
  misc_feature (1)..(25): SEQ ID NO: 4252; WAN024DTL_s_at; Start 56; Stop 80
ttacagtatgaaaccatctactata

SEQ ID NO: 170695 - DNA, 25 bp, Artificial
  probe
  misc_feature (1)..(25): SEQ ID NO: 4252; WAN024DTL_s_at; Start 148; Stop 172
catgattccggctctttattttctc

SEQ ID NO: 170696 - DNA, 25 bp, Artificial
  probe
  misc_feature (1)..(25): SEQ ID NO: 4252; WAN024DTL_s_at; Start 138; Stop 162
ctctcttttacatgattccggctct

SEQ ID NO: 170697 - DNA, 25 bp, Artificial
  probe
  misc_feature (1)..(25): SEQ ID NO: 4252; WAN024DTL_s_at; Start 128; Stop 152
atctttctagctctcttttacatga

SEQ ID NO: 170698 - DNA, 25 bp, Artificial
  probe
  misc_feature (1)..(25): SEQ ID NO: 4252; WAN024DTL_s_at; Start 131; Stop 155
tttctagctctcttttacatgattc

SEQ ID NO: 170699 - DNA, 25 bp, Artificial
  probe
  misc_feature (1)..(25): SEQ ID NO: 4252; WAN024DTL_s_at; Start 149; Stop 173
atgattccggctctttattttctct

SEQ ID NO: 170700 - DNA, 25 bp, Artificial
  probe
  misc_feature (1)..(25): SEQ ID NO: 4252; WAN024DTL_s_at; Start 130; Stop 154
ctttctagctctcttttacatgatt

SEQ ID NO: 170701 - DNA, 25 bp, Artificial
  probe
  misc_feature (1)..(25): SEQ ID NO: 4252; WAN024DTL_s_at; Start 143; Stop 167
ttttacatgattccggctctttatt

SEQ ID NO: 170702 - DNA, 25 bp, Artificial
  probe
  misc_feature (1)..(25): SEQ ID NO: 4252; WAN024DTL_s_at; Start 145; Stop 169
ttacatgattccggctctttatttt

SEQ ID NO: 170703 - DNA, 25 bp, Artificial
  probe
  misc_feature (1)..(25): SEQ ID NO: 4252; WAN024DTL_s_at; Start 133; Stop 157
tctagctctcttttacatgattccg

SEQ ID NO: 170704 - DNA, 25 bp, Artificial
  probe
  misc_feature (1)..(25): SEQ ID NO: 4252; WAN024DTL_s_at; Start 134; Stop 158
ctagctctcttttacatgattccgg

SEQ ID NO: 170705 - DNA, 25 bp, Artificial
  probe
  misc_feature (1)..(25): SEQ ID NO: 4252; WAN024DTL_s_at; Start 150; Stop 174
tgattccggctctttattttctctt

SEQ ID NO: 170706 - DNA, 25 bp, Artificial
  probe
  misc_feature (1)..(25): SEQ ID NO: 4252; WAN024DTL_s_at; Start 151; Stop 175
gattccggctctttattttctcttc

SEQ ID NO: 170707 - DNA, 25 bp, Artificial
  probe
  misc_feature (1)..(25): SEQ ID NO: 4252; WAN024DTL_s_at; Start 140; Stop 164
ctcttttacatgattccggctcttt

SEQ ID NO: 170708 - DNA, 25 bp, Artificial
  probe
  misc_feature (1)..(25): SEQ ID NO: 4252; WAN024DTL_s_at; Start 142; Stop 166
cttttacatgattccggctctttat

SEQ ID NO: 170709 - DNA, 25 bp, Artificial
  probe
  misc_feature (1)..(25): SEQ ID NO: 4252; WAN024DTL_s_at; Start 146; Stop 170
tacatgattccggctctttattttc

SEQ ID NO: 170710 - DNA, 25 bp, Artificial
  probe
  misc_feature (1)..(25): SEQ ID NO: 4252; WAN024DTL_s_at; Start 132; Stop 156
ttctagctctcttttacatgattcc

SEQ ID NO: 170711 - DNA, 25 bp, Artificial
  probe
  misc_feature (1)..(25): SEQ ID NO: 4252; WAN024DTL_s_at; Start 129; Stop 153
tctttctagctctcttttacatgat

SEQ ID NO: 170712 - DNA, 25 bp, Artificial
  probe
  misc_feature (1)..(25): SEQ ID NO: 4252; WAN024DTL_s_at; Start 139; Stop 163
tctcttttacatgattccggctctt

SEQ ID NO: 170713 - DNA, 25 bp, Artificial
  probe
  misc_feature (1)..(25): SEQ ID NO: 4252; WAN024DTL_s_at; Start 137; Stop 161
gctctcttttacatgattccggctc

SEQ ID NO: 170714 - DNA, 25 bp, Artificial
  probe
  misc_feature (1)..(25): SEQ ID NO: 4252; WAN024DTL_s_at; Start 147; Stop 171
acatgattccggctctttattttct

SEQ ID NO: 170715 - DNA, 25 bp, Artificial
  probe
  misc_feature (1)..(25): SEQ ID NO: 4252; WAN024DTL_s_at; Start 136; Stop 160
agctctcttttacatgattccggct

SEQ ID NO: 170716 - DNA, 25 bp, Artificial
  probe
  misc_feature (1)..(25): SEQ ID NO: 1066; WAN024DTM_at; Start 284; Stop 308
tcccagatagtccatttttaaatgc

SEQ ID NO: 170717 - DNA, 25 bp, Artificial
  probe
  misc_feature (1)..(25): SEQ ID NO: 1066; WAN024DTM_at; Start 522; Stop 546
gcgtatcatctcaggaattgcctct

SEQ ID NO: 170718 - DNA, 25 bp, Artificial
  probe
  misc_feature (1)..(25): SEQ ID NO: 1066; WAN024DTM_at; Start 528; Stop 552
catctcaggaattgcctctcactgg

SEQ ID NO: 170719 - DNA, 25 bp, Artificial
  probe
  misc_feature (1)..(25): SEQ ID NO: 1066; WAN024DTM_at; Start 518; Stop 542
tagagcgtatcatctcaggaattgc

SEQ ID NO: 170720 - DNA, 25 bp, Artificial
  probe
  misc_feature (1)..(25): SEQ ID NO: 1066; WAN024DTM_at; Start 483; Stop 507
gccagagggctttgactttactatt

SEQ ID NO: 170721 - DNA, 25 bp, Artificial
  probe
  misc_feature (1)..(25): SEQ ID NO: 1066; WAN024DTM_at; Start 200; Stop 224
tgtctttattgggagggatgttcct

SEQ ID NO: 170722 - DNA, 25 bp, Artificial
  probe
  misc_feature (1)..(25): SEQ ID NO: 1066; WAN024DTM_at; Start 541; Stop 565
gcctctcactggactttttcaggtc

SEQ ID NO: 170723 - DNA, 25 bp, Artificial
  probe
  misc_feature (1)..(25): SEQ ID NO: 1066; WAN024DTM_at; Start 193; Stop 217
ttgattctgtctttattgggaggga

SEQ ID NO: 170724 - DNA, 25 bp, Artificial
  probe
  misc_feature (1)..(25): SEQ ID NO: 1066; WAN024DTM_at; Start 474; Stop 498
tacggatttgccagagggctttgac

SEQ ID NO: 170725 - DNA, 25 bp, Artificial
  probe
  misc_feature (1)..(25): SEQ ID NO: 1066; WAN024DTM_at; Start 601; Stop 625
tataaaggacagaaggttggcaaga

SEQ ID NO: 170726 - DNA, 25 bp, Artificial
  probe
  misc_feature (1)..(25): SEQ ID NO: 1066; WAN024DTM_at; Start 592; Stop 616
tacagagcctataaaggacagaagg

SEQ ID NO: 170727 - DNA, 25 bp, Artificial
  probe
  misc_feature (1)..(25): SEQ ID NO: 1066; WAN024DTM_at; Start 565; Stop 589
ctagctgtagtaggtgtttacttgc

SEQ ID NO: 170728 - DNA, 25 bp, Artificial
  probe
  misc_feature (1)..(25): SEQ ID NO: 1066; WAN024DTM_at; Start 552; Stop 576
gactttttcaggtctagctgtagta

SEQ ID NO: 170729 - DNA, 25 bp, Artificial
  probe
  misc_feature (1)..(25): SEQ ID NO: 1066; WAN024DTM_at; Start 598; Stop 622
gcctataaaggacagaaggttggca

SEQ ID NO: 170730 - DNA, 25 bp, Artificial
  probe
  misc_feature (1)..(25): SEQ ID NO: 1066; WAN024DTM_at; Start 575; Stop 599
taggtgtttacttgctttacagagc

SEQ ID NO: 170731 - DNA, 25 bp, Artificial
  probe
  misc_feature (1)..(25): SEQ ID NO: 1066; WAN024DTM_at; Start 379; Stop 403
gctttgattcctgtgcgaaaattaa

SEQ ID NO: 170732 - DNA, 25 bp, Artificial
  probe
  misc_feature (1)..(25): SEQ ID NO: 1066; WAN024DTM_at; Start 501; Stop 525
tactatttcgcgaattttagagcgt

SEQ ID NO: 170733 - DNA, 25 bp, Artificial
  probe
  misc_feature (1)..(25): SEQ ID NO: 1066; WAN024DTM_at; Start 328; Stop 352
gctcctttggtagaagaacccttga

SEQ ID NO: 170734 - DNA, 25 bp, Artificial
  probe
  misc_feature (1)..(25): SEQ ID NO: 1066; WAN024DTM_at; Start 455; Stop 479
aggatattggttatattcgtacgga

SEQ ID NO: 170735 - DNA, 25 bp, Artificial
  probe
  misc_feature (1)..(25): SEQ ID NO: 1066; WAN024DTM_at; Start 533; Stop 557
caggaattgcctctcactggacttt

SEQ ID NO: 170736 - DNA, 25 bp, Artificial
  probe
  misc_feature (1)..(25): SEQ ID NO: 1066; WAN024DTM_at; Start 547; Stop 571
cactggactttttcaggtctagctg

SEQ ID NO: 170737 - DNA, 25 bp, Artificial
  probe
  misc_feature (1)..(25): SEQ ID NO: 1066; WAN024DTM_at; Start 583; Stop 607
tacttgctttacagagcctataaag

SEQ ID NO: 170738 - DNA, 25 bp, Artificial
  probe
  misc_feature (1)..(25): SEQ ID NO: 1066; WAN024DTM_at; Start 181; Stop 205
ccaaagaaggttttgattctgtctt

SEQ ID NO: 170739 - DNA, 25 bp, Artificial
  probe
  misc_feature (1)..(25): SEQ ID NO: 1066; WAN024DTM_at; Start 233; Stop 257
ggttgtctagttttgctaatactta

SEQ ID NO: 170740 - DNA, 25 bp, Artificial
  probe
  misc_feature (1)..(25): SEQ ID NO: 1066; WAN024DTM_at; Start 295; Stop 319
ccatttttaaatgcctttgaaagtg

SEQ ID NO: 170741 - DNA, 25 bp, Artificial
  probe
  misc_feature (1)..(25): SEQ ID NO: 1066; WAN024DTM_at; Start 362; Stop 386
cacttgtttttgttttggctttgat

SEQ ID NO: 170742 - DNA, 25 bp, Artificial
  probe
  misc_feature (1)..(25): SEQ ID NO: 1066; WAN024DTM_at; Start 606; Stop 630
aggacagaaggttggcaagaaacag

SEQ ID NO: 170743 - DNA, 25 bp, Artificial
  probe
  misc_feature (1)..(25): SEQ ID NO: 1066; WAN024DTM_at; Start 372; Stop 396
tgttttggctttgattcctgtgcga

SEQ ID NO: 170744 - DNA, 25 bp, Artificial
  probe
  misc_feature (1)..(25): SEQ ID NO: 1066; WAN024DTM_at; Start 560; Stop 584
caggtctagctgtagtaggtgttta

SEQ ID NO: 170745 - DNA, 25 bp, Artificial
  probe
  misc_feature (1)..(25): SEQ ID NO: 1066; WAN024DTM_at; Start 301; Stop 325
ttaaatgcctttgaaagtgctattg

SEQ ID NO: 170746 - DNA, 25 bp, Artificial
  probe
  misc_feature (1)..(25): SEQ ID NO: 1066; WAN024DTM_at; Start 512; Stop 536
gaattttagagcgtatcatctcagg

SEQ ID NO: 170747 - DNA, 25 bp, Artificial
  probe
  misc_feature (1)..(25): SEQ ID NO: 1066; WAN024DTM_at; Start 227; Stop 251
caggctggttgtctagttttgctaa

SEQ ID NO: 170748 - DNA, 25 bp, Artificial
  probe
  misc_feature (1)..(25): SEQ ID NO: 1066; WAN024DTM_at; Start 279; Stop 303
tcttttcccagatagtccattttta

SEQ ID NO: 170749 - DNA, 25 bp, Artificial
  probe
  misc_feature (1)..(25): SEQ ID NO: 1066; WAN024DTM_at; Start 468; Stop 492
tattcgtacggatttgccagagggc

SEQ ID NO: 170750 - DNA, 25 bp, Artificial
  probe
  misc_feature (1)..(25): SEQ ID NO: 3384; WAN024DTN_at; Start 44; Stop 68
tttatcaagaagaaacaatagaaag

SEQ ID NO: 170751 - DNA, 25 bp, Artificial
  probe
  misc_feature (1)..(25): SEQ ID NO: 3384; WAN024DTN_at; Start 1; Stop 25
ctgcaattatatcttacaatttatt

SEQ ID NO: 170752 - DNA, 25 bp, Artificial
  probe
  misc_feature (1)..(25): SEQ ID NO: 3384; WAN024DTN_at; Start 63; Stop 87
agaaagatttgctatttccaactat

SEQ ID NO: 170753 - DNA, 25 bp, Artificial
  probe
  misc_feature (1)..(25): SEQ ID NO: 3384; WAN024DTN_at; Start 62; Stop 86
tagaaagatttgctatttccaacta

SEQ ID NO: 170754 - DNA, 25 bp, Artificial
  probe
  misc_feature (1)..(25): SEQ ID NO: 3384; WAN024DTN_at; Start 46; Stop 70
tatcaagaagaaacaatagaaagat

SEQ ID NO: 170755 - DNA, 25 bp, Artificial
  probe
  misc_feature (1)..(25): SEQ ID NO: 3384; WAN024DTN_at; Start 3; Stop 27
gcaattatatcttacaatttattat

SEQ ID NO: 170756 - DNA, 25 bp, Artificial
  probe
  misc_feature (1)..(25): SEQ ID NO: 3384; WAN024DTN_at; Start 45; Stop 69
ttatcaagaagaaacaatagaaaga

SEQ ID NO: 170757 - DNA, 25 bp, Artificial
  probe
  misc_feature (1)..(25): SEQ ID NO: 3384; WAN024DTN_at; Start 61; Stop 85
atagaaagatttgctatttccaact

SEQ ID NO: 170758 - DNA, 25 bp, Artificial
  probe
  misc_feature (1)..(25): SEQ ID NO: 3384; WAN024DTN_at; Start 2; Stop 26
tgcaattatatcttacaatttatta

SEQ ID NO: 170759 - DNA, 25 bp, Artificial
  probe
  misc_feature (1)..(25): SEQ ID NO: 3925; WAN024DTO_at; Start 82; Stop 106
ccaaactcagctactgttgtcactt

SEQ ID NO: 170760 - DNA, 25 bp, Artificial
  probe
  misc_feature (1)..(25): SEQ ID NO: 3925; WAN024DTO_at; Start 49; Stop 73
gcagtttctcctacagttaacttac

SEQ ID NO: 170761 - DNA, 25 bp, Artificial
  probe
  misc_feature (1)..(25): SEQ ID NO: 3925; WAN024DTO_at; Start 122; Stop 146
tgacgacagcaatatcagagaaagt

SEQ ID NO: 170762 - DNA, 25 bp, Artificial
  probe
  misc_feature (1)..(25): SEQ ID NO: 3925; WAN024DTO_at; Start 148; Stop 172
tcagctccgacaatttctccaggta

SEQ ID NO: 170763 - DNA, 25 bp, Artificial
  probe
  misc_feature (1)..(25): SEQ ID NO: 3925; WAN024DTO_at; Start 190; Stop 214
aatcgaatatctactttgctggcgc

SEQ ID NO: 170764 - DNA, 25 bp, Artificial
  probe
  misc_feature (1)..(25): SEQ ID NO: 3925; WAN024DTO_at; Start 39; Stop 63
gatggcaatagcagtttctcctaca

SEQ ID NO: 170765 - DNA, 25 bp, Artificial
  probe
  misc_feature (1)..(25): SEQ ID NO: 3925; WAN024DTO_at; Start 76; Stop 100
gaatcaccaaactcagctactgttg

SEQ ID NO: 170766 - DNA, 25 bp, Artificial
  probe
  misc_feature (1)..(25): SEQ ID NO: 3925; WAN024DTO_at; Start 2; Stop 26
tgacagtatttgcatattcagaacc

SEQ ID NO: 170767 - DNA, 25 bp, Artificial
  probe
  misc_feature (1)..(25): SEQ ID NO: 3925; WAN024DTO_at; Start 16; Stop 40
tattcagaacctaacgggctaccga

SEQ ID NO: 170768 - DNA, 25 bp, Artificial
  probe
  misc_feature (1)..(25): SEQ ID NO: 3925; WAN024DTO_at; Start 187; Stop 211
gacaatcgaatatctactttgctgg

SEQ ID NO: 170769 - DNA, 25 bp, Artificial
  probe
  misc_feature (1)..(25): SEQ ID NO: 3925; WAN024DTO_at; Start 117; Stop 141
gattttgacgacagcaatatcagag

SEQ ID NO: 170770 - DNA, 25 bp, Artificial
  probe
  misc_feature (1)..(25): SEQ ID NO: 3925; WAN024DTO_at; Start 23; Stop 47
aacctaacgggctaccgatggcaat

SEQ ID NO: 170771 - DNA, 25 bp, Artificial
  probe
  misc_feature (1)..(25): SEQ ID NO: 3925; WAN024DTO_at; Start 163; Stop 187
tctccaggtactttagtcccatctg

SEQ ID NO: 170772 - DNA, 25 bp, Artificial
  probe
  misc_feature (1)..(25): SEQ ID NO: 3925; WAN024DTO_at; Start 154; Stop 178
ccgacaatttctccaggtactttag

SEQ ID NO: 170773 - DNA, 25 bp, Artificial
  probe
  misc_feature (1)..(25): SEQ ID NO: 3925; WAN024DTO_at; Start 128; Stop 152
cagcaatatcagagaaagtgtcagc

SEQ ID NO: 170774 - DNA, 25 bp, Artificial
  probe
  misc_feature (1)..(25): SEQ ID NO: 3925; WAN024DTO_at; Start 91; Stop 115
gctactgttgtcactttttctgaag

SEQ ID NO: 170775 - DNA, 25 bp, Artificial
  probe
  misc_feature (1)..(25): SEQ ID NO: 3925; WAN024DTO_at; Start 131; Stop 155
caatatcagagaaagtgtcagctcc

SEQ ID NO: 170776 - DNA, 25 bp, Artificial
  probe
  misc_feature (1)..(25): SEQ ID NO: 3925; WAN024DTO_at; Start 134; Stop 158
tatcagagaaagtgtcagctccgac

SEQ ID NO: 170777 - DNA, 25 bp, Artificial
  probe
  misc_feature (1)..(25): SEQ ID NO: 3925; WAN024DTO_at; Start 194; Stop 218
gaatatctactttgctggcgccatt

SEQ ID NO: 170778 - DNA, 25 bp, Artificial
  probe
  misc_feature (1)..(25): SEQ ID NO: 3925; WAN024DTO_at; Start 178; Stop 202
gtcccatctgacaatcgaatatcta

SEQ ID NO: 170779 - DNA, 25 bp, Artificial
  probe
  misc_feature (1)..(25): SEQ ID NO: 3925; WAN024DTO_at; Start 109; Stop 133
tctgaagagattttgacgacagcaa

SEQ ID NO: 170780 - DNA, 25 bp, Artificial
  probe
  misc_feature (1)..(25): SEQ ID NO: 3925; WAN024DTO_at; Start 62; Stop 86
cagttaacttactagaatcaccaaa

SEQ ID NO: 170781 - DNA, 25 bp, Artificial
  probe
  misc_feature (1)..(25): SEQ ID NO: 3925; WAN024DTO_at; Start 43; Stop 67
gcaatagcagtttctcctacagtta

SEQ ID NO: 170782 - DNA, 25 bp, Artificial
  probe
  misc_feature (1)..(25): SEQ ID NO: 3925; WAN024DTO_at; Start 94; Stop 118
actgttgtcactttttctgaagaga

SEQ ID NO: 170783 - DNA, 25 bp, Artificial
  probe
  misc_feature (1)..(25): SEQ ID NO: 3925; WAN024DTO_at; Start 35; Stop 59
taccgatggcaatagcagtttctcc

SEQ ID NO: 170784 - DNA, 25 bp, Artificial
  probe
  misc_feature (1)..(25): SEQ ID NO: 3925; WAN024DTO_at; Start 30; Stop 54
cgggctaccgatggcaatagcagtt

SEQ ID NO: 170785 - DNA, 25 bp, Artificial
  probe
  misc_feature (1)..(25): SEQ ID NO: 3925; WAN024DTO_at; Start 172; Stop 196
actttagtcccatctgacaatcgaa

SEQ ID NO: 170786 - DNA, 25 bp, Artificial
  probe
  misc_feature (1)..(25): SEQ ID NO: 3925; WAN024DTO_at; Start 69; Stop 93
cttactagaatcaccaaactcagct

SEQ ID NO: 170787 - DNA, 25 bp, Artificial
  probe
  misc_feature (1)..(25): SEQ ID NO: 3925; WAN024DTO_at; Start 27; Stop 51
taacgggctaccgatggcaatagca

SEQ ID NO: 170788 - DNA, 25 bp, Artificial
  probe
  misc_feature (1)..(25): SEQ ID NO: 3925; WAN024DTO_at; Start 145; Stop 169
gtgtcagctccgacaatttctccag

SEQ ID NO: 170789 - DNA, 25 bp, Artificial
  probe
  misc_feature (1)..(25): SEQ ID NO: 3925; WAN024DTO_at; Start 13; Stop 37
gcatattcagaacctaacgggctac

SEQ ID NO: 170790 - DNA, 25 bp, Artificial
  probe
  misc_feature (1)..(25): SEQ ID NO: 3925; WAN024DTO_at; Start 167; Stop 191
caggtactttagtcccatctgacaa

SEQ ID NO: 170791 - DNA, 25 bp, Artificial
  probe
  misc_feature (1)..(25): SEQ ID NO: 3925; WAN024DTO_at; Start 10; Stop 34
tttgcatattcagaacctaacgggc

SEQ ID NO: 170792 - DNA, 25 bp, Artificial
  probe
  misc_feature (1)..(25): SEQ ID NO: 3925; WAN024DTO_at; Start 137; Stop 161
cagagaaagtgtcagctccgacaat

SEQ ID NO: 170793 - DNA, 25 bp, Artificial
  probe
  misc_feature (1)..(25): SEQ ID NO: 5514; WAN024DTP_at; Start 239; Stop 263
tacttgaggtaattccgataacctg

SEQ ID NO: 170794 - DNA, 25 bp, Artificial
  probe
  misc_feature (1)..(25): SEQ ID NO: 5514; WAN024DTP_at; Start 246; Stop 270
ggtaattccgataacctgcccttga

SEQ ID NO: 170795 - DNA, 25 bp, Artificial
  probe
  misc_feature (1)..(25): SEQ ID NO: 5514; WAN024DTP_at; Start 21; Stop 45
taccgaacgaacaattacaccagat

SEQ ID NO: 170796 - DNA, 25 bp, Artificial
  probe
  misc_feature (1)..(25): SEQ ID NO: 5514; WAN024DTP_at; Start 84; Stop 108
tgtactcacattagataaattaacc

SEQ ID NO: 170797 - DNA, 25 bp, Artificial
  probe
  misc_feature (1)..(25): SEQ ID NO: 5514; WAN024DTP_at; Start 74; Stop 98
tgatgtcgcttgtactcacattaga

SEQ ID NO: 170798 - DNA, 25 bp, Artificial
  probe
  misc_feature (1)..(25): SEQ ID NO: 5514; WAN024DTP_at; Start 223; Stop 247
ccatttgtagcaattttacttgagg

SEQ ID NO: 170799 - DNA, 25 bp, Artificial
  probe
  misc_feature (1)..(25): SEQ ID NO: 5514; WAN024DTP_at; Start 64; Stop 88
ttgagtcttctgatgtcgcttgtac

SEQ ID NO: 170800 - DNA, 25 bp, Artificial
  probe
  misc_feature (1)..(25): SEQ ID NO: 5514; WAN024DTP_at; Start 5; Stop 29
caggcatattactttgtaccgaacg

SEQ ID NO: 170801 - DNA, 25 bp, Artificial
  probe
  misc_feature (1)..(25): SEQ ID NO: 5514; WAN024DTP_at; Start 183; Stop 207
tgcaggaattgcgaaaccaagacct

SEQ ID NO: 170802 - DNA, 25 bp, Artificial
  probe
  misc_feature (1)..(25): SEQ ID NO: 5514; WAN024DTP_at; Start 121; Stop 145
aaagctggacgcgtcacttttccgt

SEQ ID NO: 170803 - DNA, 25 bp, Artificial
  probe
  misc_feature (1)..(25): SEQ ID NO: 5514; WAN024DTP_at; Start 78; Stop 102
gtcgcttgtactcacattagataaa

SEQ ID NO: 170804 - DNA, 25 bp, Artificial
  probe
  misc_feature (1)..(25): SEQ ID NO: 5514; WAN024DTP_at; Start 67; Stop 91
agtcttctgatgtcgcttgtactca

SEQ ID NO: 170805 - DNA, 25 bp, Artificial
  probe
  misc_feature (1)..(25): SEQ ID NO: 5514; WAN024DTP_at; Start 112; Stop 136
tggattcccaaagctggacgcgtca

SEQ ID NO: 170806 - DNA, 25 bp, Artificial
  probe
  misc_feature (1)..(25): SEQ ID NO: 5514; WAN024DTP_at; Start 24; Stop 48
cgaacgaacaattacaccagatgta

SEQ ID NO: 170807 - DNA, 25 bp, Artificial
  probe
  misc_feature (1)..(25): SEQ ID NO: 5514; WAN024DTP_at; Start 232; Stop 256
gcaattttacttgaggtaattccga

SEQ ID NO: 170808 - DNA, 25 bp, Artificial
  probe
  misc_feature (1)..(25): SEQ ID NO: 5514; WAN024DTP_at; Start 164; Stop 188
taatattgatagcatcatttgcagg

SEQ ID NO: 170809 - DNA, 25 bp, Artificial
  probe
  misc_feature (1)..(25): SEQ ID NO: 5514; WAN024DTP_at; Start 211; Stop 235
acagatgttcctccatttgtagcaa

SEQ ID NO: 170810 - DNA, 25 bp, Artificial
  probe
  misc_feature (1)..(25): SEQ ID NO: 5514; WAN024DTP_at; Start 36; Stop 60
tacaccagatgtaacattacttgga

SEQ ID NO: 170811 - DNA, 25 bp, Artificial
  probe
  misc_feature (1)..(25): SEQ ID NO: 5514; WAN024DTP_at; Start 171; Stop 195
gatagcatcatttgcaggaattgcg

SEQ ID NO: 170812 - DNA, 25 bp, Artificial
  probe
  misc_feature (1)..(25): SEQ ID NO: 5514; WAN024DTP_at; Start 187; Stop 211
ggaattgcgaaaccaagaccttcta

SEQ ID NO: 170813 - DNA, 25 bp, Artificial
  probe
  misc_feature (1)..(25): SEQ ID NO: 5514; WAN024DTP_at; Start 193; Stop 217
gcgaaaccaagaccttctacagatg

SEQ ID NO: 170814 - DNA, 25 bp, Artificial
  probe
  misc_feature (1)..(25): SEQ ID NO: 5514; WAN024DTP_at; Start 123; Stop 147
agctggacgcgtcacttttccgttt

SEQ ID NO: 170815 - DNA, 25 bp, Artificial
  probe
  misc_feature (1)..(25): SEQ ID NO: 5514; WAN024DTP_at; Start 59; Stop 83
gaatattgagtcttctgatgtcgct

SEQ ID NO: 170816 - DNA, 25 bp, Artificial
  probe
  misc_feature (1)..(25): SEQ ID NO: 5514; WAN024DTP_at; Start 97; Stop 121
gataaattaaccatctggattccca

SEQ ID NO: 170817 - DNA, 25 bp, Artificial
  probe
  misc_feature (1)..(25): SEQ ID NO: 5514; WAN024DTP_at; Start 114; Stop 138
gattcccaaagctggacgcgtcact

SEQ ID NO: 170818 - DNA, 25 bp, Artificial
  probe
  misc_feature (1)..(25): SEQ ID NO: 5514; WAN024DTP_at; Start 179; Stop 203
catttgcaggaattgcgaaaccaag

SEQ ID NO: 170819 - DNA, 25 bp, Artificial
  probe
  misc_feature (1)..(25): SEQ ID NO: 5514; WAN024DTP_at; Start 201; Stop 225
aagaccttctacagatgttcctcca

SEQ ID NO: 170820 - DNA, 25 bp, Artificial
  probe
  misc_feature (1)..(25): SEQ ID NO: 5514; WAN024DTP_at; Start 50; Stop 74
cattacttggaatattgagtcttct

SEQ ID NO: 170821 - DNA, 25 bp, Artificial
  probe
  misc_feature (1)..(25): SEQ ID NO: 5514; WAN024DTP_at; Start 148; Stop 172
ttttctaactgttcaataatattga

SEQ ID NO: 170822 - DNA, 25 bp, Artificial
  probe
  misc_feature (1)..(25): SEQ ID NO: 5514; WAN024DTP_at; Start 108; Stop 132
catctggattcccaaagctggacgc

SEQ ID NO: 170823 - DNA, 25 bp, Artificial
  probe
  misc_feature (1)..(25): SEQ ID NO: 5514; WAN024DTP_at; Start 176; Stop 200
catcatttgcaggaattgcgaaacc

SEQ ID NO: 170824 - DNA, 25 bp, Artificial
  probe
  misc_feature (1)..(25): SEQ ID NO: 5514; WAN024DTP_at; Start 9; Stop 33
catattactttgtaccgaacgaaca

SEQ ID NO: 170825 - DNA, 25 bp, Artificial
  probe
  misc_feature (1)..(25): SEQ ID NO: 5514; WAN024DTP_at; Start 1; Stop 25
ttggcaggcatattactttgtaccg

SEQ ID NO: 170826 - DNA, 25 bp, Artificial
  probe
  misc_feature (1)..(25): SEQ ID NO: 5514; WAN024DTP_at; Start 104; Stop 128
taaccatctggattcccaaagctgg

SEQ ID NO: 170827 - DNA, 25 bp, Artificial
  probe
  misc_feature (1)..(25): SEQ ID NO: 2288; WAN024DTQ_at; Start 66; Stop 90
cgtcattagcttttttagtggagcc

SEQ ID NO: 170828 - DNA, 25 bp, Artificial
  probe
  misc_feature (1)..(25): SEQ ID NO: 2288; WAN024DTQ_at; Start 918; Stop 942
tacaagcgacatcagaagactcaat

SEQ ID NO: 170829 - DNA, 25 bp, Artificial
  probe
  misc_feature (1)..(25): SEQ ID NO: 2288; WAN024DTQ_at; Start 735; Stop 759
tcaagggcaggttatcggaattacc

SEQ ID NO: 170830 - DNA, 25 bp, Artificial
  probe
  misc_feature (1)..(25): SEQ ID NO: 2288; WAN024DTQ_at; Start 712; Stop 736
tctggcggcccactgatcaatattc

SEQ ID NO: 170831 - DNA, 25 bp, Artificial
  probe
  misc_feature (1)..(25): SEQ ID NO: 2288; WAN024DTQ_at; Start 569; Stop 593
gcccgttaggttctgaatatgcaaa

SEQ ID NO: 170832 - DNA, 25 bp, Artificial
  probe
  misc_feature (1)..(25): SEQ ID NO: 2288; WAN024DTQ_at; Start 1006; Stop 1030
ggtcaccttgaaaaatacgatgtaa

SEQ ID NO: 170833 - DNA, 25 bp, Artificial
  probe
  misc_feature (1)..(25): SEQ ID NO: 2288; WAN024DTQ_at; Start 770; Stop 794
ttgctacaaatggaggaacatctgt

SEQ ID NO: 170834 - DNA, 25 bp, Artificial
  probe
  misc_feature (1)..(25): SEQ ID NO: 2288; WAN024DTQ_at; Start 696; Stop 720
tattaacccaggtaactctggcggc

SEQ ID NO: 170835 - DNA, 25 bp, Artificial
  probe
  misc_feature (1)..(25): SEQ ID NO: 2288; WAN024DTQ_at; Start 413; Stop 437
tgtcagatgggactaaagtacctgg

SEQ ID NO: 170836 - DNA, 25 bp, Artificial
  probe
  misc_feature (1)..(25): SEQ ID NO: 2288; WAN024DTQ_at; Start 180; Stop 204
gaacgaaaattcaacaacacaggct

SEQ ID NO: 170837 - DNA, 25 bp, Artificial
  probe
  misc_feature (1)..(25): SEQ ID NO: 2288; WAN024DTQ_at; Start 348; Stop 372
taaagaagcttacatcgtcaccaac

SEQ ID NO: 170838 - DNA, 25 bp, Artificial
  probe
  misc_feature (1)..(25): SEQ ID NO: 2288; WAN024DTQ_at; Start 604; Stop 628
caaggtatcgtatccagtctcaata

SEQ ID NO: 170839 - DNA, 25 bp, Artificial
  probe
  misc_feature (1)..(25): SEQ ID NO: 2288; WAN024DTQ_at; Start 652; Stop 676
gatggacaagctatttctacaaaag

SEQ ID NO: 170840 - DNA, 25 bp, Artificial
  probe
  misc_feature (1)..(25): SEQ ID NO: 2288; WAN024DTQ_at; Start 555; Stop 579
tattgccatcggtagcccgttaggt

SEQ ID NO: 170841 - DNA, 25 bp, Artificial
  probe
  misc_feature (1)..(25): SEQ ID NO: 2288; WAN024DTQ_at; Start 589; Stop 613
gcaaatactgtcactcaaggtatcg

SEQ ID NO: 170842 - DNA, 25 bp, Artificial
  probe
  misc_feature (1)..(25): SEQ ID NO: 2288; WAN024DTQ_at; Start 299; Stop 323
ctcagcgaatctctagtgaaggatc

SEQ ID NO: 170843 - DNA, 25 bp, Artificial
  probe
  misc_feature (1)..(25): SEQ ID NO: 2288; WAN024DTQ_at; Start 858; Stop 882
aaacggaaaagtgacgcgtccagct

SEQ ID NO: 170844 - DNA, 25 bp, Artificial
  probe
  misc_feature (1)..(25): SEQ ID NO: 2288; WAN024DTQ_at; Start 993; Stop 1017
tatgcctgccaatggtcaccttgaa

SEQ ID NO: 170845 - DNA, 25 bp, Artificial
  probe
  misc_feature (1)..(25): SEQ ID NO: 2288; WAN024DTQ_at; Start 244; Stop 268
tattcggcaaacagacaaaatagcg

SEQ ID NO: 170846 - DNA, 25 bp, Artificial
  probe
  misc_feature (1)..(25): SEQ ID NO: 2288; WAN024DTQ_at; Start 503; Stop 527
caacagtagctgagtttggtgattc

SEQ ID NO: 170847 - DNA, 25 bp, Artificial
  probe
  misc_feature (1)..(25): SEQ ID NO: 2288; WAN024DTQ_at; Start 451; Stop 475
gctgacactttctctgatattgctg

SEQ ID NO: 170848 - DNA, 25 bp, Artificial
  probe
  misc_feature (1)..(25): SEQ ID NO: 2288; WAN024DTQ_at; Start 805; Stop 829
ggtttcgcaattcctgcaaatgatg

SEQ ID NO: 170849 - DNA, 25 bp, Artificial
  probe
  misc_feature (1)..(25): SEQ ID NO: 2288; WAN024DTQ_at; Start 485; Stop 509
tctcttcagaaaaagtgacaacagt

SEQ ID NO: 170850 - DNA, 25 bp, Artificial
  probe
  misc_feature (1)..(25): SEQ ID NO: 2288; WAN024DTQ_at; Start 1087; Stop 1111
tacaaccattctatcggagacacca

SEQ ID NO: 170851 - DNA, 25 bp, Artificial
  probe
  misc_feature (1)..(25): SEQ ID NO: 2288; WAN024DTQ_at; Start 1102; Stop 1126
ggagacaccattaagataacctact

SEQ ID NO: 170852 - DNA, 25 bp, Artificial
  probe
  misc_feature (1)..(25): SEQ ID NO: 2288; WAN024DTQ_at; Start 873; Stop 897
gcgtccagctttgggaatccagatg

SEQ ID NO: 170853 - DNA, 25 bp, Artificial
  probe
  misc_feature (1)..(25): SEQ ID NO: 2288; WAN024DTQ_at; Start 162; Stop 186
tacacaaactgcctataagaacgaa

SEQ ID NO: 170854 - DNA, 25 bp, Artificial
  probe
  misc_feature (1)..(25): SEQ ID NO: 2288; WAN024DTQ_at; Start 542; Stop 566
taggagaaactgctattgccatcgg

SEQ ID NO: 170855 - DNA, 25 bp, Artificial
  probe
  misc_feature (1)..(25): SEQ ID NO: 2288; WAN024DTQ_at; Start 432; Stop 456
acctggagaaattgtcggagctgac

SEQ ID NO: 170856 - DNA, 25 bp, Artificial
  probe
  misc_feature (1)..(25): SEQ ID NO: 2288; WAN024DTQ_at; Start 1051; Stop 1075
gagattgcttcatcaacagacttac

SEQ ID NO: 170857 - DNA, 25 bp, Artificial
  probe
  misc_feature (1)..(25): SEQ ID NO: 2288; WAN024DTQ_at; Start 978; Stop 1002
ttcggtacaaagtaatatgcctgcc

SEQ ID NO: 170858 - DNA, 25 bp, Artificial
  probe
  misc_feature (1)..(25): SEQ ID NO: 2288; WAN024DTQ_at; Start 788; Stop 812
catctgtagaaggtcttggtttcgc

SEQ ID NO: 170859 - DNA, 25 bp, Artificial
  probe
  misc_feature (1)..(25): SEQ ID NO: 2288; WAN024DTQ_at; Start 283; Stop 307
gatactgacacagattctcagcgaa

SEQ ID NO: 170860 - DNA, 25 bp, Artificial
  probe
  misc_feature (1)..(25): SEQ ID NO: 2288; WAN024DTQ_at; Start 903; Stop 927
tttatctaatgtgagtacaagcgac

SEQ ID NO: 170861 - DNA, 25 bp, Artificial
  probe
  misc_feature (1)..(25): SEQ ID NO: 2751; WAN024DTR_at; Start 1152; Stop 1176
gactccttcaggagatctatttgcc

SEQ ID NO: 170862 - DNA, 25 bp, Artificial
  probe
  misc_feature (1)..(25): SEQ ID NO: 2751; WAN024DTR_at; Start 1136; Stop 1160
catgtaaaatgacgatgactccttc

SEQ ID NO: 170863 - DNA, 25 bp, Artificial
  probe
  misc_feature (1)..(25): SEQ ID NO: 2751; WAN024DTR_at; Start 1267; Stop 1291
acagagatggaaggcagtacattta

SEQ ID NO: 170864 - DNA, 25 bp, Artificial
  probe
  misc_feature (1)..(25): SEQ ID NO: 2751; WAN024DTR_at; Start 1094; Stop 1118
ttattaagatggaaactgaaacagt

SEQ ID NO: 170865 - DNA, 25 bp, Artificial
  probe
  misc_feature (1)..(25): SEQ ID NO: 2751; WAN024DTR_at; Start 633; Stop 657
tcaaatggagaaagagattgctttg

SEQ ID NO: 170866 - DNA, 25 bp, Artificial
  probe
  misc_feature (1)..(25): SEQ ID NO: 2751; WAN024DTR_at; Start 853; Stop 877
cgttcagataagtacacttactttg

SEQ ID NO: 170867 - DNA, 25 bp, Artificial
  probe
  misc_feature (1)..(25): SEQ ID NO: 2751; WAN024DTR_at; Start 270; Stop 294
actactatctcttttatatgagagc

SEQ ID NO: 170868 - DNA, 25 bp, Artificial
  probe
  misc_feature (1)..(25): SEQ ID NO: 2751; WAN024DTR_at; Start 1084; Stop 1108
gaagtagcagttattaagatggaaa

SEQ ID NO: 170869 - DNA, 25 bp, Artificial
  probe
  misc_feature (1)..(25): SEQ ID NO: 2751; WAN024DTR_at; Start 938; Stop 962
ctcgaaataatggtgtagagtttac

SEQ ID NO: 170870 - DNA, 25 bp, Artificial
  probe
  misc_feature (1)..(25): SEQ ID NO: 2751; WAN024DTR_at; Start 945; Stop 969
taatggtgtagagtttacactggaa

SEQ ID NO: 170871 - DNA, 25 bp, Artificial
  probe
  misc_feature (1)..(25): SEQ ID NO: 2751; WAN024DTR_at; Start 1125; Stop 1149
gattcagaattcatgtaaaatgacg

SEQ ID NO: 170872 - DNA, 25 bp, Artificial
  probe
  misc_feature (1)..(25): SEQ ID NO: 2751; WAN024DTR_at; Start 1154; Stop 1178
ctccttcaggagatctatttgcctt

SEQ ID NO: 170873 - DNA, 25 bp, Artificial
  probe
  misc_feature (1)..(25): SEQ ID NO: 2751; WAN024DTR_at; Start 1140; Stop 1164
taaaatgacgatgactccttcagga

SEQ ID NO: 170874 - DNA, 25 bp, Artificial
  probe
  misc_feature (1)..(25): SEQ ID NO: 2751; WAN024DTR_at; Start 1272; Stop 1296
gatggaaggcagtacatttagacaa

SEQ ID NO: 170875 - DNA, 25 bp, Artificial
  probe
  misc_feature (1)..(25): SEQ ID NO: 2751; WAN024DTR_at; Start 523; Stop 547
tcagatatggtaagtacgattaaac

SEQ ID NO: 170876 - DNA, 25 bp, Artificial
  probe
  misc_feature (1)..(25): SEQ ID NO: 2751; WAN024DTR_at; Start 1142; Stop 1166
aaatgacgatgactccttcaggaga

SEQ ID NO: 170877 - DNA, 25 bp, Artificial
  probe
  misc_feature (1)..(25): SEQ ID NO: 2751; WAN024DTR_at; Start 1146; Stop 1170
gacgatgactccttcaggagatcta

SEQ ID NO: 170878 - DNA, 25 bp, Artificial
  probe
  misc_feature (1)..(25): SEQ ID NO: 2751; WAN024DTR_at; Start 934; Stop 958
tatgctcgaaataatggtgtagagt

SEQ ID NO: 170879 - DNA, 25 bp, Artificial
  probe
  misc_feature (1)..(25): SEQ ID NO: 2751; WAN024DTR_at; Start 864; Stop 888
gtacacttactttgatttgaacaac

SEQ ID NO: 170880 - DNA, 25 bp, Artificial
  probe
  misc_feature (1)..(25): SEQ ID NO: 2751; WAN024DTR_at; Start 1221; Stop 1245
taatgtgaaagaactactagataag

SEQ ID NO: 170881 - DNA, 25 bp, Artificial
  probe
  misc_feature (1)..(25): SEQ ID NO: 2751; WAN024DTR_at; Start 955; Stop 979
gagtttacactggaagtaaaagata

SEQ ID NO: 170882 - DNA, 25 bp, Artificial
  probe
  misc_feature (1)..(25): SEQ ID NO: 2751; WAN024DTR_at; Start 1078; Stop 1102
cagatggaagtagcagttattaaga

SEQ ID NO: 170883 - DNA, 25 bp, Artificial
  probe
  misc_feature (1)..(25): SEQ ID NO: 2751; WAN024DTR_at; Start 637; Stop 661
atggagaaagagattgctttgaagc

SEQ ID NO: 170884 - DNA, 25 bp, Artificial
  probe
  misc_feature (1)..(25): SEQ ID NO: 2751; WAN024DTR_at; Start 1227; Stop 1251
gaaagaactactagataagtacaac

SEQ ID NO: 170885 - DNA, 25 bp, Artificial
  probe
  misc_feature (1)..(25): SEQ ID NO: 2751; WAN024DTR_at; Start 663; Stop 687
gaagaaatttgaacagaaacattta

SEQ ID NO: 170886 - DNA, 25 bp, Artificial
  probe
  misc_feature (1)..(25): SEQ ID NO: 2751; WAN024DTR_at; Start 592; Stop 616
tctctccttttgaccttctttgcaa

SEQ ID NO: 170887 - DNA, 25 bp, Artificial
  probe
  misc_feature (1)..(25): SEQ ID NO: 2751; WAN024DTR_at; Start 1280; Stop 1304
gcagtacatttagacaaatcattag

SEQ ID NO: 170888 - DNA, 25 bp, Artificial
  probe
  misc_feature (1)..(25): SEQ ID NO: 2751; WAN024DTR_at; Start 597; Stop 621
ccttttgaccttctttgcaatgaat

SEQ ID NO: 170889 - DNA, 25 bp, Artificial
  probe
  misc_feature (1)..(25): SEQ ID NO: 2751; WAN024DTR_at; Start 533; Stop 557
taagtacgattaaacatttgaatag

SEQ ID NO: 170890 - DNA, 25 bp, Artificial
  probe
  misc_feature (1)..(25): SEQ ID NO: 2751; WAN024DTR_at; Start 1275; Stop 1299
ggaaggcagtacatttagacaaatc

SEQ ID NO: 170891 - DNA, 25 bp, Artificial
  probe
  misc_feature (1)..(25): SEQ ID NO: 2751; WAN024DTR_at; Start 545; Stop 569
aacatttgaatagttttggaagtat

SEQ ID NO: 170892 - DNA, 25 bp, Artificial
  probe
  misc_feature (1)..(25): SEQ ID NO: 2751; WAN024DTR_at; Start 871; Stop 895
tactttgatttgaacaacatagaag

SEQ ID NO: 170893 - DNA, 25 bp, Artificial
  probe
  misc_feature (1)..(25): SEQ ID NO: 2751; WAN024DTR_at; Start 1213; Stop 1237
ggattaaataatgtgaaagaactac

SEQ ID NO: 170894 - DNA, 25 bp, Artificial
  probe
  misc_feature (1)..(25): SEQ ID NO: 2751; WAN024DTR_at; Start 1290; Stop 1314
tagacaaatcattagatttaagagg

SEQ ID NO: 170895 - DNA, 25 bp, Artificial
  probe
  misc_feature (1)..(25): SEQ ID NO: 5513; WAN024DTS_at; Start 108; Stop 132
tatggtgaccactttagcaacgtgg

SEQ ID NO: 170896 - DNA, 25 bp, Artificial
  probe
  misc_feature (1)..(25): SEQ ID NO: 5513; WAN024DTS_at; Start 83; Stop 107
tcctaacaagtttagtattcatgtc

SEQ ID NO: 170897 - DNA, 25 bp, Artificial
  probe
  misc_feature (1)..(25): SEQ ID NO: 5513; WAN024DTS_at; Start 184; Stop 208
gcatcaagtgcaggtacttatccac

SEQ ID NO: 170898 - DNA, 25 bp, Artificial
  probe
  misc_feature (1)..(25): SEQ ID NO: 5513; WAN024DTS_at; Start 137; Stop 161
gccgtataggagcttttttctcact

SEQ ID NO: 170899 - DNA, 25 bp, Artificial
  probe
  misc_feature (1)..(25): SEQ ID NO: 5513; WAN024DTS_at; Start 251; Stop 275
taccaatgagctattcagtttcggg

SEQ ID NO: 170900 - DNA, 25 bp, Artificial
  probe
  misc_feature (1)..(25): SEQ ID NO: 5513; WAN024DTS_at; Start 196; Stop 220
ggtacttatccacttgctttgacaa

SEQ ID NO: 170901 - DNA, 25 bp, Artificial
  probe
  misc_feature (1)..(25): SEQ ID NO: 5513; WAN024DTS_at; Start 216; Stop 240
gacaaatgatttctttagatctatt

SEQ ID NO: 170902 - DNA, 25 bp, Artificial
  probe
  misc_feature (1)..(25): SEQ ID NO: 5513; WAN024DTS_at; Start 176; Stop 200
tacagttagcatcaagtgcaggtac

SEQ ID NO: 170903 - DNA, 25 bp, Artificial
  probe
  misc_feature (1)..(25): SEQ ID NO: 5513; WAN024DTS_at; Start 73; Stop 97
attctcatcatcctaacaagtttag

SEQ ID NO: 170904 - DNA, 25 bp, Artificial
  probe
  misc_feature (1)..(25): SEQ ID NO: 5513; WAN024DTS_at; Start 231; Stop 255
tagatctattaatccctggttacca

SEQ ID NO: 170905 - DNA, 25 bp, Artificial
  probe
  misc_feature (1)..(25): SEQ ID NO: 5513; WAN024DTS_at; Start 17; Stop 41
tatatggaggagttcagcttattgg

SEQ ID NO: 170906 - DNA, 25 bp, Artificial
  probe
  misc_feature (1)..(25): SEQ ID NO: 5513; WAN024DTS_at; Start 280; Stop 304
cgacaaacaatctctatcaacaagt

SEQ ID NO: 170907 - DNA, 25 bp, Artificial
  probe
  misc_feature (1)..(25): SEQ ID NO: 5513; WAN024DTS_at; Start 47; Stop 71
ctgctaatcatgagatgagaatatt

SEQ ID NO: 170908 - DNA, 25 bp, Artificial
  probe
  misc_feature (1)..(25): SEQ ID NO: 5513; WAN024DTS_at; Start 265; Stop 289
tcagtttcgggattacgacaaacaa

SEQ ID NO: 170909 - DNA, 25 bp, Artificial
  probe
  misc_feature (1)..(25): SEQ ID NO: 5513; WAN024DTS_at; Start 145; Stop 169
ggagcttttttctcacttattttgc

SEQ ID NO: 170910 - DNA, 25 bp, Artificial
  probe
  misc_feature (1)..(25): SEQ ID NO: 5513; WAN024DTS_at; Start 23; Stop 47
gaggagttcagcttattggtttaac

SEQ ID NO: 170911 - DNA, 25 bp, Artificial
  probe
  misc_feature (1)..(25): SEQ ID NO: 5513; WAN024DTS_at; Start 122; Stop 146
tagcaacgtggaatagccgtatagg

SEQ ID NO: 170912 - DNA, 25 bp, Artificial
  probe
  misc_feature (1)..(25): SEQ ID NO: 5513; WAN024DTS_at; Start 270; Stop 294
ttcgggattacgacaaacaatctct

SEQ ID NO: 170913 - DNA, 25 bp, Artificial
  probe
  misc_feature (1)..(25): SEQ ID NO: 5513; WAN024DTS_at; Start 291; Stop 315
ctctatcaacaagtcattttcctag

SEQ ID NO: 170914 - DNA, 25 bp, Artificial
  probe
  misc_feature (1)..(25): SEQ ID NO: 5513; WAN024DTS_at; Start 11; Stop 35
ttttggtatatggaggagttcagct

SEQ ID NO: 170915 - DNA, 25 bp, Artificial
  probe
  misc_feature (1)..(25): SEQ ID NO: 5513; WAN024DTS_at; Start 117; Stop 141
cactttagcaacgtggaatagccgt

SEQ ID NO: 170916 - DNA, 25 bp, Artificial
  probe
  misc_feature (1)..(25): SEQ ID NO: 5513; WAN024DTS_at; Start 65; Stop 89
gaatatttattctcatcatcctaac

SEQ ID NO: 170917 - DNA, 25 bp, Artificial
  probe
  misc_feature (1)..(25): SEQ ID NO: 5513; WAN024DTS_at; Start 258; Stop 282
gagctattcagtttcgggattacga

SEQ ID NO: 170918 - DNA, 25 bp, Artificial
  probe
  misc_feature (1)..(25): SEQ ID NO: 5513; WAN024DTS_at; Start 156; Stop 180
ctcacttattttgcttttactacag

SEQ ID NO: 170919 - DNA, 25 bp, Artificial
  probe
  misc_feature (1)..(25): SEQ ID NO: 5513; WAN024DTS_at; Start 173; Stop 197
tactacagttagcatcaagtgcagg

SEQ ID NO: 170920 - DNA, 25 bp, Artificial
  probe
  misc_feature (1)..(25): SEQ ID NO: 5513; WAN024DTS_at; Start 128; Stop 152
cgtggaatagccgtataggagcttt

SEQ ID NO: 170921 - DNA, 25 bp, Artificial
  probe
  misc_feature (1)..(25): SEQ ID NO: 5513; WAN024DTS_at; Start 39; Stop 63
tggtttaactgctaatcatgagatg

SEQ ID NO: 170922 - DNA, 25 bp, Artificial
  probe
  misc_feature (1)..(25): SEQ ID NO: 5513; WAN024DTS_at; Start 95; Stop 119
tagtattcatgtctatggtgaccac

SEQ ID NO: 170923 - DNA, 25 bp, Artificial
  probe
  misc_feature (1)..(25): SEQ ID NO: 5513; WAN024DTS_at; Start 31; Stop 55
cagcttattggtttaactgctaatc

SEQ ID NO: 170924 - DNA, 25 bp, Artificial
  probe
  misc_feature (1)..(25): SEQ ID NO: 5513; WAN024DTS_at; Start 204; Stop 228
tccacttgctttgacaaatgatttc

SEQ ID NO: 170925 - DNA, 25 bp, Artificial
  probe
  misc_feature (1)..(25): SEQ ID NO: 5513; WAN024DTS_at; Start 237; Stop 261
tattaatccctggttaccaatgagc

SEQ ID NO: 170926 - DNA, 25 bp, Artificial
  probe
  misc_feature (1)..(25): SEQ ID NO: 5513; WAN024DTS_at; Start 1; Stop 25
ttggcaggaattttggtatatggag

SEQ ID NO: 170927 - DNA, 25 bp, Artificial
  probe
  misc_feature (1)..(25): SEQ ID NO: 5513; WAN024DTS_at; Start 244; Stop 268
ccctggttaccaatgagctattcag

SEQ ID NO: 170928 - DNA, 25 bp, Artificial
  probe
  misc_feature (1)..(25): SEQ ID NO: 5513; WAN024DTS_at; Start 125; Stop 149
caacgtggaatagccgtataggagc

SEQ ID NO: 170929 - DNA, 25 bp, Artificial
  probe
  misc_feature (1)..(25): SEQ ID NO: 957; WAN024DTT_at; Start 806; Stop 830
ggtatcttgatctctttgctaagca

SEQ ID NO: 170930 - DNA, 25 bp, Artificial
  probe
  misc_feature (1)..(25): SEQ ID NO: 957; WAN024DTT_at; Start 2210; Stop 2234
tagataccaaaactttcaccgaggc

SEQ ID NO: 170931 - DNA, 25 bp, Artificial
  probe
  misc_feature (1)..(25): SEQ ID NO: 957; WAN024DTT_at; Start 1681; Stop 1705
gacagtcctattgataagtatggct

SEQ ID NO: 170932 - DNA, 25 bp, Artificial
  probe
  misc_feature (1)..(25): SEQ ID NO: 957; WAN024DTT_at; Start 2145; Stop 2169
caatatcaatgttagtttccctgga

SEQ ID NO: 170933 - DNA, 25 bp, Artificial
  probe
  misc_feature (1)..(25): SEQ ID NO: 957; WAN024DTT_at; Start 1402; Stop 1426
cgaagtgcttatagtcgagatatcc

SEQ ID NO: 170934 - DNA, 25 bp, Artificial
  probe
  misc_feature (1)..(25): SEQ ID NO: 957; WAN024DTT_at; Start 115; Stop 139
cctctattaggagatggctttcatc

SEQ ID NO: 170935 - DNA, 25 bp, Artificial
  probe
  misc_feature (1)..(25): SEQ ID NO: 957; WAN024DTT_at; Start 738; Stop 762
tctatttgatttacagacacatggg

SEQ ID NO: 170936 - DNA, 25 bp, Artificial
  probe
  misc_feature (1)..(25): SEQ ID NO: 957; WAN024DTT_at; Start 1349; Stop 1373
taaatgcttcatctcaaatggacgg

SEQ ID NO: 170937 - DNA, 25 bp, Artificial
  probe
  misc_feature (1)..(25): SEQ ID NO: 957; WAN024DTT_at; Start 90; Stop 114
tatctactggaatagcgacaactct

SEQ ID NO: 170938 - DNA, 25 bp, Artificial
  probe
  misc_feature (1)..(25): SEQ ID NO: 957; WAN024DTT_at; Start 1977; Stop 2001
tgaagttccagaaaacagccaagtt

SEQ ID NO: 170939 - DNA, 25 bp, Artificial
  probe
  misc_feature (1)..(25): SEQ ID NO: 957; WAN024DTT_at; Start 160; Stop 184
gccttacgaaatatcctacatggaa

SEQ ID NO: 170940 - DNA, 25 bp, Artificial
  probe
  misc_feature (1)..(25): SEQ ID NO: 957; WAN024DTT_at; Start 521; Stop 545
tactgataactgaaaagaaactcct

SEQ ID NO: 170941 - DNA, 25 bp, Artificial
  probe
  misc_feature (1)..(25): SEQ ID NO: 957; WAN024DTT_at; Start 2463; Stop 2487
caatggttttattactggagcaatc

SEQ ID NO: 170942 - DNA, 25 bp, Artificial
  probe
  misc_feature (1)..(25): SEQ ID NO: 957; WAN024DTT_at; Start 427; Stop 451
tatgctctgatgagtttcactgtca

SEQ ID NO: 170943 - DNA, 25 bp, Artificial
  probe
  misc_feature (1)..(25): SEQ ID NO: 957; WAN024DTT_at; Start 2529; Stop 2553
cagacgaaagtcatctaaggcataa

SEQ ID NO: 170944 - DNA, 25 bp, Artificial
  probe
  misc_feature (1)..(25): SEQ ID NO: 957; WAN024DTT_at; Start 2383; Stop 2407
gaaattaaacaagctcaaactggat

SEQ ID NO: 170945 - DNA, 25 bp, Artificial
  probe
  misc_feature (1)..(25): SEQ ID NO: 957; WAN024DTT_at; Start 1942; Stop 1966
tcttcaaatgaagatgcagcaatcc

SEQ ID NO: 170946 - DNA, 25 bp, Artificial
  probe
  misc_feature (1)..(25): SEQ ID NO: 957; WAN024DTT_at; Start 2283; Stop 2307
caaggtttttgctacatatgatgtc

SEQ ID NO: 170947 - DNA, 25 bp, Artificial
  probe
  misc_feature (1)..(25): SEQ ID NO: 957; WAN024DTT_at; Start 788; Stop 812
ttcaaactgaaagtagctggtatct

SEQ ID NO: 170948 - DNA, 25 bp, Artificial
  probe
  misc_feature (1)..(25): SEQ ID NO: 957; WAN024DTT_at; Start 1659; Stop 1683
tggtatccagtacaatatctcagac

SEQ ID NO: 170949 - DNA, 25 bp, Artificial
  probe
  misc_feature (1)..(25): SEQ ID NO: 957; WAN024DTT_at; Start 199; Stop 223
tacacctttacaagtggtctagggc

SEQ ID NO: 170950 - DNA, 25 bp, Artificial
  probe
  misc_feature (1)..(25): SEQ ID NO: 957; WAN024DTT_at; Start 1603; Stop 1627
gggactaatctcaatctccgatatg

SEQ ID NO: 170951 - DNA, 25 bp, Artificial
  probe
  misc_feature (1)..(25): SEQ ID NO: 957; WAN024DTT_at; Start 1087; Stop 1111
tacacagcagcagaagtcttaaagc

SEQ ID NO: 170952 - DNA, 25 bp, Artificial
  probe
  misc_feature (1)..(25): SEQ ID NO: 957; WAN024DTT_at; Start 1019; Stop 1043
ggcaaggcatgcatactccaaacat

SEQ ID NO: 170953 - DNA, 25 bp, Artificial
  probe
  misc_feature (1)..(25): SEQ ID NO: 957; WAN024DTT_at; Start 250; Stop 274
tacttgggtagttttctcgcgcctc

SEQ ID NO: 170954 - DNA, 25 bp, Artificial
  probe
  misc_feature (1)..(25): SEQ ID NO: 957; WAN024DTT_at; Start 1551; Stop 1575
tcgaaatcgttcatcaagctctact

SEQ ID NO: 170955 - DNA, 25 bp, Artificial
  probe
  misc_feature (1)..(25): SEQ ID NO: 957; WAN024DTT_at; Start 649; Stop 673
gactttaagactcgaaaatcatctg

SEQ ID NO: 170956 - DNA, 25 bp, Artificial
  probe
  misc_feature (1)..(25): SEQ ID NO: 957; WAN024DTT_at; Start 1809; Stop 1833
tgaacataccttggataatcaggcc

SEQ ID NO: 170957 - DNA, 25 bp, Artificial
  probe
  misc_feature (1)..(25): SEQ ID NO: 957; WAN024DTT_at; Start 454; Stop 478
caattagagataaaaacctggctag

SEQ ID NO: 170958 - DNA, 25 bp, Artificial
  probe
  misc_feature (1)..(25): SEQ ID NO: 957; WAN024DTT_at; Start 2341; Stop 2365
tatgacaaaggttggtctgcctacc

SEQ ID NO: 170959 - DNA, 25 bp, Artificial
  probe
  misc_feature (1)..(25): SEQ ID NO: 957; WAN024DTT_at; Start 2408; Stop 2432
ttatgaaagttgacattcccaaggg

SEQ ID NO: 170960 - DNA, 25 bp, Artificial
  probe
  misc_feature (1)..(25): SEQ ID NO: 957; WAN024DTT_at; Start 1110; Stop 1134
gcgtctgaaagaacttaaagtctgg

SEQ ID NO: 170961 - DNA, 25 bp, Artificial
  probe
  misc_feature (1)..(25): SEQ ID NO: 957; WAN024DTT_at; Start 221; Stop 245
ggctaaacttctatgccctatctag

SEQ ID NO: 170962 - DNA, 25 bp, Artificial
  probe
  misc_feature (1)..(25): SEQ ID NO: 957; WAN024DTT_at; Start 1484; Stop 1508
tacaaactcagacaggaaatgacag

SEQ ID NO: 170963 - DNA, 25 bp, Artificial
  probe
  misc_feature (1)..(25): SEQ ID NO: 856; WAN024DTU_at; Start 57; Stop 81
tactgtcaagagatcattaccaatc

SEQ ID NO: 170964 - DNA, 25 bp, Artificial
  probe
  misc_feature (1)..(25): SEQ ID NO: 856; WAN024DTU_at; Start 25; Stop 49
gtttcaccatcaatctttacagtta

SEQ ID NO: 170965 - DNA, 25 bp, Artificial
  probe
  misc_feature (1)..(25): SEQ ID NO: 856; WAN024DTU_at; Start 178; Stop 202
gcctgccttgacttagaagcattgg

SEQ ID NO: 170966 - DNA, 25 bp, Artificial
  probe
  misc_feature (1)..(25): SEQ ID NO: 856; WAN024DTU_at; Start 89; Stop 113
ccgctttaaagttgataaatggata

SEQ ID NO: 170967 - DNA, 25 bp, Artificial
  probe
  misc_feature (1)..(25): SEQ ID NO: 856; WAN024DTU_at; Start 169; Stop 193
cgtgatgttgcctgccttgacttag

SEQ ID NO: 170968 - DNA, 25 bp, Artificial
  probe
  misc_feature (1)..(25): SEQ ID NO: 856; WAN024DTU_at; Start 2; Stop 26
tgaaactaatattatccaagatagt

SEQ ID NO: 170969 - DNA, 25 bp, Artificial
  probe
  misc_feature (1)..(25): SEQ ID NO: 856; WAN024DTU_at; Start 21; Stop 45
gatagtttcaccatcaatctttaca

SEQ ID NO: 170970 - DNA, 25 bp, Artificial
  probe
  misc_feature (1)..(25): SEQ ID NO: 856; WAN024DTU_at; Start 280; Stop 304
gcagcaagctcagaagattccttcc

SEQ ID NO: 170971 - DNA, 25 bp, Artificial
  probe
  misc_feature (1)..(25): SEQ ID NO: 856; WAN024DTU_at; Start 164; Stop 188
tcttacgtgatgttgcctgccttga

SEQ ID NO: 170972 - DNA, 25 bp, Artificial
  probe
  misc_feature (1)..(25): SEQ ID NO: 856; WAN024DTU_at; Start 268; Stop 292
gctagcaatttagcagcaagctcag

SEQ ID NO: 170973 - DNA, 25 bp, Artificial
  probe
  misc_feature (1)..(25): SEQ ID NO: 856; WAN024DTU_at; Start 160; Stop 184
attttcttacgtgatgttgcctgcc

SEQ ID NO: 170974 - DNA, 25 bp, Artificial
  probe
  misc_feature (1)..(25): SEQ ID NO: 856; WAN024DTU_at; Start 194; Stop 218
aagcattggcagagaaacgagcaac

SEQ ID NO: 170975 - DNA, 25 bp, Artificial
  probe
  misc_feature (1)..(25): SEQ ID NO: 856; WAN024DTU_at; Start 82; Stop 106
tcacgttccgctttaaagttgataa

SEQ ID NO: 170976 - DNA, 25 bp, Artificial
  probe
  misc_feature (1)..(25): SEQ ID NO: 856; WAN024DTU_at; Start 192; Stop 216
agaagcattggcagagaaacgagca

SEQ ID NO: 170977 - DNA, 25 bp, Artificial
  probe
  misc_feature (1)..(25): SEQ ID NO: 856; WAN024DTU_at; Start 131; Stop 155
caatctcttctagctcaatcttatc

SEQ ID NO: 170978 - DNA, 25 bp, Artificial
  probe
  misc_feature (1)..(25): SEQ ID NO: 856; WAN024DTU_at; Start 260; Stop 284
tacggtctgctagcaatttagcagc

SEQ ID NO: 170979 - DNA, 25 bp, Artificial
  probe
  misc_feature (1)..(25): SEQ ID NO: 856; WAN024DTU_at; Start 250; Stop 274
gctttagcattacggtctgctagca

SEQ ID NO: 170980 - DNA, 25 bp, Artificial
  probe
  misc_feature (1)..(25): SEQ ID NO: 856; WAN024DTU_at; Start 104; Stop 128
taaatggatatttacgactagatgg

SEQ ID NO: 170981 - DNA, 25 bp, Artificial
  probe
  misc_feature (1)..(25): SEQ ID NO: 856; WAN024DTU_at; Start 11; Stop 35
tattatccaagatagtttcaccatc

SEQ ID NO: 170982 - DNA, 25 bp, Artificial
  probe
  misc_feature (1)..(25): SEQ ID NO: 856; WAN024DTU_at; Start 272; Stop 296
gcaatttagcagcaagctcagaaga

SEQ ID NO: 170983 - DNA, 25 bp, Artificial
  probe
  misc_feature (1)..(25): SEQ ID NO: 856; WAN024DTU_at; Start 227; Stop 251
gcaattgtttaattttttcttctgc

SEQ ID NO: 170984 - DNA, 25 bp, Artificial
  probe
  misc_feature (1)..(25): SEQ ID NO: 856; WAN024DTU_at; Start 141; Stop 165
tagctcaatcttatcaagcattttc

SEQ ID NO: 170985 - DNA, 25 bp, Artificial
  probe
  misc_feature (1)..(25): SEQ ID NO: 856; WAN024DTU_at; Start 62; Stop 86
tcaagagatcattaccaatctcacg

SEQ ID NO: 170986 - DNA, 25 bp, Artificial
  probe
  misc_feature (1)..(25): SEQ ID NO: 856; WAN024DTU_at; Start 75; Stop 99
accaatctcacgttccgctttaaag

SEQ ID NO: 170987 - DNA, 25 bp, Artificial
  probe
  misc_feature (1)..(25): SEQ ID NO: 856; WAN024DTU_at; Start 256; Stop 280
gcattacggtctgctagcaatttag

SEQ ID NO: 170988 - DNA, 25 bp, Artificial
  probe
  misc_feature (1)..(25): SEQ ID NO: 856; WAN024DTU_at; Start 276; Stop 300
tttagcagcaagctcagaagattcc

SEQ ID NO: 170989 - DNA, 25 bp, Artificial
  probe
  misc_feature (1)..(25): SEQ ID NO: 856; WAN024DTU_at; Start 291; Stop 315
agaagattccttccagaagtcgtag

SEQ ID NO: 170990 - DNA, 25 bp, Artificial
  probe
  misc_feature (1)..(25): SEQ ID NO: 856; WAN024DTU_at; Start 155; Stop 179
caagcattttcttacgtgatgttgc

SEQ ID NO: 170991 - DNA, 25 bp, Artificial
  probe
  misc_feature (1)..(25): SEQ ID NO: 856; WAN024DTU_at; Start 68; Stop 92
gatcattaccaatctcacgttccgc

SEQ ID NO: 170992 - DNA, 25 bp, Artificial
  probe
  misc_feature (1)..(25): SEQ ID NO: 856; WAN024DTU_at; Start 289; Stop 313
tcagaagattccttccagaagtcgt

SEQ ID NO: 170993 - DNA, 25 bp, Artificial
  probe
  misc_feature (1)..(25): SEQ ID NO: 856; WAN024DTU_at; Start 172; Stop 196
gatgttgcctgccttgacttagaag

SEQ ID NO: 170994 - DNA, 25 bp, Artificial
  probe
  misc_feature (1)..(25): SEQ ID NO: 856; WAN024DTU_at; Start 244; Stop 268
tcttctgctttagcattacggtctg

SEQ ID NO: 170995 - DNA, 25 bp, Artificial
  probe
  misc_feature (1)..(25): SEQ ID NO: 856; WAN024DTU_at; Start 283; Stop 307
gcaagctcagaagattccttccaga

SEQ ID NO: 170996 - DNA, 25 bp, Artificial
  probe
  misc_feature (1)..(25): SEQ ID NO: 856; WAN024DTU_at; Start 174; Stop 198
tgttgcctgccttgacttagaagca

SEQ ID NO: 170997 - DNA, 25 bp, Artificial
  probe
  misc_feature (1)..(25): SEQ ID NO: 5411; WAN024DTV_at; Start 1265; Stop 1289
tcggccgtatgctcttctctggaga

SEQ ID NO: 170998 - DNA, 25 bp, Artificial
  probe
  misc_feature (1)..(25): SEQ ID NO: 5411; WAN024DTV_at; Start 648; Stop 672
caaagtttgtactcacatggccgac

SEQ ID NO: 170999 - DNA, 25 bp, Artificial
  probe
  misc_feature (1)..(25): SEQ ID NO: 5411; WAN024DTV_at; Start 384; Stop 408
ttgggaagcagagagtgaagcctct

SEQ ID NO: 171000 - DNA, 25 bp, Artificial
  probe
  misc_feature (1)..(25): SEQ ID NO: 5411; WAN024DTV_at; Start 1192; Stop 1216
gaatcaattcttgactggttgcgtc

SEQ ID NO: 171001 - DNA, 25 bp, Artificial
  probe
  misc_feature (1)..(25): SEQ ID NO: 5411; WAN024DTV_at; Start 1371; Stop 1395
aaatgtccttgtacttgatgatcca

SEQ ID NO: 171002 - DNA, 25 bp, Artificial
  probe
  misc_feature (1)..(25): SEQ ID NO: 5411; WAN024DTV_at; Start 357; Stop 381
cgaaggagagtttgccgaacttgga

SEQ ID NO: 171003 - DNA, 25 bp, Artificial
  probe
  misc_feature (1)..(25): SEQ ID NO: 5411; WAN024DTV_at; Start 142; Stop 166
gctggagatatcgaacctactactg

SEQ ID NO: 171004 - DNA, 25 bp, Artificial
  probe
  misc_feature (1)..(25): SEQ ID NO: 5411; WAN024DTV_at; Start 159; Stop 183
tactactggtcacatctctcttggt

SEQ ID NO: 171005 - DNA, 25 bp, Artificial
  probe
  misc_feature (1)..(25): SEQ ID NO: 5411; WAN024DTV_at; Start 80; Stop 104
gaaatacttacggattaatcggtgc

SEQ ID NO: 171006 - DNA, 25 bp, Artificial
  probe
  misc_feature (1)..(25): SEQ ID NO: 5411; WAN024DTV_at; Start 521; Stop 545
cagatgttcttctcttggacgagcc

SEQ ID NO: 171007 - DNA, 25 bp, Artificial
  probe
  misc_feature (1)..(25): SEQ ID NO: 5411; WAN024DTV_at; Start 1401; Stop 1425
tcacttggacttggaatctatctca

SEQ ID NO: 171008 - DNA, 25 bp, Artificial
  probe
  misc_feature (1)..(25): SEQ ID NO: 5411; WAN024DTV_at; Start 219; Stop 243
ctttgactacgaagatgaacgtgcc

SEQ ID NO: 171009 - DNA, 25 bp, Artificial
  probe
  misc_feature (1)..(25): SEQ ID NO: 5411; WAN024DTV_at; Start 822; Stop 846
caatgcttctaagtcaaggcaggca

SEQ ID NO: 171010 - DNA, 25 bp, Artificial
  probe
  misc_feature (1)..(25): SEQ ID NO: 5411; WAN024DTV_at; Start 439; Stop 463
gaattacactaccaaaacatgagcg

SEQ ID NO: 171011 - DNA, 25 bp, Artificial
  probe
  misc_feature (1)..(25): SEQ ID NO: 5411; WAN024DTV_at; Start 611; Stop 635
cagttatcgtagtatcccacgaccg

SEQ ID NO: 171012 - DNA, 25 bp, Artificial
  probe
  misc_feature (1)..(25): SEQ ID NO: 5411; WAN024DTV_at; Start 744; Stop 768
taaattgctagcagaccgtaatgct

SEQ ID NO: 171013 - DNA, 25 bp, Artificial
  probe
  misc_feature (1)..(25): SEQ ID NO: 5411; WAN024DTV_at; Start 177; Stop 201
tcttggtccagatgaacgtctctct

SEQ ID NO: 171014 - DNA, 25 bp, Artificial
  probe
  misc_feature (1)..(25): SEQ ID NO: 5411; WAN024DTV_at; Start 483; Stop 507
agtaaaggttctcctcgccaaagca

SEQ ID NO: 171015 - DNA, 25 bp, Artificial
  probe
  misc_feature (1)..(25): SEQ ID NO: 5411; WAN024DTV_at; Start 1529; Stop 1553
aaaatggcgtcattgaccgtatcga

SEQ ID NO: 171016 - DNA, 25 bp, Artificial
  probe
  misc_feature (1)..(25): SEQ ID NO: 5411; WAN024DTV_at; Start 536; Stop 560
tggacgagcctactaacggtttgga

SEQ ID NO: 171017 - DNA, 25 bp, Artificial
  probe
  misc_feature (1)..(25): SEQ ID NO: 5411; WAN024DTV_at; Start 1552; Stop 1576
gatgaaacctacgatgaattcctag

SEQ ID NO: 171018 - DNA, 25 bp, Artificial
  probe
  misc_feature (1)..(25): SEQ ID NO: 5411; WAN024DTV_at; Start 1571; Stop 1595
tcctagaaaatgcagaagtacaagc

SEQ ID NO: 171019 - DNA, 25 bp, Artificial
  probe
  misc_feature (1)..(25): SEQ ID NO: 5411; WAN024DTV_at; Start 456; Stop 480
catgagcgaattggccaacggtgaa

SEQ ID NO: 171020 - DNA, 25 bp, Artificial
  probe
  misc_feature (1)..(25): SEQ ID NO: 5411; WAN024DTV_at; Start 835; Stop 859
tcaaggcaggcaacatcacgtaaga

SEQ ID NO: 171021 - DNA, 25 bp, Artificial
  probe
  misc_feature (1)..(25): SEQ ID NO: 5411; WAN024DTV_at; Start 342; Stop 366
tcgtgctgccgaactcgaaggagag

SEQ ID NO: 171022 - DNA, 25 bp, Artificial
  probe
  misc_feature (1)..(25): SEQ ID NO: 5411; WAN024DTV_at; Start 1025; Stop 1049
tgcgtccagatgataagacagcact

SEQ ID NO: 171023 - DNA, 25 bp, Artificial
  probe
  misc_feature (1)..(25): SEQ ID NO: 5411; WAN024DTV_at; Start 663; Stop 687
catggccgaccttgactttggaaaa

SEQ ID NO: 171024 - DNA, 25 bp, Artificial
  probe
  misc_feature (1)..(25): SEQ ID NO: 5411; WAN024DTV_at; Start 720; Stop 744
gaaggaatcttctgagcttgctgct

SEQ ID NO: 171025 - DNA, 25 bp, Artificial
  probe
  misc_feature (1)..(25): SEQ ID NO: 5411; WAN024DTV_at; Start 1009; Stop 1033
aatattagtttcatcttgcgtccag

SEQ ID NO: 171026 - DNA, 25 bp, Artificial
  probe
  misc_feature (1)..(25): SEQ ID NO: 5411; WAN024DTV_at; Start 312; Stop 336
gaaggaagatttctcagacgaggac

SEQ ID NO: 171027 - DNA, 25 bp, Artificial
  probe
  misc_feature (1)..(25): SEQ ID NO: 5411; WAN024DTV_at; Start 701; Stop 725
tcggaaactacgacttctggaagga

SEQ ID NO: 171028 - DNA, 25 bp, Artificial
  probe
  misc_feature (1)..(25): SEQ ID NO: 5411; WAN024DTV_at; Start 95; Stop 119
taatcggtgctaatggtgccggaaa

SEQ ID NO: 171029 - DNA, 25 bp, Artificial
  probe
  misc_feature (1)..(25): SEQ ID NO: 5411; WAN024DTV_at; Start 1079; Stop 1103
cattaattcgtgcaatcatgggaga

SEQ ID NO: 171030 - DNA, 25 bp, Artificial
  probe
  misc_feature (1)..(25): SEQ ID NO: 5411; WAN024DTV_at; Start 1281; Stop 1305
ctctggagatgaagttaacaaacct

SEQ ID NO: 171031 - DNA, 25 bp, Artificial
  probe
  misc_feature (1)..(25): SEQ ID NO: 5441; WAN024DTW_at; Start 48; Stop 72
tagatccaagcataacagcatttcc

SEQ ID NO: 171032 - DNA, 25 bp, Artificial
  probe
  misc_feature (1)..(25): SEQ ID NO: 5441; WAN024DTW_at; Start 142; Stop 166
atattcgcgcgcaacagctgcagca

SEQ ID NO: 171033 - DNA, 25 bp, Artificial
  probe
  misc_feature (1)..(25): SEQ ID NO: 5441; WAN024DTW_at; Start 289; Stop 313
ttcagcagtagcaatatttccagca

SEQ ID NO: 171034 - DNA, 25 bp, Artificial
  probe
  misc_feature (1)..(25): SEQ ID NO: 5441; WAN024DTW_at; Start 153; Stop 177
caacagctgcagcatcgtagatagc

SEQ ID NO: 171035 - DNA, 25 bp, Artificial
  probe
  misc_feature (1)..(25): SEQ ID NO: 5441; WAN024DTW_at; Start 248; Stop 272
ttaacaacgtctacacccgcttcat

SEQ ID NO: 171036 - DNA, 25 bp, Artificial
  probe
  misc_feature (1)..(25): SEQ ID NO: 5441; WAN024DTW_at; Start 422; Stop 446
aaaagagcctctgcacgttcaaatg

SEQ ID NO: 171037 - DNA, 25 bp, Artificial
  probe
  misc_feature (1)..(25): SEQ ID NO: 5441; WAN024DTW_at; Start 347; Stop 371
tcggcaattttacgcaagacacctg

SEQ ID NO: 171038 - DNA, 25 bp, Artificial
  probe
  misc_feature (1)..(25): SEQ ID NO: 5441; WAN024DTW_at; Start 410; Stop 434
gctcctgcctcaaaaagagcctctg

SEQ ID NO: 171039 - DNA, 25 bp, Artificial
  probe
  misc_feature (1)..(25): SEQ ID NO: 5441; WAN024DTW_at; Start 303; Stop 327
tatttccagcaatcaaagtccgatc

SEQ ID NO: 171040 - DNA, 25 bp, Artificial
  probe
  misc_feature (1)..(25): SEQ ID NO: 5441; WAN024DTW_at; Start 60; Stop 84
taacagcatttccacctgcagcaag

SEQ ID NO: 171041 - DNA, 25 bp, Artificial
  probe
  misc_feature (1)..(25): SEQ ID NO: 5441; WAN024DTW_at; Start 112; Stop 136
gatcccaccgtcagcaataatcgtt

SEQ ID NO: 171042 - DNA, 25 bp, Artificial
  probe
  misc_feature (1)..(25): SEQ ID NO: 5441; WAN024DTW_at; Start 33; Stop 57
cagttccagcaaacatagatccaag

SEQ ID NO: 171043 - DNA, 25 bp, Artificial
  probe
  misc_feature (1)..(25): SEQ ID NO: 5441; WAN024DTW_at; Start 339; Stop 363
cacgaatctcggcaattttacgcaa

SEQ ID NO: 171044 - DNA, 25 bp, Artificial
  probe
  misc_feature (1)..(25): SEQ ID NO: 5441; WAN024DTW_at; Start 194; Stop 218
ccaacaccagcaatcacacgagtag

SEQ ID NO: 171045 - DNA, 25 bp, Artificial
  probe
  misc_feature (1)..(25): SEQ ID NO: 5441; WAN024DTW_at; Start 98; Stop 122
tctccagaatacttgatcccaccgt

SEQ ID NO: 171046 - DNA, 25 bp, Artificial
  probe
  misc_feature (1)..(25): SEQ ID NO: 5441; WAN024DTW_at; Start 213; Stop 237
gagtagtacagatagaacctggtcc

SEQ ID NO: 171047 - DNA, 25 bp, Artificial
  probe
  misc_feature (1)..(25): SEQ ID NO: 5441; WAN024DTW_at; Start 129; Stop 153
taatcgttttaccatattcgcgcgc

SEQ ID NO: 171048 - DNA, 25 bp, Artificial
  probe
  misc_feature (1)..(25): SEQ ID NO: 5441; WAN024DTW_at; Start 179; Stop 203
gttacttgcggaacaccaacaccag

SEQ ID NO: 171049 - DNA, 25 bp, Artificial
  probe
  misc_feature (1)..(25): SEQ ID NO: 5441; WAN024DTW_at; Start 223; Stop 247
gatagaacctggtccaataccaacc

SEQ ID NO: 171050 - DNA, 25 bp, Artificial
  probe
  misc_feature (1)..(25): SEQ ID NO: 5441; WAN024DTW_at; Start 274; Stop 298
aagggcacgtgcaccttcagcagta

SEQ ID NO: 171051 - DNA, 25 bp, Artificial
  probe
  misc_feature (1)..(25): SEQ ID NO: 5441; WAN024DTW_at; Start 371; Stop 395
gcagaatgaccatgtgcagtatcaa

SEQ ID NO: 171052 - DNA, 25 bp, Artificial
  probe
  misc_feature (1)..(25): SEQ ID NO: 5441; WAN024DTW_at; Start 259; Stop 283
tacacccgcttcataaagggcacgt

SEQ ID NO: 171053 - DNA, 25 bp, Artificial
  probe
  misc_feature (1)..(25): SEQ ID NO: 5441; WAN024DTW_at; Start 386; Stop 410
gcagtatcaataacaatcgcatccg

SEQ ID NO: 171054 - DNA, 25 bp, Artificial
  probe
  misc_feature (1)..(25): SEQ ID NO: 5441; WAN024DTW_at; Start 168; Stop 192
cgtagatagctgttacttgcggaac

SEQ ID NO: 171055 - DNA, 25 bp, Artificial
  probe
  misc_feature (1)..(25): SEQ ID NO: 5441; WAN024DTW_at; Start 361; Stop 385
caagacacctgcagaatgaccatgt

SEQ ID NO: 171056 - DNA, 25 bp, Artificial
  probe
  misc_feature (1)..(25): SEQ ID NO: 5441; WAN024DTW_at; Start 80; Stop 104
gcaagtgcttttacaatatctccag

SEQ ID NO: 171057 - DNA, 25 bp, Artificial
  probe
  misc_feature (1)..(25): SEQ ID NO: 5441; WAN024DTW_at; Start 316; Stop 340
caaagtccgatctgggaaatgagca

SEQ ID NO: 171058 - DNA, 25 bp, Artificial
  probe
  misc_feature (1)..(25): SEQ ID NO: 5441; WAN024DTW_at; Start 3; Stop 27
ggaagatttcagtttcgcctggagc

SEQ ID NO: 171059 - DNA, 25 bp, Artificial
  probe
  misc_feature (1)..(25): SEQ ID NO: 5441; WAN024DTW_at; Start 200; Stop 224
ccagcaatcacacgagtagtacaga

SEQ ID NO: 171060 - DNA, 25 bp, Artificial
  probe
  misc_feature (1)..(25): SEQ ID NO: 5441; WAN024DTW_at; Start 11; Stop 35
tcagtttcgcctggagcttcatcag

SEQ ID NO: 171061 - DNA, 25 bp, Artificial
  probe
  misc_feature (1)..(25): SEQ ID NO: 5441; WAN024DTW_at; Start 428; Stop 452
gcctctgcacgttcaaatgtatctg

SEQ ID NO: 171062 - DNA, 25 bp, Artificial
  probe
  misc_feature (1)..(25): SEQ ID NO: 5441; WAN024DTW_at; Start 66; Stop 90
catttccacctgcagcaagtgcttt

SEQ ID NO: 171063 - DNA, 25 bp, Artificial
  probe
  misc_feature (1)..(25): SEQ ID NO: 5441; WAN024DTW_at; Start 23; Stop 47
ggagcttcatcagttccagcaaaca

SEQ ID NO: 171064 - DNA, 25 bp, Artificial
  probe
  misc_feature (1)..(25): SEQ ID NO: 5441; WAN024DTW_at; Start 326; Stop 350
tctgggaaatgagcacgaatctcgg

SEQ ID NO: 171065 - DNA, 25 bp, Artificial
  probe
  misc_feature (1)..(25): SEQ ID NO: 2913; WAN024DTX_at; Start 343; Stop 367
gagcttatgggtcgttaccgcatca

SEQ ID NO: 171066 - DNA, 25 bp, Artificial
  probe
  misc_feature (1)..(25): SEQ ID NO: 2913; WAN024DTX_at; Start 714; Stop 738
tgcagaggctctttttgaggcagga

SEQ ID NO: 171067 - DNA, 25 bp, Artificial
  probe
  misc_feature (1)..(25): SEQ ID NO: 2913; WAN024DTX_at; Start 179; Stop 203
aaatggccattgctattgctcgtgc

SEQ ID NO: 171068 - DNA, 25 bp, Artificial
  probe
  misc_feature (1)..(25): SEQ ID NO: 2913; WAN024DTX_at; Start 1411; Stop 1435
gctggtttgaaagaaagccatcctc

SEQ ID NO: 171069 - DNA, 25 bp, Artificial
  probe
  misc_feature (1)..(25): SEQ ID NO: 2913; WAN024DTX_at; Start 954; Stop 978
tggtgttccgcaagtaacagctatc

SEQ ID NO: 171070 - DNA, 25 bp, Artificial
  probe
  misc_feature (1)..(25): SEQ ID NO: 2913; WAN024DTX_at; Start 1313; Stop 1337
tccaaatgattggtggtattcgctc

SEQ ID NO: 171071 - DNA, 25 bp, Artificial
  probe
  misc_feature (1)..(25): SEQ ID NO: 2913; WAN024DTX_at; Start 358; Stop 382
taccgcatcagtggtgttccagttg

SEQ ID NO: 171072 - DNA, 25 bp, Artificial
  probe
  misc_feature (1)..(25): SEQ ID NO: 2913; WAN024DTX_at; Start 1169; Stop 1193
accgtggtatgggatcaattgctgc

SEQ ID NO: 171073 - DNA, 25 bp, Artificial
  probe
  misc_feature (1)..(25): SEQ ID NO: 2913; WAN024DTX_at; Start 520; Stop 544
gcaacggctgagagtattcttcaag

SEQ ID NO: 171074 - DNA, 25 bp, Artificial
  probe
  misc_feature (1)..(25): SEQ ID NO: 2913; WAN024DTX_at; Start 870; Stop 894
tgccctttatgaagcgggtgtagac

SEQ ID NO: 171075 - DNA, 25 bp, Artificial
  probe
  misc_feature (1)..(25): SEQ ID NO: 2913; WAN024DTX_at; Start 1275; Stop 1299
tcgtgttgcttataaaggagcggca

SEQ ID NO: 171076 - DNA, 25 bp, Artificial
  probe
  misc_feature (1)..(25): SEQ ID NO: 2913; WAN024DTX_at; Start 312; Stop 336
gacgcctgaacatacaattgctgaa

SEQ ID NO: 171077 - DNA, 25 bp, Artificial
  probe
  misc_feature (1)..(25): SEQ ID NO: 2913; WAN024DTX_at; Start 164; Stop 188
cagttacagagagtcaaatggccat

SEQ ID NO: 171078 - DNA, 25 bp, Artificial
  probe
  misc_feature (1)..(25): SEQ ID NO: 2913; WAN024DTX_at; Start 1292; Stop 1316
gagcggcagctgatattgttttcca

SEQ ID NO: 171079 - DNA, 25 bp, Artificial
  probe
  misc_feature (1)..(25): SEQ ID NO: 2913; WAN024DTX_at; Start 661; Stop 685
ggtcgtcttctagttgcaggtgcag

SEQ ID NO: 171080 - DNA, 25 bp, Artificial
  probe
  misc_feature (1)..(25): SEQ ID NO: 2913; WAN024DTX_at; Start 779; Stop 803
caggtgtcttgcgtaaaattgccga

SEQ ID NO: 171081 - DNA, 25 bp, Artificial
  probe
  misc_feature (1)..(25): SEQ ID NO: 2913; WAN024DTX_at; Start 1194; Stop 1218
tatgaagaaaggttcaagcgaccgt

SEQ ID NO: 171082 - DNA, 25 bp, Artificial
  probe
  misc_feature (1)..(25): SEQ ID NO: 2913; WAN024DTX_at; Start 484; Stop 508
gaaaatcttgttactgctcctgtgg

SEQ ID NO: 171083 - DNA, 25 bp, Artificial
  probe
  misc_feature (1)..(25): SEQ ID NO: 2913; WAN024DTX_at; Start 297; Stop 321
tgatccgttcttcttgacgcctgaa

SEQ ID NO: 171084 - DNA, 25 bp, Artificial
  probe
  misc_feature (1)..(25): SEQ ID NO: 2913; WAN024DTX_at; Start 1011; Stop 1035
taaaacgattattgctgacggtggg

SEQ ID NO: 171085 - DNA, 25 bp, Artificial
  probe
  misc_feature (1)..(25): SEQ ID NO: 2913; WAN024DTX_at; Start 1341; Stop 1365
tatgggttactgtggtgcagctaac

SEQ ID NO: 171086 - DNA, 25 bp, Artificial
  probe
  misc_feature (1)..(25): SEQ ID NO: 2913; WAN024DTX_at; Start 631; Stop 655
gagtttccaaatgcggctaaagatg

SEQ ID NO: 171087 - DNA, 25 bp, Artificial
  probe
  misc_feature (1)..(25): SEQ ID NO: 2913; WAN024DTX_at; Start 1130; Stop 1154
gcgaaactgaaatcttccaaggacg

SEQ ID NO: 171088 - DNA, 25 bp, Artificial
  probe
  misc_feature (1)..(25): SEQ ID NO: 2913; WAN024DTX_at; Start 504; Stop 528
tgtgggtacggatcttgcaacggct

SEQ ID NO: 171089 - DNA, 25 bp, Artificial
  probe
  misc_feature (1)..(25): SEQ ID NO: 2913; WAN024DTX_at; Start 804; Stop 828
gattcgtgctcatttcccagatcgg

SEQ ID NO: 171090 - DNA, 25 bp, Artificial
  probe
  misc_feature (1)..(25): SEQ ID NO: 2913; WAN024DTX_at; Start 67; Stop 91
gctgaaagtcatgtgttgcctaacg

SEQ ID NO: 171091 - DNA, 25 bp, Artificial
  probe
  misc_feature (1)..(25): SEQ ID NO: 2913; WAN024DTX_at; Start 1112; Stop 1136
gaactgatgaagctccaggcgaaac

SEQ ID NO: 171092 - DNA, 25 bp, Artificial
  probe
  misc_feature (1)..(25): SEQ ID NO: 2913; WAN024DTX_at; Start 977; Stop 1001
tctacgatgctgcagctgttgcgcg

SEQ ID NO: 171093 - DNA, 25 bp, Artificial
  probe
  misc_feature (1)..(25): SEQ ID NO: 2913; WAN024DTX_at; Start 852; Stop 876
tactgctgaaggtgcacgtgccctt

SEQ ID NO: 171094 - DNA, 25 bp, Artificial
  probe
  misc_feature (1)..(25): SEQ ID NO: 2913; WAN024DTX_at; Start 1058; Stop 1082
taaaagcacttgctgcaggtggaaa

SEQ ID NO: 171095 - DNA, 25 bp, Artificial
  probe
  misc_feature (1)..(25): SEQ ID NO: 2913; WAN024DTX_at; Start 565; Stop 589
ccgttggtcgatgaagaaggcagtc

SEQ ID NO: 171096 - DNA, 25 bp, Artificial
  probe
  misc_feature (1)..(25): SEQ ID NO: 2913; WAN024DTX_at; Start 993; Stop 1017
tgttgcgcgcgaatatggtaaaacg

SEQ ID NO: 171097 - DNA, 25 bp, Artificial
  probe
  misc_feature (1)..(25): SEQ ID NO: 2913; WAN024DTX_at; Start 140; Stop 164
caattattaccgctgccatggacac

SEQ ID NO: 171098 - DNA, 25 bp, Artificial
  probe
  misc_feature (1)..(25): SEQ ID NO: 2913; WAN024DTX_at; Start 698; Stop 722
cagatacatttgaacgtgcagaggc

SEQ ID NO: 171099 - DNA, 25 bp, Artificial
  probe
  misc_feature (1)..(25): SEQ ID NO: 4137; WAN024DTY_at; Start 161; Stop 185
taaggccggatcaaacccattatca

SEQ ID NO: 171100 - DNA, 25 bp, Artificial
  probe
  misc_feature (1)..(25): SEQ ID NO: 4137; WAN024DTY_at; Start 228; Stop 252
atctgagaggttagcacgtttttcc

SEQ ID NO: 171101 - DNA, 25 bp, Artificial
  probe
  misc_feature (1)..(25): SEQ ID NO: 4137; WAN024DTY_at; Start 4; Stop 28
gagtttcagctaaaatacgatttcg

SEQ ID NO: 171102 - DNA, 25 bp, Artificial
  probe
  misc_feature (1)..(25): SEQ ID NO: 4137; WAN024DTY_at; Start 49; Stop 73
gaagacgttcatcatgaaaaaacaa

SEQ ID NO: 171103 - DNA, 25 bp, Artificial
  probe
  misc_feature (1)..(25): SEQ ID NO: 4137; WAN024DTY_at; Start 128; Stop 152
acttgctagcaattgttttttctca

SEQ ID NO: 171104 - DNA, 25 bp, Artificial
  probe
  misc_feature (1)..(25): SEQ ID NO: 4137; WAN024DTY_at; Start 99; Stop 123
taaaaagaatcatccatatcagctg

SEQ ID NO: 171105 - DNA, 25 bp, Artificial
  probe
  misc_feature (1)..(25): SEQ ID NO: 4137; WAN024DTY_at; Start 221; Stop 245
ttccaaaatctgagaggttagcacg

SEQ ID NO: 171106 - DNA, 25 bp, Artificial
  probe
  misc_feature (1)..(25): SEQ ID NO: 4137; WAN024DTY_at; Start 102; Stop 126
aaagaatcatccatatcagctgcta

SEQ ID NO: 171107 - DNA, 25 bp, Artificial
  probe
  misc_feature (1)..(25): SEQ ID NO: 4137; WAN024DTY_at; Start 248; Stop 272
tttcctacttaaaaactcatcacga

SEQ ID NO: 171108 - DNA, 25 bp, Artificial
  probe
  misc_feature (1)..(25): SEQ ID NO: 4137; WAN024DTY_at; Start 37; Stop 61
tatattccaattgaagacgttcatc

SEQ ID NO: 171109 - DNA, 25 bp, Artificial
  probe
  misc_feature (1)..(25): SEQ ID NO: 4137; WAN024DTY_at; Start 146; Stop 170
tttctcaatttcaaataaggccgga

SEQ ID NO: 171110 - DNA, 25 bp, Artificial
  probe
  misc_feature (1)..(25): SEQ ID NO: 4137; WAN024DTY_at; Start 224; Stop 248
caaaatctgagaggttagcacgttt

SEQ ID NO: 171111 - DNA, 25 bp, Artificial
  probe
  misc_feature (1)..(25): SEQ ID NO: 4137; WAN024DTY_at; Start 217; Stop 241
caagttccaaaatctgagaggttag

SEQ ID NO: 171112 - DNA, 25 bp, Artificial
  probe
  misc_feature (1)..(25): SEQ ID NO: 4137; WAN024DTY_at; Start 120; Stop 144
gctgctaaacttgctagcaattgtt

SEQ ID NO: 171113 - DNA, 25 bp, Artificial
  probe
  misc_feature (1)..(25): SEQ ID NO: 4137; WAN024DTY_at; Start 231; Stop 255
tgagaggttagcacgtttttcctac

SEQ ID NO: 171114 - DNA, 25 bp, Artificial
  probe
  misc_feature (1)..(25): SEQ ID NO: 4137; WAN024DTY_at; Start 115; Stop 139
tatcagctgctaaacttgctagcaa

SEQ ID NO: 171115 - DNA, 25 bp, Artificial
  probe
  misc_feature (1)..(25): SEQ ID NO: 4137; WAN024DTY_at; Start 258; Stop 282
aaaaactcatcacgaacataggtaa

SEQ ID NO: 171116 - DNA, 25 bp, Artificial
  probe
  misc_feature (1)..(25): SEQ ID NO: 4137; WAN024DTY_at; Start 21; Stop 45
cgatttcgtaaatcactatattcca

SEQ ID NO: 171117 - DNA, 25 bp, Artificial
  probe
  misc_feature (1)..(25): SEQ ID NO: 4137; WAN024DTY_at; Start 71; Stop 95
caatttatccaattctttatgtgca

SEQ ID NO: 171118 - DNA, 25 bp, Artificial
  probe
  misc_feature (1)..(25): SEQ ID NO: 4137; WAN024DTY_at; Start 90; Stop 114
tgtgcaaaataaaaagaatcatcca

SEQ ID NO: 171119 - DNA, 25 bp, Artificial
  probe
  misc_feature (1)..(25): SEQ ID NO: 4137; WAN024DTY_at; Start 112; Stop 136
ccatatcagctgctaaacttgctag

SEQ ID NO: 171120 - DNA, 25 bp, Artificial
  probe
  misc_feature (1)..(25): SEQ ID NO: 4137; WAN024DTY_at; Start 56; Stop 80
ttcatcatgaaaaaacaatttatcc

SEQ ID NO: 171121 - DNA, 25 bp, Artificial
  probe
  misc_feature (1)..(25): SEQ ID NO: 4137; WAN024DTY_at; Start 167; Stop 191
cggatcaaacccattatcaactact

SEQ ID NO: 171122 - DNA, 25 bp, Artificial
  probe
  misc_feature (1)..(25): SEQ ID NO: 4137; WAN024DTY_at; Start 150; Stop 174
tcaatttcaaataaggccggatcaa

SEQ ID NO: 171123 - DNA, 25 bp, Artificial
  probe
  misc_feature (1)..(25): SEQ ID NO: 4137; WAN024DTY_at; Start 76; Stop 100
tatccaattctttatgtgcaaaata

SEQ ID NO: 171124 - DNA, 25 bp, Artificial
  probe
  misc_feature (1)..(25): SEQ ID NO: 4137; WAN024DTY_at; Start 34; Stop 58
cactatattccaattgaagacgttc

SEQ ID NO: 171125 - DNA, 25 bp, Artificial
  probe
  misc_feature (1)..(25): SEQ ID NO: 4137; WAN024DTY_at; Start 12; Stop 36
gctaaaatacgatttcgtaaatcac

SEQ ID NO: 171126 - DNA, 25 bp, Artificial
  probe
  misc_feature (1)..(25): SEQ ID NO: 4137; WAN024DTY_at; Start 157; Stop 181
caaataaggccggatcaaacccatt

SEQ ID NO: 171127 - DNA, 25 bp, Artificial
  probe
  misc_feature (1)..(25): SEQ ID NO: 4137; WAN024DTY_at; Start 255; Stop 279
cttaaaaactcatcacgaacatagg

SEQ ID NO: 171128 - DNA, 25 bp, Artificial
  probe
  misc_feature (1)..(25): SEQ ID NO: 4137; WAN024DTY_at; Start 105; Stop 129
gaatcatccatatcagctgctaaac

SEQ ID NO: 171129 - DNA, 25 bp, Artificial
  probe
  misc_feature (1)..(25): SEQ ID NO: 4137; WAN024DTY_at; Start 43; Stop 67
ccaattgaagacgttcatcatgaaa

SEQ ID NO: 171130 - DNA, 25 bp, Artificial
  probe
  misc_feature (1)..(25): SEQ ID NO: 4137; WAN024DTY_at; Start 1; Stop 25
gtggagtttcagctaaaatacgatt

SEQ ID NO: 171131 - DNA, 25 bp, Artificial
  probe
  misc_feature (1)..(25): SEQ ID NO: 4137; WAN024DTY_at; Start 213; Stop 237
tttacaagttccaaaatctgagagg

SEQ ID NO: 171132 - DNA, 25 bp, Artificial
  probe
  misc_feature (1)..(25): SEQ ID NO: 4137; WAN024DTY_at; Start 164; Stop 188
ggccggatcaaacccattatcaact

SEQ ID NO: 171133 - DNA, 25 bp, Artificial
  probe
  misc_feature (1)..(25): SEQ ID NO: 2302; WAN024DTZ_at; Start 561; Stop 585
ccaagaatttttagccaatgatcga

SEQ ID NO: 171134 - DNA, 25 bp, Artificial
  probe
  misc_feature (1)..(25): SEQ ID NO: 2302; WAN024DTZ_at; Start 1217; Stop 1241
tacaagcgatttactttatggaagg

SEQ ID NO: 171135 - DNA, 25 bp, Artificial
  probe
  misc_feature (1)..(25): SEQ ID NO: 2302; WAN024DTZ_at; Start 877; Stop 901
ggattagcttataccatttcaagtg

SEQ ID NO: 171136 - DNA, 25 bp, Artificial
  probe
  misc_feature (1)..(25): SEQ ID NO: 2302; WAN024DTZ_at; Start 1026; Stop 1050
tgagttaaatcagaccaaggaaatg

SEQ ID NO: 171137 - DNA, 25 bp, Artificial
  probe
  misc_feature (1)..(25): SEQ ID NO: 2302; WAN024DTZ_at; Start 515; Stop 539
gaaatcgtattttagctgaaactcc

SEQ ID NO: 171138 - DNA, 25 bp, Artificial
  probe
  misc_feature (1)..(25): SEQ ID NO: 2302; WAN024DTZ_at; Start 212; Stop 236
caaccaattgtttcagaagagggca

SEQ ID NO: 171139 - DNA, 25 bp, Artificial
  probe
  misc_feature (1)..(25): SEQ ID NO: 2302; WAN024DTZ_at; Start 1201; Stop 1225
gctaataatgtgaaactacaagcga

SEQ ID NO: 171140 - DNA, 25 bp, Artificial
  probe
  misc_feature (1)..(25): SEQ ID NO: 2302; WAN024DTZ_at; Start 707; Stop 731
tccttcaggaaggtatggttcggaa

SEQ ID NO: 171141 - DNA, 25 bp, Artificial
  probe
  misc_feature (1)..(25): SEQ ID NO: 2302; WAN024DTZ_at; Start 1117; Stop 1141
gccttatttggaaaatcttcagcag

SEQ ID NO: 171142 - DNA, 25 bp, Artificial
  probe
  misc_feature (1)..(25): SEQ ID NO: 2302; WAN024DTZ_at; Start 369; Stop 393
tgatccggccttatttgaaattgag

SEQ ID NO: 171143 - DNA, 25 bp, Artificial
  probe
  misc_feature (1)..(25): SEQ ID NO: 2302; WAN024DTZ_at; Start 846; Stop 870
taagctctttacaaatgtccgtgaa

SEQ ID NO: 171144 - DNA, 25 bp, Artificial
  probe
  misc_feature (1)..(25): SEQ ID NO: 2302; WAN024DTZ_at; Start 86; Stop 110
cattatcccttgatacgattgcagg

SEQ ID NO: 171145 - DNA, 25 bp, Artificial
  probe
  misc_feature (1)..(25): SEQ ID NO: 2302; WAN024DTZ_at; Start 101; Stop 125
cgattgcaggtcacatgttgagtgc

SEQ ID NO: 171146 - DNA, 25 bp, Artificial
  probe
  misc_feature (1)..(25): SEQ ID NO: 2302; WAN024DTZ_at; Start 66; Stop 90
taccgtgcgttttaccgctccatta

SEQ ID NO: 171147 - DNA, 25 bp, Artificial
  probe
  misc_feature (1)..(25): SEQ ID NO: 2302; WAN024DTZ_at; Start 354; Stop 378
agttgataatgggtttgatccggcc

SEQ ID NO: 171148 - DNA, 25 bp, Artificial
  probe
  misc_feature (1)..(25): SEQ ID NO: 2302; WAN024DTZ_at; Start 150; Stop 174
gatgtaccccacttctcaagatttg

SEQ ID NO: 171149 - DNA, 25 bp, Artificial
  probe
  misc_feature (1)..(25): SEQ ID NO: 2302; WAN024DTZ_at; Start 181; Stop 205
cacttggccagtctatacggtacag

SEQ ID NO: 171150 - DNA, 25 bp, Artificial
  probe
  misc_feature (1)..(25): SEQ ID NO: 2302; WAN024DTZ_at; Start 230; Stop 254
gagggcaaagccacattatagaatt

SEQ ID NO: 171151 - DNA, 25 bp, Artificial
  probe
  misc_feature (1)..(25): SEQ ID NO: 2302; WAN024DTZ_at; Start 290; Stop 314
ggaaaaacgtgctaacctctcagat

SEQ ID NO: 171152 - DNA, 25 bp, Artificial
  probe
  misc_feature (1)..(25): SEQ ID NO: 2302; WAN024DTZ_at; Start 828; Stop 852
tggtggatttgctcactctaagctc

SEQ ID NO: 171153 - DNA, 25 bp, Artificial
  probe
  misc_feature (1)..(25): SEQ ID NO: 2302; WAN024DTZ_at; Start 196; Stop 220
tacggtacagatatgtcaaccaatt

SEQ ID NO: 171154 - DNA, 25 bp, Artificial
  probe
  misc_feature (1)..(25): SEQ ID NO: 2302; WAN024DTZ_at; Start 936; Stop 960
tgctggtatcaatcgagaaaatcgt

SEQ ID NO: 171155 - DNA, 25 bp, Artificial
  probe
  misc_feature (1)..(25): SEQ ID NO: 2302; WAN024DTZ_at; Start 1095; Stop 1119
gattgaacgtgcttatcaaaatgcc

SEQ ID NO: 171156 - DNA, 25 bp, Artificial
  probe
  misc_feature (1)..(25): SEQ ID NO: 2302; WAN024DTZ_at; Start 134; Stop 158
tagagactgctaatcagatgtaccc

SEQ ID NO: 171157 - DNA, 25 bp, Artificial
  probe
  misc_feature (1)..(25): SEQ ID NO: 2302; WAN024DTZ_at; Start 640; Stop 664
gaatcatttggctttaaaggtcgaa

SEQ ID NO: 171158 - DNA, 25 bp, Artificial
  probe
  misc_feature (1)..(25): SEQ ID NO: 2302; WAN024DTZ_at; Start 255; Stop 279
gacatttacctatgttcgtgatgag

SEQ ID NO: 171159 - DNA, 25 bp, Artificial
  probe
  misc_feature (1)..(25): SEQ ID NO: 2302; WAN024DTZ_at; Start 119; Stop 143
tgagtgcaagtatgctagagactgc

SEQ ID NO: 171160 - DNA, 25 bp, Artificial
  probe
  misc_feature (1)..(25): SEQ ID NO: 2302; WAN024DTZ_at; Start 722; Stop 746
tggttcggaaaaatgtgggacaatc

SEQ ID NO: 171161 - DNA, 25 bp, Artificial
  probe
  misc_feature (1)..(25): SEQ ID NO: 2302; WAN024DTZ_at; Start 1147; Stop 1171
aaaagttggattgcaaagcttgaac

SEQ ID NO: 171162 - DNA, 25 bp, Artificial
  probe
  misc_feature (1)..(25): SEQ ID NO: 2302; WAN024DTZ_at; Start 861; Stop 885
tgtccgtgaaaatgctggattagct

SEQ ID NO: 171163 - DNA, 25 bp, Artificial
  probe
  misc_feature (1)..(25): SEQ ID NO: 2302; WAN024DTZ_at; Start 950; Stop 974
gagaaaatcgtaaccaggctcgtaa

SEQ ID NO: 171164 - DNA, 25 bp, Artificial
  probe
  misc_feature (1)..(25): SEQ ID NO: 2302; WAN024DTZ_at; Start 166; Stop 190
caagatttgaggagacacttggcca

SEQ ID NO: 171165 - DNA, 25 bp, Artificial
  probe
  misc_feature (1)..(25): SEQ ID NO: 2302; WAN024DTZ_at; Start 406; Stop 430
ctagcaagtttagcagctgatatgg

SEQ ID NO: 171166 - DNA, 25 bp, Artificial
  probe
  misc_feature (1)..(25): SEQ ID NO: 2302; WAN024DTZ_at; Start 4; Stop 28
gagttagtgcatggaatttcaacac

SEQ ID NO: 171167 - DNA, 25 bp, Artificial
  probe
  misc_feature (1)..(25): SEQ ID NO: 3025; WAN024DU2_at; Start 73; Stop 97
taccgaaccaaactgtacagtgaca

SEQ ID NO: 171168 - DNA, 25 bp, Artificial
  probe
  misc_feature (1)..(25): SEQ ID NO: 3025; WAN024DU2_at; Start 185; Stop 209
acagctggatagtatttttcttcaa

SEQ ID NO: 171169 - DNA, 25 bp, Artificial
  probe
  misc_feature (1)..(25): SEQ ID NO: 3025; WAN024DU2_at; Start 81; Stop 105
caaactgtacagtgacactcccgta

SEQ ID NO: 171170 - DNA, 25 bp, Artificial
  probe
  misc_feature (1)..(25): SEQ ID NO: 3025; WAN024DU2_at; Start 56; Stop 80
tctgtgacaaacgtatctaccgaac

SEQ ID NO: 171171 - DNA, 25 bp, Artificial
  probe
  misc_feature (1)..(25): SEQ ID NO: 3025; WAN024DU2_at; Start 137; Stop 161
gcaactgtcaatccgttggccaaac

SEQ ID NO: 171172 - DNA, 25 bp, Artificial
  probe
  misc_feature (1)..(25): SEQ ID NO: 3025; WAN024DU2_at; Start 148; Stop 172
tccgttggccaaacgagttcgataa

SEQ ID NO: 171173 - DNA, 25 bp, Artificial
  probe
  misc_feature (1)..(25): SEQ ID NO: 3025; WAN024DU2_at; Start 142; Stop 166
tgtcaatccgttggccaaacgagtt

SEQ ID NO: 171174 - DNA, 25 bp, Artificial
  probe
  misc_feature (1)..(25): SEQ ID NO: 3025; WAN024DU2_at; Start 122; Stop 146
tttttaggcaaaagagcaactgtca

SEQ ID NO: 171175 - DNA, 25 bp, Artificial
  probe
  misc_feature (1)..(25): SEQ ID NO: 3025; WAN024DU2_at; Start 139; Stop 163
aactgtcaatccgttggccaaacga

SEQ ID NO: 171176 - DNA, 25 bp, Artificial
  probe
  misc_feature (1)..(25): SEQ ID NO: 3025; WAN024DU2_at; Start 60; Stop 84
tgacaaacgtatctaccgaaccaaa

SEQ ID NO: 171177 - DNA, 25 bp, Artificial
  probe
  misc_feature (1)..(25): SEQ ID NO: 3025; WAN024DU2_at; Start 145; Stop 169
caatccgttggccaaacgagttcga

SEQ ID NO: 171178 - DNA, 25 bp, Artificial
  probe
  misc_feature (1)..(25): SEQ ID NO: 3025; WAN024DU2_at; Start 180; Stop 204
cttttacagctggatagtatttttc

SEQ ID NO: 171179 - DNA, 25 bp, Artificial
  probe
  misc_feature (1)..(25): SEQ ID NO: 3025; WAN024DU2_at; Start 135; Stop 159
gagcaactgtcaatccgttggccaa

SEQ ID NO: 171180 - DNA, 25 bp, Artificial
  probe
  misc_feature (1)..(25): SEQ ID NO: 3025; WAN024DU2_at; Start 214; Stop 238
aacctttgtcattctattccttcca

SEQ ID NO: 171181 - DNA, 25 bp, Artificial
  probe
  misc_feature (1)..(25): SEQ ID NO: 3025; WAN024DU2_at; Start 88; Stop 112
tacagtgacactcccgtaaacctct

SEQ ID NO: 171182 - DNA, 25 bp, Artificial
  probe
  misc_feature (1)..(25): SEQ ID NO: 3025; WAN024DU2_at; Start 63; Stop 87
caaacgtatctaccgaaccaaactg

SEQ ID NO: 171183 - DNA, 25 bp, Artificial
  probe
  misc_feature (1)..(25): SEQ ID NO: 3025; WAN024DU2_at; Start 68; Stop 92
gtatctaccgaaccaaactgtacag

SEQ ID NO: 171184 - DNA, 25 bp, Artificial
  probe
  misc_feature (1)..(25): SEQ ID NO: 3025; WAN024DU2_at; Start 119; Stop 143
tcctttttaggcaaaagagcaactg

SEQ ID NO: 171185 - DNA, 25 bp, Artificial
  probe
  misc_feature (1)..(25): SEQ ID NO: 3025; WAN024DU2_at; Start 71; Stop 95
tctaccgaaccaaactgtacagtga

SEQ ID NO: 171186 - DNA, 25 bp, Artificial
  probe
  misc_feature (1)..(25): SEQ ID NO: 3025; WAN024DU2_at; Start 19; Stop 43
aattcctccaggatattgttttaca

SEQ ID NO: 171187 - DNA, 25 bp, Artificial
  probe
  misc_feature (1)..(25): SEQ ID NO: 3025; WAN024DU2_at; Start 203; Stop 227
tcttcaaaaacaacctttgtcattc

SEQ ID NO: 171188 - DNA, 25 bp, Artificial
  probe
  misc_feature (1)..(25): SEQ ID NO: 3025; WAN024DU2_at; Start 58; Stop 82
tgtgacaaacgtatctaccgaacca

SEQ ID NO: 171189 - DNA, 25 bp, Artificial
  probe
  misc_feature (1)..(25): SEQ ID NO: 3025; WAN024DU2_at; Start 132; Stop 156
aaagagcaactgtcaatccgttggc

SEQ ID NO: 171190 - DNA, 25 bp, Artificial
  probe
  misc_feature (1)..(25): SEQ ID NO: 3025; WAN024DU2_at; Start 188; Stop 212
gctggatagtatttttcttcaaaaa

SEQ ID NO: 171191 - DNA, 25 bp, Artificial
  probe
  misc_feature (1)..(25): SEQ ID NO: 3025; WAN024DU2_at; Start 220; Stop 244
tgtcattctattccttccataaagt

SEQ ID NO: 171192 - DNA, 25 bp, Artificial
  probe
  misc_feature (1)..(25): SEQ ID NO: 3025; WAN024DU2_at; Start 46; Stop 70
tccgtcaacttctgtgacaaacgta

SEQ ID NO: 171193 - DNA, 25 bp, Artificial
  probe
  misc_feature (1)..(25): SEQ ID NO: 3025; WAN024DU2_at; Start 83; Stop 107
aactgtacagtgacactcccgtaaa

SEQ ID NO: 171194 - DNA, 25 bp, Artificial
  probe
  misc_feature (1)..(25): SEQ ID NO: 3025; WAN024DU2_at; Start 77; Stop 101
gaaccaaactgtacagtgacactcc

SEQ ID NO: 171195 - DNA, 25 bp, Artificial
  probe
  misc_feature (1)..(25): SEQ ID NO: 3025; WAN024DU2_at; Start 6; Stop 30
caagaaaatgagcaattcctccagg

SEQ ID NO: 171196 - DNA, 25 bp, Artificial
  probe
  misc_feature (1)..(25): SEQ ID NO: 3025; WAN024DU2_at; Start 53; Stop 77
acttctgtgacaaacgtatctaccg

SEQ ID NO: 171197 - DNA, 25 bp, Artificial
  probe
  misc_feature (1)..(25): SEQ ID NO: 3025; WAN024DU2_at; Start 2; Stop 26
tgttcaagaaaatgagcaattcctc

SEQ ID NO: 171198 - DNA, 25 bp, Artificial
  probe
  misc_feature (1)..(25): SEQ ID NO: 3025; WAN024DU2_at; Start 126; Stop 150
taggcaaaagagcaactgtcaatcc

SEQ ID NO: 171199 - DNA, 25 bp, Artificial
  probe
  misc_feature (1)..(25): SEQ ID NO: 3025; WAN024DU2_at; Start 128; Stop 152
ggcaaaagagcaactgtcaatccgt

SEQ ID NO: 171200 - DNA, 25 bp, Artificial
  probe
  misc_feature (1)..(25): SEQ ID NO: 3025; WAN024DU2_at; Start 124; Stop 148
tttaggcaaaagagcaactgtcaat

SEQ ID NO: 171201 - DNA, 25 bp, Artificial
  probe
  misc_feature (1)..(25): SEQ ID NO: 1320; WAN024DU3_at; Start 689; Stop 713
cagattttcaggaagtagcaagaga

SEQ ID NO: 171202 - DNA, 25 bp, Artificial
  probe
  misc_feature (1)..(25): SEQ ID NO: 1320; WAN024DU3_at; Start 1208; Stop 1232
tagaggatgtccttgatgctggaca

SEQ ID NO: 171203 - DNA, 25 bp, Artificial
  probe
  misc_feature (1)..(25): SEQ ID NO: 1320; WAN024DU3_at; Start 536; Stop 560
gaagtgaggagtccatttcccaaat

SEQ ID NO: 171204 - DNA, 25 bp, Artificial
  probe
  misc_feature (1)..(25): SEQ ID NO: 1320; WAN024DU3_at; Start 80; Stop 104
tgacagttgctcttttgcctaaaaa

SEQ ID NO: 171205 - DNA, 25 bp, Artificial
  probe
  misc_feature (1)..(25): SEQ ID NO: 1320; WAN024DU3_at; Start 814; Stop 838
gaagcggattgctatcgacatcata

SEQ ID NO: 171206 - DNA, 25 bp, Artificial
  probe
  misc_feature (1)..(25): SEQ ID NO: 1320; WAN024DU3_at; Start 400; Stop 424
gaagcttccattctgacagagcagg

SEQ ID NO: 171207 - DNA, 25 bp, Artificial
  probe
  misc_feature (1)..(25): SEQ ID NO: 1320; WAN024DU3_at; Start 278; Stop 302
taggtgcagatagtaatgcctttac

SEQ ID NO: 171208 - DNA, 25 bp, Artificial
  probe
  misc_feature (1)..(25): SEQ ID NO: 1320; WAN024DU3_at; Start 1040; Stop 1064
caaaggatttagatattacagagga

SEQ ID NO: 171209 - DNA, 25 bp, Artificial
  probe
  misc_feature (1)..(25): SEQ ID NO: 1320; WAN024DU3_at; Start 860; Stop 884
caatgatgtttggttggacttcgga

SEQ ID NO: 171210 - DNA, 25 bp, Artificial
  probe
  misc_feature (1)..(25): SEQ ID NO: 1320; WAN024DU3_at; Start 54; Stop 78
ttatcgaactcgtttggccaacgga

SEQ ID NO: 171211 - DNA, 25 bp, Artificial
  probe
  misc_feature (1)..(25): SEQ ID NO: 1320; WAN024DU3_at; Start 1116; Stop 1140
gaactctcttgaatttattgcaacg

SEQ ID NO: 171212 - DNA, 25 bp, Artificial
  probe
  misc_feature (1)..(25): SEQ ID NO: 1320; WAN024DU3_at; Start 1096; Stop 1120
ggcgaatttttcagtagcatgaact

SEQ ID NO: 171213 - DNA, 25 bp, Artificial
  probe
  misc_feature (1)..(25): SEQ ID NO: 1320; WAN024DU3_at; Start 66; Stop 90
tttggccaacggattgacagttgct

SEQ ID NO: 171214 - DNA, 25 bp, Artificial
  probe
  misc_feature (1)..(25): SEQ ID NO: 1320; WAN024DU3_at; Start 633; Stop 657
taattttgatgtggagcgagtacag

SEQ ID NO: 171215 - DNA, 25 bp, Artificial
  probe
  misc_feature (1)..(25): SEQ ID NO: 1320; WAN024DU3_at; Start 491; Stop 515
tagcgaatttgtatcctggtacacc

SEQ ID NO: 171216 - DNA, 25 bp, Artificial
  probe
  misc_feature (1)..(25): SEQ ID NO: 1320; WAN024DU3_at; Start 598; Stop 622
tacaaacctgtaaacatgtctctgt

SEQ ID NO: 171217 - DNA, 25 bp, Artificial
  probe
  misc_feature (1)..(25): SEQ ID NO: 1320; WAN024DU3_at; Start 263; Stop 287
cggcttttacgagtctaggtgcaga

SEQ ID NO: 171218 - DNA, 25 bp, Artificial
  probe
  misc_feature (1)..(25): SEQ ID NO: 1320; WAN024DU3_at; Start 193; Stop 217
tatcctggaggaattgctcattttc

SEQ ID NO: 171219 - DNA, 25 bp, Artificial
  probe
  misc_feature (1)..(25): SEQ ID NO: 1320; WAN024DU3_at; Start 22; Stop 46
gaaaaatactatccagctgtaaaag

SEQ ID NO: 171220 - DNA, 25 bp, Artificial
  probe
  misc_feature (1)..(25): SEQ ID NO: 1320; WAN024DU3_at; Start 508; Stop 532
ggtacacctttagcaactgatatag

SEQ ID NO: 171221 - DNA, 25 bp, Artificial
  probe
  misc_feature (1)..(25): SEQ ID NO: 1320; WAN024DU3_at; Start 774; Stop 798
caaactagcgattggagttagaggt

SEQ ID NO: 171222 - DNA, 25 bp, Artificial
  probe
  misc_feature (1)..(25): SEQ ID NO: 1320; WAN024DU3_at; Start 317; Stop 341
caaactatcttttttcagcaacgga

SEQ ID NO: 171223 - DNA, 25 bp, Artificial
  probe
  misc_feature (1)..(25): SEQ ID NO: 1320; WAN024DU3_at; Start 986; Stop 1010
cgaaagagccagttgctttgtctca

SEQ ID NO: 171224 - DNA, 25 bp, Artificial
  probe
  misc_feature (1)..(25): SEQ ID NO: 1320; WAN024DU3_at; Start 1195; Stop 1219
caggaaattactttagaggatgtcc

SEQ ID NO: 171225 - DNA, 25 bp, Artificial
  probe
  misc_feature (1)..(25): SEQ ID NO: 1320; WAN024DU3_at; Start 432; Stop 456
tcagcaagaacgagaaatgtaccaa

SEQ ID NO: 171226 - DNA, 25 bp, Artificial
  probe
  misc_feature (1)..(25): SEQ ID NO: 1320; WAN024DU3_at; Start 759; Stop 783
ggaagtatcttctcccaaactagcg

SEQ ID NO: 171227 - DNA, 25 bp, Artificial
  probe
  misc_feature (1)..(25): SEQ ID NO: 1320; WAN024DU3_at; Start 1074; Stop 1098
tattatcaaaagagagatgtttggc

SEQ ID NO: 171228 - DNA, 25 bp, Artificial
  probe
  misc_feature (1)..(25): SEQ ID NO: 1320; WAN024DU3_at; Start 416; Stop 440
cagagcaggatattattcagcaaga

SEQ ID NO: 171229 - DNA, 25 bp, Artificial
  probe
  misc_feature (1)..(25): SEQ ID NO: 1320; WAN024DU3_at; Start 1007; Stop 1031
ctcatcaatttaggaaggctattcg

SEQ ID NO: 171230 - DNA, 25 bp, Artificial
  probe
  misc_feature (1)..(25): SEQ ID NO: 1320; WAN024DU3_at; Start 242; Stop 266
aagattctagtgatttgatgtcggc

SEQ ID NO: 171231 - DNA, 25 bp, Artificial
  probe
  misc_feature (1)..(25): SEQ ID NO: 1320; WAN024DU3_at; Start 798; Stop 822
taagcgagaagtttctgaagcggat

SEQ ID NO: 171232 - DNA, 25 bp, Artificial
  probe
  misc_feature (1)..(25): SEQ ID NO: 1320; WAN024DU3_at; Start 449; Stop 473
tgtaccaagatgatccagattcgtg

SEQ ID NO: 171233 - DNA, 25 bp, Artificial
  probe
  misc_feature (1)..(25): SEQ ID NO: 1320; WAN024DU3_at; Start 648; Stop 672
gcgagtacaggactattttgaaagc

SEQ ID NO: 171234 - DNA, 25 bp, Artificial
  probe
  misc_feature (1)..(25): SEQ ID NO: 1320; WAN024DU3_at; Start 373; Stop 397
gaattggtaacatcagcacacttta

SEQ ID NO: 171235 - DNA, 25 bp, Artificial
  probe
  misc_feature (1)..(25): SEQ ID NO: 1328; WAN024DU4_at; Start 54; Stop 78
caatcagggattgagtttagatgaa

SEQ ID NO: 171236 - DNA, 25 bp, Artificial
  probe
  misc_feature (1)..(25): SEQ ID NO: 1328; WAN024DU4_at; Start 612; Stop 636
tacaagttgggtcagtgtttcagaa

SEQ ID NO: 171237 - DNA, 25 bp, Artificial
  probe
  misc_feature (1)..(25): SEQ ID NO: 1328; WAN024DU4_at; Start 792; Stop 816
tcagactggacaaatcactgtaacc

SEQ ID NO: 171238 - DNA, 25 bp, Artificial
  probe
  misc_feature (1)..(25): SEQ ID NO: 1328; WAN024DU4_at; Start 38; Stop 62
tacgattagctagaatcaatcaggg

SEQ ID NO: 171239 - DNA, 25 bp, Artificial
  probe
  misc_feature (1)..(25): SEQ ID NO: 1328; WAN024DU4_at; Start 95; Stop 119
aaatccagttagatatgttggaagc

SEQ ID NO: 171240 - DNA, 25 bp, Artificial
  probe
  misc_feature (1)..(25): SEQ ID NO: 1328; WAN024DU4_at; Start 591; Stop 615
gcaattggcagtttcagatgttaca

SEQ ID NO: 171241 - DNA, 25 bp, Artificial
  probe
  misc_feature (1)..(25): SEQ ID NO: 1328; WAN024DU4_at; Start 477; Stop 501
tgttccccactcctcaagtagtagt

SEQ ID NO: 171242 - DNA, 25 bp, Artificial
  probe
  misc_feature (1)..(25): SEQ ID NO: 1328; WAN024DU4_at; Start 405; Stop 429
tattcaaactcaaccagaggagcct

SEQ ID NO: 171243 - DNA, 25 bp, Artificial
  probe
  misc_feature (1)..(25): SEQ ID NO: 1328; WAN024DU4_at; Start 692; Stop 716
cagttgcaactaaaagtcctgtaac

SEQ ID NO: 171244 - DNA, 25 bp, Artificial
  probe
  misc_feature (1)..(25): SEQ ID NO: 1328; WAN024DU4_at; Start 491; Stop 515
caagtagtagttcttctagtataga

SEQ ID NO: 171245 - DNA, 25 bp, Artificial
  probe
  misc_feature (1)..(25): SEQ ID NO: 1328; WAN024DU4_at; Start 562; Stop 586
tataagacaagtaaggaaacagtta

SEQ ID NO: 171246 - DNA, 25 bp, Artificial
  probe
  misc_feature (1)..(25): SEQ ID NO: 1328; WAN024DU4_at; Start 128; Stop 152
cagacgatttcgatcaacttccaag

SEQ ID NO: 171247 - DNA, 25 bp, Artificial
  probe
  misc_feature (1)..(25): SEQ ID NO: 1328; WAN024DU4_at; Start 577; Stop 601
gaaacagttaaattgcaattggcag

SEQ ID NO: 171248 - DNA, 25 bp, Artificial
  probe
  misc_feature (1)..(25): SEQ ID NO: 1328; WAN024DU4_at; Start 444; Stop 468
cagtgtggttcaatcaacaagttca

SEQ ID NO: 171249 - DNA, 25 bp, Artificial
  probe
  misc_feature (1)..(25): SEQ ID NO: 1328; WAN024DU4_at; Start 646; Stop 670
gagggcggtgtaaccttatcgccaa

SEQ ID NO: 171250 - DNA, 25 bp, Artificial
  probe
  misc_feature (1)..(25): SEQ ID NO: 1328; WAN024DU4_at; Start 528; Stop 552
tgtatcaggcgaaggaaatcatgta

SEQ ID NO: 171251 - DNA, 25 bp, Artificial
  probe
  misc_feature (1)..(25): SEQ ID NO: 1328; WAN024DU4_at; Start 285; Stop 309
gacaggtcgtagacgttcaagtaag

SEQ ID NO: 171252 - DNA, 25 bp, Artificial
  probe
  misc_feature (1)..(25): SEQ ID NO: 1328; WAN024DU4_at; Start 80; Stop 104
tgcagaaaaagacagaaatccagtt

SEQ ID NO: 171253 - DNA, 25 bp, Artificial
  probe
  misc_feature (1)..(25): SEQ ID NO: 1328; WAN024DU4_at; Start 23; Stop 47
caattggagaggttttacgattagc

SEQ ID NO: 171254 - DNA, 25 bp, Artificial
  probe
  misc_feature (1)..(25): SEQ ID NO: 1328; WAN024DU4_at; Start 188; Stop 212
catgggctgttgagttagatgacca

SEQ ID NO: 171255 - DNA, 25 bp, Artificial
  probe
  misc_feature (1)..(25): SEQ ID NO: 1328; WAN024DU4_at; Start 173; Stop 197
tcttgaaaaaatatgcatgggctgt

SEQ ID NO: 171256 - DNA, 25 bp, Artificial
  probe
  misc_feature (1)..(25): SEQ ID NO: 1328; WAN024DU4_at; Start 462; Stop 486
aagttcaactagctctgttccccac

SEQ ID NO: 171257 - DNA, 25 bp, Artificial
  probe
  misc_feature (1)..(25): SEQ ID NO: 1328; WAN024DU4_at; Start 776; Stop 800
tatcgaaattaacagctcagactgg

SEQ ID NO: 171258 - DNA, 25 bp, Artificial
  probe
  misc_feature (1)..(25): SEQ ID NO: 1328; WAN024DU4_at; Start 709; Stop 733
cctgtaacaattacgttaggtgttg

SEQ ID NO: 171259 - DNA, 25 bp, Artificial
  probe
  misc_feature (1)..(25): SEQ ID NO: 1328; WAN024DU4_at; Start 546; Stop 570
tcatgtagaaatcgcttataagaca

SEQ ID NO: 171260 - DNA, 25 bp, Artificial
  probe
  misc_feature (1)..(25): SEQ ID NO: 1328; WAN024DU4_at; Start 110; Stop 134
tgttggaagcaatggaagcagacga

SEQ ID NO: 171261 - DNA, 25 bp, Artificial
  probe
  misc_feature (1)..(25): SEQ ID NO: 1328; WAN024DU4_at; Start 630; Stop 654
ttcagaaagcgaacttgagggcggt

SEQ ID NO: 171262 - DNA, 25 bp, Artificial
  probe
  misc_feature (1)..(25): SEQ ID NO: 1328; WAN024DU4_at; Start 750; Stop 774
gacagtagataatcagactgttgat

SEQ ID NO: 171263 - DNA, 25 bp, Artificial
  probe
  misc_feature (1)..(25): SEQ ID NO: 1328; WAN024DU4_at; Start 675; Stop 699
gaaaagtgcagaagcaacagttgca

SEQ ID NO: 171264 - DNA, 25 bp, Artificial
  probe
  misc_feature (1)..(25): SEQ ID NO: 1328; WAN024DU4_at; Start 223; Stop 247
gatgcttatgattctgggagtatga

SEQ ID NO: 171265 - DNA, 25 bp, Artificial
  probe
  misc_feature (1)..(25): SEQ ID NO: 1328; WAN024DU4_at; Start 270; Stop 294
tgatgaagatgagttgacaggtcgt

SEQ ID NO: 171266 - DNA, 25 bp, Artificial
  probe
  misc_feature (1)..(25): SEQ ID NO: 1328; WAN024DU4_at; Start 514; Stop 538
gaatcagctataagtgtatcaggcg

SEQ ID NO: 171267 - DNA, 25 bp, Artificial
  probe
  misc_feature (1)..(25): SEQ ID NO: 1328; WAN024DU4_at; Start 422; Stop 446
aggagccttctctttctaattacag

SEQ ID NO: 171268 - DNA, 25 bp, Artificial
  probe
  misc_feature (1)..(25): SEQ ID NO: 1328; WAN024DU4_at; Start 661; Stop 685
ttatcgccaaagaagaaaagtgcag

SEQ ID NO: 171269 - DNA, 25 bp, Artificial
  probe
  misc_feature (1)..(25): SEQ ID NO: 2659; WAN024DU5_at; Start 184; Stop 208
gattcatcaattccaaccagagcca

SEQ ID NO: 171270 - DNA, 25 bp, Artificial
  probe
  misc_feature (1)..(25): SEQ ID NO: 2659; WAN024DU5_at; Start 108; Stop 132
catggcaagtatgcctgcaatggca

SEQ ID NO: 171271 - DNA, 25 bp, Artificial
  probe
  misc_feature (1)..(25): SEQ ID NO: 2659; WAN024DU5_at; Start 10; Stop 34
cctgactggtggagttttttgaaca

SEQ ID NO: 171272 - DNA, 25 bp, Artificial
  probe
  misc_feature (1)..(25): SEQ ID NO: 2659; WAN024DU5_at; Start 296; Stop 320
caaaaatctgattttcagcaaactg

SEQ ID NO: 171273 - DNA, 25 bp, Artificial
  probe
  misc_feature (1)..(25): SEQ ID NO: 2659; WAN024DU5_at; Start 258; Stop 282
ttgcggtccaaaagcaacgtccttc

SEQ ID NO: 171274 - DNA, 25 bp, Artificial
  probe
  misc_feature (1)..(25): SEQ ID NO: 2659; WAN024DU5_at; Start 76; Stop 100
gttggctcatctaagactaatatag

SEQ ID NO: 171275 - DNA, 25 bp, Artificial
  probe
  misc_feature (1)..(25): SEQ ID NO: 2659; WAN024DU5_at; Start 165; Stop 189
cggactacgatcaaaaagtgattca

SEQ ID NO: 171276 - DNA, 25 bp, Artificial
  probe
  misc_feature (1)..(25): SEQ ID NO: 2659; WAN024DU5_at; Start 241; Stop 265
tcagaaactccaaaattttgcggtc

SEQ ID NO: 171277 - DNA, 25 bp, Artificial
  probe
  misc_feature (1)..(25): SEQ ID NO: 2659; WAN024DU5_at; Start 190; Stop 214
tcaattccaaccagagccagtttct

SEQ ID NO: 171278 - DNA, 25 bp, Artificial
  probe
  misc_feature (1)..(25): SEQ ID NO: 2659; WAN024DU5_at; Start 220; Stop 244
gcagtcttcacagcatcttcttcag

SEQ ID NO: 171279 - DNA, 25 bp, Artificial
  probe
  misc_feature (1)..(25): SEQ ID NO: 2659; WAN024DU5_at; Start 102; Stop 126
tggctccatggcaagtatgcctgca

SEQ ID NO: 171280 - DNA, 25 bp, Artificial
  probe
  misc_feature (1)..(25): SEQ ID NO: 2659; WAN024DU5_at; Start 260; Stop 284
gcggtccaaaagcaacgtccttcaa

SEQ ID NO: 171281 - DNA, 25 bp, Artificial
  probe
  misc_feature (1)..(25): SEQ ID NO: 2659; WAN024DU5_at; Start 39; Stop 63
catcaactcttttctccctagagga

SEQ ID NO: 171282 - DNA, 25 bp, Artificial
  probe
  misc_feature (1)..(25): SEQ ID NO: 2659; WAN024DU5_at; Start 317; Stop 341
actgaaataccaagccaacctgttt

SEQ ID NO: 171283 - DNA, 25 bp, Artificial
  probe
  misc_feature (1)..(25): SEQ ID NO: 2659; WAN024DU5_at; Start 61; Stop 85
ggatctagaccagctgttggctcat

SEQ ID NO: 171284 - DNA, 25 bp, Artificial
  probe
  misc_feature (1)..(25): SEQ ID NO: 2659; WAN024DU5_at; Start 160; Stop 184
tcaaacggactacgatcaaaaagtg

SEQ ID NO: 171285 - DNA, 25 bp, Artificial
  probe
  misc_feature (1)..(25): SEQ ID NO: 2659; WAN024DU5_at; Start 210; Stop 234
tttctcacgcgcagtcttcacagca

SEQ ID NO: 171286 - DNA, 25 bp, Artificial
  probe
  misc_feature (1)..(25): SEQ ID NO: 2659; WAN024DU5_at; Start 71; Stop 95
cagctgttggctcatctaagactaa

SEQ ID NO: 171287 - DNA, 25 bp, Artificial
  probe
  misc_feature (1)..(25): SEQ ID NO: 2659; WAN024DU5_at; Start 21; Stop 45
gagttttttgaacagggtcatcaac

SEQ ID NO: 171288 - DNA, 25 bp, Artificial
  probe
  misc_feature (1)..(25): SEQ ID NO: 2659; WAN024DU5_at; Start 57; Stop 81
tagaggatctagaccagctgttggc

SEQ ID NO: 171289 - DNA, 25 bp, Artificial
  probe
  misc_feature (1)..(25): SEQ ID NO: 2659; WAN024DU5_at; Start 230; Stop 254
cagcatcttcttcagaaactccaaa

SEQ ID NO: 171290 - DNA, 25 bp, Artificial
  probe
  misc_feature (1)..(25): SEQ ID NO: 2659; WAN024DU5_at; Start 117; Stop 141
tatgcctgcaatggcaacacgtctc

SEQ ID NO: 171291 - DNA, 25 bp, Artificial
  probe
  misc_feature (1)..(25): SEQ ID NO: 2659; WAN024DU5_at; Start 30; Stop 54
gaacagggtcatcaactcttttctc

SEQ ID NO: 171292 - DNA, 25 bp, Artificial
  probe
  misc_feature (1)..(25): SEQ ID NO: 2659; WAN024DU5_at; Start 151; Stop 175
cctgacagctcaaacggactacgat

SEQ ID NO: 171293 - DNA, 25 bp, Artificial
  probe
  misc_feature (1)..(25): SEQ ID NO: 2659; WAN024DU5_at; Start 2; Stop 26
tggtcatccctgactggtggagttt

SEQ ID NO: 171294 - DNA, 25 bp, Artificial
  probe
  misc_feature (1)..(25): SEQ ID NO: 2659; WAN024DU5_at; Start 49; Stop 73
tttctccctagaggatctagaccag

SEQ ID NO: 171295 - DNA, 25 bp, Artificial
  probe
  misc_feature (1)..(25): SEQ ID NO: 2659; WAN024DU5_at; Start 113; Stop 137
caagtatgcctgcaatggcaacacg

SEQ ID NO: 171296 - DNA, 25 bp, Artificial
  probe
  misc_feature (1)..(25): SEQ ID NO: 2659; WAN024DU5_at; Start 126; Stop 150
aatggcaacacgtctcatttgtccc

SEQ ID NO: 171297 - DNA, 25 bp, Artificial
  probe
  misc_feature (1)..(25): SEQ ID NO: 2659; WAN024DU5_at; Start 156; Stop 180
cagctcaaacggactacgatcaaaa

SEQ ID NO: 171298 - DNA, 25 bp, Artificial
  probe
  misc_feature (1)..(25): SEQ ID NO: 2659; WAN024DU5_at; Start 203; Stop 227
gagccagtttctcacgcgcagtctt

SEQ ID NO: 171299 - DNA, 25 bp, Artificial
  probe
  misc_feature (1)..(25): SEQ ID NO: 2659; WAN024DU5_at; Start 310; Stop 334
tcagcaaactgaaataccaagccaa

SEQ ID NO: 171300 - DNA, 25 bp, Artificial
  probe
  misc_feature (1)..(25): SEQ ID NO: 2659; WAN024DU5_at; Start 67; Stop 91
agaccagctgttggctcatctaaga

SEQ ID NO: 171301 - DNA, 25 bp, Artificial
  probe
  misc_feature (1)..(25): SEQ ID NO: 2659; WAN024DU5_at; Start 181; Stop 205
agtgattcatcaattccaaccagag

SEQ ID NO: 171302 - DNA, 25 bp, Artificial
  probe
  misc_feature (1)..(25): SEQ ID NO: 2659; WAN024DU5_at; Start 198; Stop 222
aaccagagccagtttctcacgcgca

SEQ ID NO: 171303 - DNA, 25 bp, Artificial
  probe
  misc_feature (1)..(25): SEQ ID NO: 2541; WAN024DU6_at; Start 450; Stop 474
aatgagacgtgttgccattgcaggc

SEQ ID NO: 171304 - DNA, 25 bp, Artificial
  probe
  misc_feature (1)..(25): SEQ ID NO: 2541; WAN024DU6_at; Start 167; Stop 191
tattggtgccaagtcaagggagtgt

SEQ ID NO: 171305 - DNA, 25 bp, Artificial
  probe
  misc_feature (1)..(25): SEQ ID NO: 2541; WAN024DU6_at; Start 510; Stop 534
tgagccaacagctggtctagatcct

SEQ ID NO: 171306 - DNA, 25 bp, Artificial
  probe
  misc_feature (1)..(25): SEQ ID NO: 2541; WAN024DU6_at; Start 574; Stop 598
caccagtcagggatgaccatcgtct

SEQ ID NO: 171307 - DNA, 25 bp, Artificial
  probe
  misc_feature (1)..(25): SEQ ID NO: 2541; WAN024DU6_at; Start 525; Stop 549
tctagatcctctagggagaaaagag

SEQ ID NO: 171308 - DNA, 25 bp, Artificial
  probe
  misc_feature (1)..(25): SEQ ID NO: 2541; WAN024DU6_at; Start 381; Stop 405
gaaactggctctggttggaattgat

SEQ ID NO: 171309 - DNA, 25 bp, Artificial
  probe
  misc_feature (1)..(25): SEQ ID NO: 2541; WAN024DU6_at; Start 55; Stop 79
gcttcagcagctttgtcggatgttt

SEQ ID NO: 171310 - DNA, 25 bp, Artificial
  probe
  misc_feature (1)..(25): SEQ ID NO: 2541; WAN024DU6_at; Start 588; Stop 612
gaccatcgtcttggtaacgcatttg

SEQ ID NO: 171311 - DNA, 25 bp, Artificial
  probe
  misc_feature (1)..(25): SEQ ID NO: 2541; WAN024DU6_at; Start 79; Stop 103
tctttgacgattgaagatggctctt

SEQ ID NO: 171312 - DNA, 25 bp, Artificial
  probe
  misc_feature (1)..(25): SEQ ID NO: 2541; WAN024DU6_at; Start 103; Stop 127
tatacagctttaattgggcacacag

SEQ ID NO: 171313 - DNA, 25 bp, Artificial
  probe
  misc_feature (1)..(25): SEQ ID NO: 2541; WAN024DU6_at; Start 468; Stop 492
tgcaggcatacttgccatggagcca

SEQ ID NO: 171314 - DNA, 25 bp, Artificial
  probe
  misc_feature (1)..(25): SEQ ID NO: 2541; WAN024DU6_at; Start 752; Stop 776
ccttttgtaaacgattggctgatag

SEQ ID NO: 171315 - DNA, 25 bp, Artificial
  probe
  misc_feature (1)..(25): SEQ ID NO: 2541; WAN024DU6_at; Start 679; Stop 703
ggcaaaccaagtgatgtctttcaag

SEQ ID NO: 171316 - DNA, 25 bp, Artificial
  probe
  misc_feature (1)..(25): SEQ ID NO: 2541; WAN024DU6_at; Start 405; Stop 429
tgaatcactttttgatcgtagtccg

SEQ ID NO: 171317 - DNA, 25 bp, Artificial
  probe
  misc_feature (1)..(25): SEQ ID NO: 2541; WAN024DU6_at; Start 611; Stop 635
tgatggatgatgttgctgaatatgc

SEQ ID NO: 171318 - DNA, 25 bp, Artificial
  probe
  misc_feature (1)..(25): SEQ ID NO: 2541; WAN024DU6_at; Start 420; Stop 444
tcgtagtccgtttgagctgtcaggg

SEQ ID NO: 171319 - DNA, 25 bp, Artificial
  probe
  misc_feature (1)..(25): SEQ ID NO: 2541; WAN024DU6_at; Start 253; Stop 277
aaacaggttggcttggtatttcagt

SEQ ID NO: 171320 - DNA, 25 bp, Artificial
  probe
  misc_feature (1)..(25): SEQ ID NO: 2541; WAN024DU6_at; Start 312; Stop 336
gaaggacgttgcttttggaccgcaa

SEQ ID NO: 171321 - DNA, 25 bp, Artificial
  probe
  misc_feature (1)..(25): SEQ ID NO: 2541; WAN024DU6_at; Start 640; Stop 664
caagtctatgtaatggaaaagggac

SEQ ID NO: 171322 - DNA, 25 bp, Artificial
  probe
  misc_feature (1)..(25): SEQ ID NO: 2541; WAN024DU6_at; Start 805; Stop 829
aagatagaggagttcaaggagtcgc

SEQ ID NO: 171323 - DNA, 25 bp, Artificial
  probe
  misc_feature (1)..(25): SEQ ID NO: 2541; WAN024DU6_at; Start 2; Stop 26
tgggaattgctctagaaaatgtgaa

SEQ ID NO: 171324 - DNA, 25 bp, Artificial
  probe
  misc_feature (1)..(25): SEQ ID NO: 2541; WAN024DU6_at; Start 365; Stop 389
tgaagactgcgcgtgagaaactggc

SEQ ID NO: 171325 - DNA, 25 bp, Artificial
  probe
  misc_feature (1)..(25): SEQ ID NO: 2541; WAN024DU6_at; Start 540; Stop 564
gagaaaagagttgatgaccctgttc

SEQ ID NO: 171326 - DNA, 25 bp, Artificial
  probe
  misc_feature (1)..(25): SEQ ID NO: 2541; WAN024DU6_at; Start 350; Stop 374
ctgaagaagatgctgtgaagactgc

SEQ ID NO: 171327 - DNA, 25 bp, Artificial
  probe
  misc_feature (1)..(25): SEQ ID NO: 2541; WAN024DU6_at; Start 240; Stop 264
tcgtcaaattagaaaacaggttggc

SEQ ID NO: 171328 - DNA, 25 bp, Artificial
  probe
  misc_feature (1)..(25): SEQ ID NO: 2541; WAN024DU6_at; Start 776; Stop 800
gaggcgtgtcatttaaacgattacc

SEQ ID NO: 171329 - DNA, 25 bp, Artificial
  probe
  misc_feature (1)..(25): SEQ ID NO: 2541; WAN024DU6_at; Start 331; Stop 355
ccgcaaaattttggagtttctgaag

SEQ ID NO: 171330 - DNA, 25 bp, Artificial
  probe
  misc_feature (1)..(25): SEQ ID NO: 2541; WAN024DU6_at; Start 202; Stop 226
gataccttaatcacctcgacttcta

SEQ ID NO: 171331 - DNA, 25 bp, Artificial
  probe
  misc_feature (1)..(25): SEQ ID NO: 2541; WAN024DU6_at; Start 700; Stop 724
caagacgttgtttttatggaagaag

SEQ ID NO: 171332 - DNA, 25 bp, Artificial
  probe
  misc_feature (1)..(25): SEQ ID NO: 2541; WAN024DU6_at; Start 497; Stop 521
tattagtcttagatgagccaacagc

SEQ ID NO: 171333 - DNA, 25 bp, Artificial
  probe
  misc_feature (1)..(25): SEQ ID NO: 2541; WAN024DU6_at; Start 40; Stop 64
gaaggtactcccttagcttcagcag

SEQ ID NO: 171334 - DNA, 25 bp, Artificial
  probe
  misc_feature (1)..(25): SEQ ID NO: 2541; WAN024DU6_at; Start 716; Stop 740
tggaagaagttcagttgggagtacc

SEQ ID NO: 171335 - DNA, 25 bp, Artificial
  probe
  misc_feature (1)..(25): SEQ ID NO: 2541; WAN024DU6_at; Start 763; Stop 787
cgattggctgatagaggcgtgtcat

SEQ ID NO: 171336 - DNA, 25 bp, Artificial
  probe
  misc_feature (1)..(25): SEQ ID NO: 2541; WAN024DU6_at; Start 560; Stop 584
tgttcaaaaaactccaccagtcagg

SEQ ID NO: 171337 - DNA, 25 bp, Artificial
  probe
  misc_feature (1)..(25): SEQ ID NO: 2333; WAN024DU7_at; Start 165; Stop 189
tgccttgtcaggagtatctctttca

SEQ ID NO: 171338 - DNA, 25 bp, Artificial
  probe
  misc_feature (1)..(25): SEQ ID NO: 2333; WAN024DU7_at; Start 129; Stop 153
gaatctgattctttttatagcgaca

SEQ ID NO: 171339 - DNA, 25 bp, Artificial
  probe
  misc_feature (1)..(25): SEQ ID NO: 2333; WAN024DU7_at; Start 383; Stop 407
taacaaccatgcctttaagtttggc

SEQ ID NO: 171340 - DNA, 25 bp, Artificial
  probe
  misc_feature (1)..(25): SEQ ID NO: 2333; WAN024DU7_at; Start 111; Stop 135
ggctaataaccccttgacgaatctg

SEQ ID NO: 171341 - DNA, 25 bp, Artificial
  probe
  misc_feature (1)..(25): SEQ ID NO: 2333; WAN024DU7_at; Start 559; Stop 583
gattttggagaaggaagcatcgttc

SEQ ID NO: 171342 - DNA, 25 bp, Artificial
  probe
  misc_feature (1)..(25): SEQ ID NO: 2333; WAN024DU7_at; Start 498; Stop 522
tgtcccaaccttgatggatgatacg

SEQ ID NO: 171343 - DNA, 25 bp, Artificial
  probe
  misc_feature (1)..(25): SEQ ID NO: 2333; WAN024DU7_at; Start 526; Stop 550
cggattatgaatgcacagaaagctc

SEQ ID NO: 171344 - DNA, 25 bp, Artificial
  probe
  misc_feature (1)..(25): SEQ ID NO: 2333; WAN024DU7_at; Start 447; Stop 471
gaaagttccagttcatgaaattgga

SEQ ID NO: 171345 - DNA, 25 bp, Artificial
  probe
  misc_feature (1)..(25): SEQ ID NO: 2333; WAN024DU7_at; Start 582; Stop 606
tcaaaaagtaaaggcgatgattccc

SEQ ID NO: 171346 - DNA, 25 bp, Artificial
  probe
  misc_feature (1)..(25): SEQ ID NO: 2333; WAN024DU7_at; Start 314; Stop 338
ctttgcaacaagctgggattatttt

SEQ ID NO: 171347 - DNA, 25 bp, Artificial
  probe
  misc_feature (1)..(25): SEQ ID NO: 2333; WAN024DU7_at; Start 412; Stop 436
gctgtcgaagctttattagcacctt

SEQ ID NO: 171348 - DNA, 25 bp, Artificial
  probe
  misc_feature (1)..(25): SEQ ID NO: 2333; WAN024DU7_at; Start 723; Stop 747
gactctaaaggatacgctgaccatt

SEQ ID NO: 171349 - DNA, 25 bp, Artificial
  probe
  misc_feature (1)..(25): SEQ ID NO: 2333; WAN024DU7_at; Start 198; Stop 222
tcagggcttgaagtctatgtttttc

SEQ ID NO: 171350 - DNA, 25 bp, Artificial
  probe
  misc_feature (1)..(25): SEQ ID NO: 2333; WAN024DU7_at; Start 144; Stop 168
tatagcgacagggatatttattgcc

SEQ ID NO: 171351 - DNA, 25 bp, Artificial
  probe
  misc_feature (1)..(25): SEQ ID NO: 2333; WAN024DU7_at; Start 70; Stop 94
aaattgcttgctatgatgctactga

SEQ ID NO: 171352 - DNA, 25 bp, Artificial
  probe
  misc_feature (1)..(25): SEQ ID NO: 2333; WAN024DU7_at; Start 694; Stop 718
ggcagaagtcaataccgacaattga

SEQ ID NO: 171353 - DNA, 25 bp, Artificial
  probe
  misc_feature (1)..(25): SEQ ID NO: 2333; WAN024DU7_at; Start 42; Stop 66
gattgttcaccgattggatccacgt

SEQ ID NO: 171354 - DNA, 25 bp, Artificial
  probe
  misc_feature (1)..(25): SEQ ID NO: 2333; WAN024DU7_at; Start 708; Stop 732
ccgacaattgaaatggactctaaag

SEQ ID NO: 171355 - DNA, 25 bp, Artificial
  probe
  misc_feature (1)..(25): SEQ ID NO: 2333; WAN024DU7_at; Start 299; Stop 323
gaatcacggattatgctttgcaaca

SEQ ID NO: 171356 - DNA, 25 bp, Artificial
  probe
  misc_feature (1)..(25): SEQ ID NO: 2333; WAN024DU7_at; Start 738; Stop 762
gctgaccattcttgttattctcgta

SEQ ID NO: 171357 - DNA, 25 bp, Artificial
  probe
  misc_feature (1)..(25): SEQ ID NO: 2333; WAN024DU7_at; Start 539; Stop 563
cacagaaagctcgtggagtggattt

SEQ ID NO: 171358 - DNA, 25 bp, Artificial
  probe
  misc_feature (1)..(25): SEQ ID NO: 2333; WAN024DU7_at; Start 631; Stop 655
agtttaaaacgtgcagattccttgg

SEQ ID NO: 171359 - DNA, 25 bp, Artificial
  probe
  misc_feature (1)..(25): SEQ ID NO: 2333; WAN024DU7_at; Start 657; Stop 681
tatcgctatggaagcgcgtggctat

SEQ ID NO: 171360 - DNA, 25 bp, Artificial
  probe
  misc_feature (1)..(25): SEQ ID NO: 2333; WAN024DU7_at; Start 612; Stop 636
gattcctctttttgcgacaagttta

SEQ ID NO: 171361 - DNA, 25 bp, Artificial
  probe
  misc_feature (1)..(25): SEQ ID NO: 2333; WAN024DU7_at; Start 483; Stop 507
tatgagtttgcgttttgtcccaacc

SEQ ID NO: 171362 - DNA, 25 bp, Artificial
  probe
  misc_feature (1)..(25): SEQ ID NO: 2333; WAN024DU7_at; Start 644; Stop 668
cagattccttggctatcgctatgga

SEQ ID NO: 171363 - DNA, 25 bp, Artificial
  probe
  misc_feature (1)..(25): SEQ ID NO: 2333; WAN024DU7_at; Start 55; Stop 79
ttggatccacgtagcaaattgcttg

SEQ ID NO: 171364 - DNA, 25 bp, Artificial
  probe
  misc_feature (1)..(25): SEQ ID NO: 2333; WAN024DU7_at; Start 572; Stop 596
gaagcatcgttcaaaaagtaaaggc

SEQ ID NO: 171365 - DNA, 25 bp, Artificial
  probe
  misc_feature (1)..(25): SEQ ID NO: 2333; WAN024DU7_at; Start 679; Stop 703
tatcagggtggaaaaggcagaagtc

SEQ ID NO: 171366 - DNA, 25 bp, Artificial
  probe
  misc_feature (1)..(25): SEQ ID NO: 2333; WAN024DU7_at; Start 433; Stop 457
cctttaaagcgtgtgaaagttccag

SEQ ID NO: 171367 - DNA, 25 bp, Artificial
  probe
  misc_feature (1)..(25): SEQ ID NO: 2333; WAN024DU7_at; Start 283; Stop 307
gagttttcgtttgtgagaatcacgg

SEQ ID NO: 171368 - DNA, 25 bp, Artificial
  probe
  misc_feature (1)..(25): SEQ ID NO: 2333; WAN024DU7_at; Start 463; Stop 487
gaaattggattgatgctgtctatga

SEQ ID NO: 171369 - DNA, 25 bp, Artificial
  probe
  misc_feature (1)..(25): SEQ ID NO: 2333; WAN024DU7_at; Start 594; Stop 618
ggcgatgattcccattttgattcct

SEQ ID NO: 171370 - DNA, 25 bp, Artificial
  probe
  misc_feature (1)..(25): SEQ ID NO: 2333; WAN024DU7_at; Start 398; Stop 422
taagtttggcatcagctgtcgaagc

SEQ ID NO: 171371 - DNA, 25 bp, Artificial
  probe
  misc_feature (1)..(25): SEQ ID NO: 5060; WAN024DU8_at; Start 79; Stop 103
gaagcaccttttgatctacctgcat

SEQ ID NO: 171372 - DNA, 25 bp, Artificial
  probe
  misc_feature (1)..(25): SEQ ID NO: 5060; WAN024DU8_at; Start 219; Stop 243
ttctgtctttaaactttccacctca

SEQ ID NO: 171373 - DNA, 25 bp, Artificial
  probe
  misc_feature (1)..(25): SEQ ID NO: 5060; WAN024DU8_at; Start 242; Stop 266
catttgatttaacttctaattggta

SEQ ID NO: 171374 - DNA, 25 bp, Artificial
  probe
  misc_feature (1)..(25): SEQ ID NO: 5060; WAN024DU8_at; Start 115; Stop 139
tcctgcttccaagataccggagaac

SEQ ID NO: 171375 - DNA, 25 bp, Artificial
  probe
  misc_feature (1)..(25): SEQ ID NO: 5060; WAN024DU8_at; Start 13; Stop 37
gagttctcctctacttttgaaacac

SEQ ID NO: 171376 - DNA, 25 bp, Artificial
  probe
  misc_feature (1)..(25): SEQ ID NO: 5060; WAN024DU8_at; Start 58; Stop 82
gcaatagctaacatgttctcagaag

SEQ ID NO: 171377 - DNA, 25 bp, Artificial
  probe
  misc_feature (1)..(25): SEQ ID NO: 5060; WAN024DU8_at; Start 184; Stop 208
gacttcatatcaagcaattggcgca

SEQ ID NO: 171378 - DNA, 25 bp, Artificial
  probe
  misc_feature (1)..(25): SEQ ID NO: 5060; WAN024DU8_at; Start 105; Stop 129
taaggtcaactcctgcttccaagat

SEQ ID NO: 171379 - DNA, 25 bp, Artificial
  probe
  misc_feature (1)..(25): SEQ ID NO: 5060; WAN024DU8_at; Start 133; Stop 157
ggagaacgcataataacatctgctg

SEQ ID NO: 171380 - DNA, 25 bp, Artificial
  probe
  misc_feature (1)..(25): SEQ ID NO: 5060; WAN024DU8_at; Start 236; Stop 260
ccacctcatttgatttaacttctaa

SEQ ID NO: 171381 - DNA, 25 bp, Artificial
  probe
  misc_feature (1)..(25): SEQ ID NO: 5060; WAN024DU8_at; Start 110; Stop 134
tcaactcctgcttccaagataccgg

SEQ ID NO: 171382 - DNA, 25 bp, Artificial
  probe
  misc_feature (1)..(25): SEQ ID NO: 5060; WAN024DU8_at; Start 127; Stop 151
gataccggagaacgcataataacat

SEQ ID NO: 171383 - DNA, 25 bp, Artificial
  probe
  misc_feature (1)..(25): SEQ ID NO: 5060; WAN024DU8_at; Start 41; Stop 65
caatcaagccaccatttgcaatagc

SEQ ID NO: 171384 - DNA, 25 bp, Artificial
  probe
  misc_feature (1)..(25): SEQ ID NO: 5060; WAN024DU8_at; Start 158; Stop 182
ctaaagtctttgtggcttgcaattt

SEQ ID NO: 171385 - DNA, 25 bp, Artificial
  probe
  misc_feature (1)..(25): SEQ ID NO: 5060; WAN024DU8_at; Start 182; Stop 206
tagacttcatatcaagcaattggcg

SEQ ID NO: 171386 - DNA, 25 bp, Artificial
  probe
  misc_feature (1)..(25): SEQ ID NO: 5060; WAN024DU8_at; Start 188; Stop 212
tcatatcaagcaattggcgcagttg

SEQ ID NO: 171387 - DNA, 25 bp, Artificial
  probe
  misc_feature (1)..(25): SEQ ID NO: 5060; WAN024DU8_at; Start 119; Stop 143
gcttccaagataccggagaacgcat

SEQ ID NO: 171388 - DNA, 25 bp, Artificial
  probe
  misc_feature (1)..(25): SEQ ID NO: 5060; WAN024DU8_at; Start 90; Stop 114
tgatctacctgcatctaaggtcaac

SEQ ID NO: 171389 - DNA, 25 bp, Artificial
  probe
  misc_feature (1)..(25): SEQ ID NO: 5060; WAN024DU8_at; Start 95; Stop 119
tacctgcatctaaggtcaactcctg

SEQ ID NO: 171390 - DNA, 25 bp, Artificial
  probe
  misc_feature (1)..(25): SEQ ID NO: 5060; WAN024DU8_at; Start 1; Stop 25
ttgactatagtagagttctcctcta

SEQ ID NO: 171391 - DNA, 25 bp, Artificial
  probe
  misc_feature (1)..(25): SEQ ID NO: 5060; WAN024DU8_at; Start 99; Stop 123
tgcatctaaggtcaactcctgcttc

SEQ ID NO: 171392 - DNA, 25 bp, Artificial
  probe
  misc_feature (1)..(25): SEQ ID NO: 5060; WAN024DU8_at; Start 62; Stop 86
tagctaacatgttctcagaagcacc

SEQ ID NO: 171393 - DNA, 25 bp, Artificial
  probe
  misc_feature (1)..(25): SEQ ID NO: 5060; WAN024DU8_at; Start 27; Stop 51
ttttgaaacactcccaatcaagcca

SEQ ID NO: 171394 - DNA, 25 bp, Artificial
  probe
  misc_feature (1)..(25): SEQ ID NO: 5060; WAN024DU8_at; Start 198; Stop 222
caattggcgcagttgttcattttct

SEQ ID NO: 171395 - DNA, 25 bp, Artificial
  probe
  misc_feature (1)..(25): SEQ ID NO: 5060; WAN024DU8_at; Start 122; Stop 146
tccaagataccggagaacgcataat

SEQ ID NO: 171396 - DNA, 25 bp, Artificial
  probe
  misc_feature (1)..(25): SEQ ID NO: 5060; WAN024DU8_at; Start 203; Stop 227
ggcgcagttgttcattttctgtctt

SEQ ID NO: 171397 - DNA, 25 bp, Artificial
  probe
  misc_feature (1)..(25): SEQ ID NO: 5060; WAN024DU8_at; Start 48; Stop 72
gccaccatttgcaatagctaacatg

SEQ ID NO: 171398 - DNA, 25 bp, Artificial
  probe
  misc_feature (1)..(25): SEQ ID NO: 5060; WAN024DU8_at; Start 76; Stop 100
tcagaagcaccttttgatctacctg

SEQ ID NO: 171399 - DNA, 25 bp, Artificial
  probe
  misc_feature (1)..(25): SEQ ID NO: 5060; WAN024DU8_at; Start 224; Stop 248
tctttaaactttccacctcatttga

SEQ ID NO: 171400 - DNA, 25 bp, Artificial
  probe
  misc_feature (1)..(25): SEQ ID NO: 5060; WAN024DU8_at; Start 168; Stop 192
tgtggcttgcaatttagacttcata

SEQ ID NO: 171401 - DNA, 25 bp, Artificial
  probe
  misc_feature (1)..(25): SEQ ID NO: 5060; WAN024DU8_at; Start 191; Stop 215
tatcaagcaattggcgcagttgttc

SEQ ID NO: 171402 - DNA, 25 bp, Artificial
  probe
  misc_feature (1)..(25): SEQ ID NO: 5060; WAN024DU8_at; Start 136; Stop 160
gaacgcataataacatctgctgcta

SEQ ID NO: 171403 - DNA, 25 bp, Artificial
  probe
  misc_feature (1)..(25): SEQ ID NO: 5060; WAN024DU8_at; Start 143; Stop 167
taataacatctgctgctaaagtctt

SEQ ID NO: 171404 - DNA, 25 bp, Artificial
  probe
  misc_feature (1)..(25): SEQ ID NO: 5060; WAN024DU8_at; Start 69; Stop 93
catgttctcagaagcaccttttgat

SEQ ID NO: 171405 - DNA, 25 bp, Artificial
  probe
  misc_feature (1)..(25): SEQ ID NO: 1033; WAN024DU9_at; Start 148; Stop 172
ccttttcagtggtttgattctgtca

SEQ ID NO: 171406 - DNA, 25 bp, Artificial
  probe
  misc_feature (1)..(25): SEQ ID NO: 1033; WAN024DU9_at; Start 713; Stop 737
tggttgccacaacgcatagtacaga

SEQ ID NO: 171407 - DNA, 25 bp, Artificial
  probe
  misc_feature (1)..(25): SEQ ID NO: 1033; WAN024DU9_at; Start 293; Stop 317
tgcgccaattgcttgatatgaagtc

SEQ ID NO: 171408 - DNA, 25 bp, Artificial
  probe
  misc_feature (1)..(25): SEQ ID NO: 1033; WAN024DU9_at; Start 696; Stop 720
tattcctgttggtgaagtggttgcc

SEQ ID NO: 171409 - DNA, 25 bp, Artificial
  probe
  misc_feature (1)..(25): SEQ ID NO: 1033; WAN024DU9_at; Start 429; Stop 453
catgttagctattgcaaatggtggc

SEQ ID NO: 171410 - DNA, 25 bp, Artificial
  probe
  misc_feature (1)..(25): SEQ ID NO: 1033; WAN024DU9_at; Start 659; Stop 683
tgactactggtggattaggaaactt

SEQ ID NO: 171411 - DNA, 25 bp, Artificial
  probe
  misc_feature (1)..(25): SEQ ID NO: 1033; WAN024DU9_at; Start 120; Stop 144
ctcattggttgatagagttgtacaa

SEQ ID NO: 171412 - DNA, 25 bp, Artificial
  probe
  misc_feature (1)..(25): SEQ ID NO: 1033; WAN024DU9_at; Start 78; Stop 102
gacttattcaagtacaattgtgaca

SEQ ID NO: 171413 - DNA, 25 bp, Artificial
  probe
  misc_feature (1)..(25): SEQ ID NO: 1033; WAN024DU9_at; Start 767; Stop 791
tgagtgcagatactcataatgtaga

SEQ ID NO: 171414 - DNA, 25 bp, Artificial
  probe
  misc_feature (1)..(25): SEQ ID NO: 1033; WAN024DU9_at; Start 751; Stop 775
gaagtaactgttaaattgagtgcag

SEQ ID NO: 171415 - DNA, 25 bp, Artificial
  probe
  misc_feature (1)..(25): SEQ ID NO: 1033; WAN024DU9_at; Start 550; Stop 574
catggctctactacaatttatggaa

SEQ ID NO: 171416 - DNA, 25 bp, Artificial
  probe
  misc_feature (1)..(25): SEQ ID NO: 1033; WAN024DU9_at; Start 346; Stop 370
gcagatgttattatgcgttctccgg

SEQ ID NO: 171417 - DNA, 25 bp, Artificial
  probe
  misc_feature (1)..(25): SEQ ID NO: 1033; WAN024DU9_at; Start 57; Stop 81
tgtgtcagctctcttagcgacgact

SEQ ID NO: 171418 - DNA, 25 bp, Artificial
  probe
  misc_feature (1)..(25): SEQ ID NO: 1033; WAN024DU9_at; Start 627; Stop 651
tagtaatagcgatattagtgcggga

SEQ ID NO: 171419 - DNA, 25 bp, Artificial
  probe
  misc_feature (1)..(25): SEQ ID NO: 1033; WAN024DU9_at; Start 98; Stop 122
tgacaaaattaggagatggaatctc

SEQ ID NO: 171420 - DNA, 25 bp, Artificial
  probe
  misc_feature (1)..(25): SEQ ID NO: 1033; WAN024DU9_at; Start 173; Stop 197
aatcagatttggctcatttgacacg

SEQ ID NO: 171421 - DNA, 25 bp, Artificial
  probe
  misc_feature (1)..(25): SEQ ID NO: 1033; WAN024DU9_at; Start 478; Stop 502
gaggagaactctactatagtcaacc

SEQ ID NO: 171422 - DNA, 25 bp, Artificial
  probe
  misc_feature (1)..(25): SEQ ID NO: 1033; WAN024DU9_at; Start 582; Stop 606
tggctatgacaaggaaaatgacgtt

SEQ ID NO: 171423 - DNA, 25 bp, Artificial
  probe
  misc_feature (1)..(25): SEQ ID NO: 1033; WAN024DU9_at; Start 328; Stop 352
gccacaaagactttagcagcagatg

SEQ ID NO: 171424 - DNA, 25 bp, Artificial
  probe
  misc_feature (1)..(25): SEQ ID NO: 1033; WAN024DU9_at; Start 42; Stop 66
tgtcactgttctgcttgtgtcagct

SEQ ID NO: 171425 - DNA, 25 bp, Artificial
  probe
  misc_feature (1)..(25): SEQ ID NO: 1033; WAN024DU9_at; Start 465; Stop 489
tgtttcaaaagtagaggagaactct

SEQ ID NO: 171426 - DNA, 25 bp, Artificial
  probe
  misc_feature (1)..(25): SEQ ID NO: 1033; WAN024DU9_at; Start 278; Stop 302
cagaaaatgaacaactgcgccaatt

SEQ ID NO: 171427 - DNA, 25 bp, Artificial
  probe
  misc_feature (1)..(25): SEQ ID NO: 1033; WAN024DU9_at; Start 312; Stop 336
gaagtctaaattgcaagccacaaag

SEQ ID NO: 171428 - DNA, 25 bp, Artificial
  probe
  misc_feature (1)..(25): SEQ ID NO: 1033; WAN024DU9_at; Start 361; Stop 385
cgttctccggtatcttggaagcagg

SEQ ID NO: 171429 - DNA, 25 bp, Artificial
  probe
  misc_feature (1)..(25): SEQ ID NO: 1033; WAN024DU9_at; Start 415; Stop 439
ggtgcttctgagaacatgttagcta

SEQ ID NO: 171430 - DNA, 25 bp, Artificial
  probe
  misc_feature (1)..(25): SEQ ID NO: 1033; WAN024DU9_at; Start 501; Stop 525
ccttctgacaaatacggaaaatgct

SEQ ID NO: 171431 - DNA, 25 bp, Artificial
  probe
  misc_feature (1)..(25): SEQ ID NO: 1033; WAN024DU9_at; Start 378; Stop 402
gaagcaggagttgaccttagatgca

SEQ ID NO: 171432 - DNA, 25 bp, Artificial
  probe
  misc_feature (1)..(25): SEQ ID NO: 1033; WAN024DU9_at; Start 183; Stop 207
ggctcatttgacacgaacatataat

SEQ ID NO: 171433 - DNA, 25 bp, Artificial
  probe
  misc_feature (1)..(25): SEQ ID NO: 1033; WAN024DU9_at; Start 679; Stop 703
aactttaacgttgctgatattcctg

SEQ ID NO: 171434 - DNA, 25 bp, Artificial
  probe
  misc_feature (1)..(25): SEQ ID NO: 1033; WAN024DU9_at; Start 222; Stop 246
gaagaaacagctttaccaattagaa

SEQ ID NO: 171435 - DNA, 25 bp, Artificial
  probe
  misc_feature (1)..(25): SEQ ID NO: 1033; WAN024DU9_at; Start 642; Stop 666
tagtgcgggagataaggtgactact

SEQ ID NO: 171436 - DNA, 25 bp, Artificial
  probe
  misc_feature (1)..(25): SEQ ID NO: 1033; WAN024DU9_at; Start 399; Stop 423
tgcaggtagatcaaaaggtgcttct

SEQ ID NO: 171437 - DNA, 25 bp, Artificial
  probe
  misc_feature (1)..(25): SEQ ID NO: 1033; WAN024DU9_at; Start 729; Stop 753
tagtacagactatttgacacgagaa

SEQ ID NO: 171438 - DNA, 25 bp, Artificial
  probe
  misc_feature (1)..(25): SEQ ID NO: 1033; WAN024DU9_at; Start 540; Stop 564
taaaattcaacatggctctactaca

SEQ ID NO: 171439 - DNA, 25 bp, Artificial
  probe
  misc_feature (1)..(25): SEQ ID NO: 1055; WAN024DUA_at; Start 833; Stop 857
caacatacagtacaaacgcttcaag

SEQ ID NO: 171440 - DNA, 25 bp, Artificial
  probe
  misc_feature (1)..(25): SEQ ID NO: 1055; WAN024DUA_at; Start 1055; Stop 1079
caacaacacgtatccaagtatcaga

SEQ ID NO: 171441 - DNA, 25 bp, Artificial
  probe
  misc_feature (1)..(25): SEQ ID NO: 1055; WAN024DUA_at; Start 887; Stop 911
taaaaacattggcaccttgggctgg

SEQ ID NO: 171442 - DNA, 25 bp, Artificial
  probe
  misc_feature (1)..(25): SEQ ID NO: 1055; WAN024DUA_at; Start 1101; Stop 1125
tacaattggaaatcaccgtggatgg

SEQ ID NO: 171443 - DNA, 25 bp, Artificial
  probe
  misc_feature (1)..(25): SEQ ID NO: 1055; WAN024DUA_at; Start 924; Stop 948
taatggagcacagtgggctacaagt

SEQ ID NO: 171444 - DNA, 25 bp, Artificial
  probe
  misc_feature (1)..(25): SEQ ID NO: 1055; WAN024DUA_at; Start 1124; Stop 1148
ggttcaatccaacaacaacttctga

SEQ ID NO: 171445 - DNA, 25 bp, Artificial
  probe
  misc_feature (1)..(25): SEQ ID NO: 1055; WAN024DUA_at; Start 710; Stop 734
cttataaagaaaaacgagctagcca

SEQ ID NO: 171446 - DNA, 25 bp, Artificial
  probe
  misc_feature (1)..(25): SEQ ID NO: 1055; WAN024DUA_at; Start 1021; Stop 1045
tatggtcacgtagcggttgttacag

SEQ ID NO: 171447 - DNA, 25 bp, Artificial
  probe
  misc_feature (1)..(25): SEQ ID NO: 1055; WAN024DUA_at; Start 788; Stop 812
cagtatctgaatctgcagcagcacc

SEQ ID NO: 171448 - DNA, 25 bp, Artificial
  probe
  misc_feature (1)..(25): SEQ ID NO: 1055; WAN024DUA_at; Start 257; Stop 281
tcgagggtgagattacagaactttc

SEQ ID NO: 171449 - DNA, 25 bp, Artificial
  probe
  misc_feature (1)..(25): SEQ ID NO: 1055; WAN024DUA_at; Start 971; Stop 995
caggttcaacacctcaagttggagc

SEQ ID NO: 171450 - DNA, 25 bp, Artificial
  probe
  misc_feature (1)..(25): SEQ ID NO: 1055; WAN024DUA_at; Start 72; Stop 96
tgcgcatgcagaaacgactgatgac

SEQ ID NO: 171451 - DNA, 25 bp, Artificial
  probe
  misc_feature (1)..(25): SEQ ID NO: 1055; WAN024DUA_at; Start 725; Stop 749
gagctagccaacaacaatcagtact

SEQ ID NO: 171452 - DNA, 25 bp, Artificial
  probe
  misc_feature (1)..(25): SEQ ID NO: 1055; WAN024DUA_at; Start 602; Stop 626
taagtcttgctgctgagaaagcgac

SEQ ID NO: 171453 - DNA, 25 bp, Artificial
  probe
  misc_feature (1)..(25): SEQ ID NO: 1055; WAN024DUA_at; Start 130; Stop 154
ttaacagcacaacaacaagaagccc

SEQ ID NO: 171454 - DNA, 25 bp, Artificial
  probe
  misc_feature (1)..(25): SEQ ID NO: 1055; WAN024DUA_at; Start 770; Stop 794
taacagctcaagtgcaagcagtatc

SEQ ID NO: 171455 - DNA, 25 bp, Artificial
  probe
  misc_feature (1)..(25): SEQ ID NO: 1055; WAN024DUA_at; Start 242; Stop 266
cagaatctaagaaactcgagggtga

SEQ ID NO: 171456 - DNA, 25 bp, Artificial
  probe
  misc_feature (1)..(25): SEQ ID NO: 1055; WAN024DUA_at; Start 202; Stop 226
gagcagtctaacttgcaagctgaaa

SEQ ID NO: 171457 - DNA, 25 bp, Artificial
  probe
  misc_feature (1)..(25): SEQ ID NO: 1055; WAN024DUA_at; Start 333; Stop 357
tcaaacaaatggagccgtaactagc

SEQ ID NO: 171458 - DNA, 25 bp, Artificial
  probe
  misc_feature (1)..(25): SEQ ID NO: 1055; WAN024DUA_at; Start 87; Stop 111
gactgatgacaaaattgctgctcaa

SEQ ID NO: 171459 - DNA, 25 bp, Artificial
  probe
  misc_feature (1)..(25): SEQ ID NO: 1055; WAN024DUA_at; Start 559; Stop 583
caagcattgactacgaaacaggcag

SEQ ID NO: 171460 - DNA, 25 bp, Artificial
  probe
  misc_feature (1)..(25): SEQ ID NO: 1055; WAN024DUA_at; Start 956; Stop 980
cagcaggtttccgtacaggttcaac

SEQ ID NO: 171461 - DNA, 25 bp, Artificial
  probe
  misc_feature (1)..(25): SEQ ID NO: 1055; WAN024DUA_at; Start 308; Stop 332
cgttggaaaaacaagctcgtagtgc

SEQ ID NO: 171462 - DNA, 25 bp, Artificial
  probe
  misc_feature (1)..(25): SEQ ID NO: 1055; WAN024DUA_at; Start 859; Stop 883
tatccaattggagaatgtacatggg

SEQ ID NO: 171463 - DNA, 25 bp, Artificial
  probe
  misc_feature (1)..(25): SEQ ID NO: 1055; WAN024DUA_at; Start 290; Stop 314
ttgtttctcgtaaccaatcgttgga

SEQ ID NO: 171464 - DNA, 25 bp, Artificial
  probe
  misc_feature (1)..(25): SEQ ID NO: 1055; WAN024DUA_at; Start 394; Stop 418
gaagctatttcacgtgttgctgcaa

SEQ ID NO: 171465 - DNA, 25 bp, Artificial
  probe
  misc_feature (1)..(25): SEQ ID NO: 1055; WAN024DUA_at; Start 540; Stop 564
aaaattggctgatgatgctcaagca

SEQ ID NO: 171466 - DNA, 25 bp, Artificial
  probe
  misc_feature (1)..(25): SEQ ID NO: 1055; WAN024DUA_at; Start 411; Stop 435
tgctgcaatgagtgaaatcgtatct

SEQ ID NO: 171467 - DNA, 25 bp, Artificial
  probe
  misc_feature (1)..(25): SEQ ID NO: 1055; WAN024DUA_at; Start 58; Stop 82
gctgttttaacaactgcgcatgcag

SEQ ID NO: 171468 - DNA, 25 bp, Artificial
  probe
  misc_feature (1)..(25): SEQ ID NO: 1055; WAN024DUA_at; Start 587; Stop 611
taaaagctgctgaattaagtcttgc

SEQ ID NO: 171469 - DNA, 25 bp, Artificial
  probe
  misc_feature (1)..(25): SEQ ID NO: 1055; WAN024DUA_at; Start 810; Stop 834
acctgtccgtgcaaaagttcgtcca

SEQ ID NO: 171470 - DNA, 25 bp, Artificial
  probe
  misc_feature (1)..(25): SEQ ID NO: 1055; WAN024DUA_at; Start 166; Stop 190
gaccaaattcaggagcaagtatcag

SEQ ID NO: 171471 - DNA, 25 bp, Artificial
  probe
  misc_feature (1)..(25): SEQ ID NO: 1055; WAN024DUA_at; Start 940; Stop 964
gctacaagtgcagcagcagcaggtt

SEQ ID NO: 171472 - DNA, 25 bp, Artificial
  probe
  misc_feature (1)..(25): SEQ ID NO: 1055; WAN024DUA_at; Start 692; Stop 716
ctgcggtagcagaagcagcttataa

SEQ ID NO: 171473 - DNA, 25 bp, Artificial
  probe
  misc_feature (1)..(25): SEQ ID NO: 7519; WAN024DUB_at; Start 15; Stop 39
taacccatcatggaagaaaagcaaa

SEQ ID NO: 171474 - DNA, 25 bp, Artificial
  probe
  misc_feature (1)..(25): SEQ ID NO: 7519; WAN024DUB_at; Start 33; Stop 57
aagcaaatctcctgtcggtctatcc

SEQ ID NO: 171475 - DNA, 25 bp, Artificial
  probe
  misc_feature (1)..(25): SEQ ID NO: 7519; WAN024DUB_at; Start 47; Stop 71
tcggtctatccatgcttcgtccaac

SEQ ID NO: 171476 - DNA, 25 bp, Artificial
  probe
  misc_feature (1)..(25): SEQ ID NO: 7519; WAN024DUB_at; Start 51; Stop 75
tctatccatgcttcgtccaactcgt

SEQ ID NO: 171477 - DNA, 25 bp, Artificial
  probe
  misc_feature (1)..(25): SEQ ID NO: 7519; WAN024DUB_at; Start 45; Stop 69
tgtcggtctatccatgcttcgtcca

SEQ ID NO: 171478 - DNA, 25 bp, Artificial
  probe
  misc_feature (1)..(25): SEQ ID NO: 7519; WAN024DUB_at; Start 6; Stop 30
tgaagcatttaacccatcatggaag

SEQ ID NO: 171479 - DNA, 25 bp, Artificial
  probe
  misc_feature (1)..(25): SEQ ID NO: 7519; WAN024DUB_at; Start 26; Stop 50
ggaagaaaagcaaatctcctgtcgg

SEQ ID NO: 171480 - DNA, 25 bp, Artificial
  probe
  misc_feature (1)..(25): SEQ ID NO: 7519; WAN024DUB_at; Start 32; Stop 56
aaagcaaatctcctgtcggtctatc

SEQ ID NO: 171481 - DNA, 25 bp, Artificial
  probe
  misc_feature (1)..(25): SEQ ID NO: 7519; WAN024DUB_at; Start 10; Stop 34
gcatttaacccatcatggaagaaaa

SEQ ID NO: 171482 - DNA, 25 bp, Artificial
  probe
  misc_feature (1)..(25): SEQ ID NO: 7519; WAN024DUB_at; Start 40; Stop 64
tctcctgtcggtctatccatgcttc

SEQ ID NO: 171483 - DNA, 25 bp, Artificial
  probe
  misc_feature (1)..(25): SEQ ID NO: 7519; WAN024DUB_at; Start 34; Stop 58
agcaaatctcctgtcggtctatcca

SEQ ID NO: 171484 - DNA, 25 bp, Artificial
  probe
  misc_feature (1)..(25): SEQ ID NO: 7519; WAN024DUB_at; Start 16; Stop 40
aacccatcatggaagaaaagcaaat

SEQ ID NO: 171485 - DNA, 25 bp, Artificial
  probe
  misc_feature (1)..(25): SEQ ID NO: 7519; WAN024DUB_at; Start 46; Stop 70
gtcggtctatccatgcttcgtccaa

SEQ ID NO: 171486 - DNA, 25 bp, Artificial
  probe
  misc_feature (1)..(25): SEQ ID NO: 7519; WAN024DUB_at; Start 59; Stop 83
tgcttcgtccaactcgtccaccaat

SEQ ID NO: 171487 - DNA, 25 bp, Artificial
  probe
  misc_feature (1)..(25): SEQ ID NO: 7519; WAN024DUB_at; Start 3; Stop 27
gattgaagcatttaacccatcatgg

SEQ ID NO: 171488 - DNA, 25 bp, Artificial
  probe
  misc_feature (1)..(25): SEQ ID NO: 7519; WAN024DUB_at; Start 13; Stop 37
tttaacccatcatggaagaaaagca

SEQ ID NO: 171489 - DNA, 25 bp, Artificial
  probe
  misc_feature (1)..(25): SEQ ID NO: 7519; WAN024DUB_at; Start 38; Stop 62
aatctcctgtcggtctatccatgct

SEQ ID NO: 171490 - DNA, 25 bp, Artificial
  probe
  misc_feature (1)..(25): SEQ ID NO: 7519; WAN024DUB_at; Start 19; Stop 43
ccatcatggaagaaaagcaaatctc

SEQ ID NO: 171491 - DNA, 25 bp, Artificial
  probe
  misc_feature (1)..(25): SEQ ID NO: 7519; WAN024DUB_at; Start 20; Stop 44
catcatggaagaaaagcaaatctcc

SEQ ID NO: 171492 - DNA, 25 bp, Artificial
  probe
  misc_feature (1)..(25): SEQ ID NO: 7519; WAN024DUB_at; Start 31; Stop 55
aaaagcaaatctcctgtcggtctat

SEQ ID NO: 171493 - DNA, 25 bp, Artificial
  probe
  misc_feature (1)..(25): SEQ ID NO: 7519; WAN024DUB_at; Start 36; Stop 60
caaatctcctgtcggtctatccatg

SEQ ID NO: 171494 - DNA, 25 bp, Artificial
  probe
  misc_feature (1)..(25): SEQ ID NO: 7519; WAN024DUB_at; Start 49; Stop 73
ggtctatccatgcttcgtccaactc

SEQ ID NO: 171495 - DNA, 25 bp, Artificial
  probe
  misc_feature (1)..(25): SEQ ID NO: 7519; WAN024DUB_at; Start 8; Stop 32
aagcatttaacccatcatggaagaa

SEQ ID NO: 171496 - DNA, 25 bp, Artificial
  probe
  misc_feature (1)..(25): SEQ ID NO: 7519; WAN024DUB_at; Start 23; Stop 47
catggaagaaaagcaaatctcctgt

SEQ ID NO: 171497 - DNA, 25 bp, Artificial
  probe
  misc_feature (1)..(25): SEQ ID NO: 7519; WAN024DUB_at; Start 42; Stop 66
tcctgtcggtctatccatgcttcgt

SEQ ID NO: 171498 - DNA, 25 bp, Artificial
  probe
  misc_feature (1)..(25): SEQ ID NO: 7519; WAN024DUB_at; Start 18; Stop 42
cccatcatggaagaaaagcaaatct

SEQ ID NO: 171499 - DNA, 25 bp, Artificial
  probe
  misc_feature (1)..(25): SEQ ID NO: 7519; WAN024DUB_at; Start 50; Stop 74
gtctatccatgcttcgtccaactcg

SEQ ID NO: 171500 - DNA, 25 bp, Artificial
  probe
  misc_feature (1)..(25): SEQ ID NO: 7519; WAN024DUB_at; Start 22; Stop 46
tcatggaagaaaagcaaatctcctg

SEQ ID NO: 171501 - DNA, 25 bp, Artificial
  probe
  misc_feature (1)..(25): SEQ ID NO: 7519; WAN024DUB_at; Start 27; Stop 51
gaagaaaagcaaatctcctgtcggt

SEQ ID NO: 171502 - DNA, 25 bp, Artificial
  probe
  misc_feature (1)..(25): SEQ ID NO: 7519; WAN024DUB_at; Start 43; Stop 67
cctgtcggtctatccatgcttcgtc

SEQ ID NO: 171503 - DNA, 25 bp, Artificial
  probe
  misc_feature (1)..(25): SEQ ID NO: 7519; WAN024DUB_at; Start 35; Stop 59
gcaaatctcctgtcggtctatccat

SEQ ID NO: 171504 - DNA, 25 bp, Artificial
  probe
  misc_feature (1)..(25): SEQ ID NO: 7519; WAN024DUB_at; Start 30; Stop 54
gaaaagcaaatctcctgtcggtcta

SEQ ID NO: 171505 - DNA, 25 bp, Artificial
  probe
  misc_feature (1)..(25): SEQ ID NO: 7519; WAN024DUB_at; Start 28; Stop 52
aagaaaagcaaatctcctgtcggtc

SEQ ID NO: 171506 - DNA, 25 bp, Artificial
  probe
  misc_feature (1)..(25): SEQ ID NO: 7519; WAN024DUB_at; Start 25; Stop 49
tggaagaaaagcaaatctcctgtcg

SEQ ID NO: 171507 - DNA, 25 bp, Artificial
  probe
  misc_feature (1)..(25): SEQ ID NO: 5522; WAN024DUC_at; Start 171; Stop 195
taagatttctgctaactgctcccct

SEQ ID NO: 171508 - DNA, 25 bp, Artificial
  probe
  misc_feature (1)..(25): SEQ ID NO: 5522; WAN024DUC_at; Start 151; Stop 175
tcatttggaaattgctcctgtaaga

SEQ ID NO: 171509 - DNA, 25 bp, Artificial
  probe
  misc_feature (1)..(25): SEQ ID NO: 5522; WAN024DUC_at; Start 100; Stop 124
tgtacttgctctaatcgatcctctg

SEQ ID NO: 171510 - DNA, 25 bp, Artificial
  probe
  misc_feature (1)..(25): SEQ ID NO: 5522; WAN024DUC_at; Start 109; Stop 133
tctaatcgatcctctgttacagaag

SEQ ID NO: 171511 - DNA, 25 bp, Artificial
  probe
  misc_feature (1)..(25): SEQ ID NO: 5522; WAN024DUC_at; Start 49; Stop 73
tccaagattgtcgtactgataagta

SEQ ID NO: 171512 - DNA, 25 bp, Artificial
  probe
  misc_feature (1)..(25): SEQ ID NO: 5522; WAN024DUC_at; Start 203; Stop 227
tttctgaagcaaaaatgagtaacgg

SEQ ID NO: 171513 - DNA, 25 bp, Artificial
  probe
  misc_feature (1)..(25): SEQ ID NO: 5522; WAN024DUC_at; Start 15; Stop 39
gaaaacatccacacaagggaaggta

SEQ ID NO: 171514 - DNA, 25 bp, Artificial
  probe
  misc_feature (1)..(25): SEQ ID NO: 5522; WAN024DUC_at; Start 71; Stop 95
gtattgtcagttctccatctcgaaa

SEQ ID NO: 171515 - DNA, 25 bp, Artificial
  probe
  misc_feature (1)..(25): SEQ ID NO: 5522; WAN024DUC_at; Start 174; Stop 198
gatttctgctaactgctcccctttc

SEQ ID NO: 171516 - DNA, 25 bp, Artificial
  probe
  misc_feature (1)..(25): SEQ ID NO: 5522; WAN024DUC_at; Start 75; Stop 99
tgtcagttctccatctcgaaaagct

SEQ ID NO: 171517 - DNA, 25 bp, Artificial
  probe
  misc_feature (1)..(25): SEQ ID NO: 5522; WAN024DUC_at; Start 137; Stop 161
caaagccaattttctcatttggaaa

SEQ ID NO: 171518 - DNA, 25 bp, Artificial
  probe
  misc_feature (1)..(25): SEQ ID NO: 5522; WAN024DUC_at; Start 80; Stop 104
gttctccatctcgaaaagcttgtac

SEQ ID NO: 171519 - DNA, 25 bp, Artificial
  probe
  misc_feature (1)..(25): SEQ ID NO: 5522; WAN024DUC_at; Start 68; Stop 92
taagtattgtcagttctccatctcg

SEQ ID NO: 171520 - DNA, 25 bp, Artificial
  probe
  misc_feature (1)..(25): SEQ ID NO: 5522; WAN024DUC_at; Start 164; Stop 188
gctcctgtaagatttctgctaactg

SEQ ID NO: 171521 - DNA, 25 bp, Artificial
  probe
  misc_feature (1)..(25): SEQ ID NO: 5522; WAN024DUC_at; Start 19; Stop 43
acatccacacaagggaaggtaactc

SEQ ID NO: 171522 - DNA, 25 bp, Artificial
  probe
  misc_feature (1)..(25): SEQ ID NO: 5522; WAN024DUC_at; Start 83; Stop 107
ctccatctcgaaaagcttgtacttg

SEQ ID NO: 171523 - DNA, 25 bp, Artificial
  probe
  misc_feature (1)..(25): SEQ ID NO: 5522; WAN024DUC_at; Start 126; Stop 150
tacagaagatacaaagccaattttc

SEQ ID NO: 171524 - DNA, 25 bp, Artificial
  probe
  misc_feature (1)..(25): SEQ ID NO: 5522; WAN024DUC_at; Start 207; Stop 231
tgaagcaaaaatgagtaacggataa

SEQ ID NO: 171525 - DNA, 25 bp, Artificial
  probe
  misc_feature (1)..(25): SEQ ID NO: 5522; WAN024DUC_at; Start 146; Stop 170
ttttctcatttggaaattgctcctg

SEQ ID NO: 171526 - DNA, 25 bp, Artificial
  probe
  misc_feature (1)..(25): SEQ ID NO: 5522; WAN024DUC_at; Start 12; Stop 36
tacgaaaacatccacacaagggaag

SEQ ID NO: 171527 - DNA, 25 bp, Artificial
  probe
  misc_feature (1)..(25): SEQ ID NO: 5522; WAN024DUC_at; Start 187; Stop 211
tgctcccctttcttaatttctgaag

SEQ ID NO: 171528 - DNA, 25 bp, Artificial
  probe
  misc_feature (1)..(25): SEQ ID NO: 5522; WAN024DUC_at; Start 54; Stop 78
gattgtcgtactgataagtattgtc

SEQ ID NO: 171529 - DNA, 25 bp, Artificial
  probe
  misc_feature (1)..(25): SEQ ID NO: 5522; WAN024DUC_at; Start 46; Stop 70
cgctccaagattgtcgtactgataa

SEQ ID NO: 171530 - DNA, 25 bp, Artificial
  probe
  misc_feature (1)..(25): SEQ ID NO: 5522; WAN024DUC_at; Start 106; Stop 130
tgctctaatcgatcctctgttacag

SEQ ID NO: 171531 - DNA, 25 bp, Artificial
  probe
  misc_feature (1)..(25): SEQ ID NO: 5522; WAN024DUC_at; Start 178; Stop 202
tctgctaactgctcccctttcttaa

SEQ ID NO: 171532 - DNA, 25 bp, Artificial
  probe
  misc_feature (1)..(25): SEQ ID NO: 5522; WAN024DUC_at; Start 160; Stop 184
aattgctcctgtaagatttctgcta

SEQ ID NO: 171533 - DNA, 25 bp, Artificial
  probe
  misc_feature (1)..(25): SEQ ID NO: 5522; WAN024DUC_at; Start 94; Stop 118
aaagcttgtacttgctctaatcgat

SEQ ID NO: 171534 - DNA, 25 bp, Artificial
  probe
  misc_feature (1)..(25): SEQ ID NO: 5522; WAN024DUC_at; Start 9; Stop 33
tactacgaaaacatccacacaaggg

SEQ ID NO: 171535 - DNA, 25 bp, Artificial
  probe
  misc_feature (1)..(25): SEQ ID NO: 5522; WAN024DUC_at; Start 169; Stop 193
tgtaagatttctgctaactgctccc

SEQ ID NO: 171536 - DNA, 25 bp, Artificial
  probe
  misc_feature (1)..(25): SEQ ID NO: 5522; WAN024DUC_at; Start 1; Stop 25
ttggcctctactacgaaaacatcca

SEQ ID NO: 171537 - DNA, 25 bp, Artificial
  probe
  misc_feature (1)..(25): SEQ ID NO: 5522; WAN024DUC_at; Start 124; Stop 148
gttacagaagatacaaagccaattt

SEQ ID NO: 171538 - DNA, 25 bp, Artificial
  probe
  misc_feature (1)..(25): SEQ ID NO: 5522; WAN024DUC_at; Start 190; Stop 214
tcccctttcttaatttctgaagcaa

SEQ ID NO: 171539 - DNA, 25 bp, Artificial
  probe
  misc_feature (1)..(25): SEQ ID NO: 5522; WAN024DUC_at; Start 133; Stop 157
gatacaaagccaattttctcatttg

SEQ ID NO: 171540 - DNA, 25 bp, Artificial
  probe
  misc_feature (1)..(25): SEQ ID NO: 5522; WAN024DUC_at; Start 119; Stop 143
cctctgttacagaagatacaaagcc

SEQ ID NO: 171541 - DNA, 25 bp, Artificial
  probe
  misc_feature (1)..(25): SEQ ID NO: 915; WAN024DUD_at; Start 50; Stop 74
taacagaagaagaacgtcagttggc

SEQ ID NO: 171542 - DNA, 25 bp, Artificial
  probe
  misc_feature (1)..(25): SEQ ID NO: 915; WAN024DUD_at; Start 221; Stop 245
ctttatactattttccgcaggagga

SEQ ID NO: 171543 - DNA, 25 bp, Artificial
  probe
  misc_feature (1)..(25): SEQ ID NO: 915; WAN024DUD_at; Start 893; Stop 917
gaaagacagcttatccgttactcat

SEQ ID NO: 171544 - DNA, 25 bp, Artificial
  probe
  misc_feature (1)..(25): SEQ ID NO: 915; WAN024DUD_at; Start 1197; Stop 1221
tagaccgacaggagatttgcttttc

SEQ ID NO: 171545 - DNA, 25 bp, Artificial
  probe
  misc_feature (1)..(25): SEQ ID NO: 915; WAN024DUD_at; Start 143; Stop 167
tagaagaatggtatttgcccatcgg

SEQ ID NO: 171546 - DNA, 25 bp, Artificial
  probe
  misc_feature (1)..(25): SEQ ID NO: 915; WAN024DUD_at; Start 424; Stop 448
ggtgcagtgtgtttggctagtcctc

SEQ ID NO: 171547 - DNA, 25 bp, Artificial
  probe
  misc_feature (1)..(25): SEQ ID NO: 915; WAN024DUD_at; Start 328; Stop 352
gtagacaagcaaaagccaaccttag

SEQ ID NO: 171548 - DNA, 25 bp, Artificial
  probe
  misc_feature (1)..(25): SEQ ID NO: 915; WAN024DUD_at; Start 460; Stop 484
tgtttggagctgtacaagcgcctgc

SEQ ID NO: 171549 - DNA, 25 bp, Artificial
  probe
  misc_feature (1)..(25): SEQ ID NO: 915; WAN024DUD_at; Start 1041; Stop 1065
tcgagatggagaactgacaatactt

SEQ ID NO: 171550 - DNA, 25 bp, Artificial
  probe
  misc_feature (1)..(25): SEQ ID NO: 915; WAN024DUD_at; Start 1010; Stop 1034
cagaggatcgattagagcaagtaca

SEQ ID NO: 171551 - DNA, 25 bp, Artificial
  probe
  misc_feature (1)..(25): SEQ ID NO: 915; WAN024DUD_at; Start 291; Stop 315
ttttcaagagaaggtgtcagaggga

SEQ ID NO: 171552 - DNA, 25 bp, Artificial
  probe
  misc_feature (1)..(25): SEQ ID NO: 915; WAN024DUD_at; Start 257; Stop 281
aagatgttctcaaatggcgcggcca

SEQ ID NO: 171553 - DNA, 25 bp, Artificial
  probe
  misc_feature (1)..(25): SEQ ID NO: 915; WAN024DUD_at; Start 197; Stop 221
tgaagcgagtcagaagtgatcaaac

SEQ ID NO: 171554 - DNA, 25 bp, Artificial
  probe
  misc_feature (1)..(25): SEQ ID NO: 915; WAN024DUD_at; Start 398; Stop 422
tagtggctaaagtgatcaatgcggg

SEQ ID NO: 171555 - DNA, 25 bp, Artificial
  probe
  misc_feature (1)..(25): SEQ ID NO: 915; WAN024DUD_at; Start 1027; Stop 1051
caagtacaagcttttcgagatggag

SEQ ID NO: 171556 - DNA, 25 bp, Artificial
  probe
  misc_feature (1)..(25): SEQ ID NO: 915; WAN024DUD_at; Start 831; Stop 855
taatcgctacttagacaagaatcgt

SEQ ID NO: 171557 - DNA, 25 bp, Artificial
  probe
  misc_feature (1)..(25): SEQ ID NO: 915; WAN024DUD_at; Start 1181; Stop 1205
ttggacgaagcatggatagaccgac

SEQ ID NO: 171558 - DNA, 25 bp, Artificial
  probe
  misc_feature (1)..(25): SEQ ID NO: 915; WAN024DUD_at; Start 1064; Stop 1088
ttatcagtacgacaatcttggagcg

SEQ ID NO: 171559 - DNA, 25 bp, Artificial
  probe
  misc_feature (1)..(25): SEQ ID NO: 915; WAN024DUD_at; Start 689; Stop 713
gattgagaatctttttaacagcgac

SEQ ID NO: 171560 - DNA, 25 bp, Artificial
  probe
  misc_feature (1)..(25): SEQ ID NO: 915; WAN024DUD_at; Start 1270; Stop 1294
cagatgatgaataaggaggctggtc

SEQ ID NO: 171561 - DNA, 25 bp, Artificial
  probe
  misc_feature (1)..(25): SEQ ID NO: 915; WAN024DUD_at; Start 704; Stop 728
taacagcgacttcgaccaatgagtt

SEQ ID NO: 171562 - DNA, 25 bp, Artificial
  probe
  misc_feature (1)..(25): SEQ ID NO: 915; WAN024DUD_at; Start 474; Stop 498
caagcgcctgcaacaggatttttct

SEQ ID NO: 171563 - DNA, 25 bp, Artificial
  probe
  misc_feature (1)..(25): SEQ ID NO: 915; WAN024DUD_at; Start 719; Stop 743
ccaatgagttagataaaaaggtccg

SEQ ID NO: 171564 - DNA, 25 bp, Artificial
  probe
  misc_feature (1)..(25): SEQ ID NO: 915; WAN024DUD_at; Start 172; Stop 196
tactattgtcgagagtgcttgctga

SEQ ID NO: 171565 - DNA, 25 bp, Artificial
  probe
  misc_feature (1)..(25): SEQ ID NO: 915; WAN024DUD_at; Start 66; Stop 90
tcagttggcggagaaacttccagca

SEQ ID NO: 171566 - DNA, 25 bp, Artificial
  probe
  misc_feature (1)..(25): SEQ ID NO: 915; WAN024DUD_at; Start 350; Stop 374
tagttcatgcggtaacaggagctgg

SEQ ID NO: 171567 - DNA, 25 bp, Artificial
  probe
  misc_feature (1)..(25): SEQ ID NO: 915; WAN024DUD_at; Start 438; Stop 462
ggctagtcctcgcatagatgtttgt

SEQ ID NO: 171568 - DNA, 25 bp, Artificial
  probe
  misc_feature (1)..(25): SEQ ID NO: 915; WAN024DUD_at; Start 770; Stop 794
taccgagacggtttcatggaaatcc

SEQ ID NO: 171569 - DNA, 25 bp, Artificial
  probe
  misc_feature (1)..(25): SEQ ID NO: 915; WAN024DUD_at; Start 1221; Stop 1245
cttccatgatgggttaaatgcttca

SEQ ID NO: 171570 - DNA, 25 bp, Artificial
  probe
  misc_feature (1)..(25): SEQ ID NO: 915; WAN024DUD_at; Start 1091; Stop 1115
gagttaccttcccttgtgtggatgt

SEQ ID NO: 171571 - DNA, 25 bp, Artificial
  probe
  misc_feature (1)..(25): SEQ ID NO: 915; WAN024DUD_at; Start 272; Stop 296
ggcgcggccaattaactccttttca

SEQ ID NO: 171572 - DNA, 25 bp, Artificial
  probe
  misc_feature (1)..(25): SEQ ID NO: 915; WAN024DUD_at; Start 1115; Stop 1139
ttttcgtagtagaggccaatcatcg

SEQ ID NO: 171573 - DNA, 25 bp, Artificial
  probe
  misc_feature (1)..(25): SEQ ID NO: 915; WAN024DUD_at; Start 508; Stop 532
gctttgctacatggagaatcggaac

SEQ ID NO: 171574 - DNA, 25 bp, Artificial
  probe
  misc_feature (1)..(25): SEQ ID NO: 915; WAN024DUD_at; Start 869; Stop 893
taaagtcctatattgagaagcagag

SEQ ID NO: 171575 - DNA, 25 bp, Artificial
  probe
  misc_feature (1)..(25): SEQ ID NO: 5187; WAN024DUE_at; Start 16; Stop 40
tggcacatcaatcaaaccaaccgct

SEQ ID NO: 171576 - DNA, 25 bp, Artificial
  probe
  misc_feature (1)..(25): SEQ ID NO: 5187; WAN024DUE_at; Start 203; Stop 227
gctttaattgcttttccttctgcaa

SEQ ID NO: 171577 - DNA, 25 bp, Artificial
  probe
  misc_feature (1)..(25): SEQ ID NO: 5187; WAN024DUE_at; Start 180; Stop 204
cagtttcttctgcttcaagttgtgc

SEQ ID NO: 171578 - DNA, 25 bp, Artificial
  probe
  misc_feature (1)..(25): SEQ ID NO: 5187; WAN024DUE_at; Start 39; Stop 63
ctcgaatcggagcttgtacttgaat

SEQ ID NO: 171579 - DNA, 25 bp, Artificial
  probe
  misc_feature (1)..(25): SEQ ID NO: 5187; WAN024DUE_at; Start 275; Stop 299
tcacctacagcttgagcagtcgctt

SEQ ID NO: 171580 - DNA, 25 bp, Artificial
  probe
  misc_feature (1)..(25): SEQ ID NO: 5187; WAN024DUE_at; Start 175; Stop 199
tacaacagtttcttctgcttcaagt

SEQ ID NO: 171581 - DNA, 25 bp, Artificial
  probe
  misc_feature (1)..(25): SEQ ID NO: 5187; WAN024DUE_at; Start 218; Stop 242
ccttctgcaatcatctcagcgtgag

SEQ ID NO: 171582 - DNA, 25 bp, Artificial
  probe
  misc_feature (1)..(25): SEQ ID NO: 5187; WAN024DUE_at; Start 9; Stop 33
ttttcactggcacatcaatcaaacc

SEQ ID NO: 171583 - DNA, 25 bp, Artificial
  probe
  misc_feature (1)..(25): SEQ ID NO: 5187; WAN024DUE_at; Start 3; Stop 27
gatagattttcactggcacatcaat

SEQ ID NO: 171584 - DNA, 25 bp, Artificial
  probe
  misc_feature (1)..(25): SEQ ID NO: 5187; WAN024DUE_at; Start 162; Stop 186
tttcaacaaattctacaacagtttc

SEQ ID NO: 171585 - DNA, 25 bp, Artificial
  probe
  misc_feature (1)..(25): SEQ ID NO: 5187; WAN024DUE_at; Start 78; Stop 102
tcttaattccaaattgcttttgcaa

SEQ ID NO: 171586 - DNA, 25 bp, Artificial
  probe
  misc_feature (1)..(25): SEQ ID NO: 5187; WAN024DUE_at; Start 264; Stop 288
taccacgaagttcacctacagcttg

SEQ ID NO: 171587 - DNA, 25 bp, Artificial
  probe
  misc_feature (1)..(25): SEQ ID NO: 5187; WAN024DUE_at; Start 126; Stop 150
taatagaaccaaaggtacgaccatc

SEQ ID NO: 171588 - DNA, 25 bp, Artificial
  probe
  misc_feature (1)..(25): SEQ ID NO: 5187; WAN024DUE_at; Start 195; Stop 219
caagttgtgctttaattgcttttcc

SEQ ID NO: 171589 - DNA, 25 bp, Artificial
  probe
  misc_feature (1)..(25): SEQ ID NO: 5187; WAN024DUE_at; Start 260; Stop 284
tgtttaccacgaagttcacctacag

SEQ ID NO: 171590 - DNA, 25 bp, Artificial
  probe
  misc_feature (1)..(25): SEQ ID NO: 5187; WAN024DUE_at; Start 50; Stop 74
gcttgtacttgaatatgacgtttat

SEQ ID NO: 171591 - DNA, 25 bp, Artificial
  probe
  misc_feature (1)..(25): SEQ ID NO: 5187; WAN024DUE_at; Start 138; Stop 162
aggtacgaccatctggaccaacttt

SEQ ID NO: 171592 - DNA, 25 bp, Artificial
  probe
  misc_feature (1)..(25): SEQ ID NO: 5187; WAN024DUE_at; Start 111; Stop 135
caatcttcttattggtaatagaacc

SEQ ID NO: 171593 - DNA, 25 bp, Artificial
  probe
  misc_feature (1)..(25): SEQ ID NO: 5187; WAN024DUE_at; Start 129; Stop 153
tagaaccaaaggtacgaccatctgg

SEQ ID NO: 171594 - DNA, 25 bp, Artificial
  probe
  misc_feature (1)..(25): SEQ ID NO: 5187; WAN024DUE_at; Start 33; Stop 57
caaccgctcgaatcggagcttgtac

SEQ ID NO: 171595 - DNA, 25 bp, Artificial
  probe
  misc_feature (1)..(25): SEQ ID NO: 5187; WAN024DUE_at; Start 135; Stop 159
caaaggtacgaccatctggaccaac

SEQ ID NO: 171596 - DNA, 25 bp, Artificial
  probe
  misc_feature (1)..(25): SEQ ID NO: 5187; WAN024DUE_at; Start 66; Stop 90
gacgtttatcaatcttaattccaaa

SEQ ID NO: 171597 - DNA, 25 bp, Artificial
  probe
  misc_feature (1)..(25): SEQ ID NO: 5187; WAN024DUE_at; Start 231; Stop 255
tctcagcgtgagctttttcttccga

SEQ ID NO: 171598 - DNA, 25 bp, Artificial
  probe
  misc_feature (1)..(25): SEQ ID NO: 5187; WAN024DUE_at; Start 147; Stop 171
catctggaccaactttttcaacaaa

SEQ ID NO: 171599 - DNA, 25 bp, Artificial
  probe
  misc_feature (1)..(25): SEQ ID NO: 5187; WAN024DUE_at; Start 285; Stop 309
cttgagcagtcgcttctttggctag

SEQ ID NO: 171600 - DNA, 25 bp, Artificial
  probe
  misc_feature (1)..(25): SEQ ID NO: 5187; WAN024DUE_at; Start 28; Stop 52
caaaccaaccgctcgaatcggagct

SEQ ID NO: 171601 - DNA, 25 bp, Artificial
  probe
  misc_feature (1)..(25): SEQ ID NO: 5187; WAN024DUE_at; Start 23; Stop 47
tcaatcaaaccaaccgctcgaatcg

SEQ ID NO: 171602 - DNA, 25 bp, Artificial
  probe
  misc_feature (1)..(25): SEQ ID NO: 5187; WAN024DUE_at; Start 221; Stop 245
tctgcaatcatctcagcgtgagctt

SEQ ID NO: 171603 - DNA, 25 bp, Artificial
  probe
  misc_feature (1)..(25): SEQ ID NO: 5187; WAN024DUE_at; Start 99; Stop 123
gcaattcttctgcaatcttcttatt

SEQ ID NO: 171604 - DNA, 25 bp, Artificial
  probe
  misc_feature (1)..(25): SEQ ID NO: 5187; WAN024DUE_at; Start 280; Stop 304
tacagcttgagcagtcgcttctttg

SEQ ID NO: 171605 - DNA, 25 bp, Artificial
  probe
  misc_feature (1)..(25): SEQ ID NO: 5187; WAN024DUE_at; Start 88; Stop 112
aaattgcttttgcaattcttctgca

SEQ ID NO: 171606 - DNA, 25 bp, Artificial
  probe
  misc_feature (1)..(25): SEQ ID NO: 5187; WAN024DUE_at; Start 45; Stop 69
tcggagcttgtacttgaatatgacg

SEQ ID NO: 171607 - DNA, 25 bp, Artificial
  probe
  misc_feature (1)..(25): SEQ ID NO: 5187; WAN024DUE_at; Start 237; Stop 261
cgtgagctttttcttccgatttttg

SEQ ID NO: 171608 - DNA, 25 bp, Artificial
  probe
  misc_feature (1)..(25): SEQ ID NO: 5187; WAN024DUE_at; Start 270; Stop 294
gaagttcacctacagcttgagcagt

SEQ ID NO: 171609 - DNA, 25 bp, Artificial
  probe
  misc_feature (1)..(25): SEQ ID NO: 919; WAN024DUF_at; Start 356; Stop 380
tacaagctccgattcgagcggttgg

SEQ ID NO: 171610 - DNA, 25 bp, Artificial
  probe
  misc_feature (1)..(25): SEQ ID NO: 919; WAN024DUF_at; Start 199; Stop 223
gcaattaaagcacaacttgaagcag

SEQ ID NO: 171611 - DNA, 25 bp, Artificial
  probe
  misc_feature (1)..(25): SEQ ID NO: 919; WAN024DUF_at; Start 116; Stop 140
cgactgctcaagctgtaggtgaact

SEQ ID NO: 171612 - DNA, 25 bp, Artificial
  probe
  misc_feature (1)..(25): SEQ ID NO: 919; WAN024DUF_at; Start 157; Stop 181
tcggaagaaaaagctcacgctgaga

SEQ ID NO: 171613 - DNA, 25 bp, Artificial
  probe
  misc_feature (1)..(25): SEQ ID NO: 919; WAN024DUF_at; Start 388; Stop 412
gatgtgccagtgaaaatctatcaag

SEQ ID NO: 171614 - DNA, 25 bp, Artificial
  probe
  misc_feature (1)..(25): SEQ ID NO: 919; WAN024DUF_at; Start 129; Stop 153
tgtaggtgaacttcgtggtaaacaa

SEQ ID NO: 171615 - DNA, 25 bp, Artificial
  probe
  misc_feature (1)..(25): SEQ ID NO: 919; WAN024DUF_at; Start 339; Stop 363
taaacgtcatattcaagtacaagct

SEQ ID NO: 171616 - DNA, 25 bp, Artificial
  probe
  misc_feature (1)..(25): SEQ ID NO: 919; WAN024DUF_at; Start 372; Stop 396
agcggttggtttgattgatgtgcca

SEQ ID NO: 171617 - DNA, 25 bp, Artificial
  probe
  misc_feature (1)..(25): SEQ ID NO: 919; WAN024DUF_at; Start 325; Stop 349
ggaattaagattgataaacgtcata

SEQ ID NO: 171618 - DNA, 25 bp, Artificial
  probe
  misc_feature (1)..(25): SEQ ID NO: 919; WAN024DUF_at; Start 211; Stop 235
caacttgaagcagaagaaactgttg

SEQ ID NO: 171619 - DNA, 25 bp, Artificial
  probe
  misc_feature (1)..(25): SEQ ID NO: 919; WAN024DUF_at; Start 300; Stop 324
tgcagaagaattgcaaaagcaattt

SEQ ID NO: 171620 - DNA, 25 bp, Artificial
  probe
  misc_feature (1)..(25): SEQ ID NO: 919; WAN024DUF_at; Start 166; Stop 190
aaagctcacgctgagatgattgcag

SEQ ID NO: 171621 - DNA, 25 bp, Artificial
  probe
  misc_feature (1)..(25): SEQ ID NO: 919; WAN024DUF_at; Start 404; Stop 428
tctatcaagatatcacaagtgtaat

SEQ ID NO: 171622 - DNA, 25 bp, Artificial
  probe
  misc_feature (1)..(25): SEQ ID NO: 919; WAN024DUF_at; Start 124; Stop 148
caagctgtaggtgaacttcgtggta

SEQ ID NO: 171623 - DNA, 25 bp, Artificial
  probe
  misc_feature (1)..(25): SEQ ID NO: 919; WAN024DUF_at; Start 250; Stop 274
aaagttggtccagatggtcgtacct

SEQ ID NO: 171624 - DNA, 25 bp, Artificial
  probe
  misc_feature (1)..(25): SEQ ID NO: 919; WAN024DUF_at; Start 17; Stop 41
tagcagatgttaaaggaaaaggtaa

SEQ ID NO: 171625 - DNA, 25 bp, Artificial
  probe
  misc_feature (1)..(25): SEQ ID NO: 919; WAN024DUF_at; Start 2; Stop 26
tgaaagtaatctttttagcagatgt

SEQ ID NO: 171626 - DNA, 25 bp, Artificial
  probe
  misc_feature (1)..(25): SEQ ID NO: 919; WAN024DUF_at; Start 260; Stop 284
cagatggtcgtacctttggttctat

SEQ ID NO: 171627 - DNA, 25 bp, Artificial
  probe
  misc_feature (1)..(25): SEQ ID NO: 919; WAN024DUF_at; Start 108; Stop 132
caaagaagcgactgctcaagctgta

SEQ ID NO: 171628 - DNA, 25 bp, Artificial
  probe
  misc_feature (1)..(25): SEQ ID NO: 919; WAN024DUF_at; Start 226; Stop 250
gaaactgttgtagaatttgttgaaa

SEQ ID NO: 171629 - DNA, 25 bp, Artificial
  probe
  misc_feature (1)..(25): SEQ ID NO: 919; WAN024DUF_at; Start 102; Stop 126
tctagccaaagaagcgactgctcaa

SEQ ID NO: 171630 - DNA, 25 bp, Artificial
  probe
  misc_feature (1)..(25): SEQ ID NO: 919; WAN024DUF_at; Start 280; Stop 304
tctattaccaataagaagattgcag

SEQ ID NO: 171631 - DNA, 25 bp, Artificial
  probe
  misc_feature (1)..(25): SEQ ID NO: 919; WAN024DUF_at; Start 311; Stop 335
tgcaaaagcaatttggaattaagat

SEQ ID NO: 171632 - DNA, 25 bp, Artificial
  probe
  misc_feature (1)..(25): SEQ ID NO: 919; WAN024DUF_at; Start 241; Stop 265
tttgttgaaaaagttggtccagatg

SEQ ID NO: 171633 - DNA, 25 bp, Artificial
  probe
  misc_feature (1)..(25): SEQ ID NO: 919; WAN024DUF_at; Start 365; Stop 389
cgattcgagcggttggtttgattga

SEQ ID NO: 171634 - DNA, 25 bp, Artificial
  probe
  misc_feature (1)..(25): SEQ ID NO: 919; WAN024DUF_at; Start 87; Stop 111
tcttatcaaaaagaatctagccaaa

SEQ ID NO: 171635 - DNA, 25 bp, Artificial
  probe
  misc_feature (1)..(25): SEQ ID NO: 919; WAN024DUF_at; Start 172; Stop 196
cacgctgagatgattgcagaaggaa

SEQ ID NO: 171636 - DNA, 25 bp, Artificial
  probe
  misc_feature (1)..(25): SEQ ID NO: 919; WAN024DUF_at; Start 53; Stop 77
ttaaggaagtaccaacagggtatgc

SEQ ID NO: 171637 - DNA, 25 bp, Artificial
  probe
  misc_feature (1)..(25): SEQ ID NO: 919; WAN024DUF_at; Start 58; Stop 82
gaagtaccaacagggtatgcgcaaa

SEQ ID NO: 171638 - DNA, 25 bp, Artificial
  probe
  misc_feature (1)..(25): SEQ ID NO: 919; WAN024DUF_at; Start 348; Stop 372
tattcaagtacaagctccgattcga

SEQ ID NO: 171639 - DNA, 25 bp, Artificial
  probe
  misc_feature (1)..(25): SEQ ID NO: 919; WAN024DUF_at; Start 432; Stop 456
tcttcgtgtgaaagaaggataacta

SEQ ID NO: 171640 - DNA, 25 bp, Artificial
  probe
  misc_feature (1)..(25): SEQ ID NO: 919; WAN024DUF_at; Start 187; Stop 211
gcagaaggaaaagcaattaaagcac

SEQ ID NO: 171641 - DNA, 25 bp, Artificial
  probe
  misc_feature (1)..(25): SEQ ID NO: 919; WAN024DUF_at; Start 419; Stop 443
caagtgtaatcaatcttcgtgtgaa

SEQ ID NO: 171642 - DNA, 25 bp, Artificial
  probe
  misc_feature (1)..(25): SEQ ID NO: 919; WAN024DUF_at; Start 151; Stop 175
caaaaatcggaagaaaaagctcacg

SEQ ID NO: 171643 - DNA, 25 bp, Artificial
  probe
  misc_feature (1)..(25): SEQ ID NO: 5428; WAN024DUG_at; Start 71; Stop 95
tttgggataccctcctcttcttcac

SEQ ID NO: 171644 - DNA, 25 bp, Artificial
  probe
  misc_feature (1)..(25): SEQ ID NO: 5428; WAN024DUG_at; Start 99; Stop 123
cacgttcatagtagtcatcgcgata

SEQ ID NO: 171645 - DNA, 25 bp, Artificial
  probe
  misc_feature (1)..(25): SEQ ID NO: 5428; WAN024DUG_at; Start 150; Stop 174
gctcaatagacccagattcacgaat

SEQ ID NO: 171646 - DNA, 25 bp, Artificial
  probe
  misc_feature (1)..(25): SEQ ID NO: 5428; WAN024DUG_at; Start 211; Stop 235
tacaccacgagaaagctgactcaga

SEQ ID NO: 171647 - DNA, 25 bp, Artificial
  probe
  misc_feature (1)..(25): SEQ ID NO: 5428; WAN024DUG_at; Start 206; Stop 230
tgttctacaccacgagaaagctgac

SEQ ID NO: 171648 - DNA, 25 bp, Artificial
  probe
  misc_feature (1)..(25): SEQ ID NO: 5428; WAN024DUG_at; Start 243; Stop 267
ctggaaccttcaattccttggctag

SEQ ID NO: 171649 - DNA, 25 bp, Artificial
  probe
  misc_feature (1)..(25): SEQ ID NO: 5428; WAN024DUG_at; Start 234; Stop 258
gagcgattactggaaccttcaattc

SEQ ID NO: 171650 - DNA, 25 bp, Artificial
  probe
  misc_feature (1)..(25): SEQ ID NO: 5428; WAN024DUG_at; Start 181; Stop 205
caagaccggtctcttgtcctgacgt

SEQ ID NO: 171651 - DNA, 25 bp, Artificial
  probe
  misc_feature (1)..(25): SEQ ID NO: 5428; WAN024DUG_at; Start 64; Stop 88
cttattatttgggataccctcctct

SEQ ID NO: 171652 - DNA, 25 bp, Artificial
  probe
  misc_feature (1)..(25): SEQ ID NO: 5428; WAN024DUG_at; Start 104; Stop 128
tcatagtagtcatcgcgatagagaa

SEQ ID NO: 171653 - DNA, 25 bp, Artificial
  probe
  misc_feature (1)..(25): SEQ ID NO: 5428; WAN024DUG_at; Start 43; Stop 67
tttctcgataataacttccacctta

SEQ ID NO: 171654 - DNA, 25 bp, Artificial
  probe
  misc_feature (1)..(25): SEQ ID NO: 5428; WAN024DUG_at; Start 126; Stop 150
gaaaagctacgatatcagcgtcctg

SEQ ID NO: 171655 - DNA, 25 bp, Artificial
  probe
  misc_feature (1)..(25): SEQ ID NO: 5428; WAN024DUG_at; Start 223; Stop 247
aagctgactcagagcgattactgga

SEQ ID NO: 171656 - DNA, 25 bp, Artificial
  probe
  misc_feature (1)..(25): SEQ ID NO: 5428; WAN024DUG_at; Start 143; Stop 167
gcgtcctgctcaatagacccagatt

SEQ ID NO: 171657 - DNA, 25 bp, Artificial
  probe
  misc_feature (1)..(25): SEQ ID NO: 5428; WAN024DUG_at; Start 216; Stop 240
cacgagaaagctgactcagagcgat

SEQ ID NO: 171658 - DNA, 25 bp, Artificial
  probe
  misc_feature (1)..(25): SEQ ID NO: 5428; WAN024DUG_at; Start 7; Stop 31
aatcaattccactgttccacgagct

SEQ ID NO: 171659 - DNA, 25 bp, Artificial
  probe
  misc_feature (1)..(25): SEQ ID NO: 5428; WAN024DUG_at; Start 201; Stop 225
gacgttgttctacaccacgagaaag

SEQ ID NO: 171660 - DNA, 25 bp, Artificial
  probe
  misc_feature (1)..(25): SEQ ID NO: 5428; WAN024DUG_at; Start 96; Stop 120
caccacgttcatagtagtcatcgcg

SEQ ID NO: 171661 - DNA, 25 bp, Artificial
  probe
  misc_feature (1)..(25): SEQ ID NO: 5428; WAN024DUG_at; Start 171; Stop 195
gaatatcagacaagaccggtctctt

SEQ ID NO: 171662 - DNA, 25 bp, Artificial
  probe
  misc_feature (1)..(25): SEQ ID NO: 5428; WAN024DUG_at; Start 184; Stop 208
gaccggtctcttgtcctgacgttgt

SEQ ID NO: 171663 - DNA, 25 bp, Artificial
  probe
  misc_feature (1)..(25): SEQ ID NO: 5428; WAN024DUG_at; Start 164; Stop 188
gattcacgaatatcagacaagaccg

SEQ ID NO: 171664 - DNA, 25 bp, Artificial
  probe
  misc_feature (1)..(25): SEQ ID NO: 5428; WAN024DUG_at; Start 167; Stop 191
tcacgaatatcagacaagaccggtc

SEQ ID NO: 171665 - DNA, 25 bp, Artificial
  probe
  misc_feature (1)..(25): SEQ ID NO: 5428; WAN024DUG_at; Start 136; Stop 160
gatatcagcgtcctgctcaatagac

SEQ ID NO: 171666 - DNA, 25 bp, Artificial
  probe
  misc_feature (1)..(25): SEQ ID NO: 5428; WAN024DUG_at; Start 122; Stop 146
tagagaaaagctacgatatcagcgt

SEQ ID NO: 171667 - DNA, 25 bp, Artificial
  probe
  misc_feature (1)..(25): SEQ ID NO: 5428; WAN024DUG_at; Start 131; Stop 155
gctacgatatcagcgtcctgctcaa

SEQ ID NO: 171668 - DNA, 25 bp, Artificial
  probe
  misc_feature (1)..(25): SEQ ID NO: 5428; WAN024DUG_at; Start 86; Stop 110
tcttcttcaccaccacgttcatagt

SEQ ID NO: 171669 - DNA, 25 bp, Artificial
  probe
  misc_feature (1)..(25): SEQ ID NO: 5428; WAN024DUG_at; Start 227; Stop 251
tgactcagagcgattactggaacct

SEQ ID NO: 171670 - DNA, 25 bp, Artificial
  probe
  misc_feature (1)..(25): SEQ ID NO: 5428; WAN024DUG_at; Start 29; Stop 53
gctccactacggtttttctcgataa

SEQ ID NO: 171671 - DNA, 25 bp, Artificial
  probe
  misc_feature (1)..(25): SEQ ID NO: 5428; WAN024DUG_at; Start 4; Stop 28
gaaaatcaattccactgttccacga

SEQ ID NO: 171672 - DNA, 25 bp, Artificial
  probe
  misc_feature (1)..(25): SEQ ID NO: 5428; WAN024DUG_at; Start 156; Stop 180
tagacccagattcacgaatatcaga

SEQ ID NO: 171673 - DNA, 25 bp, Artificial
  probe
  misc_feature (1)..(25): SEQ ID NO: 5428; WAN024DUG_at; Start 140; Stop 164
tcagcgtcctgctcaatagacccag

SEQ ID NO: 171674 - DNA, 25 bp, Artificial
  probe
  misc_feature (1)..(25): SEQ ID NO: 5428; WAN024DUG_at; Start 19; Stop 43
tgttccacgagctccactacggttt

SEQ ID NO: 171675 - DNA, 25 bp, Artificial
  probe
  misc_feature (1)..(25): SEQ ID NO: 5428; WAN024DUG_at; Start 113; Stop 137
tcatcgcgatagagaaaagctacga

SEQ ID NO: 171676 - DNA, 25 bp, Artificial
  probe
  misc_feature (1)..(25): SEQ ID NO: 5428; WAN024DUG_at; Start 195; Stop 219
tgtcctgacgttgttctacaccacg

SEQ ID NO: 171677 - DNA, 25 bp, Artificial
  probe
  misc_feature (1)..(25): SEQ ID NO: 3368; WAN024DUH_at; Start 591; Stop 615
gacaacaggacttcatgaggaggag

SEQ ID NO: 171678 - DNA, 25 bp, Artificial
  probe
  misc_feature (1)..(25): SEQ ID NO: 3368; WAN024DUH_at; Start 1158; Stop 1182
tgagcaggacgctgatatcgtagct

SEQ ID NO: 171679 - DNA, 25 bp, Artificial
  probe
  misc_feature (1)..(25): SEQ ID NO: 3368; WAN024DUH_at; Start 655; Stop 679
gcatttgccttgaatatcgctcaga

SEQ ID NO: 171680 - DNA, 25 bp, Artificial
  probe
  misc_feature (1)..(25): SEQ ID NO: 3368; WAN024DUH_at; Start 837; Stop 861
tgctcagggtaatctagctaacgcc

SEQ ID NO: 171681 - DNA, 25 bp, Artificial
  probe
  misc_feature (1)..(25): SEQ ID NO: 3368; WAN024DUH_at; Start 1062; Stop 1086
ggttccagtaatcgctctgagtcag

SEQ ID NO: 171682 - DNA, 25 bp, Artificial
  probe
  misc_feature (1)..(25): SEQ ID NO: 3368; WAN024DUH_at; Start 980; Stop 1004
tcacgggaactggtcgagaaaatcg

SEQ ID NO: 171683 - DNA, 25 bp, Artificial
  probe
  misc_feature (1)..(25): SEQ ID NO: 3368; WAN024DUH_at; Start 1122; Stop 1146
accggtcttgtctgatattcgtgaa

SEQ ID NO: 171684 - DNA, 25 bp, Artificial
  probe
  misc_feature (1)..(25): SEQ ID NO: 3368; WAN024DUH_at; Start 423; Stop 447
tgctcaggcagaaaaagggttgatt

SEQ ID NO: 171685 - DNA, 25 bp, Artificial
  probe
  misc_feature (1)..(25): SEQ ID NO: 3368; WAN024DUH_at; Start 526; Stop 550
gctcgctcgcaacaaacgaccgata

SEQ ID NO: 171686 - DNA, 25 bp, Artificial
  probe
  misc_feature (1)..(25): SEQ ID NO: 3368; WAN024DUH_at; Start 1191; Stop 1215
tcgcgatgactactatgaacgtggt

SEQ ID NO: 171687 - DNA, 25 bp, Artificial
  probe
  misc_feature (1)..(25): SEQ ID NO: 3368; WAN024DUH_at; Start 391; Stop 415
tacgaagcgtcacaaccagctgatg

SEQ ID NO: 171688 - DNA, 25 bp, Artificial
  probe
  misc_feature (1)..(25): SEQ ID NO: 3368; WAN024DUH_at; Start 1145; Stop 1169
aatctgggtctattgagcaggacgc

SEQ ID NO: 171689 - DNA, 25 bp, Artificial
  probe
  misc_feature (1)..(25): SEQ ID NO: 3368; WAN024DUH_at; Start 1090; Stop 1114
tctcgtggtgtagaacaacgtcagg

SEQ ID NO: 171690 - DNA, 25 bp, Artificial
  probe
  misc_feature (1)..(25): SEQ ID NO: 3368; WAN024DUH_at; Start 792; Stop 816
ccgtacagggcaattgacagatgag

SEQ ID NO: 171691 - DNA, 25 bp, Artificial
  probe
  misc_feature (1)..(25): SEQ ID NO: 3368; WAN024DUH_at; Start 288; Stop 312
tgtgccaacttctgctaatgcggag

SEQ ID NO: 171692 - DNA, 25 bp, Artificial
  probe
  misc_feature (1)..(25): SEQ ID NO: 3368; WAN024DUH_at; Start 193; Stop 217
gccatagatgcaacaacggttcgta

SEQ ID NO: 171693 - DNA, 25 bp, Artificial
  probe
  misc_feature (1)..(25): SEQ ID NO: 3368; WAN024DUH_at; Start 618; Stop 642
gattatcttagcagctcgtccagca

SEQ ID NO: 171694 - DNA, 25 bp, Artificial
  probe
  misc_feature (1)..(25): SEQ ID NO: 3368; WAN024DUH_at; Start 910; Stop 934
tctcgttctcgtaaattggctcaag

SEQ ID NO: 171695 - DNA, 25 bp, Artificial
  probe
  misc_feature (1)..(25): SEQ ID NO: 3368; WAN024DUH_at; Start 1330; Stop 1354
tcaagtatctcaaagagggaggcat

SEQ ID NO: 171696 - DNA, 25 bp, Artificial
  probe
  misc_feature (1)..(25): SEQ ID NO: 3368; WAN024DUH_at; Start 879; Stop 903
tacgccaggtattcggattacagag

SEQ ID NO: 171697 - DNA, 25 bp, Artificial
  probe
  misc_feature (1)..(25): SEQ ID NO: 3368; WAN024DUH_at; Start 511; Stop 535
tttggaaatctggaagctcgctcgc

SEQ ID NO: 171698 - DNA, 25 bp, Artificial
  probe
  misc_feature (1)..(25): SEQ ID NO: 3368; WAN024DUH_at; Start 176; Stop 200
tatccgatcgtggtgatgccataga

SEQ ID NO: 171699 - DNA, 25 bp, Artificial
  probe
  misc_feature (1)..(25): SEQ ID NO: 3368; WAN024DUH_at; Start 452; Stop 476
tcagtgaaaatgcaaatcgaagcgg

SEQ ID NO: 171700 - DNA, 25 bp, Artificial
  probe
  misc_feature (1)..(25): SEQ ID NO: 3368; WAN024DUH_at; Start 373; Stop 397
gagtctgtcaaccaagcttacgaag

SEQ ID NO: 171701 - DNA, 25 bp, Artificial
  probe
  misc_feature (1)..(25): SEQ ID NO: 3368; WAN024DUH_at; Start 158; Stop 182
tccaagccatggtcgatttatccga

SEQ ID NO: 171702 - DNA, 25 bp, Artificial
  probe
  misc_feature (1)..(25): SEQ ID NO: 3368; WAN024DUH_at; Start 1105; Stop 1129
caacgtcaggacaagagaccggtct

SEQ ID NO: 171703 - DNA, 25 bp, Artificial
  probe
  misc_feature (1)..(25): SEQ ID NO: 3368; WAN024DUH_at; Start 545; Stop 569
ccgatattacaggtattgcgacagg

SEQ ID NO: 171704 - DNA, 25 bp, Artificial
  probe
  misc_feature (1)..(25): SEQ ID NO: 3368; WAN024DUH_at; Start 964; Stop 988
gactatttgcaacttatcacgggaa

SEQ ID NO: 171705 - DNA, 25 bp, Artificial
  probe
  misc_feature (1)..(25): SEQ ID NO: 3368; WAN024DUH_at; Start 1043; Stop 1067
tactagccaaggaattgaaggttcc

SEQ ID NO: 171706 - DNA, 25 bp, Artificial
  probe
  misc_feature (1)..(25): SEQ ID NO: 3368; WAN024DUH_at; Start 778; Stop 802
gagtcacattctatccgtacagggc

SEQ ID NO: 171707 - DNA, 25 bp, Artificial
  probe
  misc_feature (1)..(25): SEQ ID NO: 3368; WAN024DUH_at; Start 636; Stop 660
tccagcagttggtaagacagcattt

SEQ ID NO: 171708 - DNA, 25 bp, Artificial
  probe
  misc_feature (1)..(25): SEQ ID NO: 3368; WAN024DUH_at; Start 1269; Stop 1293
aaaccgtagtggagctcgtggaaca

SEQ ID NO: 171709 - DNA, 25 bp, Artificial
  probe
  misc_feature (1)..(25): SEQ ID NO: 3368; WAN024DUH_at; Start 719; Stop 743
cactcgaaatgggtgcggaaagctt

SEQ ID NO: 171710 - DNA, 25 bp, Artificial
  probe
  misc_feature (1)..(25): SEQ ID NO: 3368; WAN024DUH_at; Start 44; Stop 68
tcttagctgagcaatccgttttagg

SEQ ID NO: 171711 - DNA, 25 bp, Artificial
  probe
  misc_feature (1)..(25): SEQ ID NO: 4298; WAN024DUI_at; Start 24; Stop 48
cagtgattcctgctcctttttccaa

SEQ ID NO: 171712 - DNA, 25 bp, Artificial
  probe
  misc_feature (1)..(25): SEQ ID NO: 4298; WAN024DUI_at; Start 183; Stop 207
tggcaacataaagccctgtgtggtt

SEQ ID NO: 171713 - DNA, 25 bp, Artificial
  probe
  misc_feature (1)..(25): SEQ ID NO: 4298; WAN024DUI_at; Start 1; Stop 25
gtgttcaacaatagctgcaacggca

SEQ ID NO: 171714 - DNA, 25 bp, Artificial
  probe
  misc_feature (1)..(25): SEQ ID NO: 4298; WAN024DUI_at; Start 113; Stop 137
gaagaactttcttctggtggcaatt

SEQ ID NO: 171715 - DNA, 25 bp, Artificial
  probe
  misc_feature (1)..(25): SEQ ID NO: 4298; WAN024DUI_at; Start 81; Stop 105
caaatggtgcctttccgttgataac

SEQ ID NO: 171716 - DNA, 25 bp, Artificial
  probe
  misc_feature (1)..(25): SEQ ID NO: 4298; WAN024DUI_at; Start 177; Stop 201
tttccttggcaacataaagccctgt

SEQ ID NO: 171717 - DNA, 25 bp, Artificial
  probe
  misc_feature (1)..(25): SEQ ID NO: 4298; WAN024DUI_at; Start 123; Stop 147
cttctggtggcaatttcaaatcaac

SEQ ID NO: 171718 - DNA, 25 bp, Artificial
  probe
  misc_feature (1)..(25): SEQ ID NO: 4298; WAN024DUI_at; Start 16; Stop 40
tgcaacggcagtgattcctgctcct

SEQ ID NO: 171719 - DNA, 25 bp, Artificial
  probe
  misc_feature (1)..(25): SEQ ID NO: 4298; WAN024DUI_at; Start 136; Stop 160
tttcaaatcaacatccactccagct

SEQ ID NO: 171720 - DNA, 25 bp, Artificial
  probe
  misc_feature (1)..(25): SEQ ID NO: 4298; WAN024DUI_at; Start 180; Stop 204
ccttggcaacataaagccctgtgtg

SEQ ID NO: 171721 - DNA, 25 bp, Artificial
  probe
  misc_feature (1)..(25): SEQ ID NO: 4298; WAN024DUI_at; Start 85; Stop 109
tggtgcctttccgttgataaccaag

SEQ ID NO: 171722 - DNA, 25 bp, Artificial
  probe
  misc_feature (1)..(25): SEQ ID NO: 4298; WAN024DUI_at; Start 100; Stop 124
gataaccaagtcagaagaactttct

SEQ ID NO: 171723 - DNA, 25 bp, Artificial
  probe
  misc_feature (1)..(25): SEQ ID NO: 4298; WAN024DUI_at; Start 6; Stop 30
caacaatagctgcaacggcagtgat

SEQ ID NO: 171724 - DNA, 25 bp, Artificial
  probe
  misc_feature (1)..(25): SEQ ID NO: 4298; WAN024DUI_at; Start 197; Stop 221
cctgtgtggttggtatttggtgtcc

SEQ ID NO: 171725 - DNA, 25 bp, Artificial
  probe
  misc_feature (1)..(25): SEQ ID NO: 4298; WAN024DUI_at; Start 204; Stop 228
ggttggtatttggtgtccagtctag

SEQ ID NO: 171726 - DNA, 25 bp, Artificial
  probe
  misc_feature (1)..(25): SEQ ID NO: 4298; WAN024DUI_at; Start 128; Stop 152
ggtggcaatttcaaatcaacatcca

SEQ ID NO: 171727 - DNA, 25 bp, Artificial
  probe
  misc_feature (1)..(25): SEQ ID NO: 4298; WAN024DUI_at; Start 69; Stop 93
ggaaatacactgcaaatggtgcctt

SEQ ID NO: 171728 - DNA, 25 bp, Artificial
  probe
  misc_feature (1)..(25): SEQ ID NO: 4298; WAN024DUI_at; Start 96; Stop 120
cgttgataaccaagtcagaagaact

SEQ ID NO: 171729 - DNA, 25 bp, Artificial
  probe
  misc_feature (1)..(25): SEQ ID NO: 4298; WAN024DUI_at; Start 92; Stop 116
tttccgttgataaccaagtcagaag

SEQ ID NO: 171730 - DNA, 25 bp, Artificial
  probe
  misc_feature (1)..(25): SEQ ID NO: 4298; WAN024DUI_at; Start 145; Stop 169
aacatccactccagcttctttgaaa

SEQ ID NO: 171731 - DNA, 25 bp, Artificial
  probe
  misc_feature (1)..(25): SEQ ID NO: 4298; WAN024DUI_at; Start 65; Stop 89
tcttggaaatacactgcaaatggtg

SEQ ID NO: 171732 - DNA, 25 bp, Artificial
  probe
  misc_feature (1)..(25): SEQ ID NO: 4298; WAN024DUI_at; Start 46; Stop 70
caatttcttagccatgtagtcttgg

SEQ ID NO: 171733 - DNA, 25 bp, Artificial
  probe
  misc_feature (1)..(25): SEQ ID NO: 4298; WAN024DUI_at; Start 89; Stop 113
gcctttccgttgataaccaagtcag

SEQ ID NO: 171734 - DNA, 25 bp, Artificial
  probe
  misc_feature (1)..(25): SEQ ID NO: 4298; WAN024DUI_at; Start 3; Stop 27
gttcaacaatagctgcaacggcagt

SEQ ID NO: 171735 - DNA, 25 bp, Artificial
  probe
  misc_feature (1)..(25): SEQ ID NO: 4298; WAN024DUI_at; Start 37; Stop 61
tcctttttccaatttcttagccatg

SEQ ID NO: 171736 - DNA, 25 bp, Artificial
  probe
  misc_feature (1)..(25): SEQ ID NO: 4298; WAN024DUI_at; Start 187; Stop 211
aacataaagccctgtgtggttggta

SEQ ID NO: 171737 - DNA, 25 bp, Artificial
  probe
  misc_feature (1)..(25): SEQ ID NO: 4298; WAN024DUI_at; Start 151; Stop 175
cactccagcttctttgaaataacct

SEQ ID NO: 171738 - DNA, 25 bp, Artificial
  probe
  misc_feature (1)..(25): SEQ ID NO: 4298; WAN024DUI_at; Start 12; Stop 36
tagctgcaacggcagtgattcctgc

SEQ ID NO: 171739 - DNA, 25 bp, Artificial
  probe
  misc_feature (1)..(25): SEQ ID NO: 4298; WAN024DUI_at; Start 74; Stop 98
tacactgcaaatggtgcctttccgt

SEQ ID NO: 171740 - DNA, 25 bp, Artificial
  probe
  misc_feature (1)..(25): SEQ ID NO: 4298; WAN024DUI_at; Start 117; Stop 141
aactttcttctggtggcaatttcaa

SEQ ID NO: 171741 - DNA, 25 bp, Artificial
  probe
  misc_feature (1)..(25): SEQ ID NO: 4298; WAN024DUI_at; Start 192; Stop 216
aaagccctgtgtggttggtatttgg

SEQ ID NO: 171742 - DNA, 25 bp, Artificial
  probe
  misc_feature (1)..(25): SEQ ID NO: 4298; WAN024DUI_at; Start 9; Stop 33
caatagctgcaacggcagtgattcc

SEQ ID NO: 171743 - DNA, 25 bp, Artificial
  probe
  misc_feature (1)..(25): SEQ ID NO: 4298; WAN024DUI_at; Start 54; Stop 78
tagccatgtagtcttggaaatacac

SEQ ID NO: 171744 - DNA, 25 bp, Artificial
  probe
  misc_feature (1)..(25): SEQ ID NO: 4298; WAN024DUI_at; Start 60; Stop 84
tgtagtcttggaaatacactgcaaa

SEQ ID NO: 171745 - DNA, 25 bp, Artificial
  probe
  misc_feature (1)..(25): SEQ ID NO: 1062; WAN024DUJ_at; Start 553; Stop 577
aatggcgtctttgatactgcttgga

SEQ ID NO: 171746 - DNA, 25 bp, Artificial
  probe
  misc_feature (1)..(25): SEQ ID NO: 1062; WAN024DUJ_at; Start 310; Stop 334
ttggaaaaaggagcaggaatcactg

SEQ ID NO: 171747 - DNA, 25 bp, Artificial
  probe
  misc_feature (1)..(25): SEQ ID NO: 1062; WAN024DUJ_at; Start 82; Stop 106
gcttctaaagacaacaaagaggcag

SEQ ID NO: 171748 - DNA, 25 bp, Artificial
  probe
  misc_feature (1)..(25): SEQ ID NO: 1062; WAN024DUJ_at; Start 471; Stop 495
cttggtagaatctcaaggtggagac

SEQ ID NO: 171749 - DNA, 25 bp, Artificial
  probe
  misc_feature (1)..(25): SEQ ID NO: 1062; WAN024DUJ_at; Start 681; Stop 705
tatcatcgcaaacaacgactatctg

SEQ ID NO: 171750 - DNA, 25 bp, Artificial
  probe
  misc_feature (1)..(25): SEQ ID NO: 1062; WAN024DUJ_at; Start 64; Stop 88
gcctgtggtcaaggaactgcttcta

SEQ ID NO: 171751 - DNA, 25 bp, Artificial
  probe
  misc_feature (1)..(25): SEQ ID NO: 1062; WAN024DUJ_at; Start 522; Stop 546
taacgactcaaactcaatcacaccg

SEQ ID NO: 171752 - DNA, 25 bp, Artificial
  probe
  misc_feature (1)..(25): SEQ ID NO: 1062; WAN024DUJ_at; Start 187; Stop 211
tatttcaaagaagctggagtggatg

SEQ ID NO: 171753 - DNA, 25 bp, Artificial
  probe
  misc_feature (1)..(25): SEQ ID NO: 1062; WAN024DUJ_at; Start 814; Stop 838
cctgaactcaaggaaaaacgtgact

SEQ ID NO: 171754 - DNA, 25 bp, Artificial
  probe
  misc_feature (1)..(25): SEQ ID NO: 1062; WAN024DUJ_at; Start 784; Stop 808
gaagctgcagatattctcatcaaga

SEQ ID NO: 171755 - DNA, 25 bp, Artificial
  probe
  misc_feature (1)..(25): SEQ ID NO: 1062; WAN024DUJ_at; Start 254; Stop 278
ttatcaacggaaaggcaccatttgc

SEQ ID NO: 171756 - DNA, 25 bp, Artificial
  probe
  misc_feature (1)..(25): SEQ ID NO: 1062; WAN024DUJ_at; Start 590; Stop 614
gggatggtatccttgctaaatctca

SEQ ID NO: 171757 - DNA, 25 bp, Artificial
  probe
  misc_feature (1)..(25): SEQ ID NO: 1062; WAN024DUJ_at; Start 751; Stop 775
aaaggctaccaatatgccatggaac

SEQ ID NO: 171758 - DNA, 25 bp, Artificial
  probe
  misc_feature (1)..(25): SEQ ID NO: 1062; WAN024DUJ_at; Start 153; Stop 177
ccacacagggctttatgttgccaag

SEQ ID NO: 171759 - DNA, 25 bp, Artificial
  probe
  misc_feature (1)..(25): SEQ ID NO: 1062; WAN024DUJ_at; Start 768; Stop 792
catggaacatccagaagaagctgca

SEQ ID NO: 171760 - DNA, 25 bp, Artificial
  probe
  misc_feature (1)..(25): SEQ ID NO: 1062; WAN024DUJ_at; Start 42; Stop 66
tcttgtagctgttgtgcttgtggcc

SEQ ID NO: 171761 - DNA, 25 bp, Artificial
  probe
  misc_feature (1)..(25): SEQ ID NO: 1062; WAN024DUJ_at; Start 395; Stop 419
taagcagtccaaaagacttggttgg

SEQ ID NO: 171762 - DNA, 25 bp, Artificial
  probe
  misc_feature (1)..(25): SEQ ID NO: 1062; WAN024DUJ_at; Start 26; Stop 50
taacgcttgtaacagctcttgtagc

SEQ ID NO: 171763 - DNA, 25 bp, Artificial
  probe
  misc_feature (1)..(25): SEQ ID NO: 1062; WAN024DUJ_at; Start 654; Stop 678
caaggagtttgactactattcacca

SEQ ID NO: 171764 - DNA, 25 bp, Artificial
  probe
  misc_feature (1)..(25): SEQ ID NO: 1062; WAN024DUJ_at; Start 859; Stop 883
tacttgtcaaaagaatacgcaagcg

SEQ ID NO: 171765 - DNA, 25 bp, Artificial
  probe
  misc_feature (1)..(25): SEQ ID NO: 1062; WAN024DUJ_at; Start 899; Stop 923
gtcaatttgacgcagctcgctggaa

SEQ ID NO: 171766 - DNA, 25 bp, Artificial
  probe
  misc_feature (1)..(25): SEQ ID NO: 1062; WAN024DUJ_at; Start 269; Stop 293
caccatttgcagtgtatttccaaga

SEQ ID NO: 171767 - DNA, 25 bp, Artificial
  probe
  misc_feature (1)..(25): SEQ ID NO: 1062; WAN024DUJ_at; Start 331; Stop 355
actgccgttgcagctattgttgaac

SEQ ID NO: 171768 - DNA, 25 bp, Artificial
  probe
  misc_feature (1)..(25): SEQ ID NO: 1062; WAN024DUJ_at; Start 434; Stop 458
catggaatgacccaactgaacttgc

SEQ ID NO: 171769 - DNA, 25 bp, Artificial
  probe
  misc_feature (1)..(25): SEQ ID NO: 1062; WAN024DUJ_at; Start 537; Stop 561
aatcacaccgattgccaatggcgtc

SEQ ID NO: 171770 - DNA, 25 bp, Artificial
  probe
  misc_feature (1)..(25): SEQ ID NO: 1062; WAN024DUJ_at; Start 357; Stop 381
caatacatcaggaatcatctctcgt

SEQ ID NO: 171771 - DNA, 25 bp, Artificial
  probe
  misc_feature (1)..(25): SEQ ID NO: 1062; WAN024DUJ_at; Start 451; Stop 475
gaacttgctatgttgaaaaccttgg

SEQ ID NO: 171772 - DNA, 25 bp, Artificial
  probe
  misc_feature (1)..(25): SEQ ID NO: 1062; WAN024DUJ_at; Start 610; Stop 634
tctcaaggtgtagatgctaacttca

SEQ ID NO: 171773 - DNA, 25 bp, Artificial
  probe
  misc_feature (1)..(25): SEQ ID NO: 1062; WAN024DUJ_at; Start 705; Stop 729
gaaagataacaaagaagaagctcgc

SEQ ID NO: 171774 - DNA, 25 bp, Artificial
  probe
  misc_feature (1)..(25): SEQ ID NO: 1062; WAN024DUJ_at; Start 96; Stop 120
caaagaggcagaacttaagaaggtt

SEQ ID NO: 171775 - DNA, 25 bp, Artificial
  probe
  misc_feature (1)..(25): SEQ ID NO: 1062; WAN024DUJ_at; Start 569; Stop 593
ctgcttggatttactacggttggga

SEQ ID NO: 171776 - DNA, 25 bp, Artificial
  probe
  misc_feature (1)..(25): SEQ ID NO: 1062; WAN024DUJ_at; Start 718; Stop 742
gaagaagctcgcaaagtcatccaag

SEQ ID NO: 171777 - DNA, 25 bp, Artificial
  probe
  misc_feature (1)..(25): SEQ ID NO: 1062; WAN024DUJ_at; Start 967; Stop 991
gacttgacagacaaaggcttcacca

SEQ ID NO: 171778 - DNA, 25 bp, Artificial
  probe
  misc_feature (1)..(25): SEQ ID NO: 1062; WAN024DUJ_at; Start 874; Stop 898
tacgcaagcgacaaggaaaaatggg

SEQ ID NO: 171779 - DNA, 25 bp, Artificial
  probe
  misc_feature (1)..(25): SEQ ID NO: 5070; WAN024DUK_at; Start 206; Stop 230
tgcaactccacgataccagattgat

SEQ ID NO: 171780 - DNA, 25 bp, Artificial
  probe
  misc_feature (1)..(25): SEQ ID NO: 5070; WAN024DUK_at; Start 47; Stop 71
tcatgatgactagaaaactcaatcc

SEQ ID NO: 171781 - DNA, 25 bp, Artificial
  probe
  misc_feature (1)..(25): SEQ ID NO: 5070; WAN024DUK_at; Start 181; Stop 205
aaaggtatctgccaactgactccgt

SEQ ID NO: 171782 - DNA, 25 bp, Artificial
  probe
  misc_feature (1)..(25): SEQ ID NO: 5070; WAN024DUK_at; Start 37; Stop 61
ccggagcatttcatgatgactagaa

SEQ ID NO: 171783 - DNA, 25 bp, Artificial
  probe
  misc_feature (1)..(25): SEQ ID NO: 5070; WAN024DUK_at; Start 72; Stop 96
gtcctatacgaatgtagcctccgcc

SEQ ID NO: 171784 - DNA, 25 bp, Artificial
  probe
  misc_feature (1)..(25): SEQ ID NO: 5070; WAN024DUK_at; Start 97; Stop 121
accacgcttactttcaaccaagtag

SEQ ID NO: 171785 - DNA, 25 bp, Artificial
  probe
  misc_feature (1)..(25): SEQ ID NO: 5070; WAN024DUK_at; Start 132; Stop 156
ccgtaaagcgtgtcttgatcacgta

SEQ ID NO: 171786 - DNA, 25 bp, Artificial
  probe
  misc_feature (1)..(25): SEQ ID NO: 5070; WAN024DUK_at; Start 105; Stop 129
tactttcaaccaagtagcctctact

SEQ ID NO: 171787 - DNA, 25 bp, Artificial
  probe
  misc_feature (1)..(25): SEQ ID NO: 5070; WAN024DUK_at; Start 57; Stop 81
tagaaaactcaatccgtcctatacg

SEQ ID NO: 171788 - DNA, 25 bp, Artificial
  probe
  misc_feature (1)..(25): SEQ ID NO: 5070; WAN024DUK_at; Start 14; Stop 38
tcaccaatcgagtaaagcagctccc

SEQ ID NO: 171789 - DNA, 25 bp, Artificial
  probe
  misc_feature (1)..(25): SEQ ID NO: 5070; WAN024DUK_at; Start 201; Stop 225
tccgttgcaactccacgataccaga

SEQ ID NO: 171790 - DNA, 25 bp, Artificial
  probe
  misc_feature (1)..(25): SEQ ID NO: 5070; WAN024DUK_at; Start 157; Stop 181
gttaatctgactaggaacaacctga

SEQ ID NO: 171791 - DNA, 25 bp, Artificial
  probe
  misc_feature (1)..(25): SEQ ID NO: 5070; WAN024DUK_at; Start 18; Stop 42
caatcgagtaaagcagctcccggag

SEQ ID NO: 171792 - DNA, 25 bp, Artificial
  probe
  misc_feature (1)..(25): SEQ ID NO: 5070; WAN024DUK_at; Start 210; Stop 234
actccacgataccagattgatctaa

SEQ ID NO: 171793 - DNA, 25 bp, Artificial
  probe
  misc_feature (1)..(25): SEQ ID NO: 5070; WAN024DUK_at; Start 142; Stop 166
tgtcttgatcacgtagttaatctga

SEQ ID NO: 171794 - DNA, 25 bp, Artificial
  probe
  misc_feature (1)..(25): SEQ ID NO: 5070; WAN024DUK_at; Start 10; Stop 34
tcgctcaccaatcgagtaaagcagc

SEQ ID NO: 171795 - DNA, 25 bp, Artificial
  probe
  misc_feature (1)..(25): SEQ ID NO: 5070; WAN024DUK_at; Start 168; Stop 192
taggaacaacctgaaaggtatctgc

SEQ ID NO: 171796 - DNA, 25 bp, Artificial
  probe
  misc_feature (1)..(25): SEQ ID NO: 5070; WAN024DUK_at; Start 117; Stop 141
agtagcctctactttccgtaaagcg

SEQ ID NO: 171797 - DNA, 25 bp, Artificial
  probe
  misc_feature (1)..(25): SEQ ID NO: 5070; WAN024DUK_at; Start 125; Stop 149
ctactttccgtaaagcgtgtcttga

SEQ ID NO: 171798 - DNA, 25 bp, Artificial
  probe
  misc_feature (1)..(25): SEQ ID NO: 5070; WAN024DUK_at; Start 119; Stop 143
tagcctctactttccgtaaagcgtg

SEQ ID NO: 171799 - DNA, 25 bp, Artificial
  probe
  misc_feature (1)..(25): SEQ ID NO: 5070; WAN024DUK_at; Start 175; Stop 199
aacctgaaaggtatctgccaactga

SEQ ID NO: 171800 - DNA, 25 bp, Artificial
  probe
  misc_feature (1)..(25): SEQ ID NO: 5070; WAN024DUK_at; Start 6; Stop 30
tgactcgctcaccaatcgagtaaag

SEQ ID NO: 171801 - DNA, 25 bp, Artificial
  probe
  misc_feature (1)..(25): SEQ ID NO: 5070; WAN024DUK_at; Start 162; Stop 186
tctgactaggaacaacctgaaaggt

SEQ ID NO: 171802 - DNA, 25 bp, Artificial
  probe
  misc_feature (1)..(25): SEQ ID NO: 5070; WAN024DUK_at; Start 204; Stop 228
gttgcaactccacgataccagattg

SEQ ID NO: 171803 - DNA, 25 bp, Artificial
  probe
  misc_feature (1)..(25): SEQ ID NO: 5070; WAN024DUK_at; Start 1; Stop 25
ttgactgactcgctcaccaatcgag

SEQ ID NO: 171804 - DNA, 25 bp, Artificial
  probe
  misc_feature (1)..(25): SEQ ID NO: 5070; WAN024DUK_at; Start 179; Stop 203
tgaaaggtatctgccaactgactcc

SEQ ID NO: 171805 - DNA, 25 bp, Artificial
  probe
  misc_feature (1)..(25): SEQ ID NO: 5070; WAN024DUK_at; Start 31; Stop 55
cagctcccggagcatttcatgatga

SEQ ID NO: 171806 - DNA, 25 bp, Artificial
  probe
  misc_feature (1)..(25): SEQ ID NO: 5070; WAN024DUK_at; Start 51; Stop 75
gatgactagaaaactcaatccgtcc

SEQ ID NO: 171807 - DNA, 25 bp, Artificial
  probe
  misc_feature (1)..(25): SEQ ID NO: 5070; WAN024DUK_at; Start 194; Stop 218
aactgactccgttgcaactccacga

SEQ ID NO: 171808 - DNA, 25 bp, Artificial
  probe
  misc_feature (1)..(25): SEQ ID NO: 5070; WAN024DUK_at; Start 151; Stop 175
cacgtagttaatctgactaggaaca

SEQ ID NO: 171809 - DNA, 25 bp, Artificial
  probe
  misc_feature (1)..(25): SEQ ID NO: 5070; WAN024DUK_at; Start 21; Stop 45
tcgagtaaagcagctcccggagcat

SEQ ID NO: 171810 - DNA, 25 bp, Artificial
  probe
  misc_feature (1)..(25): SEQ ID NO: 5070; WAN024DUK_at; Start 65; Stop 89
tcaatccgtcctatacgaatgtagc

SEQ ID NO: 171811 - DNA, 25 bp, Artificial
  probe
  misc_feature (1)..(25): SEQ ID NO: 5070; WAN024DUK_at; Start 184; Stop 208
ggtatctgccaactgactccgttgc

SEQ ID NO: 171812 - DNA, 25 bp, Artificial
  probe
  misc_feature (1)..(25): SEQ ID NO: 5070; WAN024DUK_at; Start 35; Stop 59
tcccggagcatttcatgatgactag

SEQ ID NO: 171813 - DNA, 25 bp, Artificial
  probe
  misc_feature (1)..(25): SEQ ID NO: 1503; WAN024DUL_at; Start 334; Stop 358
gagcgagtcagtcaagaaatttatg

SEQ ID NO: 171814 - DNA, 25 bp, Artificial
  probe
  misc_feature (1)..(25): SEQ ID NO: 1503; WAN024DUL_at; Start 141; Stop 165
gcaacggagtcagttggcagatacc

SEQ ID NO: 171815 - DNA, 25 bp, Artificial
  probe
  misc_feature (1)..(25): SEQ ID NO: 1503; WAN024DUL_at; Start 3; Stop 27
gagaaaatttcggtataatagtcaa

SEQ ID NO: 171816 - DNA, 25 bp, Artificial
  probe
  misc_feature (1)..(25): SEQ ID NO: 1503; WAN024DUL_at; Start 65; Stop 89
tgagatttaaaaatacatcggatca

SEQ ID NO: 171817 - DNA, 25 bp, Artificial
  probe
  misc_feature (1)..(25): SEQ ID NO: 1503; WAN024DUL_at; Start 121; Stop 145
caatctggtatcgtggagttgcaac

SEQ ID NO: 171818 - DNA, 25 bp, Artificial
  probe
  misc_feature (1)..(25): SEQ ID NO: 1503; WAN024DUL_at; Start 29; Stop 53
caaggtcaaggtttaaagagagagg

SEQ ID NO: 171819 - DNA, 25 bp, Artificial
  probe
  misc_feature (1)..(25): SEQ ID NO: 1503; WAN024DUL_at; Start 496; Stop 520
caagaggtagatagaaaagggaagt

SEQ ID NO: 171820 - DNA, 25 bp, Artificial
  probe
  misc_feature (1)..(25): SEQ ID NO: 1503; WAN024DUL_at; Start 129; Stop 153
tatcgtggagttgcaacggagtcag

SEQ ID NO: 171821 - DNA, 25 bp, Artificial
  probe
  misc_feature (1)..(25): SEQ ID NO: 1503; WAN024DUL_at; Start 229; Stop 253
tacttggttgaaagtaagcgtggtg

SEQ ID NO: 171822 - DNA, 25 bp, Artificial
  probe
  misc_feature (1)..(25): SEQ ID NO: 1503; WAN024DUL_at; Start 90; Stop 114
tattgaggcctacatcaaggcgatt

SEQ ID NO: 171823 - DNA, 25 bp, Artificial
  probe
  misc_feature (1)..(25): SEQ ID NO: 1503; WAN024DUL_at; Start 150; Stop 174
tcagttggcagatacctttcaggtt

SEQ ID NO: 171824 - DNA, 25 bp, Artificial
  probe
  misc_feature (1)..(25): SEQ ID NO: 1503; WAN024DUL_at; Start 174; Stop 198
tgttcctagtcagattaactacgtg

SEQ ID NO: 171825 - DNA, 25 bp, Artificial
  probe
  misc_feature (1)..(25): SEQ ID NO: 1503; WAN024DUL_at; Start 465; Stop 489
tgttcgagcaaacatgctacgtcag

SEQ ID NO: 171826 - DNA, 25 bp, Artificial
  probe
  misc_feature (1)..(25): SEQ ID NO: 1503; WAN024DUL_at; Start 78; Stop 102
tacatcggatcatattgaggcctac

SEQ ID NO: 171827 - DNA, 25 bp, Artificial
  probe
  misc_feature (1)..(25): SEQ ID NO: 1503; WAN024DUL_at; Start 163; Stop 187
acctttcaggttgttcctagtcaga

SEQ ID NO: 171828 - DNA, 25 bp, Artificial
  probe
  misc_feature (1)..(25): SEQ ID NO: 1503; WAN024DUL_at; Start 260; Stop 284
gctacattcgtataggacggattga

SEQ ID NO: 171829 - DNA, 25 bp, Artificial
  probe
  misc_feature (1)..(25): SEQ ID NO: 1503; WAN024DUL_at; Start 313; Stop 337
gagctgctttactcgattggtgagc

SEQ ID NO: 171830 - DNA, 25 bp, Artificial
  probe
  misc_feature (1)..(25): SEQ ID NO: 1503; WAN024DUL_at; Start 16; Stop 40
tataatagtcaaacaaggtcaaggt

SEQ ID NO: 171831 - DNA, 25 bp, Artificial
  probe
  misc_feature (1)..(25): SEQ ID NO: 1503; WAN024DUL_at; Start 275; Stop 299
gacggattgagttttctagtcatca

SEQ ID NO: 171832 - DNA, 25 bp, Artificial
  probe
  misc_feature (1)..(25): SEQ ID NO: 1503; WAN024DUL_at; Start 326; Stop 350
cgattggtgagcgagtcagtcaaga

SEQ ID NO: 171833 - DNA, 25 bp, Artificial
  probe
  misc_feature (1)..(25): SEQ ID NO: 1503; WAN024DUL_at; Start 451; Stop 475
gaagaagctccagttgttcgagcaa

SEQ ID NO: 171834 - DNA, 25 bp, Artificial
  probe
  misc_feature (1)..(25): SEQ ID NO: 1503; WAN024DUL_at; Start 200; Stop 224
tcaagacacgctttacggaaagtag

SEQ ID NO: 171835 - DNA, 25 bp, Artificial
  probe
  misc_feature (1)..(25): SEQ ID NO: 1503; WAN024DUL_at; Start 186; Stop 210
gattaactacgtgatcaagacacgc

SEQ ID NO: 171836 - DNA, 25 bp, Artificial
  probe
  misc_feature (1)..(25): SEQ ID NO: 1503; WAN024DUL_at; Start 291; Stop 315
tagtcatcatgaaatgctccgggag

SEQ ID NO: 171837 - DNA, 25 bp, Artificial
  probe
  misc_feature (1)..(25): SEQ ID NO: 1503; WAN024DUL_at; Start 395; Stop 419
tgaccaagcaggagatgaatttgct

SEQ ID NO: 171838 - DNA, 25 bp, Artificial
  probe
  misc_feature (1)..(25): SEQ ID NO: 1503; WAN024DUL_at; Start 389; Stop 413
aattgatgaccaagcaggagatgaa

SEQ ID NO: 171839 - DNA, 25 bp, Artificial
  probe
  misc_feature (1)..(25): SEQ ID NO: 1503; WAN024DUL_at; Start 424; Stop 448
tcagtagctttggatcgcgttttag

SEQ ID NO: 171840 - DNA, 25 bp, Artificial
  probe
  misc_feature (1)..(25): SEQ ID NO: 1503; WAN024DUL_at; Start 105; Stop 129
caaggcgattttagatcaatctggt

SEQ ID NO: 171841 - DNA, 25 bp, Artificial
  probe
  misc_feature (1)..(25): SEQ ID NO: 1503; WAN024DUL_at; Start 363; Stop 387
tattctccagcttttggttgagcag

SEQ ID NO: 171842 - DNA, 25 bp, Artificial
  probe
  misc_feature (1)..(25): SEQ ID NO: 1503; WAN024DUL_at; Start 349; Stop 373
gaaatttatgaggatattctccagc

SEQ ID NO: 171843 - DNA, 25 bp, Artificial
  probe
  misc_feature (1)..(25): SEQ ID NO: 1503; WAN024DUL_at; Start 436; Stop 460
gatcgcgttttaggagaagaagctc

SEQ ID NO: 171844 - DNA, 25 bp, Artificial
  probe
  misc_feature (1)..(25): SEQ ID NO: 1503; WAN024DUL_at; Start 208; Stop 232
cgctttacggaaagtagaggctact

SEQ ID NO: 171845 - DNA, 25 bp, Artificial
  probe
  misc_feature (1)..(25): SEQ ID NO: 1503; WAN024DUL_at; Start 253; Stop 277
ggcggaggctacattcgtataggac

SEQ ID NO: 171846 - DNA, 25 bp, Artificial
  probe
  misc_feature (1)..(25): SEQ ID NO: 1503; WAN024DUL_at; Start 303; Stop 327
aatgctccgggagctgctttactcg

SEQ ID NO: 171847 - DNA, 25 bp, Artificial
  probe
  misc_feature (1)..(25): SEQ ID NO: 7284; WAN024DUM_at; Start 16; Stop 40
gtgctatcaaggacaaaagcacgaa

SEQ ID NO: 171848 - DNA, 25 bp, Artificial
  probe
  misc_feature (1)..(25): SEQ ID NO: 7284; WAN024DUM_at; Start 10; Stop 34
gtttcagtgctatcaaggacaaaag

SEQ ID NO: 171849 - DNA, 25 bp, Artificial
  probe
  misc_feature (1)..(25): SEQ ID NO: 7284; WAN024DUM_at; Start 23; Stop 47
caaggacaaaagcacgaaaggctcc

SEQ ID NO: 171850 - DNA, 25 bp, Artificial
  probe
  misc_feature (1)..(25): SEQ ID NO: 7284; WAN024DUM_at; Start 42; Stop 66
ggctccgctttctgatatagtttta

SEQ ID NO: 171851 - DNA, 25 bp, Artificial
  probe
  misc_feature (1)..(25): SEQ ID NO: 7284; WAN024DUM_at; Start 25; Stop 49
aggacaaaagcacgaaaggctccgc

SEQ ID NO: 171852 - DNA, 25 bp, Artificial
  probe
  misc_feature (1)..(25): SEQ ID NO: 7284; WAN024DUM_at; Start 22; Stop 46
tcaaggacaaaagcacgaaaggctc

SEQ ID NO: 171853 - DNA, 25 bp, Artificial
  probe
  misc_feature (1)..(25): SEQ ID NO: 7284; WAN024DUM_at; Start 38; Stop 62
gaaaggctccgctttctgatatagt

SEQ ID NO: 171854 - DNA, 25 bp, Artificial
  probe
  misc_feature (1)..(25): SEQ ID NO: 7284; WAN024DUM_at; Start 6; Stop 30
gacggtttcagtgctatcaaggaca

SEQ ID NO: 171855 - DNA, 25 bp, Artificial
  probe
  misc_feature (1)..(25): SEQ ID NO: 7284; WAN024DUM_at; Start 9; Stop 33
ggtttcagtgctatcaaggacaaaa

SEQ ID NO: 171856 - DNA, 25 bp, Artificial
  probe
  misc_feature (1)..(25): SEQ ID NO: 7284; WAN024DUM_at; Start 2; Stop 26
tgcggacggtttcagtgctatcaag

SEQ ID NO: 171857 - DNA, 25 bp, Artificial
  probe
  misc_feature (1)..(25): SEQ ID NO: 7284; WAN024DUM_at; Start 5; Stop 29
ggacggtttcagtgctatcaaggac

SEQ ID NO: 171858 - DNA, 25 bp, Artificial
  probe
  misc_feature (1)..(25): SEQ ID NO: 7284; WAN024DUM_at; Start 43; Stop 67
gctccgctttctgatatagttttaa

SEQ ID NO: 171859 - DNA, 25 bp, Artificial
  probe
  misc_feature (1)..(25): SEQ ID NO: 7284; WAN024DUM_at; Start 11; Stop 35
tttcagtgctatcaaggacaaaagc

SEQ ID NO: 171860 - DNA, 25 bp, Artificial
  probe
  misc_feature (1)..(25): SEQ ID NO: 7284; WAN024DUM_at; Start 29; Stop 53
caaaagcacgaaaggctccgctttc

SEQ ID NO: 171861 - DNA, 25 bp, Artificial
  probe
  misc_feature (1)..(25): SEQ ID NO: 7284; WAN024DUM_at; Start 8; Stop 32
cggtttcagtgctatcaaggacaaa

SEQ ID NO: 171862 - DNA, 25 bp, Artificial
  probe
  misc_feature (1)..(25): SEQ ID NO: 7284; WAN024DUM_at; Start 12; Stop 36
ttcagtgctatcaaggacaaaagca

SEQ ID NO: 171863 - DNA, 25 bp, Artificial
  probe
  misc_feature (1)..(25): SEQ ID NO: 7284; WAN024DUM_at; Start 4; Stop 28
cggacggtttcagtgctatcaagga

SEQ ID NO: 171864 - DNA, 25 bp, Artificial
  probe
  misc_feature (1)..(25): SEQ ID NO: 7284; WAN024DUM_at; Start 3; Stop 27
gcggacggtttcagtgctatcaagg

SEQ ID NO: 171865 - DNA, 25 bp, Artificial
  probe
  misc_feature (1)..(25): SEQ ID NO: 7284; WAN024DUM_at; Start 46; Stop 70
ccgctttctgatatagttttaataa

SEQ ID NO: 171866 - DNA, 25 bp, Artificial
  probe
  misc_feature (1)..(25): SEQ ID NO: 7284; WAN024DUM_at; Start 37; Stop 61
cgaaaggctccgctttctgatatag

SEQ ID NO: 171867 - DNA, 25 bp, Artificial
  probe
  misc_feature (1)..(25): SEQ ID NO: 7284; WAN024DUM_at; Start 65; Stop 89
taataattttatccatagctactat

SEQ ID NO: 171868 - DNA, 25 bp, Artificial
  probe
  misc_feature (1)..(25): SEQ ID NO: 7284; WAN024DUM_at; Start 32; Stop 56
aagcacgaaaggctccgctttctga

SEQ ID NO: 171869 - DNA, 25 bp, Artificial
  probe
  misc_feature (1)..(25): SEQ ID NO: 7284; WAN024DUM_at; Start 30; Stop 54
aaaagcacgaaaggctccgctttct

SEQ ID NO: 171870 - DNA, 25 bp, Artificial
  probe
  misc_feature (1)..(25): SEQ ID NO: 7284; WAN024DUM_at; Start 72; Stop 96
tttatccatagctactattttagca

SEQ ID NO: 171871 - DNA, 25 bp, Artificial
  probe
  misc_feature (1)..(25): SEQ ID NO: 7284; WAN024DUM_at; Start 24; Stop 48
aaggacaaaagcacgaaaggctccg

SEQ ID NO: 171872 - DNA, 25 bp, Artificial
  probe
  misc_feature (1)..(25): SEQ ID NO: 7284; WAN024DUM_at; Start 14; Stop 38
cagtgctatcaaggacaaaagcacg

SEQ ID NO: 171873 - DNA, 25 bp, Artificial
  probe
  misc_feature (1)..(25): SEQ ID NO: 7284; WAN024DUM_at; Start 27; Stop 51
gacaaaagcacgaaaggctccgctt

SEQ ID NO: 171874 - DNA, 25 bp, Artificial
  probe
  misc_feature (1)..(25): SEQ ID NO: 7284; WAN024DUM_at; Start 7; Stop 31
acggtttcagtgctatcaaggacaa

SEQ ID NO: 171875 - DNA, 25 bp, Artificial
  probe
  misc_feature (1)..(25): SEQ ID NO: 7284; WAN024DUM_at; Start 40; Stop 64
aaggctccgctttctgatatagttt

SEQ ID NO: 171876 - DNA, 25 bp, Artificial
  probe
  misc_feature (1)..(25): SEQ ID NO: 7284; WAN024DUM_at; Start 26; Stop 50
ggacaaaagcacgaaaggctccgct

SEQ ID NO: 171877 - DNA, 25 bp, Artificial
  probe
  misc_feature (1)..(25): SEQ ID NO: 7284; WAN024DUM_at; Start 1; Stop 25
gtgcggacggtttcagtgctatcaa

SEQ ID NO: 171878 - DNA, 25 bp, Artificial
  probe
  misc_feature (1)..(25): SEQ ID NO: 7284; WAN024DUM_at; Start 20; Stop 44
tatcaaggacaaaagcacgaaaggc

SEQ ID NO: 171879 - DNA, 25 bp, Artificial
  probe
  misc_feature (1)..(25): SEQ ID NO: 7284; WAN024DUM_at; Start 34; Stop 58
gcacgaaaggctccgctttctgata

SEQ ID NO: 171880 - DNA, 25 bp, Artificial
  probe
  misc_feature (1)..(25): SEQ ID NO: 7284; WAN024DUM_at; Start 18; Stop 42
gctatcaaggacaaaagcacgaaag

SEQ ID NO: 171881 - DNA, 25 bp, Artificial
  probe
  misc_feature (1)..(25): SEQ ID NO: 6870; WAN024DUN_at; Start 74; Stop 98
gtttcaatctctgccagggtgctgg

SEQ ID NO: 171882 - DNA, 25 bp, Artificial
  probe
  misc_feature (1)..(25): SEQ ID NO: 6870; WAN024DUN_at; Start 78; Stop 102
caatctctgccagggtgctggcttg

SEQ ID NO: 171883 - DNA, 25 bp, Artificial
  probe
  misc_feature (1)..(25): SEQ ID NO: 6870; WAN024DUN_at; Start 191; Stop 215
tctcctttgaggttaatcaatcgtt

SEQ ID NO: 171884 - DNA, 25 bp, Artificial
  probe
  misc_feature (1)..(25): SEQ ID NO: 6870; WAN024DUN_at; Start 112; Stop 136
tccacggagtttggcagcgccagat

SEQ ID NO: 171885 - DNA, 25 bp, Artificial
  probe
  misc_feature (1)..(25): SEQ ID NO: 6870; WAN024DUN_at; Start 169; Stop 193
gaattcacgaactgcgacgttttct

SEQ ID NO: 171886 - DNA, 25 bp, Artificial
  probe
  misc_feature (1)..(25): SEQ ID NO: 6870; WAN024DUN_at; Start 46; Stop 70
ctattaagccttctccaattgcaag

SEQ ID NO: 171887 - DNA, 25 bp, Artificial
  probe
  misc_feature (1)..(25): SEQ ID NO: 6870; WAN024DUN_at; Start 199; Stop 223
gaggttaatcaatcgtttcaagtgt

SEQ ID NO: 171888 - DNA, 25 bp, Artificial
  probe
  misc_feature (1)..(25): SEQ ID NO: 6870; WAN024DUN_at; Start 126; Stop 150
cagcgccagatgttccacggagata

SEQ ID NO: 171889 - DNA, 25 bp, Artificial
  probe
  misc_feature (1)..(25): SEQ ID NO: 6870; WAN024DUN_at; Start 161; Stop 185
agaccgcggaattcacgaactgcga

SEQ ID NO: 171890 - DNA, 25 bp, Artificial
  probe
  misc_feature (1)..(25): SEQ ID NO: 6870; WAN024DUN_at; Start 57; Stop 81
tctccaattgcaagagggtttcaat

SEQ ID NO: 171891 - DNA, 25 bp, Artificial
  probe
  misc_feature (1)..(25): SEQ ID NO: 6870; WAN024DUN_at; Start 235; Stop 259
cttcatcttgtcttcaaaggtcaaa

SEQ ID NO: 171892 - DNA, 25 bp, Artificial
  probe
  misc_feature (1)..(25): SEQ ID NO: 6870; WAN024DUN_at; Start 121; Stop 145
tttggcagcgccagatgttccacgg

SEQ ID NO: 171893 - DNA, 25 bp, Artificial
  probe
  misc_feature (1)..(25): SEQ ID NO: 6870; WAN024DUN_at; Start 12; Stop 36
caagaggctctttaagagagttacg

SEQ ID NO: 171894 - DNA, 25 bp, Artificial
  probe
  misc_feature (1)..(25): SEQ ID NO: 6870; WAN024DUN_at; Start 67; Stop 91
caagagggtttcaatctctgccagg

SEQ ID NO: 171895 - DNA, 25 bp, Artificial
  probe
  misc_feature (1)..(25): SEQ ID NO: 6870; WAN024DUN_at; Start 71; Stop 95
agggtttcaatctctgccagggtgc

SEQ ID NO: 171896 - DNA, 25 bp, Artificial
  probe
  misc_feature (1)..(25): SEQ ID NO: 6870; WAN024DUN_at; Start 217; Stop 241
caagtgttcgtaggcgatcttcatc

SEQ ID NO: 171897 - DNA, 25 bp, Artificial
  probe
  misc_feature (1)..(25): SEQ ID NO: 6870; WAN024DUN_at; Start 208; Stop 232
caatcgtttcaagtgttcgtaggcg

SEQ ID NO: 171898 - DNA, 25 bp, Artificial
  probe
  misc_feature (1)..(25): SEQ ID NO: 6870; WAN024DUN_at; Start 130; Stop 154
gccagatgttccacggagatagtga

SEQ ID NO: 171899 - DNA, 25 bp, Artificial
  probe
  misc_feature (1)..(25): SEQ ID NO: 6870; WAN024DUN_at; Start 181; Stop 205
tgcgacgttttctcctttgaggtta

SEQ ID NO: 171900 - DNA, 25 bp, Artificial
  probe
  misc_feature (1)..(25): SEQ ID NO: 6870; WAN024DUN_at; Start 84; Stop 108
ctgccagggtgctggcttgcgaaat

SEQ ID NO: 171901 - DNA, 25 bp, Artificial
  probe
  misc_feature (1)..(25): SEQ ID NO: 6870; WAN024DUN_at; Start 99; Stop 123
cttgcgaaatggctccacggagttt

SEQ ID NO: 171902 - DNA, 25 bp, Artificial
  probe
  misc_feature (1)..(25): SEQ ID NO: 6870; WAN024DUN_at; Start 158; Stop 182
gcgagaccgcggaattcacgaactg

SEQ ID NO: 171903 - DNA, 25 bp, Artificial
  probe
  misc_feature (1)..(25): SEQ ID NO: 6870; WAN024DUN_at; Start 103; Stop 127
cgaaatggctccacggagtttggca

SEQ ID NO: 171904 - DNA, 25 bp, Artificial
  probe
  misc_feature (1)..(25): SEQ ID NO: 6870; WAN024DUN_at; Start 108; Stop 132
tggctccacggagtttggcagcgcc

SEQ ID NO: 171905 - DNA, 25 bp, Artificial
  probe
  misc_feature (1)..(25): SEQ ID NO: 6870; WAN024DUN_at; Start 143; Stop 167
cggagatagtgaggagcgagaccgc

SEQ ID NO: 171906 - DNA, 25 bp, Artificial
  probe
  misc_feature (1)..(25): SEQ ID NO: 6870; WAN024DUN_at; Start 212; Stop 236
cgtttcaagtgttcgtaggcgatct

SEQ ID NO: 171907 - DNA, 25 bp, Artificial
  probe
  misc_feature (1)..(25): SEQ ID NO: 6870; WAN024DUN_at; Start 135; Stop 159
atgttccacggagatagtgaggagc

SEQ ID NO: 171908 - DNA, 25 bp, Artificial
  probe
  misc_feature (1)..(25): SEQ ID NO: 6870; WAN024DUN_at; Start 177; Stop 201
gaactgcgacgttttctcctttgag

SEQ ID NO: 171909 - DNA, 25 bp, Artificial
  probe
  misc_feature (1)..(25): SEQ ID NO: 6870; WAN024DUN_at; Start 166; Stop 190
gcggaattcacgaactgcgacgttt

SEQ ID NO: 171910 - DNA, 25 bp, Artificial
  probe
  misc_feature (1)..(25): SEQ ID NO: 6870; WAN024DUN_at; Start 1; Stop 25
atggcggcattcaagaggctcttta

SEQ ID NO: 171911 - DNA, 25 bp, Artificial
  probe
  misc_feature (1)..(25): SEQ ID NO: 6870; WAN024DUN_at; Start 93; Stop 117
tgctggcttgcgaaatggctccacg

SEQ ID NO: 171912 - DNA, 25 bp, Artificial
  probe
  misc_feature (1)..(25): SEQ ID NO: 6870; WAN024DUN_at; Start 96; Stop 120
tggcttgcgaaatggctccacggag

SEQ ID NO: 171913 - DNA, 25 bp, Artificial
  probe
  misc_feature (1)..(25): SEQ ID NO: 6870; WAN024DUN_at; Start 230; Stop 254
gcgatcttcatcttgtcttcaaagg

SEQ ID NO: 171914 - DNA, 25 bp, Artificial
  probe
  misc_feature (1)..(25): SEQ ID NO: 6870; WAN024DUN_at; Start 222; Stop 246
gttcgtaggcgatcttcatcttgtc

SEQ ID NO: 171915 - DNA, 25 bp, Artificial
  probe
  misc_feature (1)..(25): SEQ ID NO: 2952; WAN024DUO_at; Start 52; Stop 76
tccattacaacgagtccagctccga

SEQ ID NO: 171916 - DNA, 25 bp, Artificial
  probe
  misc_feature (1)..(25): SEQ ID NO: 2952; WAN024DUO_at; Start 152; Stop 176
caatattgccaatcataaaaggtgt

SEQ ID NO: 171917 - DNA, 25 bp, Artificial
  probe
  misc_feature (1)..(25): SEQ ID NO: 2952; WAN024DUO_at; Start 41; Stop 65
cagagaccatttccattacaacgag

SEQ ID NO: 171918 - DNA, 25 bp, Artificial
  probe
  misc_feature (1)..(25): SEQ ID NO: 2952; WAN024DUO_at; Start 105; Stop 129
gttggtcacgccagccataggcgct

SEQ ID NO: 171919 - DNA, 25 bp, Artificial
  probe
  misc_feature (1)..(25): SEQ ID NO: 2952; WAN024DUO_at; Start 144; Stop 168
gggaatctcaatattgccaatcata

SEQ ID NO: 171920 - DNA, 25 bp, Artificial
  probe
  misc_feature (1)..(25): SEQ ID NO: 2952; WAN024DUO_at; Start 129; Stop 153
taaaacggtacgattgggaatctca

SEQ ID NO: 171921 - DNA, 25 bp, Artificial
  probe
  misc_feature (1)..(25): SEQ ID NO: 2952; WAN024DUO_at; Start 108; Stop 132
ggtcacgccagccataggcgctaaa

SEQ ID NO: 171922 - DNA, 25 bp, Artificial
  probe
  misc_feature (1)..(25): SEQ ID NO: 2952; WAN024DUO_at; Start 33; Stop 57
tcccttgtcagagaccatttccatt

SEQ ID NO: 171923 - DNA, 25 bp, Artificial
  probe
  misc_feature (1)..(25): SEQ ID NO: 2952; WAN024DUO_at; Start 247; Stop 271
acaagtgatttctgccccgtggtct

SEQ ID NO: 171924 - DNA, 25 bp, Artificial
  probe
  misc_feature (1)..(25): SEQ ID NO: 2952; WAN024DUO_at; Start 95; Stop 119
gaaaggctgagttggtcacgccagc

SEQ ID NO: 171925 - DNA, 25 bp, Artificial
  probe
  misc_feature (1)..(25): SEQ ID NO: 2952; WAN024DUO_at; Start 2; Stop 26
tgtgcagggttttttcgttgttgta

SEQ ID NO: 171926 - DNA, 25 bp, Artificial
  probe
  misc_feature (1)..(25): SEQ ID NO: 2952; WAN024DUO_at; Start 158; Stop 182
tgccaatcataaaaggtgtattaag

SEQ ID NO: 171927 - DNA, 25 bp, Artificial
  probe
  misc_feature (1)..(25): SEQ ID NO: 2952; WAN024DUO_at; Start 254; Stop 278
atttctgccccgtggtcttcctctt

SEQ ID NO: 171928 - DNA, 25 bp, Artificial
  probe
  misc_feature (1)..(25): SEQ ID NO: 2952; WAN024DUO_at; Start 116; Stop 140
cagccataggcgctaaaacggtacg

SEQ ID NO: 171929 - DNA, 25 bp, Artificial
  probe
  misc_feature (1)..(25): SEQ ID NO: 2952; WAN024DUO_at; Start 169; Stop 193
aaaggtgtattaagatttgtcacga

SEQ ID NO: 171930 - DNA, 25 bp, Artificial
  probe
  misc_feature (1)..(25): SEQ ID NO: 2952; WAN024DUO_at; Start 196; Stop 220
gagttcctccaggtccttttcatca

SEQ ID NO: 171931 - DNA, 25 bp, Artificial
  probe
  misc_feature (1)..(25): SEQ ID NO: 2952; WAN024DUO_at; Start 200; Stop 224
tcctccaggtccttttcatcaaagt

SEQ ID NO: 171932 - DNA, 25 bp, Artificial
  probe
  misc_feature (1)..(25): SEQ ID NO: 2952; WAN024DUO_at; Start 205; Stop 229
caggtccttttcatcaaagttgtaa

SEQ ID NO: 171933 - DNA, 25 bp, Artificial
  probe
  misc_feature (1)..(25): SEQ ID NO: 2952; WAN024DUO_at; Start 234; Stop 258
tttggcagaattgacaagtgatttc

SEQ ID NO: 171934 - DNA, 25 bp, Artificial
  probe
  misc_feature (1)..(25): SEQ ID NO: 2952; WAN024DUO_at; Start 227; Stop 251
taagtagtttggcagaattgacaag

SEQ ID NO: 171935 - DNA, 25 bp, Artificial
  probe
  misc_feature (1)..(25): SEQ ID NO: 2952; WAN024DUO_at; Start 182; Stop 206
gatttgtcacgaatgagttcctcca

SEQ ID NO: 171936 - DNA, 25 bp, Artificial
  probe
  misc_feature (1)..(25): SEQ ID NO: 2952; WAN024DUO_at; Start 48; Stop 72
catttccattacaacgagtccagct

SEQ ID NO: 171937 - DNA, 25 bp, Artificial
  probe
  misc_feature (1)..(25): SEQ ID NO: 2952; WAN024DUO_at; Start 189; Stop 213
cacgaatgagttcctccaggtcctt

SEQ ID NO: 171938 - DNA, 25 bp, Artificial
  probe
  misc_feature (1)..(25): SEQ ID NO: 2952; WAN024DUO_at; Start 216; Stop 240
catcaaagttgtaagtagtttggca

SEQ ID NO: 171939 - DNA, 25 bp, Artificial
  probe
  misc_feature (1)..(25): SEQ ID NO: 2952; WAN024DUO_at; Start 186; Stop 210
tgtcacgaatgagttcctccaggtc

SEQ ID NO: 171940 - DNA, 25 bp, Artificial
  probe
  misc_feature (1)..(25): SEQ ID NO: 2952; WAN024DUO_at; Start 119; Stop 143
ccataggcgctaaaacggtacgatt

SEQ ID NO: 171941 - DNA, 25 bp, Artificial
  probe
  misc_feature (1)..(25): SEQ ID NO: 2952; WAN024DUO_at; Start 267; Stop 291
ggtcttcctctttcatttcctgtaa

SEQ ID NO: 171942 - DNA, 25 bp, Artificial
  probe
  misc_feature (1)..(25): SEQ ID NO: 2952; WAN024DUO_at; Start 24; Stop 48
gtattggattcccttgtcagagacc

SEQ ID NO: 171943 - DNA, 25 bp, Artificial
  probe
  misc_feature (1)..(25): SEQ ID NO: 2952; WAN024DUO_at; Start 101; Stop 125
ctgagttggtcacgccagccatagg

SEQ ID NO: 171944 - DNA, 25 bp, Artificial
  probe
  misc_feature (1)..(25): SEQ ID NO: 2952; WAN024DUO_at; Start 15; Stop 39
ttcgttgttgtattggattcccttg

SEQ ID NO: 171945 - DNA, 25 bp, Artificial
  probe
  misc_feature (1)..(25): SEQ ID NO: 2952; WAN024DUO_at; Start 29; Stop 53
ggattcccttgtcagagaccatttc

SEQ ID NO: 171946 - DNA, 25 bp, Artificial
  probe
  misc_feature (1)..(25): SEQ ID NO: 2952; WAN024DUO_at; Start 137; Stop 161
tacgattgggaatctcaatattgcc

SEQ ID NO: 171947 - DNA, 25 bp, Artificial
  probe
  misc_feature (1)..(25): SEQ ID NO: 2952; WAN024DUO_at; Start 56; Stop 80
ttacaacgagtccagctccgagctc

SEQ ID NO: 171948 - DNA, 25 bp, Artificial
  probe
  misc_feature (1)..(25): SEQ ID NO: 2952; WAN024DUO_at; Start 92; Stop 116
tacgaaaggctgagttggtcacgcc

SEQ ID NO: 171949 - DNA, 25 bp, Artificial
  probe
  misc_feature (1)..(25): SEQ ID NO: 5559; WAN024DUP_at; Start 288; Stop 312
cgacgatatcggtcttggtgttttc

SEQ ID NO: 171950 - DNA, 25 bp, Artificial
  probe
  misc_feature (1)..(25): SEQ ID NO: 5559; WAN024DUP_at; Start 256; Stop 280
gattttgttgacagggcagcccatg

SEQ ID NO: 171951 - DNA, 25 bp, Artificial
  probe
  misc_feature (1)..(25): SEQ ID NO: 5559; WAN024DUP_at; Start 177; Stop 201
ggacagactggaccttgttgatgat

SEQ ID NO: 171952 - DNA, 25 bp, Artificial
  probe
  misc_feature (1)..(25): SEQ ID NO: 5559; WAN024DUP_at; Start 27; Stop 51
ggtctgcgtggccagtatacatttg

SEQ ID NO: 171953 - DNA, 25 bp, Artificial
  probe
  misc_feature (1)..(25): SEQ ID NO: 5559; WAN024DUP_at; Start 137; Stop 161
gcccagccggtacgcattttgacag

SEQ ID NO: 171954 - DNA, 25 bp, Artificial
  probe
  misc_feature (1)..(25): SEQ ID NO: 5559; WAN024DUP_at; Start 64; Stop 88
gccatgcatggcgagggcagaaaca

SEQ ID NO: 171955 - DNA, 25 bp, Artificial
  probe
  misc_feature (1)..(25): SEQ ID NO: 5559; WAN024DUP_at; Start 283; Stop 307
gatatcgacgatatcggtcttggtg

SEQ ID NO: 171956 - DNA, 25 bp, Artificial
  probe
  misc_feature (1)..(25): SEQ ID NO: 5559; WAN024DUP_at; Start 296; Stop 320
tcggtcttggtgttttcttggatga

SEQ ID NO: 171957 - DNA, 25 bp, Artificial
  probe
  misc_feature (1)..(25): SEQ ID NO: 5559; WAN024DUP_at; Start 239; Stop 263
ccagcttcgttcttcacgattttgt

SEQ ID NO: 171958 - DNA, 25 bp, Artificial
  probe
  misc_feature (1)..(25): SEQ ID NO: 5559; WAN024DUP_at; Start 72; Stop 96
tggcgagggcagaaacacctgcagc

SEQ ID NO: 171959 - DNA, 25 bp, Artificial
  probe
  misc_feature (1)..(25): SEQ ID NO: 5559; WAN024DUP_at; Start 162; Stop 186
taagtgggatatcaaggacagactg

SEQ ID NO: 171960 - DNA, 25 bp, Artificial
  probe
  misc_feature (1)..(25): SEQ ID NO: 5559; WAN024DUP_at; Start 1; Stop 25
ttgggcaaccttgtaaagggtctca

SEQ ID NO: 171961 - DNA, 25 bp, Artificial
  probe
  misc_feature (1)..(25): SEQ ID NO: 5559; WAN024DUP_at; Start 166; Stop 190
tgggatatcaaggacagactggacc

SEQ ID NO: 171962 - DNA, 25 bp, Artificial
  probe
  misc_feature (1)..(25): SEQ ID NO: 5559; WAN024DUP_at; Start 144; Stop 168
cggtacgcattttgacagtaagtgg

SEQ ID NO: 171963 - DNA, 25 bp, Artificial
  probe
  misc_feature (1)..(25): SEQ ID NO: 5559; WAN024DUP_at; Start 31; Stop 55
tgcgtggccagtatacatttgttca

SEQ ID NO: 171964 - DNA, 25 bp, Artificial
  probe
  misc_feature (1)..(25): SEQ ID NO: 5559; WAN024DUP_at; Start 140; Stop 164
cagccggtacgcattttgacagtaa

SEQ ID NO: 171965 - DNA, 25 bp, Artificial
  probe
  misc_feature (1)..(25): SEQ ID NO: 5559; WAN024DUP_at; Start 47; Stop 71
atttgttcacgggtacggccatgca

SEQ ID NO: 171966 - DNA, 25 bp, Artificial
  probe
  misc_feature (1)..(25): SEQ ID NO: 5559; WAN024DUP_at; Start 129; Stop 153
atgggtccgcccagccggtacgcat

SEQ ID NO: 171967 - DNA, 25 bp, Artificial
  probe
  misc_feature (1)..(25): SEQ ID NO: 5559; WAN024DUP_at; Start 23; Stop 47
tcaaggtctgcgtggccagtataca

SEQ ID NO: 171968 - DNA, 25 bp, Artificial
  probe
  misc_feature (1)..(25): SEQ ID NO: 5559; WAN024DUP_at; Start 253; Stop 277
cacgattttgttgacagggcagccc

SEQ ID NO: 171969 - DNA, 25 bp, Artificial
  probe
  misc_feature (1)..(25): SEQ ID NO: 5559; WAN024DUP_at; Start 70; Stop 94
catggcgagggcagaaacacctgca

SEQ ID NO: 171970 - DNA, 25 bp, Artificial
  probe
  misc_feature (1)..(25): SEQ ID NO: 5559; WAN024DUP_at; Start 19; Stop 43
ggtctcaaggtctgcgtggccagta

SEQ ID NO: 171971 - DNA, 25 bp, Artificial
  probe
  misc_feature (1)..(25): SEQ ID NO: 5559; WAN024DUP_at; Start 271; Stop 295
gcagcccatgttgatatcgacgata

SEQ ID NO: 171972 - DNA, 25 bp, Artificial
  probe
  misc_feature (1)..(25): SEQ ID NO: 5559; WAN024DUP_at; Start 311; Stop 335
tcttggatgaattctgctgcgcgtg

SEQ ID NO: 171973 - DNA, 25 bp, Artificial
  probe
  misc_feature (1)..(25): SEQ ID NO: 5559; WAN024DUP_at; Start 169; Stop 193
gatatcaaggacagactggaccttg

SEQ ID NO: 171974 - DNA, 25 bp, Artificial
  probe
  misc_feature (1)..(25): SEQ ID NO: 5559; WAN024DUP_at; Start 42; Stop 66
tatacatttgttcacgggtacggcc

SEQ ID NO: 171975 - DNA, 25 bp, Artificial
  probe
  misc_feature (1)..(25): SEQ ID NO: 5559; WAN024DUP_at; Start 267; Stop 291
cagggcagcccatgttgatatcgac

SEQ ID NO: 171976 - DNA, 25 bp, Artificial
  probe
  misc_feature (1)..(25): SEQ ID NO: 5559; WAN024DUP_at; Start 16; Stop 40
aagggtctcaaggtctgcgtggcca

SEQ ID NO: 171977 - DNA, 25 bp, Artificial
  probe
  misc_feature (1)..(25): SEQ ID NO: 5559; WAN024DUP_at; Start 157; Stop 181
gacagtaagtgggatatcaaggaca

SEQ ID NO: 171978 - DNA, 25 bp, Artificial
  probe
  misc_feature (1)..(25): SEQ ID NO: 5559; WAN024DUP_at; Start 14; Stop 38
taaagggtctcaaggtctgcgtggc

SEQ ID NO: 171979 - DNA, 25 bp, Artificial
  probe
  misc_feature (1)..(25): SEQ ID NO: 5559; WAN024DUP_at; Start 314; Stop 338
tggatgaattctgctgcgcgtgcta

SEQ ID NO: 171980 - DNA, 25 bp, Artificial
  probe
  misc_feature (1)..(25): SEQ ID NO: 5559; WAN024DUP_at; Start 11; Stop 35
ttgtaaagggtctcaaggtctgcgt

SEQ ID NO: 171981 - DNA, 25 bp, Artificial
  probe
  misc_feature (1)..(25): SEQ ID NO: 5559; WAN024DUP_at; Start 49; Stop 73
ttgttcacgggtacggccatgcatg

SEQ ID NO: 171982 - DNA, 25 bp, Artificial
  probe
  misc_feature (1)..(25): SEQ ID NO: 5559; WAN024DUP_at; Start 149; Stop 173
cgcattttgacagtaagtgggatat

SEQ ID NO: 171983 - DNA, 25 bp, Artificial
  probe
  misc_feature (1)..(25): SEQ ID NO: 5203; WAN024DUQ_at; Start 914; Stop 938
tccgtggaacatctggcgctgccaa

SEQ ID NO: 171984 - DNA, 25 bp, Artificial
  probe
  misc_feature (1)..(25): SEQ ID NO: 5203; WAN024DUQ_at; Start 790; Stop 814
atcctacctgatttgacctttgaag

SEQ ID NO: 171985 - DNA, 25 bp, Artificial
  probe
  misc_feature (1)..(25): SEQ ID NO: 5203; WAN024DUQ_at; Start 870; Stop 894
aaacgtcgcagttcgtgaattccgc

SEQ ID NO: 171986 - DNA, 25 bp, Artificial
  probe
  misc_feature (1)..(25): SEQ ID NO: 5203; WAN024DUQ_at; Start 79; Stop 103
aatcgtaccgttttagcgcctatgg

SEQ ID NO: 171987 - DNA, 25 bp, Artificial
  probe
  misc_feature (1)..(25): SEQ ID NO: 5203; WAN024DUQ_at; Start 855; Stop 879
taacctcaaaggagaaaacgtcgca

SEQ ID NO: 171988 - DNA, 25 bp, Artificial
  probe
  misc_feature (1)..(25): SEQ ID NO: 5203; WAN024DUQ_at; Start 690; Stop 714
catcgaagaagttggtgctgacgca

SEQ ID NO: 171989 - DNA, 25 bp, Artificial
  probe
  misc_feature (1)..(25): SEQ ID NO: 5203; WAN024DUQ_at; Start 708; Stop 732
tgacgcagtcatgattggccgagct

SEQ ID NO: 171990 - DNA, 25 bp, Artificial
  probe
  misc_feature (1)..(25): SEQ ID NO: 5203; WAN024DUQ_at; Start 142; Stop 166
gagctcggagctggactcgttgtaa

SEQ ID NO: 171991 - DNA, 25 bp, Artificial
  probe
  misc_feature (1)..(25): SEQ ID NO: 5203; WAN024DUQ_at; Start 237; Stop 261
gggcgaaaaccctgtctctatccaa

SEQ ID NO: 171992 - DNA, 25 bp, Artificial
  probe
  misc_feature (1)..(25): SEQ ID NO: 5203; WAN024DUQ_at; Start 224; Stop 248
ttcatatcgatgagggcgaaaaccc

SEQ ID NO: 171993 - DNA, 25 bp, Artificial
  probe
  misc_feature (1)..(25): SEQ ID NO: 5203; WAN024DUQ_at; Start 660; Stop 684
tatccgtactgtccaagaagccaag

SEQ ID NO: 171994 - DNA, 25 bp, Artificial
  probe
  misc_feature (1)..(25): SEQ ID NO: 5203; WAN024DUQ_at; Start 272; Stop 296
gcgatgaagacagcctagcacgcgc

SEQ ID NO: 171995 - DNA, 25 bp, Artificial
  probe
  misc_feature (1)..(25): SEQ ID NO: 5203; WAN024DUQ_at; Start 159; Stop 183
cgttgtaatggaaatggtctctgac

SEQ ID NO: 171996 - DNA, 25 bp, Artificial
  probe
  misc_feature (1)..(25): SEQ ID NO: 5203; WAN024DUQ_at; Start 535; Stop 559
ggtgtttctgccctcgccatgcatg

SEQ ID NO: 171997 - DNA, 25 bp, Artificial
  probe
  misc_feature (1)..(25): SEQ ID NO: 5203; WAN024DUQ_at; Start 554; Stop 578
tgcatggccgtacccgtgaacaaat

SEQ ID NO: 171998 - DNA, 25 bp, Artificial
  probe
  misc_feature (1)..(25): SEQ ID NO: 5203; WAN024DUQ_at; Start 590; Stop 614
acgcagaccttgagaccctttacaa

SEQ ID NO: 171999 - DNA, 25 bp, Artificial
  probe
  misc_feature (1)..(25): SEQ ID NO: 5203; WAN024DUQ_at; Start 937; Stop 961
aaactccgtggagccatttcgcaag

SEQ ID NO: 172000 - DNA, 25 bp, Artificial
  probe
  misc_feature (1)..(25): SEQ ID NO: 5203; WAN024DUQ_at; Start 571; Stop 595
gaacaaatgtatactggccacgcag

SEQ ID NO: 172001 - DNA, 25 bp, Artificial
  probe
  misc_feature (1)..(25): SEQ ID NO: 5203; WAN024DUQ_at; Start 1035; Stop 1059
taaagagtctcttgaatgccgccat

SEQ ID NO: 172002 - DNA, 25 bp, Artificial
  probe
  misc_feature (1)..(25): SEQ ID NO: 5203; WAN024DUQ_at; Start 676; Stop 700
gaagccaagcaacgcatcgaagaag

SEQ ID NO: 172003 - DNA, 25 bp, Artificial
  probe
  misc_feature (1)..(25): SEQ ID NO: 5203; WAN024DUQ_at; Start 435; Stop 459
ggtccagtctgtccttgatatccca

SEQ ID NO: 172004 - DNA, 25 bp, Artificial
  probe
  misc_feature (1)..(25): SEQ ID NO: 5203; WAN024DUQ_at; Start 769; Stop 793
cattactttgaaacaggagaaatcc

SEQ ID NO: 172005 - DNA, 25 bp, Artificial
  probe
  misc_feature (1)..(25): SEQ ID NO: 5203; WAN024DUQ_at; Start 258; Stop 282
ccaactttttggtagcgatgaagac

SEQ ID NO: 172006 - DNA, 25 bp, Artificial
  probe
  misc_feature (1)..(25): SEQ ID NO: 5203; WAN024DUQ_at; Start 822; Stop 846
gaagatcgcctacgaacacttgaaa

SEQ ID NO: 172007 - DNA, 25 bp, Artificial
  probe
  misc_feature (1)..(25): SEQ ID NO: 5203; WAN024DUQ_at; Start 362; Stop 386
acaaaatcgtgaagaacgaagctgg

SEQ ID NO: 172008 - DNA, 25 bp, Artificial
  probe
  misc_feature (1)..(25): SEQ ID NO: 5203; WAN024DUQ_at; Start 174; Stop 198
ggtctctgacaagggaatccaatac

SEQ ID NO: 172009 - DNA, 25 bp, Artificial
  probe
  misc_feature (1)..(25): SEQ ID NO: 5203; WAN024DUQ_at; Start 99; Stop 123
tatggctggcgtgaccaactcagcc

SEQ ID NO: 172010 - DNA, 25 bp, Artificial
  probe
  misc_feature (1)..(25): SEQ ID NO: 5203; WAN024DUQ_at; Start 330; Stop 354
tatcgtcgatatcaacatgggctgc

SEQ ID NO: 172011 - DNA, 25 bp, Artificial
  probe
  misc_feature (1)..(25): SEQ ID NO: 5203; WAN024DUQ_at; Start 613; Stop 637
aaggttgcccaagctctaaccaaga

SEQ ID NO: 172012 - DNA, 25 bp, Artificial
  probe
  misc_feature (1)..(25): SEQ ID NO: 5203; WAN024DUQ_at; Start 347; Stop 371
tgggctgccctgtcaacaaaatcgt

SEQ ID NO: 172013 - DNA, 25 bp, Artificial
  probe
  misc_feature (1)..(25): SEQ ID NO: 5203; WAN024DUQ_at; Start 725; Stop 749
gccgagctgccatgggaaatcctta

SEQ ID NO: 172014 - DNA, 25 bp, Artificial
  probe
  misc_feature (1)..(25): SEQ ID NO: 5203; WAN024DUQ_at; Start 807; Stop 831
ctttgaagacaagatgaagatcgcc

SEQ ID NO: 172015 - DNA, 25 bp, Artificial
  probe
  misc_feature (1)..(25): SEQ ID NO: 5203; WAN024DUQ_at; Start 636; Stop 660
gattccattcatcgccaacggtgat

SEQ ID NO: 172016 - DNA, 25 bp, Artificial
  probe
  misc_feature (1)..(25): SEQ ID NO: 5203; WAN024DUQ_at; Start 465; Stop 489
tgtcaaaatgcgtaccggctgggcg

SEQ ID NO: 172017 - DNA, 25 bp, Artificial
  probe
  misc_feature (1)..(25): SEQ ID NO: 2309; WAN024DUR_at; Start 524; Stop 548
tagttcaagtcttgccaggagccaa

SEQ ID NO: 172018 - DNA, 25 bp, Artificial
  probe
  misc_feature (1)..(25): SEQ ID NO: 2309; WAN024DUR_at; Start 571; Stop 595
gaaaaacgcatccaagaaatgccag

SEQ ID NO: 172019 - DNA, 25 bp, Artificial
  probe
  misc_feature (1)..(25): SEQ ID NO: 2309; WAN024DUR_at; Start 15; Stop 39
taaaactatatcagaaagcggagcc

SEQ ID NO: 172020 - DNA, 25 bp, Artificial
  probe
  misc_feature (1)..(25): SEQ ID NO: 2309; WAN024DUR_at; Start 631; Stop 655
gaagccctcctcaaggctatctacg

SEQ ID NO: 172021 - DNA, 25 bp, Artificial
  probe
  misc_feature (1)..(25): SEQ ID NO: 2309; WAN024DUR_at; Start 688; Stop 712
gaaatccgtttccaatgtgactgta

SEQ ID NO: 172022 - DNA, 25 bp, Artificial
  probe
  misc_feature (1)..(25): SEQ ID NO: 2309; WAN024DUR_at; Start 743; Stop 767
gccttccaagctcagacttacagga

SEQ ID NO: 172023 - DNA, 25 bp, Artificial
  probe
  misc_feature (1)..(25): SEQ ID NO: 2309; WAN024DUR_at; Start 703; Stop 727
tgtgactgtagccatgaacgcttta

SEQ ID NO: 172024 - DNA, 25 bp, Artificial
  probe
  misc_feature (1)..(25): SEQ ID NO: 2309; WAN024DUR_at; Start 393; Stop 417
tcccctcatctctggagaaatcggt

SEQ ID NO: 172025 - DNA, 25 bp, Artificial
  probe
  misc_feature (1)..(25): SEQ ID NO: 2309; WAN024DUR_at; Start 481; Stop 505
cttttggacgaggaagacaaggtca

SEQ ID NO: 172026 - DNA, 25 bp, Artificial
  probe
  misc_feature (1)..(25): SEQ ID NO: 2309; WAN024DUR_at; Start 613; Stop 637
gaaagcgacgaccatatcgaagccc

SEQ ID NO: 172027 - DNA, 25 bp, Artificial
  probe
  misc_feature (1)..(25): SEQ ID NO: 2309; WAN024DUR_at; Start 119; Stop 143
tagcgcttggtcgaactcttatcgc

SEQ ID NO: 172028 - DNA, 25 bp, Artificial
  probe
  misc_feature (1)..(25): SEQ ID NO: 2309; WAN024DUR_at; Start 719; Stop 743
aacgctttatgaacgctcttgccag

SEQ ID NO: 172029 - DNA, 25 bp, Artificial
  probe
  misc_feature (1)..(25): SEQ ID NO: 2309; WAN024DUR_at; Start 35; Stop 59
gagcctttcgtgcttttgtccttga

SEQ ID NO: 172030 - DNA, 25 bp, Artificial
  probe
  misc_feature (1)..(25): SEQ ID NO: 2309; WAN024DUR_at; Start 793; Stop 817
gaaatcacttgtcaattctgccaaa

SEQ ID NO: 172031 - DNA, 25 bp, Artificial
  probe
  misc_feature (1)..(25): SEQ ID NO: 2309; WAN024DUR_at; Start 150; Stop 174
gattctcgcagccaatgaaaaagga

SEQ ID NO: 172032 - DNA, 25 bp, Artificial
  probe
  misc_feature (1)..(25): SEQ ID NO: 2309; WAN024DUR_at; Start 282; Stop 306
tgacatcaaaaagactgcgactggt

SEQ ID NO: 172033 - DNA, 25 bp, Artificial
  probe
  misc_feature (1)..(25): SEQ ID NO: 2309; WAN024DUR_at; Start 224; Stop 248
ttatcaccgtcgctgataccaaggg

SEQ ID NO: 172034 - DNA, 25 bp, Artificial
  probe
  misc_feature (1)..(25): SEQ ID NO: 2309; WAN024DUR_at; Start 763; Stop 787
caggaaatgaaagaggaagaccacg

SEQ ID NO: 172035 - DNA, 25 bp, Artificial
  probe
  misc_feature (1)..(25): SEQ ID NO: 2309; WAN024DUR_at; Start 300; Stop 324
gactggtgaagtcctagtcggacct

SEQ ID NO: 172036 - DNA, 25 bp, Artificial
  probe
  misc_feature (1)..(25): SEQ ID NO: 2309; WAN024DUR_at; Start 108; Stop 132
tagctcaactgtagcgcttggtcga

SEQ ID NO: 172037 - DNA, 25 bp, Artificial
  probe
  misc_feature (1)..(25): SEQ ID NO: 2309; WAN024DUR_at; Start 441; Stop 465
tgaaagccaacaaacgccttcagcg

SEQ ID NO: 172038 - DNA, 25 bp, Artificial
  probe
  misc_feature (1)..(25): SEQ ID NO: 2309; WAN024DUR_at; Start 67; Stop 91
gaaaccgtccgcactgctcaagaaa

SEQ ID NO: 172039 - DNA, 25 bp, Artificial
  probe
  misc_feature (1)..(25): SEQ ID NO: 2309; WAN024DUR_at; Start 407; Stop 431
gagaaatcggtgaagaccttgcctt

SEQ ID NO: 172040 - DNA, 25 bp, Artificial
  probe
  misc_feature (1)..(25): SEQ ID NO: 2309; WAN024DUR_at; Start 208; Stop 232
agctctctaggtgctattatcaccg

SEQ ID NO: 172041 - DNA, 25 bp, Artificial
  probe
  misc_feature (1)..(25): SEQ ID NO: 2309; WAN024DUR_at; Start 88; Stop 112
gaaaaacatcaaacccaagctagct

SEQ ID NO: 172042 - DNA, 25 bp, Artificial
  probe
  misc_feature (1)..(25): SEQ ID NO: 2309; WAN024DUR_at; Start 268; Stop 292
caaaatcctggtgttgacatcaaaa

SEQ ID NO: 172043 - DNA, 25 bp, Artificial
  probe
  misc_feature (1)..(25): SEQ ID NO: 2309; WAN024DUR_at; Start 510; Stop 534
tgcaggtggtttcctagttcaagtc

SEQ ID NO: 172044 - DNA, 25 bp, Artificial
  probe
  misc_feature (1)..(25): SEQ ID NO: 2309; WAN024DUR_at; Start 556; Stop 580
gagattgctcgctttgaaaaacgca

SEQ ID NO: 172045 - DNA, 25 bp, Artificial
  probe
  misc_feature (1)..(25): SEQ ID NO: 2309; WAN024DUR_at; Start 597; Stop 621
tatctctactcttctcgaaagcgac

SEQ ID NO: 172046 - DNA, 25 bp, Artificial
  probe
  misc_feature (1)..(25): SEQ ID NO: 2309; WAN024DUR_at; Start 460; Stop 484
tcagcggtcggcctcaatgtccttt

SEQ ID NO: 172047 - DNA, 25 bp, Artificial
  probe
  misc_feature (1)..(25): SEQ ID NO: 2309; WAN024DUR_at; Start 313; Stop 337
ctagtcggaccttttgttggaaatg

SEQ ID NO: 172048 - DNA, 25 bp, Artificial
  probe
  misc_feature (1)..(25): SEQ ID NO: 2309; WAN024DUR_at; Start 537; Stop 561
gccaggagccaagaaagaagagatt

SEQ ID NO: 172049 - DNA, 25 bp, Artificial
  probe
  misc_feature (1)..(25): SEQ ID NO: 2309; WAN024DUR_at; Start 664; Stop 688
gcctacaagcgtctttctgaagaag

SEQ ID NO: 172050 - DNA, 25 bp, Artificial
  probe
  misc_feature (1)..(25): SEQ ID NO: 2309; WAN024DUR_at; Start 426; Stop 450
tgccttttaccttactgaaagccaa

SEQ ID NO: 172051 - DNA, 25 bp, Artificial
  probe
  misc_feature (1)..(25): SEQ ID NO: 5361; WAN024DUS_at; Start 1; Stop 25
ttgcgagattcgttcatagatggct

SEQ ID NO: 172052 - DNA, 25 bp, Artificial
  probe
  misc_feature (1)..(25): SEQ ID NO: 5361; WAN024DUS_at; Start 149; Stop 173
tgtcaatgcctaaaatatccgcctg

SEQ ID NO: 172053 - DNA, 25 bp, Artificial
  probe
  misc_feature (1)..(25): SEQ ID NO: 5361; WAN024DUS_at; Start 152; Stop 176
caatgcctaaaatatccgcctggaa

SEQ ID NO: 172054 - DNA, 25 bp, Artificial
  probe
  misc_feature (1)..(25): SEQ ID NO: 5361; WAN024DUS_at; Start 29; Stop 53
agagttctcctgtctcgttcaagag

SEQ ID NO: 172055 - DNA, 25 bp, Artificial
  probe
  misc_feature (1)..(25): SEQ ID NO: 5361; WAN024DUS_at; Start 139; Stop 163
gcacgtgcaatgtcaatgcctaaaa

SEQ ID NO: 172056 - DNA, 25 bp, Artificial
  probe
  misc_feature (1)..(25): SEQ ID NO: 5361; WAN024DUS_at; Start 34; Stop 58
tctcctgtctcgttcaagagtttca

SEQ ID NO: 172057 - DNA, 25 bp, Artificial
  probe
  misc_feature (1)..(25): SEQ ID NO: 5361; WAN024DUS_at; Start 47; Stop 71
tcaagagtttcaactcgtccaagtc

SEQ ID NO: 172058 - DNA, 25 bp, Artificial
  probe
  misc_feature (1)..(25): SEQ ID NO: 5361; WAN024DUS_at; Start 204; Stop 228
accaccatccaccttcagtacttga

SEQ ID NO: 172059 - DNA, 25 bp, Artificial
  probe
  misc_feature (1)..(25): SEQ ID NO: 5361; WAN024DUS_at; Start 91; Stop 115
aaacctgctaggaaggccgctccta

SEQ ID NO: 172060 - DNA, 25 bp, Artificial
  probe
  misc_feature (1)..(25): SEQ ID NO: 5361; WAN024DUS_at; Start 39; Stop 63
tgtctcgttcaagagtttcaactcg

SEQ ID NO: 172061 - DNA, 25 bp, Artificial
  probe
  misc_feature (1)..(25): SEQ ID NO: 5361; WAN024DUS_at; Start 7; Stop 31
gattcgttcatagatggctcaaaga

SEQ ID NO: 172062 - DNA, 25 bp, Artificial
  probe
  misc_feature (1)..(25): SEQ ID NO: 5361; WAN024DUS_at; Start 19; Stop 43
gatggctcaaagagttctcctgtct

SEQ ID NO: 172063 - DNA, 25 bp, Artificial
  probe
  misc_feature (1)..(25): SEQ ID NO: 5361; WAN024DUS_at; Start 134; Stop 158
ttttagcacgtgcaatgtcaatgcc

SEQ ID NO: 172064 - DNA, 25 bp, Artificial
  probe
  misc_feature (1)..(25): SEQ ID NO: 5361; WAN024DUS_at; Start 182; Stop 206
tgaggaagttgttcatggctgcacc

SEQ ID NO: 172065 - DNA, 25 bp, Artificial
  probe
  misc_feature (1)..(25): SEQ ID NO: 5361; WAN024DUS_at; Start 189; Stop 213
gttgttcatggctgcaccaccatcc

SEQ ID NO: 172066 - DNA, 25 bp, Artificial
  probe
  misc_feature (1)..(25): SEQ ID NO: 5361; WAN024DUS_at; Start 106; Stop 130
gccgctcctagagctgttgtttcca

SEQ ID NO: 172067 - DNA, 25 bp, Artificial
  probe
  misc_feature (1)..(25): SEQ ID NO: 5361; WAN024DUS_at; Start 164; Stop 188
tatccgcctggaactgcatgaggaa

SEQ ID NO: 172068 - DNA, 25 bp, Artificial
  probe
  misc_feature (1)..(25): SEQ ID NO: 5361; WAN024DUS_at; Start 170; Stop 194
cctggaactgcatgaggaagttgtt

SEQ ID NO: 172069 - DNA, 25 bp, Artificial
  probe
  misc_feature (1)..(25): SEQ ID NO: 5361; WAN024DUS_at; Start 17; Stop 41
tagatggctcaaagagttctcctgt

SEQ ID NO: 172070 - DNA, 25 bp, Artificial
  probe
  misc_feature (1)..(25): SEQ ID NO: 5361; WAN024DUS_at; Start 155; Stop 179
tgcctaaaatatccgcctggaactg

SEQ ID NO: 172071 - DNA, 25 bp, Artificial
  probe
  misc_feature (1)..(25): SEQ ID NO: 5361; WAN024DUS_at; Start 51; Stop 75
gagtttcaactcgtccaagtctttc

SEQ ID NO: 172072 - DNA, 25 bp, Artificial
  probe
  misc_feature (1)..(25): SEQ ID NO: 5361; WAN024DUS_at; Start 26; Stop 50
caaagagttctcctgtctcgttcaa

SEQ ID NO: 172073 - DNA, 25 bp, Artificial
  probe
  misc_feature (1)..(25): SEQ ID NO: 5361; WAN024DUS_at; Start 56; Stop 80
tcaactcgtccaagtctttccagta

SEQ ID NO: 172074 - DNA, 25 bp, Artificial
  probe
  misc_feature (1)..(25): SEQ ID NO: 5361; WAN024DUS_at; Start 4; Stop 28
cgagattcgttcatagatggctcaa

SEQ ID NO: 172075 - DNA, 25 bp, Artificial
  probe
  misc_feature (1)..(25): SEQ ID NO: 5361; WAN024DUS_at; Start 162; Stop 186
aatatccgcctggaactgcatgagg

SEQ ID NO: 172076 - DNA, 25 bp, Artificial
  probe
  misc_feature (1)..(25): SEQ ID NO: 5361; WAN024DUS_at; Start 186; Stop 210
gaagttgttcatggctgcaccacca

SEQ ID NO: 172077 - DNA, 25 bp, Artificial
  probe
  misc_feature (1)..(25): SEQ ID NO: 5361; WAN024DUS_at; Start 43; Stop 67
tcgttcaagagtttcaactcgtcca

SEQ ID NO: 172078 - DNA, 25 bp, Artificial
  probe
  misc_feature (1)..(25): SEQ ID NO: 5361; WAN024DUS_at; Start 102; Stop 126
gaaggccgctcctagagctgttgtt

SEQ ID NO: 172079 - DNA, 25 bp, Artificial
  probe
  misc_feature (1)..(25): SEQ ID NO: 5361; WAN024DUS_at; Start 166; Stop 190
tccgcctggaactgcatgaggaagt

SEQ ID NO: 172080 - DNA, 25 bp, Artificial
  probe
  misc_feature (1)..(25): SEQ ID NO: 5361; WAN024DUS_at; Start 173; Stop 197
ggaactgcatgaggaagttgttcat

SEQ ID NO: 172081 - DNA, 25 bp, Artificial
  probe
  misc_feature (1)..(25): SEQ ID NO: 5361; WAN024DUS_at; Start 159; Stop 183
taaaatatccgcctggaactgcatg

SEQ ID NO: 172082 - DNA, 25 bp, Artificial
  probe
  misc_feature (1)..(25): SEQ ID NO: 5361; WAN024DUS_at; Start 22; Stop 46
ggctcaaagagttctcctgtctcgt

SEQ ID NO: 172083 - DNA, 25 bp, Artificial
  probe
  misc_feature (1)..(25): SEQ ID NO: 5361; WAN024DUS_at; Start 99; Stop 123
taggaaggccgctcctagagctgtt

SEQ ID NO: 172084 - DNA, 25 bp, Artificial
  probe
  misc_feature (1)..(25): SEQ ID NO: 5361; WAN024DUS_at; Start 14; Stop 38
tcatagatggctcaaagagttctcc

SEQ ID NO: 172085 - DNA, 25 bp, Artificial
  probe
  misc_feature (1)..(25): SEQ ID NO: 5677; WAN024DUT_at; Start 1442; Stop 1466
gaaactcttgaacgagacaggagaa

SEQ ID NO: 172086 - DNA, 25 bp, Artificial
  probe
  misc_feature (1)..(25): SEQ ID NO: 5677; WAN024DUT_at; Start 996; Stop 1020
gctattcagtggcttcgtgacggtc

SEQ ID NO: 172087 - DNA, 25 bp, Artificial
  probe
  misc_feature (1)..(25): SEQ ID NO: 5677; WAN024DUT_at; Start 39; Stop 63
tctttatcaggaggacagtacatgt

SEQ ID NO: 172088 - DNA, 25 bp, Artificial
  probe
  misc_feature (1)..(25): SEQ ID NO: 5677; WAN024DUT_at; Start 231; Stop 255
cagtcagttattgcgggtgctttca

SEQ ID NO: 172089 - DNA, 25 bp, Artificial
  probe
  misc_feature (1)..(25): SEQ ID NO: 5677; WAN024DUT_at; Start 1291; Stop 1315
gtggtgcagccatgaacaacttcct

SEQ ID NO: 172090 - DNA, 25 bp, Artificial
  probe
  misc_feature (1)..(25): SEQ ID NO: 5677; WAN024DUT_at; Start 588; Stop 612
ggtgcggctcacgtgactgactact

SEQ ID NO: 172091 - DNA, 25 bp, Artificial
  probe
  misc_feature (1)..(25): SEQ ID NO: 5677; WAN024DUT_at; Start 572; Stop 596
ttggaaattgactgacggtgcggct

SEQ ID NO: 172092 - DNA, 25 bp, Artificial
  probe
  misc_feature (1)..(25): SEQ ID NO: 5677; WAN024DUT_at; Start 1102; Stop 1126
cctttacaggtctaggcgctccata

SEQ ID NO: 172093 - DNA, 25 bp, Artificial
  probe
  misc_feature (1)..(25): SEQ ID NO: 5677; WAN024DUT_at; Start 325; Stop 349
tctgggataagaaaacaggacttcc

SEQ ID NO: 172094 - DNA, 25 bp, Artificial
  probe
  misc_feature (1)..(25): SEQ ID NO: 5677; WAN024DUT_at; Start 1041; Stop 1065
ccagaatctgaaaaatacgctcgtg

SEQ ID NO: 172095 - DNA, 25 bp, Artificial
  probe
  misc_feature (1)..(25): SEQ ID NO: 5677; WAN024DUT_at; Start 1011; Stop 1035
cgtgacggtcttcgcatggttgaaa

SEQ ID NO: 172096 - DNA, 25 bp, Artificial
  probe
  misc_feature (1)..(25): SEQ ID NO: 5677; WAN024DUT_at; Start 801; Stop 825
caagcagccctctttggacagttgg

SEQ ID NO: 172097 - DNA, 25 bp, Artificial
  probe
  misc_feature (1)..(25): SEQ ID NO: 5677; WAN024DUT_at; Start 1079; Stop 1103
cgatgaagtttatgtcgttccagcc

SEQ ID NO: 172098 - DNA, 25 bp, Artificial
  probe
  misc_feature (1)..(25): SEQ ID NO: 5677; WAN024DUT_at; Start 180; Stop 204
cctcaggcaggttgggttgagcaca

SEQ ID NO: 172099 - DNA, 25 bp, Artificial
  probe
  misc_feature (1)..(25): SEQ ID NO: 5677; WAN024DUT_at; Start 1507; Stop 1531
tctacaagggctggaagaaggctgt

SEQ ID NO: 172100 - DNA, 25 bp, Artificial
  probe
  misc_feature (1)..(25): SEQ ID NO: 5677; WAN024DUT_at; Start 969; Stop 993
gaaggttctatcttcatcgcaggaa

SEQ ID NO: 172101 - DNA, 25 bp, Artificial
  probe
  misc_feature (1)..(25): SEQ ID NO: 5677; WAN024DUT_at; Start 459; Stop 483
gatgcttacttctctgctaccaagg

SEQ ID NO: 172102 - DNA, 25 bp, Artificial
  probe
  misc_feature (1)..(25): SEQ ID NO: 5677; WAN024DUT_at; Start 1062; Stop 1086
cgtgattctcacaacaacgatgaag

SEQ ID NO: 172103 - DNA, 25 bp, Artificial
  probe
  misc_feature (1)..(25): SEQ ID NO: 5677; WAN024DUT_at; Start 383; Stop 407
gacagcacctttggctgagcaacta

SEQ ID NO: 172104 - DNA, 25 bp, Artificial
  probe
  misc_feature (1)..(25): SEQ ID NO: 5677; WAN024DUT_at; Start 288; Stop 312
gcaatcgggattaccaaccaacgtg

SEQ ID NO: 172105 - DNA, 25 bp, Artificial
  probe
  misc_feature (1)..(25): SEQ ID NO: 5677; WAN024DUT_at; Start 1163; Stop 1187
gactcgtggaacaagcaaagaagac

SEQ ID NO: 172106 - DNA, 25 bp, Artificial
  probe
  misc_feature (1)..(25): SEQ ID NO: 5677; WAN024DUT_at; Start 1493; Stop 1517
tcgcaaggaacaactctacaagggc

SEQ ID NO: 172107 - DNA, 25 bp, Artificial
  probe
  misc_feature (1)..(25): SEQ ID NO: 5677; WAN024DUT_at; Start 1135; Stop 1159
aaaatgctcgtggttccgtctttgg

SEQ ID NO: 172108 - DNA, 25 bp, Artificial
  probe
  misc_feature (1)..(25): SEQ ID NO: 5677; WAN024DUT_at; Start 1371; Stop 1395
gaaacaacagctctaggagcggcct

SEQ ID NO: 172109 - DNA, 25 bp, Artificial
  probe
  misc_feature (1)..(25): SEQ ID NO: 5677; WAN024DUT_at; Start 753; Stop 777
catttctacggtggagaggtgccaa

SEQ ID NO: 172110 - DNA, 25 bp, Artificial
  probe
  misc_feature (1)..(25): SEQ ID NO: 5677; WAN024DUT_at; Start 273; Stop 297
ccaaatcaaatcgaggcaatcggga

SEQ ID NO: 172111 - DNA, 25 bp, Artificial
  probe
  misc_feature (1)..(25): SEQ ID NO: 5677; WAN024DUT_at; Start 726; Stop 750
gaaatctacggcaagacagctccat

SEQ ID NO: 172112 - DNA, 25 bp, Artificial
  probe
  misc_feature (1)..(25): SEQ ID NO: 5677; WAN024DUT_at; Start 146; Stop 170
tagctcgagtcaaaaagagtttacc

SEQ ID NO: 172113 - DNA, 25 bp, Artificial
  probe
  misc_feature (1)..(25): SEQ ID NO: 5677; WAN024DUT_at; Start 925; Stop 949
caaccattggttacggaatcaacgg

SEQ ID NO: 172114 - DNA, 25 bp, Artificial
  probe
  misc_feature (1)..(25): SEQ ID NO: 5677; WAN024DUT_at; Start 1546; Stop 1570
tctttgcggaagtagacgactaact

SEQ ID NO: 172115 - DNA, 25 bp, Artificial
  probe
  misc_feature (1)..(25): SEQ ID NO: 5677; WAN024DUT_at; Start 357; Stop 381
aatgctatcgtttggcagtcacgcc

SEQ ID NO: 172116 - DNA, 25 bp, Artificial
  probe
  misc_feature (1)..(25): SEQ ID NO: 5677; WAN024DUT_at; Start 1457; Stop 1481
gacaggagaactctttgagccatct

SEQ ID NO: 172117 - DNA, 25 bp, Artificial
  probe
  misc_feature (1)..(25): SEQ ID NO: 5677; WAN024DUT_at; Start 858; Stop 882
ggaacaggctctttcatcatcatga

SEQ ID NO: 172118 - DNA, 25 bp, Artificial
  probe
  misc_feature (1)..(25): SEQ ID NO: 5677; WAN024DUT_at; Start 609; Stop 633
tactcaaatgcagctcgtaccatgc

SEQ ID NO: 172119 - DNA, 25 bp, Artificial
  probe
  misc_feature (1)..(25): SEQ ID NO: 3084; WAN024DUU_at; Start 159; Stop 183
tgttccctgcaatcaatggacgaag

SEQ ID NO: 172120 - DNA, 25 bp, Artificial
  probe
  misc_feature (1)..(25): SEQ ID NO: 3084; WAN024DUU_at; Start 34; Stop 58
gacagcagactcaacatcttcacgt

SEQ ID NO: 172121 - DNA, 25 bp, Artificial
  probe
  misc_feature (1)..(25): SEQ ID NO: 3084; WAN024DUU_at; Start 30; Stop 54
tgctgacagcagactcaacatcttc

SEQ ID NO: 172122 - DNA, 25 bp, Artificial
  probe
  misc_feature (1)..(25): SEQ ID NO: 3084; WAN024DUU_at; Start 132; Stop 156
tatttccaccattatagtcagaggc

SEQ ID NO: 172123 - DNA, 25 bp, Artificial
  probe
  misc_feature (1)..(25): SEQ ID NO: 3084; WAN024DUU_at; Start 87; Stop 111
cagtcgcaatcaagttgtcaaagct

SEQ ID NO: 172124 - DNA, 25 bp, Artificial
  probe
  misc_feature (1)..(25): SEQ ID NO: 3084; WAN024DUU_at; Start 3; Stop 27
gtttctcagatgtgctactttcaag

SEQ ID NO: 172125 - DNA, 25 bp, Artificial
  probe
  misc_feature (1)..(25): SEQ ID NO: 3084; WAN024DUU_at; Start 141; Stop 165
cattatagtcagaggcactgttccc

SEQ ID NO: 172126 - DNA, 25 bp, Artificial
  probe
  misc_feature (1)..(25): SEQ ID NO: 3084; WAN024DUU_at; Start 11; Stop 35
gatgtgctactttcaagcttgctga

SEQ ID NO: 172127 - DNA, 25 bp, Artificial
  probe
  misc_feature (1)..(25): SEQ ID NO: 3084; WAN024DUU_at; Start 18; Stop 42
tactttcaagcttgctgacagcaga

SEQ ID NO: 172128 - DNA, 25 bp, Artificial
  probe
  misc_feature (1)..(25): SEQ ID NO: 3084; WAN024DUU_at; Start 23; Stop 47
tcaagcttgctgacagcagactcaa

SEQ ID NO: 172129 - DNA, 25 bp, Artificial
  probe
  misc_feature (1)..(25): SEQ ID NO: 3084; WAN024DUU_at; Start 136; Stop 160
tccaccattatagtcagaggcactg

SEQ ID NO: 172130 - DNA, 25 bp, Artificial
  probe
  misc_feature (1)..(25): SEQ ID NO: 3084; WAN024DUU_at; Start 69; Stop 93
tggagagataagattcaacagtcgc

SEQ ID NO: 172131 - DNA, 25 bp, Artificial
  probe
  misc_feature (1)..(25): SEQ ID NO: 3084; WAN024DUU_at; Start 48; Stop 72
catcttcacgtgttttttctttgga

SEQ ID NO: 172132 - DNA, 25 bp, Artificial
  probe
  misc_feature (1)..(25): SEQ ID NO: 3084; WAN024DUU_at; Start 71; Stop 95
gagagataagattcaacagtcgcaa

SEQ ID NO: 172133 - DNA, 25 bp, Artificial
  probe
  misc_feature (1)..(25): SEQ ID NO: 3084; WAN024DUU_at; Start 91; Stop 115
cgcaatcaagttgtcaaagctttca

SEQ ID NO: 172134 - DNA, 25 bp, Artificial
  probe
  misc_feature (1)..(25): SEQ ID NO: 3084; WAN024DUU_at; Start 164; Stop 188
cctgcaatcaatggacgaagacctg

SEQ ID NO: 172135 - DNA, 25 bp, Artificial
  probe
  misc_feature (1)..(25): SEQ ID NO: 3084; WAN024DUU_at; Start 207; Stop 231
catcaatggtgatgttggattctgg

SEQ ID NO: 172136 - DNA, 25 bp, Artificial
  probe
  misc_feature (1)..(25): SEQ ID NO: 3084; WAN024DUU_at; Start 180; Stop 204
gaagacctgcccagctgctttcgat

SEQ ID NO: 172137 - DNA, 25 bp, Artificial
  probe
  misc_feature (1)..(25): SEQ ID NO: 3084; WAN024DUU_at; Start 168; Stop 192
caatcaatggacgaagacctgccca

SEQ ID NO: 172138 - DNA, 25 bp, Artificial
  probe
  misc_feature (1)..(25): SEQ ID NO: 3084; WAN024DUU_at; Start 196; Stop 220
gctttcgatatcatcaatggtgatg

SEQ ID NO: 172139 - DNA, 25 bp, Artificial
  probe
  misc_feature (1)..(25): SEQ ID NO: 3084; WAN024DUU_at; Start 114; Stop 138
catcactgatggtaccgttatttcc

SEQ ID NO: 172140 - DNA, 25 bp, Artificial
  probe
  misc_feature (1)..(25): SEQ ID NO: 3084; WAN024DUU_at; Start 106; Stop 130
aaagctttcatcactgatggtaccg

SEQ ID NO: 172141 - DNA, 25 bp, Artificial
  probe
  misc_feature (1)..(25): SEQ ID NO: 3084; WAN024DUU_at; Start 154; Stop 178
ggcactgttccctgcaatcaatgga

SEQ ID NO: 172142 - DNA, 25 bp, Artificial
  probe
  misc_feature (1)..(25): SEQ ID NO: 3084; WAN024DUU_at; Start 121; Stop 145
gatggtaccgttatttccaccatta

SEQ ID NO: 172143 - DNA, 25 bp, Artificial
  probe
  misc_feature (1)..(25): SEQ ID NO: 3084; WAN024DUU_at; Start 54; Stop 78
cacgtgttttttctttggagagata

SEQ ID NO: 172144 - DNA, 25 bp, Artificial
  probe
  misc_feature (1)..(25): SEQ ID NO: 3084; WAN024DUU_at; Start 174; Stop 198
atggacgaagacctgcccagctgct

SEQ ID NO: 172145 - DNA, 25 bp, Artificial
  probe
  misc_feature (1)..(25): SEQ ID NO: 3084; WAN024DUU_at; Start 77; Stop 101
taagattcaacagtcgcaatcaagt

SEQ ID NO: 172146 - DNA, 25 bp, Artificial
  probe
  misc_feature (1)..(25): SEQ ID NO: 3084; WAN024DUU_at; Start 38; Stop 62
gcagactcaacatcttcacgtgttt

SEQ ID NO: 172147 - DNA, 25 bp, Artificial
  probe
  misc_feature (1)..(25): SEQ ID NO: 3084; WAN024DUU_at; Start 144; Stop 168
tatagtcagaggcactgttccctgc

SEQ ID NO: 172148 - DNA, 25 bp, Artificial
  probe
  misc_feature (1)..(25): SEQ ID NO: 3084; WAN024DUU_at; Start 193; Stop 217
gctgctttcgatatcatcaatggtg

SEQ ID NO: 172149 - DNA, 25 bp, Artificial
  probe
  misc_feature (1)..(25): SEQ ID NO: 3084; WAN024DUU_at; Start 150; Stop 174
cagaggcactgttccctgcaatcaa

SEQ ID NO: 172150 - DNA, 25 bp, Artificial
  probe
  misc_feature (1)..(25): SEQ ID NO: 3084; WAN024DUU_at; Start 233; Stop 257
aagcggttgttgacaatgccaagta

SEQ ID NO: 172151 - DNA, 25 bp, Artificial
  probe
  misc_feature (1)..(25): SEQ ID NO: 3084; WAN024DUU_at; Start 188; Stop 212
gcccagctgctttcgatatcatcaa

SEQ ID NO: 172152 - DNA, 25 bp, Artificial
  probe
  misc_feature (1)..(25): SEQ ID NO: 3084; WAN024DUU_at; Start 102; Stop 126
tgtcaaagctttcatcactgatggt

SEQ ID NO: 172153 - DNA, 25 bp, Artificial
  probe
  misc_feature (1)..(25): SEQ ID NO: 5371; WAN024DUV_at; Start 289; Stop 313
tggctggcgttccaagacttgatcc

SEQ ID NO: 172154 - DNA, 25 bp, Artificial
  probe
  misc_feature (1)..(25): SEQ ID NO: 5371; WAN024DUV_at; Start 220; Stop 244
gagacgcgcatcgttgttacggaag

SEQ ID NO: 172155 - DNA, 25 bp, Artificial
  probe
  misc_feature (1)..(25): SEQ ID NO: 5371; WAN024DUV_at; Start 39; Stop 63
tccaaggacctgttgtattaataac

SEQ ID NO: 172156 - DNA, 25 bp, Artificial
  probe
  misc_feature (1)..(25): SEQ ID NO: 5371; WAN024DUV_at; Start 403; Stop 427
aaaggttgctccatcttcatcgtaa

SEQ ID NO: 172157 - DNA, 25 bp, Artificial
  probe
  misc_feature (1)..(25): SEQ ID NO: 5371; WAN024DUV_at; Start 160; Stop 184
cttcacgtggttggcaatgagggca

SEQ ID NO: 172158 - DNA, 25 bp, Artificial
  probe
  misc_feature (1)..(25): SEQ ID NO: 5371; WAN024DUV_at; Start 355; Stop 379
tgccaagaggtcgtacaagtccatg

SEQ ID NO: 172159 - DNA, 25 bp, Artificial
  probe
  misc_feature (1)..(25): SEQ ID NO: 5371; WAN024DUV_at; Start 49; Stop 73
tgttgtattaataaccagacgggcc

SEQ ID NO: 172160 - DNA, 25 bp, Artificial
  probe
  misc_feature (1)..(25): SEQ ID NO: 5371; WAN024DUV_at; Start 361; Stop 385
gaggtcgtacaagtccatggctact

SEQ ID NO: 172161 - DNA, 25 bp, Artificial
  probe
  misc_feature (1)..(25): SEQ ID NO: 5371; WAN024DUV_at; Start 17; Stop 41
gacaaattacgtactttatcactcc

SEQ ID NO: 172162 - DNA, 25 bp, Artificial
  probe
  misc_feature (1)..(25): SEQ ID NO: 5371; WAN024DUV_at; Start 241; Stop 265
gaagtcaagatacactccacctcct

SEQ ID NO: 172163 - DNA, 25 bp, Artificial
  probe
  misc_feature (1)..(25): SEQ ID NO: 5371; WAN024DUV_at; Start 88; Stop 112
ttggtctgtcaagagatcacgagct

SEQ ID NO: 172164 - DNA, 25 bp, Artificial
  probe
  misc_feature (1)..(25): SEQ ID NO: 5371; WAN024DUV_at; Start 121; Stop 145
tgtaatcttgccactttcgtcaaag

SEQ ID NO: 172165 - DNA, 25 bp, Artificial
  probe
  misc_feature (1)..(25): SEQ ID NO: 5371; WAN024DUV_at; Start 410; Stop 434
gctccatcttcatcgtaaactggta

SEQ ID NO: 172166 - DNA, 25 bp, Artificial
  probe
  misc_feature (1)..(25): SEQ ID NO: 5371; WAN024DUV_at; Start 278; Stop 302
ttcttcaagtttggctggcgttcca

SEQ ID NO: 172167 - DNA, 25 bp, Artificial
  probe
  misc_feature (1)..(25): SEQ ID NO: 5371; WAN024DUV_at; Start 205; Stop 229
gatgttttcaatcacgagacgcgca

SEQ ID NO: 172168 - DNA, 25 bp, Artificial
  probe
  misc_feature (1)..(25): SEQ ID NO: 5371; WAN024DUV_at; Start 175; Stop 199
aatgagggcaccgtcttggttggca

SEQ ID NO: 172169 - DNA, 25 bp, Artificial
  probe
  misc_feature (1)..(25): SEQ ID NO: 5371; WAN024DUV_at; Start 54; Stop 78
tattaataaccagacgggccttgat

SEQ ID NO: 172170 - DNA, 25 bp, Artificial
  probe
  misc_feature (1)..(25): SEQ ID NO: 5371; WAN024DUV_at; Start 108; Stop 132
gagctacaacacctgtaatcttgcc

SEQ ID NO: 172171 - DNA, 25 bp, Artificial
  probe
  misc_feature (1)..(25): SEQ ID NO: 5371; WAN024DUV_at; Start 100; Stop 124
gagatcacgagctacaacacctgta

SEQ ID NO: 172172 - DNA, 25 bp, Artificial
  probe
  misc_feature (1)..(25): SEQ ID NO: 5371; WAN024DUV_at; Start 189; Stop 213
cttggttggcacgtttgatgttttc

SEQ ID NO: 172173 - DNA, 25 bp, Artificial
  probe
  misc_feature (1)..(25): SEQ ID NO: 5371; WAN024DUV_at; Start 397; Stop 421
gaggctaaaggttgctccatcttca

SEQ ID NO: 172174 - DNA, 25 bp, Artificial
  probe
  misc_feature (1)..(25): SEQ ID NO: 5371; WAN024DUV_at; Start 182; Stop 206
gcaccgtcttggttggcacgtttga

SEQ ID NO: 172175 - DNA, 25 bp, Artificial
  probe
  misc_feature (1)..(25): SEQ ID NO: 5371; WAN024DUV_at; Start 145; Stop 169
gaggaagccttctgccttcacgtgg

SEQ ID NO: 172176 - DNA, 25 bp, Artificial
  probe
  misc_feature (1)..(25): SEQ ID NO: 5371; WAN024DUV_at; Start 2; Stop 26
tgcgttcccttattagacaaattac

SEQ ID NO: 172177 - DNA, 25 bp, Artificial
  probe
  misc_feature (1)..(25): SEQ ID NO: 5371; WAN024DUV_at; Start 26; Stop 50
cgtactttatcactccaaggacctg

SEQ ID NO: 172178 - DNA, 25 bp, Artificial
  probe
  misc_feature (1)..(25): SEQ ID NO: 5371; WAN024DUV_at; Start 370; Stop 394
caagtccatggctactttaagacgg

SEQ ID NO: 172179 - DNA, 25 bp, Artificial
  probe
  misc_feature (1)..(25): SEQ ID NO: 5371; WAN024DUV_at; Start 268; Stop 292
caagccttccttcttcaagtttggc

SEQ ID NO: 172180 - DNA, 25 bp, Artificial
  probe
  misc_feature (1)..(25): SEQ ID NO: 5371; WAN024DUV_at; Start 380; Stop 404
gctactttaagacggaagaggctaa

SEQ ID NO: 172181 - DNA, 25 bp, Artificial
  probe
  misc_feature (1)..(25): SEQ ID NO: 5371; WAN024DUV_at; Start 340; Stop 364
tgtgttgctaacacctgccaagagg

SEQ ID NO: 172182 - DNA, 25 bp, Artificial
  probe
  misc_feature (1)..(25): SEQ ID NO: 5371; WAN024DUV_at; Start 390; Stop 414
gacggaagaggctaaaggttgctcc

SEQ ID NO: 172183 - DNA, 25 bp, Artificial
  probe
  misc_feature (1)..(25): SEQ ID NO: 5371; WAN024DUV_at; Start 167; Stop 191
tggttggcaatgagggcaccgtctt

SEQ ID NO: 172184 - DNA, 25 bp, Artificial
  probe
  misc_feature (1)..(25): SEQ ID NO: 5371; WAN024DUV_at; Start 234; Stop 258
tgttacggaagtcaagatacactcc

SEQ ID NO: 172185 - DNA, 25 bp, Artificial
  probe
  misc_feature (1)..(25): SEQ ID NO: 5371; WAN024DUV_at; Start 136; Stop 160
ttcgtcaaagaggaagccttctgcc

SEQ ID NO: 172186 - DNA, 25 bp, Artificial
  probe
  misc_feature (1)..(25): SEQ ID NO: 5371; WAN024DUV_at; Start 301; Stop 325
caagacttgatccttgctcaaaacc

SEQ ID NO: 172187 - DNA, 25 bp, Artificial
  probe
  misc_feature (1)..(25): SEQ ID NO: 2243; WAN024DUW_at; Start 317; Stop 341
cagtttacgatgaagatggagcaac

SEQ ID NO: 172188 - DNA, 25 bp, Artificial
  probe
  misc_feature (1)..(25): SEQ ID NO: 2243; WAN024DUW_at; Start 1165; Stop 1189
gaagatgttgagtctgctgtcagca

SEQ ID NO: 172189 - DNA, 25 bp, Artificial
  probe
  misc_feature (1)..(25): SEQ ID NO: 2243; WAN024DUW_at; Start 1020; Stop 1044
aagcagctgggcaggtcttcgtcca

SEQ ID NO: 172190 - DNA, 25 bp, Artificial
  probe
  misc_feature (1)..(25): SEQ ID NO: 2243; WAN024DUW_at; Start 672; Stop 696
caaggcccgtctggttattaataca

SEQ ID NO: 172191 - DNA, 25 bp, Artificial
  probe
  misc_feature (1)..(25): SEQ ID NO: 2243; WAN024DUW_at; Start 1226; Stop 1250
catctgcagtttctcgtgggtctag

SEQ ID NO: 172192 - DNA, 25 bp, Artificial
  probe
  misc_feature (1)..(25): SEQ ID NO: 2243; WAN024DUW_at; Start 1545; Stop 1569
tgcacttgctcacagcttggaacaa

SEQ ID NO: 172193 - DNA, 25 bp, Artificial
  probe
  misc_feature (1)..(25): SEQ ID NO: 2243; WAN024DUW_at; Start 105; Stop 129
cttgcaggcggcagctagcggtctt

SEQ ID NO: 172194 - DNA, 25 bp, Artificial
  probe
  misc_feature (1)..(25): SEQ ID NO: 2243; WAN024DUW_at; Start 1598; Stop 1622
tgtcccttcactatgcaatgcgcaa

SEQ ID NO: 172195 - DNA, 25 bp, Artificial
  probe
  misc_feature (1)..(25): SEQ ID NO: 2243; WAN024DUW_at; Start 1041; Stop 1065
tccattgattgcagggaacagtgcc

SEQ ID NO: 172196 - DNA, 25 bp, Artificial
  probe
  misc_feature (1)..(25): SEQ ID NO: 2243; WAN024DUW_at; Start 361; Stop 385
aaagtagccatggacttgtacgacc

SEQ ID NO: 172197 - DNA, 25 bp, Artificial
  probe
  misc_feature (1)..(25): SEQ ID NO: 2243; WAN024DUW_at; Start 854; Stop 878
tggtctttgttctcccacgtgaaaa

SEQ ID NO: 172198 - DNA, 25 bp, Artificial
  probe
  misc_feature (1)..(25): SEQ ID NO: 2243; WAN024DUW_at; Start 1188; Stop 1212
caagcttgaaagtagcacatctgag

SEQ ID NO: 172199 - DNA, 25 bp, Artificial
  probe
  misc_feature (1)..(25): SEQ ID NO: 2243; WAN024DUW_at; Start 56; Stop 80
ccctggacctcttgattatcggtgg

SEQ ID NO: 172200 - DNA, 25 bp, Artificial
  probe
  misc_feature (1)..(25): SEQ ID NO: 2243; WAN024DUW_at; Start 517; Stop 541
gatgcgcgtctcgtgattgaaaaca

SEQ ID NO: 172201 - DNA, 25 bp, Artificial
  probe
  misc_feature (1)..(25): SEQ ID NO: 2243; WAN024DUW_at; Start 1725; Stop 1749
aatgggacgattctatgactggaca

SEQ ID NO: 172202 - DNA, 25 bp, Artificial
  probe
  misc_feature (1)..(25): SEQ ID NO: 2243; WAN024DUW_at; Start 575; Stop 599
ccaaccacgtgaaggcagaaggctt

SEQ ID NO: 172203 - DNA, 25 bp, Artificial
  probe
  misc_feature (1)..(25): SEQ ID NO: 2243; WAN024DUW_at; Start 910; Stop 934
tacacaggtgatttggagcatccaa

SEQ ID NO: 172204 - DNA, 25 bp, Artificial
  probe
  misc_feature (1)..(25): SEQ ID NO: 2243; WAN024DUW_at; Start 1007; Stop 1031
ttgatgatatcgaaagcagctgggc

SEQ ID NO: 172205 - DNA, 25 bp, Artificial
  probe
  misc_feature (1)..(25): SEQ ID NO: 2243; WAN024DUW_at; Start 542; Stop 566
tcaaacgtgccaaccaagacggtgc

SEQ ID NO: 172206 - DNA, 25 bp, Artificial
  probe
  misc_feature (1)..(25): SEQ ID NO: 2243; WAN024DUW_at; Start 1406; Stop 1430
tttcaggtggagaattgaacccagc

SEQ ID NO: 172207 - DNA, 25 bp, Artificial
  probe
  misc_feature (1)..(25): SEQ ID NO: 2243; WAN024DUW_at; Start 1438; Stop 1462
gattcagaaatcgaagcctttgcgc

SEQ ID NO: 172208 - DNA, 25 bp, Artificial
  probe
  misc_feature (1)..(25): SEQ ID NO: 2243; WAN024DUW_at; Start 1106; Stop 1130
aaagctttgacaacttgattgcgac

SEQ ID NO: 172209 - DNA, 25 bp, Artificial
  probe
  misc_feature (1)..(25): SEQ ID NO: 2243; WAN024DUW_at; Start 257; Stop 281
aacgtgcagtggttcaacaaatcgc

SEQ ID NO: 172210 - DNA, 25 bp, Artificial
  probe
  misc_feature (1)..(25): SEQ ID NO: 2243; WAN024DUW_at; Start 730; Stop 754
tctaataagggaacgcaattctcac

SEQ ID NO: 172211 - DNA, 25 bp, Artificial
  probe
  misc_feature (1)..(25): SEQ ID NO: 2243; WAN024DUW_at; Start 150; Stop 174
gcaagactttgcagaaggaacatct

SEQ ID NO: 172212 - DNA, 25 bp, Artificial
  probe
  misc_feature (1)..(25): SEQ ID NO: 2243; WAN024DUW_at; Start 1059; Stop 1083
cagtgcctctgactataatggtgga

SEQ ID NO: 172213 - DNA, 25 bp, Artificial
  probe
  misc_feature (1)..(25): SEQ ID NO: 2243; WAN024DUW_at; Start 1475; Stop 1499
cacgtggtttggatagcaaggaagc

SEQ ID NO: 172214 - DNA, 25 bp, Artificial
  probe
  misc_feature (1)..(25): SEQ ID NO: 2243; WAN024DUW_at; Start 1753; Stop 1777
gaagaaaaagcaacttaccgtgctg

SEQ ID NO: 172215 - DNA, 25 bp, Artificial
  probe
  misc_feature (1)..(25): SEQ ID NO: 2243; WAN024DUW_at; Start 71; Stop 95
ttatcggtggaggaatcacaggagc

SEQ ID NO: 172216 - DNA, 25 bp, Artificial
  probe
  misc_feature (1)..(25): SEQ ID NO: 2243; WAN024DUW_at; Start 87; Stop 111
cacaggagctggtgtagccttgcag

SEQ ID NO: 172217 - DNA, 25 bp, Artificial
  probe
  misc_feature (1)..(25): SEQ ID NO: 2243; WAN024DUW_at; Start 1141; Stop 1165
tatctctccaaagaaaaaacacgtg

SEQ ID NO: 172218 - DNA, 25 bp, Artificial
  probe
  misc_feature (1)..(25): SEQ ID NO: 2243; WAN024DUW_at; Start 447; Stop 471
ggaacgccagccaaacttgaagaag

SEQ ID NO: 172219 - DNA, 25 bp, Artificial
  probe
  misc_feature (1)..(25): SEQ ID NO: 2243; WAN024DUW_at; Start 1329; Stop 1353
tatggagcgcgtggttgacatcctc

SEQ ID NO: 172220 - DNA, 25 bp, Artificial
  probe
  misc_feature (1)..(25): SEQ ID NO: 2243; WAN024DUW_at; Start 624; Stop 648
tacaggtgttgtagctcgtgatctc

SEQ ID NO: 172221 - DNA, 25 bp, Artificial
  probe
  misc_feature (1)..(25): SEQ ID NO: 5335; WAN024DUX_at; Start 132; Stop 156
gattaaagtccctagaaattctcca

SEQ ID NO: 172222 - DNA, 25 bp, Artificial
  probe
  misc_feature (1)..(25): SEQ ID NO: 5335; WAN024DUX_at; Start 128; Stop 152
tcaggattaaagtccctagaaattc

SEQ ID NO: 172223 - DNA, 25 bp, Artificial
  probe
  misc_feature (1)..(25): SEQ ID NO: 5335; WAN024DUX_at; Start 107; Stop 131
caacaccatttcctagaagaatcag

SEQ ID NO: 172224 - DNA, 25 bp, Artificial
  probe
  misc_feature (1)..(25): SEQ ID NO: 5335; WAN024DUX_at; Start 86; Stop 110
taggaagaaccacacctgcaacaac

SEQ ID NO: 172225 - DNA, 25 bp, Artificial
  probe
  misc_feature (1)..(25): SEQ ID NO: 5335; WAN024DUX_at; Start 118; Stop 142
cctagaagaatcaggattaaagtcc

SEQ ID NO: 172226 - DNA, 25 bp, Artificial
  probe
  misc_feature (1)..(25): SEQ ID NO: 5335; WAN024DUX_at; Start 162; Stop 186
ttcattcatcatctttctgtctcca

SEQ ID NO: 172227 - DNA, 25 bp, Artificial
  probe
  misc_feature (1)..(25): SEQ ID NO: 5335; WAN024DUX_at; Start 49; Stop 73
gtaatcacaatccaacctgagctat

SEQ ID NO: 172228 - DNA, 25 bp, Artificial
  probe
  misc_feature (1)..(25): SEQ ID NO: 5335; WAN024DUX_at; Start 146; Stop 170
gaaattctccaaataattcattcat

SEQ ID NO: 172229 - DNA, 25 bp, Artificial
  probe
  misc_feature (1)..(25): SEQ ID NO: 5335; WAN024DUX_at; Start 202; Stop 226
gggcgacaaggaatgctgccctcca

SEQ ID NO: 172230 - DNA, 25 bp, Artificial
  probe
  misc_feature (1)..(25): SEQ ID NO: 5335; WAN024DUX_at; Start 9; Stop 33
tacaaagactgcaaccgcaactgca

SEQ ID NO: 172231 - DNA, 25 bp, Artificial
  probe
  misc_feature (1)..(25): SEQ ID NO: 5335; WAN024DUX_at; Start 199; Stop 223
gacgggcgacaaggaatgctgccct

SEQ ID NO: 172232 - DNA, 25 bp, Artificial
  probe
  misc_feature (1)..(25): SEQ ID NO: 5335; WAN024DUX_at; Start 53; Stop 77
tcacaatccaacctgagctattgct

SEQ ID NO: 172233 - DNA, 25 bp, Artificial
  probe
  misc_feature (1)..(25): SEQ ID NO: 5335; WAN024DUX_at; Start 11; Stop 35
caaagactgcaaccgcaactgcaat

SEQ ID NO: 172234 - DNA, 25 bp, Artificial
  probe
  misc_feature (1)..(25): SEQ ID NO: 5335; WAN024DUX_at; Start 138; Stop 162
agtccctagaaattctccaaataat

SEQ ID NO: 172235 - DNA, 25 bp, Artificial
  probe
  misc_feature (1)..(25): SEQ ID NO: 5335; WAN024DUX_at; Start 211; Stop 235
ggaatgctgccctccacctctttta

SEQ ID NO: 172236 - DNA, 25 bp, Artificial
  probe
  misc_feature (1)..(25): SEQ ID NO: 5335; WAN024DUX_at; Start 177; Stop 201
tctgtctccattaaaaagaagggac

SEQ ID NO: 172237 - DNA, 25 bp, Artificial
  probe
  misc_feature (1)..(25): SEQ ID NO: 5335; WAN024DUX_at; Start 47; Stop 71
tagtaatcacaatccaacctgagct

SEQ ID NO: 172238 - DNA, 25 bp, Artificial
  probe
  misc_feature (1)..(25): SEQ ID NO: 5335; WAN024DUX_at; Start 88; Stop 112
ggaagaaccacacctgcaacaacac

SEQ ID NO: 172239 - DNA, 25 bp, Artificial
  probe
  misc_feature (1)..(25): SEQ ID NO: 5335; WAN024DUX_at; Start 102; Stop 126
tgcaacaacaccatttcctagaaga

SEQ ID NO: 172240 - DNA, 25 bp, Artificial
  probe
  misc_feature (1)..(25): SEQ ID NO: 5335; WAN024DUX_at; Start 39; Stop 63
ccaacccatagtaatcacaatccaa

SEQ ID NO: 172241 - DNA, 25 bp, Artificial
  probe
  misc_feature (1)..(25): SEQ ID NO: 5335; WAN024DUX_at; Start 178; Stop 202
ctgtctccattaaaaagaagggacg

SEQ ID NO: 172242 - DNA, 25 bp, Artificial
  probe
  misc_feature (1)..(25): SEQ ID NO: 5335; WAN024DUX_at; Start 122; Stop 146
gaagaatcaggattaaagtccctag

SEQ ID NO: 172243 - DNA, 25 bp, Artificial
  probe
  misc_feature (1)..(25): SEQ ID NO: 5335; WAN024DUX_at; Start 215; Stop 239
tgctgccctccacctcttttatttt

SEQ ID NO: 172244 - DNA, 25 bp, Artificial
  probe
  misc_feature (1)..(25): SEQ ID NO: 5335; WAN024DUX_at; Start 45; Stop 69
catagtaatcacaatccaacctgag

SEQ ID NO: 172245 - DNA, 25 bp, Artificial
  probe
  misc_feature (1)..(25): SEQ ID NO: 5335; WAN024DUX_at; Start 83; Stop 107
ttttaggaagaaccacacctgcaac

SEQ ID NO: 172246 - DNA, 25 bp, Artificial
  probe
  misc_feature (1)..(25): SEQ ID NO: 5335; WAN024DUX_at; Start 2; Stop 26
tgccagatacaaagactgcaaccgc

SEQ ID NO: 172247 - DNA, 25 bp, Artificial
  probe
  misc_feature (1)..(25): SEQ ID NO: 5335; WAN024DUX_at; Start 110; Stop 134
caccatttcctagaagaatcaggat

SEQ ID NO: 172248 - DNA, 25 bp, Artificial
  probe
  misc_feature (1)..(25): SEQ ID NO: 5335; WAN024DUX_at; Start 67; Stop 91
gagctattgctcttggttttaggaa

SEQ ID NO: 172249 - DNA, 25 bp, Artificial
  probe
  misc_feature (1)..(25): SEQ ID NO: 5335; WAN024DUX_at; Start 112; Stop 136
ccatttcctagaagaatcaggatta

SEQ ID NO: 172250 - DNA, 25 bp, Artificial
  probe
  misc_feature (1)..(25): SEQ ID NO: 5335; WAN024DUX_at; Start 7; Stop 31
gatacaaagactgcaaccgcaactg

SEQ ID NO: 172251 - DNA, 25 bp, Artificial
  probe
  misc_feature (1)..(25): SEQ ID NO: 5335; WAN024DUX_at; Start 75; Stop 99
gctcttggttttaggaagaaccaca

SEQ ID NO: 172252 - DNA, 25 bp, Artificial
  probe
  misc_feature (1)..(25): SEQ ID NO: 5335; WAN024DUX_at; Start 81; Stop 105
ggttttaggaagaaccacacctgca

SEQ ID NO: 172253 - DNA, 25 bp, Artificial
  probe
  misc_feature (1)..(25): SEQ ID NO: 5335; WAN024DUX_at; Start 71; Stop 95
tattgctcttggttttaggaagaac

SEQ ID NO: 172254 - DNA, 25 bp, Artificial
  probe
  misc_feature (1)..(25): SEQ ID NO: 5335; WAN024DUX_at; Start 57; Stop 81
aatccaacctgagctattgctcttg

SEQ ID NO: 172255 - DNA, 25 bp, Artificial
  probe
  misc_feature (1)..(25): SEQ ID NO: 4134; WAN024DUY_at; Start 340; Stop 364
ctgggtcagattttggtttggttgc

SEQ ID NO: 172256 - DNA, 25 bp, Artificial
  probe
  misc_feature (1)..(25): SEQ ID NO: 4134; WAN024DUY_at; Start 287; Stop 311
tgccttgggcttccgttttgcctta

SEQ ID NO: 172257 - DNA, 25 bp, Artificial
  probe
  misc_feature (1)..(25): SEQ ID NO: 4134; WAN024DUY_at; Start 662; Stop 686
caaacaagggagacggagactggtc

SEQ ID NO: 172258 - DNA, 25 bp, Artificial
  probe
  misc_feature (1)..(25): SEQ ID NO: 4134; WAN024DUY_at; Start 405; Stop 429
tatcctggcaaccttcagtactgga

SEQ ID NO: 172259 - DNA, 25 bp, Artificial
  probe
  misc_feature (1)..(25): SEQ ID NO: 4134; WAN024DUY_at; Start 300; Stop 324
cgttttgccttatatcttagcccag

SEQ ID NO: 172260 - DNA, 25 bp, Artificial
  probe
  misc_feature (1)..(25): SEQ ID NO: 4134; WAN024DUY_at; Start 307; Stop 331
ccttatatcttagcccagttcgcag

SEQ ID NO: 172261 - DNA, 25 bp, Artificial
  probe
  misc_feature (1)..(25): SEQ ID NO: 4134; WAN024DUY_at; Start 430; Stop 454
ccagccatcaaggatactgtatcaa

SEQ ID NO: 172262 - DNA, 25 bp, Artificial
  probe
  misc_feature (1)..(25): SEQ ID NO: 4134; WAN024DUY_at; Start 102; Stop 126
tcttctaggaaatggtgttgttgca

SEQ ID NO: 172263 - DNA, 25 bp, Artificial
  probe
  misc_feature (1)..(25): SEQ ID NO: 4134; WAN024DUY_at; Start 391; Stop 415
gaaaatgcaggcaatatcctggcaa

SEQ ID NO: 172264 - DNA, 25 bp, Artificial
  probe
  misc_feature (1)..(25): SEQ ID NO: 4134; WAN024DUY_at; Start 547; Stop 571
gcagtgggaactttgattgtcggta

SEQ ID NO: 172265 - DNA, 25 bp, Artificial
  probe
  misc_feature (1)..(25): SEQ ID NO: 4134; WAN024DUY_at; Start 622; Stop 646
gaccttggacctcgtatcatgcaca

SEQ ID NO: 172266 - DNA, 25 bp, Artificial
  probe
  misc_feature (1)..(25): SEQ ID NO: 4134; WAN024DUY_at; Start 161; Stop 185
caggttggattgtgattactatggg

SEQ ID NO: 172267 - DNA, 25 bp, Artificial
  probe
  misc_feature (1)..(25): SEQ ID NO: 4134; WAN024DUY_at; Start 1; Stop 25
gtggagggcagcattccttgtcgcc

SEQ ID NO: 172268 - DNA, 25 bp, Artificial
  probe
  misc_feature (1)..(25): SEQ ID NO: 4134; WAN024DUY_at; Start 5; Stop 29
agggcagcattccttgtcgcccgtc

SEQ ID NO: 172269 - DNA, 25 bp, Artificial
  probe
  misc_feature (1)..(25): SEQ ID NO: 4134; WAN024DUY_at; Start 524; Stop 548
ttcaggcaggtatcggaacctttgc

SEQ ID NO: 172270 - DNA, 25 bp, Artificial
  probe
  misc_feature (1)..(25): SEQ ID NO: 4134; WAN024DUY_at; Start 570; Stop 594
tatcggtctatcactaggtgggaca

SEQ ID NO: 172271 - DNA, 25 bp, Artificial
  probe
  misc_feature (1)..(25): SEQ ID NO: 4134; WAN024DUY_at; Start 607; Stop 631
ttgaacccagctcgtgaccttggac

SEQ ID NO: 172272 - DNA, 25 bp, Artificial
  probe
  misc_feature (1)..(25): SEQ ID NO: 4134; WAN024DUY_at; Start 497; Stop 521
caatctttgctttgggtctttacga

SEQ ID NO: 172273 - DNA, 25 bp, Artificial
  probe
  misc_feature (1)..(25): SEQ ID NO: 4134; WAN024DUY_at; Start 455; Stop 479
acttgattagcgaaatccttggaac

SEQ ID NO: 172274 - DNA, 25 bp, Artificial
  probe
  misc_feature (1)..(25): SEQ ID NO: 4134; WAN024DUY_at; Start 423; Stop 447
tactggaccagccatcaaggatact

SEQ ID NO: 172275 - DNA, 25 bp, Artificial
  probe
  misc_feature (1)..(25): SEQ ID NO: 4134; WAN024DUY_at; Start 581; Stop 605
cactaggtgggacaacaggttatgc

SEQ ID NO: 172276 - DNA, 25 bp, Artificial
  probe
  misc_feature (1)..(25): SEQ ID NO: 4134; WAN024DUY_at; Start 561; Stop 585
gattgtcggtatcggtctatcacta

SEQ ID NO: 172277 - DNA, 25 bp, Artificial
  probe
  misc_feature (1)..(25): SEQ ID NO: 4134; WAN024DUY_at; Start 412; Stop 436
gcaaccttcagtactggaccagcca

SEQ ID NO: 172278 - DNA, 25 bp, Artificial
  probe
  misc_feature (1)..(25): SEQ ID NO: 4134; WAN024DUY_at; Start 37; Stop 61
tttaatggagacagaaagatgatga

SEQ ID NO: 172279 - DNA, 25 bp, Artificial
  probe
  misc_feature (1)..(25): SEQ ID NO: 4134; WAN024DUY_at; Start 627; Stop 651
tggacctcgtatcatgcacagcatc

SEQ ID NO: 172280 - DNA, 25 bp, Artificial
  probe
  misc_feature (1)..(25): SEQ ID NO: 4134; WAN024DUY_at; Start 534; Stop 558
tatcggaacctttgcagtgggaact

SEQ ID NO: 172281 - DNA, 25 bp, Artificial
  probe
  misc_feature (1)..(25): SEQ ID NO: 4134; WAN024DUY_at; Start 86; Stop 110
ggactttaatcctgattcttctagg

SEQ ID NO: 172282 - DNA, 25 bp, Artificial
  probe
  misc_feature (1)..(25): SEQ ID NO: 4134; WAN024DUY_at; Start 346; Stop 370
cagattttggtttggttgcaattca

SEQ ID NO: 172283 - DNA, 25 bp, Artificial
  probe
  misc_feature (1)..(25): SEQ ID NO: 4134; WAN024DUY_at; Start 116; Stop 140
gtgttgttgcaggtgtggttcttcc

SEQ ID NO: 172284 - DNA, 25 bp, Artificial
  probe
  misc_feature (1)..(25): SEQ ID NO: 4134; WAN024DUY_at; Start 588; Stop 612
tgggacaacaggttatgccttgaac

SEQ ID NO: 172285 - DNA, 25 bp, Artificial
  probe
  misc_feature (1)..(25): SEQ ID NO: 4134; WAN024DUY_at; Start 483; Stop 507
tgttttggtgttgacaatctttgct

SEQ ID NO: 172286 - DNA, 25 bp, Artificial
  probe
  misc_feature (1)..(25): SEQ ID NO: 4134; WAN024DUY_at; Start 599; Stop 623
gttatgccttgaacccagctcgtga

SEQ ID NO: 172287 - DNA, 25 bp, Artificial
  probe
  misc_feature (1)..(25): SEQ ID NO: 4134; WAN024DUY_at; Start 26; Stop 50
cgtcccttctttttaatggagacag

SEQ ID NO: 172288 - DNA, 25 bp, Artificial
  probe
  misc_feature (1)..(25): SEQ ID NO: 4134; WAN024DUY_at; Start 442; Stop 466
gatactgtatcaaacttgattagcg

SEQ ID NO: 172289 - DNA, 25 bp, Artificial
  probe
  misc_feature (1)..(25): SEQ ID NO: 6935; WAN024DUZ_at; Start 15; Stop 39
atctgctattggtttatttgacaca

SEQ ID NO: 172290 - DNA, 25 bp, Artificial
  probe
  misc_feature (1)..(25): SEQ ID NO: 6935; WAN024DUZ_at; Start 49; Stop 73
ctccttcaagttaaaattcattata

SEQ ID NO: 172291 - DNA, 25 bp, Artificial
  probe
  misc_feature (1)..(25): SEQ ID NO: 6935; WAN024DUZ_at; Start 34; Stop 58
gacacaatagggattctccttcaag

SEQ ID NO: 172292 - DNA, 25 bp, Artificial
  probe
  misc_feature (1)..(25): SEQ ID NO: 6935; WAN024DUZ_at; Start 48; Stop 72
tctccttcaagttaaaattcattat

SEQ ID NO: 172293 - DNA, 25 bp, Artificial
  probe
  misc_feature (1)..(25): SEQ ID NO: 6935; WAN024DUZ_at; Start 22; Stop 46
attggtttatttgacacaataggga

SEQ ID NO: 172294 - DNA, 25 bp, Artificial
  probe
  misc_feature (1)..(25): SEQ ID NO: 6935; WAN024DUZ_at; Start 38; Stop 62
caatagggattctccttcaagttaa

SEQ ID NO: 172295 - DNA, 25 bp, Artificial
  probe
  misc_feature (1)..(25): SEQ ID NO: 6935; WAN024DUZ_at; Start 27; Stop 51
tttatttgacacaatagggattctc

SEQ ID NO: 172296 - DNA, 25 bp, Artificial
  probe
  misc_feature (1)..(25): SEQ ID NO: 6935; WAN024DUZ_at; Start 13; Stop 37
atatctgctattggtttatttgaca

SEQ ID NO: 172297 - DNA, 25 bp, Artificial
  probe
  misc_feature (1)..(25): SEQ ID NO: 6935; WAN024DUZ_at; Start 30; Stop 54
atttgacacaatagggattctcctt

SEQ ID NO: 172298 - DNA, 25 bp, Artificial
  probe
  misc_feature (1)..(25): SEQ ID NO: 6935; WAN024DUZ_at; Start 50; Stop 74
tccttcaagttaaaattcattatag

SEQ ID NO: 172299 - DNA, 25 bp, Artificial
  probe
  misc_feature (1)..(25): SEQ ID NO: 6935; WAN024DUZ_at; Start 23; Stop 47
ttggtttatttgacacaatagggat

SEQ ID NO: 172300 - DNA, 25 bp, Artificial
  probe
  misc_feature (1)..(25): SEQ ID NO: 6935; WAN024DUZ_at; Start 17; Stop 41
ctgctattggtttatttgacacaat

SEQ ID NO: 172301 - DNA, 25 bp, Artificial
  probe
  misc_feature (1)..(25): SEQ ID NO: 6935; WAN024DUZ_at; Start 46; Stop 70
attctccttcaagttaaaattcatt

SEQ ID NO: 172302 - DNA, 25 bp, Artificial
  probe
  misc_feature (1)..(25): SEQ ID NO: 6935; WAN024DUZ_at; Start 21; Stop 45
tattggtttatttgacacaataggg

SEQ ID NO: 172303 - DNA, 25 bp, Artificial
  probe
  misc_feature (1)..(25): SEQ ID NO: 6935; WAN024DUZ_at; Start 28; Stop 52
ttatttgacacaatagggattctcc

SEQ ID NO: 172304 - DNA, 25 bp, Artificial
  probe
  misc_feature (1)..(25): SEQ ID NO: 6935; WAN024DUZ_at; Start 33; Stop 57
tgacacaatagggattctccttcaa

SEQ ID NO: 172305 - DNA, 25 bp, Artificial
  probe
  misc_feature (1)..(25): SEQ ID NO: 6935; WAN024DUZ_at; Start 26; Stop 50
gtttatttgacacaatagggattct

SEQ ID NO: 172306 - DNA, 25 bp, Artificial
  probe
  misc_feature (1)..(25): SEQ ID NO: 6935; WAN024DUZ_at; Start 31; Stop 55
tttgacacaatagggattctccttc

SEQ ID NO: 172307 - DNA, 25 bp, Artificial
  probe
  misc_feature (1)..(25): SEQ ID NO: 6935; WAN024DUZ_at; Start 20; Stop 44
ctattggtttatttgacacaatagg

SEQ ID NO: 172308 - DNA, 25 bp, Artificial
  probe
  misc_feature (1)..(25): SEQ ID NO: 6935; WAN024DUZ_at; Start 47; Stop 71
ttctccttcaagttaaaattcatta

SEQ ID NO: 172309 - DNA, 25 bp, Artificial
  probe
  misc_feature (1)..(25): SEQ ID NO: 6935; WAN024DUZ_at; Start 36; Stop 60
cacaatagggattctccttcaagtt

SEQ ID NO: 172310 - DNA, 25 bp, Artificial
  probe
  misc_feature (1)..(25): SEQ ID NO: 6935; WAN024DUZ_at; Start 45; Stop 69
gattctccttcaagttaaaattcat

SEQ ID NO: 172311 - DNA, 25 bp, Artificial
  probe
  misc_feature (1)..(25): SEQ ID NO: 6935; WAN024DUZ_at; Start 14; Stop 38
tatctgctattggtttatttgacac

SEQ ID NO: 172312 - DNA, 25 bp, Artificial
  probe
  misc_feature (1)..(25): SEQ ID NO: 6935; WAN024DUZ_at; Start 29; Stop 53
tatttgacacaatagggattctcct

SEQ ID NO: 172313 - DNA, 25 bp, Artificial
  probe
  misc_feature (1)..(25): SEQ ID NO: 6935; WAN024DUZ_at; Start 35; Stop 59
acacaatagggattctccttcaagt

SEQ ID NO: 172314 - DNA, 25 bp, Artificial
  probe
  misc_feature (1)..(25): SEQ ID NO: 6935; WAN024DUZ_at; Start 18; Stop 42
tgctattggtttatttgacacaata

SEQ ID NO: 172315 - DNA, 25 bp, Artificial
  probe
  misc_feature (1)..(25): SEQ ID NO: 6935; WAN024DUZ_at; Start 37; Stop 61
acaatagggattctccttcaagtta

SEQ ID NO: 172316 - DNA, 25 bp, Artificial
  probe
  misc_feature (1)..(25): SEQ ID NO: 6935; WAN024DUZ_at; Start 16; Stop 40
tctgctattggtttatttgacacaa

SEQ ID NO: 172317 - DNA, 25 bp, Artificial
  probe
  misc_feature (1)..(25): SEQ ID NO: 6935; WAN024DUZ_at; Start 32; Stop 56
ttgacacaatagggattctccttca

SEQ ID NO: 172318 - DNA, 25 bp, Artificial
  probe
  misc_feature (1)..(25): SEQ ID NO: 6935; WAN024DUZ_at; Start 44; Stop 68
ggattctccttcaagttaaaattca

SEQ ID NO: 172319 - DNA, 25 bp, Artificial
  probe
  misc_feature (1)..(25): SEQ ID NO: 6935; WAN024DUZ_at; Start 25; Stop 49
ggtttatttgacacaatagggattc

SEQ ID NO: 172320 - DNA, 25 bp, Artificial
  probe
  misc_feature (1)..(25): SEQ ID NO: 6935; WAN024DUZ_at; Start 24; Stop 48
tggtttatttgacacaatagggatt

SEQ ID NO: 172321 - DNA, 25 bp, Artificial
  probe
  misc_feature (1)..(25): SEQ ID NO: 6935; WAN024DUZ_at; Start 19; Stop 43
gctattggtttatttgacacaatag

SEQ ID NO: 172322 - DNA, 25 bp, Artificial
  probe
  misc_feature (1)..(25): SEQ ID NO: 6935; WAN024DUZ_at; Start 51; Stop 75
ccttcaagttaaaattcattataga

SEQ ID NO: 172323 - DNA, 25 bp, Artificial
  probe
  misc_feature (1)..(25): SEQ ID NO: 2545; WAN024DV2_at; Start 552; Stop 576
cattctacttggactatacatcatg

SEQ ID NO: 172324 - DNA, 25 bp, Artificial
  probe
  misc_feature (1)..(25): SEQ ID NO: 2545; WAN024DV2_at; Start 329; Stop 353
tgttttggacagttacattgctgac

SEQ ID NO: 172325 - DNA, 25 bp, Artificial
  probe
  misc_feature (1)..(25): SEQ ID NO: 2545; WAN024DV2_at; Start 29; Stop 53
gtgtttatatttccaccagtatcga

SEQ ID NO: 172326 - DNA, 25 bp, Artificial
  probe
  misc_feature (1)..(25): SEQ ID NO: 2545; WAN024DV2_at; Start 155; Stop 179
gggcgagtttagttgctgcttatgt

SEQ ID NO: 172327 - DNA, 25 bp, Artificial
  probe
  misc_feature (1)..(25): SEQ ID NO: 2545; WAN024DV2_at; Start 430; Stop 454
gccttgcttgtgtttgtaatcggca

SEQ ID NO: 172328 - DNA, 25 bp, Artificial
  probe
  misc_feature (1)..(25): SEQ ID NO: 2545; WAN024DV2_at; Start 489; Stop 513
ctctattccgttaatattcgagaca

SEQ ID NO: 172329 - DNA, 25 bp, Artificial
  probe
  misc_feature (1)..(25): SEQ ID NO: 2545; WAN024DV2_at; Start 417; Stop 441
acagaccctcgtggccttgcttgtg

SEQ ID NO: 172330 - DNA, 25 bp, Artificial
  probe
  misc_feature (1)..(25): SEQ ID NO: 2545; WAN024DV2_at; Start 124; Stop 148
gggcaatatctaggcacaggcttac

SEQ ID NO: 172331 - DNA, 25 bp, Artificial
  probe
  misc_feature (1)..(25): SEQ ID NO: 2545; WAN024DV2_at; Start 351; Stop 375
gacaattgcgtctggcggagataat

SEQ ID NO: 172332 - DNA, 25 bp, Artificial
  probe
  misc_feature (1)..(25): SEQ ID NO: 2545; WAN024DV2_at; Start 474; Stop 498
tagtcgggtgttatcctctattccg

SEQ ID NO: 172333 - DNA, 25 bp, Artificial
  probe
  misc_feature (1)..(25): SEQ ID NO: 2545; WAN024DV2_at; Start 344; Stop 368
cattgctgacaattgcgtctggcgg

SEQ ID NO: 172334 - DNA, 25 bp, Artificial
  probe
  misc_feature (1)..(25): SEQ ID NO: 2545; WAN024DV2_at; Start 231; Stop 255
tatctatttagggattcgctttgca

SEQ ID NO: 172335 - DNA, 25 bp, Artificial
  probe
  misc_feature (1)..(25): SEQ ID NO: 2545; WAN024DV2_at; Start 520; Stop 544
aaatacgagcgaatcattgtgccct

SEQ ID NO: 172336 - DNA, 25 bp, Artificial
  probe
  misc_feature (1)..(25): SEQ ID NO: 2545; WAN024DV2_at; Start 582; Stop 606
aaatggcacgatagagacttttctg

SEQ ID NO: 172337 - DNA, 25 bp, Artificial
  probe
  misc_feature (1)..(25): SEQ ID NO: 2545; WAN024DV2_at; Start 101; Stop 125
aacagaaatggcatatttatgcggg

SEQ ID NO: 172338 - DNA, 25 bp, Artificial
  probe
  misc_feature (1)..(25): SEQ ID NO: 2545; WAN024DV2_at; Start 314; Stop 338
gcaaggcaaatcaactgttttggac

SEQ ID NO: 172339 - DNA, 25 bp, Artificial
  probe
  misc_feature (1)..(25): SEQ ID NO: 2545; WAN024DV2_at; Start 270; Stop 294
tgcggaagaagaagaggaagaaatt

SEQ ID NO: 172340 - DNA, 25 bp, Artificial
  probe
  misc_feature (1)..(25): SEQ ID NO: 2545; WAN024DV2_at; Start 568; Stop 592
tacatcatgtatgaaaatggcacga

SEQ ID NO: 172341 - DNA, 25 bp, Artificial
  probe
  misc_feature (1)..(25): SEQ ID NO: 2545; WAN024DV2_at; Start 72; Stop 96
tattttatttgcacagctatcacag

SEQ ID NO: 172342 - DNA, 25 bp, Artificial
  probe
  misc_feature (1)..(25): SEQ ID NO: 2545; WAN024DV2_at; Start 297; Stop 321
tgaaagattagaacaaagcaaggca

SEQ ID NO: 172343 - DNA, 25 bp, Artificial
  probe
  misc_feature (1)..(25): SEQ ID NO: 2545; WAN024DV2_at; Start 506; Stop 530
tcgagacaattgaaaaatacgagcg

SEQ ID NO: 172344 - DNA, 25 bp, Artificial
  probe
  misc_feature (1)..(25): SEQ ID NO: 2545; WAN024DV2_at; Start 212; Stop 236
gattgcttggtttaatccctatcta

SEQ ID NO: 172345 - DNA, 25 bp, Artificial
  probe
  misc_feature (1)..(25): SEQ ID NO: 2545; WAN024DV2_at; Start 170; Stop 194
ctgcttatgtcgttaatttcgtgcc

SEQ ID NO: 172346 - DNA, 25 bp, Artificial
  probe
  misc_feature (1)..(25): SEQ ID NO: 2545; WAN024DV2_at; Start 193; Stop 217
cctgaagaatggatggttggattgc

SEQ ID NO: 172347 - DNA, 25 bp, Artificial
  probe
  misc_feature (1)..(25): SEQ ID NO: 2545; WAN024DV2_at; Start 1; Stop 25
atgggacagacaatcatatctgcta

SEQ ID NO: 172348 - DNA, 25 bp, Artificial
  probe
  misc_feature (1)..(25): SEQ ID NO: 2545; WAN024DV2_at; Start 387; Stop 411
tataccttattttgcttcgttagat

SEQ ID NO: 172349 - DNA, 25 bp, Artificial
  probe
  misc_feature (1)..(25): SEQ ID NO: 2545; WAN024DV2_at; Start 459; Stop 483
tatcttttgcgagattagtcgggtg

SEQ ID NO: 172350 - DNA, 25 bp, Artificial
  probe
  misc_feature (1)..(25): SEQ ID NO: 2545; WAN024DV2_at; Start 183; Stop 207
taatttcgtgcctgaagaatggatg

SEQ ID NO: 172351 - DNA, 25 bp, Artificial
  probe
  misc_feature (1)..(25): SEQ ID NO: 2545; WAN024DV2_at; Start 254; Stop 278
caattgttggagaagatgcggaaga

SEQ ID NO: 172352 - DNA, 25 bp, Artificial
  probe
  misc_feature (1)..(25): SEQ ID NO: 2545; WAN024DV2_at; Start 445; Stop 469
gtaatcggcataattatcttttgcg

SEQ ID NO: 172353 - DNA, 25 bp, Artificial
  probe
  misc_feature (1)..(25): SEQ ID NO: 2545; WAN024DV2_at; Start 241; Stop 265
gggattcgctttgcaattgttggag

SEQ ID NO: 172354 - DNA, 25 bp, Artificial
  probe
  misc_feature (1)..(25): SEQ ID NO: 2545; WAN024DV2_at; Start 132; Stop 156
tctaggcacaggcttacttgtaggg

SEQ ID NO: 172355 - DNA, 25 bp, Artificial
  probe
  misc_feature (1)..(25): SEQ ID NO: 2545; WAN024DV2_at; Start 87; Stop 111
gctatcacagaataaacagaaatgg

SEQ ID NO: 172356 - DNA, 25 bp, Artificial
  probe
  misc_feature (1)..(25): SEQ ID NO: 2545; WAN024DV2_at; Start 534; Stop 558
cattgtgcccttagtattcattcta

SEQ ID NO: 172357 - DNA, 25 bp, Artificial
  probe
  misc_feature (1)..(25): SEQ ID NO: 4255; WAN024DV3_at; Start 382; Stop 406
caggttcaagaagcctttgcccaag

SEQ ID NO: 172358 - DNA, 25 bp, Artificial
  probe
  misc_feature (1)..(25): SEQ ID NO: 4255; WAN024DV3_at; Start 331; Stop 355
atttcagcctttcccttggagcagg

SEQ ID NO: 172359 - DNA, 25 bp, Artificial
  probe
  misc_feature (1)..(25): SEQ ID NO: 4255; WAN024DV3_at; Start 1172; Stop 1196
gaaccatgacagatgagggcttgct

SEQ ID NO: 172360 - DNA, 25 bp, Artificial
  probe
  misc_feature (1)..(25): SEQ ID NO: 4255; WAN024DV3_at; Start 483; Stop 507
taagcctaagggagtgcagatttca

SEQ ID NO: 172361 - DNA, 25 bp, Artificial
  probe
  misc_feature (1)..(25): SEQ ID NO: 4255; WAN024DV3_at; Start 1204; Stop 1228
ggcggacgcatggacttccagatta

SEQ ID NO: 172362 - DNA, 25 bp, Artificial
  probe
  misc_feature (1)..(25): SEQ ID NO: 4255; WAN024DV3_at; Start 900; Stop 924
cggcccaacagaagcgacagtagct

SEQ ID NO: 172363 - DNA, 25 bp, Artificial
  probe
  misc_feature (1)..(25): SEQ ID NO: 4255; WAN024DV3_at; Start 1307; Stop 1331
cagtaccgcgctataacaaggacca

SEQ ID NO: 172364 - DNA, 25 bp, Artificial
  probe
  misc_feature (1)..(25): SEQ ID NO: 4255; WAN024DV3_at; Start 267; Stop 291
ccattcggccttggagcgagtttca

SEQ ID NO: 172365 - DNA, 25 bp, Artificial
  probe
  misc_feature (1)..(25): SEQ ID NO: 4255; WAN024DV3_at; Start 623; Stop 647
attgggcaccgaccttggcacttgg

SEQ ID NO: 172366 - DNA, 25 bp, Artificial
  probe
  misc_feature (1)..(25): SEQ ID NO: 4255; WAN024DV3_at; Start 1016; Stop 1040
ttgacgaggaaggaaataaactgcc

SEQ ID NO: 172367 - DNA, 25 bp, Artificial
  probe
  misc_feature (1)..(25): SEQ ID NO: 4255; WAN024DV3_at; Start 562; Stop 586
acaccgagtcgtccgcaaatgctgg

SEQ ID NO: 172368 - DNA, 25 bp, Artificial
  probe
  misc_feature (1)..(25): SEQ ID NO: 4255; WAN024DV3_at; Start 1057; Stop 1081
gaaatcattgtttctgggccagctg

SEQ ID NO: 172369 - DNA, 25 bp, Artificial
  probe
  misc_feature (1)..(25): SEQ ID NO: 4255; WAN024DV3_at; Start 524; Stop 548
gctttacaaactggatgattacgga

SEQ ID NO: 172370 - DNA, 25 bp, Artificial
  probe
  misc_feature (1)..(25): SEQ ID NO: 4255; WAN024DV3_at; Start 929; Stop 953
cagcagttgccgtgacagacgagat

SEQ ID NO: 172371 - DNA, 25 bp, Artificial
  probe
  misc_feature (1)..(25): SEQ ID NO: 4255; WAN024DV3_at; Start 294; Stop 318
tattttagaagtagcagagccaagc

SEQ ID NO: 172372 - DNA, 25 bp, Artificial
  probe
  misc_feature (1)..(25): SEQ ID NO: 4255; WAN024DV3_at; Start 1155; Stop 1179
tcacacaggcgatgtgggaaccatg

SEQ ID NO: 172373 - DNA, 25 bp, Artificial
  probe
  misc_feature (1)..(25): SEQ ID NO: 4255; WAN024DV3_at; Start 127; Stop 151
gatagtttggctgcagtcattgacc

SEQ ID NO: 172374 - DNA, 25 bp, Artificial
  probe
  misc_feature (1)..(25): SEQ ID NO: 4255; WAN024DV3_at; Start 209; Stop 233
tgttggcaacctttgtagcgctgac

SEQ ID NO: 172375 - DNA, 25 bp, Artificial
  probe
  misc_feature (1)..(25): SEQ ID NO: 4255; WAN024DV3_at; Start 885; Stop 909
tatcatcaatgcttacggcccaaca

SEQ ID NO: 172376 - DNA, 25 bp, Artificial
  probe
  misc_feature (1)..(25): SEQ ID NO: 4255; WAN024DV3_at; Start 88; Stop 112
gggcaggaacacacttatggcgatt

SEQ ID NO: 172377 - DNA, 25 bp, Artificial
  probe
  misc_feature (1)..(25): SEQ ID NO: 4255; WAN024DV3_at; Start 252; Stop 276
cattccaattgatagccattcggcc

SEQ ID NO: 172378 - DNA, 25 bp, Artificial
  probe
  misc_feature (1)..(25): SEQ ID NO: 4255; WAN024DV3_at; Start 1104; Stop 1128
tcctgaaaaaacagcagaagccttc

SEQ ID NO: 172379 - DNA, 25 bp, Artificial
  probe
  misc_feature (1)..(25): SEQ ID NO: 4255; WAN024DV3_at; Start 1187; Stop 1211
agggcttgcttctctacggcggacg

SEQ ID NO: 172380 - DNA, 25 bp, Artificial
  probe
  misc_feature (1)..(25): SEQ ID NO: 4255; WAN024DV3_at; Start 863; Stop 887
gcgagcgtttcccaaatgcccgtat

SEQ ID NO: 172381 - DNA, 25 bp, Artificial
  probe
  misc_feature (1)..(25): SEQ ID NO: 4255; WAN024DV3_at; Start 1401; Stop 1425
cgatattaccaaggccatcaaggaa

SEQ ID NO: 172382 - DNA, 25 bp, Artificial
  probe
  misc_feature (1)..(25): SEQ ID NO: 4255; WAN024DV3_at; Start 843; Stop 867
caaaacagctcaaaaactgcgcgag

SEQ ID NO: 172383 - DNA, 25 bp, Artificial
  probe
  misc_feature (1)..(25): SEQ ID NO: 4255; WAN024DV3_at; Start 608; Stop 632
acttgtctgtcatgtattgggcacc

SEQ ID NO: 172384 - DNA, 25 bp, Artificial
  probe
  misc_feature (1)..(25): SEQ ID NO: 4255; WAN024DV3_at; Start 465; Stop 489
tacttctggtacgactggtaagcct

SEQ ID NO: 172385 - DNA, 25 bp, Artificial
  probe
  misc_feature (1)..(25): SEQ ID NO: 4255; WAN024DV3_at; Start 1469; Stop 1493
tcctttaccgagacagtttgccact

SEQ ID NO: 172386 - DNA, 25 bp, Artificial
  probe
  misc_feature (1)..(25): SEQ ID NO: 4255; WAN024DV3_at; Start 418; Stop 442
gaaatcacgcatccagtcaagggag

SEQ ID NO: 172387 - DNA, 25 bp, Artificial
  probe
  misc_feature (1)..(25): SEQ ID NO: 4255; WAN024DV3_at; Start 974; Stop 998
taccaatcggctataccaaggctga

SEQ ID NO: 172388 - DNA, 25 bp, Artificial
  probe
  misc_feature (1)..(25): SEQ ID NO: 4255; WAN024DV3_at; Start 547; Stop 571
gataaggaatttgcgacaccgagtc

SEQ ID NO: 172389 - DNA, 25 bp, Artificial
  probe
  misc_feature (1)..(25): SEQ ID NO: 4255; WAN024DV3_at; Start 1416; Stop 1440
catcaaggaagacctgacagacatc

SEQ ID NO: 172390 - DNA, 25 bp, Artificial
  probe
  misc_feature (1)..(25): SEQ ID NO: 4255; WAN024DV3_at; Start 144; Stop 168
cattgaccaactaggcttgcctgag

SEQ ID NO: 172391 - DNA, 25 bp, Artificial
  probe
  misc_feature (1)..(25): SEQ ID NO: 1755; WAN024DV4_at; Start 314; Stop 338
ttatctttgtcaaggtgcaaccagc

SEQ ID NO: 172392 - DNA, 25 bp, Artificial
  probe
  misc_feature (1)..(25): SEQ ID NO: 1755; WAN024DV4_at; Start 854; Stop 878
ggaatcgctggcatatgagtctgtc

SEQ ID NO: 172393 - DNA, 25 bp, Artificial
  probe
  misc_feature (1)..(25): SEQ ID NO: 1755; WAN024DV4_at; Start 15; Stop 39
tcaacagcttcctcatttagagcca

SEQ ID NO: 172394 - DNA, 25 bp, Artificial
  probe
  misc_feature (1)..(25): SEQ ID NO: 1755; WAN024DV4_at; Start 675; Stop 699
gcagtcaggtggcttctttaatctc

SEQ ID NO: 172395 - DNA, 25 bp, Artificial
  probe
  misc_feature (1)..(25): SEQ ID NO: 1755; WAN024DV4_at; Start 1050; Stop 1074
actaggcttggtcatcaatgatgcc

SEQ ID NO: 172396 - DNA, 25 bp, Artificial
  probe
  misc_feature (1)..(25): SEQ ID NO: 1755; WAN024DV4_at; Start 1110; Stop 1134
gaaaaaagcagggaaggctgcccta

SEQ ID NO: 172397 - DNA, 25 bp, Artificial
  probe
  misc_feature (1)..(25): SEQ ID NO: 1755; WAN024DV4_at; Start 1125; Stop 1149
ggctgccctacctgagaatcgctgg

SEQ ID NO: 172398 - DNA, 25 bp, Artificial
  probe
  misc_feature (1)..(25): SEQ ID NO: 1755; WAN024DV4_at; Start 476; Stop 500
tcatgccaactttctcgagtggtcc

SEQ ID NO: 172399 - DNA, 25 bp, Artificial
  probe
  misc_feature (1)..(25): SEQ ID NO: 1755; WAN024DV4_at; Start 108; Stop 132
caagaaacgctttgcctggtatgaa

SEQ ID NO: 172400 - DNA, 25 bp, Artificial
  probe
  misc_feature (1)..(25): SEQ ID NO: 1755; WAN024DV4_at; Start 241; Stop 265
tacaagcattatcgaaaaagcaagg

SEQ ID NO: 172401 - DNA, 25 bp, Artificial
  probe
  misc_feature (1)..(25): SEQ ID NO: 1755; WAN024DV4_at; Start 1014; Stop 1038
gacctggtactatatcgcctatgga

SEQ ID NO: 172402 - DNA, 25 bp, Artificial
  probe
  misc_feature (1)..(25): SEQ ID NO: 1755; WAN024DV4_at; Start 1167; Stop 1191
ggttgtcactttccatgttgtcatg

SEQ ID NO: 172403 - DNA, 25 bp, Artificial
  probe
  misc_feature (1)..(25): SEQ ID NO: 1755; WAN024DV4_at; Start 335; Stop 359
cagctatcaatggaacgcagtcttt

SEQ ID NO: 172404 - DNA, 25 bp, Artificial
  probe
  misc_feature (1)..(25): SEQ ID NO: 1755; WAN024DV4_at; Start 782; Stop 806
caaacttgatgggaatccgtagccc

SEQ ID NO: 172405 - DNA, 25 bp, Artificial
  probe
  misc_feature (1)..(25): SEQ ID NO: 1755; WAN024DV4_at; Start 159; Stop 183
caccatgttggtgggtggaaagacc

SEQ ID NO: 172406 - DNA, 25 bp, Artificial
  probe
  misc_feature (1)..(25): SEQ ID NO: 1755; WAN024DV4_at; Start 174; Stop 198
tggaaagaccaatcaactagctgcc

SEQ ID NO: 172407 - DNA, 25 bp, Artificial
  probe
  misc_feature (1)..(25): SEQ ID NO: 1755; WAN024DV4_at; Start 660; Stop 684
gaagaatttagccttgcagtcaggt

SEQ ID NO: 172408 - DNA, 25 bp, Artificial
  probe
  misc_feature (1)..(25): SEQ ID NO: 1755; WAN024DV4_at; Start 564; Stop 588
ggatatgctggatgaatctgtccgc

SEQ ID NO: 172409 - DNA, 25 bp, Artificial
  probe
  misc_feature (1)..(25): SEQ ID NO: 1755; WAN024DV4_at; Start 187; Stop 211
caactagctgccttgggtatttacc

SEQ ID NO: 172410 - DNA, 25 bp, Artificial
  probe
  misc_feature (1)..(25): SEQ ID NO: 1755; WAN024DV4_at; Start 842; Stop 866
taaaggagttttggaatcgctggca

SEQ ID NO: 172411 - DNA, 25 bp, Artificial
  probe
  misc_feature (1)..(25): SEQ ID NO: 1755; WAN024DV4_at; Start 689; Stop 713
tctttaatctctatgccttggcagt

SEQ ID NO: 172412 - DNA, 25 bp, Artificial
  probe
  misc_feature (1)..(25): SEQ ID NO: 1755; WAN024DV4_at; Start 64; Stop 88
tatgtgattgctgcaaccttgccca

SEQ ID NO: 172413 - DNA, 25 bp, Artificial
  probe
  misc_feature (1)..(25): SEQ ID NO: 1755; WAN024DV4_at; Start 208; Stop 232
tacctttgctgggaaatattgctcc

SEQ ID NO: 172414 - DNA, 25 bp, Artificial
  probe
  misc_feature (1)..(25): SEQ ID NO: 1755; WAN024DV4_at; Start 903; Stop 927
tatgcgaatggtgatggtgttaacc

SEQ ID NO: 172415 - DNA, 25 bp, Artificial
  probe
  misc_feature (1)..(25): SEQ ID NO: 1755; WAN024DV4_at; Start 948; Stop 972
tcgtaatgtaacctcaagcatggcc

SEQ ID NO: 172416 - DNA, 25 bp, Artificial
  probe
  misc_feature (1)..(25): SEQ ID NO: 1755; WAN024DV4_at; Start 1035; Stop 1059
tggactctttcatggactaggcttg

SEQ ID NO: 172417 - DNA, 25 bp, Artificial
  probe
  misc_feature (1)..(25): SEQ ID NO: 1755; WAN024DV4_at; Start 34; Stop 58
gagccatatggcaatcctcagtatt

SEQ ID NO: 172418 - DNA, 25 bp, Artificial
  probe
  misc_feature (1)..(25): SEQ ID NO: 1755; WAN024DV4_at; Start 352; Stop 376
cagtctttgcttgggttcttgggaa

SEQ ID NO: 172419 - DNA, 25 bp, Artificial
  probe
  misc_feature (1)..(25): SEQ ID NO: 1755; WAN024DV4_at; Start 621; Stop 645
cctagctcatgttttaggagagacc

SEQ ID NO: 172420 - DNA, 25 bp, Artificial
  probe
  misc_feature (1)..(25): SEQ ID NO: 1755; WAN024DV4_at; Start 492; Stop 516
gagtggtccaatcgatcgctttaag

SEQ ID NO: 172421 - DNA, 25 bp, Artificial
  probe
  misc_feature (1)..(25): SEQ ID NO: 1755; WAN024DV4_at; Start 544; Stop 568
cctgagcgagatgagttgatggata

SEQ ID NO: 172422 - DNA, 25 bp, Artificial
  probe
  misc_feature (1)..(25): SEQ ID NO: 1755; WAN024DV4_at; Start 261; Stop 285
caaggatggcaagtgggtcttctac

SEQ ID NO: 172423 - DNA, 25 bp, Artificial
  probe
  misc_feature (1)..(25): SEQ ID NO: 1755; WAN024DV4_at; Start 1064; Stop 1088
tcaatgatgcctgggttcgcaagaa

SEQ ID NO: 172424 - DNA, 25 bp, Artificial
  probe
  misc_feature (1)..(25): SEQ ID NO: 1755; WAN024DV4_at; Start 431; Stop 455
tgattaaggattttaccctctggga

SEQ ID NO: 172425 - DNA, 25 bp, Artificial
  probe
  misc_feature (1)..(25): SEQ ID NO: 1872; WAN024DV5_at; Start 27; Stop 51
gtcacgaccaaactctgttacaggg

SEQ ID NO: 172426 - DNA, 25 bp, Artificial
  probe
  misc_feature (1)..(25): SEQ ID NO: 1872; WAN024DV5_at; Start 75; Stop 99
aatctccacaatcaactcaaccgtt

SEQ ID NO: 172427 - DNA, 25 bp, Artificial
  probe
  misc_feature (1)..(25): SEQ ID NO: 1872; WAN024DV5_at; Start 107; Stop 131
tatccaagacacctgcatcaaaaag

SEQ ID NO: 172428 - DNA, 25 bp, Artificial
  probe
  misc_feature (1)..(25): SEQ ID NO: 1872; WAN024DV5_at; Start 157; Stop 181
tcttccataaacaactcatcaataa

SEQ ID NO: 172429 - DNA, 25 bp, Artificial
  probe
  misc_feature (1)..(25): SEQ ID NO: 1872; WAN024DV5_at; Start 97; Stop 121
gttcccatactatccaagacacctg

SEQ ID NO: 172430 - DNA, 25 bp, Artificial
  probe
  misc_feature (1)..(25): SEQ ID NO: 1872; WAN024DV5_at; Start 144; Stop 168
catgtcagaaacatcttccataaac

SEQ ID NO: 172431 - DNA, 25 bp, Artificial
  probe
  misc_feature (1)..(25): SEQ ID NO: 1872; WAN024DV5_at; Start 104; Stop 128
tactatccaagacacctgcatcaaa

SEQ ID NO: 172432 - DNA, 25 bp, Artificial
  probe
  misc_feature (1)..(25): SEQ ID NO: 1872; WAN024DV5_at; Start 11; Stop 35
tagctgtattccagtcgtcacgacc

SEQ ID NO: 172433 - DNA, 25 bp, Artificial
  probe
  misc_feature (1)..(25): SEQ ID NO: 1872; WAN024DV5_at; Start 64; Stop 88
aaacggttctcaatctccacaatca

SEQ ID NO: 172434 - DNA, 25 bp, Artificial
  probe
  misc_feature (1)..(25): SEQ ID NO: 1872; WAN024DV5_at; Start 114; Stop 138
gacacctgcatcaaaaagatcttca

SEQ ID NO: 172435 - DNA, 25 bp, Artificial
  probe
  misc_feature (1)..(25): SEQ ID NO: 1872; WAN024DV5_at; Start 29; Stop 53
cacgaccaaactctgttacagggac

SEQ ID NO: 172436 - DNA, 25 bp, Artificial
  probe
  misc_feature (1)..(25): SEQ ID NO: 1872; WAN024DV5_at; Start 110; Stop 134
ccaagacacctgcatcaaaaagatc

SEQ ID NO: 172437 - DNA, 25 bp, Artificial
  probe
  misc_feature (1)..(25): SEQ ID NO: 1872; WAN024DV5_at; Start 39; Stop 63
ctctgttacagggacacgaatgtca

SEQ ID NO: 172438 - DNA, 25 bp, Artificial
  probe
  misc_feature (1)..(25): SEQ ID NO: 1872; WAN024DV5_at; Start 60; Stop 84
gtcaaaacggttctcaatctccaca

SEQ ID NO: 172439 - DNA, 25 bp, Artificial
  probe
  misc_feature (1)..(25): SEQ ID NO: 1872; WAN024DV5_at; Start 91; Stop 115
tcaaccgttcccatactatccaaga

SEQ ID NO: 172440 - DNA, 25 bp, Artificial
  probe
  misc_feature (1)..(25): SEQ ID NO: 1872; WAN024DV5_at; Start 131; Stop 155
gatcttcatccatcatgtcagaaac

SEQ ID NO: 172441 - DNA, 25 bp, Artificial
  probe
  misc_feature (1)..(25): SEQ ID NO: 1872; WAN024DV5_at; Start 127; Stop 151
aaaagatcttcatccatcatgtcag

SEQ ID NO: 172442 - DNA, 25 bp, Artificial
  probe
  misc_feature (1)..(25): SEQ ID NO: 1872; WAN024DV5_at; Start 13; Stop 37
gctgtattccagtcgtcacgaccaa

SEQ ID NO: 172443 - DNA, 25 bp, Artificial
  probe
  misc_feature (1)..(25): SEQ ID NO: 1872; WAN024DV5_at; Start 45; Stop 69
tacagggacacgaatgtcaaaacgg

SEQ ID NO: 172444 - DNA, 25 bp, Artificial
  probe
  misc_feature (1)..(25): SEQ ID NO: 1872; WAN024DV5_at; Start 47; Stop 71
cagggacacgaatgtcaaaacggtt

SEQ ID NO: 172445 - DNA, 25 bp, Artificial
  probe
  misc_feature (1)..(25): SEQ ID NO: 1872; WAN024DV5_at; Start 53; Stop 77
cacgaatgtcaaaacggttctcaat

SEQ ID NO: 172446 - DNA, 25 bp, Artificial
  probe
  misc_feature (1)..(25): SEQ ID NO: 1872; WAN024DV5_at; Start 185; Stop 209
caataacttctgatttgatatccat

SEQ ID NO: 172447 - DNA, 25 bp, Artificial
  probe
  misc_feature (1)..(25): SEQ ID NO: 1872; WAN024DV5_at; Start 139; Stop 163
tccatcatgtcagaaacatcttcca

SEQ ID NO: 172448 - DNA, 25 bp, Artificial
  probe
  misc_feature (1)..(25): SEQ ID NO: 1872; WAN024DV5_at; Start 51; Stop 75
gacacgaatgtcaaaacggttctca

SEQ ID NO: 172449 - DNA, 25 bp, Artificial
  probe
  misc_feature (1)..(25): SEQ ID NO: 1872; WAN024DV5_at; Start 32; Stop 56
gaccaaactctgttacagggacacg

SEQ ID NO: 172450 - DNA, 25 bp, Artificial
  probe
  misc_feature (1)..(25): SEQ ID NO: 1872; WAN024DV5_at; Start 151; Stop 175
gaaacatcttccataaacaactcat

SEQ ID NO: 172451 - DNA, 25 bp, Artificial
  probe
  misc_feature (1)..(25): SEQ ID NO: 1872; WAN024DV5_at; Start 196; Stop 220
gatttgatatccatattttatttcc

SEQ ID NO: 172452 - DNA, 25 bp, Artificial
  probe
  misc_feature (1)..(25): SEQ ID NO: 1872; WAN024DV5_at; Start 3; Stop 27
gattttattagctgtattccagtcg

SEQ ID NO: 172453 - DNA, 25 bp, Artificial
  probe
  misc_feature (1)..(25): SEQ ID NO: 1872; WAN024DV5_at; Start 172; Stop 196
tcatcaataatttcaataacttctg

SEQ ID NO: 172454 - DNA, 25 bp, Artificial
  probe
  misc_feature (1)..(25): SEQ ID NO: 1872; WAN024DV5_at; Start 8; Stop 32
tattagctgtattccagtcgtcacg

SEQ ID NO: 172455 - DNA, 25 bp, Artificial
  probe
  misc_feature (1)..(25): SEQ ID NO: 1872; WAN024DV5_at; Start 35; Stop 59
caaactctgttacagggacacgaat

SEQ ID NO: 172456 - DNA, 25 bp, Artificial
  probe
  misc_feature (1)..(25): SEQ ID NO: 1872; WAN024DV5_at; Start 22; Stop 46
cagtcgtcacgaccaaactctgtta

SEQ ID NO: 172457 - DNA, 25 bp, Artificial
  probe
  misc_feature (1)..(25): SEQ ID NO: 1872; WAN024DV5_at; Start 68; Stop 92
ggttctcaatctccacaatcaactc

SEQ ID NO: 172458 - DNA, 25 bp, Artificial
  probe
  misc_feature (1)..(25): SEQ ID NO: 1872; WAN024DV5_at; Start 118; Stop 142
cctgcatcaaaaagatcttcatcca

SEQ ID NO: 172459 - DNA, 25 bp, Artificial
  probe
  misc_feature (1)..(25): SEQ ID NO: 2338; WAN024DV6_at; Start 76; Stop 100
gatctttttgatgcaggtgtcttgg

SEQ ID NO: 172460 - DNA, 25 bp, Artificial
  probe
  misc_feature (1)..(25): SEQ ID NO: 2338; WAN024DV6_at; Start 30; Stop 54
tattgatgagttgtttatggaagat

SEQ ID NO: 172461 - DNA, 25 bp, Artificial
  probe
  misc_feature (1)..(25): SEQ ID NO: 2338; WAN024DV6_at; Start 181; Stop 205
gacgactggaatacagctaataaaa

SEQ ID NO: 172462 - DNA, 25 bp, Artificial
  probe
  misc_feature (1)..(25): SEQ ID NO: 2338; WAN024DV6_at; Start 118; Stop 142
gagttgattgtggagattgagaacc

SEQ ID NO: 172463 - DNA, 25 bp, Artificial
  probe
  misc_feature (1)..(25): SEQ ID NO: 2338; WAN024DV6_at; Start 79; Stop 103
ctttttgatgcaggtgtcttggata

SEQ ID NO: 172464 - DNA, 25 bp, Artificial
  probe
  misc_feature (1)..(25): SEQ ID NO: 2338; WAN024DV6_at; Start 174; Stop 198
tggtcgtgacgactggaatacagct

SEQ ID NO: 172465 - DNA, 25 bp, Artificial
  probe
  misc_feature (1)..(25): SEQ ID NO: 2338; WAN024DV6_at; Start 61; Stop 85
gacatgatggatgaagatctttttg

SEQ ID NO: 172466 - DNA, 25 bp, Artificial
  probe
  misc_feature (1)..(25): SEQ ID NO: 2338; WAN024DV6_at; Start 154; Stop 178
cgtgtccctgtaacagagtttggtc

SEQ ID NO: 172467 - DNA, 25 bp, Artificial
  probe
  misc_feature (1)..(25): SEQ ID NO: 2338; WAN024DV6_at; Start 1; Stop 25
atggatatcaaatcagaagttattg

SEQ ID NO: 172468 - DNA, 25 bp, Artificial
  probe
  misc_feature (1)..(25): SEQ ID NO: 2338; WAN024DV6_at; Start 95; Stop 119
tcttggatagtatgggaacggttga

SEQ ID NO: 172469 - DNA, 25 bp, Artificial
  probe
  misc_feature (1)..(25): SEQ ID NO: 2338; WAN024DV6_at; Start 139; Stop 163
aaccgttttgacattcgtgtccctg

SEQ ID NO: 172470 - DNA, 25 bp, Artificial
  probe
  misc_feature (1)..(25): SEQ ID NO: 2338; WAN024DV6_at; Start 202; Stop 226
aaaatcatagctggtattgtggagc

SEQ ID NO: 172471 - DNA, 25 bp, Artificial
  probe
  misc_feature (1)..(25): SEQ ID NO: 2338; WAN024DV6_at; Start 126; Stop 150
tgtggagattgagaaccgttttgac

SEQ ID NO: 172472 - DNA, 25 bp, Artificial
  probe
  misc_feature (1)..(25): SEQ ID NO: 2338; WAN024DV6_at; Start 162; Stop 186
tgtaacagagtttggtcgtgacgac

SEQ ID NO: 172473 - DNA, 25 bp, Artificial
  probe
  misc_feature (1)..(25): SEQ ID NO: 2338; WAN024DV6_at; Start 178; Stop 202
cgtgacgactggaatacagctaata

SEQ ID NO: 172474 - DNA, 25 bp, Artificial
  probe
  misc_feature (1)..(25): SEQ ID NO: 2338; WAN024DV6_at; Start 132; Stop 156
gattgagaaccgttttgacattcgt

SEQ ID NO: 172475 - DNA, 25 bp, Artificial
  probe
  misc_feature (1)..(25): SEQ ID NO: 2338; WAN024DV6_at; Start 122; Stop 146
tgattgtggagattgagaaccgttt

SEQ ID NO: 172476 - DNA, 25 bp, Artificial
  probe
  misc_feature (1)..(25): SEQ ID NO: 2338; WAN024DV6_at; Start 135; Stop 159
tgagaaccgttttgacattcgtgtc

SEQ ID NO: 172477 - DNA, 25 bp, Artificial
  probe
  misc_feature (1)..(25): SEQ ID NO: 2338; WAN024DV6_at; Start 111; Stop 135
aacggttgagttgattgtggagatt

SEQ ID NO: 172478 - DNA, 25 bp, Artificial
  probe
  misc_feature (1)..(25): SEQ ID NO: 2338; WAN024DV6_at; Start 66; Stop 90
gatggatgaagatctttttgatgca

SEQ ID NO: 172479 - DNA, 25 bp, Artificial
  probe
  misc_feature (1)..(25): SEQ ID NO: 2338; WAN024DV6_at; Start 72; Stop 96
tgaagatctttttgatgcaggtgtc

SEQ ID NO: 172480 - DNA, 25 bp, Artificial
  probe
  misc_feature (1)..(25): SEQ ID NO: 2338; WAN024DV6_at; Start 52; Stop 76
gatgtttctgacatgatggatgaag

SEQ ID NO: 172481 - DNA, 25 bp, Artificial
  probe
  misc_feature (1)..(25): SEQ ID NO: 2338; WAN024DV6_at; Start 167; Stop 191
cagagtttggtcgtgacgactggaa

SEQ ID NO: 172482 - DNA, 25 bp, Artificial
  probe
  misc_feature (1)..(25): SEQ ID NO: 2338; WAN024DV6_at; Start 142; Stop 166
cgttttgacattcgtgtccctgtaa

SEQ ID NO: 172483 - DNA, 25 bp, Artificial
  probe
  misc_feature (1)..(25): SEQ ID NO: 2338; WAN024DV6_at; Start 159; Stop 183
ccctgtaacagagtttggtcgtgac

SEQ ID NO: 172484 - DNA, 25 bp, Artificial
  probe
  misc_feature (1)..(25): SEQ ID NO: 2338; WAN024DV6_at; Start 150; Stop 174
cattcgtgtccctgtaacagagttt

SEQ ID NO: 172485 - DNA, 25 bp, Artificial
  probe
  misc_feature (1)..(25): SEQ ID NO: 2338; WAN024DV6_at; Start 58; Stop 82
tctgacatgatggatgaagatcttt

SEQ ID NO: 172486 - DNA, 25 bp, Artificial
  probe
  misc_feature (1)..(25): SEQ ID NO: 2338; WAN024DV6_at; Start 164; Stop 188
taacagagtttggtcgtgacgactg

SEQ ID NO: 172487 - DNA, 25 bp, Artificial
  probe
  misc_feature (1)..(25): SEQ ID NO: 2338; WAN024DV6_at; Start 188; Stop 212
ggaatacagctaataaaatcatagc

SEQ ID NO: 172488 - DNA, 25 bp, Artificial
  probe
  misc_feature (1)..(25): SEQ ID NO: 2338; WAN024DV6_at; Start 37; Stop 61
gagttgtttatggaagatgtttctg

SEQ ID NO: 172489 - DNA, 25 bp, Artificial
  probe
  misc_feature (1)..(25): SEQ ID NO: 2338; WAN024DV6_at; Start 89; Stop 113
caggtgtcttggatagtatgggaac

SEQ ID NO: 172490 - DNA, 25 bp, Artificial
  probe
  misc_feature (1)..(25): SEQ ID NO: 2338; WAN024DV6_at; Start 13; Stop 37
tcagaagttattgaaattattgatg

SEQ ID NO: 172491 - DNA, 25 bp, Artificial
  probe
  misc_feature (1)..(25): SEQ ID NO: 2338; WAN024DV6_at; Start 147; Stop 171
tgacattcgtgtccctgtaacagag

SEQ ID NO: 172492 - DNA, 25 bp, Artificial
  probe
  misc_feature (1)..(25): SEQ ID NO: 2338; WAN024DV6_at; Start 47; Stop 71
tggaagatgtttctgacatgatgga

SEQ ID NO: 172493 - DNA, 25 bp, Artificial
  probe
  misc_feature (1)..(25): SEQ ID NO: 3430; WAN024DV7_at; Start 508; Stop 532
gatcaggctagtcaatatgcagcga

SEQ ID NO: 172494 - DNA, 25 bp, Artificial
  probe
  misc_feature (1)..(25): SEQ ID NO: 3430; WAN024DV7_at; Start 887; Stop 911
gctttacctatctcaagtcgccaga

SEQ ID NO: 172495 - DNA, 25 bp, Artificial
  probe
  misc_feature (1)..(25): SEQ ID NO: 3430; WAN024DV7_at; Start 1088; Stop 1112
tagcagatttttctaaggacggcgg

SEQ ID NO: 172496 - DNA, 25 bp, Artificial
  probe
  misc_feature (1)..(25): SEQ ID NO: 3430; WAN024DV7_at; Start 29; Stop 53
aacgcttatggatgatcttcggacc

SEQ ID NO: 172497 - DNA, 25 bp, Artificial
  probe
  misc_feature (1)..(25): SEQ ID NO: 3430; WAN024DV7_at; Start 472; Stop 496
gaccagttgactagttttctgaaac

SEQ ID NO: 172498 - DNA, 25 bp, Artificial
  probe
  misc_feature (1)..(25): SEQ ID NO: 3430; WAN024DV7_at; Start 153; Stop 177
tactatcgatagttttaaggagcga

SEQ ID NO: 172499 - DNA, 25 bp, Artificial
  probe
  misc_feature (1)..(25): SEQ ID NO: 3430; WAN024DV7_at; Start 1009; Stop 1033
gctggtctacgagaggatatgtacc

SEQ ID NO: 172500 - DNA, 25 bp, Artificial
  probe
  misc_feature (1)..(25): SEQ ID NO: 3430; WAN024DV7_at; Start 129; Stop 153
tgaaaagcgttcagcagtggctact

SEQ ID NO: 172501 - DNA, 25 bp, Artificial
  probe
  misc_feature (1)..(25): SEQ ID NO: 3430; WAN024DV7_at; Start 426; Stop 450
taaaaatggctatgatccagcagcc

SEQ ID NO: 172502 - DNA, 25 bp, Artificial
  probe
  misc_feature (1)..(25): SEQ ID NO: 3430; WAN024DV7_at; Start 438; Stop 462
tgatccagcagccttccagcagtat

SEQ ID NO: 172503 - DNA, 25 bp, Artificial
  probe
  misc_feature (1)..(25): SEQ ID NO: 3430; WAN024DV7_at; Start 227; Stop 251
tctttggctctagtgaatggcttcg

SEQ ID NO: 172504 - DNA, 25 bp, Artificial
  probe
  misc_feature (1)..(25): SEQ ID NO: 3430; WAN024DV7_at; Start 764; Stop 788
tagaagatgttgtcaaagcagatgc

SEQ ID NO: 172505 - DNA, 25 bp, Artificial
  probe
  misc_feature (1)..(25): SEQ ID NO: 3430; WAN024DV7_at; Start 412; Stop 436
cctcagtggttcagtaaaaatggct

SEQ ID NO: 172506 - DNA, 25 bp, Artificial
  probe
  misc_feature (1)..(25): SEQ ID NO: 3430; WAN024DV7_at; Start 1235; Stop 1259
gctttttcagcaaagattgggcgac

SEQ ID NO: 172507 - DNA, 25 bp, Artificial
  probe
  misc_feature (1)..(25): SEQ ID NO: 3430; WAN024DV7_at; Start 328; Stop 352
ggagctgcatcgcttaaccaatatt

SEQ ID NO: 172508 - DNA, 25 bp, Artificial
  probe
  misc_feature (1)..(25): SEQ ID NO: 3430; WAN024DV7_at; Start 723; Stop 747
gtatttaaaaatcttgccagaccag

SEQ ID NO: 172509 - DNA, 25 bp, Artificial
  probe
  misc_feature (1)..(25): SEQ ID NO: 3430; WAN024DV7_at; Start 356; Stop 380
gaatgcaacagatgttaccacagct

SEQ ID NO: 172510 - DNA, 25 bp, Artificial
  probe
  misc_feature (1)..(25): SEQ ID NO: 3430; WAN024DV7_at; Start 44; Stop 68
tcttcggaccggtcttgatcgctgg

SEQ ID NO: 172511 - DNA, 25 bp, Artificial
  probe
  misc_feature (1)..(25): SEQ ID NO: 3430; WAN024DV7_at; Start 1215; Stop 1239
gacttaccatctgaatgagcgcttt

SEQ ID NO: 172512 - DNA, 25 bp, Artificial
  probe
  misc_feature (1)..(25): SEQ ID NO: 3430; WAN024DV7_at; Start 547; Stop 571
cagttcccaaacgtagctatgaagg

SEQ ID NO: 172513 - DNA, 25 bp, Artificial
  probe
  misc_feature (1)..(25): SEQ ID NO: 3430; WAN024DV7_at; Start 171; Stop 195
ggagcgaagtcaaaaagtcagagca

SEQ ID NO: 172514 - DNA, 25 bp, Artificial
  probe
  misc_feature (1)..(25): SEQ ID NO: 3430; WAN024DV7_at; Start 371; Stop 395
taccacagctggagaataaacaagt

SEQ ID NO: 172515 - DNA, 25 bp, Artificial
  probe
  misc_feature (1)..(25): SEQ ID NO: 3430; WAN024DV7_at; Start 282; Stop 306
tgagaaatacaatcgttcctaccgt

SEQ ID NO: 172516 - DNA, 25 bp, Artificial
  probe
  misc_feature (1)..(25): SEQ ID NO: 3430; WAN024DV7_at; Start 396; Stop 420
tgtgtatgttatctcacctcagtgg

SEQ ID NO: 172517 - DNA, 25 bp, Artificial
  probe
  misc_feature (1)..(25): SEQ ID NO: 3430; WAN024DV7_at; Start 689; Stop 713
gaggctatgttaactacgataagca

SEQ ID NO: 172518 - DNA, 25 bp, Artificial
  probe
  misc_feature (1)..(25): SEQ ID NO: 3430; WAN024DV7_at; Start 1163; Stop 1187
tggcttttgacaaggcagttgatcc

SEQ ID NO: 172519 - DNA, 25 bp, Artificial
  probe
  misc_feature (1)..(25): SEQ ID NO: 3430; WAN024DV7_at; Start 1044; Stop 1068
gcagaagattcgctaccagttagaa

SEQ ID NO: 172520 - DNA, 25 bp, Artificial
  probe
  misc_feature (1)..(25): SEQ ID NO: 3430; WAN024DV7_at; Start 242; Stop 266
aatggcttcgttttgacggtgctca

SEQ ID NO: 172521 - DNA, 25 bp, Artificial
  probe
  misc_feature (1)..(25): SEQ ID NO: 3430; WAN024DV7_at; Start 1024; Stop 1048
gatatgtaccaacaaacggtgcaga

SEQ ID NO: 172522 - DNA, 25 bp, Artificial
  probe
  misc_feature (1)..(25): SEQ ID NO: 3430; WAN024DV7_at; Start 108; Stop 132
gatgcatcataatctaggagctgaa

SEQ ID NO: 172523 - DNA, 25 bp, Artificial
  probe
  misc_feature (1)..(25): SEQ ID NO: 3430; WAN024DV7_at; Start 918; Stop 942
tgacttgcagttggttttaacacag

SEQ ID NO: 172524 - DNA, 25 bp, Artificial
  probe
  misc_feature (1)..(25): SEQ ID NO: 3430; WAN024DV7_at; Start 1128; Stop 1152
gaaggacaccattcaccttggttgg

SEQ ID NO: 172525 - DNA, 25 bp, Artificial
  probe
  misc_feature (1)..(25): SEQ ID NO: 3430; WAN024DV7_at; Start 453; Stop 477
ccagcagtattttaatggagaccag

SEQ ID NO: 172526 - DNA, 25 bp, Artificial
  probe
  misc_feature (1)..(25): SEQ ID NO: 3430; WAN024DV7_at; Start 527; Stop 551
cagcgactcgcttactgcaacagtt

SEQ ID NO: 172527 - DNA, 25 bp, Artificial
  probe
  misc_feature (1)..(25): SEQ ID NO: 2662; WAN024DV8_at; Start 228; Stop 252
gatcgaaccaaagagatattggtcc

SEQ ID NO: 172528 - DNA, 25 bp, Artificial
  probe
  misc_feature (1)..(25): SEQ ID NO: 2662; WAN024DV8_at; Start 93; Stop 117
tggcaagccatccacaaaggccgta

SEQ ID NO: 172529 - DNA, 25 bp, Artificial
  probe
  misc_feature (1)..(25): SEQ ID NO: 2662; WAN024DV8_at; Start 176; Stop 200
caaccgccgcaatgacaaagaggga

SEQ ID NO: 172530 - DNA, 25 bp, Artificial
  probe
  misc_feature (1)..(25): SEQ ID NO: 2662; WAN024DV8_at; Start 125; Stop 149
caaaagttaagatatacataggacg

SEQ ID NO: 172531 - DNA, 25 bp, Artificial
  probe
  misc_feature (1)..(25): SEQ ID NO: 2662; WAN024DV8_at; Start 2; Stop 26
tggtcgataccagaagagctcctgc

SEQ ID NO: 172532 - DNA, 25 bp, Artificial
  probe
  misc_feature (1)..(25): SEQ ID NO: 2662; WAN024DV8_at; Start 302; Stop 326
cagccagacctgttgacatgaggat

SEQ ID NO: 172533 - DNA, 25 bp, Artificial
  probe
  misc_feature (1)..(25): SEQ ID NO: 2662; WAN024DV8_at; Start 106; Stop 130
acaaaggccgtatcttcgtcaaaag

SEQ ID NO: 172534 - DNA, 25 bp, Artificial
  probe
  misc_feature (1)..(25): SEQ ID NO: 2662; WAN024DV8_at; Start 219; Stop 243
gatagtcacgatcgaaccaaagaga

SEQ ID NO: 172535 - DNA, 25 bp, Artificial
  probe
  misc_feature (1)..(25): SEQ ID NO: 2662; WAN024DV8_at; Start 312; Stop 336
tgttgacatgaggatagctgtcccg

SEQ ID NO: 172536 - DNA, 25 bp, Artificial
  probe
  misc_feature (1)..(25): SEQ ID NO: 2662; WAN024DV8_at; Start 275; Stop 299
tacccttgctcatgacaatcagaga

SEQ ID NO: 172537 - DNA, 25 bp, Artificial
  probe
  misc_feature (1)..(25): SEQ ID NO: 2662; WAN024DV8_at; Start 183; Stop 207
cgcaatgacaaagagggaaatgacc

SEQ ID NO: 172538 - DNA, 25 bp, Artificial
  probe
  misc_feature (1)..(25): SEQ ID NO: 2662; WAN024DV8_at; Start 199; Stop 223
gaaatgacctgttcttcactgatag

SEQ ID NO: 172539 - DNA, 25 bp, Artificial
  probe
  misc_feature (1)..(25): SEQ ID NO: 2662; WAN024DV8_at; Start 9; Stop 33
taccagaagagctcctgctgcagga

SEQ ID NO: 172540 - DNA, 25 bp, Artificial
  probe
  misc_feature (1)..(25): SEQ ID NO: 2662; WAN024DV8_at; Start 287; Stop 311
tgacaatcagagaaacagccagacc

SEQ ID NO: 172541 - DNA, 25 bp, Artificial
  probe
  misc_feature (1)..(25): SEQ ID NO: 2662; WAN024DV8_at; Start 333; Stop 357
cccgatttccataaagctcttgtaa

SEQ ID NO: 172542 - DNA, 25 bp, Artificial
  probe
  misc_feature (1)..(25): SEQ ID NO: 2662; WAN024DV8_at; Start 191; Stop 215
caaagagggaaatgacctgttcttc

SEQ ID NO: 172543 - DNA, 25 bp, Artificial
  probe
  misc_feature (1)..(25): SEQ ID NO: 2662; WAN024DV8_at; Start 162; Stop 186
ggtcaaaatcaaaacaaccgccgca

SEQ ID NO: 172544 - DNA, 25 bp, Artificial
  probe
  misc_feature (1)..(25): SEQ ID NO: 2662; WAN024DV8_at; Start 53; Stop 77
cccctgtcaccatgttaaaaagaat

SEQ ID NO: 172545 - DNA, 25 bp, Artificial
  probe
  misc_feature (1)..(25): SEQ ID NO: 2662; WAN024DV8_at; Start 141; Stop 165
cataggacgaagaaagagaaaggtc

SEQ ID NO: 172546 - DNA, 25 bp, Artificial
  probe
  misc_feature (1)..(25): SEQ ID NO: 2662; WAN024DV8_at; Start 47; Stop 71
tagccacccctgtcaccatgttaaa

SEQ ID NO: 172547 - DNA, 25 bp, Artificial
  probe
  misc_feature (1)..(25): SEQ ID NO: 2662; WAN024DV8_at; Start 248; Stop 272
ggtccaaactcattgaactcgagct

SEQ ID NO: 172548 - DNA, 25 bp, Artificial
  probe
  misc_feature (1)..(25): SEQ ID NO: 2662; WAN024DV8_at; Start 112; Stop 136
gccgtatcttcgtcaaaagttaaga

SEQ ID NO: 172549 - DNA, 25 bp, Artificial
  probe
  misc_feature (1)..(25): SEQ ID NO: 2662; WAN024DV8_at; Start 244; Stop 268
tattggtccaaactcattgaactcg

SEQ ID NO: 172550 - DNA, 25 bp, Artificial
  probe
  misc_feature (1)..(25): SEQ ID NO: 2662; WAN024DV8_at; Start 148; Stop 172
cgaagaaagagaaaggtcaaaatca

SEQ ID NO: 172551 - DNA, 25 bp, Artificial
  probe
  misc_feature (1)..(25): SEQ ID NO: 2662; WAN024DV8_at; Start 258; Stop 282
cattgaactcgagcttttacccttg

SEQ ID NO: 172552 - DNA, 25 bp, Artificial
  probe
  misc_feature (1)..(25): SEQ ID NO: 2662; WAN024DV8_at; Start 35; Stop 59
tcataagggcaatagccacccctgt

SEQ ID NO: 172553 - DNA, 25 bp, Artificial
  probe
  misc_feature (1)..(25): SEQ ID NO: 2662; WAN024DV8_at; Start 209; Stop 233
gttcttcactgatagtcacgatcga

SEQ ID NO: 172554 - DNA, 25 bp, Artificial
  probe
  misc_feature (1)..(25): SEQ ID NO: 2662; WAN024DV8_at; Start 65; Stop 89
tgttaaaaagaatggacatggtacg

SEQ ID NO: 172555 - DNA, 25 bp, Artificial
  probe
  misc_feature (1)..(25): SEQ ID NO: 2662; WAN024DV8_at; Start 81; Stop 105
catggtacgaactggcaagccatcc

SEQ ID NO: 172556 - DNA, 25 bp, Artificial
  probe
  misc_feature (1)..(25): SEQ ID NO: 2662; WAN024DV8_at; Start 324; Stop 348
gatagctgtcccgatttccataaag

SEQ ID NO: 172557 - DNA, 25 bp, Artificial
  probe
  misc_feature (1)..(25): SEQ ID NO: 2662; WAN024DV8_at; Start 268; Stop 292
gagcttttacccttgctcatgacaa

SEQ ID NO: 172558 - DNA, 25 bp, Artificial
  probe
  misc_feature (1)..(25): SEQ ID NO: 2662; WAN024DV8_at; Start 74; Stop 98
gaatggacatggtacgaactggcaa

SEQ ID NO: 172559 - DNA, 25 bp, Artificial
  probe
  misc_feature (1)..(25): SEQ ID NO: 2662; WAN024DV8_at; Start 318; Stop 342
catgaggatagctgtcccgatttcc

SEQ ID NO: 172560 - DNA, 25 bp, Artificial
  probe
  misc_feature (1)..(25): SEQ ID NO: 2662; WAN024DV8_at; Start 22; Stop 46
cctgctgcaggaatcataagggcaa

SEQ ID NO: 172561 - DNA, 25 bp, Artificial
  probe
  misc_feature (1)..(25): SEQ ID NO: 1545; WAN024DV9_at; Start 317; Stop 341
ggttccgtcgtttgaatgctcatga

SEQ ID NO: 172562 - DNA, 25 bp, Artificial
  probe
  misc_feature (1)..(25): SEQ ID NO: 1545; WAN024DV9_at; Start 526; Stop 550
ttttacgaactcatgcaccacagcg

SEQ ID NO: 172563 - DNA, 25 bp, Artificial
  probe
  misc_feature (1)..(25): SEQ ID NO: 1545; WAN024DV9_at; Start 446; Stop 470
cgcgtatgtttgcttctgaccctga

SEQ ID NO: 172564 - DNA, 25 bp, Artificial
  probe
  misc_feature (1)..(25): SEQ ID NO: 1545; WAN024DV9_at; Start 129; Stop 153
gacgctcatcaaggctagtcttgga

SEQ ID NO: 172565 - DNA, 25 bp, Artificial
  probe
  misc_feature (1)..(25): SEQ ID NO: 1545; WAN024DV9_at; Start 156; Stop 180
tctgcaaccacgcattggaaaggtg

SEQ ID NO: 172566 - DNA, 25 bp, Artificial
  probe
  misc_feature (1)..(25): SEQ ID NO: 1545; WAN024DV9_at; Start 235; Stop 259
caacaaattgccagttttaatgctg

SEQ ID NO: 172567 - DNA, 25 bp, Artificial
  probe
  misc_feature (1)..(25): SEQ ID NO: 1545; WAN024DV9_at; Start 544; Stop 568
cacagcgcccatcatcatggcaagg

SEQ ID NO: 172568 - DNA, 25 bp, Artificial
  probe
  misc_feature (1)..(25): SEQ ID NO: 1545; WAN024DV9_at; Start 173; Stop 197
gaaaggtggctatttcaaagacaaa

SEQ ID NO: 172569 - DNA, 25 bp, Artificial
  probe
  misc_feature (1)..(25): SEQ ID NO: 1545; WAN024DV9_at; Start 378; Stop 402
catgtgggaacatcgagacaaacgc

SEQ ID NO: 172570 - DNA, 25 bp, Artificial
  probe
  misc_feature (1)..(25): SEQ ID NO: 1545; WAN024DV9_at; Start 301; Stop 325
tatccgagaaaaggctggttccgtc

SEQ ID NO: 172571 - DNA, 25 bp, Artificial
  probe
  misc_feature (1)..(25): SEQ ID NO: 1545; WAN024DV9_at; Start 466; Stop 490
cctgatgtgtttatcctagacgagc

SEQ ID NO: 172572 - DNA, 25 bp, Artificial
  probe
  misc_feature (1)..(25): SEQ ID NO: 1545; WAN024DV9_at; Start 582; Stop 606
tacccatgaccctgaagaagttaag

SEQ ID NO: 172573 - DNA, 25 bp, Artificial
  probe
  misc_feature (1)..(25): SEQ ID NO: 1545; WAN024DV9_at; Start 363; Stop 387
tctggactcagttggcatgtgggaa

SEQ ID NO: 172574 - DNA, 25 bp, Artificial
  probe
  misc_feature (1)..(25): SEQ ID NO: 1545; WAN024DV9_at; Start 610; Stop 634
tatgcggatcgcaatattcatctag

SEQ ID NO: 172575 - DNA, 25 bp, Artificial
  probe
  misc_feature (1)..(25): SEQ ID NO: 1545; WAN024DV9_at; Start 348; Stop 372
gcatatcaaggctagtctggactca

SEQ ID NO: 172576 - DNA, 25 bp, Artificial
  probe
  misc_feature (1)..(25): SEQ ID NO: 1545; WAN024DV9_at; Start 576; Stop 600
gatgattacccatgaccctgaagaa

SEQ ID NO: 172577 - DNA, 25 bp, Artificial
  probe
  misc_feature (1)..(25): SEQ ID NO: 1545; WAN024DV9_at; Start 650; Stop 674
cgccatggcgttgtttcaatgttca

SEQ ID NO: 172578 - DNA, 25 bp, Artificial
  probe
  misc_feature (1)..(25): SEQ ID NO: 1545; WAN024DV9_at; Start 598; Stop 622
gaagttaaggattatgcggatcgca

SEQ ID NO: 172579 - DNA, 25 bp, Artificial
  probe
  misc_feature (1)..(25): SEQ ID NO: 1545; WAN024DV9_at; Start 216; Stop 240
gagaatagcctatcttcctcaacaa

SEQ ID NO: 172580 - DNA, 25 bp, Artificial
  probe
  misc_feature (1)..(25): SEQ ID NO: 1545; WAN024DV9_at; Start 144; Stop 168
tagtcttggaattctgcaaccacgc

SEQ ID NO: 172581 - DNA, 25 bp, Artificial
  probe
  misc_feature (1)..(25): SEQ ID NO: 1545; WAN024DV9_at; Start 501; Stop 525
gatggatgcaggaagtaaaaatgaa

SEQ ID NO: 172582 - DNA, 25 bp, Artificial
  probe
  misc_feature (1)..(25): SEQ ID NO: 1545; WAN024DV9_at; Start 252; Stop 276
taatgctggttttccaagtacggtc

SEQ ID NO: 172583 - DNA, 25 bp, Artificial
  probe
  misc_feature (1)..(25): SEQ ID NO: 1545; WAN024DV9_at; Start 280; Stop 304
gaatttgtcaagtcgggtcgctatc

SEQ ID NO: 172584 - DNA, 25 bp, Artificial
  probe
  misc_feature (1)..(25): SEQ ID NO: 1545; WAN024DV9_at; Start 637; Stop 661
cgtaaccaagactcgccatggcgtt

SEQ ID NO: 172585 - DNA, 25 bp, Artificial
  probe
  misc_feature (1)..(25): SEQ ID NO: 1545; WAN024DV9_at; Start 7; Stop 31
tatattacggtagaggatttgtcct

SEQ ID NO: 172586 - DNA, 25 bp, Artificial
  probe
  misc_feature (1)..(25): SEQ ID NO: 1545; WAN024DV9_at; Start 186; Stop 210
ttcaaagacaaatacgcaaggtaag

SEQ ID NO: 172587 - DNA, 25 bp, Artificial
  probe
  misc_feature (1)..(25): SEQ ID NO: 1545; WAN024DV9_at; Start 201; Stop 225
gcaaggtaagaaattgagaatagcc

SEQ ID NO: 172588 - DNA, 25 bp, Artificial
  probe
  misc_feature (1)..(25): SEQ ID NO: 1545; WAN024DV9_at; Start 383; Stop 407
gggaacatcgagacaaacgcttggg

SEQ ID NO: 172589 - DNA, 25 bp, Artificial
  probe
  misc_feature (1)..(25): SEQ ID NO: 1545; WAN024DV9_at; Start 292; Stop 316
tcgggtcgctatccgagaaaaggct

SEQ ID NO: 172590 - DNA, 25 bp, Artificial
  probe
  misc_feature (1)..(25): SEQ ID NO: 1545; WAN024DV9_at; Start 336; Stop 360
tcatgatgaggagcatatcaaggct

SEQ ID NO: 172591 - DNA, 25 bp, Artificial
  probe
  misc_feature (1)..(25): SEQ ID NO: 1545; WAN024DV9_at; Start 622; Stop 646
aatattcatctagtccgtaaccaag

SEQ ID NO: 172592 - DNA, 25 bp, Artificial
  probe
  misc_feature (1)..(25): SEQ ID NO: 1545; WAN024DV9_at; Start 563; Stop 587
gcaaggctgttttgatgattaccca

SEQ ID NO: 172593 - DNA, 25 bp, Artificial
  probe
  misc_feature (1)..(25): SEQ ID NO: 1545; WAN024DV9_at; Start 29; Stop 53
ccttctattatgataaggagcctgt

SEQ ID NO: 172594 - DNA, 25 bp, Artificial
  probe
  misc_feature (1)..(25): SEQ ID NO: 1545; WAN024DV9_at; Start 265; Stop 289
ccaagtacggtctatgaatttgtca

SEQ ID NO: 172595 - DNA, 25 bp, Artificial
  probe
  misc_feature (1)..(25): SEQ ID NO: 3035; WAN024DVA_at; Start 532; Stop 556
ggcttgccagttcgtaccatgtcca

SEQ ID NO: 172596 - DNA, 25 bp, Artificial
  probe
  misc_feature (1)..(25): SEQ ID NO: 3035; WAN024DVA_at; Start 588; Stop 612
tgcccttatgattcctgcagcagga

SEQ ID NO: 172597 - DNA, 25 bp, Artificial
  probe
  misc_feature (1)..(25): SEQ ID NO: 3035; WAN024DVA_at; Start 687; Stop 711
tatgctgcttgccagtgcgattggc

SEQ ID NO: 172598 - DNA, 25 bp, Artificial
  probe
  misc_feature (1)..(25): SEQ ID NO: 3035; WAN024DVA_at; Start 711; Stop 735
ctttttgggaatggtagcaggactt

SEQ ID NO: 172599 - DNA, 25 bp, Artificial
  probe
  misc_feature (1)..(25): SEQ ID NO: 3035; WAN024DVA_at; Start 172; Stop 196
ctttcaggtgtagcctttggtctgg

SEQ ID NO: 172600 - DNA, 25 bp, Artificial
  probe
  misc_feature (1)..(25): SEQ ID NO: 3035; WAN024DVA_at; Start 90; Stop 114
gagtcttttctcaccggtattggga

SEQ ID NO: 172601 - DNA, 25 bp, Artificial
  probe
  misc_feature (1)..(25): SEQ ID NO: 3035; WAN024DVA_at; Start 429; Stop 453
catttccctctttgtcattgcggcg

SEQ ID NO: 172602 - DNA, 25 bp, Artificial
  probe
  misc_feature (1)..(25): SEQ ID NO: 3035; WAN024DVA_at; Start 67; Stop 91
gcctttttggcggttattgctatga

SEQ ID NO: 172603 - DNA, 25 bp, Artificial
  probe
  misc_feature (1)..(25): SEQ ID NO: 3035; WAN024DVA_at; Start 677; Stop 701
ttaaatcggttatgctgcttgccag

SEQ ID NO: 172604 - DNA, 25 bp, Artificial
  probe
  misc_feature (1)..(25): SEQ ID NO: 3035; WAN024DVA_at; Start 627; Stop 651
gaccattatggtcttgccagctagt

SEQ ID NO: 172605 - DNA, 25 bp, Artificial
  probe
  misc_feature (1)..(25): SEQ ID NO: 3035; WAN024DVA_at; Start 225; Stop 249
tattgccattgtcttgattgcggcg

SEQ ID NO: 172606 - DNA, 25 bp, Artificial
  probe
  misc_feature (1)..(25): SEQ ID NO: 3035; WAN024DVA_at; Start 555; Stop 579
cattctttttaacatggtgacaggg

SEQ ID NO: 172607 - DNA, 25 bp, Artificial
  probe
  misc_feature (1)..(25): SEQ ID NO: 3035; WAN024DVA_at; Start 400; Stop 424
tcgatcgtgactatcagtgaagaac

SEQ ID NO: 172608 - DNA, 25 bp, Artificial
  probe
  misc_feature (1)..(25): SEQ ID NO: 3035; WAN024DVA_at; Start 760; Stop 784
cctgcaagtgcaagtattaccatta

SEQ ID NO: 172609 - DNA, 25 bp, Artificial
  probe
  misc_feature (1)..(25): SEQ ID NO: 3035; WAN024DVA_at; Start 447; Stop 471
tgcggcggttgttttgattttgacc

SEQ ID NO: 172610 - DNA, 25 bp, Artificial
  probe
  misc_feature (1)..(25): SEQ ID NO: 3035; WAN024DVA_at; Start 745; Stop 769
tactatgcagaaacacctgcaagtg

SEQ ID NO: 172611 - DNA, 25 bp, Artificial
  probe
  misc_feature (1)..(25): SEQ ID NO: 3035; WAN024DVA_at; Start 502; Stop 526
acttttgacgaagatacggcctttg

SEQ ID NO: 172612 - DNA, 25 bp, Artificial
  probe
  misc_feature (1)..(25): SEQ ID NO: 3035; WAN024DVA_at; Start 607; Stop 631
gcaggagctcttctggtatcgacca

SEQ ID NO: 172613 - DNA, 25 bp, Artificial
  probe
  misc_feature (1)..(25): SEQ ID NO: 3035; WAN024DVA_at; Start 385; Stop 409
caatatctctttggttcgatcgtga

SEQ ID NO: 172614 - DNA, 25 bp, Artificial
  probe
  misc_feature (1)..(25): SEQ ID NO: 3035; WAN024DVA_at; Start 304; Stop 328
gctatcctcatgtcaacaggtctgg

SEQ ID NO: 172615 - DNA, 25 bp, Artificial
  probe
  misc_feature (1)..(25): SEQ ID NO: 3035; WAN024DVA_at; Start 362; Stop 386
gctcgagttcaatgagtttggacca

SEQ ID NO: 172616 - DNA, 25 bp, Artificial
  probe
  misc_feature (1)..(25): SEQ ID NO: 3035; WAN024DVA_at; Start 322; Stop 346
ggtctggctgtttctctgattgtca

SEQ ID NO: 172617 - DNA, 25 bp, Artificial
  probe
  misc_feature (1)..(25): SEQ ID NO: 3035; WAN024DVA_at; Start 243; Stop 267
tgcggcggtctttctggagtatctc

SEQ ID NO: 172618 - DNA, 25 bp, Artificial
  probe
  misc_feature (1)..(25): SEQ ID NO: 3035; WAN024DVA_at; Start 642; Stop 666
gccagctagtattgccctgcgtctg

SEQ ID NO: 172619 - DNA, 25 bp, Artificial
  probe
  misc_feature (1)..(25): SEQ ID NO: 3035; WAN024DVA_at; Start 516; Stop 540
tacggcctttgtggatggcttgcca

SEQ ID NO: 172620 - DNA, 25 bp, Artificial
  probe
  misc_feature (1)..(25): SEQ ID NO: 3035; WAN024DVA_at; Start 157; Stop 181
cttagccacgtctcactttcaggtg

SEQ ID NO: 172621 - DNA, 25 bp, Artificial
  probe
  misc_feature (1)..(25): SEQ ID NO: 3035; WAN024DVA_at; Start 259; Stop 283
gagtatctccgtacggtttacaaga

SEQ ID NO: 172622 - DNA, 25 bp, Artificial
  probe
  misc_feature (1)..(25): SEQ ID NO: 3035; WAN024DVA_at; Start 202; Stop 226
gggatttctccaactgtttctacta

SEQ ID NO: 172623 - DNA, 25 bp, Artificial
  probe
  misc_feature (1)..(25): SEQ ID NO: 3035; WAN024DVA_at; Start 140; Stop 164
gtttgatgagtgatacccttagcca

SEQ ID NO: 172624 - DNA, 25 bp, Artificial
  probe
  misc_feature (1)..(25): SEQ ID NO: 3035; WAN024DVA_at; Start 730; Stop 754
ggactttacatttcctactatgcag

SEQ ID NO: 172625 - DNA, 25 bp, Artificial
  probe
  misc_feature (1)..(25): SEQ ID NO: 3035; WAN024DVA_at; Start 125; Stop 149
tcttgcgtcgtcagagtttgatgag

SEQ ID NO: 172626 - DNA, 25 bp, Artificial
  probe
  misc_feature (1)..(25): SEQ ID NO: 3035; WAN024DVA_at; Start 414; Stop 438
cagtgaagaacaggtcatttccctc

SEQ ID NO: 172627 - DNA, 25 bp, Artificial
  probe
  misc_feature (1)..(25): SEQ ID NO: 3035; WAN024DVA_at; Start 23; Stop 47
ggtgggccatgcttagtttattatc

SEQ ID NO: 172628 - DNA, 25 bp, Artificial
  probe
  misc_feature (1)..(25): SEQ ID NO: 3035; WAN024DVA_at; Start 110; Stop 134
tgggaaccttcctcatcttgcgtcg

SEQ ID NO: 172629 - DNA, 25 bp, Artificial
  probe
  misc_feature (1)..(25): SEQ ID NO: 5549; WAN024DVB_at; Start 222; Stop 246
tatcagtaatgttaatcttagtcac

SEQ ID NO: 172630 - DNA, 25 bp, Artificial
  probe
  misc_feature (1)..(25): SEQ ID NO: 5549; WAN024DVB_at; Start 340; Stop 364
cgtgccgtcttcaaggaaaggataa

SEQ ID NO: 172631 - DNA, 25 bp, Artificial
  probe
  misc_feature (1)..(25): SEQ ID NO: 5549; WAN024DVB_at; Start 290; Stop 314
tgggtcatcttaccagtcaacttag

SEQ ID NO: 172632 - DNA, 25 bp, Artificial
  probe
  misc_feature (1)..(25): SEQ ID NO: 5549; WAN024DVB_at; Start 131; Stop 155
cgattgcctttcttgtaagtcaaaa

SEQ ID NO: 172633 - DNA, 25 bp, Artificial
  probe
  misc_feature (1)..(25): SEQ ID NO: 5549; WAN024DVB_at; Start 163; Stop 187
accgacatacttgtaagtgtatttc

SEQ ID NO: 172634 - DNA, 25 bp, Artificial
  probe
  misc_feature (1)..(25): SEQ ID NO: 5549; WAN024DVB_at; Start 281; Stop 305
tactcagcctgggtcatcttaccag

SEQ ID NO: 172635 - DNA, 25 bp, Artificial
  probe
  misc_feature (1)..(25): SEQ ID NO: 5549; WAN024DVB_at; Start 323; Stop 347
tcaaagacttggtcaaacgtgccgt

SEQ ID NO: 172636 - DNA, 25 bp, Artificial
  probe
  misc_feature (1)..(25): SEQ ID NO: 5549; WAN024DVB_at; Start 345; Stop 369
cgtcttcaaggaaaggataaactga

SEQ ID NO: 172637 - DNA, 25 bp, Artificial
  probe
  misc_feature (1)..(25): SEQ ID NO: 5549; WAN024DVB_at; Start 228; Stop 252
taatgttaatcttagtcacatctgt

SEQ ID NO: 172638 - DNA, 25 bp, Artificial
  probe
  misc_feature (1)..(25): SEQ ID NO: 5549; WAN024DVB_at; Start 328; Stop 352
gacttggtcaaacgtgccgtcttca

SEQ ID NO: 172639 - DNA, 25 bp, Artificial
  probe
  misc_feature (1)..(25): SEQ ID NO: 5549; WAN024DVB_at; Start 82; Stop 106
gaattgtccagcgtcagcatctgtg

SEQ ID NO: 172640 - DNA, 25 bp, Artificial
  probe
  misc_feature (1)..(25): SEQ ID NO: 5549; WAN024DVB_at; Start 181; Stop 205
gtatttcttgctttgtccaccttga

SEQ ID NO: 172641 - DNA, 25 bp, Artificial
  probe
  misc_feature (1)..(25): SEQ ID NO: 5549; WAN024DVB_at; Start 57; Stop 81
tgtggtcactaaactgaacatactt

SEQ ID NO: 172642 - DNA, 25 bp, Artificial
  probe
  misc_feature (1)..(25): SEQ ID NO: 5549; WAN024DVB_at; Start 90; Stop 114
cagcgtcagcatctgtggcttcaaa

SEQ ID NO: 172643 - DNA, 25 bp, Artificial
  probe
  misc_feature (1)..(25): SEQ ID NO: 5549; WAN024DVB_at; Start 9; Stop 33
tacctccaaaaaagatatggaaatg

SEQ ID NO: 172644 - DNA, 25 bp, Artificial
  probe
  misc_feature (1)..(25): SEQ ID NO: 5549; WAN024DVB_at; Start 3; Stop 27
ggcttgtacctccaaaaaagatatg

SEQ ID NO: 172645 - DNA, 25 bp, Artificial
  probe
  misc_feature (1)..(25): SEQ ID NO: 5549; WAN024DVB_at; Start 24; Stop 48
tatggaaatgttctgccttaactgg

SEQ ID NO: 172646 - DNA, 25 bp, Artificial
  probe
  misc_feature (1)..(25): SEQ ID NO: 5549; WAN024DVB_at; Start 113; Stop 137
aagaggaaacgcacgccacgattgc

SEQ ID NO: 172647 - DNA, 25 bp, Artificial
  probe
  misc_feature (1)..(25): SEQ ID NO: 5549; WAN024DVB_at; Start 302; Stop 326
ccagtcaacttagccttgtagtcaa

SEQ ID NO: 172648 - DNA, 25 bp, Artificial
  probe
  misc_feature (1)..(25): SEQ ID NO: 5549; WAN024DVB_at; Start 77; Stop 101
tacttgaattgtccagcgtcagcat

SEQ ID NO: 172649 - DNA, 25 bp, Artificial
  probe
  misc_feature (1)..(25): SEQ ID NO: 5549; WAN024DVB_at; Start 204; Stop 228
gaacaaattccatagtattatcagt

SEQ ID NO: 172650 - DNA, 25 bp, Artificial
  probe
  misc_feature (1)..(25): SEQ ID NO: 5549; WAN024DVB_at; Start 254; Stop 278
tgatagccttttgtatagtaagcct

SEQ ID NO: 172651 - DNA, 25 bp, Artificial
  probe
  misc_feature (1)..(25): SEQ ID NO: 5549; WAN024DVB_at; Start 151; Stop 175
caaaattttcttaccgacatacttg

SEQ ID NO: 172652 - DNA, 25 bp, Artificial
  probe
  misc_feature (1)..(25): SEQ ID NO: 5549; WAN024DVB_at; Start 105; Stop 129
tggcttcaaagaggaaacgcacgcc

SEQ ID NO: 172653 - DNA, 25 bp, Artificial
  probe
  misc_feature (1)..(25): SEQ ID NO: 5549; WAN024DVB_at; Start 194; Stop 218
tgtccaccttgaacaaattccatag

SEQ ID NO: 172654 - DNA, 25 bp, Artificial
  probe
  misc_feature (1)..(25): SEQ ID NO: 5549; WAN024DVB_at; Start 124; Stop 148
cacgccacgattgcctttcttgtaa

SEQ ID NO: 172655 - DNA, 25 bp, Artificial
  probe
  misc_feature (1)..(25): SEQ ID NO: 5549; WAN024DVB_at; Start 72; Stop 96
gaacatacttgaattgtccagcgtc

SEQ ID NO: 172656 - DNA, 25 bp, Artificial
  probe
  misc_feature (1)..(25): SEQ ID NO: 5549; WAN024DVB_at; Start 272; Stop 296
taagccttgtactcagcctgggtca

SEQ ID NO: 172657 - DNA, 25 bp, Artificial
  probe
  misc_feature (1)..(25): SEQ ID NO: 5549; WAN024DVB_at; Start 312; Stop 336
tagccttgtagtcaaagacttggtc

SEQ ID NO: 172658 - DNA, 25 bp, Artificial
  probe
  misc_feature (1)..(25): SEQ ID NO: 5549; WAN024DVB_at; Start 177; Stop 201
aagtgtatttcttgctttgtccacc

SEQ ID NO: 172659 - DNA, 25 bp, Artificial
  probe
  misc_feature (1)..(25): SEQ ID NO: 5549; WAN024DVB_at; Start 96; Stop 120
cagcatctgtggcttcaaagaggaa

SEQ ID NO: 172660 - DNA, 25 bp, Artificial
  probe
  misc_feature (1)..(25): SEQ ID NO: 5549; WAN024DVB_at; Start 269; Stop 293
tagtaagccttgtactcagcctggg

SEQ ID NO: 172661 - DNA, 25 bp, Artificial
  probe
  misc_feature (1)..(25): SEQ ID NO: 5549; WAN024DVB_at; Start 101; Stop 125
tctgtggcttcaaagaggaaacgca

SEQ ID NO: 172662 - DNA, 25 bp, Artificial
  probe
  misc_feature (1)..(25): SEQ ID NO: 5549; WAN024DVB_at; Start 336; Stop 360
caaacgtgccgtcttcaaggaaagg

SEQ ID NO: 172663 - DNA, 25 bp, Artificial
  probe
  misc_feature (1)..(25): SEQ ID NO: 3835; WAN024DVC_at; Start 1100; Stop 1124
ctaagttgactggtaagatgaccca

SEQ ID NO: 172664 - DNA, 25 bp, Artificial
  probe
  misc_feature (1)..(25): SEQ ID NO: 3835; WAN024DVC_at; Start 361; Stop 385
gaagaagagggagaccatgaccatg

SEQ ID NO: 172665 - DNA, 25 bp, Artificial
  probe
  misc_feature (1)..(25): SEQ ID NO: 3835; WAN024DVC_at; Start 838; Stop 862
agtctgacagaagaggacaccaagg

SEQ ID NO: 172666 - DNA, 25 bp, Artificial
  probe
  misc_feature (1)..(25): SEQ ID NO: 3835; WAN024DVC_at; Start 379; Stop 403
gaccatggagaagaaggtcatcacc

SEQ ID NO: 172667 - DNA, 25 bp, Artificial
  probe
  misc_feature (1)..(25): SEQ ID NO: 3835; WAN024DVC_at; Start 1085; Stop 1109
tctttgactacaaggctaagttgac

SEQ ID NO: 172668 - DNA, 25 bp, Artificial
  probe
  misc_feature (1)..(25): SEQ ID NO: 3835; WAN024DVC_at; Start 190; Stop 214
gaatacgaaccatctgccaaggcag

SEQ ID NO: 172669 - DNA, 25 bp, Artificial
  probe
  misc_feature (1)..(25): SEQ ID NO: 3835; WAN024DVC_at; Start 506; Stop 530
cctttgagaagaatgcagctgccta

SEQ ID NO: 172670 - DNA, 25 bp, Artificial
  probe
  misc_feature (1)..(25): SEQ ID NO: 3835; WAN024DVC_at; Start 1364; Stop 1388
ccccagttaaggcagaacatttcca

SEQ ID NO: 172671 - DNA, 25 bp, Artificial
  probe
  misc_feature (1)..(25): SEQ ID NO: 3835; WAN024DVC_at; Start 1024; Stop 1048
gactatgcaggtaactggcaatcag

SEQ ID NO: 172672 - DNA, 25 bp, Artificial
  probe
  misc_feature (1)..(25): SEQ ID NO: 3835; WAN024DVC_at; Start 991; Stop 1015
gaggatgcagctgtcaaggaccgca

SEQ ID NO: 172673 - DNA, 25 bp, Artificial
  probe
  misc_feature (1)..(25): SEQ ID NO: 3835; WAN024DVC_at; Start 155; Stop 179
tagaactcctaatcggtgctgggac

SEQ ID NO: 172674 - DNA, 25 bp, Artificial
  probe
  misc_feature (1)..(25): SEQ ID NO: 3835; WAN024DVC_at; Start 88; Stop 112
aatatcgtgacaaccttttaccctg

SEQ ID NO: 172675 - DNA, 25 bp, Artificial
  probe
  misc_feature (1)..(25): SEQ ID NO: 3835; WAN024DVC_at; Start 334; Stop 358
gatatgttgctcttgccaggtggcg

SEQ ID NO: 172676 - DNA, 25 bp, Artificial
  probe
  misc_feature (1)..(25): SEQ ID NO: 3835; WAN024DVC_at; Start 1062; Stop 1086
tgaagacggcacgtttgaccaagtc

SEQ ID NO: 172677 - DNA, 25 bp, Artificial
  probe
  misc_feature (1)..(25): SEQ ID NO: 3835; WAN024DVC_at; Start 868; Stop 892
gaaaactacatttccgtgatggaga

SEQ ID NO: 172678 - DNA, 25 bp, Artificial
  probe
  misc_feature (1)..(25): SEQ ID NO: 3835; WAN024DVC_at; Start 951; Stop 975
aaaggcagaggataccaagacagtc

SEQ ID NO: 172679 - DNA, 25 bp, Artificial
  probe
  misc_feature (1)..(25): SEQ ID NO: 3835; WAN024DVC_at; Start 1118; Stop 1142
tgacccaggctgagtacaaggctta

SEQ ID NO: 172680 - DNA, 25 bp, Artificial
  probe
  misc_feature (1)..(25): SEQ ID NO: 3835; WAN024DVC_at; Start 1301; Stop 1325
ttgaagccacagatgctgacgctgg

SEQ ID NO: 172681 - DNA, 25 bp, Artificial
  probe
  misc_feature (1)..(25): SEQ ID NO: 3835; WAN024DVC_at; Start 673; Stop 697
tctccagatgcagagccatcagctg

SEQ ID NO: 172682 - DNA, 25 bp, Artificial
  probe
  misc_feature (1)..(25): SEQ ID NO: 3835; WAN024DVC_at; Start 1008; Stop 1032
ggaccgcaccttgagtgactatgca

SEQ ID NO: 172683 - DNA, 25 bp, Artificial
  probe
  misc_feature (1)..(25): SEQ ID NO: 3835; WAN024DVC_at; Start 420; Stop 444
tgtttggttatcaccagttcgtgcc

SEQ ID NO: 172684 - DNA, 25 bp, Artificial
  probe
  misc_feature (1)..(25): SEQ ID NO: 3835; WAN024DVC_at; Start 211; Stop 235
gcagttgccaaaatccaagatgcag

SEQ ID NO: 172685 - DNA, 25 bp, Artificial
  probe
  misc_feature (1)..(25): SEQ ID NO: 3835; WAN024DVC_at; Start 140; Stop 164
gagatacggctaatgtagaactcct

SEQ ID NO: 172686 - DNA, 25 bp, Artificial
  probe
  misc_feature (1)..(25): SEQ ID NO: 3835; WAN024DVC_at; Start 802; Stop 826
gcaggtgtcaaaactgatgtcctca

SEQ ID NO: 172687 - DNA, 25 bp, Artificial
  probe
  misc_feature (1)..(25): SEQ ID NO: 3835; WAN024DVC_at; Start 884; Stop 908
tgatggagaaaaacctcaaggcttt

SEQ ID NO: 172688 - DNA, 25 bp, Artificial
  probe
  misc_feature (1)..(25): SEQ ID NO: 3835; WAN024DVC_at; Start 696; Stop 720
tgctcgcttggcagaattgacagag

SEQ ID NO: 172689 - DNA, 25 bp, Artificial
  probe
  misc_feature (1)..(25): SEQ ID NO: 3835; WAN024DVC_at; Start 265; Stop 289
gaaacatgggtacctaaattgctag

SEQ ID NO: 172690 - DNA, 25 bp, Artificial
  probe
  misc_feature (1)..(25): SEQ ID NO: 3835; WAN024DVC_at; Start 1285; Stop 1309
ggcgtgcgtttcctctttgaagcca

SEQ ID NO: 172691 - DNA, 25 bp, Artificial
  probe
  misc_feature (1)..(25): SEQ ID NO: 3835; WAN024DVC_at; Start 757; Stop 781
gaagaaaatgcctcacaagcccttg

SEQ ID NO: 172692 - DNA, 25 bp, Artificial
  probe
  misc_feature (1)..(25): SEQ ID NO: 3835; WAN024DVC_at; Start 592; Stop 616
aagagctttgtgactcaacacgcag

SEQ ID NO: 172693 - DNA, 25 bp, Artificial
  probe
  misc_feature (1)..(25): SEQ ID NO: 3835; WAN024DVC_at; Start 975; Stop 999
ccaaaatggttacttcgaggatgca

SEQ ID NO: 172694 - DNA, 25 bp, Artificial
  probe
  misc_feature (1)..(25): SEQ ID NO: 3835; WAN024DVC_at; Start 622; Stop 646
aactatcttgccttggactatggac

SEQ ID NO: 172695 - DNA, 25 bp, Artificial
  probe
  misc_feature (1)..(25): SEQ ID NO: 3835; WAN024DVC_at; Start 172; Stop 196
gctgggacagaacctcatgaatacg

SEQ ID NO: 172696 - DNA, 25 bp, Artificial
  probe
  misc_feature (1)..(25): SEQ ID NO: 3835; WAN024DVC_at; Start 312; Stop 336
gaaaaccatcaaggcgacaggcgat

SEQ ID NO: 172697 - DNA, 25 bp, Artificial
  probe
  misc_feature (1)..(25): SEQ ID NO: 7082; WAN024DVD_at; Start 7; Stop 31
gattcggtagtaagaatcggtgaag

SEQ ID NO: 172698 - DNA, 25 bp, Artificial
  probe
  misc_feature (1)..(25): SEQ ID NO: 7082; WAN024DVD_at; Start 42; Stop 66
tccaaccaaagaccaagtacctgat

SEQ ID NO: 172699 - DNA, 25 bp, Artificial
  probe
  misc_feature (1)..(25): SEQ ID NO: 7082; WAN024DVD_at; Start 32; Stop 56
taagttccactccaaccaaagacca

SEQ ID NO: 172700 - DNA, 25 bp, Artificial
  probe
  misc_feature (1)..(25): SEQ ID NO: 7082; WAN024DVD_at; Start 10; Stop 34
tcggtagtaagaatcggtgaagtaa

SEQ ID NO: 172701 - DNA, 25 bp, Artificial
  probe
  misc_feature (1)..(25): SEQ ID NO: 7082; WAN024DVD_at; Start 55; Stop 79
caagtacctgatgaaataaataaac

SEQ ID NO: 172702 - DNA, 25 bp, Artificial
  probe
  misc_feature (1)..(25): SEQ ID NO: 7082; WAN024DVD_at; Start 96; Stop 120
tactgagacaatcgcacttgctgta

SEQ ID NO: 172703 - DNA, 25 bp, Artificial
  probe
  misc_feature (1)..(25): SEQ ID NO: 7082; WAN024DVD_at; Start 34; Stop 58
agttccactccaaccaaagaccaag

SEQ ID NO: 172704 - DNA, 25 bp, Artificial
  probe
  misc_feature (1)..(25): SEQ ID NO: 7082; WAN024DVD_at; Start 91; Stop 115
ttaggtactgagacaatcgcacttg

SEQ ID NO: 172705 - DNA, 25 bp, Artificial
  probe
  misc_feature (1)..(25): SEQ ID NO: 7082; WAN024DVD_at; Start 49; Stop 73
aaagaccaagtacctgatgaaataa

SEQ ID NO: 172706 - DNA, 25 bp, Artificial
  probe
  misc_feature (1)..(25): SEQ ID NO: 7082; WAN024DVD_at; Start 61; Stop 85
cctgatgaaataaataaactacctt

SEQ ID NO: 172707 - DNA, 25 bp, Artificial
  probe
  misc_feature (1)..(25): SEQ ID NO: 7082; WAN024DVD_at; Start 36; Stop 60
ttccactccaaccaaagaccaagta

SEQ ID NO: 172708 - DNA, 25 bp, Artificial
  probe
  misc_feature (1)..(25): SEQ ID NO: 7082; WAN024DVD_at; Start 87; Stop 111
tgtcttaggtactgagacaatcgca

SEQ ID NO: 172709 - DNA, 25 bp, Artificial
  probe
  misc_feature (1)..(25): SEQ ID NO: 7082; WAN024DVD_at; Start 44; Stop 68
caaccaaagaccaagtacctgatga

SEQ ID NO: 172710 - DNA, 25 bp, Artificial
  probe
  misc_feature (1)..(25): SEQ ID NO: 7082; WAN024DVD_at; Start 64; Stop 88
gatgaaataaataaactaccttctg

SEQ ID NO: 172711 - DNA, 25 bp, Artificial
  probe
  misc_feature (1)..(25): SEQ ID NO: 7082; WAN024DVD_at; Start 20; Stop 44
gaatcggtgaagtaagttccactcc

SEQ ID NO: 172712 - DNA, 25 bp, Artificial
  probe
  misc_feature (1)..(25): SEQ ID NO: 7082; WAN024DVD_at; Start 52; Stop 76
gaccaagtacctgatgaaataaata

SEQ ID NO: 172713 - DNA, 25 bp, Artificial
  probe
  misc_feature (1)..(25): SEQ ID NO: 7082; WAN024DVD_at; Start 85; Stop 109
tctgtcttaggtactgagacaatcg

SEQ ID NO: 172714 - DNA, 25 bp, Artificial
  probe
  misc_feature (1)..(25): SEQ ID NO: 7082; WAN024DVD_at; Start 14; Stop 38
tagtaagaatcggtgaagtaagttc

SEQ ID NO: 172715 - DNA, 25 bp, Artificial
  probe
  misc_feature (1)..(25): SEQ ID NO: 7082; WAN024DVD_at; Start 27; Stop 51
tgaagtaagttccactccaaccaaa

SEQ ID NO: 172716 - DNA, 25 bp, Artificial
  probe
  misc_feature (1)..(25): SEQ ID NO: 7082; WAN024DVD_at; Start 76; Stop 100
aaactaccttctgtcttaggtactg

SEQ ID NO: 172717 - DNA, 25 bp, Artificial
  probe
  misc_feature (1)..(25): SEQ ID NO: 7082; WAN024DVD_at; Start 94; Stop 118
ggtactgagacaatcgcacttgctg

SEQ ID NO: 172718 - DNA, 25 bp, Artificial
  probe
  misc_feature (1)..(25): SEQ ID NO: 7082; WAN024DVD_at; Start 1; Stop 25
ctgaaggattcggtagtaagaatcg

SEQ ID NO: 172719 - DNA, 25 bp, Artificial
  probe
  misc_feature (1)..(25): SEQ ID NO: 7082; WAN024DVD_at; Start 78; Stop 102
actaccttctgtcttaggtactgag

SEQ ID NO: 172720 - DNA, 25 bp, Artificial
  probe
  misc_feature (1)..(25): SEQ ID NO: 7082; WAN024DVD_at; Start 89; Stop 113
tcttaggtactgagacaatcgcact

SEQ ID NO: 172721 - DNA, 25 bp, Artificial
  probe
  misc_feature (1)..(25): SEQ ID NO: 7082; WAN024DVD_at; Start 17; Stop 41
taagaatcggtgaagtaagttccac

SEQ ID NO: 172722 - DNA, 25 bp, Artificial
  probe
  misc_feature (1)..(25): SEQ ID NO: 7082; WAN024DVD_at; Start 80; Stop 104
taccttctgtcttaggtactgagac

SEQ ID NO: 172723 - DNA, 25 bp, Artificial
  probe
  misc_feature (1)..(25): SEQ ID NO: 7082; WAN024DVD_at; Start 99; Stop 123
tgagacaatcgcacttgctgtatca

SEQ ID NO: 172724 - DNA, 25 bp, Artificial
  probe
  misc_feature (1)..(25): SEQ ID NO: 7082; WAN024DVD_at; Start 82; Stop 106
ccttctgtcttaggtactgagacaa

SEQ ID NO: 172725 - DNA, 25 bp, Artificial
  probe
  misc_feature (1)..(25): SEQ ID NO: 7082; WAN024DVD_at; Start 23; Stop 47
tcggtgaagtaagttccactccaac

SEQ ID NO: 172726 - DNA, 25 bp, Artificial
  probe
  misc_feature (1)..(25): SEQ ID NO: 7082; WAN024DVD_at; Start 92; Stop 116
taggtactgagacaatcgcacttgc

SEQ ID NO: 172727 - DNA, 25 bp, Artificial
  probe
  misc_feature (1)..(25): SEQ ID NO: 7082; WAN024DVD_at; Start 25; Stop 49
ggtgaagtaagttccactccaacca

SEQ ID NO: 172728 - DNA, 25 bp, Artificial
  probe
  misc_feature (1)..(25): SEQ ID NO: 7082; WAN024DVD_at; Start 66; Stop 90
tgaaataaataaactaccttctgtc

SEQ ID NO: 172729 - DNA, 25 bp, Artificial
  probe
  misc_feature (1)..(25): SEQ ID NO: 7082; WAN024DVD_at; Start 47; Stop 71
ccaaagaccaagtacctgatgaaat

SEQ ID NO: 172730 - DNA, 25 bp, Artificial
  probe
  misc_feature (1)..(25): SEQ ID NO: 7082; WAN024DVD_at; Start 21; Stop 45
aatcggtgaagtaagttccactcca

SEQ ID NO: 172731 - DNA, 25 bp, Artificial
  probe
  misc_feature (1)..(25): SEQ ID NO: 4184; WAN024DVE_at; Start 1342; Stop 1366
attgttgtgcagctattgagtcaag

SEQ ID NO: 172732 - DNA, 25 bp, Artificial
  probe
  misc_feature (1)..(25): SEQ ID NO: 4184; WAN024DVE_at; Start 1363; Stop 1387
caaggtaaaataaacgaggatacag

SEQ ID NO: 172733 - DNA, 25 bp, Artificial
  probe
  misc_feature (1)..(25): SEQ ID NO: 4184; WAN024DVE_at; Start 1380; Stop 1404
ggatacagagttaaaggatattatg

SEQ ID NO: 172734 - DNA, 25 bp, Artificial
  probe
  misc_feature (1)..(25): SEQ ID NO: 4184; WAN024DVE_at; Start 1394; Stop 1418
aggatattatgacaaatattgctga

SEQ ID NO: 172735 - DNA, 25 bp, Artificial
  probe
  misc_feature (1)..(25): SEQ ID NO: 4184; WAN024DVE_at; Start 1377; Stop 1401
cgaggatacagagttaaaggatatt

SEQ ID NO: 172736 - DNA, 25 bp, Artificial
  probe
  misc_feature (1)..(25): SEQ ID NO: 4184; WAN024DVE_at; Start 1353; Stop 1377
gctattgagtcaaggtaaaataaac

SEQ ID NO: 172737 - DNA, 25 bp, Artificial
  probe
  misc_feature (1)..(25): SEQ ID NO: 4184; WAN024DVE_at; Start 1422; Stop 1446
acaatattattatcctcagctatca

SEQ ID NO: 172738 - DNA, 25 bp, Artificial
  probe
  misc_feature (1)..(25): SEQ ID NO: 4184; WAN024DVE_at; Start 1345; Stop 1369
gttgtgcagctattgagtcaaggta

SEQ ID NO: 172739 - DNA, 25 bp, Artificial
  probe
  misc_feature (1)..(25): SEQ ID NO: 4184; WAN024DVE_at; Start 1354; Stop 1378
ctattgagtcaaggtaaaataaacg

SEQ ID NO: 172740 - DNA, 25 bp, Artificial
  probe
  misc_feature (1)..(25): SEQ ID NO: 4184; WAN024DVE_at; Start 1378; Stop 1402
gaggatacagagttaaaggatatta

SEQ ID NO: 172741 - DNA, 25 bp, Artificial
  probe
  misc_feature (1)..(25): SEQ ID NO: 4184; WAN024DVE_at; Start 1383; Stop 1407
tacagagttaaaggatattatgaca

SEQ ID NO: 172742 - DNA, 25 bp, Artificial
  probe
  misc_feature (1)..(25): SEQ ID NO: 4184; WAN024DVE_at; Start 1373; Stop 1397
taaacgaggatacagagttaaagga

SEQ ID NO: 172743 - DNA, 25 bp, Artificial
  probe
  misc_feature (1)..(25): SEQ ID NO: 4184; WAN024DVE_at; Start 1365; Stop 1389
aggtaaaataaacgaggatacagag

SEQ ID NO: 172744 - DNA, 25 bp, Artificial
  probe
  misc_feature (1)..(25): SEQ ID NO: 4184; WAN024DVE_at; Start 1351; Stop 1375
cagctattgagtcaaggtaaaataa

SEQ ID NO: 172745 - DNA, 25 bp, Artificial
  probe
  misc_feature (1)..(25): SEQ ID NO: 4184; WAN024DVE_at; Start 1343; Stop 1367
ttgttgtgcagctattgagtcaagg

SEQ ID NO: 172746 - DNA, 25 bp, Artificial
  probe
  misc_feature (1)..(25): SEQ ID NO: 4184; WAN024DVE_at; Start 1355; Stop 1379
tattgagtcaaggtaaaataaacga

SEQ ID NO: 172747 - DNA, 25 bp, Artificial
  probe
  misc_feature (1)..(25): SEQ ID NO: 4184; WAN024DVE_at; Start 1368; Stop 1392
taaaataaacgaggatacagagtta

SEQ ID NO: 172748 - DNA, 25 bp, Artificial
  probe
  misc_feature (1)..(25): SEQ ID NO: 4184; WAN024DVE_at; Start 1391; Stop 1415
taaaggatattatgacaaatattgc

SEQ ID NO: 172749 - DNA, 25 bp, Artificial
  probe
  misc_feature (1)..(25): SEQ ID NO: 4184; WAN024DVE_at; Start 1421; Stop 1445
cacaatattattatcctcagctatc

SEQ ID NO: 172750 - DNA, 25 bp, Artificial
  probe
  misc_feature (1)..(25): SEQ ID NO: 4184; WAN024DVE_at; Start 1358; Stop 1382
tgagtcaaggtaaaataaacgagga

SEQ ID NO: 172751 - DNA, 25 bp, Artificial
  probe
  misc_feature (1)..(25): SEQ ID NO: 4184; WAN024DVE_at; Start 1371; Stop 1395
aataaacgaggatacagagttaaag

SEQ ID NO: 172752 - DNA, 25 bp, Artificial
  probe
  misc_feature (1)..(25): SEQ ID NO: 4184; WAN024DVE_at; Start 1376; Stop 1400
acgaggatacagagttaaaggatat

SEQ ID NO: 172753 - DNA, 25 bp, Artificial
  probe
  misc_feature (1)..(25): SEQ ID NO: 4184; WAN024DVE_at; Start 1362; Stop 1386
tcaaggtaaaataaacgaggataca

SEQ ID NO: 172754 - DNA, 25 bp, Artificial
  probe
  misc_feature (1)..(25): SEQ ID NO: 4184; WAN024DVE_at; Start 1385; Stop 1409
cagagttaaaggatattatgacaaa

SEQ ID NO: 172755 - DNA, 25 bp, Artificial
  probe
  misc_feature (1)..(25): SEQ ID NO: 4184; WAN024DVE_at; Start 1348; Stop 1372
gtgcagctattgagtcaaggtaaaa

SEQ ID NO: 172756 - DNA, 25 bp, Artificial
  probe
  misc_feature (1)..(25): SEQ ID NO: 4184; WAN024DVE_at; Start 1350; Stop 1374
gcagctattgagtcaaggtaaaata

SEQ ID NO: 172757 - DNA, 25 bp, Artificial
  probe
  misc_feature (1)..(25): SEQ ID NO: 4184; WAN024DVE_at; Start 1356; Stop 1380
attgagtcaaggtaaaataaacgag

SEQ ID NO: 172758 - DNA, 25 bp, Artificial
  probe
  misc_feature (1)..(25): SEQ ID NO: 4184; WAN024DVE_at; Start 1346; Stop 1370
ttgtgcagctattgagtcaaggtaa

SEQ ID NO: 172759 - DNA, 25 bp, Artificial
  probe
  misc_feature (1)..(25): SEQ ID NO: 4184; WAN024DVE_at; Start 1347; Stop 1371
tgtgcagctattgagtcaaggtaaa

SEQ ID NO: 172760 - DNA, 25 bp, Artificial
  probe
  misc_feature (1)..(25): SEQ ID NO: 4184; WAN024DVE_at; Start 1344; Stop 1368
tgttgtgcagctattgagtcaaggt

SEQ ID NO: 172761 - DNA, 25 bp, Artificial
  probe
  misc_feature (1)..(25): SEQ ID NO: 4184; WAN024DVE_at; Start 1374; Stop 1398
aaacgaggatacagagttaaaggat

SEQ ID NO: 172762 - DNA, 25 bp, Artificial
  probe
  misc_feature (1)..(25): SEQ ID NO: 4184; WAN024DVE_at; Start 1349; Stop 1373
tgcagctattgagtcaaggtaaaat

SEQ ID NO: 172763 - DNA, 25 bp, Artificial
  probe
  misc_feature (1)..(25): SEQ ID NO: 4184; WAN024DVE_at; Start 1341; Stop 1365
tattgttgtgcagctattgagtcaa

SEQ ID NO: 172764 - DNA, 25 bp, Artificial
  probe
  misc_feature (1)..(25): SEQ ID NO: 4184; WAN024DVE_at; Start 1375; Stop 1399
aacgaggatacagagttaaaggata

SEQ ID NO: 172765 - DNA, 25 bp, Artificial
  probe
  misc_feature (1)..(25): SEQ ID NO: 4185; WAN024DVF_at; Start 1356; Stop 1380
catagctatgggacaattaaaaggg

SEQ ID NO: 172766 - DNA, 25 bp, Artificial
  probe
  misc_feature (1)..(25): SEQ ID NO: 4185; WAN024DVF_at; Start 1347; Stop 1371
tgtgcagctcatagctatgggacaa

SEQ ID NO: 172767 - DNA, 25 bp, Artificial
  probe
  misc_feature (1)..(25): SEQ ID NO: 4185; WAN024DVF_at; Start 1353; Stop 1377
gctcatagctatgggacaattaaaa

SEQ ID NO: 172768 - DNA, 25 bp, Artificial
  probe
  misc_feature (1)..(25): SEQ ID NO: 4185; WAN024DVF_at; Start 1392; Stop 1416
tcaccatgttattgaggagtttcta

SEQ ID NO: 172769 - DNA, 25 bp, Artificial
  probe
  misc_feature (1)..(25): SEQ ID NO: 4185; WAN024DVF_at; Start 1422; Stop 1446
agagagttattactcccaaaagaat

SEQ ID NO: 172770 - DNA, 25 bp, Artificial
  probe
  misc_feature (1)..(25): SEQ ID NO: 4185; WAN024DVF_at; Start 1415; Stop 1439
tacaattagagagttattactccca

SEQ ID NO: 172771 - DNA, 25 bp, Artificial
  probe
  misc_feature (1)..(25): SEQ ID NO: 4185; WAN024DVF_at; Start 1345; Stop 1369
gttgtgcagctcatagctatgggac

SEQ ID NO: 172772 - DNA, 25 bp, Artificial
  probe
  misc_feature (1)..(25): SEQ ID NO: 4185; WAN024DVF_at; Start 1361; Stop 1385
ctatgggacaattaaaagggatgga

SEQ ID NO: 172773 - DNA, 25 bp, Artificial
  probe
  misc_feature (1)..(25): SEQ ID NO: 4185; WAN024DVF_at; Start 1349; Stop 1373
tgcagctcatagctatgggacaatt

SEQ ID NO: 172774 - DNA, 25 bp, Artificial
  probe
  misc_feature (1)..(25): SEQ ID NO: 4185; WAN024DVF_at; Start 1362; Stop 1386
tatgggacaattaaaagggatggaa

SEQ ID NO: 172775 - DNA, 25 bp, Artificial
  probe
  misc_feature (1)..(25): SEQ ID NO: 4185; WAN024DVF_at; Start 1405; Stop 1429
gaggagtttctacaattagagagtt

SEQ ID NO: 172776 - DNA, 25 bp, Artificial
  probe
  misc_feature (1)..(25): SEQ ID NO: 4185; WAN024DVF_at; Start 1359; Stop 1383
agctatgggacaattaaaagggatg

SEQ ID NO: 172777 - DNA, 25 bp, Artificial
  probe
  misc_feature (1)..(25): SEQ ID NO: 4185; WAN024DVF_at; Start 1343; Stop 1367
ttgttgtgcagctcatagctatggg

SEQ ID NO: 172778 - DNA, 25 bp, Artificial
  probe
  misc_feature (1)..(25): SEQ ID NO: 4185; WAN024DVF_at; Start 1394; Stop 1418
accatgttattgaggagtttctaca

SEQ ID NO: 172779 - DNA, 25 bp, Artificial
  probe
  misc_feature (1)..(25): SEQ ID NO: 4185; WAN024DVF_at; Start 1421; Stop 1445
tagagagttattactcccaaaagaa

SEQ ID NO: 172780 - DNA, 25 bp, Artificial
  probe
  misc_feature (1)..(25): SEQ ID NO: 4185; WAN024DVF_at; Start 1390; Stop 1414
gctcaccatgttattgaggagtttc

SEQ ID NO: 172781 - DNA, 25 bp, Artificial
  probe
  misc_feature (1)..(25): SEQ ID NO: 4185; WAN024DVF_at; Start 1395; Stop 1419
ccatgttattgaggagtttctacaa

SEQ ID NO: 172782 - DNA, 25 bp, Artificial
  probe
  misc_feature (1)..(25): SEQ ID NO: 4185; WAN024DVF_at; Start 1401; Stop 1425
tattgaggagtttctacaattagag

SEQ ID NO: 172783 - DNA, 25 bp, Artificial
  probe
  misc_feature (1)..(25): SEQ ID NO: 4185; WAN024DVF_at; Start 1393; Stop 1417
caccatgttattgaggagtttctac

SEQ ID NO: 172784 - DNA, 25 bp, Artificial
  probe
  misc_feature (1)..(25): SEQ ID NO: 4185; WAN024DVF_at; Start 1351; Stop 1375
cagctcatagctatgggacaattaa

SEQ ID NO: 172785 - DNA, 25 bp, Artificial
  probe
  misc_feature (1)..(25): SEQ ID NO: 4185; WAN024DVF_at; Start 1355; Stop 1379
tcatagctatgggacaattaaaagg

SEQ ID NO: 172786 - DNA, 25 bp, Artificial
  probe
  misc_feature (1)..(25): SEQ ID NO: 4185; WAN024DVF_at; Start 1364; Stop 1388
tgggacaattaaaagggatggaaga

SEQ ID NO: 172787 - DNA, 25 bp, Artificial
  probe
  misc_feature (1)..(25): SEQ ID NO: 4185; WAN024DVF_at; Start 1358; Stop 1382
tagctatgggacaattaaaagggat

SEQ ID NO: 172788 - DNA, 25 bp, Artificial
  probe
  misc_feature (1)..(25): SEQ ID NO: 4185; WAN024DVF_at; Start 1350; Stop 1374
gcagctcatagctatgggacaatta

SEQ ID NO: 172789 - DNA, 25 bp, Artificial
  probe
  misc_feature (1)..(25): SEQ ID NO: 4185; WAN024DVF_at; Start 1404; Stop 1428
tgaggagtttctacaattagagagt

SEQ ID NO: 172790 - DNA, 25 bp, Artificial
  probe
  misc_feature (1)..(25): SEQ ID NO: 4185; WAN024DVF_at; Start 1348; Stop 1372
gtgcagctcatagctatgggacaat

SEQ ID NO: 172791 - DNA, 25 bp, Artificial
  probe
  misc_feature (1)..(25): SEQ ID NO: 4185; WAN024DVF_at; Start 1407; Stop 1431
ggagtttctacaattagagagttat

SEQ ID NO: 172792 - DNA, 25 bp, Artificial
  probe
  misc_feature (1)..(25): SEQ ID NO: 4185; WAN024DVF_at; Start 1417; Stop 1441
caattagagagttattactcccaaa

SEQ ID NO: 172793 - DNA, 25 bp, Artificial
  probe
  misc_feature (1)..(25): SEQ ID NO: 4185; WAN024DVF_at; Start 1344; Stop 1368
tgttgtgcagctcatagctatggga

SEQ ID NO: 172794 - DNA, 25 bp, Artificial
  probe
  misc_feature (1)..(25): SEQ ID NO: 4185; WAN024DVF_at; Start 1413; Stop 1437
tctacaattagagagttattactcc

SEQ ID NO: 172795 - DNA, 25 bp, Artificial
  probe
  misc_feature (1)..(25): SEQ ID NO: 4185; WAN024DVF_at; Start 1396; Stop 1420
catgttattgaggagtttctacaat

SEQ ID NO: 172796 - DNA, 25 bp, Artificial
  probe
  misc_feature (1)..(25): SEQ ID NO: 4185; WAN024DVF_at; Start 1346; Stop 1370
ttgtgcagctcatagctatgggaca

SEQ ID NO: 172797 - DNA, 25 bp, Artificial
  probe
  misc_feature (1)..(25): SEQ ID NO: 4185; WAN024DVF_at; Start 1360; Stop 1384
gctatgggacaattaaaagggatgg

SEQ ID NO: 172798 - DNA, 25 bp, Artificial
  probe
  misc_feature (1)..(25): SEQ ID NO: 4185; WAN024DVF_at; Start 1341; Stop 1365
tattgttgtgcagctcatagctatg

SEQ ID NO: 172799 - DNA, 25 bp, Artificial
  probe
  misc_feature (1)..(25): SEQ ID NO: 4934; WAN024DVG_at; Start 214; Stop 238
atatcctccctattttctctgaccg

SEQ ID NO: 172800 - DNA, 25 bp, Artificial
  probe
  misc_feature (1)..(25): SEQ ID NO: 4934; WAN024DVG_at; Start 66; Stop 90
tttacaccatcacaacgaattagct

SEQ ID NO: 172801 - DNA, 25 bp, Artificial
  probe
  misc_feature (1)..(25): SEQ ID NO: 4934; WAN024DVG_at; Start 291; Stop 315
ctggctctccaaaattcttagctaa

SEQ ID NO: 172802 - DNA, 25 bp, Artificial
  probe
  misc_feature (1)..(25): SEQ ID NO: 4934; WAN024DVG_at; Start 89; Stop 113
cttatttgcacatgaggcagaagga

SEQ ID NO: 172803 - DNA, 25 bp, Artificial
  probe
  misc_feature (1)..(25): SEQ ID NO: 4934; WAN024DVG_at; Start 270; Stop 294
tctcctcatcaggaagaactactgg

SEQ ID NO: 172804 - DNA, 25 bp, Artificial
  probe
  misc_feature (1)..(25): SEQ ID NO: 4934; WAN024DVG_at; Start 82; Stop 106
gaattagcttatttgcacatgaggc

SEQ ID NO: 172805 - DNA, 25 bp, Artificial
  probe
  misc_feature (1)..(25): SEQ ID NO: 4934; WAN024DVG_at; Start 3; Stop 27
gaactatcgacgtaactatctaatg

SEQ ID NO: 172806 - DNA, 25 bp, Artificial
  probe
  misc_feature (1)..(25): SEQ ID NO: 4934; WAN024DVG_at; Start 279; Stop 303
caggaagaactactggctctccaaa

SEQ ID NO: 172807 - DNA, 25 bp, Artificial
  probe
  misc_feature (1)..(25): SEQ ID NO: 4934; WAN024DVG_at; Start 11; Stop 35
gacgtaactatctaatggcattaaa

SEQ ID NO: 172808 - DNA, 25 bp, Artificial
  probe
  misc_feature (1)..(25): SEQ ID NO: 4934; WAN024DVG_at; Start 99; Stop 123
catgaggcagaaggataattcgcgt

SEQ ID NO: 172809 - DNA, 25 bp, Artificial
  probe
  misc_feature (1)..(25): SEQ ID NO: 4934; WAN024DVG_at; Start 165; Stop 189
gtcttcaataaatctggagaaatat

SEQ ID NO: 172810 - DNA, 25 bp, Artificial
  probe
  misc_feature (1)..(25): SEQ ID NO: 4934; WAN024DVG_at; Start 21; Stop 45
tctaatggcattaaatacagaatgg

SEQ ID NO: 172811 - DNA, 25 bp, Artificial
  probe
  misc_feature (1)..(25): SEQ ID NO: 4934; WAN024DVG_at; Start 148; Stop 172
gtcccatttccattaaagtcttcaa

SEQ ID NO: 172812 - DNA, 25 bp, Artificial
  probe
  misc_feature (1)..(25): SEQ ID NO: 4934; WAN024DVG_at; Start 53; Stop 77
taattctggaatatttacaccatca

SEQ ID NO: 172813 - DNA, 25 bp, Artificial
  probe
  misc_feature (1)..(25): SEQ ID NO: 4934; WAN024DVG_at; Start 158; Stop 182
cattaaagtcttcaataaatctgga

SEQ ID NO: 172814 - DNA, 25 bp, Artificial
  probe
  misc_feature (1)..(25): SEQ ID NO: 4934; WAN024DVG_at; Start 143; Stop 167
tccatgtcccatttccattaaagtc

SEQ ID NO: 172815 - DNA, 25 bp, Artificial
  probe
  misc_feature (1)..(25): SEQ ID NO: 4934; WAN024DVG_at; Start 250; Stop 274
tttttctgccatcaattccatctcc

SEQ ID NO: 172816 - DNA, 25 bp, Artificial
  probe
  misc_feature (1)..(25): SEQ ID NO: 4934; WAN024DVG_at; Start 73; Stop 97
catcacaacgaattagcttatttgc

SEQ ID NO: 172817 - DNA, 25 bp, Artificial
  probe
  misc_feature (1)..(25): SEQ ID NO: 4934; WAN024DVG_at; Start 60; Stop 84
ggaatatttacaccatcacaacgaa

SEQ ID NO: 172818 - DNA, 25 bp, Artificial
  probe
  misc_feature (1)..(25): SEQ ID NO: 4934; WAN024DVG_at; Start 27; Stop 51
ggcattaaatacagaatggaatcta

SEQ ID NO: 172819 - DNA, 25 bp, Artificial
  probe
  misc_feature (1)..(25): SEQ ID NO: 4934; WAN024DVG_at; Start 118; Stop 142
tcgcgtcagctaatactatttcatc

SEQ ID NO: 172820 - DNA, 25 bp, Artificial
  probe
  misc_feature (1)..(25): SEQ ID NO: 4934; WAN024DVG_at; Start 111; Stop 135
ggataattcgcgtcagctaatacta

SEQ ID NO: 172821 - DNA, 25 bp, Artificial
  probe
  misc_feature (1)..(25): SEQ ID NO: 4934; WAN024DVG_at; Start 275; Stop 299
tcatcaggaagaactactggctctc

SEQ ID NO: 172822 - DNA, 25 bp, Artificial
  probe
  misc_feature (1)..(25): SEQ ID NO: 4934; WAN024DVG_at; Start 38; Stop 62
cagaatggaatctaataattctgga

SEQ ID NO: 172823 - DNA, 25 bp, Artificial
  probe
  misc_feature (1)..(25): SEQ ID NO: 4934; WAN024DVG_at; Start 199; Stop 223
tatgttttaacattaatatcctccc

SEQ ID NO: 172824 - DNA, 25 bp, Artificial
  probe
  misc_feature (1)..(25): SEQ ID NO: 4934; WAN024DVG_at; Start 106; Stop 130
cagaaggataattcgcgtcagctaa

SEQ ID NO: 172825 - DNA, 25 bp, Artificial
  probe
  misc_feature (1)..(25): SEQ ID NO: 4934; WAN024DVG_at; Start 7; Stop 31
tatcgacgtaactatctaatggcat

SEQ ID NO: 172826 - DNA, 25 bp, Artificial
  probe
  misc_feature (1)..(25): SEQ ID NO: 4934; WAN024DVG_at; Start 97; Stop 121
cacatgaggcagaaggataattcgc

SEQ ID NO: 172827 - DNA, 25 bp, Artificial
  probe
  misc_feature (1)..(25): SEQ ID NO: 4934; WAN024DVG_at; Start 129; Stop 153
aatactatttcatctccatgtccca

SEQ ID NO: 172828 - DNA, 25 bp, Artificial
  probe
  misc_feature (1)..(25): SEQ ID NO: 4934; WAN024DVG_at; Start 285; Stop 309
gaactactggctctccaaaattctt

SEQ ID NO: 172829 - DNA, 25 bp, Artificial
  probe
  misc_feature (1)..(25): SEQ ID NO: 4934; WAN024DVG_at; Start 86; Stop 110
tagcttatttgcacatgaggcagaa

SEQ ID NO: 172830 - DNA, 25 bp, Artificial
  probe
  misc_feature (1)..(25): SEQ ID NO: 4934; WAN024DVG_at; Start 178; Stop 202
ctggagaaatatttttcggtatatg

SEQ ID NO: 172831 - DNA, 25 bp, Artificial
  probe
  misc_feature (1)..(25): SEQ ID NO: 4934; WAN024DVG_at; Start 261; Stop 285
tcaattccatctcctcatcaggaag

SEQ ID NO: 172832 - DNA, 25 bp, Artificial
  probe
  misc_feature (1)..(25): SEQ ID NO: 4934; WAN024DVG_at; Start 224; Stop 248
tattttctctgaccgtatgttttaa

SEQ ID NO: 172833 - DNA, 25 bp, Artificial
  probe
  misc_feature (1)..(25): SEQ ID NO: 1565; WAN024DVH_at; Start 26; Stop 50
tcatcacgagtttgatattgaatca

SEQ ID NO: 172834 - DNA, 25 bp, Artificial
  probe
  misc_feature (1)..(25): SEQ ID NO: 1565; WAN024DVH_at; Start 77; Stop 101
aagcgttctccctctacaacatttc

SEQ ID NO: 172835 - DNA, 25 bp, Artificial
  probe
  misc_feature (1)..(25): SEQ ID NO: 1565; WAN024DVH_at; Start 191; Stop 215
tcgaaaacgctgagattcccacctg

SEQ ID NO: 172836 - DNA, 25 bp, Artificial
  probe
  misc_feature (1)..(25): SEQ ID NO: 1565; WAN024DVH_at; Start 12; Stop 36
taattgcatcgatatcatcacgagt

SEQ ID NO: 172837 - DNA, 25 bp, Artificial
  probe
  misc_feature (1)..(25): SEQ ID NO: 1565; WAN024DVH_at; Start 67; Stop 91
gctagatggcaagcgttctccctct

SEQ ID NO: 172838 - DNA, 25 bp, Artificial
  probe
  misc_feature (1)..(25): SEQ ID NO: 1565; WAN024DVH_at; Start 45; Stop 69
gaatcaaatgcatataccattcgct

SEQ ID NO: 172839 - DNA, 25 bp, Artificial
  probe
  misc_feature (1)..(25): SEQ ID NO: 1565; WAN024DVH_at; Start 64; Stop 88
ttcgctagatggcaagcgttctccc

SEQ ID NO: 172840 - DNA, 25 bp, Artificial
  probe
  misc_feature (1)..(25): SEQ ID NO: 1565; WAN024DVH_at; Start 51; Stop 75
aatgcatataccattcgctagatgg

SEQ ID NO: 172841 - DNA, 25 bp, Artificial
  probe
  misc_feature (1)..(25): SEQ ID NO: 1565; WAN024DVH_at; Start 215; Stop 239
gttcctttcgtcaaatctgtttcta

SEQ ID NO: 172842 - DNA, 25 bp, Artificial
  probe
  misc_feature (1)..(25): SEQ ID NO: 1565; WAN024DVH_at; Start 180; Stop 204
gtttttcacgatcgaaaacgctgag

SEQ ID NO: 172843 - DNA, 25 bp, Artificial
  probe
  misc_feature (1)..(25): SEQ ID NO: 1565; WAN024DVH_at; Start 62; Stop 86
cattcgctagatggcaagcgttctc

SEQ ID NO: 172844 - DNA, 25 bp, Artificial
  probe
  misc_feature (1)..(25): SEQ ID NO: 1565; WAN024DVH_at; Start 57; Stop 81
tataccattcgctagatggcaagcg

SEQ ID NO: 172845 - DNA, 25 bp, Artificial
  probe
  misc_feature (1)..(25): SEQ ID NO: 1565; WAN024DVH_at; Start 170; Stop 194
gccatcaattgtttttcacgatcga

SEQ ID NO: 172846 - DNA, 25 bp, Artificial
  probe
  misc_feature (1)..(25): SEQ ID NO: 1565; WAN024DVH_at; Start 59; Stop 83
taccattcgctagatggcaagcgtt

SEQ ID NO: 172847 - DNA, 25 bp, Artificial
  probe
  misc_feature (1)..(25): SEQ ID NO: 1565; WAN024DVH_at; Start 196; Stop 220
aacgctgagattcccacctgttcct

SEQ ID NO: 172848 - DNA, 25 bp, Artificial
  probe
  misc_feature (1)..(25): SEQ ID NO: 1565; WAN024DVH_at; Start 39; Stop 63
gatattgaatcaaatgcatatacca

SEQ ID NO: 172849 - DNA, 25 bp, Artificial
  probe
  misc_feature (1)..(25): SEQ ID NO: 1565; WAN024DVH_at; Start 2; Stop 26
tgagcatggataattgcatcgatat

SEQ ID NO: 172850 - DNA, 25 bp, Artificial
  probe
  misc_feature (1)..(25): SEQ ID NO: 1565; WAN024DVH_at; Start 70; Stop 94
agatggcaagcgttctccctctaca

SEQ ID NO: 172851 - DNA, 25 bp, Artificial
  probe
  misc_feature (1)..(25): SEQ ID NO: 1565; WAN024DVH_at; Start 155; Stop 179
cccgacggggtaattgccatcaatt

SEQ ID NO: 172852 - DNA, 25 bp, Artificial
  probe
  misc_feature (1)..(25): SEQ ID NO: 1565; WAN024DVH_at; Start 193; Stop 217
gaaaacgctgagattcccacctgtt

SEQ ID NO: 172853 - DNA, 25 bp, Artificial
  probe
  misc_feature (1)..(25): SEQ ID NO: 1565; WAN024DVH_at; Start 120; Stop 144
caatatcggattctttgatttcaaa

SEQ ID NO: 172854 - DNA, 25 bp, Artificial
  probe
  misc_feature (1)..(25): SEQ ID NO: 1565; WAN024DVH_at; Start 74; Stop 98
ggcaagcgttctccctctacaacat

SEQ ID NO: 172855 - DNA, 25 bp, Artificial
  probe
  misc_feature (1)..(25): SEQ ID NO: 1565; WAN024DVH_at; Start 189; Stop 213
gatcgaaaacgctgagattcccacc

SEQ ID NO: 172856 - DNA, 25 bp, Artificial
  probe
  misc_feature (1)..(25): SEQ ID NO: 1565; WAN024DVH_at; Start 105; Stop 129
taatatccatcactacaatatcgga

SEQ ID NO: 172857 - DNA, 25 bp, Artificial
  probe
  misc_feature (1)..(25): SEQ ID NO: 1565; WAN024DVH_at; Start 185; Stop 209
tcacgatcgaaaacgctgagattcc

SEQ ID NO: 172858 - DNA, 25 bp, Artificial
  probe
  misc_feature (1)..(25): SEQ ID NO: 1565; WAN024DVH_at; Start 17; Stop 41
gcatcgatatcatcacgagtttgat

SEQ ID NO: 172859 - DNA, 25 bp, Artificial
  probe
  misc_feature (1)..(25): SEQ ID NO: 1565; WAN024DVH_at; Start 137; Stop 161
atttcaaagaaatcaatacccgacg

SEQ ID NO: 172860 - DNA, 25 bp, Artificial
  probe
  misc_feature (1)..(25): SEQ ID NO: 1565; WAN024DVH_at; Start 9; Stop 33
ggataattgcatcgatatcatcacg

SEQ ID NO: 172861 - DNA, 25 bp, Artificial
  probe
  misc_feature (1)..(25): SEQ ID NO: 1565; WAN024DVH_at; Start 219; Stop 243
ctttcgtcaaatctgtttctactag

SEQ ID NO: 172862 - DNA, 25 bp, Artificial
  probe
  misc_feature (1)..(25): SEQ ID NO: 1565; WAN024DVH_at; Start 204; Stop 228
gattcccacctgttcctttcgtcaa

SEQ ID NO: 172863 - DNA, 25 bp, Artificial
  probe
  misc_feature (1)..(25): SEQ ID NO: 1565; WAN024DVH_at; Start 112; Stop 136
catcactacaatatcggattctttg

SEQ ID NO: 172864 - DNA, 25 bp, Artificial
  probe
  misc_feature (1)..(25): SEQ ID NO: 1565; WAN024DVH_at; Start 201; Stop 225
tgagattcccacctgttcctttcgt

SEQ ID NO: 172865 - DNA, 25 bp, Artificial
  probe
  misc_feature (1)..(25): SEQ ID NO: 1565; WAN024DVH_at; Start 210; Stop 234
cacctgttcctttcgtcaaatctgt

SEQ ID NO: 172866 - DNA, 25 bp, Artificial
  probe
  misc_feature (1)..(25): SEQ ID NO: 1565; WAN024DVH_at; Start 91; Stop 115
tacaacatttccattaatatccatc

SEQ ID NO: 172867 - DNA, 25 bp, Artificial
  probe
  misc_feature (1)..(25): SEQ ID NO: 2979; WAN024DVI_at; Start 107; Stop 131
cctcatgtgcaaataagctaattcg

SEQ ID NO: 172868 - DNA, 25 bp, Artificial
  probe
  misc_feature (1)..(25): SEQ ID NO: 2979; WAN024DVI_at; Start 258; Stop 282
gggtacctatagacagatgattgaa

SEQ ID NO: 172869 - DNA, 25 bp, Artificial
  probe
  misc_feature (1)..(25): SEQ ID NO: 2979; WAN024DVI_at; Start 116; Stop 140
caaataagctaattcgttgtgatgg

SEQ ID NO: 172870 - DNA, 25 bp, Artificial
  probe
  misc_feature (1)..(25): SEQ ID NO: 2979; WAN024DVI_at; Start 145; Stop 169
aatattccagaattattagattcca

SEQ ID NO: 172871 - DNA, 25 bp, Artificial
  probe
  misc_feature (1)..(25): SEQ ID NO: 2979; WAN024DVI_at; Start 336; Stop 360
tgaacgtagtaagaaagcttatgct

SEQ ID NO: 172872 - DNA, 25 bp, Artificial
  probe
  misc_feature (1)..(25): SEQ ID NO: 2979; WAN024DVI_at; Start 309; Stop 333
tacttatcttagaagagaagacttt

SEQ ID NO: 172873 - DNA, 25 bp, Artificial
  probe
  misc_feature (1)..(25): SEQ ID NO: 2979; WAN024DVI_at; Start 323; Stop 347
gagaagacttttatgaacgtagtaa

SEQ ID NO: 172874 - DNA, 25 bp, Artificial
  probe
  misc_feature (1)..(25): SEQ ID NO: 2979; WAN024DVI_at; Start 163; Stop 187
gattccattctgtatttaatgccat

SEQ ID NO: 172875 - DNA, 25 bp, Artificial
  probe
  misc_feature (1)..(25): SEQ ID NO: 2979; WAN024DVI_at; Start 302; Stop 326
aaacgattacttatcttagaagaga

SEQ ID NO: 172876 - DNA, 25 bp, Artificial
  probe
  misc_feature (1)..(25): SEQ ID NO: 2979; WAN024DVI_at; Start 77; Stop 101
tagtattagctgacgcgaattatcc

SEQ ID NO: 172877 - DNA, 25 bp, Artificial
  probe
  misc_feature (1)..(25): SEQ ID NO: 2979; WAN024DVI_at; Start 224; Stop 248
acgttgtttcgggtgatgatattcc

SEQ ID NO: 172878 - DNA, 25 bp, Artificial
  probe
  misc_feature (1)..(25): SEQ ID NO: 2979; WAN024DVI_at; Start 235; Stop 259
ggtgatgatattcctaagatatggg

SEQ ID NO: 172879 - DNA, 25 bp, Artificial
  probe
  misc_feature (1)..(25): SEQ ID NO: 2979; WAN024DVI_at; Start 40; Stop 64
ttgaagactttaatggaaatgggac

SEQ ID NO: 172880 - DNA, 25 bp, Artificial
  probe
  misc_feature (1)..(25): SEQ ID NO: 2979; WAN024DVI_at; Start 179; Stop 203
taatgccattagatagttacgtcga

SEQ ID NO: 172881 - DNA, 25 bp, Artificial
  probe
  misc_feature (1)..(25): SEQ ID NO: 2979; WAN024DVI_at; Start 408; Stop 432
gaaaggagtagttgttgaaagagaa

SEQ ID NO: 172882 - DNA, 25 bp, Artificial
  probe
  misc_feature (1)..(25): SEQ ID NO: 2979; WAN024DVI_at; Start 70; Stop 94
gatgaaatagtattagctgacgcga

SEQ ID NO: 172883 - DNA, 25 bp, Artificial
  probe
  misc_feature (1)..(25): SEQ ID NO: 2979; WAN024DVI_at; Start 93; Stop 117
gaattatccttctgcctcatgtgca

SEQ ID NO: 172884 - DNA, 25 bp, Artificial
  probe
  misc_feature (1)..(25): SEQ ID NO: 2979; WAN024DVI_at; Start 283; Stop 307
ggtcatggtacagatcttaaaacga

SEQ ID NO: 172885 - DNA, 25 bp, Artificial
  probe
  misc_feature (1)..(25): SEQ ID NO: 2979; WAN024DVI_at; Start 263; Stop 287
cctatagacagatgattgaaggtca

SEQ ID NO: 172886 - DNA, 25 bp, Artificial
  probe
  misc_feature (1)..(25): SEQ ID NO: 2979; WAN024DVI_at; Start 363; Stop 387
tgttgctacaggagaaacttcactt

SEQ ID NO: 172887 - DNA, 25 bp, Artificial
  probe
  misc_feature (1)..(25): SEQ ID NO: 2979; WAN024DVI_at; Start 45; Stop 69
gactttaatggaaatgggacatgga

SEQ ID NO: 172888 - DNA, 25 bp, Artificial
  probe
  misc_feature (1)..(25): SEQ ID NO: 2979; WAN024DVI_at; Start 275; Stop 299
tgattgaaggtcatggtacagatct

SEQ ID NO: 172889 - DNA, 25 bp, Artificial
  probe
  misc_feature (1)..(25): SEQ ID NO: 2979; WAN024DVI_at; Start 198; Stop 222
cgtcgatagttcaattcagtttatg

SEQ ID NO: 172890 - DNA, 25 bp, Artificial
  probe
  misc_feature (1)..(25): SEQ ID NO: 2979; WAN024DVI_at; Start 55; Stop 79
gaaatgggacatggagatgaaatag

SEQ ID NO: 172891 - DNA, 25 bp, Artificial
  probe
  misc_feature (1)..(25): SEQ ID NO: 2979; WAN024DVI_at; Start 83; Stop 107
tagctgacgcgaattatccttctgc

SEQ ID NO: 172892 - DNA, 25 bp, Artificial
  probe
  misc_feature (1)..(25): SEQ ID NO: 2979; WAN024DVI_at; Start 10; Stop 34
catataccgaaaaatatttctccag

SEQ ID NO: 172893 - DNA, 25 bp, Artificial
  probe
  misc_feature (1)..(25): SEQ ID NO: 2979; WAN024DVI_at; Start 214; Stop 238
cagtttatgaacgttgtttcgggtg

SEQ ID NO: 172894 - DNA, 25 bp, Artificial
  probe
  misc_feature (1)..(25): SEQ ID NO: 2979; WAN024DVI_at; Start 391; Stop 415
gctaatattatccttaagaaaggag

SEQ ID NO: 172895 - DNA, 25 bp, Artificial
  probe
  misc_feature (1)..(25): SEQ ID NO: 2979; WAN024DVI_at; Start 357; Stop 381
tgctattgttgctacaggagaaact

SEQ ID NO: 172896 - DNA, 25 bp, Artificial
  probe
  misc_feature (1)..(25): SEQ ID NO: 2979; WAN024DVI_at; Start 192; Stop 216
tagttacgtcgatagttcaattcag

SEQ ID NO: 172897 - DNA, 25 bp, Artificial
  probe
  misc_feature (1)..(25): SEQ ID NO: 2979; WAN024DVI_at; Start 288; Stop 312
tggtacagatcttaaaacgattact

SEQ ID NO: 172898 - DNA, 25 bp, Artificial
  probe
  misc_feature (1)..(25): SEQ ID NO: 2979; WAN024DVI_at; Start 348; Stop 372
gaaagcttatgctattgttgctaca

SEQ ID NO: 172899 - DNA, 25 bp, Artificial
  probe
  misc_feature (1)..(25): SEQ ID NO: 2979; WAN024DVI_at; Start 24; Stop 48
tatttctccagatttattgaagact

SEQ ID NO: 172900 - DNA, 25 bp, Artificial
  probe
  misc_feature (1)..(25): SEQ ID NO: 2979; WAN024DVI_at; Start 373; Stop 397
ggagaaacttcactttatgctaata

SEQ ID NO: 172901 - DNA, 25 bp, Artificial
  probe
  misc_feature (1)..(25): SEQ ID NO: 1582; WAN024DVJ_at; Start 433; Stop 457
gcagctaaagcaatggaaggtcgta

SEQ ID NO: 172902 - DNA, 25 bp, Artificial
  probe
  misc_feature (1)..(25): SEQ ID NO: 1582; WAN024DVJ_at; Start 486; Stop 510
tttagcaggtgcacaaaatttattg

SEQ ID NO: 172903 - DNA, 25 bp, Artificial
  probe
  misc_feature (1)..(25): SEQ ID NO: 1582; WAN024DVJ_at; Start 460; Stop 484
gcagttttactagcgaatcatggaa

SEQ ID NO: 172904 - DNA, 25 bp, Artificial
  probe
  misc_feature (1)..(25): SEQ ID NO: 1582; WAN024DVJ_at; Start 68; Stop 92
cagatttgacgaaaggaacaggtgg

SEQ ID NO: 172905 - DNA, 25 bp, Artificial
  probe
  misc_feature (1)..(25): SEQ ID NO: 1582; WAN024DVJ_at; Start 314; Stop 338
cagtattagcttgtctcagagaacc

SEQ ID NO: 172906 - DNA, 25 bp, Artificial
  probe
  misc_feature (1)..(25): SEQ ID NO: 1582; WAN024DVJ_at; Start 578; Stop 602
gagagccagtagttcttcctgatga

SEQ ID NO: 172907 - DNA, 25 bp, Artificial
  probe
  misc_feature (1)..(25): SEQ ID NO: 1582; WAN024DVJ_at; Start 103; Stop 127
gttttcgatcgtgaaaaacaattga

SEQ ID NO: 172908 - DNA, 25 bp, Artificial
  probe
  misc_feature (1)..(25): SEQ ID NO: 1582; WAN024DVJ_at; Start 320; Stop 344
tagcttgtctcagagaaccacttcc

SEQ ID NO: 172909 - DNA, 25 bp, Artificial
  probe
  misc_feature (1)..(25): SEQ ID NO: 1582; WAN024DVJ_at; Start 77; Stop 101
cgaaaggaacaggtgggaatctcag

SEQ ID NO: 172910 - DNA, 25 bp, Artificial
  probe
  misc_feature (1)..(25): SEQ ID NO: 1582; WAN024DVJ_at; Start 195; Stop 219
taatggaaatgttgtagagggagaa

SEQ ID NO: 172911 - DNA, 25 bp, Artificial
  probe
  misc_feature (1)..(25): SEQ ID NO: 1582; WAN024DVJ_at; Start 475; Stop 499
aatcatggaattttagcaggtgcac

SEQ ID NO: 172912 - DNA, 25 bp, Artificial
  probe
  misc_feature (1)..(25): SEQ ID NO: 1582; WAN024DVJ_at; Start 413; Stop 437
cgaaagaattggctgtgaatgcagc

SEQ ID NO: 172913 - DNA, 25 bp, Artificial
  probe
  misc_feature (1)..(25): SEQ ID NO: 1582; WAN024DVJ_at; Start 54; Stop 78
gaagctagtagaaacagatttgacg

SEQ ID NO: 172914 - DNA, 25 bp, Artificial
  probe
  misc_feature (1)..(25): SEQ ID NO: 1582; WAN024DVJ_at; Start 160; Stop 184
gaaatcaaagaatccgatattgtag

SEQ ID NO: 172915 - DNA, 25 bp, Artificial
  probe
  misc_feature (1)..(25): SEQ ID NO: 1582; WAN024DVJ_at; Start 251; Stop 275
tgattcaatatcaaactcgtgatga

SEQ ID NO: 172916 - DNA, 25 bp, Artificial
  probe
  misc_feature (1)..(25): SEQ ID NO: 1582; WAN024DVJ_at; Start 385; Stop 409
cgggtagctgagtatgcaacatatg

SEQ ID NO: 172917 - DNA, 25 bp, Artificial
  probe
  misc_feature (1)..(25): SEQ ID NO: 1582; WAN024DVJ_at; Start 377; Stop 401
aagatgttcgggtagctgagtatgc

SEQ ID NO: 172918 - DNA, 25 bp, Artificial
  probe
  misc_feature (1)..(25): SEQ ID NO: 1582; WAN024DVJ_at; Start 425; Stop 449
ctgtgaatgcagctaaagcaatgga

SEQ ID NO: 172919 - DNA, 25 bp, Artificial
  probe
  misc_feature (1)..(25): SEQ ID NO: 1582; WAN024DVJ_at; Start 361; Stop 385
attgcagtggcagggaaagatgttc

SEQ ID NO: 172920 - DNA, 25 bp, Artificial
  probe
  misc_feature (1)..(25): SEQ ID NO: 1582; WAN024DVJ_at; Start 173; Stop 197
ccgatattgtagtgatggatattaa

SEQ ID NO: 172921 - DNA, 25 bp, Artificial
  probe
  misc_feature (1)..(25): SEQ ID NO: 1582; WAN024DVJ_at; Start 629; Stop 653
ttaaaacatacggtcagagaaaata

SEQ ID NO: 172922 - DNA, 25 bp, Artificial
  probe
  misc_feature (1)..(25): SEQ ID NO: 1582; WAN024DVJ_at; Start 233; Stop 257
gcgaatggtatatgcatttgattca

SEQ ID NO: 172923 - DNA, 25 bp, Artificial
  probe
  misc_feature (1)..(25): SEQ ID NO: 1582; WAN024DVJ_at; Start 217; Stop 241
gaacgcttgccatctagcgaatggt

SEQ ID NO: 172924 - DNA, 25 bp, Artificial
  probe
  misc_feature (1)..(25): SEQ ID NO: 1582; WAN024DVJ_at; Start 352; Stop 376
cattatatgattgcagtggcaggga

SEQ ID NO: 172925 - DNA, 25 bp, Artificial
  probe
  misc_feature (1)..(25): SEQ ID NO: 1582; WAN024DVJ_at; Start 562; Stop 586
ttagctaagaattttggagagccag

SEQ ID NO: 172926 - DNA, 25 bp, Artificial
  probe
  misc_feature (1)..(25): SEQ ID NO: 1582; WAN024DVJ_at; Start 288; Stop 312
tatccatgctcatacaacttatgca

SEQ ID NO: 172927 - DNA, 25 bp, Artificial
  probe
  misc_feature (1)..(25): SEQ ID NO: 1582; WAN024DVJ_at; Start 274; Stop 298
gatatcgatgcaattatccatgctc

SEQ ID NO: 172928 - DNA, 25 bp, Artificial
  probe
  misc_feature (1)..(25): SEQ ID NO: 1582; WAN024DVJ_at; Start 122; Stop 146
aattgatggcaattaccccgtcggg

SEQ ID NO: 172929 - DNA, 25 bp, Artificial
  probe
  misc_feature (1)..(25): SEQ ID NO: 1582; WAN024DVJ_at; Start 262; Stop 286
caaactcgtgatgatatcgatgcaa

SEQ ID NO: 172930 - DNA, 25 bp, Artificial
  probe
  misc_feature (1)..(25): SEQ ID NO: 1582; WAN024DVJ_at; Start 17; Stop 41
tgtcagatgtaaaacaagaattaat

SEQ ID NO: 172931 - DNA, 25 bp, Artificial
  probe
  misc_feature (1)..(25): SEQ ID NO: 1582; WAN024DVJ_at; Start 587; Stop 611
tagttcttcctgatgaggagatgga

SEQ ID NO: 172932 - DNA, 25 bp, Artificial
  probe
  misc_feature (1)..(25): SEQ ID NO: 1582; WAN024DVJ_at; Start 448; Stop 472
gaaggtcgtagagcagttttactag

SEQ ID NO: 172933 - DNA, 25 bp, Artificial
  probe
  misc_feature (1)..(25): SEQ ID NO: 1582; WAN024DVJ_at; Start 206; Stop 230
ttgtagagggagaacgcttgccatc

SEQ ID NO: 172934 - DNA, 25 bp, Artificial
  probe
  misc_feature (1)..(25): SEQ ID NO: 1582; WAN024DVJ_at; Start 300; Stop 324
tacaacttatgcaacagtattagct

SEQ ID NO: 172935 - DNA, 25 bp, Artificial
  probe
  misc_feature (1)..(25): SEQ ID NO: 6543; WAN024DVK_at; Start 995; Stop 1019
tactaccacagagatatattaaact

SEQ ID NO: 172936 - DNA, 25 bp, Artificial
  probe
  misc_feature (1)..(25): SEQ ID NO: 6543; WAN024DVK_at; Start 398; Stop 422
tatgggcactatatttagtatacgg

SEQ ID NO: 172937 - DNA, 25 bp, Artificial
  probe
  misc_feature (1)..(25): SEQ ID NO: 6543; WAN024DVK_at; Start 613; Stop 637
ctactaggaatcatatttaatatcg

SEQ ID NO: 172938 - DNA, 25 bp, Artificial
  probe
  misc_feature (1)..(25): SEQ ID NO: 6543; WAN024DVK_at; Start 886; Stop 910
ggaattggttctgtttttcttcata

SEQ ID NO: 172939 - DNA, 25 bp, Artificial
  probe
  misc_feature (1)..(25): SEQ ID NO: 6543; WAN024DVK_at; Start 226; Stop 250
tattatatgaagaagaaaacgatag

SEQ ID NO: 172940 - DNA, 25 bp, Artificial
  probe
  misc_feature (1)..(25): SEQ ID NO: 6543; WAN024DVK_at; Start 320; Stop 344
tacgtgttcccactacattgtttaa

SEQ ID NO: 172941 - DNA, 25 bp, Artificial
  probe
  misc_feature (1)..(25): SEQ ID NO: 6543; WAN024DVK_at; Start 78; Stop 102
tactggtttatttgattctgggaaa

SEQ ID NO: 172942 - DNA, 25 bp, Artificial
  probe
  misc_feature (1)..(25): SEQ ID NO: 6543; WAN024DVK_at; Start 310; Stop 334
ggaggatcggtacgtgttcccacta

SEQ ID NO: 172943 - DNA, 25 bp, Artificial
  probe
  misc_feature (1)..(25): SEQ ID NO: 6543; WAN024DVK_at; Start 295; Stop 319
ttacagaaaatagcgggaggatcgg

SEQ ID NO: 172944 - DNA, 25 bp, Artificial
  probe
  misc_feature (1)..(25): SEQ ID NO: 6543; WAN024DVK_at; Start 152; Stop 176
tattccatattccagtattctttgc

SEQ ID NO: 172945 - DNA, 25 bp, Artificial
  probe
  misc_feature (1)..(25): SEQ ID NO: 6543; WAN024DVK_at; Start 552; Stop 576
catgttgggttctgtattaaaaaca

SEQ ID NO: 172946 - DNA, 25 bp, Artificial
  probe
  misc_feature (1)..(25): SEQ ID NO: 6543; WAN024DVK_at; Start 383; Stop 407
ggtatttgtatacattatgggcact

SEQ ID NO: 172947 - DNA, 25 bp, Artificial
  probe
  misc_feature (1)..(25): SEQ ID NO: 6543; WAN024DVK_at; Start 14; Stop 38
gaataaactggatagattttgggaa

SEQ ID NO: 172948 - DNA, 25 bp, Artificial
  probe
  misc_feature (1)..(25): SEQ ID NO: 6543; WAN024DVK_at; Start 864; Stop 888
tcgaattctaatgttaaaaatggga

SEQ ID NO: 172949 - DNA, 25 bp, Artificial
  probe
  misc_feature (1)..(25): SEQ ID NO: 6543; WAN024DVK_at; Start 669; Stop 693
tgtatatggtaaaataataacggac

SEQ ID NO: 172950 - DNA, 25 bp, Artificial
  probe
  misc_feature (1)..(25): SEQ ID NO: 6543; WAN024DVK_at; Start 47; Stop 71
caatatttctagtagtcataggtca

SEQ ID NO: 172951 - DNA, 25 bp, Artificial
  probe
  misc_feature (1)..(25): SEQ ID NO: 6543; WAN024DVK_at; Start 953; Stop 977
caaccaatgtattgaagaaaattcc

SEQ ID NO: 172952 - DNA, 25 bp, Artificial
  probe
  misc_feature (1)..(25): SEQ ID NO: 6543; WAN024DVK_at; Start 541; Stop 565
ggagtaattttcatgttgggttctg

SEQ ID NO: 172953 - DNA, 25 bp, Artificial
  probe
  misc_feature (1)..(25): SEQ ID NO: 6543; WAN024DVK_at; Start 244; Stop 268
acgatagtattaggattaccgtata

SEQ ID NO: 172954 - DNA, 25 bp, Artificial
  probe
  misc_feature (1)..(25): SEQ ID NO: 6543; WAN024DVK_at; Start 690; Stop 714
ggactataactatcctagatggtgg

SEQ ID NO: 172955 - DNA, 25 bp, Artificial
  probe
  misc_feature (1)..(25): SEQ ID NO: 6543; WAN024DVK_at; Start 63; Stop 87
cataggtcatgtgtttactggttta

SEQ ID NO: 172956 - DNA, 25 bp, Artificial
  probe
  misc_feature (1)..(25): SEQ ID NO: 6543; WAN024DVK_at; Start 117; Stop 141
caaatggttatccatagttattgca

SEQ ID NO: 172957 - DNA, 25 bp, Artificial
  probe
  misc_feature (1)..(25): SEQ ID NO: 6543; WAN024DVK_at; Start 930; Stop 954
gggctggtatttatcaatacttgca

SEQ ID NO: 172958 - DNA, 25 bp, Artificial
  probe
  misc_feature (1)..(25): SEQ ID NO: 6543; WAN024DVK_at; Start 456; Stop 480
tctttttatgattagtatactcgga

SEQ ID NO: 172959 - DNA, 25 bp, Artificial
  probe
  misc_feature (1)..(25): SEQ ID NO: 6543; WAN024DVK_at; Start 33; Stop 57
tgggaaagggttcgcaatatttcta

SEQ ID NO: 172960 - DNA, 25 bp, Artificial
  probe
  misc_feature (1)..(25): SEQ ID NO: 6543; WAN024DVK_at; Start 717; Stop 741
tattggatacacaggtaatgttatc

SEQ ID NO: 172961 - DNA, 25 bp, Artificial
  probe
  misc_feature (1)..(25): SEQ ID NO: 6543; WAN024DVK_at; Start 912; Stop 936
tgttattggtattgtcttgggctgg

SEQ ID NO: 172962 - DNA, 25 bp, Artificial
  probe
  misc_feature (1)..(25): SEQ ID NO: 6543; WAN024DVK_at; Start 838; Stop 862
ttccattcaccaatttgtagtatga

SEQ ID NO: 172963 - DNA, 25 bp, Artificial
  probe
  misc_feature (1)..(25): SEQ ID NO: 6543; WAN024DVK_at; Start 824; Stop 848
tagggattctaattttccattcacc

SEQ ID NO: 172964 - DNA, 25 bp, Artificial
  probe
  misc_feature (1)..(25): SEQ ID NO: 6543; WAN024DVK_at; Start 703; Stop 727
cctagatggtggattattggataca

SEQ ID NO: 172965 - DNA, 25 bp, Artificial
  probe
  misc_feature (1)..(25): SEQ ID NO: 6543; WAN024DVK_at; Start 596; Stop 620
gatttagaaacataattctactagg

SEQ ID NO: 172966 - DNA, 25 bp, Artificial
  probe
  misc_feature (1)..(25): SEQ ID NO: 6543; WAN024DVK_at; Start 105; Stop 129
tacaagtgatgccaaatggttatcc

SEQ ID NO: 172967 - DNA, 25 bp, Artificial
  probe
  misc_feature (1)..(25): SEQ ID NO: 6543; WAN024DVK_at; Start 93; Stop 117
ttctgggaaatttacaagtgatgcc

SEQ ID NO: 172968 - DNA, 25 bp, Artificial
  probe
  misc_feature (1)..(25): SEQ ID NO: 6543; WAN024DVK_at; Start 360; Stop 384
taaagaaccattaggagttgtatgg

SEQ ID NO: 172969 - DNA, 25 bp, Artificial
  probe
  misc_feature (1)..(25): SEQ ID NO: 6671; WAN024DVL_at; Start 28; Stop 52
ggaattagctctactttacttcata

SEQ ID NO: 172970 - DNA, 25 bp, Artificial
  probe
  misc_feature (1)..(25): SEQ ID NO: 6671; WAN024DVL_at; Start 64; Stop 88
attgttttgggctggcatttatcca

SEQ ID NO: 172971 - DNA, 25 bp, Artificial
  probe
  misc_feature (1)..(25): SEQ ID NO: 6671; WAN024DVL_at; Start 78; Stop 102
gcatttatccatcctagcaacctat

SEQ ID NO: 172972 - DNA, 25 bp, Artificial
  probe
  misc_feature (1)..(25): SEQ ID NO: 6671; WAN024DVL_at; Start 29; Stop 53
gaattagctctactttacttcatat

SEQ ID NO: 172973 - DNA, 25 bp, Artificial
  probe
  misc_feature (1)..(25): SEQ ID NO: 6671; WAN024DVL_at; Start 56; Stop 80
ttatcggaattgttttgggctggca

SEQ ID NO: 172974 - DNA, 25 bp, Artificial
  probe
  misc_feature (1)..(25): SEQ ID NO: 6671; WAN024DVL_at; Start 51; Stop 75
tattgttatcggaattgttttgggc

SEQ ID NO: 172975 - DNA, 25 bp, Artificial
  probe
  misc_feature (1)..(25): SEQ ID NO: 6671; WAN024DVL_at; Start 18; Stop 42
gttgaaagtgggaattagctctact

SEQ ID NO: 172976 - DNA, 25 bp, Artificial
  probe
  misc_feature (1)..(25): SEQ ID NO: 6671; WAN024DVL_at; Start 27; Stop 51
gggaattagctctactttacttcat

SEQ ID NO: 172977 - DNA, 25 bp, Artificial
  probe
  misc_feature (1)..(25): SEQ ID NO: 6671; WAN024DVL_at; Start 79; Stop 103
catttatccatcctagcaacctata

SEQ ID NO: 172978 - DNA, 25 bp, Artificial
  probe
  misc_feature (1)..(25): SEQ ID NO: 6671; WAN024DVL_at; Start 19; Stop 43
ttgaaagtgggaattagctctactt

SEQ ID NO: 172979 - DNA, 25 bp, Artificial
  probe
  misc_feature (1)..(25): SEQ ID NO: 6671; WAN024DVL_at; Start 70; Stop 94
ttgggctggcatttatccatcctag

SEQ ID NO: 172980 - DNA, 25 bp, Artificial
  probe
  misc_feature (1)..(25): SEQ ID NO: 6671; WAN024DVL_at; Start 6; Stop 30
tctaattctgatgttgaaagtggga

SEQ ID NO: 172981 - DNA, 25 bp, Artificial
  probe
  misc_feature (1)..(25): SEQ ID NO: 6671; WAN024DVL_at; Start 59; Stop 83
tcggaattgttttgggctggcattt

SEQ ID NO: 172982 - DNA, 25 bp, Artificial
  probe
  misc_feature (1)..(25): SEQ ID NO: 6671; WAN024DVL_at; Start 40; Stop 64
actttacttcatattgttatcggaa

SEQ ID NO: 172983 - DNA, 25 bp, Artificial
  probe
  misc_feature (1)..(25): SEQ ID NO: 6671; WAN024DVL_at; Start 67; Stop 91
gttttgggctggcatttatccatcc

SEQ ID NO: 172984 - DNA, 25 bp, Artificial
  probe
  misc_feature (1)..(25): SEQ ID NO: 6671; WAN024DVL_at; Start 60; Stop 84
cggaattgttttgggctggcattta

SEQ ID NO: 172985 - DNA, 25 bp, Artificial
  probe
  misc_feature (1)..(25): SEQ ID NO: 6671; WAN024DVL_at; Start 71; Stop 95
tgggctggcatttatccatcctagc

SEQ ID NO: 172986 - DNA, 25 bp, Artificial
  probe
  misc_feature (1)..(25): SEQ ID NO: 6671; WAN024DVL_at; Start 72; Stop 96
gggctggcatttatccatcctagca

SEQ ID NO: 172987 - DNA, 25 bp, Artificial
  probe
  misc_feature (1)..(25): SEQ ID NO: 6671; WAN024DVL_at; Start 75; Stop 99
ctggcatttatccatcctagcaacc

SEQ ID NO: 172988 - DNA, 25 bp, Artificial
  probe
  misc_feature (1)..(25): SEQ ID NO: 6671; WAN024DVL_at; Start 68; Stop 92
ttttgggctggcatttatccatcct

SEQ ID NO: 172989 - DNA, 25 bp, Artificial
  probe
  misc_feature (1)..(25): SEQ ID NO: 6671; WAN024DVL_at; Start 3; Stop 27
gattctaattctgatgttgaaagtg

SEQ ID NO: 172990 - DNA, 25 bp, Artificial
  probe
  misc_feature (1)..(25): SEQ ID NO: 6671; WAN024DVL_at; Start 54; Stop 78
tgttatcggaattgttttgggctgg

SEQ ID NO: 172991 - DNA, 25 bp, Artificial
  probe
  misc_feature (1)..(25): SEQ ID NO: 6671; WAN024DVL_at; Start 58; Stop 82
atcggaattgttttgggctggcatt

SEQ ID NO: 172992 - DNA, 25 bp, Artificial
  probe
  misc_feature (1)..(25): SEQ ID NO: 6671; WAN024DVL_at; Start 77; Stop 101
ggcatttatccatcctagcaaccta

SEQ ID NO: 172993 - DNA, 25 bp, Artificial
  probe
  misc_feature (1)..(25): SEQ ID NO: 6671; WAN024DVL_at; Start 33; Stop 57
tagctctactttacttcatattgtt

SEQ ID NO: 172994 - DNA, 25 bp, Artificial
  probe
  misc_feature (1)..(25): SEQ ID NO: 6671; WAN024DVL_at; Start 23; Stop 47
aagtgggaattagctctactttact

SEQ ID NO: 172995 - DNA, 25 bp, Artificial
  probe
  misc_feature (1)..(25): SEQ ID NO: 6671; WAN024DVL_at; Start 55; Stop 79
gttatcggaattgttttgggctggc

SEQ ID NO: 172996 - DNA, 25 bp, Artificial
  probe
  misc_feature (1)..(25): SEQ ID NO: 6671; WAN024DVL_at; Start 39; Stop 63
tactttacttcatattgttatcgga

SEQ ID NO: 172997 - DNA, 25 bp, Artificial
  probe
  misc_feature (1)..(25): SEQ ID NO: 6671; WAN024DVL_at; Start 44; Stop 68
tacttcatattgttatcggaattgt

SEQ ID NO: 172998 - DNA, 25 bp, Artificial
  probe
  misc_feature (1)..(25): SEQ ID NO: 6671; WAN024DVL_at; Start 69; Stop 93
tttgggctggcatttatccatccta

SEQ ID NO: 172999 - DNA, 25 bp, Artificial
  probe
  misc_feature (1)..(25): SEQ ID NO: 6671; WAN024DVL_at; Start 57; Stop 81
tatcggaattgttttgggctggcat

SEQ ID NO: 173000 - DNA, 25 bp, Artificial
  probe
  misc_feature (1)..(25): SEQ ID NO: 6671; WAN024DVL_at; Start 65; Stop 89
ttgttttgggctggcatttatccat

SEQ ID NO: 173001 - DNA, 25 bp, Artificial
  probe
  misc_feature (1)..(25): SEQ ID NO: 6671; WAN024DVL_at; Start 21; Stop 45
gaaagtgggaattagctctacttta

SEQ ID NO: 173002 - DNA, 25 bp, Artificial
  probe
  misc_feature (1)..(25): SEQ ID NO: 6671; WAN024DVL_at; Start 25; Stop 49
gtgggaattagctctactttacttc

SEQ ID NO: 173003 - DNA, 25 bp, Artificial
  probe
  misc_feature (1)..(25): SEQ ID NO: 992; WAN024DVM_at; Start 114; Stop 138
tcaattgcaaatgatgtgttattat

SEQ ID NO: 173004 - DNA, 25 bp, Artificial
  probe
  misc_feature (1)..(25): SEQ ID NO: 992; WAN024DVM_at; Start 113; Stop 137
ttcaattgcaaatgatgtgttatta

SEQ ID NO: 173005 - DNA, 25 bp, Artificial
  probe
  misc_feature (1)..(25): SEQ ID NO: 992; WAN024DVM_at; Start 111; Stop 135
ttttcaattgcaaatgatgtgttat

SEQ ID NO: 173006 - DNA, 25 bp, Artificial
  probe
  misc_feature (1)..(25): SEQ ID NO: 992; WAN024DVM_at; Start 115; Stop 139
caattgcaaatgatgtgttattatt

SEQ ID NO: 173007 - DNA, 25 bp, Artificial
  probe
  misc_feature (1)..(25): SEQ ID NO: 992; WAN024DVM_at; Start 112; Stop 136
tttcaattgcaaatgatgtgttatt

SEQ ID NO: 173008 - DNA, 25 bp, Artificial
  probe
  misc_feature (1)..(25): SEQ ID NO: 5825; WAN024DVN_at; Start 340; Stop 364
tatgattcaaaaatcaatttagaag

SEQ ID NO: 173009 - DNA, 25 bp, Artificial
  probe
  misc_feature (1)..(25): SEQ ID NO: 5825; WAN024DVN_at; Start 99; Stop 123
gacaacaaatgatagagttaggaca

SEQ ID NO: 173010 - DNA, 25 bp, Artificial
  probe
  misc_feature (1)..(25): SEQ ID NO: 5825; WAN024DVN_at; Start 196; Stop 220
gactcaaatcaagaggttatcgttt

SEQ ID NO: 173011 - DNA, 25 bp, Artificial
  probe
  misc_feature (1)..(25): SEQ ID NO: 5825; WAN024DVN_at; Start 28; Stop 52
ggaattttagttgccagtcatggta

SEQ ID NO: 173012 - DNA, 25 bp, Artificial
  probe
  misc_feature (1)..(25): SEQ ID NO: 5825; WAN024DVN_at; Start 318; Stop 342
cctagtggaattaatatcaagttat

SEQ ID NO: 173013 - DNA, 25 bp, Artificial
  probe
  misc_feature (1)..(25): SEQ ID NO: 5825; WAN024DVN_at; Start 222; Stop 246
gactgacttgattggaggaagtcct

SEQ ID NO: 173014 - DNA, 25 bp, Artificial
  probe
  misc_feature (1)..(25): SEQ ID NO: 5825; WAN024DVN_at; Start 55; Stop 79
tttgctagcggagctctcatgaccg

SEQ ID NO: 173015 - DNA, 25 bp, Artificial
  probe
  misc_feature (1)..(25): SEQ ID NO: 5825; WAN024DVN_at; Start 77; Stop 101
ccgcagaaatgtttgttggtgagac

SEQ ID NO: 173016 - DNA, 25 bp, Artificial
  probe
  misc_feature (1)..(25): SEQ ID NO: 5825; WAN024DVN_at; Start 64; Stop 88
ggagctctcatgaccgcagaaatgt

SEQ ID NO: 173017 - DNA, 25 bp, Artificial
  probe
  misc_feature (1)..(25): SEQ ID NO: 5825; WAN024DVN_at; Start 122; Stop 146
cattaggtttgatgcctggagagaa

SEQ ID NO: 173018 - DNA, 25 bp, Artificial
  probe
  misc_feature (1)..(25): SEQ ID NO: 5825; WAN024DVN_at; Start 234; Stop 258
tggaggaagtcctaataatgtggct

SEQ ID NO: 173019 - DNA, 25 bp, Artificial
  probe
  misc_feature (1)..(25): SEQ ID NO: 5825; WAN024DVN_at; Start 312; Stop 336
ccctctcctagtggaattaatatca

SEQ ID NO: 173020 - DNA, 25 bp, Artificial
  probe
  misc_feature (1)..(25): SEQ ID NO: 5825; WAN024DVN_at; Start 80; Stop 104
cagaaatgtttgttggtgagacaac

SEQ ID NO: 173021 - DNA, 25 bp, Artificial
  probe
  misc_feature (1)..(25): SEQ ID NO: 5825; WAN024DVN_at; Start 302; Stop 326
ggtttaatatccctctcctagtgga

SEQ ID NO: 173022 - DNA, 25 bp, Artificial
  probe
  misc_feature (1)..(25): SEQ ID NO: 5825; WAN024DVN_at; Start 46; Stop 70
catggtaattttgctagcggagctc

SEQ ID NO: 173023 - DNA, 25 bp, Artificial
  probe
  misc_feature (1)..(25): SEQ ID NO: 5825; WAN024DVN_at; Start 113; Stop 137
gagttaggacattaggtttgatgcc

SEQ ID NO: 173024 - DNA, 25 bp, Artificial
  probe
  misc_feature (1)..(25): SEQ ID NO: 5825; WAN024DVN_at; Start 379; Stop 403
gctcaaaatagtttgtttaatgtta

SEQ ID NO: 173025 - DNA, 25 bp, Artificial
  probe
  misc_feature (1)..(25): SEQ ID NO: 5825; WAN024DVN_at; Start 136; Stop 160
cctggagagaatattgtagagtttg

SEQ ID NO: 173026 - DNA, 25 bp, Artificial
  probe
  misc_feature (1)..(25): SEQ ID NO: 5825; WAN024DVN_at; Start 406; Stop 430
caacaacttaacgtagaggaggaag

SEQ ID NO: 173027 - DNA, 25 bp, Artificial
  probe
  misc_feature (1)..(25): SEQ ID NO: 5825; WAN024DVN_at; Start 131; Stop 155
tgatgcctggagagaatattgtaga

SEQ ID NO: 173028 - DNA, 25 bp, Artificial
  probe
  misc_feature (1)..(25): SEQ ID NO: 5825; WAN024DVN_at; Start 42; Stop 66
cagtcatggtaattttgctagcgga

SEQ ID NO: 173029 - DNA, 25 bp, Artificial
  probe
  misc_feature (1)..(25): SEQ ID NO: 5825; WAN024DVN_at; Start 119; Stop 143
ggacattaggtttgatgcctggaga

SEQ ID NO: 173030 - DNA, 25 bp, Artificial
  probe
  misc_feature (1)..(25): SEQ ID NO: 5825; WAN024DVN_at; Start 92; Stop 116
ttggtgagacaacaaatgatagagt

SEQ ID NO: 173031 - DNA, 25 bp, Artificial
  probe
  misc_feature (1)..(25): SEQ ID NO: 5825; WAN024DVN_at; Start 216; Stop 240
cgttttgactgacttgattggagga

SEQ ID NO: 173032 - DNA, 25 bp, Artificial
  probe
  misc_feature (1)..(25): SEQ ID NO: 5825; WAN024DVN_at; Start 243; Stop 267
tcctaataatgtggctttgtcacgg

SEQ ID NO: 173033 - DNA, 25 bp, Artificial
  probe
  misc_feature (1)..(25): SEQ ID NO: 5825; WAN024DVN_at; Start 22; Stop 46
aatagaggaattttagttgccagtc

SEQ ID NO: 173034 - DNA, 25 bp, Artificial
  probe
  misc_feature (1)..(25): SEQ ID NO: 5825; WAN024DVN_at; Start 279; Stop 303
ggattcagttgatattgtaacaggg

SEQ ID NO: 173035 - DNA, 25 bp, Artificial
  probe
  misc_feature (1)..(25): SEQ ID NO: 5825; WAN024DVN_at; Start 294; Stop 318
tgtaacagggtttaatatccctctc

SEQ ID NO: 173036 - DNA, 25 bp, Artificial
  probe
  misc_feature (1)..(25): SEQ ID NO: 5825; WAN024DVN_at; Start 60; Stop 84
tagcggagctctcatgaccgcagaa

SEQ ID NO: 173037 - DNA, 25 bp, Artificial
  probe
  misc_feature (1)..(25): SEQ ID NO: 5825; WAN024DVN_at; Start 249; Stop 273
taatgtggctttgtcacggttttta

SEQ ID NO: 173038 - DNA, 25 bp, Artificial
  probe
  misc_feature (1)..(25): SEQ ID NO: 5825; WAN024DVN_at; Start 49; Stop 73
ggtaattttgctagcggagctctca

SEQ ID NO: 173039 - DNA, 25 bp, Artificial
  probe
  misc_feature (1)..(25): SEQ ID NO: 5825; WAN024DVN_at; Start 71; Stop 95
tcatgaccgcagaaatgtttgttgg

SEQ ID NO: 173040 - DNA, 25 bp, Artificial
  probe
  misc_feature (1)..(25): SEQ ID NO: 5825; WAN024DVN_at; Start 205; Stop 229
caagaggttatcgttttgactgact

SEQ ID NO: 173041 - DNA, 25 bp, Artificial
  probe
  misc_feature (1)..(25): SEQ ID NO: 5825; WAN024DVN_at; Start 187; Stop 211
gaactgttagactcaaatcaagagg

SEQ ID NO: 173042 - DNA, 25 bp, Artificial
  probe
  misc_feature (1)..(25): SEQ ID NO: 1603; WAN024DVO_at; Start 800; Stop 824
caagaacttcctatttattagcgga

SEQ ID NO: 173043 - DNA, 25 bp, Artificial
  probe
  misc_feature (1)..(25): SEQ ID NO: 1603; WAN024DVO_at; Start 187; Stop 211
tacggaaatagaacaattgcgactg

SEQ ID NO: 173044 - DNA, 25 bp, Artificial
  probe
  misc_feature (1)..(25): SEQ ID NO: 1603; WAN024DVO_at; Start 201; Stop 225
aattgcgactgttaaacgagaagga

SEQ ID NO: 173045 - DNA, 25 bp, Artificial
  probe
  misc_feature (1)..(25): SEQ ID NO: 1603; WAN024DVO_at; Start 606; Stop 630
ggaattactacctcatatcaagcca

SEQ ID NO: 173046 - DNA, 25 bp, Artificial
  probe
  misc_feature (1)..(25): SEQ ID NO: 1603; WAN024DVO_at; Start 284; Stop 308
ttctggtaactatagcttatcttgc

SEQ ID NO: 173047 - DNA, 25 bp, Artificial
  probe
  misc_feature (1)..(25): SEQ ID NO: 1603; WAN024DVO_at; Start 856; Stop 880
gaggtaacaattttatacgtgatga

SEQ ID NO: 173048 - DNA, 25 bp, Artificial
  probe
  misc_feature (1)..(25): SEQ ID NO: 1603; WAN024DVO_at; Start 1063; Stop 1087
gattatgtagtgtctctaattgcgg

SEQ ID NO: 173049 - DNA, 25 bp, Artificial
  probe
  misc_feature (1)..(25): SEQ ID NO: 1603; WAN024DVO_at; Start 1303; Stop 1327
cagttaccatacaatataatgagtc

SEQ ID NO: 173050 - DNA, 25 bp, Artificial
  probe
  misc_feature (1)..(25): SEQ ID NO: 1603; WAN024DVO_at; Start 490; Stop 514
caaggcacagatttatggaaataca

SEQ ID NO: 173051 - DNA, 25 bp, Artificial
  probe
  misc_feature (1)..(25): SEQ ID NO: 1603; WAN024DVO_at; Start 438; Stop 462
gaatacattagtcaaacttttagga

SEQ ID NO: 173052 - DNA, 25 bp, Artificial
  probe
  misc_feature (1)..(25): SEQ ID NO: 1603; WAN024DVO_at; Start 476; Stop 500
ttttatgtgtgcgtcaaggcacaga

SEQ ID NO: 173053 - DNA, 25 bp, Artificial
  probe
  misc_feature (1)..(25): SEQ ID NO: 1603; WAN024DVO_at; Start 124; Stop 148
cattcttttactatgtcggttgcac

SEQ ID NO: 173054 - DNA, 25 bp, Artificial
  probe
  misc_feature (1)..(25): SEQ ID NO: 1603; WAN024DVO_at; Start 420; Stop 444
taagcaaatcgtttttaggaataca

SEQ ID NO: 173055 - DNA, 25 bp, Artificial
  probe
  misc_feature (1)..(25): SEQ ID NO: 1603; WAN024DVO_at; Start 701; Stop 725
taatggttgatgtaaagcaggttgg

SEQ ID NO: 173056 - DNA, 25 bp, Artificial
  probe
  misc_feature (1)..(25): SEQ ID NO: 1603; WAN024DVO_at; Start 718; Stop 742
caggttggattttatgacaatgcag

SEQ ID NO: 173057 - DNA, 25 bp, Artificial
  probe
  misc_feature (1)..(25): SEQ ID NO: 1603; WAN024DVO_at; Start 1169; Stop 1193
cagaatttgtattgtctggaatgca

SEQ ID NO: 173058 - DNA, 25 bp, Artificial
  probe
  misc_feature (1)..(25): SEQ ID NO: 1603; WAN024DVO_at; Start 1088; Stop 1112
gggctgttgttaatctagtgctaaa

SEQ ID NO: 173059 - DNA, 25 bp, Artificial
  probe
  misc_feature (1)..(25): SEQ ID NO: 1603; WAN024DVO_at; Start 1187; Stop 1211
gaatgcagttttggtcagtaagaag

SEQ ID NO: 173060 - DNA, 25 bp, Artificial
  probe
  misc_feature (1)..(25): SEQ ID NO: 1603; WAN024DVO_at; Start 754; Stop 778
gaaattcctaaagctttgattgcag

SEQ ID NO: 173061 - DNA, 25 bp, Artificial
  probe
  misc_feature (1)..(25): SEQ ID NO: 1603; WAN024DVO_at; Start 59; Stop 83
ttgcagctcccttgataacttctcc

SEQ ID NO: 173062 - DNA, 25 bp, Artificial
  probe
  misc_feature (1)..(25): SEQ ID NO: 1603; WAN024DVO_at; Start 513; Stop 537
cacatttataaacggatcagtaact

SEQ ID NO: 173063 - DNA, 25 bp, Artificial
  probe
  misc_feature (1)..(25): SEQ ID NO: 1603; WAN024DVO_at; Start 526; Stop 550
ggatcagtaactttagttggccaac

SEQ ID NO: 173064 - DNA, 25 bp, Artificial
  probe
  misc_feature (1)..(25): SEQ ID NO: 1603; WAN024DVO_at; Start 987; Stop 1011
gtctccggcttttgtcttctctgta

SEQ ID NO: 173065 - DNA, 25 bp, Artificial
  probe
  misc_feature (1)..(25): SEQ ID NO: 1603; WAN024DVO_at; Start 1125; Stop 1149
aaaaccttttggtgctatgggagca

SEQ ID NO: 173066 - DNA, 25 bp, Artificial
  probe
  misc_feature (1)..(25): SEQ ID NO: 1603; WAN024DVO_at; Start 815; Stop 839
tattagcggaaggacagaaagaaaa

SEQ ID NO: 173067 - DNA, 25 bp, Artificial
  probe
  misc_feature (1)..(25): SEQ ID NO: 1603; WAN024DVO_at; Start 899; Stop 923
tgtttgggctaatatcggtatctga

SEQ ID NO: 173068 - DNA, 25 bp, Artificial
  probe
  misc_feature (1)..(25): SEQ ID NO: 1603; WAN024DVO_at; Start 1012; Stop 1036
ttaggaaatatcattaggactcagt

SEQ ID NO: 173069 - DNA, 25 bp, Artificial
  probe
  misc_feature (1)..(25): SEQ ID NO: 1603; WAN024DVO_at; Start 217; Stop 241
cgagaaggaaaggatattctatcaa

SEQ ID NO: 173070 - DNA, 25 bp, Artificial
  probe
  misc_feature (1)..(25): SEQ ID NO: 1603; WAN024DVO_at; Start 641; Stop 665
tttttattcctgtactagccattag

SEQ ID NO: 173071 - DNA, 25 bp, Artificial
  probe
  misc_feature (1)..(25): SEQ ID NO: 1603; WAN024DVO_at; Start 840; Stop 864
gagtaaatactacatagaggtaaca

SEQ ID NO: 173072 - DNA, 25 bp, Artificial
  probe
  misc_feature (1)..(25): SEQ ID NO: 1603; WAN024DVO_at; Start 1243; Stop 1267
ggtttgatattctacctatttggtc

SEQ ID NO: 173073 - DNA, 25 bp, Artificial
  probe
  misc_feature (1)..(25): SEQ ID NO: 1603; WAN024DVO_at; Start 971; Stop 995
gattgatttctgctatgtctccggc

SEQ ID NO: 173074 - DNA, 25 bp, Artificial
  probe
  misc_feature (1)..(25): SEQ ID NO: 1603; WAN024DVO_at; Start 323; Stop 347
gggcagtacattacaaagttattgc

SEQ ID NO: 173075 - DNA, 25 bp, Artificial
  probe
  misc_feature (1)..(25): SEQ ID NO: 1603; WAN024DVO_at; Start 251; Stop 275
ggagtatctactctatccagttgat

SEQ ID NO: 173076 - DNA, 25 bp, Artificial
  probe
  misc_feature (1)..(25): SEQ ID NO: 5751; WAN024DVP_at; Start 296; Stop 320
caatatcatacttttttagccacgt

SEQ ID NO: 173077 - DNA, 25 bp, Artificial
  probe
  misc_feature (1)..(25): SEQ ID NO: 5751; WAN024DVP_at; Start 41; Stop 65
cattttcctccgttttactcatctg

SEQ ID NO: 173078 - DNA, 25 bp, Artificial
  probe
  misc_feature (1)..(25): SEQ ID NO: 5751; WAN024DVP_at; Start 3; Stop 27
gtcttcttcacctagagctacacct

SEQ ID NO: 173079 - DNA, 25 bp, Artificial
  probe
  misc_feature (1)..(25): SEQ ID NO: 5751; WAN024DVP_at; Start 278; Stop 302
taacaatgataacttgctcaatatc

SEQ ID NO: 173080 - DNA, 25 bp, Artificial
  probe
  misc_feature (1)..(25): SEQ ID NO: 5751; WAN024DVP_at; Start 267; Stop 291
gatgcgatcattaacaatgataact

SEQ ID NO: 173081 - DNA, 25 bp, Artificial
  probe
  misc_feature (1)..(25): SEQ ID NO: 5751; WAN024DVP_at; Start 124; Stop 148
ggatttgtatatatcagcattgttc

SEQ ID NO: 173082 - DNA, 25 bp, Artificial
  probe
  misc_feature (1)..(25): SEQ ID NO: 5751; WAN024DVP_at; Start 285; Stop 309
gataacttgctcaatatcatacttt

SEQ ID NO: 173083 - DNA, 25 bp, Artificial
  probe
  misc_feature (1)..(25): SEQ ID NO: 5751; WAN024DVP_at; Start 227; Stop 251
cagaaatctttaaaatagattgtcg

SEQ ID NO: 173084 - DNA, 25 bp, Artificial
  probe
  misc_feature (1)..(25): SEQ ID NO: 5751; WAN024DVP_at; Start 144; Stop 168
tgttctcttttttattggcacagag

SEQ ID NO: 173085 - DNA, 25 bp, Artificial
  probe
  misc_feature (1)..(25): SEQ ID NO: 5751; WAN024DVP_at; Start 221; Stop 245
ccggtgcagaaatctttaaaataga

SEQ ID NO: 173086 - DNA, 25 bp, Artificial
  probe
  misc_feature (1)..(25): SEQ ID NO: 5751; WAN024DVP_at; Start 304; Stop 328
tacttttttagccacgtagtgacaa

SEQ ID NO: 173087 - DNA, 25 bp, Artificial
  probe
  misc_feature (1)..(25): SEQ ID NO: 5751; WAN024DVP_at; Start 54; Stop 78
tttactcatctgtcctacattgagg

SEQ ID NO: 173088 - DNA, 25 bp, Artificial
  probe
  misc_feature (1)..(25): SEQ ID NO: 5751; WAN024DVP_at; Start 14; Stop 38
ctagagctacacctcccgttacctt

SEQ ID NO: 173089 - DNA, 25 bp, Artificial
  probe
  misc_feature (1)..(25): SEQ ID NO: 5751; WAN024DVP_at; Start 156; Stop 180
tattggcacagagtttaaaacttcc

SEQ ID NO: 173090 - DNA, 25 bp, Artificial
  probe
  misc_feature (1)..(25): SEQ ID NO: 5751; WAN024DVP_at; Start 51; Stop 75
cgttttactcatctgtcctacattg

SEQ ID NO: 173091 - DNA, 25 bp, Artificial
  probe
  misc_feature (1)..(25): SEQ ID NO: 5751; WAN024DVP_at; Start 306; Stop 330
cttttttagccacgtagtgacaact

SEQ ID NO: 173092 - DNA, 25 bp, Artificial
  probe
  misc_feature (1)..(25): SEQ ID NO: 5751; WAN024DVP_at; Start 262; Stop 286
tctgagatgcgatcattaacaatga

SEQ ID NO: 173093 - DNA, 25 bp, Artificial
  probe
  misc_feature (1)..(25): SEQ ID NO: 5751; WAN024DVP_at; Start 90; Stop 114
taaatttccttcaatagaatcatac

SEQ ID NO: 173094 - DNA, 25 bp, Artificial
  probe
  misc_feature (1)..(25): SEQ ID NO: 5751; WAN024DVP_at; Start 1; Stop 25
ttgtcttcttcacctagagctacac

SEQ ID NO: 173095 - DNA, 25 bp, Artificial
  probe
  misc_feature (1)..(25): SEQ ID NO: 5751; WAN024DVP_at; Start 138; Stop 162
cagcattgttctcttttttattggc

SEQ ID NO: 173096 - DNA, 25 bp, Artificial
  probe
  misc_feature (1)..(25): SEQ ID NO: 5751; WAN024DVP_at; Start 59; Stop 83
tcatctgtcctacattgaggtactc

SEQ ID NO: 173097 - DNA, 25 bp, Artificial
  probe
  misc_feature (1)..(25): SEQ ID NO: 5751; WAN024DVP_at; Start 274; Stop 298
tcattaacaatgataacttgctcaa

SEQ ID NO: 173098 - DNA, 25 bp, Artificial
  probe
  misc_feature (1)..(25): SEQ ID NO: 5751; WAN024DVP_at; Start 101; Stop 125
caatagaatcatacacatcttttgg

SEQ ID NO: 173099 - DNA, 25 bp, Artificial
  probe
  misc_feature (1)..(25): SEQ ID NO: 5751; WAN024DVP_at; Start 309; Stop 333
ttttagccacgtagtgacaacttga

SEQ ID NO: 173100 - DNA, 25 bp, Artificial
  probe
  misc_feature (1)..(25): SEQ ID NO: 5751; WAN024DVP_at; Start 114; Stop 138
cacatcttttggatttgtatatatc

SEQ ID NO: 173101 - DNA, 25 bp, Artificial
  probe
  misc_feature (1)..(25): SEQ ID NO: 5751; WAN024DVP_at; Start 62; Stop 86
tctgtcctacattgaggtactccaa

SEQ ID NO: 173102 - DNA, 25 bp, Artificial
  probe
  misc_feature (1)..(25): SEQ ID NO: 5751; WAN024DVP_at; Start 106; Stop 130
gaatcatacacatcttttggatttg

SEQ ID NO: 173103 - DNA, 25 bp, Artificial
  probe
  misc_feature (1)..(25): SEQ ID NO: 5751; WAN024DVP_at; Start 161; Stop 185
gcacagagtttaaaacttccacaaa

SEQ ID NO: 173104 - DNA, 25 bp, Artificial
  probe
  misc_feature (1)..(25): SEQ ID NO: 5751; WAN024DVP_at; Start 46; Stop 70
tcctccgttttactcatctgtccta

SEQ ID NO: 173105 - DNA, 25 bp, Artificial
  probe
  misc_feature (1)..(25): SEQ ID NO: 5751; WAN024DVP_at; Start 218; Stop 242
ctaccggtgcagaaatctttaaaat

SEQ ID NO: 173106 - DNA, 25 bp, Artificial
  probe
  misc_feature (1)..(25): SEQ ID NO: 5751; WAN024DVP_at; Start 257; Stop 281
tatcttctgagatgcgatcattaac

SEQ ID NO: 173107 - DNA, 25 bp, Artificial
  probe
  misc_feature (1)..(25): SEQ ID NO: 5751; WAN024DVP_at; Start 71; Stop 95
cattgaggtactccaattttaaatt

SEQ ID NO: 173108 - DNA, 25 bp, Artificial
  probe
  misc_feature (1)..(25): SEQ ID NO: 5751; WAN024DVP_at; Start 302; Stop 326
catacttttttagccacgtagtgac

SEQ ID NO: 173109 - DNA, 25 bp, Artificial
  probe
  misc_feature (1)..(25): SEQ ID NO: 5751; WAN024DVP_at; Start 65; Stop 89
gtcctacattgaggtactccaattt

SEQ ID NO: 173110 - DNA, 25 bp, Artificial
  probe
  misc_feature (1)..(25): SEQ ID NO: 2917; WAN024DVQ_at; Start 259; Stop 283
gatgtgtatgattctattgaaggaa

SEQ ID NO: 173111 - DNA, 25 bp, Artificial
  probe
  misc_feature (1)..(25): SEQ ID NO: 2917; WAN024DVQ_at; Start 8; Stop 32
tagagtttgttcgtattgatgaccg

SEQ ID NO: 173112 - DNA, 25 bp, Artificial
  probe
  misc_feature (1)..(25): SEQ ID NO: 2917; WAN024DVQ_at; Start 36; Stop 60
ggtacatggtcaagttgtcactacg

SEQ ID NO: 173113 - DNA, 25 bp, Artificial
  probe
  misc_feature (1)..(25): SEQ ID NO: 2917; WAN024DVQ_at; Start 133; Stop 157
tctattttaaagatttctgcaccgg

SEQ ID NO: 173114 - DNA, 25 bp, Artificial
  probe
  misc_feature (1)..(25): SEQ ID NO: 2917; WAN024DVQ_at; Start 308; Stop 332
taggacagatgagtaaaacggagga

SEQ ID NO: 173115 - DNA, 25 bp, Artificial
  probe
  misc_feature (1)..(25): SEQ ID NO: 2917; WAN024DVQ_at; Start 69; Stop 93
aaagtatgatattgagcaagttatc

SEQ ID NO: 173116 - DNA, 25 bp, Artificial
  probe
  misc_feature (1)..(25): SEQ ID NO: 2917; WAN024DVQ_at; Start 424; Stop 448
caaatggttcctaatgataaagtta

SEQ ID NO: 173117 - DNA, 25 bp, Artificial
  probe
  misc_feature (1)..(25): SEQ ID NO: 2917; WAN024DVQ_at; Start 303; Stop 327
caatgtaggacagatgagtaaaacg

SEQ ID NO: 173118 - DNA, 25 bp, Artificial
  probe
  misc_feature (1)..(25): SEQ ID NO: 2917; WAN024DVQ_at; Start 93; Stop 117
cattgttaatgatcgcatctcagaa

SEQ ID NO: 173119 - DNA, 25 bp, Artificial
  probe
  misc_feature (1)..(25): SEQ ID NO: 2917; WAN024DVQ_at; Start 295; Stop 319
gagtacctcaatgtaggacagatga

SEQ ID NO: 173120 - DNA, 25 bp, Artificial
  probe
  misc_feature (1)..(25): SEQ ID NO: 2917; WAN024DVQ_at; Start 85; Stop 109
caagttatcattgttaatgatcgca

SEQ ID NO: 173121 - DNA, 25 bp, Artificial
  probe
  misc_feature (1)..(25): SEQ ID NO: 2917; WAN024DVQ_at; Start 237; Stop 261
gctgatatatacaaatccaaaagat

SEQ ID NO: 173122 - DNA, 25 bp, Artificial
  probe
  misc_feature (1)..(25): SEQ ID NO: 2917; WAN024DVQ_at; Start 40; Stop 64
catggtcaagttgtcactacgtggc

SEQ ID NO: 173123 - DNA, 25 bp, Artificial
  probe
  misc_feature (1)..(25): SEQ ID NO: 2917; WAN024DVQ_at; Start 400; Stop 424
gataagggaacgagagttgaaattc

SEQ ID NO: 173124 - DNA, 25 bp, Artificial
  probe
  misc_feature (1)..(25): SEQ ID NO: 2917; WAN024DVQ_at; Start 253; Stop 277
ccaaaagatgtgtatgattctattg

SEQ ID NO: 173125 - DNA, 25 bp, Artificial
  probe
  misc_feature (1)..(25): SEQ ID NO: 2917; WAN024DVQ_at; Start 211; Stop 235
tctgtgccaataaaaaagagaacaa

SEQ ID NO: 173126 - DNA, 25 bp, Artificial
  probe
  misc_feature (1)..(25): SEQ ID NO: 2917; WAN024DVQ_at; Start 99; Stop 123
taatgatcgcatctcagaagataaa

SEQ ID NO: 173127 - DNA, 25 bp, Artificial
  probe
  misc_feature (1)..(25): SEQ ID NO: 2917; WAN024DVQ_at; Start 46; Stop 70
caagttgtcactacgtggctaaaaa

SEQ ID NO: 173128 - DNA, 25 bp, Artificial
  probe
  misc_feature (1)..(25): SEQ ID NO: 2917; WAN024DVQ_at; Start 230; Stop 254
gaacaatgctgatatatacaaatcc

SEQ ID NO: 173129 - DNA, 25 bp, Artificial
  probe
  misc_feature (1)..(25): SEQ ID NO: 2917; WAN024DVQ_at; Start 206; Stop 230
taaactctgtgccaataaaaaagag

SEQ ID NO: 173130 - DNA, 25 bp, Artificial
  probe
  misc_feature (1)..(25): SEQ ID NO: 2917; WAN024DVQ_at; Start 287; Stop 311
taaaattggagtacctcaatgtagg

SEQ ID NO: 173131 - DNA, 25 bp, Artificial
  probe
  misc_feature (1)..(25): SEQ ID NO: 2917; WAN024DVQ_at; Start 195; Stop 219
tgtggaagttttaaactctgtgcca

SEQ ID NO: 173132 - DNA, 25 bp, Artificial
  probe
  misc_feature (1)..(25): SEQ ID NO: 2917; WAN024DVQ_at; Start 136; Stop 160
attttaaagatttctgcaccggtag

SEQ ID NO: 173133 - DNA, 25 bp, Artificial
  probe
  misc_feature (1)..(25): SEQ ID NO: 2917; WAN024DVQ_at; Start 199; Stop 223
gaagttttaaactctgtgccaataa

SEQ ID NO: 173134 - DNA, 25 bp, Artificial
  probe
  misc_feature (1)..(25): SEQ ID NO: 2917; WAN024DVQ_at; Start 15; Stop 39
tgttcgtattgatgaccgtctggta

SEQ ID NO: 173135 - DNA, 25 bp, Artificial
  probe
  misc_feature (1)..(25): SEQ ID NO: 2917; WAN024DVQ_at; Start 410; Stop 434
cgagagttgaaattcaaatggttcc

SEQ ID NO: 173136 - DNA, 25 bp, Artificial
  probe
  misc_feature (1)..(25): SEQ ID NO: 2917; WAN024DVQ_at; Start 21; Stop 45
tattgatgaccgtctggtacatggt

SEQ ID NO: 173137 - DNA, 25 bp, Artificial
  probe
  misc_feature (1)..(25): SEQ ID NO: 2917; WAN024DVQ_at; Start 433; Stop 457
cctaatgataaagttacaatgttgg

SEQ ID NO: 173138 - DNA, 25 bp, Artificial
  probe
  misc_feature (1)..(25): SEQ ID NO: 2917; WAN024DVQ_at; Start 58; Stop 82
acgtggctaaaaaagtatgatattg

SEQ ID NO: 173139 - DNA, 25 bp, Artificial
  probe
  misc_feature (1)..(25): SEQ ID NO: 2917; WAN024DVQ_at; Start 390; Stop 414
gaaaatagttgataagggaacgaga

SEQ ID NO: 173140 - DNA, 25 bp, Artificial
  probe
  misc_feature (1)..(25): SEQ ID NO: 2917; WAN024DVQ_at; Start 31; Stop 55
cgtctggtacatggtcaagttgtca

SEQ ID NO: 173141 - DNA, 25 bp, Artificial
  probe
  misc_feature (1)..(25): SEQ ID NO: 2917; WAN024DVQ_at; Start 340; Stop 364
aaggtaacgggaggtgtagctctag

SEQ ID NO: 173142 - DNA, 25 bp, Artificial
  probe
  misc_feature (1)..(25): SEQ ID NO: 2917; WAN024DVQ_at; Start 354; Stop 378
tgtagctctaggtgaagaagacaaa

SEQ ID NO: 173143 - DNA, 25 bp, Artificial
  probe
  misc_feature (1)..(25): SEQ ID NO: 2917; WAN024DVQ_at; Start 313; Stop 337
cagatgagtaaaacggaggaaaatg

SEQ ID NO: 173144 - DNA, 25 bp, Artificial
  probe
  misc_feature (1)..(25): SEQ ID NO: 2710; WAN024DVR_at; Start 7; Stop 31
gacattcctccatacacagaacaaa

SEQ ID NO: 173145 - DNA, 25 bp, Artificial
  probe
  misc_feature (1)..(25): SEQ ID NO: 2710; WAN024DVR_at; Start 12; Stop 36
tcctccatacacagaacaaatgaat

SEQ ID NO: 173146 - DNA, 25 bp, Artificial
  probe
  misc_feature (1)..(25): SEQ ID NO: 2710; WAN024DVR_at; Start 134; Stop 158
cctgcataacgattggtggaacctt

SEQ ID NO: 173147 - DNA, 25 bp, Artificial
  probe
  misc_feature (1)..(25): SEQ ID NO: 2710; WAN024DVR_at; Start 111; Stop 135
taaagcacctgcagagttaagtccc

SEQ ID NO: 173148 - DNA, 25 bp, Artificial
  probe
  misc_feature (1)..(25): SEQ ID NO: 2710; WAN024DVR_at; Start 162; Stop 186
aaacaagtctgccacatattcccct

SEQ ID NO: 173149 - DNA, 25 bp, Artificial
  probe
  misc_feature (1)..(25): SEQ ID NO: 2710; WAN024DVR_at; Start 98; Stop 122
caattgaaggtagtaaagcacctgc

SEQ ID NO: 173150 - DNA, 25 bp, Artificial
  probe
  misc_feature (1)..(25): SEQ ID NO: 2710; WAN024DVR_at; Start 36; Stop 60
tccaatcaacaagaatacccacata

SEQ ID NO: 173151 - DNA, 25 bp, Artificial
  probe
  misc_feature (1)..(25): SEQ ID NO: 2710; WAN024DVR_at; Start 68; Stop 92
tgagcatcatatttaaaagcatacc

SEQ ID NO: 173152 - DNA, 25 bp, Artificial
  probe
  misc_feature (1)..(25): SEQ ID NO: 2710; WAN024DVR_at; Start 183; Stop 207
ccctccaagcataatagctaggaaa

SEQ ID NO: 173153 - DNA, 25 bp, Artificial
  probe
  misc_feature (1)..(25): SEQ ID NO: 2710; WAN024DVR_at; Start 191; Stop 215
gcataatagctaggaaaattggtac

SEQ ID NO: 173154 - DNA, 25 bp, Artificial
  probe
  misc_feature (1)..(25): SEQ ID NO: 2710; WAN024DVR_at; Start 130; Stop 154
agtccctgcataacgattggtggaa

SEQ ID NO: 173155 - DNA, 25 bp, Artificial
  probe
  misc_feature (1)..(25): SEQ ID NO: 2710; WAN024DVR_at; Start 113; Stop 137
aagcacctgcagagttaagtccctg

SEQ ID NO: 173156 - DNA, 25 bp, Artificial
  probe
  misc_feature (1)..(25): SEQ ID NO: 2710; WAN024DVR_at; Start 128; Stop 152
taagtccctgcataacgattggtgg

SEQ ID NO: 173157 - DNA, 25 bp, Artificial
  probe
  misc_feature (1)..(25): SEQ ID NO: 2710; WAN024DVR_at; Start 32; Stop 56
tgaatccaatcaacaagaataccca

SEQ ID NO: 173158 - DNA, 25 bp, Artificial
  probe
  misc_feature (1)..(25): SEQ ID NO: 2710; WAN024DVR_at; Start 3; Stop 27
ggttgacattcctccatacacagaa

SEQ ID NO: 173159 - DNA, 25 bp, Artificial
  probe
  misc_feature (1)..(25): SEQ ID NO: 2710; WAN024DVR_at; Start 150; Stop 174
tggaaccttagcaaacaagtctgcc

SEQ ID NO: 173160 - DNA, 25 bp, Artificial
  probe
  misc_feature (1)..(25): SEQ ID NO: 2710; WAN024DVR_at; Start 152; Stop 176
gaaccttagcaaacaagtctgccac

SEQ ID NO: 173161 - DNA, 25 bp, Artificial
  probe
  misc_feature (1)..(25): SEQ ID NO: 2710; WAN024DVR_at; Start 106; Stop 130
ggtagtaaagcacctgcagagttaa

SEQ ID NO: 173162 - DNA, 25 bp, Artificial
  probe
  misc_feature (1)..(25): SEQ ID NO: 2710; WAN024DVR_at; Start 51; Stop 75
tacccacatatttttcttgagcatc

SEQ ID NO: 173163 - DNA, 25 bp, Artificial
  probe
  misc_feature (1)..(25): SEQ ID NO: 2710; WAN024DVR_at; Start 17; Stop 41
catacacagaacaaatgaatccaat

SEQ ID NO: 173164 - DNA, 25 bp, Artificial
  probe
  misc_feature (1)..(25): SEQ ID NO: 2710; WAN024DVR_at; Start 115; Stop 139
gcacctgcagagttaagtccctgca

SEQ ID NO: 173165 - DNA, 25 bp, Artificial
  probe
  misc_feature (1)..(25): SEQ ID NO: 2710; WAN024DVR_at; Start 178; Stop 202
tattcccctccaagcataatagcta

SEQ ID NO: 173166 - DNA, 25 bp, Artificial
  probe
  misc_feature (1)..(25): SEQ ID NO: 2710; WAN024DVR_at; Start 103; Stop 127
gaaggtagtaaagcacctgcagagt

SEQ ID NO: 173167 - DNA, 25 bp, Artificial
  probe
  misc_feature (1)..(25): SEQ ID NO: 2710; WAN024DVR_at; Start 158; Stop 182
tagcaaacaagtctgccacatattc

SEQ ID NO: 173168 - DNA, 25 bp, Artificial
  probe
  misc_feature (1)..(25): SEQ ID NO: 2710; WAN024DVR_at; Start 124; Stop 148
gagttaagtccctgcataacgattg

SEQ ID NO: 173169 - DNA, 25 bp, Artificial
  probe
  misc_feature (1)..(25): SEQ ID NO: 2710; WAN024DVR_at; Start 148; Stop 172
ggtggaaccttagcaaacaagtctg

SEQ ID NO: 173170 - DNA, 25 bp, Artificial
  probe
  misc_feature (1)..(25): SEQ ID NO: 2710; WAN024DVR_at; Start 144; Stop 168
gattggtggaaccttagcaaacaag

SEQ ID NO: 173171 - DNA, 25 bp, Artificial
  probe
  misc_feature (1)..(25): SEQ ID NO: 2710; WAN024DVR_at; Start 54; Stop 78
ccacatatttttcttgagcatcata

SEQ ID NO: 173172 - DNA, 25 bp, Artificial
  probe
  misc_feature (1)..(25): SEQ ID NO: 2710; WAN024DVR_at; Start 194; Stop 218
taatagctaggaaaattggtacaat

SEQ ID NO: 173173 - DNA, 25 bp, Artificial
  probe
  misc_feature (1)..(25): SEQ ID NO: 2710; WAN024DVR_at; Start 96; Stop 120
accaattgaaggtagtaaagcacct

SEQ ID NO: 173174 - DNA, 25 bp, Artificial
  probe
  misc_feature (1)..(25): SEQ ID NO: 2710; WAN024DVR_at; Start 140; Stop 164
taacgattggtggaaccttagcaaa

SEQ ID NO: 173175 - DNA, 25 bp, Artificial
  probe
  misc_feature (1)..(25): SEQ ID NO: 2710; WAN024DVR_at; Start 138; Stop 162
cataacgattggtggaaccttagca

SEQ ID NO: 173176 - DNA, 25 bp, Artificial
  probe
  misc_feature (1)..(25): SEQ ID NO: 2710; WAN024DVR_at; Start 121; Stop 145
gcagagttaagtccctgcataacga

SEQ ID NO: 173177 - DNA, 25 bp, Artificial
  probe
  misc_feature (1)..(25): SEQ ID NO: 2710; WAN024DVR_at; Start 71; Stop 95
gcatcatatttaaaagcataccaaa

SEQ ID NO: 173178 - DNA, 25 bp, Artificial
  probe
  misc_feature (1)..(25): SEQ ID NO: 2075; WAN024DVS_at; Start 494; Stop 518
cagacttgtttgctaaggttccacc

SEQ ID NO: 173179 - DNA, 25 bp, Artificial
  probe
  misc_feature (1)..(25): SEQ ID NO: 2075; WAN024DVS_at; Start 90; Stop 114
gttagttacaagtgcaatggttggc

SEQ ID NO: 173180 - DNA, 25 bp, Artificial
  probe
  misc_feature (1)..(25): SEQ ID NO: 2075; WAN024DVS_at; Start 507; Stop 531
taaggttccaccaatcgttatgcag

SEQ ID NO: 173181 - DNA, 25 bp, Artificial
  probe
  misc_feature (1)..(25): SEQ ID NO: 2075; WAN024DVS_at; Start 669; Stop 693
gatctcactagttggtattgcggta

SEQ ID NO: 173182 - DNA, 25 bp, Artificial
  probe
  misc_feature (1)..(25): SEQ ID NO: 2075; WAN024DVS_at; Start 61; Stop 85
aatggaccgttatttatgattcacc

SEQ ID NO: 173183 - DNA, 25 bp, Artificial
  probe
  misc_feature (1)..(25): SEQ ID NO: 2075; WAN024DVS_at; Start 16; Stop 40
gcattactggtgacattagttggga

SEQ ID NO: 173184 - DNA, 25 bp, Artificial
  probe
  misc_feature (1)..(25): SEQ ID NO: 2075; WAN024DVS_at; Start 167; Stop 191
taacttggctcggtgtaacaggtat

SEQ ID NO: 173185 - DNA, 25 bp, Artificial
  probe
  misc_feature (1)..(25): SEQ ID NO: 2075; WAN024DVS_at; Start 75; Stop 99
tatgattcaccgtccgttagttaca

SEQ ID NO: 173186 - DNA, 25 bp, Artificial
  probe
  misc_feature (1)..(25): SEQ ID NO: 2075; WAN024DVS_at; Start 531; Stop 555
gggacttaactctgcaggtgcttta

SEQ ID NO: 173187 - DNA, 25 bp, Artificial
  probe
  misc_feature (1)..(25): SEQ ID NO: 2075; WAN024DVS_at; Start 639; Stop 663
ttctgtgtatggaggaatgtcaacc

SEQ ID NO: 173188 - DNA, 25 bp, Artificial
  probe
  misc_feature (1)..(25): SEQ ID NO: 2075; WAN024DVS_at; Start 653; Stop 677
gaatgtcaaccattgggatctcact

SEQ ID NO: 173189 - DNA, 25 bp, Artificial
  probe
  misc_feature (1)..(25): SEQ ID NO: 2075; WAN024DVS_at; Start 27; Stop 51
gacattagttgggattattgccact

SEQ ID NO: 173190 - DNA, 25 bp, Artificial
  probe
  misc_feature (1)..(25): SEQ ID NO: 2075; WAN024DVS_at; Start 3; Stop 27
gctattcacacaagcattactggtg

SEQ ID NO: 173191 - DNA, 25 bp, Artificial
  probe
  misc_feature (1)..(25): SEQ ID NO: 2075; WAN024DVS_at; Start 208; Stop 232
ccagatactatttcaggtgcgatta

SEQ ID NO: 173192 - DNA, 25 bp, Artificial
  probe
  misc_feature (1)..(25): SEQ ID NO: 2075; WAN024DVS_at; Start 121; Stop 145
ttaggagatttcacccaaggtgttc

SEQ ID NO: 173193 - DNA, 25 bp, Artificial
  probe
  misc_feature (1)..(25): SEQ ID NO: 2075; WAN024DVS_at; Start 515; Stop 539
caccaatcgttatgcagggacttaa

SEQ ID NO: 173194 - DNA, 25 bp, Artificial
  probe
  misc_feature (1)..(25): SEQ ID NO: 2075; WAN024DVS_at; Start 151; Stop 175
ggttcagctcttgaattaacttggc

SEQ ID NO: 173195 - DNA, 25 bp, Artificial
  probe
  misc_feature (1)..(25): SEQ ID NO: 2075; WAN024DVS_at; Start 574; Stop 598
ggtatgcttttaaatatgatgctca

SEQ ID NO: 173196 - DNA, 25 bp, Artificial
  probe
  misc_feature (1)..(25): SEQ ID NO: 2075; WAN024DVS_at; Start 380; Stop 404
aaaacggagattattcaaagatcgg

SEQ ID NO: 173197 - DNA, 25 bp, Artificial
  probe
  misc_feature (1)..(25): SEQ ID NO: 2075; WAN024DVS_at; Start 459; Stop 483
tttcctagctattatgcttggaggg

SEQ ID NO: 173198 - DNA, 25 bp, Artificial
  probe
  misc_feature (1)..(25): SEQ ID NO: 2075; WAN024DVS_at; Start 740; Stop 764
caagtagtgatgttgaggaggatct

SEQ ID NO: 173199 - DNA, 25 bp, Artificial
  probe
  misc_feature (1)..(25): SEQ ID NO: 2075; WAN024DVS_at; Start 682; Stop 706
ggtattgcggtagcatacttctacg

SEQ ID NO: 173200 - DNA, 25 bp, Artificial
  probe
  misc_feature (1)..(25): SEQ ID NO: 2075; WAN024DVS_at; Start 724; Stop 748
ccacaagaaacaacttcaagtagtg

SEQ ID NO: 173201 - DNA, 25 bp, Artificial
  probe
  misc_feature (1)..(25): SEQ ID NO: 2075; WAN024DVS_at; Start 591; Stop 615
gatgctcaagaaaaatatgtgggta

SEQ ID NO: 173202 - DNA, 25 bp, Artificial
  probe
  misc_feature (1)..(25): SEQ ID NO: 2075; WAN024DVS_at; Start 45; Stop 69
tgccactattgactataatggaccg

SEQ ID NO: 173203 - DNA, 25 bp, Artificial
  probe
  misc_feature (1)..(25): SEQ ID NO: 2075; WAN024DVS_at; Start 364; Stop 388
gctgataatgatgctaaaaacggag

SEQ ID NO: 173204 - DNA, 25 bp, Artificial
  probe
  misc_feature (1)..(25): SEQ ID NO: 2075; WAN024DVS_at; Start 545; Stop 569
caggtgctttactaccttcaattgg

SEQ ID NO: 173205 - DNA, 25 bp, Artificial
  probe
  misc_feature (1)..(25): SEQ ID NO: 2075; WAN024DVS_at; Start 136; Stop 160
caaggtgttcttattggttcagctc

SEQ ID NO: 173206 - DNA, 25 bp, Artificial
  probe
  misc_feature (1)..(25): SEQ ID NO: 2075; WAN024DVS_at; Start 266; Stop 290
gagaaactgctggtatcgctatagc

SEQ ID NO: 173207 - DNA, 25 bp, Artificial
  probe
  misc_feature (1)..(25): SEQ ID NO: 2075; WAN024DVS_at; Start 281; Stop 305
tcgctatagcagttccaattgcagt

SEQ ID NO: 173208 - DNA, 25 bp, Artificial
  probe
  misc_feature (1)..(25): SEQ ID NO: 2075; WAN024DVS_at; Start 221; Stop 245
caggtgcgattattggtactgcatt

SEQ ID NO: 173209 - DNA, 25 bp, Artificial
  probe
  misc_feature (1)..(25): SEQ ID NO: 2075; WAN024DVS_at; Start 256; Stop 280
tctggtcaaggagaaactgctggta

SEQ ID NO: 173210 - DNA, 25 bp, Artificial
  probe
  misc_feature (1)..(25): SEQ ID NO: 2075; WAN024DVS_at; Start 313; Stop 337
caacagttggatgttcttgcaaaaa

SEQ ID NO: 173211 - DNA, 25 bp, Artificial
  probe
  misc_feature (1)..(25): SEQ ID NO: 2075; WAN024DVS_at; Start 695; Stop 719
catacttctacgatatgattggaag

SEQ ID NO: 173212 - DNA, 25 bp, Artificial
  probe
  misc_feature (1)..(25): SEQ ID NO: 1740; WAN024DVT_at; Start 137; Stop 161
tatacccagacaaagattcagcttc

SEQ ID NO: 173213 - DNA, 25 bp, Artificial
  probe
  misc_feature (1)..(25): SEQ ID NO: 1740; WAN024DVT_at; Start 337; Stop 361
tggctgacactagttcctatctgtt

SEQ ID NO: 173214 - DNA, 25 bp, Artificial
  probe
  misc_feature (1)..(25): SEQ ID NO: 1740; WAN024DVT_at; Start 222; Stop 246
tcttggagttacttccgctatggaa

SEQ ID NO: 173215 - DNA, 25 bp, Artificial
  probe
  misc_feature (1)..(25): SEQ ID NO: 1740; WAN024DVT_at; Start 534; Stop 558
tacgagtatggcgacagcattaggg

SEQ ID NO: 173216 - DNA, 25 bp, Artificial
  probe
  misc_feature (1)..(25): SEQ ID NO: 1740; WAN024DVT_at; Start 162; Stop 186
tcctgcaatgaaacgtcaccttgag

SEQ ID NO: 173217 - DNA, 25 bp, Artificial
  probe
  misc_feature (1)..(25): SEQ ID NO: 1740; WAN024DVT_at; Start 148; Stop 172
aaagattcagcttctcctgcaatga

SEQ ID NO: 173218 - DNA, 25 bp, Artificial
  probe
  misc_feature (1)..(25): SEQ ID NO: 1740; WAN024DVT_at; Start 45; Stop 69
caaacgaagttttatgtatggttct

SEQ ID NO: 173219 - DNA, 25 bp, Artificial
  probe
  misc_feature (1)..(25): SEQ ID NO: 1740; WAN024DVT_at; Start 548; Stop 572
cagcattagggctagtactagtggg

SEQ ID NO: 173220 - DNA, 25 bp, Artificial
  probe
  misc_feature (1)..(25): SEQ ID NO: 1740; WAN024DVT_at; Start 388; Stop 412
gacggcggtgctttaggtatcttta

SEQ ID NO: 173221 - DNA, 25 bp, Artificial
  probe
  misc_feature (1)..(25): SEQ ID NO: 1740; WAN024DVT_at; Start 480; Stop 504
taagggttctagtcttatccaagaa

SEQ ID NO: 173222 - DNA, 25 bp, Artificial
  probe
  misc_feature (1)..(25): SEQ ID NO: 1740; WAN024DVT_at; Start 191; Stop 215
tcaatactcatcaaacagcggcacc

SEQ ID NO: 173223 - DNA, 25 bp, Artificial
  probe
  misc_feature (1)..(25): SEQ ID NO: 1740; WAN024DVT_at; Start 262; Stop 286
gaaggtgcagcttcaattactggta

SEQ ID NO: 173224 - DNA, 25 bp, Artificial
  probe
  misc_feature (1)..(25): SEQ ID NO: 1740; WAN024DVT_at; Start 728; Stop 752
agaatccggttgtactaatctttag

SEQ ID NO: 173225 - DNA, 25 bp, Artificial
  probe
  misc_feature (1)..(25): SEQ ID NO: 1740; WAN024DVT_at; Start 743; Stop 767
taatctttagtgttatggctattgg

SEQ ID NO: 173226 - DNA, 25 bp, Artificial
  probe
  misc_feature (1)..(25): SEQ ID NO: 1740; WAN024DVT_at; Start 665; Stop 689
taattccaggatttatccctatggc

SEQ ID NO: 173227 - DNA, 25 bp, Artificial
  probe
  misc_feature (1)..(25): SEQ ID NO: 1740; WAN024DVT_at; Start 121; Stop 145
ccagtattgaaaaaactatacccag

SEQ ID NO: 173228 - DNA, 25 bp, Artificial
  probe
  misc_feature (1)..(25): SEQ ID NO: 1740; WAN024DVT_at; Start 206; Stop 230
cagcggcaccatttattcttggagt

SEQ ID NO: 173229 - DNA, 25 bp, Artificial
  probe
  misc_feature (1)..(25): SEQ ID NO: 1740; WAN024DVT_at; Start 61; Stop 85
tatggttcttcatggaactatgaga

SEQ ID NO: 173230 - DNA, 25 bp, Artificial
  probe
  misc_feature (1)..(25): SEQ ID NO: 1740; WAN024DVT_at; Start 82; Stop 106
gagagaatgcagaacctaggttttc

SEQ ID NO: 173231 - DNA, 25 bp, Artificial
  probe
  misc_feature (1)..(25): SEQ ID NO: 1740; WAN024DVT_at; Start 681; Stop 705
ccctatggctttgactttattaatg

SEQ ID NO: 173232 - DNA, 25 bp, Artificial
  probe
  misc_feature (1)..(25): SEQ ID NO: 1740; WAN024DVT_at; Start 100; Stop 124
ggttttctatatacaattcttccag

SEQ ID NO: 173233 - DNA, 25 bp, Artificial
  probe
  misc_feature (1)..(25): SEQ ID NO: 1740; WAN024DVT_at; Start 563; Stop 587
tactagtgggtggtttgattccatc

SEQ ID NO: 173234 - DNA, 25 bp, Artificial
  probe
  misc_feature (1)..(25): SEQ ID NO: 1740; WAN024DVT_at; Start 464; Stop 488
tgaaatatgggtatactaagggttc

SEQ ID NO: 173235 - DNA, 25 bp, Artificial
  probe
  misc_feature (1)..(25): SEQ ID NO: 1740; WAN024DVT_at; Start 73; Stop 97
tggaactatgagagaatgcagaacc

SEQ ID NO: 173236 - DNA, 25 bp, Artificial
  probe
  misc_feature (1)..(25): SEQ ID NO: 1740; WAN024DVT_at; Start 521; Stop 545
cattgaatcgcgttacgagtatggc

SEQ ID NO: 173237 - DNA, 25 bp, Artificial
  probe
  misc_feature (1)..(25): SEQ ID NO: 1740; WAN024DVT_at; Start 279; Stop 303
tactggtattaaagttggcttgatg

SEQ ID NO: 173238 - DNA, 25 bp, Artificial
  probe
  misc_feature (1)..(25): SEQ ID NO: 1740; WAN024DVT_at; Start 234; Stop 258
ttccgctatggaagaacaagaagga

SEQ ID NO: 173239 - DNA, 25 bp, Artificial
  probe
  misc_feature (1)..(25): SEQ ID NO: 1740; WAN024DVT_at; Start 626; Stop 650
gggaacttgttatttctgttcaaga

SEQ ID NO: 173240 - DNA, 25 bp, Artificial
  probe
  misc_feature (1)..(25): SEQ ID NO: 1740; WAN024DVT_at; Start 353; Stop 377
ctatctgttttagtattggtgcgtc

SEQ ID NO: 173241 - DNA, 25 bp, Artificial
  probe
  misc_feature (1)..(25): SEQ ID NO: 1740; WAN024DVT_at; Start 322; Stop 346
ggagatagtttgttctggctgacac

SEQ ID NO: 173242 - DNA, 25 bp, Artificial
  probe
  misc_feature (1)..(25): SEQ ID NO: 1740; WAN024DVT_at; Start 248; Stop 272
aacaagaaggaaatgaaggtgcagc

SEQ ID NO: 173243 - DNA, 25 bp, Artificial
  probe
  misc_feature (1)..(25): SEQ ID NO: 1740; WAN024DVT_at; Start 376; Stop 400
tcttattctaaagacggcggtgctt

SEQ ID NO: 173244 - DNA, 25 bp, Artificial
  probe
  misc_feature (1)..(25): SEQ ID NO: 1740; WAN024DVT_at; Start 507; Stop 531
taatacaaaaggaacattgaatcgc

SEQ ID NO: 173245 - DNA, 25 bp, Artificial
  probe
  misc_feature (1)..(25): SEQ ID NO: 1740; WAN024DVT_at; Start 306; Stop 330
gccactggctggtctaggagatagt

SEQ ID NO: 173246 - DNA, 25 bp, Artificial
  probe
  misc_feature (1)..(25): SEQ ID NO: 3873; WAN024DVU_at; Start 2072; Stop 2096
cagctttaccttctgcttggtcaga

SEQ ID NO: 173247 - DNA, 25 bp, Artificial
  probe
  misc_feature (1)..(25): SEQ ID NO: 3873; WAN024DVU_at; Start 1893; Stop 1917
tgcgagactatatcaaggtgaacct

SEQ ID NO: 173248 - DNA, 25 bp, Artificial
  probe
  misc_feature (1)..(25): SEQ ID NO: 3873; WAN024DVU_at; Start 1404; Stop 1428
gacaggtccaagtgtctcaccggaa

SEQ ID NO: 173249 - DNA, 25 bp, Artificial
  probe
  misc_feature (1)..(25): SEQ ID NO: 3873; WAN024DVU_at; Start 969; Stop 993
tggtttacctgccaatcttcaagga

SEQ ID NO: 173250 - DNA, 25 bp, Artificial
  probe
  misc_feature (1)..(25): SEQ ID NO: 3873; WAN024DVU_at; Start 1075; Stop 1099
ggtccatgtgatttaccagaagtag

SEQ ID NO: 173251 - DNA, 25 bp, Artificial
  probe
  misc_feature (1)..(25): SEQ ID NO: 3873; WAN024DVU_at; Start 1722; Stop 1746
taaaactccggaattagcagaagca

SEQ ID NO: 173252 - DNA, 25 bp, Artificial
  probe
  misc_feature (1)..(25): SEQ ID NO: 3873; WAN024DVU_at; Start 1130; Stop 1154
tgagagaaccgggaagactaaccgc

SEQ ID NO: 173253 - DNA, 25 bp, Artificial
  probe
  misc_feature (1)..(25): SEQ ID NO: 3873; WAN024DVU_at; Start 36; Stop 60
gaatgaagccttgccgattgggaac

SEQ ID NO: 173254 - DNA, 25 bp, Artificial
  probe
  misc_feature (1)..(25): SEQ ID NO: 3873; WAN024DVU_at; Start 1416; Stop 1440
tgtctcaccggaaaataaatatcgc

SEQ ID NO: 173255 - DNA, 25 bp, Artificial
  probe
  misc_feature (1)..(25): SEQ ID NO: 3873; WAN024DVU_at; Start 3; Stop 27
gaaattatggtataagaaagctgcc

SEQ ID NO: 173256 - DNA, 25 bp, Artificial
  probe
  misc_feature (1)..(25): SEQ ID NO: 3873; WAN024DVU_at; Start 458; Stop 482
gccgtatagtgtcatcagttcaaaa

SEQ ID NO: 173257 - DNA, 25 bp, Artificial
  probe
  misc_feature (1)..(25): SEQ ID NO: 3873; WAN024DVU_at; Start 1145; Stop 1169
gactaaccgctaagaaaatgtatgg

SEQ ID NO: 173258 - DNA, 25 bp, Artificial
  probe
  misc_feature (1)..(25): SEQ ID NO: 3873; WAN024DVU_at; Start 663; Stop 687
agttattcggaatgctacagaggta

SEQ ID NO: 173259 - DNA, 25 bp, Artificial
  probe
  misc_feature (1)..(25): SEQ ID NO: 3873; WAN024DVU_at; Start 1201; Stop 1225
gatggttttggcgatacggctcccc

SEQ ID NO: 173260 - DNA, 25 bp, Artificial
  probe
  misc_feature (1)..(25): SEQ ID NO: 3873; WAN024DVU_at; Start 1670; Stop 1694
gacacatttcacctctatttgggct

SEQ ID NO: 173261 - DNA, 25 bp, Artificial
  probe
  misc_feature (1)..(25): SEQ ID NO: 3873; WAN024DVU_at; Start 1309; Stop 1333
caagatgagcgtattcttacggaac

SEQ ID NO: 173262 - DNA, 25 bp, Artificial
  probe
  misc_feature (1)..(25): SEQ ID NO: 3873; WAN024DVU_at; Start 267; Stop 291
tcaaagccactatgaattacttggg

SEQ ID NO: 173263 - DNA, 25 bp, Artificial
  probe
  misc_feature (1)..(25): SEQ ID NO: 3873; WAN024DVU_at; Start 203; Stop 227
tagatggagaaattcagaaagccga

SEQ ID NO: 173264 - DNA, 25 bp, Artificial
  probe
  misc_feature (1)..(25): SEQ ID NO: 3873; WAN024DVU_at; Start 1906; Stop 1930
caaggtgaacctgcttataaccaga

SEQ ID NO: 173265 - DNA, 25 bp, Artificial
  probe
  misc_feature (1)..(25): SEQ ID NO: 3873; WAN024DVU_at; Start 1855; Stop 1879
caaacaggttggagtgctgcatggc

SEQ ID NO: 173266 - DNA, 25 bp, Artificial
  probe
  misc_feature (1)..(25): SEQ ID NO: 3873; WAN024DVU_at; Start 1524; Stop 1548
tggcattgcaaaacaattaggagac

SEQ ID NO: 173267 - DNA, 25 bp, Artificial
  probe
  misc_feature (1)..(25): SEQ ID NO: 3873; WAN024DVU_at; Start 2026; Stop 2050
tgtgaattattagtacagagccatc

SEQ ID NO: 173268 - DNA, 25 bp, Artificial
  probe
  misc_feature (1)..(25): SEQ ID NO: 3873; WAN024DVU_at; Start 1116; Stop 1140
tatgctcgaaagaatgagagaaccg

SEQ ID NO: 173269 - DNA, 25 bp, Artificial
  probe
  misc_feature (1)..(25): SEQ ID NO: 3873; WAN024DVU_at; Start 1389; Stop 1413
ggatggctacttgatgacaggtcca

SEQ ID NO: 173270 - DNA, 25 bp, Artificial
  probe
  misc_feature (1)..(25): SEQ ID NO: 3873; WAN024DVU_at; Start 574; Stop 598
tctgctggaggtagaaaaggtgttc

SEQ ID NO: 173271 - DNA, 25 bp, Artificial
  probe
  misc_feature (1)..(25): SEQ ID NO: 3873; WAN024DVU_at; Start 557; Stop 581
caattttaatgtcggcctctgctgg

SEQ ID NO: 173272 - DNA, 25 bp, Artificial
  probe
  misc_feature (1)..(25): SEQ ID NO: 3873; WAN024DVU_at; Start 1758; Stop 1782
tatcaataggagattatcaaacgct

SEQ ID NO: 173273 - DNA, 25 bp, Artificial
  probe
  misc_feature (1)..(25): SEQ ID NO: 3873; WAN024DVU_at; Start 728; Stop 752
tagatatttcttctcttcagggaga

SEQ ID NO: 173274 - DNA, 25 bp, Artificial
  probe
  misc_feature (1)..(25): SEQ ID NO: 3873; WAN024DVU_at; Start 248; Stop 272
tgtttgctaccccaagagatcaaag

SEQ ID NO: 173275 - DNA, 25 bp, Artificial
  probe
  misc_feature (1)..(25): SEQ ID NO: 3873; WAN024DVU_at; Start 108; Stop 132
tcaactaaacgatgagactatttgg

SEQ ID NO: 173276 - DNA, 25 bp, Artificial
  probe
  misc_feature (1)..(25): SEQ ID NO: 3873; WAN024DVU_at; Start 1738; Stop 1762
gcagaagcagctaaaatcactatca

SEQ ID NO: 173277 - DNA, 25 bp, Artificial
  probe
  misc_feature (1)..(25): SEQ ID NO: 3873; WAN024DVU_at; Start 947; Stop 971
taatatcgtctagtcaaccgaatgg

SEQ ID NO: 173278 - DNA, 25 bp, Artificial
  probe
  misc_feature (1)..(25): SEQ ID NO: 3873; WAN024DVU_at; Start 1841; Stop 1865
tgcatgctagtacacaaacaggttg

SEQ ID NO: 173279 - DNA, 25 bp, Artificial
  probe
  misc_feature (1)..(25): SEQ ID NO: 3873; WAN024DVU_at; Start 1165; Stop 1189
tatggagctagaggttttacagcac

SEQ ID NO: 173280 - DNA, 25 bp, Artificial
  probe
  misc_feature (1)..(25): SEQ ID NO: 5154; WAN024DVV_at; Start 199; Stop 223
tgcatatgctatattcaaattacca

SEQ ID NO: 173281 - DNA, 25 bp, Artificial
  probe
  misc_feature (1)..(25): SEQ ID NO: 5154; WAN024DVV_at; Start 279; Stop 303
tagacatctctaccattccattatg

SEQ ID NO: 173282 - DNA, 25 bp, Artificial
  probe
  misc_feature (1)..(25): SEQ ID NO: 5154; WAN024DVV_at; Start 317; Stop 341
gtataaacatgggtattctcatccc

SEQ ID NO: 173283 - DNA, 25 bp, Artificial
  probe
  misc_feature (1)..(25): SEQ ID NO: 5154; WAN024DVV_at; Start 122; Stop 146
aaattaccatttctgttaccatcca

SEQ ID NO: 173284 - DNA, 25 bp, Artificial
  probe
  misc_feature (1)..(25): SEQ ID NO: 5154; WAN024DVV_at; Start 59; Stop 83
ttcaaatcgacttcccaccaagagg

SEQ ID NO: 173285 - DNA, 25 bp, Artificial
  probe
  misc_feature (1)..(25): SEQ ID NO: 5154; WAN024DVV_at; Start 387; Stop 411
tctgaggtttatgaccagtatgccc

SEQ ID NO: 173286 - DNA, 25 bp, Artificial
  probe
  misc_feature (1)..(25): SEQ ID NO: 5154; WAN024DVV_at; Start 145; Stop 169
cacagctctattagggtctccattg

SEQ ID NO: 173287 - DNA, 25 bp, Artificial
  probe
  misc_feature (1)..(25): SEQ ID NO: 5154; WAN024DVV_at; Start 177; Stop 201
cagaactttgtgttgttggttttgc

SEQ ID NO: 173288 - DNA, 25 bp, Artificial
  probe
  misc_feature (1)..(25): SEQ ID NO: 5154; WAN024DVV_at; Start 269; Stop 293
tcagtatttatagacatctctacca

SEQ ID NO: 173289 - DNA, 25 bp, Artificial
  probe
  misc_feature (1)..(25): SEQ ID NO: 5154; WAN024DVV_at; Start 339; Stop 363
cccaattttctgtataagtataatg

SEQ ID NO: 173290 - DNA, 25 bp, Artificial
  probe
  misc_feature (1)..(25): SEQ ID NO: 5154; WAN024DVV_at; Start 225; Stop 249
cattaaatttatctggtgttgggaa

SEQ ID NO: 173291 - DNA, 25 bp, Artificial
  probe
  misc_feature (1)..(25): SEQ ID NO: 5154; WAN024DVV_at; Start 84; Stop 108
gattatctgccctagtgtgtgttac

SEQ ID NO: 173292 - DNA, 25 bp, Artificial
  probe
  misc_feature (1)..(25): SEQ ID NO: 5154; WAN024DVV_at; Start 112; Stop 136
accagagttaaaattaccatttctg

SEQ ID NO: 173293 - DNA, 25 bp, Artificial
  probe
  misc_feature (1)..(25): SEQ ID NO: 5154; WAN024DVV_at; Start 303; Stop 327
gattaaccgtaatggtataaacatg

SEQ ID NO: 173294 - DNA, 25 bp, Artificial
  probe
  misc_feature (1)..(25): SEQ ID NO: 5154; WAN024DVV_at; Start 369; Stop 393
tatcgccacttatatttatctgagg

SEQ ID NO: 173295 - DNA, 25 bp, Artificial
  probe
  misc_feature (1)..(25): SEQ ID NO: 5154; WAN024DVV_at; Start 1; Stop 25
ttgagtctcagcatctgtgcgatta

SEQ ID NO: 173296 - DNA, 25 bp, Artificial
  probe
  misc_feature (1)..(25): SEQ ID NO: 5154; WAN024DVV_at; Start 74; Stop 98
caccaagagggattatctgccctag

SEQ ID NO: 173297 - DNA, 25 bp, Artificial
  probe
  misc_feature (1)..(25): SEQ ID NO: 5154; WAN024DVV_at; Start 289; Stop 313
taccattccattatgattaaccgta

SEQ ID NO: 173298 - DNA, 25 bp, Artificial
  probe
  misc_feature (1)..(25): SEQ ID NO: 5154; WAN024DVV_at; Start 136; Stop 160
gttaccatccacagctctattaggg

SEQ ID NO: 173299 - DNA, 25 bp, Artificial
  probe
  misc_feature (1)..(25): SEQ ID NO: 5154; WAN024DVV_at; Start 309; Stop 333
ccgtaatggtataaacatgggtatt

SEQ ID NO: 173300 - DNA, 25 bp, Artificial
  probe
  misc_feature (1)..(25): SEQ ID NO: 5154; WAN024DVV_at; Start 354; Stop 378
aagtataatgatttttatcgccact

SEQ ID NO: 173301 - DNA, 25 bp, Artificial
  probe
  misc_feature (1)..(25): SEQ ID NO: 5154; WAN024DVV_at; Start 185; Stop 209
tgtgttgttggttttgcatatgcta

SEQ ID NO: 173302 - DNA, 25 bp, Artificial
  probe
  misc_feature (1)..(25): SEQ ID NO: 5154; WAN024DVV_at; Start 327; Stop 351
gggtattctcatcccaattttctgt

SEQ ID NO: 173303 - DNA, 25 bp, Artificial
  probe
  misc_feature (1)..(25): SEQ ID NO: 5154; WAN024DVV_at; Start 70; Stop 94
ttcccaccaagagggattatctgcc

SEQ ID NO: 173304 - DNA, 25 bp, Artificial
  probe
  misc_feature (1)..(25): SEQ ID NO: 5154; WAN024DVV_at; Start 206; Stop 230
gctatattcaaattaccatcattaa

SEQ ID NO: 173305 - DNA, 25 bp, Artificial
  probe
  misc_feature (1)..(25): SEQ ID NO: 5154; WAN024DVV_at; Start 7; Stop 31
ctcagcatctgtgcgattataaatt

SEQ ID NO: 173306 - DNA, 25 bp, Artificial
  probe
  misc_feature (1)..(25): SEQ ID NO: 5154; WAN024DVV_at; Start 141; Stop 165
catccacagctctattagggtctcc

SEQ ID NO: 173307 - DNA, 25 bp, Artificial
  probe
  misc_feature (1)..(25): SEQ ID NO: 5154; WAN024DVV_at; Start 164; Stop 188
ccattgtaatctacagaactttgtg

SEQ ID NO: 173308 - DNA, 25 bp, Artificial
  probe
  misc_feature (1)..(25): SEQ ID NO: 5154; WAN024DVV_at; Start 392; Stop 416
ggtttatgaccagtatgccctttta

SEQ ID NO: 173309 - DNA, 25 bp, Artificial
  probe
  misc_feature (1)..(25): SEQ ID NO: 5154; WAN024DVV_at; Start 156; Stop 180
tagggtctccattgtaatctacaga

SEQ ID NO: 173310 - DNA, 25 bp, Artificial
  probe
  misc_feature (1)..(25): SEQ ID NO: 5154; WAN024DVV_at; Start 233; Stop 257
ttatctggtgttgggaaagagactg

SEQ ID NO: 173311 - DNA, 25 bp, Artificial
  probe
  misc_feature (1)..(25): SEQ ID NO: 5154; WAN024DVV_at; Start 19; Stop 43
gcgattataaattttaacaagccca

SEQ ID NO: 173312 - DNA, 25 bp, Artificial
  probe
  misc_feature (1)..(25): SEQ ID NO: 5154; WAN024DVV_at; Start 65; Stop 89
tcgacttcccaccaagagggattat

SEQ ID NO: 173313 - DNA, 25 bp, Artificial
  probe
  misc_feature (1)..(25): SEQ ID NO: 5154; WAN024DVV_at; Start 373; Stop 397
gccacttatatttatctgaggttta

SEQ ID NO: 173314 - DNA, 25 bp, Artificial
  probe
  misc_feature (1)..(25): SEQ ID NO: 386; WAN024DVW-3_at; Start 86; Stop 110
taaacctcagataaatataagtggc

SEQ ID NO: 173315 - DNA, 25 bp, Artificial
  probe
  misc_feature (1)..(25): SEQ ID NO: 386; WAN024DVW-3_at; Start 1174; Stop 1198
gacagagttcaacggattacaatgg

SEQ ID NO: 173316 - DNA, 25 bp, Artificial
  probe
  misc_feature (1)..(25): SEQ ID NO: 386; WAN024DVW-3_at; Start 132; Stop 156
acagaaaattgggatgagaataccc

SEQ ID NO: 173317 - DNA, 25 bp, Artificial
  probe
  misc_feature (1)..(25): SEQ ID NO: 386; WAN024DVW-3_at; Start 1245; Stop 1269
catcattcagtgactcataccaaag

SEQ ID NO: 173318 - DNA, 25 bp, Artificial
  probe
  misc_feature (1)..(25): SEQ ID NO: 386; WAN024DVW-3_at; Start 323; Stop 347
ccctaatagagctgtggatggtaac

SEQ ID NO: 173319 - DNA, 25 bp, Artificial
  probe
  misc_feature (1)..(25): SEQ ID NO: 386; WAN024DVW-3_at; Start 1077; Stop 1101
tcagcagctattccgttaagtttag

SEQ ID NO: 173320 - DNA, 25 bp, Artificial
  probe
  misc_feature (1)..(25): SEQ ID NO: 386; WAN024DVW-3_at; Start 1419; Stop 1443
caacatattgacagtttagaaagca

SEQ ID NO: 173321 - DNA, 25 bp, Artificial
  probe
  misc_feature (1)..(25): SEQ ID NO: 386; WAN024DVW-3_at; Start 629; Stop 653
tggagtgcctttgagtttagcagaa

SEQ ID NO: 173322 - DNA, 25 bp, Artificial
  probe
  misc_feature (1)..(25): SEQ ID NO: 386; WAN024DVW-3_at; Start 1203; Stop 1227
tctcgtctagcagttgatggaaata

SEQ ID NO: 173323 - DNA, 25 bp, Artificial
  probe
  misc_feature (1)..(25): SEQ ID NO: 386; WAN024DVW-3_at; Start 1281; Stop 1305
tcatggtgggagatagatttagcac

SEQ ID NO: 173324 - DNA, 25 bp, Artificial
  probe
  misc_feature (1)..(25): SEQ ID NO: 386; WAN024DVW-3_at; Start 822; Stop 846
cattcggtgactcatactaaggcag

SEQ ID NO: 173325 - DNA, 25 bp, Artificial
  probe
  misc_feature (1)..(25): SEQ ID NO: 386; WAN024DVW-3_at; Start 737; Stop 761
taaggtagctactcaaagttcaacc

SEQ ID NO: 173326 - DNA, 25 bp, Artificial
  probe
  misc_feature (1)..(25): SEQ ID NO: 386; WAN024DVW-3_at; Start 1114; Stop 1138
tctatggttcaaagagaactccgaa

SEQ ID NO: 173327 - DNA, 25 bp, Artificial
  probe
  misc_feature (1)..(25): SEQ ID NO: 386; WAN024DVW-3_at; Start 1099; Stop 1123
tagcggaagttgaagtctatggttc

SEQ ID NO: 173328 - DNA, 25 bp, Artificial
  probe
  misc_feature (1)..(25): SEQ ID NO: 386; WAN024DVW-3_at; Start 279; Stop 303
tatgcaaaaccaacaacacaaagtt

SEQ ID NO: 173329 - DNA, 25 bp, Artificial
  probe
  misc_feature (1)..(25): SEQ ID NO: 386; WAN024DVW-3_at; Start 836; Stop 860
tactaaggcagattctaacgcttgg

SEQ ID NO: 173330 - DNA, 25 bp, Artificial
  probe
  misc_feature (1)..(25): SEQ ID NO: 386; WAN024DVW-3_at; Start 179; Stop 203
tcataatggaatggtagagatgtct

SEQ ID NO: 173331 - DNA, 25 bp, Artificial
  probe
  misc_feature (1)..(25): SEQ ID NO: 386; WAN024DVW-3_at; Start 757; Stop 781
caaccaattatgagggtgtagctgc

SEQ ID NO: 173332 - DNA, 25 bp, Artificial
  probe
  misc_feature (1)..(25): SEQ ID NO: 386; WAN024DVW-3_at; Start 1191; Stop 1215
tacaatggtttttctcgtctagcag

SEQ ID NO: 173333 - DNA, 25 bp, Artificial
  probe
  misc_feature (1)..(25): SEQ ID NO: 386; WAN024DVW-3_at; Start 1229; Stop 1253
aaacggagattatggtcatcattca

SEQ ID NO: 173334 - DNA, 25 bp, Artificial
  probe
  misc_feature (1)..(25): SEQ ID NO: 386; WAN024DVW-3_at; Start 614; Stop 638
taaattactaacgagtggagtgcct

SEQ ID NO: 173335 - DNA, 25 bp, Artificial
  probe
  misc_feature (1)..(25): SEQ ID NO: 386; WAN024DVW-3_at; Start 911; Stop 935
taatagaacagatgccgaacctcag

SEQ ID NO: 173336 - DNA, 25 bp, Artificial
  probe
  misc_feature (1)..(25): SEQ ID NO: 386; WAN024DVW-3_at; Start 461; Stop 485
tcgcacagatgctgagactcaacgt

SEQ ID NO: 173337 - DNA, 25 bp, Artificial
  probe
  misc_feature (1)..(25): SEQ ID NO: 386; WAN024DVW-3_at; Start 58; Stop 82
cacttacattaaaagggcatactgg

SEQ ID NO: 173338 - DNA, 25 bp, Artificial
  probe
  misc_feature (1)..(25): SEQ ID NO: 386; WAN024DVW-3_at; Start 376; Stop 400
taacacacactagggcagataatcc

SEQ ID NO: 173339 - DNA, 25 bp, Artificial
  probe
  misc_feature (1)..(25): SEQ ID NO: 386; WAN024DVW-3_at; Start 807; Stop 831
ggagattacggacatcattcggtga

SEQ ID NO: 173340 - DNA, 25 bp, Artificial
  probe
  misc_feature (1)..(25): SEQ ID NO: 386; WAN024DVW-3_at; Start 36; Stop 60
gataatgactttaggacaacaacac

SEQ ID NO: 173341 - DNA, 25 bp, Artificial
  probe
  misc_feature (1)..(25): SEQ ID NO: 386; WAN024DVW-3_at; Start 675; Stop 699
gatggtaagcaatctgaagaggata

SEQ ID NO: 173342 - DNA, 25 bp, Artificial
  probe
  misc_feature (1)..(25): SEQ ID NO: 386; WAN024DVW-3_at; Start 1296; Stop 1320
gatttagcacaaaccgaagaattag

SEQ ID NO: 173343 - DNA, 25 bp, Artificial
  probe
  misc_feature (1)..(25): SEQ ID NO: 386; WAN024DVW-3_at; Start 72; Stop 96
gggcatactggtcataaacctcaga

SEQ ID NO: 173344 - DNA, 25 bp, Artificial
  probe
  misc_feature (1)..(25): SEQ ID NO: 386; WAN024DVW-3_at; Start 399; Stop 423
ccctcttggtgggaagtcgatttga

SEQ ID NO: 173345 - DNA, 25 bp, Artificial
  probe
  misc_feature (1)..(25): SEQ ID NO: 386; WAN024DVW-3_at; Start 849; Stop 873
tctaacgcttggtggcaggtcgatc

SEQ ID NO: 173346 - DNA, 25 bp, Artificial
  probe
  misc_feature (1)..(25): SEQ ID NO: 386; WAN024DVW-3_at; Start 303; Stop 327
tctgtagattacaatggagacccta

SEQ ID NO: 173347 - DNA, 25 bp, Artificial
  probe
  misc_feature (1)..(25): SEQ ID NO: 386; WAN024DVW-3_at; Start 868; Stop 892
tcgatctgggagaagagtttacggt

SEQ ID NO: 173348 - DNA, 25 bp, Artificial
  probe
  misc_feature (1)..(25): SEQ ID NO: 1168; WAN024DVW-5_at; Start 258; Stop 282
tcatcctgcaaaagtctgtaaacca

SEQ ID NO: 173349 - DNA, 25 bp, Artificial
  probe
  misc_feature (1)..(25): SEQ ID NO: 1168; WAN024DVW-5_at; Start 644; Stop 668
tggtgttggcaactaaaaatacgcc

SEQ ID NO: 173350 - DNA, 25 bp, Artificial
  probe
  misc_feature (1)..(25): SEQ ID NO: 1168; WAN024DVW-5_at; Start 526; Stop 550
gaagtttgtgccaaatatggagcgc

SEQ ID NO: 173351 - DNA, 25 bp, Artificial
  probe
  misc_feature (1)..(25): SEQ ID NO: 1168; WAN024DVW-5_at; Start 295; Stop 319
ccacgagatacgaaagaattgagag

SEQ ID NO: 173352 - DNA, 25 bp, Artificial
  probe
  misc_feature (1)..(25): SEQ ID NO: 1168; WAN024DVW-5_at; Start 600; Stop 624
tgatccgacattctttgaagcgagt

SEQ ID NO: 173353 - DNA, 25 bp, Artificial
  probe
  misc_feature (1)..(25): SEQ ID NO: 1168; WAN024DVW-5_at; Start 144; Stop 168
gctttctccgttgtatggcaatgat

SEQ ID NO: 173354 - DNA, 25 bp, Artificial
  probe
  misc_feature (1)..(25): SEQ ID NO: 1168; WAN024DVW-5_at; Start 192; Stop 216
gaacacattgaagggagcatgggaa

SEQ ID NO: 173355 - DNA, 25 bp, Artificial
  probe
  misc_feature (1)..(25): SEQ ID NO: 1168; WAN024DVW-5_at; Start 381; Stop 405
tatgtcggctggagagcgtaataca

SEQ ID NO: 173356 - DNA, 25 bp, Artificial
  probe
  misc_feature (1)..(25): SEQ ID NO: 1168; WAN024DVW-5_at; Start 96; Stop 120
taatcgtgttcaaatgagaacgacg

SEQ ID NO: 173357 - DNA, 25 bp, Artificial
  probe
  misc_feature (1)..(25): SEQ ID NO: 1168; WAN024DVW-5_at; Start 924; Stop 948
gacaaatgatgtaccaactccagca

SEQ ID NO: 173358 - DNA, 25 bp, Artificial
  probe
  misc_feature (1)..(25): SEQ ID NO: 1168; WAN024DVW-5_at; Start 562; Stop 586
catgatcatgaaaaatggttctggg

SEQ ID NO: 173359 - DNA, 25 bp, Artificial
  probe
  misc_feature (1)..(25): SEQ ID NO: 1168; WAN024DVW-5_at; Start 280; Stop 304
ccaacaagttgtattccacgagata

SEQ ID NO: 173360 - DNA, 25 bp, Artificial
  probe
  misc_feature (1)..(25): SEQ ID NO: 1168; WAN024DVW-5_at; Start 1486; Stop 1510
aagacagctatgtgggcattatcag

SEQ ID NO: 173361 - DNA, 25 bp, Artificial
  probe
  misc_feature (1)..(25): SEQ ID NO: 1168; WAN024DVW-5_at; Start 1093; Stop 1117
tattcgaatgatgaaacaatgcctt

SEQ ID NO: 173362 - DNA, 25 bp, Artificial
  probe
  misc_feature (1)..(25): SEQ ID NO: 1168; WAN024DVW-5_at; Start 666; Stop 690
gccaataagagatgatgcgggtaca

SEQ ID NO: 173363 - DNA, 25 bp, Artificial
  probe
  misc_feature (1)..(25): SEQ ID NO: 1168; WAN024DVW-5_at; Start 396; Stop 420
gcgtaatacagttcctccagagtgg

SEQ ID NO: 173364 - DNA, 25 bp, Artificial
  probe
  misc_feature (1)..(25): SEQ ID NO: 1168; WAN024DVW-5_at; Start 993; Stop 1017
tccagctccaagtaaggaagaagtt

SEQ ID NO: 173365 - DNA, 25 bp, Artificial
  probe
  misc_feature (1)..(25): SEQ ID NO: 1168; WAN024DVW-5_at; Start 788; Stop 812
catttgaaactggaagagctaggga

SEQ ID NO: 173366 - DNA, 25 bp, Artificial
  probe
  misc_feature (1)..(25): SEQ ID NO: 1168; WAN024DVW-5_at; Start 901; Stop 925
gaatgtgccgcgtatacatttatga

SEQ ID NO: 173367 - DNA, 25 bp, Artificial
  probe
  misc_feature (1)..(25): SEQ ID NO: 1168; WAN024DVW-5_at; Start 813; Stop 837
tatgagatcctatgcatcggaacca

SEQ ID NO: 173368 - DNA, 25 bp, Artificial
  probe
  misc_feature (1)..(25): SEQ ID NO: 1168; WAN024DVW-5_at; Start 343; Stop 367
gaagctcaaagtctaaacattccag

SEQ ID NO: 173369 - DNA, 25 bp, Artificial
  probe
  misc_feature (1)..(25): SEQ ID NO: 1168; WAN024DVW-5_at; Start 679; Stop 703
gatgcgggtacagattctatcgtta

SEQ ID NO: 173370 - DNA, 25 bp, Artificial
  probe
  misc_feature (1)..(25): SEQ ID NO: 1168; WAN024DVW-5_at; Start 129; Stop 153
tgaatcgccattgttgctttctccg

SEQ ID NO: 173371 - DNA, 25 bp, Artificial
  probe
  misc_feature (1)..(25): SEQ ID NO: 1168; WAN024DVW-5_at; Start 541; Stop 565
tatggagcgcattttatctggcatg

SEQ ID NO: 173372 - DNA, 25 bp, Artificial
  probe
  misc_feature (1)..(25): SEQ ID NO: 1168; WAN024DVW-5_at; Start 492; Stop 516
taaccagttagctccgcatagtgct

SEQ ID NO: 173373 - DNA, 25 bp, Artificial
  probe
  misc_feature (1)..(25): SEQ ID NO: 1168; WAN024DVW-5_at; Start 412; Stop 436
ccagagtggttagatgaacaattcc

SEQ ID NO: 173374 - DNA, 25 bp, Artificial
  probe
  misc_feature (1)..(25): SEQ ID NO: 1168; WAN024DVW-5_at; Start 325; Stop 349
tatgtcaagatgttggaggaagctc

SEQ ID NO: 173375 - DNA, 25 bp, Artificial
  probe
  misc_feature (1)..(25): SEQ ID NO: 1168; WAN024DVW-5_at; Start 1276; Stop 1300
tatgaaggagatgggtatgctcagc

SEQ ID NO: 173376 - DNA, 25 bp, Artificial
  probe
  misc_feature (1)..(25): SEQ ID NO: 1168; WAN024DVW-5_at; Start 206; Stop 230
gagcatgggaagctattcctgaaga

SEQ ID NO: 173377 - DNA, 25 bp, Artificial
  probe
  misc_feature (1)..(25): SEQ ID NO: 1168; WAN024DVW-5_at; Start 738; Stop 762
gggctcatcaacagatacatggaaa

SEQ ID NO: 173378 - DNA, 25 bp, Artificial
  probe
  misc_feature (1)..(25): SEQ ID NO: 1168; WAN024DVW-5_at; Start 1405; Stop 1429
gatttgacgccacatacttacgctg

SEQ ID NO: 173379 - DNA, 25 bp, Artificial
  probe
  misc_feature (1)..(25): SEQ ID NO: 1168; WAN024DVW-5_at; Start 827; Stop 851
catcggaaccagaatcaatgattgc

SEQ ID NO: 173380 - DNA, 25 bp, Artificial
  probe
  misc_feature (1)..(25): SEQ ID NO: 1168; WAN024DVW-5_at; Start 1291; Stop 1315
tatgctcagcgtgtaggtaattcct

SEQ ID NO: 173381 - DNA, 25 bp, Artificial
  probe
  misc_feature (1)..(25): SEQ ID NO: 1168; WAN024DVW-5_at; Start 1473; Stop 1497
ttacaggacagataagacagctatg

SEQ ID NO: 173382 - DNA, 25 bp, Artificial
  probe
  misc_feature (1)..(25): SEQ ID NO: 3876; WAN024DVX_at; Start 441; Stop 465
ggttttccaccatttgtagccatga

SEQ ID NO: 173383 - DNA, 25 bp, Artificial
  probe
  misc_feature (1)..(25): SEQ ID NO: 3876; WAN024DVX_at; Start 421; Stop 445
gaagcccttcataatcctgtggttt

SEQ ID NO: 173384 - DNA, 25 bp, Artificial
  probe
  misc_feature (1)..(25): SEQ ID NO: 3876; WAN024DVX_at; Start 171; Stop 195
caggtgttaccaaagcttcaacagc

SEQ ID NO: 173385 - DNA, 25 bp, Artificial
  probe
  misc_feature (1)..(25): SEQ ID NO: 3876; WAN024DVX_at; Start 213; Stop 237
taccagtagcagcagtcaggccttt

SEQ ID NO: 173386 - DNA, 25 bp, Artificial
  probe
  misc_feature (1)..(25): SEQ ID NO: 3876; WAN024DVX_at; Start 154; Stop 178
ggttacatcataagcaccaggtgtt

SEQ ID NO: 173387 - DNA, 25 bp, Artificial
  probe
  misc_feature (1)..(25): SEQ ID NO: 3876; WAN024DVX_at; Start 298; Stop 322
caaccattaccatcttaaccttgcg

SEQ ID NO: 173388 - DNA, 25 bp, Artificial
  probe
  misc_feature (1)..(25): SEQ ID NO: 3876; WAN024DVX_at; Start 51; Stop 75
tggcattgaccataccttcacgcgc

SEQ ID NO: 173389 - DNA, 25 bp, Artificial
  probe
  misc_feature (1)..(25): SEQ ID NO: 3876; WAN024DVX_at; Start 459; Stop 483
gccatgatagaaatacaactagctg

SEQ ID NO: 173390 - DNA, 25 bp, Artificial
  probe
  misc_feature (1)..(25): SEQ ID NO: 3876; WAN024DVX_at; Start 592; Stop 616
cgctaaagatgacatattcgattcc

SEQ ID NO: 173391 - DNA, 25 bp, Artificial
  probe
  misc_feature (1)..(25): SEQ ID NO: 3876; WAN024DVX_at; Start 529; Stop 553
catgttcttgcaaagcagctacccc

SEQ ID NO: 173392 - DNA, 25 bp, Artificial
  probe
  misc_feature (1)..(25): SEQ ID NO: 3876; WAN024DVX_at; Start 474; Stop 498
caactagctgcatcctgtggagaac

SEQ ID NO: 173393 - DNA, 25 bp, Artificial
  probe
  misc_feature (1)..(25): SEQ ID NO: 3876; WAN024DVX_at; Start 24; Stop 48
tattaaagctcataccaccaaggaa

SEQ ID NO: 173394 - DNA, 25 bp, Artificial
  probe
  misc_feature (1)..(25): SEQ ID NO: 3876; WAN024DVX_at; Start 113; Stop 137
tattccttgataagctcaatagcac

SEQ ID NO: 173395 - DNA, 25 bp, Artificial
  probe
  misc_feature (1)..(25): SEQ ID NO: 3876; WAN024DVX_at; Start 320; Stop 344
gcgttcttcatcagtaatcacatag

SEQ ID NO: 173396 - DNA, 25 bp, Artificial
  probe
  misc_feature (1)..(25): SEQ ID NO: 3876; WAN024DVX_at; Start 577; Stop 601
ggtttggctctacatcgctaaagat

SEQ ID NO: 173397 - DNA, 25 bp, Artificial
  probe
  misc_feature (1)..(25): SEQ ID NO: 3876; WAN024DVX_at; Start 280; Stop 304
gagcaaggctattcttgtcaaccat

SEQ ID NO: 173398 - DNA, 25 bp, Artificial
  probe
  misc_feature (1)..(25): SEQ ID NO: 3876; WAN024DVX_at; Start 138; Stop 162
caatagacagtttcttggttacatc

SEQ ID NO: 173399 - DNA, 25 bp, Artificial
  probe
  misc_feature (1)..(25): SEQ ID NO: 3876; WAN024DVX_at; Start 126; Stop 150
gctcaatagcaccaatagacagttt

SEQ ID NO: 173400 - DNA, 25 bp, Artificial
  probe
  misc_feature (1)..(25): SEQ ID NO: 3876; WAN024DVX_at; Start 228; Stop 252
tcaggcctttaggtttggaaagcat

SEQ ID NO: 173401 - DNA, 25 bp, Artificial
  probe
  misc_feature (1)..(25): SEQ ID NO: 3876; WAN024DVX_at; Start 392; Stop 416
aactggcaagccttttttagcagac

SEQ ID NO: 173402 - DNA, 25 bp, Artificial
  probe
  misc_feature (1)..(25): SEQ ID NO: 3876; WAN024DVX_at; Start 97; Stop 121
tacagcacgaggaagatattccttg

SEQ ID NO: 173403 - DNA, 25 bp, Artificial
  probe
  misc_feature (1)..(25): SEQ ID NO: 3876; WAN024DVX_at; Start 606; Stop 630
tattcgattccttctgtatccagtg

SEQ ID NO: 173404 - DNA, 25 bp, Artificial
  probe
  misc_feature (1)..(25): SEQ ID NO: 3876; WAN024DVX_at; Start 363; Stop 387
gaagttcctgccgttgtattgatag

SEQ ID NO: 173405 - DNA, 25 bp, Artificial
  probe
  misc_feature (1)..(25): SEQ ID NO: 3876; WAN024DVX_at; Start 654; Stop 678
tcactgccttcgatgtacttatctg

SEQ ID NO: 173406 - DNA, 25 bp, Artificial
  probe
  misc_feature (1)..(25): SEQ ID NO: 3876; WAN024DVX_at; Start 37; Stop 61
accaccaaggaagatggcattgacc

SEQ ID NO: 173407 - DNA, 25 bp, Artificial
  probe
  misc_feature (1)..(25): SEQ ID NO: 3876; WAN024DVX_at; Start 568; Stop 592
tacaagtagggtttggctctacatc

SEQ ID NO: 173408 - DNA, 25 bp, Artificial
  probe
  misc_feature (1)..(25): SEQ ID NO: 3876; WAN024DVX_at; Start 379; Stop 403
tattgatagccacaactggcaagcc

SEQ ID NO: 173409 - DNA, 25 bp, Artificial
  probe
  misc_feature (1)..(25): SEQ ID NO: 3876; WAN024DVX_at; Start 63; Stop 87
taccttcacgcgcttcaatatcatg

SEQ ID NO: 173410 - DNA, 25 bp, Artificial
  probe
  misc_feature (1)..(25): SEQ ID NO: 3876; WAN024DVX_at; Start 197; Stop 221
tgagtcagagcatccataccagtag

SEQ ID NO: 173411 - DNA, 25 bp, Artificial
  probe
  misc_feature (1)..(25): SEQ ID NO: 3876; WAN024DVX_at; Start 541; Stop 565
aagcagctaccccatctgtgacatt

SEQ ID NO: 173412 - DNA, 25 bp, Artificial
  probe
  misc_feature (1)..(25): SEQ ID NO: 3876; WAN024DVX_at; Start 1; Stop 25
gtgaacataaccaagaccagcatta

SEQ ID NO: 173413 - DNA, 25 bp, Artificial
  probe
  misc_feature (1)..(25): SEQ ID NO: 3876; WAN024DVX_at; Start 637; Stop 661
aagtcttaggtaaaatatcactgcc

SEQ ID NO: 173414 - DNA, 25 bp, Artificial
  probe
  misc_feature (1)..(25): SEQ ID NO: 3876; WAN024DVX_at; Start 406; Stop 430
ttttagcagacttatgaagcccttc

SEQ ID NO: 173415 - DNA, 25 bp, Artificial
  probe
  misc_feature (1)..(25): SEQ ID NO: 3876; WAN024DVX_at; Start 669; Stop 693
tacttatctgtcaccaaaagtgcct

SEQ ID NO: 173416 - DNA, 25 bp, Artificial
  probe
  misc_feature (1)..(25): SEQ ID NO: 2496; WAN024DVY_at; Start 906; Stop 930
caaagccttgggacttcatgtagaa

SEQ ID NO: 173417 - DNA, 25 bp, Artificial
  probe
  misc_feature (1)..(25): SEQ ID NO: 2496; WAN024DVY_at; Start 709; Stop 733
gcgcgtgaaggtatggtcaatgcca

SEQ ID NO: 173418 - DNA, 25 bp, Artificial
  probe
  misc_feature (1)..(25): SEQ ID NO: 2496; WAN024DVY_at; Start 981; Stop 1005
gctttctgagacagtaggtattcct

SEQ ID NO: 173419 - DNA, 25 bp, Artificial
  probe
  misc_feature (1)..(25): SEQ ID NO: 2496; WAN024DVY_at; Start 865; Stop 889
gaaaatgctaaacgtgtaccagaag

SEQ ID NO: 173420 - DNA, 25 bp, Artificial
  probe
  misc_feature (1)..(25): SEQ ID NO: 2496; WAN024DVY_at; Start 13; Stop 37
tatgttccggcagtcaaccttattg

SEQ ID NO: 173421 - DNA, 25 bp, Artificial
  probe
  misc_feature (1)..(25): SEQ ID NO: 2496; WAN024DVY_at; Start 479; Stop 503
taatggttgacaagaatagccttgc

SEQ ID NO: 173422 - DNA, 25 bp, Artificial
  probe
  misc_feature (1)..(25): SEQ ID NO: 2496; WAN024DVY_at; Start 881; Stop 905
taccagaagctttccgcaatgttgc

SEQ ID NO: 173423 - DNA, 25 bp, Artificial
  probe
  misc_feature (1)..(25): SEQ ID NO: 2496; WAN024DVY_at; Start 591; Stop 615
tgttgaagctttggtaacacctggt

SEQ ID NO: 173424 - DNA, 25 bp, Artificial
  probe
  misc_feature (1)..(25): SEQ ID NO: 2496; WAN024DVY_at; Start 1093; Stop 1117
ggaaatccatttatgccaaccttag

SEQ ID NO: 173425 - DNA, 25 bp, Artificial
  probe
  misc_feature (1)..(25): SEQ ID NO: 2496; WAN024DVY_at; Start 634; Stop 658
aaactgtctattggtgctattgagc

SEQ ID NO: 173426 - DNA, 25 bp, Artificial
  probe
  misc_feature (1)..(25): SEQ ID NO: 2496; WAN024DVY_at; Start 922; Stop 946
catgtagaaggtaaatcagatcaag

SEQ ID NO: 173427 - DNA, 25 bp, Artificial
  probe
  misc_feature (1)..(25): SEQ ID NO: 2496; WAN024DVY_at; Start 546; Stop 570
taaaggcctgactgctgctactggt

SEQ ID NO: 173428 - DNA, 25 bp, Artificial
  probe
  misc_feature (1)..(25): SEQ ID NO: 2496; WAN024DVY_at; Start 606; Stop 630
aacacctggtgcttatgatgtaacc

SEQ ID NO: 173429 - DNA, 25 bp, Artificial
  probe
  misc_feature (1)..(25): SEQ ID NO: 2496; WAN024DVY_at; Start 72; Stop 96
caaggaacttggctataaaaaggca

SEQ ID NO: 173430 - DNA, 25 bp, Artificial
  probe
  misc_feature (1)..(25): SEQ ID NO: 2496; WAN024DVY_at; Start 1062; Stop 1086
taagaatgccttgattgatgcctgc

SEQ ID NO: 173431 - DNA, 25 bp, Artificial
  probe
  misc_feature (1)..(25): SEQ ID NO: 2496; WAN024DVY_at; Start 366; Stop 390
taagtctgctaaaaaaggcttgcca

SEQ ID NO: 173432 - DNA, 25 bp, Artificial
  probe
  misc_feature (1)..(25): SEQ ID NO: 2496; WAN024DVY_at; Start 1078; Stop 1102
gatgcctgcgcaccaggaaatccat

SEQ ID NO: 173433 - DNA, 25 bp, Artificial
  probe
  misc_feature (1)..(25): SEQ ID NO: 2496; WAN024DVY_at; Start 446; Stop 470
tgattactgatgaagaacgcaaggt

SEQ ID NO: 173434 - DNA, 25 bp, Artificial
  probe
  misc_feature (1)..(25): SEQ ID NO: 2496; WAN024DVY_at; Start 233; Stop 257
gggtagctgctttgcaagaacatgg

SEQ ID NO: 173435 - DNA, 25 bp, Artificial
  probe
  misc_feature (1)..(25): SEQ ID NO: 2496; WAN024DVY_at; Start 169; Stop 193
ggaatcgaatatgtcatctttagcg

SEQ ID NO: 173436 - DNA, 25 bp, Artificial
  probe
  misc_feature (1)..(25): SEQ ID NO: 2496; WAN024DVY_at; Start 784; Stop 808
tcaatggctcaccaactcggtgcag

SEQ ID NO: 173437 - DNA, 25 bp, Artificial
  probe
  misc_feature (1)..(25): SEQ ID NO: 2496; WAN024DVY_at; Start 342; Stop 366
accacaggattatgaagggcttcat

SEQ ID NO: 173438 - DNA, 25 bp, Artificial
  probe
  misc_feature (1)..(25): SEQ ID NO: 2496; WAN024DVY_at; Start 723; Stop 747
ggtcaatgccatcttccttggtggt

SEQ ID NO: 173439 - DNA, 25 bp, Artificial
  probe
  misc_feature (1)..(25): SEQ ID NO: 2496; WAN024DVY_at; Start 285; Stop 309
gggttctccacaggatgcagctagt

SEQ ID NO: 173440 - DNA, 25 bp, Artificial
  probe
  misc_feature (1)..(25): SEQ ID NO: 2496; WAN024DVY_at; Start 562; Stop 586
gctactggtatggatgctctgactc

SEQ ID NO: 173441 - DNA, 25 bp, Artificial
  probe
  misc_feature (1)..(25): SEQ ID NO: 2496; WAN024DVY_at; Start 531; Stop 555
catgctttccaaacctaaaggcctg

SEQ ID NO: 173442 - DNA, 25 bp, Artificial
  probe
  misc_feature (1)..(25): SEQ ID NO: 2496; WAN024DVY_at; Start 1109; Stop 1133
caaccttagaagaaacgattgcctt

SEQ ID NO: 173443 - DNA, 25 bp, Artificial
  probe
  misc_feature (1)..(25): SEQ ID NO: 2496; WAN024DVY_at; Start 154; Stop 178
ccactggatacagaaggaatcgaat

SEQ ID NO: 173444 - DNA, 25 bp, Artificial
  probe
  misc_feature (1)..(25): SEQ ID NO: 2496; WAN024DVY_at; Start 107; Stop 131
cagataagtacatcgaaggcagtga

SEQ ID NO: 173445 - DNA, 25 bp, Artificial
  probe
  misc_feature (1)..(25): SEQ ID NO: 2496; WAN024DVY_at; Start 316; Stop 340
tctatcatggctacaaatggtggaa

SEQ ID NO: 173446 - DNA, 25 bp, Artificial
  probe
  misc_feature (1)..(25): SEQ ID NO: 2496; WAN024DVY_at; Start 695; Stop 719
gacatgatattgaagcgcgtgaagg

SEQ ID NO: 173447 - DNA, 25 bp, Artificial
  probe
  misc_feature (1)..(25): SEQ ID NO: 2496; WAN024DVY_at; Start 835; Stop 859
tgtgccatgttgctaccagttatag

SEQ ID NO: 173448 - DNA, 25 bp, Artificial
  probe
  misc_feature (1)..(25): SEQ ID NO: 2496; WAN024DVY_at; Start 663; Stop 687
caaggaatatcttcctcgtgctgta

SEQ ID NO: 173449 - DNA, 25 bp, Artificial
  probe
  misc_feature (1)..(25): SEQ ID NO: 2496; WAN024DVY_at; Start 185; Stop 209
tctttagcgatgtagagccaaaccc

SEQ ID NO: 173450 - DNA, 25 bp, Artificial
  probe
  misc_feature (1)..(25): SEQ ID NO: 5260; WAN024DVZ_at; Start 102; Stop 126
tgagttcggtgatagactctgccaa

SEQ ID NO: 173451 - DNA, 25 bp, Artificial
  probe
  misc_feature (1)..(25): SEQ ID NO: 5260; WAN024DVZ_at; Start 334; Stop 358
cacgataatgtagccgtaagtggtc

SEQ ID NO: 173452 - DNA, 25 bp, Artificial
  probe
  misc_feature (1)..(25): SEQ ID NO: 5260; WAN024DVZ_at; Start 1; Stop 25
ttgatttcctttagaggcaaaggta

SEQ ID NO: 173453 - DNA, 25 bp, Artificial
  probe
  misc_feature (1)..(25): SEQ ID NO: 5260; WAN024DVZ_at; Start 219; Stop 243
tcttgtcagcttccgccaattcttg

SEQ ID NO: 173454 - DNA, 25 bp, Artificial
  probe
  misc_feature (1)..(25): SEQ ID NO: 5260; WAN024DVZ_at; Start 114; Stop 138
tagactctgccaatccatccacaat

SEQ ID NO: 173455 - DNA, 25 bp, Artificial
  probe
  misc_feature (1)..(25): SEQ ID NO: 5260; WAN024DVZ_at; Start 51; Stop 75
tcaagaggatagacatgatttgttc

SEQ ID NO: 173456 - DNA, 25 bp, Artificial
  probe
  misc_feature (1)..(25): SEQ ID NO: 5260; WAN024DVZ_at; Start 168; Stop 192
catgaaggcggtctttttctgcttc

SEQ ID NO: 173457 - DNA, 25 bp, Artificial
  probe
  misc_feature (1)..(25): SEQ ID NO: 5260; WAN024DVZ_at; Start 72; Stop 96
gttcttctgtcatgccaacattggc

SEQ ID NO: 173458 - DNA, 25 bp, Artificial
  probe
  misc_feature (1)..(25): SEQ ID NO: 5260; WAN024DVZ_at; Start 325; Stop 349
caaggttttcacgataatgtagccg

SEQ ID NO: 173459 - DNA, 25 bp, Artificial
  probe
  misc_feature (1)..(25): SEQ ID NO: 5260; WAN024DVZ_at; Start 348; Stop 372
cgtaagtggtcatttcttctgctac

SEQ ID NO: 173460 - DNA, 25 bp, Artificial
  probe
  misc_feature (1)..(25): SEQ ID NO: 5260; WAN024DVZ_at; Start 14; Stop 38
gaggcaaaggtattcaaggtatcca

SEQ ID NO: 173461 - DNA, 25 bp, Artificial
  probe
  misc_feature (1)..(25): SEQ ID NO: 5260; WAN024DVZ_at; Start 299; Stop 323
tctgcatctggttcgaccttggtaa

SEQ ID NO: 173462 - DNA, 25 bp, Artificial
  probe
  misc_feature (1)..(25): SEQ ID NO: 5260; WAN024DVZ_at; Start 305; Stop 329
tctggttcgaccttggtaatcaagg

SEQ ID NO: 173463 - DNA, 25 bp, Artificial
  probe
  misc_feature (1)..(25): SEQ ID NO: 5260; WAN024DVZ_at; Start 290; Stop 314
tgcttaacttctgcatctggttcga

SEQ ID NO: 173464 - DNA, 25 bp, Artificial
  probe
  misc_feature (1)..(25): SEQ ID NO: 5260; WAN024DVZ_at; Start 194; Stop 218
gcttcagctgcagtgacaattttaa

SEQ ID NO: 173465 - DNA, 25 bp, Artificial
  probe
  misc_feature (1)..(25): SEQ ID NO: 5260; WAN024DVZ_at; Start 155; Stop 179
gcaatccccacaccatgaaggcggt

SEQ ID NO: 173466 - DNA, 25 bp, Artificial
  probe
  misc_feature (1)..(25): SEQ ID NO: 5260; WAN024DVZ_at; Start 125; Stop 149
aatccatccacaatcgccttacgtt

SEQ ID NO: 173467 - DNA, 25 bp, Artificial
  probe
  misc_feature (1)..(25): SEQ ID NO: 5260; WAN024DVZ_at; Start 94; Stop 118
ggcttccttgagttcggtgatagac

SEQ ID NO: 173468 - DNA, 25 bp, Artificial
  probe
  misc_feature (1)..(25): SEQ ID NO: 5260; WAN024DVZ_at; Start 235; Stop 259
caattcttgtgctgcgacccgctta

SEQ ID NO: 173469 - DNA, 25 bp, Artificial
  probe
  misc_feature (1)..(25): SEQ ID NO: 5260; WAN024DVZ_at; Start 319; Stop 343
ggtaatcaaggttttcacgataatg

SEQ ID NO: 173470 - DNA, 25 bp, Artificial
  probe
  misc_feature (1)..(25): SEQ ID NO: 5260; WAN024DVZ_at; Start 251; Stop 275
acccgcttacgttgcgccgcattga

SEQ ID NO: 173471 - DNA, 25 bp, Artificial
  probe
  misc_feature (1)..(25): SEQ ID NO: 5260; WAN024DVZ_at; Start 211; Stop 235
aattttaatcttgtcagcttccgcc

SEQ ID NO: 173472 - DNA, 25 bp, Artificial
  probe
  misc_feature (1)..(25): SEQ ID NO: 5260; WAN024DVZ_at; Start 28; Stop 52
caaggtatccaaatactggttggtc

SEQ ID NO: 173473 - DNA, 25 bp, Artificial
  probe
  misc_feature (1)..(25): SEQ ID NO: 5260; WAN024DVZ_at; Start 133; Stop 157
cacaatcgccttacgttgttgggca

SEQ ID NO: 173474 - DNA, 25 bp, Artificial
  probe
  misc_feature (1)..(25): SEQ ID NO: 5260; WAN024DVZ_at; Start 390; Stop 414
gggcaatctcatcttttttctcaaa

SEQ ID NO: 173475 - DNA, 25 bp, Artificial
  probe
  misc_feature (1)..(25): SEQ ID NO: 5260; WAN024DVZ_at; Start 405; Stop 429
ttttctcaaacaattcatccaaggt

SEQ ID NO: 173476 - DNA, 25 bp, Artificial
  probe
  misc_feature (1)..(25): SEQ ID NO: 5260; WAN024DVZ_at; Start 41; Stop 65
tactggttggtcaagaggatagaca

SEQ ID NO: 173477 - DNA, 25 bp, Artificial
  probe
  misc_feature (1)..(25): SEQ ID NO: 5260; WAN024DVZ_at; Start 260; Stop 284
cgttgcgccgcattgatttcattca

SEQ ID NO: 173478 - DNA, 25 bp, Artificial
  probe
  misc_feature (1)..(25): SEQ ID NO: 5260; WAN024DVZ_at; Start 140; Stop 164
gccttacgttgttgggcaatcccca

SEQ ID NO: 173479 - DNA, 25 bp, Artificial
  probe
  misc_feature (1)..(25): SEQ ID NO: 5260; WAN024DVZ_at; Start 161; Stop 185
cccacaccatgaaggcggtcttttt

SEQ ID NO: 173480 - DNA, 25 bp, Artificial
  probe
  misc_feature (1)..(25): SEQ ID NO: 5260; WAN024DVZ_at; Start 240; Stop 264
cttgtgctgcgacccgcttacgttg

SEQ ID NO: 173481 - DNA, 25 bp, Artificial
  probe
  misc_feature (1)..(25): SEQ ID NO: 5260; WAN024DVZ_at; Start 67; Stop 91
gatttgttcttctgtcatgccaaca

SEQ ID NO: 173482 - DNA, 25 bp, Artificial
  probe
  misc_feature (1)..(25): SEQ ID NO: 5260; WAN024DVZ_at; Start 107; Stop 131
tcggtgatagactctgccaatccat

SEQ ID NO: 173483 - DNA, 25 bp, Artificial
  probe
  misc_feature (1)..(25): SEQ ID NO: 5260; WAN024DVZ_at; Start 87; Stop 111
caacattggcttccttgagttcggt

SEQ ID NO: 173484 - DNA, 25 bp, Artificial
  probe
  misc_feature (1)..(25): SEQ ID NO: 2407; WAN024DW2_at; Start 752; Stop 776
tgtctatcctcttgaccaaccagta

SEQ ID NO: 173485 - DNA, 25 bp, Artificial
  probe
  misc_feature (1)..(25): SEQ ID NO: 2407; WAN024DW2_at; Start 469; Stop 493
ggctacattatcgtgaaaaccttga

SEQ ID NO: 173486 - DNA, 25 bp, Artificial
  probe
  misc_feature (1)..(25): SEQ ID NO: 2407; WAN024DW2_at; Start 358; Stop 382
gatgctcttcgctcttctgttccaa

SEQ ID NO: 173487 - DNA, 25 bp, Artificial
  probe
  misc_feature (1)..(25): SEQ ID NO: 2407; WAN024DW2_at; Start 862; Stop 886
acacaaatcttgtcagcccttcgcg

SEQ ID NO: 173488 - DNA, 25 bp, Artificial
  probe
  misc_feature (1)..(25): SEQ ID NO: 2407; WAN024DW2_at; Start 48; Stop 72
ggtgatagtcacactgagtacagtt

SEQ ID NO: 173489 - DNA, 25 bp, Artificial
  probe
  misc_feature (1)..(25): SEQ ID NO: 2407; WAN024DW2_at; Start 451; Stop 475
gaagaaatgaccacttacggctaca

SEQ ID NO: 173490 - DNA, 25 bp, Artificial
  probe
  misc_feature (1)..(25): SEQ ID NO: 2407; WAN024DW2_at; Start 574; Stop 598
caagaattggcggaagctgacaaga

SEQ ID NO: 173491 - DNA, 25 bp, Artificial
  probe
  misc_feature (1)..(25): SEQ ID NO: 2407; WAN024DW2_at; Start 102; Stop 126
tattgaacgctttgggaaataccaa

SEQ ID NO: 173492 - DNA, 25 bp, Artificial
  probe
  misc_feature (1)..(25): SEQ ID NO: 2407; WAN024DW2_at; Start 214; Stop 238
gatattgtggttgagactaagacca

SEQ ID NO: 173493 - DNA, 25 bp, Artificial
  probe
  misc_feature (1)..(25): SEQ ID NO: 2407; WAN024DW2_at; Start 165; Stop 189
tgggattgactcgattgcagcacgg

SEQ ID NO: 173494 - DNA, 25 bp, Artificial
  probe
  misc_feature (1)..(25): SEQ ID NO: 2407; WAN024DW2_at; Start 533; Stop 557
tgaatgaaatcaatgcggcgcaacg

SEQ ID NO: 173495 - DNA, 25 bp, Artificial
  probe
  misc_feature (1)..(25): SEQ ID NO: 2407; WAN024DW2_at; Start 315; Stop 339
taaactcatacgtccagaatctcag

SEQ ID NO: 173496 - DNA, 25 bp, Artificial
  probe
  misc_feature (1)..(25): SEQ ID NO: 2407; WAN024DW2_at; Start 632; Stop 656
aaaaagaccgccttcatggtgtggg

SEQ ID NO: 173497 - DNA, 25 bp, Artificial
  probe
  misc_feature (1)..(25): SEQ ID NO: 2407; WAN024DW2_at; Start 781; Stop 805
gataccttgaatacctttgcctcta

SEQ ID NO: 173498 - DNA, 25 bp, Artificial
  probe
  misc_feature (1)..(25): SEQ ID NO: 2407; WAN024DW2_at; Start 878; Stop 902
cccttcgcgctgagaagaaataact

SEQ ID NO: 173499 - DNA, 25 bp, Artificial
  probe
  misc_feature (1)..(25): SEQ ID NO: 2407; WAN024DW2_at; Start 403; Stop 427
tttgagaaaaaagatgagattgccc

SEQ ID NO: 173500 - DNA, 25 bp, Artificial
  probe
  misc_feature (1)..(25): SEQ ID NO: 2407; WAN024DW2_at; Start 599; Stop 623
ttaaaattgtcactgcagctgaagc

SEQ ID NO: 173501 - DNA, 25 bp, Artificial
  probe
  misc_feature (1)..(25): SEQ ID NO: 2407; WAN024DW2_at; Start 704; Stop 728
tcaccgaactcaaggaagccaatgt

SEQ ID NO: 173502 - DNA, 25 bp, Artificial
  probe
  misc_feature (1)..(25): SEQ ID NO: 2407; WAN024DW2_at; Start 721; Stop 745
gccaatgttggcatgacagaagaac

SEQ ID NO: 173503 - DNA, 25 bp, Artificial
  probe
  misc_feature (1)..(25): SEQ ID NO: 2407; WAN024DW2_at; Start 119; Stop 143
aataccaaaaggttgctaatagcgg

SEQ ID NO: 173504 - DNA, 25 bp, Artificial
  probe
  misc_feature (1)..(25): SEQ ID NO: 2407; WAN024DW2_at; Start 229; Stop 253
actaagaccaaggacaatgtgttcg

SEQ ID NO: 173505 - DNA, 25 bp, Artificial
  probe
  misc_feature (1)..(25): SEQ ID NO: 2407; WAN024DW2_at; Start 251; Stop 275
tcgttatgatgaatgtagcgactca

SEQ ID NO: 173506 - DNA, 25 bp, Artificial
  probe
  misc_feature (1)..(25): SEQ ID NO: 2407; WAN024DW2_at; Start 266; Stop 290
tagcgactcagtaccgtgtcaacga

SEQ ID NO: 173507 - DNA, 25 bp, Artificial
  probe
  misc_feature (1)..(25): SEQ ID NO: 2407; WAN024DW2_at; Start 435; Stop 459
tcaacaccaagtagcagaagaaatg

SEQ ID NO: 173508 - DNA, 25 bp, Artificial
  probe
  misc_feature (1)..(25): SEQ ID NO: 2407; WAN024DW2_at; Start 284; Stop 308
tcaacgagcagagcgtgacagatgc

SEQ ID NO: 173509 - DNA, 25 bp, Artificial
  probe
  misc_feature (1)..(25): SEQ ID NO: 2407; WAN024DW2_at; Start 66; Stop 90
tacagtttatgtggttcgtcagcag

SEQ ID NO: 173510 - DNA, 25 bp, Artificial
  probe
  misc_feature (1)..(25): SEQ ID NO: 2407; WAN024DW2_at; Start 655; Stop 679
gggattgcccaacaacgtaaggcga

SEQ ID NO: 173511 - DNA, 25 bp, Artificial
  probe
  misc_feature (1)..(25): SEQ ID NO: 2407; WAN024DW2_at; Start 296; Stop 320
gcgtgacagatgcttactataaact

SEQ ID NO: 173512 - DNA, 25 bp, Artificial
  probe
  misc_feature (1)..(25): SEQ ID NO: 2407; WAN024DW2_at; Start 185; Stop 209
cacggattcagttgcgcttgttgca

SEQ ID NO: 173513 - DNA, 25 bp, Artificial
  probe
  misc_feature (1)..(25): SEQ ID NO: 2407; WAN024DW2_at; Start 558; Stop 582
taagcgggtcgcagcacaagaattg

SEQ ID NO: 173514 - DNA, 25 bp, Artificial
  probe
  misc_feature (1)..(25): SEQ ID NO: 2407; WAN024DW2_at; Start 542; Stop 566
tcaatgcggcgcaacgtaagcgggt

SEQ ID NO: 173515 - DNA, 25 bp, Artificial
  probe
  misc_feature (1)..(25): SEQ ID NO: 2407; WAN024DW2_at; Start 84; Stop 108
tcagcagtcggtggcgattattgaa

SEQ ID NO: 173516 - DNA, 25 bp, Artificial
  probe
  misc_feature (1)..(25): SEQ ID NO: 2407; WAN024DW2_at; Start 689; Stop 713
gattggcagagtctatcaccgaact

SEQ ID NO: 173517 - DNA, 25 bp, Artificial
  probe
  misc_feature (1)..(25): SEQ ID NO: 2407; WAN024DW2_at; Start 150; Stop 174
tattcgcttgccttttgggattgac

SEQ ID NO: 173518 - DNA, 25 bp, Artificial
  probe
  misc_feature (1)..(25): SEQ ID NO: 5862; WAN024DW3_at; Start 30; Stop 54
cattcacatgttccaatttttcctg

SEQ ID NO: 173519 - DNA, 25 bp, Artificial
  probe
  misc_feature (1)..(25): SEQ ID NO: 5862; WAN024DW3_at; Start 109; Stop 133
gaggtctgcatcaaccaattctgcc

SEQ ID NO: 173520 - DNA, 25 bp, Artificial
  probe
  misc_feature (1)..(25): SEQ ID NO: 5862; WAN024DW3_at; Start 189; Stop 213
cattgttttctttgacgacgggaat

SEQ ID NO: 173521 - DNA, 25 bp, Artificial
  probe
  misc_feature (1)..(25): SEQ ID NO: 5862; WAN024DW3_at; Start 11; Stop 35
tattcttccagctgggcaacattca

SEQ ID NO: 173522 - DNA, 25 bp, Artificial
  probe
  misc_feature (1)..(25): SEQ ID NO: 5862; WAN024DW3_at; Start 231; Stop 255
ctacgacgacttgaccattatttaa

SEQ ID NO: 173523 - DNA, 25 bp, Artificial
  probe
  misc_feature (1)..(25): SEQ ID NO: 5862; WAN024DW3_at; Start 103; Stop 127
gatgaagaggtctgcatcaaccaat

SEQ ID NO: 173524 - DNA, 25 bp, Artificial
  probe
  misc_feature (1)..(25): SEQ ID NO: 5862; WAN024DW3_at; Start 88; Stop 112
tacacctgtcaaaacgatgaagagg

SEQ ID NO: 173525 - DNA, 25 bp, Artificial
  probe
  misc_feature (1)..(25): SEQ ID NO: 5862; WAN024DW3_at; Start 3; Stop 27
gtttgatatattcttccagctgggc

SEQ ID NO: 173526 - DNA, 25 bp, Artificial
  probe
  misc_feature (1)..(25): SEQ ID NO: 5862; WAN024DW3_at; Start 124; Stop 148
caattctgccaaacgttgggaagcg

SEQ ID NO: 173527 - DNA, 25 bp, Artificial
  probe
  misc_feature (1)..(25): SEQ ID NO: 5862; WAN024DW3_at; Start 115; Stop 139
tgcatcaaccaattctgccaaacgt

SEQ ID NO: 173528 - DNA, 25 bp, Artificial
  probe
  misc_feature (1)..(25): SEQ ID NO: 5862; WAN024DW3_at; Start 43; Stop 67
caatttttcctggtttggcttgttg

SEQ ID NO: 173529 - DNA, 25 bp, Artificial
  probe
  misc_feature (1)..(25): SEQ ID NO: 5862; WAN024DW3_at; Start 119; Stop 143
tcaaccaattctgccaaacgttggg

SEQ ID NO: 173530 - DNA, 25 bp, Artificial
  probe
  misc_feature (1)..(25): SEQ ID NO: 5862; WAN024DW3_at; Start 228; Stop 252
cagctacgacgacttgaccattatt

SEQ ID NO: 173531 - DNA, 25 bp, Artificial
  probe
  misc_feature (1)..(25): SEQ ID NO: 5862; WAN024DW3_at; Start 59; Stop 83
ggcttgttgtagttaacaaatacat

SEQ ID NO: 173532 - DNA, 25 bp, Artificial
  probe
  misc_feature (1)..(25): SEQ ID NO: 5862; WAN024DW3_at; Start 71; Stop 95
ttaacaaatacataatctacacctg

SEQ ID NO: 173533 - DNA, 25 bp, Artificial
  probe
  misc_feature (1)..(25): SEQ ID NO: 5862; WAN024DW3_at; Start 162; Stop 186
taaccgcttcgacaccagtcaaatg

SEQ ID NO: 173534 - DNA, 25 bp, Artificial
  probe
  misc_feature (1)..(25): SEQ ID NO: 5862; WAN024DW3_at; Start 93; Stop 117
ctgtcaaaacgatgaagaggtctgc

SEQ ID NO: 173535 - DNA, 25 bp, Artificial
  probe
  misc_feature (1)..(25): SEQ ID NO: 5862; WAN024DW3_at; Start 224; Stop 248
cctgcagctacgacgacttgaccat

SEQ ID NO: 173536 - DNA, 25 bp, Artificial
  probe
  misc_feature (1)..(25): SEQ ID NO: 5862; WAN024DW3_at; Start 97; Stop 121
caaaacgatgaagaggtctgcatca

SEQ ID NO: 173537 - DNA, 25 bp, Artificial
  probe
  misc_feature (1)..(25): SEQ ID NO: 5862; WAN024DW3_at; Start 136; Stop 160
acgttgggaagcgaagtctttatca

SEQ ID NO: 173538 - DNA, 25 bp, Artificial
  probe
  misc_feature (1)..(25): SEQ ID NO: 5862; WAN024DW3_at; Start 185; Stop 209
tgtccattgttttctttgacgacgg

SEQ ID NO: 173539 - DNA, 25 bp, Artificial
  probe
  misc_feature (1)..(25): SEQ ID NO: 5862; WAN024DW3_at; Start 152; Stop 176
tctttatcaataaccgcttcgacac

SEQ ID NO: 173540 - DNA, 25 bp, Artificial
  probe
  misc_feature (1)..(25): SEQ ID NO: 5862; WAN024DW3_at; Start 170; Stop 194
tcgacaccagtcaaatgtccattgt

SEQ ID NO: 173541 - DNA, 25 bp, Artificial
  probe
  misc_feature (1)..(25): SEQ ID NO: 5862; WAN024DW3_at; Start 156; Stop 180
tatcaataaccgcttcgacaccagt

SEQ ID NO: 173542 - DNA, 25 bp, Artificial
  probe
  misc_feature (1)..(25): SEQ ID NO: 5862; WAN024DW3_at; Start 7; Stop 31
gatatattcttccagctgggcaaca

SEQ ID NO: 173543 - DNA, 25 bp, Artificial
  probe
  misc_feature (1)..(25): SEQ ID NO: 5862; WAN024DW3_at; Start 83; Stop 107
taatctacacctgtcaaaacgatga

SEQ ID NO: 173544 - DNA, 25 bp, Artificial
  probe
  misc_feature (1)..(25): SEQ ID NO: 5862; WAN024DW3_at; Start 220; Stop 244
accacctgcagctacgacgacttga

SEQ ID NO: 173545 - DNA, 25 bp, Artificial
  probe
  misc_feature (1)..(25): SEQ ID NO: 5862; WAN024DW3_at; Start 167; Stop 191
gcttcgacaccagtcaaatgtccat

SEQ ID NO: 173546 - DNA, 25 bp, Artificial
  probe
  misc_feature (1)..(25): SEQ ID NO: 5862; WAN024DW3_at; Start 21; Stop 45
gctgggcaacattcacatgttccaa

SEQ ID NO: 173547 - DNA, 25 bp, Artificial
  probe
  misc_feature (1)..(25): SEQ ID NO: 5862; WAN024DW3_at; Start 139; Stop 163
ttgggaagcgaagtctttatcaata

SEQ ID NO: 173548 - DNA, 25 bp, Artificial
  probe
  misc_feature (1)..(25): SEQ ID NO: 5862; WAN024DW3_at; Start 50; Stop 74
tcctggtttggcttgttgtagttaa

SEQ ID NO: 173549 - DNA, 25 bp, Artificial
  probe
  misc_feature (1)..(25): SEQ ID NO: 5862; WAN024DW3_at; Start 128; Stop 152
tctgccaaacgttgggaagcgaagt

SEQ ID NO: 173550 - DNA, 25 bp, Artificial
  probe
  misc_feature (1)..(25): SEQ ID NO: 5862; WAN024DW3_at; Start 199; Stop 223
tttgacgacgggaataccgccacca

SEQ ID NO: 173551 - DNA, 25 bp, Artificial
  probe
  misc_feature (1)..(25): SEQ ID NO: 5862; WAN024DW3_at; Start 16; Stop 40
ttccagctgggcaacattcacatgt

SEQ ID NO: 173552 - DNA, 25 bp, Artificial
  probe
  misc_feature (1)..(25): SEQ ID NO: 2394; WAN024DW4_at; Start 258; Stop 282
catcggtttctggttgaaaaatgct

SEQ ID NO: 173553 - DNA, 25 bp, Artificial
  probe
  misc_feature (1)..(25): SEQ ID NO: 2394; WAN024DW4_at; Start 741; Stop 765
ccaggaaaaattggaacatgtgaat

SEQ ID NO: 173554 - DNA, 25 bp, Artificial
  probe
  misc_feature (1)..(25): SEQ ID NO: 2394; WAN024DW4_at; Start 916; Stop 940
tctgaaagcggaacaattattgaaa

SEQ ID NO: 173555 - DNA, 25 bp, Artificial
  probe
  misc_feature (1)..(25): SEQ ID NO: 2394; WAN024DW4_at; Start 667; Stop 691
gaattggttgatgcagacctcttca

SEQ ID NO: 173556 - DNA, 25 bp, Artificial
  probe
  misc_feature (1)..(25): SEQ ID NO: 2394; WAN024DW4_at; Start 649; Stop 673
gcttcccaacgtttggcagaattgg

SEQ ID NO: 173557 - DNA, 25 bp, Artificial
  probe
  misc_feature (1)..(25): SEQ ID NO: 2394; WAN024DW4_at; Start 243; Stop 267
tatgacagaaggtagcatcggtttc

SEQ ID NO: 173558 - DNA, 25 bp, Artificial
  probe
  misc_feature (1)..(25): SEQ ID NO: 2394; WAN024DW4_at; Start 636; Stop 660
tgataaagacttcgcttcccaacgt

SEQ ID NO: 173559 - DNA, 25 bp, Artificial
  probe
  misc_feature (1)..(25): SEQ ID NO: 2394; WAN024DW4_at; Start 793; Stop 817
caagatcagtttgcaccaggtagca

SEQ ID NO: 173560 - DNA, 25 bp, Artificial
  probe
  misc_feature (1)..(25): SEQ ID NO: 2394; WAN024DW4_at; Start 722; Stop 746
ttaactacaacaagccaaaccagga

SEQ ID NO: 173561 - DNA, 25 bp, Artificial
  probe
  misc_feature (1)..(25): SEQ ID NO: 2394; WAN024DW4_at; Start 603; Stop 627
caatggacatttgactggtgtcgaa

SEQ ID NO: 173562 - DNA, 25 bp, Artificial
  probe
  misc_feature (1)..(25): SEQ ID NO: 2394; WAN024DW4_at; Start 851; Stop 875
tcaatggtcgtccagaaggaaaagc

SEQ ID NO: 173563 - DNA, 25 bp, Artificial
  probe
  misc_feature (1)..(25): SEQ ID NO: 2394; WAN024DW4_at; Start 153; Stop 177
taatggacctcaagttgggaatctc

SEQ ID NO: 173564 - DNA, 25 bp, Artificial
  probe
  misc_feature (1)..(25): SEQ ID NO: 2394; WAN024DW4_at; Start 552; Stop 576
tcaagtcgtcgtagctgcaggtggt

SEQ ID NO: 173565 - DNA, 25 bp, Artificial
  probe
  misc_feature (1)..(25): SEQ ID NO: 2394; WAN024DW4_at; Start 573; Stop 597
tggtggcggtattcccgtcgtcaaa

SEQ ID NO: 173566 - DNA, 25 bp, Artificial
  probe
  misc_feature (1)..(25): SEQ ID NO: 2394; WAN024DW4_at; Start 2; Stop 26
tggcaaatcgtaaaattgtagtagc

SEQ ID NO: 173567 - DNA, 25 bp, Artificial
  probe
  misc_feature (1)..(25): SEQ ID NO: 2394; WAN024DW4_at; Start 587; Stop 611
ccgtcgtcaaagaaaacaatggaca

SEQ ID NO: 173568 - DNA, 25 bp, Artificial
  probe
  misc_feature (1)..(25): SEQ ID NO: 2394; WAN024DW4_at; Start 835; Stop 859
gcagctatcgcttttgtcaatggtc

SEQ ID NO: 173569 - DNA, 25 bp, Artificial
  probe
  misc_feature (1)..(25): SEQ ID NO: 2394; WAN024DW4_at; Start 619; Stop 643
ggtgtcgaagcggttattgataaag

SEQ ID NO: 173570 - DNA, 25 bp, Artificial
  probe
  misc_feature (1)..(25): SEQ ID NO: 2394; WAN024DW4_at; Start 869; Stop 893
gaaaagcagttattacttcccttga

SEQ ID NO: 173571 - DNA, 25 bp, Artificial
  probe
  misc_feature (1)..(25): SEQ ID NO: 2394; WAN024DW4_at; Start 513; Stop 537
caaagaaattgaaaccatccgtact

SEQ ID NO: 173572 - DNA, 25 bp, Artificial
  probe
  misc_feature (1)..(25): SEQ ID NO: 2394; WAN024DW4_at; Start 493; Stop 517
tcaccaaaacctgttgacatcaaag

SEQ ID NO: 173573 - DNA, 25 bp, Artificial
  probe
  misc_feature (1)..(25): SEQ ID NO: 2394; WAN024DW4_at; Start 138; Stop 162
gattatcactcacggtaatggacct

SEQ ID NO: 173574 - DNA, 25 bp, Artificial
  probe
  misc_feature (1)..(25): SEQ ID NO: 2394; WAN024DW4_at; Start 169; Stop 193
gggaatctcttgctccaacatttgg

SEQ ID NO: 173575 - DNA, 25 bp, Artificial
  probe
  misc_feature (1)..(25): SEQ ID NO: 2394; WAN024DW4_at; Start 49; Stop 73
tcttctgacccatcagcaaaggctc

SEQ ID NO: 173576 - DNA, 25 bp, Artificial
  probe
  misc_feature (1)..(25): SEQ ID NO: 2394; WAN024DW4_at; Start 476; Stop 500
ggcgtaaggtcgttgcctcaccaaa

SEQ ID NO: 173577 - DNA, 25 bp, Artificial
  probe
  misc_feature (1)..(25): SEQ ID NO: 2394; WAN024DW4_at; Start 882; Stop 906
tacttcccttgaaaatctaggcgcc

SEQ ID NO: 173578 - DNA, 25 bp, Artificial
  probe
  misc_feature (1)..(25): SEQ ID NO: 2394; WAN024DW4_at; Start 23; Stop 47
tagctttgggaggaaatgcgattct

SEQ ID NO: 173579 - DNA, 25 bp, Artificial
  probe
  misc_feature (1)..(25): SEQ ID NO: 2394; WAN024DW4_at; Start 808; Stop 832
ccaggtagcatgcttccaaaagtag

SEQ ID NO: 173580 - DNA, 25 bp, Artificial
  probe
  misc_feature (1)..(25): SEQ ID NO: 2394; WAN024DW4_at; Start 36; Stop 60
aaatgcgattctttcttctgaccca

SEQ ID NO: 173581 - DNA, 25 bp, Artificial
  probe
  misc_feature (1)..(25): SEQ ID NO: 2394; WAN024DW4_at; Start 86; Stop 110
tagttgaaacagctaagcatcttgt

SEQ ID NO: 173582 - DNA, 25 bp, Artificial
  probe
  misc_feature (1)..(25): SEQ ID NO: 2394; WAN024DW4_at; Start 228; Stop 252
cgactcacttgtcgctatgacagaa

SEQ ID NO: 173583 - DNA, 25 bp, Artificial
  probe
  misc_feature (1)..(25): SEQ ID NO: 2394; WAN024DW4_at; Start 386; Stop 410
aaccaatcggtcctttctattcaga

SEQ ID NO: 173584 - DNA, 25 bp, Artificial
  probe
  misc_feature (1)..(25): SEQ ID NO: 2394; WAN024DW4_at; Start 61; Stop 85
tcagcaaaggctcaacaagaagctt

SEQ ID NO: 173585 - DNA, 25 bp, Artificial
  probe
  misc_feature (1)..(25): SEQ ID NO: 2394; WAN024DW4_at; Start 897; Stop 921
tctaggcgccttgattgaatctgaa

SEQ ID NO: 173586 - DNA, 25 bp, Artificial
  probe
  misc_feature (1)..(25): SEQ ID NO: 1895; WAN024DW5_at; Start 120; Stop 144
tcaacaccactaccttgctggcaag

SEQ ID NO: 173587 - DNA, 25 bp, Artificial
  probe
  misc_feature (1)..(25): SEQ ID NO: 1895; WAN024DW5_at; Start 610; Stop 634
ggatttgctaaagaaagtggcgcac

SEQ ID NO: 173588 - DNA, 25 bp, Artificial
  probe
  misc_feature (1)..(25): SEQ ID NO: 1895; WAN024DW5_at; Start 180; Stop 204
tactcgtgcagcctttacaactgcg

SEQ ID NO: 173589 - DNA, 25 bp, Artificial
  probe
  misc_feature (1)..(25): SEQ ID NO: 1895; WAN024DW5_at; Start 215; Stop 239
ttggtgctcacccagaatacctcgg

SEQ ID NO: 173590 - DNA, 25 bp, Artificial
  probe
  misc_feature (1)..(25): SEQ ID NO: 1895; WAN024DW5_at; Start 163; Stop 187
gaaaaaacatctactcgtactcgtg

SEQ ID NO: 173591 - DNA, 25 bp, Artificial
  probe
  misc_feature (1)..(25): SEQ ID NO: 1895; WAN024DW5_at; Start 197; Stop 221
caactgcggctatcgaccttggtgc

SEQ ID NO: 173592 - DNA, 25 bp, Artificial
  probe
  misc_feature (1)..(25): SEQ ID NO: 1895; WAN024DW5_at; Start 479; Stop 503
tatactgtggtgatggacgtaacaa

SEQ ID NO: 173593 - DNA, 25 bp, Artificial
  probe
  misc_feature (1)..(25): SEQ ID NO: 1895; WAN024DW5_at; Start 361; Stop 385
gaattctcaggcgttccagtatgga

SEQ ID NO: 173594 - DNA, 25 bp, Artificial
  probe
  misc_feature (1)..(25): SEQ ID NO: 1895; WAN024DW5_at; Start 435; Stop 459
gactgttcaagaaaacttcggtcgc

SEQ ID NO: 173595 - DNA, 25 bp, Artificial
  probe
  misc_feature (1)..(25): SEQ ID NO: 1895; WAN024DW5_at; Start 231; Stop 255
atacctcggagcaaatgatattcag

SEQ ID NO: 173596 - DNA, 25 bp, Artificial
  probe
  misc_feature (1)..(25): SEQ ID NO: 1895; WAN024DW5_at; Start 903; Stop 927
cgaagtcttccgcagcaagtacgct

SEQ ID NO: 173597 - DNA, 25 bp, Artificial
  probe
  misc_feature (1)..(25): SEQ ID NO: 1895; WAN024DW5_at; Start 303; Stop 327
tatgtttgacgggattgaattccgc

SEQ ID NO: 173598 - DNA, 25 bp, Artificial
  probe
  misc_feature (1)..(25): SEQ ID NO: 1895; WAN024DW5_at; Start 644; Stop 668
tcactgaagatgctgatgaagcagt

SEQ ID NO: 173599 - DNA, 25 bp, Artificial
  probe
  misc_feature (1)..(25): SEQ ID NO: 1895; WAN024DW5_at; Start 575; Stop 599
tcttcccagaaaaagaaatcgttga

SEQ ID NO: 173600 - DNA, 25 bp, Artificial
  probe
  misc_feature (1)..(25): SEQ ID NO: 1895; WAN024DW5_at; Start 802; Stop 826
ttgatcttcctacactgcttgccag

SEQ ID NO: 173601 - DNA, 25 bp, Artificial
  probe
  misc_feature (1)..(25): SEQ ID NO: 1895; WAN024DW5_at; Start 459; Stop 483
cttggaaggcttgacattggtatac

SEQ ID NO: 173602 - DNA, 25 bp, Artificial
  probe
  misc_feature (1)..(25): SEQ ID NO: 1895; WAN024DW5_at; Start 949; Stop 973
aaccgtatgcacactatcaaagctg

SEQ ID NO: 173603 - DNA, 25 bp, Artificial
  probe
  misc_feature (1)..(25): SEQ ID NO: 1895; WAN024DW5_at; Start 400; Stop 424
gaatggcacccaactcaaatgctcg

SEQ ID NO: 173604 - DNA, 25 bp, Artificial
  probe
  misc_feature (1)..(25): SEQ ID NO: 1895; WAN024DW5_at; Start 384; Stop 408
gaacggtctaactgacgaatggcac

SEQ ID NO: 173605 - DNA, 25 bp, Artificial
  probe
  misc_feature (1)..(25): SEQ ID NO: 1895; WAN024DW5_at; Start 22; Stop 46
ggacgcagcttcttagcagaaaaag

SEQ ID NO: 173606 - DNA, 25 bp, Artificial
  probe
  misc_feature (1)..(25): SEQ ID NO: 1895; WAN024DW5_at; Start 322; Stop 346
ttccgcggattcagccaacgtatgg

SEQ ID NO: 173607 - DNA, 25 bp, Artificial
  probe
  misc_feature (1)..(25): SEQ ID NO: 1895; WAN024DW5_at; Start 721; Stop 745
gacaaattcgcagaacgtgtagctc

SEQ ID NO: 173608 - DNA, 25 bp, Artificial
  probe
  misc_feature (1)..(25): SEQ ID NO: 1895; WAN024DW5_at; Start 39; Stop 63
agaaaaagactttacccgtgcagag

SEQ ID NO: 173609 - DNA, 25 bp, Artificial
  probe
  misc_feature (1)..(25): SEQ ID NO: 1895; WAN024DW5_at; Start 673; Stop 697
gatgcagacgttctttacacagacg

SEQ ID NO: 173610 - DNA, 25 bp, Artificial
  probe
  misc_feature (1)..(25): SEQ ID NO: 1895; WAN024DW5_at; Start 508; Stop 532
gccaacagcttgctcgtaacaggtg

SEQ ID NO: 173611 - DNA, 25 bp, Artificial
  probe
  misc_feature (1)..(25): SEQ ID NO: 1895; WAN024DW5_at; Start 886; Stop 910
gaaatggaagtaacagacgaagtct

SEQ ID NO: 173612 - DNA, 25 bp, Artificial
  probe
  misc_feature (1)..(25): SEQ ID NO: 1895; WAN024DW5_at; Start 965; Stop 989
tcaaagctgttatggctgctacact

SEQ ID NO: 173613 - DNA, 25 bp, Artificial
  probe
  misc_feature (1)..(25): SEQ ID NO: 1895; WAN024DW5_at; Start 51; Stop 75
tacccgtgcagagttagaatacctt

SEQ ID NO: 173614 - DNA, 25 bp, Artificial
  probe
  misc_feature (1)..(25): SEQ ID NO: 1895; WAN024DW5_at; Start 415; Stop 439
caaatgctcgctgactacttgactg

SEQ ID NO: 173615 - DNA, 25 bp, Artificial
  probe
  misc_feature (1)..(25): SEQ ID NO: 1895; WAN024DW5_at; Start 6; Stop 30
aaattcagtattccaaggacgcagc

SEQ ID NO: 173616 - DNA, 25 bp, Artificial
  probe
  misc_feature (1)..(25): SEQ ID NO: 1895; WAN024DW5_at; Start 135; Stop 159
tgctggcaagaatatcgctctccta

SEQ ID NO: 173617 - DNA, 25 bp, Artificial
  probe
  misc_feature (1)..(25): SEQ ID NO: 1895; WAN024DW5_at; Start 688; Stop 712
tacacagacgtttgggtatcaatgg

SEQ ID NO: 173618 - DNA, 25 bp, Artificial
  probe
  misc_feature (1)..(25): SEQ ID NO: 1895; WAN024DW5_at; Start 919; Stop 943
aagtacgctcgccacttcgatcaag

SEQ ID NO: 173619 - DNA, 25 bp, Artificial
  probe
  misc_feature (1)..(25): SEQ ID NO: 1895; WAN024DW5_at; Start 934; Stop 958
ttcgatcaagcagaaaaccgtatgc

SEQ ID NO: 173620 - DNA, 25 bp, Artificial
  probe
  misc_feature (1)..(25): SEQ ID NO: 7233; WAN024DW6_at; Start 178; Stop 202
tgtacgttgagagatacctactgca

SEQ ID NO: 173621 - DNA, 25 bp, Artificial
  probe
  misc_feature (1)..(25): SEQ ID NO: 7233; WAN024DW6_at; Start 28; Stop 52
aatagtgaacttgtcatagtctacc

SEQ ID NO: 173622 - DNA, 25 bp, Artificial
  probe
  misc_feature (1)..(25): SEQ ID NO: 7233; WAN024DW6_at; Start 84; Stop 108
tacggttgttagcaaattcaaaggc

SEQ ID NO: 173623 - DNA, 25 bp, Artificial
  probe
  misc_feature (1)..(25): SEQ ID NO: 7233; WAN024DW6_at; Start 34; Stop 58
gaacttgtcatagtctaccatagtg

SEQ ID NO: 173624 - DNA, 25 bp, Artificial
  probe
  misc_feature (1)..(25): SEQ ID NO: 7233; WAN024DW6_at; Start 129; Stop 153
catttttcttgaagatgttgaccaa

SEQ ID NO: 173625 - DNA, 25 bp, Artificial
  probe
  misc_feature (1)..(25): SEQ ID NO: 7233; WAN024DW6_at; Start 15; Stop 39
cgatttctgggtgaatagtgaactt

SEQ ID NO: 173626 - DNA, 25 bp, Artificial
  probe
  misc_feature (1)..(25): SEQ ID NO: 7233; WAN024DW6_at; Start 90; Stop 114
tgttagcaaattcaaaggccaaaac

SEQ ID NO: 173627 - DNA, 25 bp, Artificial
  probe
  misc_feature (1)..(25): SEQ ID NO: 7233; WAN024DW6_at; Start 9; Stop 33
cgccttcgatttctgggtgaatagt

SEQ ID NO: 173628 - DNA, 25 bp, Artificial
  probe
  misc_feature (1)..(25): SEQ ID NO: 7233; WAN024DW6_at; Start 121; Stop 145
gaagccaacatttttcttgaagatg

SEQ ID NO: 173629 - DNA, 25 bp, Artificial
  probe
  misc_feature (1)..(25): SEQ ID NO: 7233; WAN024DW6_at; Start 188; Stop 212
gagatacctactgcaaggacgtctt

SEQ ID NO: 173630 - DNA, 25 bp, Artificial
  probe
  misc_feature (1)..(25): SEQ ID NO: 7233; WAN024DW6_at; Start 200; Stop 224
gcaaggacgtctttagaaagaacta

SEQ ID NO: 173631 - DNA, 25 bp, Artificial
  probe
  misc_feature (1)..(25): SEQ ID NO: 7233; WAN024DW6_at; Start 101; Stop 125
tcaaaggccaaaactttcttgaagc

SEQ ID NO: 173632 - DNA, 25 bp, Artificial
  probe
  misc_feature (1)..(25): SEQ ID NO: 7233; WAN024DW6_at; Start 155; Stop 179
agtttttcgatagaagctgcgtctg

SEQ ID NO: 173633 - DNA, 25 bp, Artificial
  probe
  misc_feature (1)..(25): SEQ ID NO: 7233; WAN024DW6_at; Start 159; Stop 183
tttcgatagaagctgcgtctgtacg

SEQ ID NO: 173634 - DNA, 25 bp, Artificial
  probe
  misc_feature (1)..(25): SEQ ID NO: 7233; WAN024DW6_at; Start 135; Stop 159
tcttgaagatgttgaccaaaagttt

SEQ ID NO: 173635 - DNA, 25 bp, Artificial
  probe
  misc_feature (1)..(25): SEQ ID NO: 7233; WAN024DW6_at; Start 163; Stop 187
gatagaagctgcgtctgtacgttga

SEQ ID NO: 173636 - DNA, 25 bp, Artificial
  probe
  misc_feature (1)..(25): SEQ ID NO: 7233; WAN024DW6_at; Start 106; Stop 130
ggccaaaactttcttgaagccaaca

SEQ ID NO: 173637 - DNA, 25 bp, Artificial
  probe
  misc_feature (1)..(25): SEQ ID NO: 7233; WAN024DW6_at; Start 170; Stop 194
gctgcgtctgtacgttgagagatac

SEQ ID NO: 173638 - DNA, 25 bp, Artificial
  probe
  misc_feature (1)..(25): SEQ ID NO: 7233; WAN024DW6_at; Start 41; Stop 65
tcatagtctaccatagtgaagacag

SEQ ID NO: 173639 - DNA, 25 bp, Artificial
  probe
  misc_feature (1)..(25): SEQ ID NO: 7233; WAN024DW6_at; Start 167; Stop 191
gaagctgcgtctgtacgttgagaga

SEQ ID NO: 173640 - DNA, 25 bp, Artificial
  probe
  misc_feature (1)..(25): SEQ ID NO: 7233; WAN024DW6_at; Start 196; Stop 220
tactgcaaggacgtctttagaaaga

SEQ ID NO: 173641 - DNA, 25 bp, Artificial
  probe
  misc_feature (1)..(25): SEQ ID NO: 7233; WAN024DW6_at; Start 185; Stop 209
tgagagatacctactgcaaggacgt

SEQ ID NO: 173642 - DNA, 25 bp, Artificial
  probe
  misc_feature (1)..(25): SEQ ID NO: 7233; WAN024DW6_at; Start 52; Stop 76
catagtgaagacagtatccaagtgc

SEQ ID NO: 173643 - DNA, 25 bp, Artificial
  probe
  misc_feature (1)..(25): SEQ ID NO: 7233; WAN024DW6_at; Start 57; Stop 81
tgaagacagtatccaagtgcatgaa

SEQ ID NO: 173644 - DNA, 25 bp, Artificial
  probe
  misc_feature (1)..(25): SEQ ID NO: 7233; WAN024DW6_at; Start 20; Stop 44
tctgggtgaatagtgaacttgtcat

SEQ ID NO: 173645 - DNA, 25 bp, Artificial
  probe
  misc_feature (1)..(25): SEQ ID NO: 7233; WAN024DW6_at; Start 61; Stop 85
gacagtatccaagtgcatgaattta

SEQ ID NO: 173646 - DNA, 25 bp, Artificial
  probe
  misc_feature (1)..(25): SEQ ID NO: 7233; WAN024DW6_at; Start 180; Stop 204
tacgttgagagatacctactgcaag

SEQ ID NO: 173647 - DNA, 25 bp, Artificial
  probe
  misc_feature (1)..(25): SEQ ID NO: 7233; WAN024DW6_at; Start 2; Stop 26
tgaaggtcgccttcgatttctgggt

SEQ ID NO: 173648 - DNA, 25 bp, Artificial
  probe
  misc_feature (1)..(25): SEQ ID NO: 7233; WAN024DW6_at; Start 173; Stop 197
gcgtctgtacgttgagagataccta

SEQ ID NO: 173649 - DNA, 25 bp, Artificial
  probe
  misc_feature (1)..(25): SEQ ID NO: 7233; WAN024DW6_at; Start 150; Stop 174
ccaaaagtttttcgatagaagctgc

SEQ ID NO: 173650 - DNA, 25 bp, Artificial
  probe
  misc_feature (1)..(25): SEQ ID NO: 7233; WAN024DW6_at; Start 192; Stop 216
tacctactgcaaggacgtctttaga

SEQ ID NO: 173651 - DNA, 25 bp, Artificial
  probe
  misc_feature (1)..(25): SEQ ID NO: 7233; WAN024DW6_at; Start 47; Stop 71
tctaccatagtgaagacagtatcca

SEQ ID NO: 173652 - DNA, 25 bp, Artificial
  probe
  misc_feature (1)..(25): SEQ ID NO: 7233; WAN024DW6_at; Start 66; Stop 90
tatccaagtgcatgaatttacggtt

SEQ ID NO: 173653 - DNA, 25 bp, Artificial
  probe
  misc_feature (1)..(25): SEQ ID NO: 7233; WAN024DW6_at; Start 72; Stop 96
agtgcatgaatttacggttgttagc

SEQ ID NO: 173654 - DNA, 25 bp, Artificial
  probe
  misc_feature (1)..(25): SEQ ID NO: 7678; WAN024DW7_at; Start 35; Stop 59
cattttctattgacgaatatcgaac

SEQ ID NO: 173655 - DNA, 25 bp, Artificial
  probe
  misc_feature (1)..(25): SEQ ID NO: 7678; WAN024DW7_at; Start 3; Stop 27
gtcattttattatttcctctttcta

SEQ ID NO: 173656 - DNA, 25 bp, Artificial
  probe
  misc_feature (1)..(25): SEQ ID NO: 7678; WAN024DW7_at; Start 38; Stop 62
tttctattgacgaatatcgaacagc

SEQ ID NO: 173657 - DNA, 25 bp, Artificial
  probe
  misc_feature (1)..(25): SEQ ID NO: 7678; WAN024DW7_at; Start 24; Stop 48
tctattttttacattttctattgac

SEQ ID NO: 173658 - DNA, 25 bp, Artificial
  probe
  misc_feature (1)..(25): SEQ ID NO: 7678; WAN024DW7_at; Start 41; Stop 65
ctattgacgaatatcgaacagcgat

SEQ ID NO: 173659 - DNA, 25 bp, Artificial
  probe
  misc_feature (1)..(25): SEQ ID NO: 7678; WAN024DW7_at; Start 33; Stop 57
tacattttctattgacgaatatcga

SEQ ID NO: 173660 - DNA, 25 bp, Artificial
  probe
  misc_feature (1)..(25): SEQ ID NO: 7678; WAN024DW7_at; Start 31; Stop 55
tttacattttctattgacgaatatc

SEQ ID NO: 173661 - DNA, 25 bp, Artificial
  probe
  misc_feature (1)..(25): SEQ ID NO: 7678; WAN024DW7_at; Start 39; Stop 63
ttctattgacgaatatcgaacagcg

SEQ ID NO: 173662 - DNA, 25 bp, Artificial
  probe
  misc_feature (1)..(25): SEQ ID NO: 7678; WAN024DW7_at; Start 34; Stop 58
acattttctattgacgaatatcgaa

SEQ ID NO: 173663 - DNA, 25 bp, Artificial
  probe
  misc_feature (1)..(25): SEQ ID NO: 7678; WAN024DW7_at; Start 26; Stop 50
tattttttacattttctattgacga

SEQ ID NO: 173664 - DNA, 25 bp, Artificial
  probe
  misc_feature (1)..(25): SEQ ID NO: 7678; WAN024DW7_at; Start 30; Stop 54
ttttacattttctattgacgaatat

SEQ ID NO: 173665 - DNA, 25 bp, Artificial
  probe
  misc_feature (1)..(25): SEQ ID NO: 7678; WAN024DW7_at; Start 2; Stop 26
tgtcattttattatttcctctttct

SEQ ID NO: 173666 - DNA, 25 bp, Artificial
  probe
  misc_feature (1)..(25): SEQ ID NO: 7678; WAN024DW7_at; Start 25; Stop 49
ctattttttacattttctattgacg

SEQ ID NO: 173667 - DNA, 25 bp, Artificial
  probe
  misc_feature (1)..(25): SEQ ID NO: 7678; WAN024DW7_at; Start 36; Stop 60
attttctattgacgaatatcgaaca

SEQ ID NO: 173668 - DNA, 25 bp, Artificial
  probe
  misc_feature (1)..(25): SEQ ID NO: 7678; WAN024DW7_at; Start 4; Stop 28
tcattttattatttcctctttctat

SEQ ID NO: 173669 - DNA, 25 bp, Artificial
  probe
  misc_feature (1)..(25): SEQ ID NO: 7678; WAN024DW7_at; Start 32; Stop 56
ttacattttctattgacgaatatcg

SEQ ID NO: 173670 - DNA, 25 bp, Artificial
  probe
  misc_feature (1)..(25): SEQ ID NO: 7678; WAN024DW7_at; Start 37; Stop 61
ttttctattgacgaatatcgaacag

SEQ ID NO: 173671 - DNA, 25 bp, Artificial
  probe
  misc_feature (1)..(25): SEQ ID NO: 7678; WAN024DW7_at; Start 29; Stop 53
tttttacattttctattgacgaata

SEQ ID NO: 173672 - DNA, 25 bp, Artificial
  probe
  misc_feature (1)..(25): SEQ ID NO: 7678; WAN024DW7_at; Start 40; Stop 64
tctattgacgaatatcgaacagcga

SEQ ID NO: 173673 - DNA, 25 bp, Artificial
  probe
  misc_feature (1)..(25): SEQ ID NO: 7678; WAN024DW7_at; Start 1; Stop 25
ttgtcattttattatttcctctttc

SEQ ID NO: 173674 - DNA, 25 bp, Artificial
  probe
  misc_feature (1)..(25): SEQ ID NO: 5049; WAN024DW8_at; Start 138; Stop 162
tggtcacggtattgcggtcataaac

SEQ ID NO: 173675 - DNA, 25 bp, Artificial
  probe
  misc_feature (1)..(25): SEQ ID NO: 5049; WAN024DW8_at; Start 187; Stop 211
caaagtgttagaaccgtcgttccat

SEQ ID NO: 173676 - DNA, 25 bp, Artificial
  probe
  misc_feature (1)..(25): SEQ ID NO: 5049; WAN024DW8_at; Start 122; Stop 146
tcttccaaaatcttattggtcacgg

SEQ ID NO: 173677 - DNA, 25 bp, Artificial
  probe
  misc_feature (1)..(25): SEQ ID NO: 5049; WAN024DW8_at; Start 78; Stop 102
gaaccaattcacttccgcgaatctt

SEQ ID NO: 173678 - DNA, 25 bp, Artificial
  probe
  misc_feature (1)..(25): SEQ ID NO: 5049; WAN024DW8_at; Start 162; Stop 186
caactaccacaccaggtgcgatggt

SEQ ID NO: 173679 - DNA, 25 bp, Artificial
  probe
  misc_feature (1)..(25): SEQ ID NO: 5049; WAN024DW8_at; Start 174; Stop 198
caggtgcgatggtcaaagtgttaga

SEQ ID NO: 173680 - DNA, 25 bp, Artificial
  probe
  misc_feature (1)..(25): SEQ ID NO: 5049; WAN024DW8_at; Start 129; Stop 153
aaatcttattggtcacggtattgcg

SEQ ID NO: 173681 - DNA, 25 bp, Artificial
  probe
  misc_feature (1)..(25): SEQ ID NO: 5049; WAN024DW8_at; Start 197; Stop 221
gaaccgtcgttccattgttcacgcg

SEQ ID NO: 173682 - DNA, 25 bp, Artificial
  probe
  misc_feature (1)..(25): SEQ ID NO: 5049; WAN024DW8_at; Start 212; Stop 236
tgttcacgcgcagctgctacgatat

SEQ ID NO: 173683 - DNA, 25 bp, Artificial
  probe
  misc_feature (1)..(25): SEQ ID NO: 5049; WAN024DW8_at; Start 223; Stop 247
agctgctacgatattgccaccaccg

SEQ ID NO: 173684 - DNA, 25 bp, Artificial
  probe
  misc_feature (1)..(25): SEQ ID NO: 5049; WAN024DW8_at; Start 96; Stop 120
gaatcttaatcaagcgaagcccgta

SEQ ID NO: 173685 - DNA, 25 bp, Artificial
  probe
  misc_feature (1)..(25): SEQ ID NO: 5049; WAN024DW8_at; Start 231; Stop 255
cgatattgccaccaccgcaacgaat

SEQ ID NO: 173686 - DNA, 25 bp, Artificial
  probe
  misc_feature (1)..(25): SEQ ID NO: 5049; WAN024DW8_at; Start 106; Stop 130
caagcgaagcccgtattcttccaaa

SEQ ID NO: 173687 - DNA, 25 bp, Artificial
  probe
  misc_feature (1)..(25): SEQ ID NO: 5049; WAN024DW8_at; Start 242; Stop 266
ccaccgcaacgaatcaaatgaactt

SEQ ID NO: 173688 - DNA, 25 bp, Artificial
  probe
  misc_feature (1)..(25): SEQ ID NO: 5049; WAN024DW8_at; Start 99; Stop 123
tcttaatcaagcgaagcccgtattc

SEQ ID NO: 173689 - DNA, 25 bp, Artificial
  probe
  misc_feature (1)..(25): SEQ ID NO: 5049; WAN024DW8_at; Start 158; Stop 182
taaacaactaccacaccaggtgcga

SEQ ID NO: 173690 - DNA, 25 bp, Artificial
  probe
  misc_feature (1)..(25): SEQ ID NO: 5049; WAN024DW8_at; Start 49; Stop 73
agacatacaacgaggtccaccacgg

SEQ ID NO: 173691 - DNA, 25 bp, Artificial
  probe
  misc_feature (1)..(25): SEQ ID NO: 5049; WAN024DW8_at; Start 167; Stop 191
accacaccaggtgcgatggtcaaag

SEQ ID NO: 173692 - DNA, 25 bp, Artificial
  probe
  misc_feature (1)..(25): SEQ ID NO: 5049; WAN024DW8_at; Start 279; Stop 303
ggttttgagcaagaagttcagctaa

SEQ ID NO: 173693 - DNA, 25 bp, Artificial
  probe
  misc_feature (1)..(25): SEQ ID NO: 5049; WAN024DW8_at; Start 256; Stop 280
caaatgaactttttctacaccaagg

SEQ ID NO: 173694 - DNA, 25 bp, Artificial
  probe
  misc_feature (1)..(25): SEQ ID NO: 5049; WAN024DW8_at; Start 36; Stop 60
gttcaaatggcatagacatacaacg

SEQ ID NO: 173695 - DNA, 25 bp, Artificial
  probe
  misc_feature (1)..(25): SEQ ID NO: 5049; WAN024DW8_at; Start 217; Stop 241
acgcgcagctgctacgatattgcca

SEQ ID NO: 173696 - DNA, 25 bp, Artificial
  probe
  misc_feature (1)..(25): SEQ ID NO: 5049; WAN024DW8_at; Start 265; Stop 289
tttttctacaccaaggttttgagca

SEQ ID NO: 173697 - DNA, 25 bp, Artificial
  probe
  misc_feature (1)..(25): SEQ ID NO: 5049; WAN024DW8_at; Start 237; Stop 261
tgccaccaccgcaacgaatcaaatg

SEQ ID NO: 173698 - DNA, 25 bp, Artificial
  probe
  misc_feature (1)..(25): SEQ ID NO: 5049; WAN024DW8_at; Start 171; Stop 195
caccaggtgcgatggtcaaagtgtt

SEQ ID NO: 173699 - DNA, 25 bp, Artificial
  probe
  misc_feature (1)..(25): SEQ ID NO: 5049; WAN024DW8_at; Start 109; Stop 133
gcgaagcccgtattcttccaaaatc

SEQ ID NO: 173700 - DNA, 25 bp, Artificial
  probe
  misc_feature (1)..(25): SEQ ID NO: 5049; WAN024DW8_at; Start 43; Stop 67
tggcatagacatacaacgaggtcca

SEQ ID NO: 173701 - DNA, 25 bp, Artificial
  probe
  misc_feature (1)..(25): SEQ ID NO: 5049; WAN024DW8_at; Start 142; Stop 166
cacggtattgcggtcataaacaact

SEQ ID NO: 173702 - DNA, 25 bp, Artificial
  probe
  misc_feature (1)..(25): SEQ ID NO: 5049; WAN024DW8_at; Start 86; Stop 110
tcacttccgcgaatcttaatcaagc

SEQ ID NO: 173703 - DNA, 25 bp, Artificial
  probe
  misc_feature (1)..(25): SEQ ID NO: 5049; WAN024DW8_at; Start 147; Stop 171
tattgcggtcataaacaactaccac

SEQ ID NO: 173704 - DNA, 25 bp, Artificial
  probe
  misc_feature (1)..(25): SEQ ID NO: 5049; WAN024DW8_at; Start 132; Stop 156
tcttattggtcacggtattgcggtc

SEQ ID NO: 173705 - DNA, 25 bp, Artificial
  probe
  misc_feature (1)..(25): SEQ ID NO: 5049; WAN024DW8_at; Start 205; Stop 229
gttccattgttcacgcgcagctgct

SEQ ID NO: 173706 - DNA, 25 bp, Artificial
  probe
  misc_feature (1)..(25): SEQ ID NO: 5049; WAN024DW8_at; Start 181; Stop 205
gatggtcaaagtgttagaaccgtcg

SEQ ID NO: 173707 - DNA, 25 bp, Artificial
  probe
  misc_feature (1)..(25): SEQ ID NO: 5049; WAN024DW8_at; Start 154; Stop 178
gtcataaacaactaccacaccaggt

SEQ ID NO: 173708 - DNA, 25 bp, Artificial
  probe
  misc_feature (1)..(25): SEQ ID NO: 2943; WAN024DW9_at; Start 1134; Stop 1158
cgggcttcgcttgattaagattcgc

SEQ ID NO: 173709 - DNA, 25 bp, Artificial
  probe
  misc_feature (1)..(25): SEQ ID NO: 2943; WAN024DW9_at; Start 211; Stop 235
gaacaactcgctgctgaatcattga

SEQ ID NO: 173710 - DNA, 25 bp, Artificial
  probe
  misc_feature (1)..(25): SEQ ID NO: 2943; WAN024DW9_at; Start 1057; Stop 1081
aacactttgaccatcgcacctggtg

SEQ ID NO: 173711 - DNA, 25 bp, Artificial
  probe
  misc_feature (1)..(25): SEQ ID NO: 2943; WAN024DW9_at; Start 64; Stop 88
cgtccaggcaaggagttagaaaact

SEQ ID NO: 173712 - DNA, 25 bp, Artificial
  probe
  misc_feature (1)..(25): SEQ ID NO: 2943; WAN024DW9_at; Start 1207; Stop 1231
ccatttgaacgtgaagaagtgtaac

SEQ ID NO: 173713 - DNA, 25 bp, Artificial
  probe
  misc_feature (1)..(25): SEQ ID NO: 2943; WAN024DW9_at; Start 160; Stop 184
gatgcatttgcccaagctcttcgcg

SEQ ID NO: 173714 - DNA, 25 bp, Artificial
  probe
  misc_feature (1)..(25): SEQ ID NO: 2943; WAN024DW9_at; Start 1179; Stop 1203
ccgtggtggacctcgttgtatgtct

SEQ ID NO: 173715 - DNA, 25 bp, Artificial
  probe
  misc_feature (1)..(25): SEQ ID NO: 2943; WAN024DW9_at; Start 481; Stop 505
tatttcactcgcgacccatttgcaa

SEQ ID NO: 173716 - DNA, 25 bp, Artificial
  probe
  misc_feature (1)..(25): SEQ ID NO: 2943; WAN024DW9_at; Start 275; Stop 299
tagacgaagccaacatccgtgatcg

SEQ ID NO: 173717 - DNA, 25 bp, Artificial
  probe
  misc_feature (1)..(25): SEQ ID NO: 2943; WAN024DW9_at; Start 512; Stop 536
gaaacgccgtatcgcttaaccacat

SEQ ID NO: 173718 - DNA, 25 bp, Artificial
  probe
  misc_feature (1)..(25): SEQ ID NO: 2943; WAN024DW9_at; Start 1119; Stop 1143
gattttggaagaatacgggcttcgc

SEQ ID NO: 173719 - DNA, 25 bp, Artificial
  probe
  misc_feature (1)..(25): SEQ ID NO: 2943; WAN024DW9_at; Start 877; Stop 901
gaaggcgaccttcacgtttactcag

SEQ ID NO: 173720 - DNA, 25 bp, Artificial
  probe
  misc_feature (1)..(25): SEQ ID NO: 2943; WAN024DW9_at; Start 861; Stop 885
tattcacccagaaatcgaaggcgac

SEQ ID NO: 173721 - DNA, 25 bp, Artificial
  probe
  misc_feature (1)..(25): SEQ ID NO: 2943; WAN024DW9_at; Start 85; Stop 109
aacttgttgccggactatcttgaaa

SEQ ID NO: 173722 - DNA, 25 bp, Artificial
  probe
  misc_feature (1)..(25): SEQ ID NO: 2943; WAN024DW9_at; Start 713; Stop 737
cagacgcagcttctatcgaaaaact

SEQ ID NO: 173723 - DNA, 25 bp, Artificial
  probe
  misc_feature (1)..(25): SEQ ID NO: 2943; WAN024DW9_at; Start 536; Stop 560
tgtttgcagacactcgtaaccgtga

SEQ ID NO: 173724 - DNA, 25 bp, Artificial
  probe
  misc_feature (1)..(25): SEQ ID NO: 2943; WAN024DW9_at; Start 1089; Stop 1113
tgtttatgaccgcaataccgtgacc

SEQ ID NO: 173725 - DNA, 25 bp, Artificial
  probe
  misc_feature (1)..(25): SEQ ID NO: 2943; WAN024DW9_at; Start 329; Stop 353
ttcacggcatcaaggacaaccaaga

SEQ ID NO: 173726 - DNA, 25 bp, Artificial
  probe
  misc_feature (1)..(25): SEQ ID NO: 2943; WAN024DW9_at; Start 623; Stop 647
tctacaaccgtgaagaagatacgcg

SEQ ID NO: 173727 - DNA, 25 bp, Artificial
  probe
  misc_feature (1)..(25): SEQ ID NO: 2943; WAN024DW9_at; Start 1005; Stop 1029
cggtggtggcaatatcgtagcagct

SEQ ID NO: 173728 - DNA, 25 bp, Artificial
  probe
  misc_feature (1)..(25): SEQ ID NO: 2943; WAN024DW9_at; Start 991; Stop 1015
catttgattcgttgcggtggtggca

SEQ ID NO: 173729 - DNA, 25 bp, Artificial
  probe
  misc_feature (1)..(25): SEQ ID NO: 2943; WAN024DW9_at; Start 678; Stop 702
taaagacgtccttgcagtaggtatc

SEQ ID NO: 173730 - DNA, 25 bp, Artificial
  probe
  misc_feature (1)..(25): SEQ ID NO: 2943; WAN024DW9_at; Start 408; Stop 432
tgacgaagctaaagatctaactgac

SEQ ID NO: 173731 - DNA, 25 bp, Artificial
  probe
  misc_feature (1)..(25): SEQ ID NO: 2943; WAN024DW9_at; Start 450; Stop 474
tccatttgcaattgacccgatgcca

SEQ ID NO: 173732 - DNA, 25 bp, Artificial
  probe
  misc_feature (1)..(25): SEQ ID NO: 2943; WAN024DW9_at; Start 392; Stop 416
aattgccagaaattcctgacgaagc

SEQ ID NO: 173733 - DNA, 25 bp, Artificial
  probe
  misc_feature (1)..(25): SEQ ID NO: 2943; WAN024DW9_at; Start 180; Stop 204
tcgcgatgaaggaattgaggttctc

SEQ ID NO: 173734 - DNA, 25 bp, Artificial
  probe
  misc_feature (1)..(25): SEQ ID NO: 2943; WAN024DW9_at; Start 1022; Stop 1046
tagcagctgcgcgtgaacaatggaa

SEQ ID NO: 173735 - DNA, 25 bp, Artificial
  probe
  misc_feature (1)..(25): SEQ ID NO: 2943; WAN024DW9_at; Start 695; Stop 719
taggtatctctcaacgtacagacgc

SEQ ID NO: 173736 - DNA, 25 bp, Artificial
  probe
  misc_feature (1)..(25): SEQ ID NO: 2943; WAN024DW9_at; Start 497; Stop 521
catttgcaacaattggaaacgccgt

SEQ ID NO: 173737 - DNA, 25 bp, Artificial
  probe
  misc_feature (1)..(25): SEQ ID NO: 2943; WAN024DW9_at; Start 807; Stop 831
taaattcatgcacttggatactgtc

SEQ ID NO: 173738 - DNA, 25 bp, Artificial
  probe
  misc_feature (1)..(25): SEQ ID NO: 2943; WAN024DW9_at; Start 47; Stop 71
aaaaagttatgttgcaccgtccagg

SEQ ID NO: 173739 - DNA, 25 bp, Artificial
  probe
  misc_feature (1)..(25): SEQ ID NO: 2943; WAN024DW9_at; Start 230; Stop 254
cattgacctctccagaaatccgcga

SEQ ID NO: 173740 - DNA, 25 bp, Artificial
  probe
  misc_feature (1)..(25): SEQ ID NO: 2943; WAN024DW9_at; Start 784; Stop 808
gcctttgaatttgctaacaaccgta

SEQ ID NO: 173741 - DNA, 25 bp, Artificial
  probe
  misc_feature (1)..(25): SEQ ID NO: 2943; WAN024DW9_at; Start 261; Stop 285
tatcgaggaatacttagacgaagcc

SEQ ID NO: 173742 - DNA, 25 bp, Artificial
  probe
  misc_feature (1)..(25): SEQ ID NO: 5557; WAN024DWA_at; Start 71; Stop 95
tgagctgtcggataaaggacaaagc

SEQ ID NO: 173743 - DNA, 25 bp, Artificial
  probe
  misc_feature (1)..(25): SEQ ID NO: 5557; WAN024DWA_at; Start 2; Stop 26
tgggatacttcaaggagcaagtcgc

SEQ ID NO: 173744 - DNA, 25 bp, Artificial
  probe
  misc_feature (1)..(25): SEQ ID NO: 5557; WAN024DWA_at; Start 108; Stop 132
tgaccaccaaaatcaactttttgaa

SEQ ID NO: 173745 - DNA, 25 bp, Artificial
  probe
  misc_feature (1)..(25): SEQ ID NO: 5557; WAN024DWA_at; Start 21; Stop 45
agtcgccctttcctctcctccaagg

SEQ ID NO: 173746 - DNA, 25 bp, Artificial
  probe
  misc_feature (1)..(25): SEQ ID NO: 5557; WAN024DWA_at; Start 188; Stop 212
aagcgctcaggatcctcctgtccag

SEQ ID NO: 173747 - DNA, 25 bp, Artificial
  probe
  misc_feature (1)..(25): SEQ ID NO: 5557; WAN024DWA_at; Start 240; Stop 264
taggaccgaagtggataaaagctgc

SEQ ID NO: 173748 - DNA, 25 bp, Artificial
  probe
  misc_feature (1)..(25): SEQ ID NO: 5557; WAN024DWA_at; Start 88; Stop 112
gacaaagccatcgtggtgcttgacc

SEQ ID NO: 173749 - DNA, 25 bp, Artificial
  probe
  misc_feature (1)..(25): SEQ ID NO: 5557; WAN024DWA_at; Start 130; Stop 154
gaagcccgtttccttgagcacacga

SEQ ID NO: 173750 - DNA, 25 bp, Artificial
  probe
  misc_feature (1)..(25): SEQ ID NO: 5557; WAN024DWA_at; Start 182; Stop 206
gggttaaagcgctcaggatcctcct

SEQ ID NO: 173751 - DNA, 25 bp, Artificial
  probe
  misc_feature (1)..(25): SEQ ID NO: 5557; WAN024DWA_at; Start 243; Stop 267
gaccgaagtggataaaagctgctag

SEQ ID NO: 173752 - DNA, 25 bp, Artificial
  probe
  misc_feature (1)..(25): SEQ ID NO: 5557; WAN024DWA_at; Start 11; Stop 35
tcaaggagcaagtcgccctttcctc

SEQ ID NO: 173753 - DNA, 25 bp, Artificial
  probe
  misc_feature (1)..(25): SEQ ID NO: 5557; WAN024DWA_at; Start 137; Stop 161
gtttccttgagcacacgaacccact

SEQ ID NO: 173754 - DNA, 25 bp, Artificial
  probe
  misc_feature (1)..(25): SEQ ID NO: 5557; WAN024DWA_at; Start 59; Stop 83
gaataatctgtgtgagctgtcggat

SEQ ID NO: 173755 - DNA, 25 bp, Artificial
  probe
  misc_feature (1)..(25): SEQ ID NO: 5557; WAN024DWA_at; Start 44; Stop 68
ggactgaccttaaccgaataatctg

SEQ ID NO: 173756 - DNA, 25 bp, Artificial
  probe
  misc_feature (1)..(25): SEQ ID NO: 5557; WAN024DWA_at; Start 49; Stop 73
gaccttaaccgaataatctgtgtga

SEQ ID NO: 173757 - DNA, 25 bp, Artificial
  probe
  misc_feature (1)..(25): SEQ ID NO: 5557; WAN024DWA_at; Start 172; Stop 196
caactgactcgggttaaagcgctca

SEQ ID NO: 173758 - DNA, 25 bp, Artificial
  probe
  misc_feature (1)..(25): SEQ ID NO: 5557; WAN024DWA_at; Start 215; Stop 239
ccccattcttggtcataaaaggtat

SEQ ID NO: 173759 - DNA, 25 bp, Artificial
  probe
  misc_feature (1)..(25): SEQ ID NO: 5557; WAN024DWA_at; Start 221; Stop 245
tcttggtcataaaaggtattaggac

SEQ ID NO: 173760 - DNA, 25 bp, Artificial
  probe
  misc_feature (1)..(25): SEQ ID NO: 5557; WAN024DWA_at; Start 102; Stop 126
ggtgcttgaccaccaaaatcaactt

SEQ ID NO: 173761 - DNA, 25 bp, Artificial
  probe
  misc_feature (1)..(25): SEQ ID NO: 5557; WAN024DWA_at; Start 165; Stop 189
gcgcatccaactgactcgggttaaa

SEQ ID NO: 173762 - DNA, 25 bp, Artificial
  probe
  misc_feature (1)..(25): SEQ ID NO: 5557; WAN024DWA_at; Start 54; Stop 78
taaccgaataatctgtgtgagctgt

SEQ ID NO: 173763 - DNA, 25 bp, Artificial
  probe
  misc_feature (1)..(25): SEQ ID NO: 5557; WAN024DWA_at; Start 5; Stop 29
gatacttcaaggagcaagtcgccct

SEQ ID NO: 173764 - DNA, 25 bp, Artificial
  probe
  misc_feature (1)..(25): SEQ ID NO: 5557; WAN024DWA_at; Start 62; Stop 86
taatctgtgtgagctgtcggataaa

SEQ ID NO: 173765 - DNA, 25 bp, Artificial
  probe
  misc_feature (1)..(25): SEQ ID NO: 5557; WAN024DWA_at; Start 168; Stop 192
catccaactgactcgggttaaagcg

SEQ ID NO: 173766 - DNA, 25 bp, Artificial
  probe
  misc_feature (1)..(25): SEQ ID NO: 5557; WAN024DWA_at; Start 228; Stop 252
cataaaaggtattaggaccgaagtg

SEQ ID NO: 173767 - DNA, 25 bp, Artificial
  probe
  misc_feature (1)..(25): SEQ ID NO: 5557; WAN024DWA_at; Start 95; Stop 119
ccatcgtggtgcttgaccaccaaaa

SEQ ID NO: 173768 - DNA, 25 bp, Artificial
  probe
  misc_feature (1)..(25): SEQ ID NO: 5557; WAN024DWA_at; Start 66; Stop 90
ctgtgtgagctgtcggataaaggac

SEQ ID NO: 173769 - DNA, 25 bp, Artificial
  probe
  misc_feature (1)..(25): SEQ ID NO: 5557; WAN024DWA_at; Start 125; Stop 149
tttttgaagcccgtttccttgagca

SEQ ID NO: 173770 - DNA, 25 bp, Artificial
  probe
  misc_feature (1)..(25): SEQ ID NO: 5557; WAN024DWA_at; Start 78; Stop 102
tcggataaaggacaaagccatcgtg

SEQ ID NO: 173771 - DNA, 25 bp, Artificial
  probe
  misc_feature (1)..(25): SEQ ID NO: 5557; WAN024DWA_at; Start 162; Stop 186
cacgcgcatccaactgactcgggtt

SEQ ID NO: 173772 - DNA, 25 bp, Artificial
  probe
  misc_feature (1)..(25): SEQ ID NO: 5557; WAN024DWA_at; Start 176; Stop 200
tgactcgggttaaagcgctcaggat

SEQ ID NO: 173773 - DNA, 25 bp, Artificial
  probe
  misc_feature (1)..(25): SEQ ID NO: 5557; WAN024DWA_at; Start 91; Stop 115
aaagccatcgtggtgcttgaccacc

SEQ ID NO: 173774 - DNA, 25 bp, Artificial
  probe
  misc_feature (1)..(25): SEQ ID NO: 5557; WAN024DWA_at; Start 36; Stop 60
tcctccaaggactgaccttaaccga

SEQ ID NO: 173775 - DNA, 25 bp, Artificial
  probe
  misc_feature (1)..(25): SEQ ID NO: 5557; WAN024DWA_at; Start 82; Stop 106
ataaaggacaaagccatcgtggtgc

SEQ ID NO: 173776 - DNA, 25 bp, Artificial
  probe
  misc_feature (1)..(25): SEQ ID NO: 2045; WAN024DWB_at; Start 194; Stop 218
cctctcagaatgctactctccataa

SEQ ID NO: 173777 - DNA, 25 bp, Artificial
  probe
  misc_feature (1)..(25): SEQ ID NO: 2045; WAN024DWB_at; Start 120; Stop 144
ccaactggtaggctcaggatttttc

SEQ ID NO: 173778 - DNA, 25 bp, Artificial
  probe
  misc_feature (1)..(25): SEQ ID NO: 2045; WAN024DWB_at; Start 123; Stop 147
actggtaggctcaggatttttctcc

SEQ ID NO: 173779 - DNA, 25 bp, Artificial
  probe
  misc_feature (1)..(25): SEQ ID NO: 2045; WAN024DWB_at; Start 186; Stop 210
tgctaacacctctcagaatgctact

SEQ ID NO: 173780 - DNA, 25 bp, Artificial
  probe
  misc_feature (1)..(25): SEQ ID NO: 2045; WAN024DWB_at; Start 154; Stop 178
ttccctcttcaaacagctctgtcat

SEQ ID NO: 173781 - DNA, 25 bp, Artificial
  probe
  misc_feature (1)..(25): SEQ ID NO: 2045; WAN024DWB_at; Start 239; Stop 263
ggtcattgtgtgaagaccattcact

SEQ ID NO: 173782 - DNA, 25 bp, Artificial
  probe
  misc_feature (1)..(25): SEQ ID NO: 2045; WAN024DWB_at; Start 178; Stop 202
tatggttctgctaacacctctcaga

SEQ ID NO: 173783 - DNA, 25 bp, Artificial
  probe
  misc_feature (1)..(25): SEQ ID NO: 2045; WAN024DWB_at; Start 126; Stop 150
ggtaggctcaggatttttctcctca

SEQ ID NO: 173784 - DNA, 25 bp, Artificial
  probe
  misc_feature (1)..(25): SEQ ID NO: 2045; WAN024DWB_at; Start 181; Stop 205
ggttctgctaacacctctcagaatg

SEQ ID NO: 173785 - DNA, 25 bp, Artificial
  probe
  misc_feature (1)..(25): SEQ ID NO: 2045; WAN024DWB_at; Start 159; Stop 183
tcttcaaacagctctgtcatatggt

SEQ ID NO: 173786 - DNA, 25 bp, Artificial
  probe
  misc_feature (1)..(25): SEQ ID NO: 2045; WAN024DWB_at; Start 113; Stop 137
tccaactccaactggtaggctcagg

SEQ ID NO: 173787 - DNA, 25 bp, Artificial
  probe
  misc_feature (1)..(25): SEQ ID NO: 2045; WAN024DWB_at; Start 247; Stop 271
tgtgaagaccattcactatccagac

SEQ ID NO: 173788 - DNA, 25 bp, Artificial
  probe
  misc_feature (1)..(25): SEQ ID NO: 2045; WAN024DWB_at; Start 79; Stop 103
tggataataaaccatgatctaacag

SEQ ID NO: 173789 - DNA, 25 bp, Artificial
  probe
  misc_feature (1)..(25): SEQ ID NO: 2045; WAN024DWB_at; Start 115; Stop 139
caactccaactggtaggctcaggat

SEQ ID NO: 173790 - DNA, 25 bp, Artificial
  probe
  misc_feature (1)..(25): SEQ ID NO: 2045; WAN024DWB_at; Start 226; Stop 250
caggcttctttcaggtcattgtgtg

SEQ ID NO: 173791 - DNA, 25 bp, Artificial
  probe
  misc_feature (1)..(25): SEQ ID NO: 2045; WAN024DWB_at; Start 173; Stop 197
tgtcatatggttctgctaacacctc

SEQ ID NO: 173792 - DNA, 25 bp, Artificial
  probe
  misc_feature (1)..(25): SEQ ID NO: 2045; WAN024DWB_at; Start 258; Stop 282
ttcactatccagacttttccacaga

SEQ ID NO: 173793 - DNA, 25 bp, Artificial
  probe
  misc_feature (1)..(25): SEQ ID NO: 2045; WAN024DWB_at; Start 220; Stop 244
tattctcaggcttctttcaggtcat

SEQ ID NO: 173794 - DNA, 25 bp, Artificial
  probe
  misc_feature (1)..(25): SEQ ID NO: 2045; WAN024DWB_at; Start 205; Stop 229
gctactctccataattattctcagg

SEQ ID NO: 173795 - DNA, 25 bp, Artificial
  probe
  misc_feature (1)..(25): SEQ ID NO: 2045; WAN024DWB_at; Start 223; Stop 247
tctcaggcttctttcaggtcattgt

SEQ ID NO: 173796 - DNA, 25 bp, Artificial
  probe
  misc_feature (1)..(25): SEQ ID NO: 2045; WAN024DWB_at; Start 169; Stop 193
gctctgtcatatggttctgctaaca

SEQ ID NO: 173797 - DNA, 25 bp, Artificial
  probe
  misc_feature (1)..(25): SEQ ID NO: 2045; WAN024DWB_at; Start 118; Stop 142
ctccaactggtaggctcaggatttt

SEQ ID NO: 173798 - DNA, 25 bp, Artificial
  probe
  misc_feature (1)..(25): SEQ ID NO: 2045; WAN024DWB_at; Start 128; Stop 152
taggctcaggatttttctcctcaat

SEQ ID NO: 173799 - DNA, 25 bp, Artificial
  probe
  misc_feature (1)..(25): SEQ ID NO: 2045; WAN024DWB_at; Start 15; Stop 39
tcttcatcgttatatatctccttct

SEQ ID NO: 173800 - DNA, 25 bp, Artificial
  probe
  misc_feature (1)..(25): SEQ ID NO: 2045; WAN024DWB_at; Start 74; Stop 98
ggttgtggataataaaccatgatct

SEQ ID NO: 173801 - DNA, 25 bp, Artificial
  probe
  misc_feature (1)..(25): SEQ ID NO: 2045; WAN024DWB_at; Start 216; Stop 240
taattattctcaggcttctttcagg

SEQ ID NO: 173802 - DNA, 25 bp, Artificial
  probe
  misc_feature (1)..(25): SEQ ID NO: 2045; WAN024DWB_at; Start 68; Stop 92
tccacaggttgtggataataaacca

SEQ ID NO: 173803 - DNA, 25 bp, Artificial
  probe
  misc_feature (1)..(25): SEQ ID NO: 2045; WAN024DWB_at; Start 228; Stop 252
ggcttctttcaggtcattgtgtgaa

SEQ ID NO: 173804 - DNA, 25 bp, Artificial
  probe
  misc_feature (1)..(25): SEQ ID NO: 2045; WAN024DWB_at; Start 2; Stop 26
tgcggtttgattttcttcatcgtta

SEQ ID NO: 173805 - DNA, 25 bp, Artificial
  probe
  misc_feature (1)..(25): SEQ ID NO: 2045; WAN024DWB_at; Start 237; Stop 261
caggtcattgtgtgaagaccattca

SEQ ID NO: 173806 - DNA, 25 bp, Artificial
  probe
  misc_feature (1)..(25): SEQ ID NO: 2045; WAN024DWB_at; Start 250; Stop 274
gaagaccattcactatccagacttt

SEQ ID NO: 173807 - DNA, 25 bp, Artificial
  probe
  misc_feature (1)..(25): SEQ ID NO: 2045; WAN024DWB_at; Start 164; Stop 188
aaacagctctgtcatatggttctgc

SEQ ID NO: 173808 - DNA, 25 bp, Artificial
  probe
  misc_feature (1)..(25): SEQ ID NO: 2045; WAN024DWB_at; Start 233; Stop 257
ctttcaggtcattgtgtgaagacca

SEQ ID NO: 173809 - DNA, 25 bp, Artificial
  probe
  misc_feature (1)..(25): SEQ ID NO: 2045; WAN024DWB_at; Start 263; Stop 287
tatccagacttttccacagattgtg

SEQ ID NO: 173810 - DNA, 25 bp, Artificial
  probe
  misc_feature (1)..(25): SEQ ID NO: 2724; WAN024DWC_at; Start 394; Stop 418
gaagtatcccaagctgccacagagt

SEQ ID NO: 173811 - DNA, 25 bp, Artificial
  probe
  misc_feature (1)..(25): SEQ ID NO: 2724; WAN024DWC_at; Start 1041; Stop 1065
taaagaagatttggctctgggagct

SEQ ID NO: 173812 - DNA, 25 bp, Artificial
  probe
  misc_feature (1)..(25): SEQ ID NO: 2724; WAN024DWC_at; Start 857; Stop 881
caggctggttctaccatgaggatca

SEQ ID NO: 173813 - DNA, 25 bp, Artificial
  probe
  misc_feature (1)..(25): SEQ ID NO: 2724; WAN024DWC_at; Start 1462; Stop 1486
tttgcagaaaaaagcctagctgtgg

SEQ ID NO: 173814 - DNA, 25 bp, Artificial
  probe
  misc_feature (1)..(25): SEQ ID NO: 2724; WAN024DWC_at; Start 1687; Stop 1711
gatttctatctgaacctaacggtgg

SEQ ID NO: 173815 - DNA, 25 bp, Artificial
  probe
  misc_feature (1)..(25): SEQ ID NO: 2724; WAN024DWC_at; Start 931; Stop 955
gggcgaggaactccactcttgctta

SEQ ID NO: 173816 - DNA, 25 bp, Artificial
  probe
  misc_feature (1)..(25): SEQ ID NO: 2724; WAN024DWC_at; Start 545; Stop 569
actatgggaatgctggtaagttcgc

SEQ ID NO: 173817 - DNA, 25 bp, Artificial
  probe
  misc_feature (1)..(25): SEQ ID NO: 2724; WAN024DWC_at; Start 954; Stop 978
taatattccgccgaatcaagctggg

SEQ ID NO: 173818 - DNA, 25 bp, Artificial
  probe
  misc_feature (1)..(25): SEQ ID NO: 2724; WAN024DWC_at; Start 715; Stop 739
gaacgagggtatgcaggtgatccac

SEQ ID NO: 173819 - DNA, 25 bp, Artificial
  probe
  misc_feature (1)..(25): SEQ ID NO: 2724; WAN024DWC_at; Start 217; Stop 241
tttaacccgagtcagttggatgcgc

SEQ ID NO: 173820 - DNA, 25 bp, Artificial
  probe
  misc_feature (1)..(25): SEQ ID NO: 2724; WAN024DWC_at; Start 840; Stop 864
agatgtttccatccgtccaggctgg

SEQ ID NO: 173821 - DNA, 25 bp, Artificial
  probe
  misc_feature (1)..(25): SEQ ID NO: 2724; WAN024DWC_at; Start 470; Stop 494
tctatcatgtggaccgagaagcgga

SEQ ID NO: 173822 - DNA, 25 bp, Artificial
  probe
  misc_feature (1)..(25): SEQ ID NO: 2724; WAN024DWC_at; Start 805; Stop 829
gatccctcgggcacgattttttcaa

SEQ ID NO: 173823 - DNA, 25 bp, Artificial
  probe
  misc_feature (1)..(25): SEQ ID NO: 2724; WAN024DWC_at; Start 916; Stop 940
tactttcactcagtagggcgaggaa

SEQ ID NO: 173824 - DNA, 25 bp, Artificial
  probe
  misc_feature (1)..(25): SEQ ID NO: 2724; WAN024DWC_at; Start 696; Stop 720
tatccgctggattggcaatgaacga

SEQ ID NO: 173825 - DNA, 25 bp, Artificial
  probe
  misc_feature (1)..(25): SEQ ID NO: 2724; WAN024DWC_at; Start 1056; Stop 1080
tctgggagctgaggtatctggtcca

SEQ ID NO: 173826 - DNA, 25 bp, Artificial
  probe
  misc_feature (1)..(25): SEQ ID NO: 2724; WAN024DWC_at; Start 1018; Stop 1042
gcgacctatcgcaatgagctctata

SEQ ID NO: 173827 - DNA, 25 bp, Artificial
  probe
  misc_feature (1)..(25): SEQ ID NO: 2724; WAN024DWC_at; Start 122; Stop 146
cttatctgggagatgaactagcagc

SEQ ID NO: 173828 - DNA, 25 bp, Artificial
  probe
  misc_feature (1)..(25): SEQ ID NO: 2724; WAN024DWC_at; Start 1241; Stop 1265
gaatcgctgcttttcatgtgcaagt

SEQ ID NO: 173829 - DNA, 25 bp, Artificial
  probe
  misc_feature (1)..(25): SEQ ID NO: 2724; WAN024DWC_at; Start 91; Stop 115
catggaccgttaccaagtcagactc

SEQ ID NO: 173830 - DNA, 25 bp, Artificial
  probe
  misc_feature (1)..(25): SEQ ID NO: 2724; WAN024DWC_at; Start 201; Stop 225
ggaggatcctgagcgctttaacccg

SEQ ID NO: 173831 - DNA, 25 bp, Artificial
  probe
  misc_feature (1)..(25): SEQ ID NO: 2724; WAN024DWC_at; Start 1226; Stop 1250
tgaagctagggcaacgaatcgctgc

SEQ ID NO: 173832 - DNA, 25 bp, Artificial
  probe
  misc_feature (1)..(25): SEQ ID NO: 2724; WAN024DWC_at; Start 338; Stop 362
cagattattcggttaaggtcagtcc

SEQ ID NO: 173833 - DNA, 25 bp, Artificial
  probe
  misc_feature (1)..(25): SEQ ID NO: 2724; WAN024DWC_at; Start 16; Stop 40
caacctgtggataatcttgtgaaca

SEQ ID NO: 173834 - DNA, 25 bp, Artificial
  probe
  misc_feature (1)..(25): SEQ ID NO: 2724; WAN024DWC_at; Start 288; Stop 312
tttggtggtcaagcaccacgatggc

SEQ ID NO: 173835 - DNA, 25 bp, Artificial
  probe
  misc_feature (1)..(25): SEQ ID NO: 2724; WAN024DWC_at; Start 1571; Stop 1595
caggtgtccatggtgtcgcctatca

SEQ ID NO: 173836 - DNA, 25 bp, Artificial
  probe
  misc_feature (1)..(25): SEQ ID NO: 2724; WAN024DWC_at; Start 969; Stop 993
tcaagctgggctctttgatgcaaag

SEQ ID NO: 173837 - DNA, 25 bp, Artificial
  probe
  misc_feature (1)..(25): SEQ ID NO: 2724; WAN024DWC_at; Start 877; Stop 901
gatcaggatcctaagtctctcgagg

SEQ ID NO: 173838 - DNA, 25 bp, Artificial
  probe
  misc_feature (1)..(25): SEQ ID NO: 2724; WAN024DWC_at; Start 1663; Stop 1687
tatttcgcaggagataaaaccttgg

SEQ ID NO: 173839 - DNA, 25 bp, Artificial
  probe
  misc_feature (1)..(25): SEQ ID NO: 2724; WAN024DWC_at; Start 75; Stop 99
gaagaaaatcaaaccgcatggaccg

SEQ ID NO: 173840 - DNA, 25 bp, Artificial
  probe
  misc_feature (1)..(25): SEQ ID NO: 2724; WAN024DWC_at; Start 252; Stop 276
tcgtgtgctcaaggaaacgggcttc

SEQ ID NO: 173841 - DNA, 25 bp, Artificial
  probe
  misc_feature (1)..(25): SEQ ID NO: 2724; WAN024DWC_at; Start 676; Stop 700
ttttcaacagaaggcaccagtatcc

SEQ ID NO: 173842 - DNA, 25 bp, Artificial
  probe
  misc_feature (1)..(25): SEQ ID NO: 2724; WAN024DWC_at; Start 825; Stop 849
ttcaatcggagaggcagatgtttcc

SEQ ID NO: 173843 - DNA, 25 bp, Artificial
  probe
  misc_feature (1)..(25): SEQ ID NO: 2724; WAN024DWC_at; Start 1111; Stop 1135
ttgacagacggccttgagaccagct

SEQ ID NO: 173844 - DNA, 25 bp, Artificial
  probe
  misc_feature (1)..(25): SEQ ID NO: 3842; WAN024DWD_at; Start 205; Stop 229
caaaagatagttgctaaaggtttct

SEQ ID NO: 173845 - DNA, 25 bp, Artificial
  probe
  misc_feature (1)..(25): SEQ ID NO: 3842; WAN024DWD_at; Start 139; Stop 163
gctcatttcgtgaatttcgtaacca

SEQ ID NO: 173846 - DNA, 25 bp, Artificial
  probe
  misc_feature (1)..(25): SEQ ID NO: 3842; WAN024DWD_at; Start 1; Stop 25
gtgaaaagctttctgacggagcgtc

SEQ ID NO: 173847 - DNA, 25 bp, Artificial
  probe
  misc_feature (1)..(25): SEQ ID NO: 3842; WAN024DWD_at; Start 12; Stop 36
tctgacggagcgtcttgataagaag

SEQ ID NO: 173848 - DNA, 25 bp, Artificial
  probe
  misc_feature (1)..(25): SEQ ID NO: 3842; WAN024DWD_at; Start 128; Stop 152
gtagccatctcgctcatttcgtgaa

SEQ ID NO: 173849 - DNA, 25 bp, Artificial
  probe
  misc_feature (1)..(25): SEQ ID NO: 3842; WAN024DWD_at; Start 109; Stop 133
tatttgtccaaaaggagcagtagcc

SEQ ID NO: 173850 - DNA, 25 bp, Artificial
  probe
  misc_feature (1)..(25): SEQ ID NO: 3842; WAN024DWD_at; Start 117; Stop 141
caaaaggagcagtagccatctcgct

SEQ ID NO: 173851 - DNA, 25 bp, Artificial
  probe
  misc_feature (1)..(25): SEQ ID NO: 3842; WAN024DWD_at; Start 124; Stop 148
agcagtagccatctcgctcatttcg

SEQ ID NO: 173852 - DNA, 25 bp, Artificial
  probe
  misc_feature (1)..(25): SEQ ID NO: 3842; WAN024DWD_at; Start 184; Stop 208
gggagcatcttgacaggctttcaaa

SEQ ID NO: 173853 - DNA, 25 bp, Artificial
  probe
  misc_feature (1)..(25): SEQ ID NO: 3842; WAN024DWD_at; Start 119; Stop 143
aaaggagcagtagccatctcgctca

SEQ ID NO: 173854 - DNA, 25 bp, Artificial
  probe
  misc_feature (1)..(25): SEQ ID NO: 3842; WAN024DWD_at; Start 133; Stop 157
catctcgctcatttcgtgaatttcg

SEQ ID NO: 173855 - DNA, 25 bp, Artificial
  probe
  misc_feature (1)..(25): SEQ ID NO: 3842; WAN024DWD_at; Start 156; Stop 180
cgtaaccatagcctgttgtttcaaa

SEQ ID NO: 173856 - DNA, 25 bp, Artificial
  probe
  misc_feature (1)..(25): SEQ ID NO: 3842; WAN024DWD_at; Start 146; Stop 170
tcgtgaatttcgtaaccatagcctg

SEQ ID NO: 173857 - DNA, 25 bp, Artificial
  probe
  misc_feature (1)..(25): SEQ ID NO: 3842; WAN024DWD_at; Start 24; Stop 48
tcttgataagaagggcagtgtagtc

SEQ ID NO: 173858 - DNA, 25 bp, Artificial
  probe
  misc_feature (1)..(25): SEQ ID NO: 3842; WAN024DWD_at; Start 102; Stop 126
aaatggctatttgtccaaaaggagc

SEQ ID NO: 173859 - DNA, 25 bp, Artificial
  probe
  misc_feature (1)..(25): SEQ ID NO: 3842; WAN024DWD_at; Start 16; Stop 40
acggagcgtcttgataagaagggca

SEQ ID NO: 173860 - DNA, 25 bp, Artificial
  probe
  misc_feature (1)..(25): SEQ ID NO: 3842; WAN024DWD_at; Start 191; Stop 215
tcttgacaggctttcaaaagatagt

SEQ ID NO: 173861 - DNA, 25 bp, Artificial
  probe
  misc_feature (1)..(25): SEQ ID NO: 3842; WAN024DWD_at; Start 3; Stop 27
gaaaagctttctgacggagcgtctt

SEQ ID NO: 173862 - DNA, 25 bp, Artificial
  probe
  misc_feature (1)..(25): SEQ ID NO: 3842; WAN024DWD_at; Start 7; Stop 31
agctttctgacggagcgtcttgata

SEQ ID NO: 173863 - DNA, 25 bp, Artificial
  probe
  misc_feature (1)..(25): SEQ ID NO: 3842; WAN024DWD_at; Start 65; Stop 89
cggaagagataaggaatgtggaaac

SEQ ID NO: 173864 - DNA, 25 bp, Artificial
  probe
  misc_feature (1)..(25): SEQ ID NO: 3842; WAN024DWD_at; Start 150; Stop 174
gaatttcgtaaccatagcctgttgt

SEQ ID NO: 173865 - DNA, 25 bp, Artificial
  probe
  misc_feature (1)..(25): SEQ ID NO: 3842; WAN024DWD_at; Start 85; Stop 109
gaaactaggctggttggaaatggct

SEQ ID NO: 173866 - DNA, 25 bp, Artificial
  probe
  misc_feature (1)..(25): SEQ ID NO: 3842; WAN024DWD_at; Start 74; Stop 98
taaggaatgtggaaactaggctggt

SEQ ID NO: 173867 - DNA, 25 bp, Artificial
  probe
  misc_feature (1)..(25): SEQ ID NO: 3842; WAN024DWD_at; Start 169; Stop 193
tgttgtttcaaagaggggagcatct

SEQ ID NO: 173868 - DNA, 25 bp, Artificial
  probe
  misc_feature (1)..(25): SEQ ID NO: 3842; WAN024DWD_at; Start 228; Stop 252
cttttccacccatcagttggattaa

SEQ ID NO: 173869 - DNA, 25 bp, Artificial
  probe
  misc_feature (1)..(25): SEQ ID NO: 3842; WAN024DWD_at; Start 21; Stop 45
gcgtcttgataagaagggcagtgta

SEQ ID NO: 173870 - DNA, 25 bp, Artificial
  probe
  misc_feature (1)..(25): SEQ ID NO: 3842; WAN024DWD_at; Start 186; Stop 210
gagcatcttgacaggctttcaaaag

SEQ ID NO: 173871 - DNA, 25 bp, Artificial
  probe
  misc_feature (1)..(25): SEQ ID NO: 3842; WAN024DWD_at; Start 93; Stop 117
gctggttggaaatggctatttgtcc

SEQ ID NO: 173872 - DNA, 25 bp, Artificial
  probe
  misc_feature (1)..(25): SEQ ID NO: 3842; WAN024DWD_at; Start 38; Stop 62
gcagtgtagtcagggtaatcgctgt

SEQ ID NO: 173873 - DNA, 25 bp, Artificial
  probe
  misc_feature (1)..(25): SEQ ID NO: 3842; WAN024DWD_at; Start 161; Stop 185
ccatagcctgttgtttcaaagaggg

SEQ ID NO: 173874 - DNA, 25 bp, Artificial
  probe
  misc_feature (1)..(25): SEQ ID NO: 3842; WAN024DWD_at; Start 224; Stop 248
gtttcttttccacccatcagttgga

SEQ ID NO: 173875 - DNA, 25 bp, Artificial
  probe
  misc_feature (1)..(25): SEQ ID NO: 3842; WAN024DWD_at; Start 113; Stop 137
tgtccaaaaggagcagtagccatct

SEQ ID NO: 173876 - DNA, 25 bp, Artificial
  probe
  misc_feature (1)..(25): SEQ ID NO: 3842; WAN024DWD_at; Start 197; Stop 221
caggctttcaaaagatagttgctaa

SEQ ID NO: 173877 - DNA, 25 bp, Artificial
  probe
  misc_feature (1)..(25): SEQ ID NO: 3842; WAN024DWD_at; Start 222; Stop 246
aggtttcttttccacccatcagttg

SEQ ID NO: 173878 - DNA, 25 bp, Artificial
  probe
  misc_feature (1)..(25): SEQ ID NO: 3887; WAN024DWE_at; Start 45; Stop 69
gaatagaagcaccatagcaagtcgg

SEQ ID NO: 173879 - DNA, 25 bp, Artificial
  probe
  misc_feature (1)..(25): SEQ ID NO: 3887; WAN024DWE_at; Start 101; Stop 125
gaaaagagcttcaaatagtgaggct

SEQ ID NO: 173880 - DNA, 25 bp, Artificial
  probe
  misc_feature (1)..(25): SEQ ID NO: 3887; WAN024DWE_at; Start 72; Stop 96
tgagctgggtttcaatctgataacg

SEQ ID NO: 173881 - DNA, 25 bp, Artificial
  probe
  misc_feature (1)..(25): SEQ ID NO: 3887; WAN024DWE_at; Start 78; Stop 102
gggtttcaatctgataacgcagaga

SEQ ID NO: 173882 - DNA, 25 bp, Artificial
  probe
  misc_feature (1)..(25): SEQ ID NO: 3887; WAN024DWE_at; Start 210; Stop 234
ggagccaagagtagtccccaatcca

SEQ ID NO: 173883 - DNA, 25 bp, Artificial
  probe
  misc_feature (1)..(25): SEQ ID NO: 3887; WAN024DWE_at; Start 75; Stop 99
gctgggtttcaatctgataacgcag

SEQ ID NO: 173884 - DNA, 25 bp, Artificial
  probe
  misc_feature (1)..(25): SEQ ID NO: 3887; WAN024DWE_at; Start 112; Stop 136
caaatagtgaggctggaagcaagct

SEQ ID NO: 173885 - DNA, 25 bp, Artificial
  probe
  misc_feature (1)..(25): SEQ ID NO: 3887; WAN024DWE_at; Start 156; Stop 180
actggcggtgaaagaggctgtctcc

SEQ ID NO: 173886 - DNA, 25 bp, Artificial
  probe
  misc_feature (1)..(25): SEQ ID NO: 3887; WAN024DWE_at; Start 53; Stop 77
gcaccatagcaagtcggtgtgagct

SEQ ID NO: 173887 - DNA, 25 bp, Artificial
  probe
  misc_feature (1)..(25): SEQ ID NO: 3887; WAN024DWE_at; Start 105; Stop 129
agagcttcaaatagtgaggctggaa

SEQ ID NO: 173888 - DNA, 25 bp, Artificial
  probe
  misc_feature (1)..(25): SEQ ID NO: 3887; WAN024DWE_at; Start 92; Stop 116
taacgcagagaaaagagcttcaaat

SEQ ID NO: 173889 - DNA, 25 bp, Artificial
  probe
  misc_feature (1)..(25): SEQ ID NO: 3887; WAN024DWE_at; Start 38; Stop 62
ttcaaacgaatagaagcaccatagc

SEQ ID NO: 173890 - DNA, 25 bp, Artificial
  probe
  misc_feature (1)..(25): SEQ ID NO: 3887; WAN024DWE_at; Start 218; Stop 242
gagtagtccccaatccaaggactgg

SEQ ID NO: 173891 - DNA, 25 bp, Artificial
  probe
  misc_feature (1)..(25): SEQ ID NO: 3887; WAN024DWE_at; Start 11; Stop 35
agggagagggctttgccttgctttt

SEQ ID NO: 173892 - DNA, 25 bp, Artificial
  probe
  misc_feature (1)..(25): SEQ ID NO: 3887; WAN024DWE_at; Start 142; Stop 166
tatatcataagaagactggcggtga

SEQ ID NO: 173893 - DNA, 25 bp, Artificial
  probe
  misc_feature (1)..(25): SEQ ID NO: 3887; WAN024DWE_at; Start 228; Stop 252
caatccaaggactgggctggtgagt

SEQ ID NO: 173894 - DNA, 25 bp, Artificial
  probe
  misc_feature (1)..(25): SEQ ID NO: 3887; WAN024DWE_at; Start 88; Stop 112
ctgataacgcagagaaaagagcttc

SEQ ID NO: 173895 - DNA, 25 bp, Artificial
  probe
  misc_feature (1)..(25): SEQ ID NO: 3887; WAN024DWE_at; Start 198; Stop 222
caggtgtcagaaggagccaagagta

SEQ ID NO: 173896 - DNA, 25 bp, Artificial
  probe
  misc_feature (1)..(25): SEQ ID NO: 3887; WAN024DWE_at; Start 138; Stop 162
tatctatatcataagaagactggcg

SEQ ID NO: 173897 - DNA, 25 bp, Artificial
  probe
  misc_feature (1)..(25): SEQ ID NO: 3887; WAN024DWE_at; Start 166; Stop 190
aaagaggctgtctccccccagttga

SEQ ID NO: 173898 - DNA, 25 bp, Artificial
  probe
  misc_feature (1)..(25): SEQ ID NO: 3887; WAN024DWE_at; Start 48; Stop 72
tagaagcaccatagcaagtcggtgt

SEQ ID NO: 173899 - DNA, 25 bp, Artificial
  probe
  misc_feature (1)..(25): SEQ ID NO: 3887; WAN024DWE_at; Start 195; Stop 219
tgacaggtgtcagaaggagccaaga

SEQ ID NO: 173900 - DNA, 25 bp, Artificial
  probe
  misc_feature (1)..(25): SEQ ID NO: 3887; WAN024DWE_at; Start 3; Stop 27
gaagatagagggagagggctttgcc

SEQ ID NO: 173901 - DNA, 25 bp, Artificial
  probe
  misc_feature (1)..(25): SEQ ID NO: 3887; WAN024DWE_at; Start 66; Stop 90
tcggtgtgagctgggtttcaatctg

SEQ ID NO: 173902 - DNA, 25 bp, Artificial
  probe
  misc_feature (1)..(25): SEQ ID NO: 3887; WAN024DWE_at; Start 147; Stop 171
cataagaagactggcggtgaaagag

SEQ ID NO: 173903 - DNA, 25 bp, Artificial
  probe
  misc_feature (1)..(25): SEQ ID NO: 3887; WAN024DWE_at; Start 116; Stop 140
tagtgaggctggaagcaagctttat

SEQ ID NO: 173904 - DNA, 25 bp, Artificial
  probe
  misc_feature (1)..(25): SEQ ID NO: 3887; WAN024DWE_at; Start 62; Stop 86
caagtcggtgtgagctgggtttcaa

SEQ ID NO: 173905 - DNA, 25 bp, Artificial
  probe
  misc_feature (1)..(25): SEQ ID NO: 3887; WAN024DWE_at; Start 126; Stop 150
ggaagcaagctttatctatatcata

SEQ ID NO: 173906 - DNA, 25 bp, Artificial
  probe
  misc_feature (1)..(25): SEQ ID NO: 3887; WAN024DWE_at; Start 204; Stop 228
tcagaaggagccaagagtagtcccc

SEQ ID NO: 173907 - DNA, 25 bp, Artificial
  probe
  misc_feature (1)..(25): SEQ ID NO: 3887; WAN024DWE_at; Start 207; Stop 231
gaaggagccaagagtagtccccaat

SEQ ID NO: 173908 - DNA, 25 bp, Artificial
  probe
  misc_feature (1)..(25): SEQ ID NO: 3887; WAN024DWE_at; Start 182; Stop 206
cccagttgactggtgacaggtgtca

SEQ ID NO: 173909 - DNA, 25 bp, Artificial
  probe
  misc_feature (1)..(25): SEQ ID NO: 3887; WAN024DWE_at; Start 120; Stop 144
gaggctggaagcaagctttatctat

SEQ ID NO: 173910 - DNA, 25 bp, Artificial
  probe
  misc_feature (1)..(25): SEQ ID NO: 3887; WAN024DWE_at; Start 224; Stop 248
tccccaatccaaggactgggctggt

SEQ ID NO: 173911 - DNA, 25 bp, Artificial
  probe
  misc_feature (1)..(25): SEQ ID NO: 3887; WAN024DWE_at; Start 158; Stop 182
tggcggtgaaagaggctgtctcccc

SEQ ID NO: 173912 - DNA, 25 bp, Artificial
  probe
  misc_feature (1)..(25): SEQ ID NO: 830; WAN024DWF_at; Start 1853; Stop 1877
cctgtccaggaaaaccaagctatga

SEQ ID NO: 173913 - DNA, 25 bp, Artificial
  probe
  misc_feature (1)..(25): SEQ ID NO: 830; WAN024DWF_at; Start 1341; Stop 1365
caaggctgcttcacaaaattaccgc

SEQ ID NO: 173914 - DNA, 25 bp, Artificial
  probe
  misc_feature (1)..(25): SEQ ID NO: 830; WAN024DWF_at; Start 1576; Stop 1600
gatgctcccctctttgaaacaacag

SEQ ID NO: 173915 - DNA, 25 bp, Artificial
  probe
  misc_feature (1)..(25): SEQ ID NO: 830; WAN024DWF_at; Start 538; Stop 562
ttcactgccctgcaaatgaacacgg

SEQ ID NO: 173916 - DNA, 25 bp, Artificial
  probe
  misc_feature (1)..(25): SEQ ID NO: 830; WAN024DWF_at; Start 988; Stop 1012
gaaggtttcctcaatagctaccgcg

SEQ ID NO: 173917 - DNA, 25 bp, Artificial
  probe
  misc_feature (1)..(25): SEQ ID NO: 830; WAN024DWF_at; Start 220; Stop 244
tactcttggctccttctgacacctg

SEQ ID NO: 173918 - DNA, 25 bp, Artificial
  probe
  misc_feature (1)..(25): SEQ ID NO: 830; WAN024DWF_at; Start 1126; Stop 1150
gaaggagaactcttccaagccatgc

SEQ ID NO: 173919 - DNA, 25 bp, Artificial
  probe
  misc_feature (1)..(25): SEQ ID NO: 830; WAN024DWF_at; Start 68; Stop 92
gaaataccctgccatacacaggcgt

SEQ ID NO: 173920 - DNA, 25 bp, Artificial
  probe
  misc_feature (1)..(25): SEQ ID NO: 830; WAN024DWF_at; Start 1753; Stop 1777
cagaaagcttttcacccaagttggg

SEQ ID NO: 173921 - DNA, 25 bp, Artificial
  probe
  misc_feature (1)..(25): SEQ ID NO: 830; WAN024DWF_at; Start 1392; Stop 1416
catgcgagcacgagacaatcaagga

SEQ ID NO: 173922 - DNA, 25 bp, Artificial
  probe
  misc_feature (1)..(25): SEQ ID NO: 830; WAN024DWF_at; Start 180; Stop 204
gattcgattaactcaccagcccagt

SEQ ID NO: 173923 - DNA, 25 bp, Artificial
  probe
  misc_feature (1)..(25): SEQ ID NO: 830; WAN024DWF_at; Start 857; Stop 881
tccacatggatctggctactggtac

SEQ ID NO: 173924 - DNA, 25 bp, Artificial
  probe
  misc_feature (1)..(25): SEQ ID NO: 830; WAN024DWF_at; Start 873; Stop 897
tactggtactgtcaagcctggtgtc

SEQ ID NO: 173925 - DNA, 25 bp, Artificial
  probe
  misc_feature (1)..(25): SEQ ID NO: 830; WAN024DWF_at; Start 1971; Stop 1995
taactttgtcaaagaatgccgactg

SEQ ID NO: 173926 - DNA, 25 bp, Artificial
  probe
  misc_feature (1)..(25): SEQ ID NO: 830; WAN024DWF_at; Start 1029; Stop 1053
aaaatggctggctccagatgaacgg

SEQ ID NO: 173927 - DNA, 25 bp, Artificial
  probe
  misc_feature (1)..(25): SEQ ID NO: 830; WAN024DWF_at; Start 1783; Stop 1807
tatcctggagatgaagacaatggta

SEQ ID NO: 173928 - DNA, 25 bp, Artificial
  probe
  misc_feature (1)..(25): SEQ ID NO: 830; WAN024DWF_at; Start 1616; Stop 1640
ttcacgaaatgagcgagatggctac

SEQ ID NO: 173929 - DNA, 25 bp, Artificial
  probe
  misc_feature (1)..(25): SEQ ID NO: 830; WAN024DWF_at; Start 1229; Stop 1253
tctctaccgaccaccacgaaagtgt

SEQ ID NO: 173930 - DNA, 25 bp, Artificial
  probe
  misc_feature (1)..(25): SEQ ID NO: 830; WAN024DWF_at; Start 1014; Stop 1038
tactggtttccttccaaaatggctg

SEQ ID NO: 173931 - DNA, 25 bp, Artificial
  probe
  misc_feature (1)..(25): SEQ ID NO: 830; WAN024DWF_at; Start 1806; Stop 1830
tagtctctctgcttggtacatctgg

SEQ ID NO: 173932 - DNA, 25 bp, Artificial
  probe
  misc_feature (1)..(25): SEQ ID NO: 830; WAN024DWF_at; Start 1380; Stop 1404
tgagacaggttacatgcgagcacga

SEQ ID NO: 173933 - DNA, 25 bp, Artificial
  probe
  misc_feature (1)..(25): SEQ ID NO: 830; WAN024DWF_at; Start 1737; Stop 1761
tatcaagacgctccgtcagaaagct

SEQ ID NO: 173934 - DNA, 25 bp, Artificial
  probe
  misc_feature (1)..(25): SEQ ID NO: 830; WAN024DWF_at; Start 764; Stop 788
gagaggctgaccgaaccttctttga

SEQ ID NO: 173935 - DNA, 25 bp, Artificial
  probe
  misc_feature (1)..(25): SEQ ID NO: 830; WAN024DWF_at; Start 1480; Stop 1504
caagctactttaggcgttctccacg

SEQ ID NO: 173936 - DNA, 25 bp, Artificial
  probe
  misc_feature (1)..(25): SEQ ID NO: 830; WAN024DWF_at; Start 1838; Stop 1862
tcggattttatccaacctgtccagg

SEQ ID NO: 173937 - DNA, 25 bp, Artificial
  probe
  misc_feature (1)..(25): SEQ ID NO: 830; WAN024DWF_at; Start 910; Stop 934
aatggtttctgggataccttccgca

SEQ ID NO: 173938 - DNA, 25 bp, Artificial
  probe
  misc_feature (1)..(25): SEQ ID NO: 830; WAN024DWF_at; Start 1768; Stop 1792
ccaagttgggaagcctatcctggag

SEQ ID NO: 173939 - DNA, 25 bp, Artificial
  probe
  misc_feature (1)..(25): SEQ ID NO: 830; WAN024DWF_at; Start 750; Stop 774
cattatagagacaggagaggctgac

SEQ ID NO: 173940 - DNA, 25 bp, Artificial
  probe
  misc_feature (1)..(25): SEQ ID NO: 830; WAN024DWF_at; Start 236; Stop 260
tgacacctgtcaccagtcaactggg

SEQ ID NO: 173941 - DNA, 25 bp, Artificial
  probe
  misc_feature (1)..(25): SEQ ID NO: 830; WAN024DWF_at; Start 892; Stop 916
ggtgtcctctttagcaacaatggtt

SEQ ID NO: 173942 - DNA, 25 bp, Artificial
  probe
  misc_feature (1)..(25): SEQ ID NO: 830; WAN024DWF_at; Start 1360; Stop 1384
taccgccagctatttgacgctgaga

SEQ ID NO: 173943 - DNA, 25 bp, Artificial
  probe
  misc_feature (1)..(25): SEQ ID NO: 830; WAN024DWF_at; Start 618; Stop 642
tcaaaccgagatgcaactagccact

SEQ ID NO: 173944 - DNA, 25 bp, Artificial
  probe
  misc_feature (1)..(25): SEQ ID NO: 830; WAN024DWF_at; Start 1324; Stop 1348
gaaatcgctgaaacctacaaggctg

SEQ ID NO: 173945 - DNA, 25 bp, Artificial
  probe
  misc_feature (1)..(25): SEQ ID NO: 830; WAN024DWF_at; Start 1632; Stop 1656
gatggctactgctccttttggacaa

SEQ ID NO: 173946 - DNA, 25 bp, Artificial
  probe
  misc_feature (1)..(25): SEQ ID NO: 4387; WAN024DWG_at; Start 34; Stop 58
atcgcaggcaaccagctgatccagc

SEQ ID NO: 173947 - DNA, 25 bp, Artificial
  probe
  misc_feature (1)..(25): SEQ ID NO: 4387; WAN024DWG_at; Start 7; Stop 31
gctttcgtgcatgacacctgtacca

SEQ ID NO: 173948 - DNA, 25 bp, Artificial
  probe
  misc_feature (1)..(25): SEQ ID NO: 4387; WAN024DWG_at; Start 243; Stop 267
aacagtagcccagatagggcgcagc

SEQ ID NO: 173949 - DNA, 25 bp, Artificial
  probe
  misc_feature (1)..(25): SEQ ID NO: 4387; WAN024DWG_at; Start 115; Stop 139
tggccagatatagcgatagaaggta

SEQ ID NO: 173950 - DNA, 25 bp, Artificial
  probe
  misc_feature (1)..(25): SEQ ID NO: 4387; WAN024DWG_at; Start 100; Stop 124
gatagaaagggcgattggccagata

SEQ ID NO: 173951 - DNA, 25 bp, Artificial
  probe
  misc_feature (1)..(25): SEQ ID NO: 4387; WAN024DWG_at; Start 164; Stop 188
tattctccttggtagaagtatggat

SEQ ID NO: 173952 - DNA, 25 bp, Artificial
  probe
  misc_feature (1)..(25): SEQ ID NO: 4387; WAN024DWG_at; Start 11; Stop 35
tcgtgcatgacacctgtaccaccat

SEQ ID NO: 173953 - DNA, 25 bp, Artificial
  probe
  misc_feature (1)..(25): SEQ ID NO: 4387; WAN024DWG_at; Start 13; Stop 37
gtgcatgacacctgtaccaccatcg

SEQ ID NO: 173954 - DNA, 25 bp, Artificial
  probe
  misc_feature (1)..(25): SEQ ID NO: 4387; WAN024DWG_at; Start 55; Stop 79
cagcaagaattttttctctgcctta

SEQ ID NO: 173955 - DNA, 25 bp, Artificial
  probe
  misc_feature (1)..(25): SEQ ID NO: 4387; WAN024DWG_at; Start 38; Stop 62
caggcaaccagctgatccagcaaga

SEQ ID NO: 173956 - DNA, 25 bp, Artificial
  probe
  misc_feature (1)..(25): SEQ ID NO: 4387; WAN024DWG_at; Start 169; Stop 193
tccttggtagaagtatggattttca

SEQ ID NO: 173957 - DNA, 25 bp, Artificial
  probe
  misc_feature (1)..(25): SEQ ID NO: 4387; WAN024DWG_at; Start 69; Stop 93
tctctgccttatctcttgttgtcaa

SEQ ID NO: 173958 - DNA, 25 bp, Artificial
  probe
  misc_feature (1)..(25): SEQ ID NO: 4387; WAN024DWG_at; Start 245; Stop 269
cagtagcccagatagggcgcagcta

SEQ ID NO: 173959 - DNA, 25 bp, Artificial
  probe
  misc_feature (1)..(25): SEQ ID NO: 4387; WAN024DWG_at; Start 96; Stop 120
cttggatagaaagggcgattggcca

SEQ ID NO: 173960 - DNA, 25 bp, Artificial
  probe
  misc_feature (1)..(25): SEQ ID NO: 4387; WAN024DWG_at; Start 161; Stop 185
gcgtattctccttggtagaagtatg

SEQ ID NO: 173961 - DNA, 25 bp, Artificial
  probe
  misc_feature (1)..(25): SEQ ID NO: 4387; WAN024DWG_at; Start 17; Stop 41
atgacacctgtaccaccatcgcagg

SEQ ID NO: 173962 - DNA, 25 bp, Artificial
  probe
  misc_feature (1)..(25): SEQ ID NO: 4387; WAN024DWG_at; Start 176; Stop 200
tagaagtatggattttcagagctca

SEQ ID NO: 173963 - DNA, 25 bp, Artificial
  probe
  misc_feature (1)..(25): SEQ ID NO: 4387; WAN024DWG_at; Start 123; Stop 147
tatagcgatagaaggtatgagaact

SEQ ID NO: 173964 - DNA, 25 bp, Artificial
  probe
  misc_feature (1)..(25): SEQ ID NO: 4387; WAN024DWG_at; Start 246; Stop 270
agtagcccagatagggcgcagctag

SEQ ID NO: 173965 - DNA, 25 bp, Artificial
  probe
  misc_feature (1)..(25): SEQ ID NO: 4387; WAN024DWG_at; Start 9; Stop 33
tttcgtgcatgacacctgtaccacc

SEQ ID NO: 173966 - DNA, 25 bp, Artificial
  probe
  misc_feature (1)..(25): SEQ ID NO: 4387; WAN024DWG_at; Start 46; Stop 70
cagctgatccagcaagaattttttc

SEQ ID NO: 173967 - DNA, 25 bp, Artificial
  probe
  misc_feature (1)..(25): SEQ ID NO: 4387; WAN024DWG_at; Start 241; Stop 265
cgaacagtagcccagatagggcgca

SEQ ID NO: 173968 - DNA, 25 bp, Artificial
  probe
  misc_feature (1)..(25): SEQ ID NO: 4387; WAN024DWG_at; Start 104; Stop 128
gaaagggcgattggccagatatagc

SEQ ID NO: 173969 - DNA, 25 bp, Artificial
  probe
  misc_feature (1)..(25): SEQ ID NO: 4387; WAN024DWG_at; Start 118; Stop 142
ccagatatagcgatagaaggtatga

SEQ ID NO: 173970 - DNA, 25 bp, Artificial
  probe
  misc_feature (1)..(25): SEQ ID NO: 4387; WAN024DWG_at; Start 102; Stop 126
tagaaagggcgattggccagatata

SEQ ID NO: 173971 - DNA, 25 bp, Artificial
  probe
  misc_feature (1)..(25): SEQ ID NO: 4387; WAN024DWG_at; Start 108; Stop 132
gggcgattggccagatatagcgata

SEQ ID NO: 173972 - DNA, 25 bp, Artificial
  probe
  misc_feature (1)..(25): SEQ ID NO: 4387; WAN024DWG_at; Start 48; Stop 72
gctgatccagcaagaattttttctc

SEQ ID NO: 173973 - DNA, 25 bp, Artificial
  probe
  misc_feature (1)..(25): SEQ ID NO: 4387; WAN024DWG_at; Start 110; Stop 134
gcgattggccagatatagcgataga

SEQ ID NO: 173974 - DNA, 25 bp, Artificial
  probe
  misc_feature (1)..(25): SEQ ID NO: 4387; WAN024DWG_at; Start 42; Stop 66
caaccagctgatccagcaagaattt

SEQ ID NO: 173975 - DNA, 25 bp, Artificial
  probe
  misc_feature (1)..(25): SEQ ID NO: 4387; WAN024DWG_at; Start 95; Stop 119
ccttggatagaaagggcgattggcc

SEQ ID NO: 173976 - DNA, 25 bp, Artificial
  probe
  misc_feature (1)..(25): SEQ ID NO: 4387; WAN024DWG_at; Start 50; Stop 74
tgatccagcaagaattttttctctg

SEQ ID NO: 173977 - DNA, 25 bp, Artificial
  probe
  misc_feature (1)..(25): SEQ ID NO: 4387; WAN024DWG_at; Start 5; Stop 29
aagctttcgtgcatgacacctgtac

SEQ ID NO: 173978 - DNA, 25 bp, Artificial
  probe
  misc_feature (1)..(25): SEQ ID NO: 4387; WAN024DWG_at; Start 40; Stop 64
ggcaaccagctgatccagcaagaat

SEQ ID NO: 173979 - DNA, 25 bp, Artificial
  probe
  misc_feature (1)..(25): SEQ ID NO: 4387; WAN024DWG_at; Start 112; Stop 136
gattggccagatatagcgatagaag

SEQ ID NO: 173980 - DNA, 25 bp, Artificial
  probe
  misc_feature (1)..(25): SEQ ID NO: 2094; WAN024DWH_at; Start 119; Stop 143
tgtcactgcaaagtcaggtccaaag

SEQ ID NO: 173981 - DNA, 25 bp, Artificial
  probe
  misc_feature (1)..(25): SEQ ID NO: 2094; WAN024DWH_at; Start 75; Stop 99
tggcaacagtcatcactcggacgaa

SEQ ID NO: 173982 - DNA, 25 bp, Artificial
  probe
  misc_feature (1)..(25): SEQ ID NO: 2094; WAN024DWH_at; Start 35; Stop 59
tactacagcaaacatatttgacgga

SEQ ID NO: 173983 - DNA, 25 bp, Artificial
  probe
  misc_feature (1)..(25): SEQ ID NO: 2094; WAN024DWH_at; Start 54; Stop 78
gacggaatcaagtaactatactggc

SEQ ID NO: 173984 - DNA, 25 bp, Artificial
  probe
  misc_feature (1)..(25): SEQ ID NO: 2094; WAN024DWH_at; Start 174; Stop 198
tccgtatctcggacaaaacgataag

SEQ ID NO: 173985 - DNA, 25 bp, Artificial
  probe
  misc_feature (1)..(25): SEQ ID NO: 2094; WAN024DWH_at; Start 18; Stop 42
tgcacataacccaagactactacag

SEQ ID NO: 173986 - DNA, 25 bp, Artificial
  probe
  misc_feature (1)..(25): SEQ ID NO: 2094; WAN024DWH_at; Start 97; Stop 121
gaaaagctgaccaagtcatacctgt

SEQ ID NO: 173987 - DNA, 25 bp, Artificial
  probe
  misc_feature (1)..(25): SEQ ID NO: 2094; WAN024DWH_at; Start 139; Stop 163
caaagccatcatttaccaaggtgtc

SEQ ID NO: 173988 - DNA, 25 bp, Artificial
  probe
  misc_feature (1)..(25): SEQ ID NO: 2094; WAN024DWH_at; Start 108; Stop 132
caagtcatacctgtcactgcaaagt

SEQ ID NO: 173989 - DNA, 25 bp, Artificial
  probe
  misc_feature (1)..(25): SEQ ID NO: 2094; WAN024DWH_at; Start 87; Stop 111
tcactcggacgaaaagctgaccaag

SEQ ID NO: 173990 - DNA, 25 bp, Artificial
  probe
  misc_feature (1)..(25): SEQ ID NO: 2094; WAN024DWH_at; Start 196; Stop 220
aaggagagttcttgtggtcttgttc

SEQ ID NO: 173991 - DNA, 25 bp, Artificial
  probe
  misc_feature (1)..(25): SEQ ID NO: 2094; WAN024DWH_at; Start 112; Stop 136
tcatacctgtcactgcaaagtcagg

SEQ ID NO: 173992 - DNA, 25 bp, Artificial
  probe
  misc_feature (1)..(25): SEQ ID NO: 2094; WAN024DWH_at; Start 61; Stop 85
tcaagtaactatactggcaacagtc

SEQ ID NO: 173993 - DNA, 25 bp, Artificial
  probe
  misc_feature (1)..(25): SEQ ID NO: 2094; WAN024DWH_at; Start 178; Stop 202
tatctcggacaaaacgataaggaga

SEQ ID NO: 173994 - DNA, 25 bp, Artificial
  probe
  misc_feature (1)..(25): SEQ ID NO: 2094; WAN024DWH_at; Start 79; Stop 103
aacagtcatcactcggacgaaaagc

SEQ ID NO: 173995 - DNA, 25 bp, Artificial
  probe
  misc_feature (1)..(25): SEQ ID NO: 2094; WAN024DWH_at; Start 42; Stop 66
gcaaacatatttgacggaatcaagt

SEQ ID NO: 173996 - DNA, 25 bp, Artificial
  probe
  misc_feature (1)..(25): SEQ ID NO: 2094; WAN024DWH_at; Start 162; Stop 186
tcttccttacggtccgtatctcgga

SEQ ID NO: 173997 - DNA, 25 bp, Artificial
  probe
  misc_feature (1)..(25): SEQ ID NO: 2094; WAN024DWH_at; Start 187; Stop 211
caaaacgataaggagagttcttgtg

SEQ ID NO: 173998 - DNA, 25 bp, Artificial
  probe
  misc_feature (1)..(25): SEQ ID NO: 2094; WAN024DWH_at; Start 70; Stop 94
tatactggcaacagtcatcactcgg

SEQ ID NO: 173999 - DNA, 25 bp, Artificial
  probe
  misc_feature (1)..(25): SEQ ID NO: 2094; WAN024DWH_at; Start 24; Stop 48
taacccaagactactacagcaaaca

SEQ ID NO: 174000 - DNA, 25 bp, Artificial
  probe
  misc_feature (1)..(25): SEQ ID NO: 2094; WAN024DWH_at; Start 143; Stop 167
gccatcatttaccaaggtgtcttcc

SEQ ID NO: 174001 - DNA, 25 bp, Artificial
  probe
  misc_feature (1)..(25): SEQ ID NO: 2094; WAN024DWH_at; Start 91; Stop 115
tcggacgaaaagctgaccaagtcat

SEQ ID NO: 174002 - DNA, 25 bp, Artificial
  probe
  misc_feature (1)..(25): SEQ ID NO: 2094; WAN024DWH_at; Start 8; Stop 32
gaagatttcttgcacataacccaag

SEQ ID NO: 174003 - DNA, 25 bp, Artificial
  probe
  misc_feature (1)..(25): SEQ ID NO: 2094; WAN024DWH_at; Start 84; Stop 108
tcatcactcggacgaaaagctgacc

SEQ ID NO: 174004 - DNA, 25 bp, Artificial
  probe
  misc_feature (1)..(25): SEQ ID NO: 2094; WAN024DWH_at; Start 122; Stop 146
cactgcaaagtcaggtccaaagcca

SEQ ID NO: 174005 - DNA, 25 bp, Artificial
  probe
  misc_feature (1)..(25): SEQ ID NO: 2094; WAN024DWH_at; Start 130; Stop 154
agtcaggtccaaagccatcatttac

SEQ ID NO: 174006 - DNA, 25 bp, Artificial
  probe
  misc_feature (1)..(25): SEQ ID NO: 2094; WAN024DWH_at; Start 3; Stop 27
gctgcgaagatttcttgcacataac

SEQ ID NO: 174007 - DNA, 25 bp, Artificial
  probe
  misc_feature (1)..(25): SEQ ID NO: 2094; WAN024DWH_at; Start 148; Stop 172
catttaccaaggtgtcttccttacg

SEQ ID NO: 174008 - DNA, 25 bp, Artificial
  probe
  misc_feature (1)..(25): SEQ ID NO: 2094; WAN024DWH_at; Start 135; Stop 159
ggtccaaagccatcatttaccaagg

SEQ ID NO: 174009 - DNA, 25 bp, Artificial
  probe
  misc_feature (1)..(25): SEQ ID NO: 2094; WAN024DWH_at; Start 192; Stop 216
cgataaggagagttcttgtggtctt

SEQ ID NO: 174010 - DNA, 25 bp, Artificial
  probe
  misc_feature (1)..(25): SEQ ID NO: 2094; WAN024DWH_at; Start 183; Stop 207
cggacaaaacgataaggagagttct

SEQ ID NO: 174011 - DNA, 25 bp, Artificial
  probe
  misc_feature (1)..(25): SEQ ID NO: 2094; WAN024DWH_at; Start 105; Stop 129
gaccaagtcatacctgtcactgcaa

SEQ ID NO: 174012 - DNA, 25 bp, Artificial
  probe
  misc_feature (1)..(25): SEQ ID NO: 2094; WAN024DWH_at; Start 165; Stop 189
tccttacggtccgtatctcggacaa

SEQ ID NO: 174013 - DNA, 25 bp, Artificial
  probe
  misc_feature (1)..(25): SEQ ID NO: 2094; WAN024DWH_at; Start 126; Stop 150
gcaaagtcaggtccaaagccatcat

SEQ ID NO: 174014 - DNA, 25 bp, Artificial
  probe
  misc_feature (1)..(25): SEQ ID NO: 5813; WAN024DWI_at; Start 137; Stop 161
ttgcgctcccagatccagccgttaa

SEQ ID NO: 174015 - DNA, 25 bp, Artificial
  probe
  misc_feature (1)..(25): SEQ ID NO: 5813; WAN024DWI_at; Start 342; Stop 366
gaagccacatggcaggaatatcccc

SEQ ID NO: 174016 - DNA, 25 bp, Artificial
  probe
  misc_feature (1)..(25): SEQ ID NO: 5813; WAN024DWI_at; Start 219; Stop 243
tagcatagggatccttgagtaccaa

SEQ ID NO: 174017 - DNA, 25 bp, Artificial
  probe
  misc_feature (1)..(25): SEQ ID NO: 5813; WAN024DWI_at; Start 117; Stop 141
aaagcgaatccacctcatacttgcg

SEQ ID NO: 174018 - DNA, 25 bp, Artificial
  probe
  misc_feature (1)..(25): SEQ ID NO: 5813; WAN024DWI_at; Start 319; Stop 343
tctgagttgggctgtcgaatctcga

SEQ ID NO: 174019 - DNA, 25 bp, Artificial
  probe
  misc_feature (1)..(25): SEQ ID NO: 5813; WAN024DWI_at; Start 296; Stop 320
cttttagctacatgaaggtagggtc

SEQ ID NO: 174020 - DNA, 25 bp, Artificial
  probe
  misc_feature (1)..(25): SEQ ID NO: 5813; WAN024DWI_at; Start 106; Stop 130
caaaggatagcaaagcgaatccacc

SEQ ID NO: 174021 - DNA, 25 bp, Artificial
  probe
  misc_feature (1)..(25): SEQ ID NO: 5813; WAN024DWI_at; Start 289; Stop 313
ggcatctcttttagctacatgaagg

SEQ ID NO: 174022 - DNA, 25 bp, Artificial
  probe
  misc_feature (1)..(25): SEQ ID NO: 5813; WAN024DWI_at; Start 232; Stop 256
cttgagtaccaaggtcatctgacgt

SEQ ID NO: 174023 - DNA, 25 bp, Artificial
  probe
  misc_feature (1)..(25): SEQ ID NO: 5813; WAN024DWI_at; Start 351; Stop 375
tggcaggaatatccccagtcaagac

SEQ ID NO: 174024 - DNA, 25 bp, Artificial
  probe
  misc_feature (1)..(25): SEQ ID NO: 5813; WAN024DWI_at; Start 183; Stop 207
ggtgccctttccagttctcctcaat

SEQ ID NO: 174025 - DNA, 25 bp, Artificial
  probe
  misc_feature (1)..(25): SEQ ID NO: 5813; WAN024DWI_at; Start 53; Stop 77
tcatcaaactgactagtctcgccag

SEQ ID NO: 174026 - DNA, 25 bp, Artificial
  probe
  misc_feature (1)..(25): SEQ ID NO: 5813; WAN024DWI_at; Start 241; Stop 265
caaggtcatctgacgtttgaccaaa

SEQ ID NO: 174027 - DNA, 25 bp, Artificial
  probe
  misc_feature (1)..(25): SEQ ID NO: 5813; WAN024DWI_at; Start 171; Stop 195
ggtcagtctcgtggtgccctttcca

SEQ ID NO: 174028 - DNA, 25 bp, Artificial
  probe
  misc_feature (1)..(25): SEQ ID NO: 5813; WAN024DWI_at; Start 164; Stop 188
tctgtgtggtcagtctcgtggtgcc

SEQ ID NO: 174029 - DNA, 25 bp, Artificial
  probe
  misc_feature (1)..(25): SEQ ID NO: 5813; WAN024DWI_at; Start 252; Stop 276
gacgtttgaccaaacctgcaatggt

SEQ ID NO: 174030 - DNA, 25 bp, Artificial
  probe
  misc_feature (1)..(25): SEQ ID NO: 5813; WAN024DWI_at; Start 1; Stop 25
ttgttccaccgtccacagatggaga

SEQ ID NO: 174031 - DNA, 25 bp, Artificial
  probe
  misc_feature (1)..(25): SEQ ID NO: 5813; WAN024DWI_at; Start 66; Stop 90
tagtctcgccagtctctttccagag

SEQ ID NO: 174032 - DNA, 25 bp, Artificial
  probe
  misc_feature (1)..(25): SEQ ID NO: 5813; WAN024DWI_at; Start 332; Stop 356
gtcgaatctcgaagccacatggcag

SEQ ID NO: 174033 - DNA, 25 bp, Artificial
  probe
  misc_feature (1)..(25): SEQ ID NO: 5813; WAN024DWI_at; Start 22; Stop 46
gagaatttccttagtcgctgcgaca

SEQ ID NO: 174034 - DNA, 25 bp, Artificial
  probe
  misc_feature (1)..(25): SEQ ID NO: 5813; WAN024DWI_at; Start 273; Stop 297
tggtctgacgcaggagggcatctct

SEQ ID NO: 174035 - DNA, 25 bp, Artificial
  probe
  misc_feature (1)..(25): SEQ ID NO: 5813; WAN024DWI_at; Start 91; Stop 115
gagataagccaactgcaaaggatag

SEQ ID NO: 174036 - DNA, 25 bp, Artificial
  probe
  misc_feature (1)..(25): SEQ ID NO: 5813; WAN024DWI_at; Start 73; Stop 97
gccagtctctttccagaggagataa

SEQ ID NO: 174037 - DNA, 25 bp, Artificial
  probe
  misc_feature (1)..(25): SEQ ID NO: 5813; WAN024DWI_at; Start 283; Stop 307
caggagggcatctcttttagctaca

SEQ ID NO: 174038 - DNA, 25 bp, Artificial
  probe
  misc_feature (1)..(25): SEQ ID NO: 5813; WAN024DWI_at; Start 201; Stop 225
cctcaatgttgaaggagttagcata

SEQ ID NO: 174039 - DNA, 25 bp, Artificial
  probe
  misc_feature (1)..(25): SEQ ID NO: 5813; WAN024DWI_at; Start 360; Stop 384
tatccccagtcaagacaaaagttga

SEQ ID NO: 174040 - DNA, 25 bp, Artificial
  probe
  misc_feature (1)..(25): SEQ ID NO: 5813; WAN024DWI_at; Start 191; Stop 215
ttccagttctcctcaatgttgaagg

SEQ ID NO: 174041 - DNA, 25 bp, Artificial
  probe
  misc_feature (1)..(25): SEQ ID NO: 5813; WAN024DWI_at; Start 303; Stop 327
ctacatgaaggtagggtctgagttg

SEQ ID NO: 174042 - DNA, 25 bp, Artificial
  probe
  misc_feature (1)..(25): SEQ ID NO: 5813; WAN024DWI_at; Start 151; Stop 175
ccagccgttaaggtctgtgtggtca

SEQ ID NO: 174043 - DNA, 25 bp, Artificial
  probe
  misc_feature (1)..(25): SEQ ID NO: 5813; WAN024DWI_at; Start 262; Stop 286
caaacctgcaatggtctgacgcagg

SEQ ID NO: 174044 - DNA, 25 bp, Artificial
  probe
  misc_feature (1)..(25): SEQ ID NO: 5813; WAN024DWI_at; Start 98; Stop 122
gccaactgcaaaggatagcaaagcg

SEQ ID NO: 174045 - DNA, 25 bp, Artificial
  probe
  misc_feature (1)..(25): SEQ ID NO: 5813; WAN024DWI_at; Start 208; Stop 232
gttgaaggagttagcatagggatcc

SEQ ID NO: 174046 - DNA, 25 bp, Artificial
  probe
  misc_feature (1)..(25): SEQ ID NO: 5813; WAN024DWI_at; Start 7; Stop 31
caccgtccacagatggagaatttcc

SEQ ID NO: 174047 - DNA, 25 bp, Artificial
  probe
  misc_feature (1)..(25): SEQ ID NO: 5813; WAN024DWI_at; Start 82; Stop 106
tttccagaggagataagccaactgc

SEQ ID NO: 174048 - DNA, 25 bp, Artificial
  probe
  misc_feature (1)..(25): SEQ ID NO: 4053; WAN024DWJ_at; Start 12; Stop 36
tctttcaaacaagtttcatgttcag

SEQ ID NO: 174049 - DNA, 25 bp, Artificial
  probe
  misc_feature (1)..(25): SEQ ID NO: 4053; WAN024DWJ_at; Start 62; Stop 86
catacacaaatgatagtcatttttc

SEQ ID NO: 174050 - DNA, 25 bp, Artificial
  probe
  misc_feature (1)..(25): SEQ ID NO: 4053; WAN024DWJ_at; Start 8; Stop 32
tccctctttcaaacaagtttcatgt

SEQ ID NO: 174051 - DNA, 25 bp, Artificial
  probe
  misc_feature (1)..(25): SEQ ID NO: 4053; WAN024DWJ_at; Start 14; Stop 38
tttcaaacaagtttcatgttcagta

SEQ ID NO: 174052 - DNA, 25 bp, Artificial
  probe
  misc_feature (1)..(25): SEQ ID NO: 4053; WAN024DWJ_at; Start 20; Stop 44
acaagtttcatgttcagtatatagc

SEQ ID NO: 174053 - DNA, 25 bp, Artificial
  probe
  misc_feature (1)..(25): SEQ ID NO: 4053; WAN024DWJ_at; Start 13; Stop 37
ctttcaaacaagtttcatgttcagt

SEQ ID NO: 174054 - DNA, 25 bp, Artificial
  probe
  misc_feature (1)..(25): SEQ ID NO: 4053; WAN024DWJ_at; Start 34; Stop 58
cagtatatagcttttgagacagaaa

SEQ ID NO: 174055 - DNA, 25 bp, Artificial
  probe
  misc_feature (1)..(25): SEQ ID NO: 4053; WAN024DWJ_at; Start 17; Stop 41
caaacaagtttcatgttcagtatat

SEQ ID NO: 174056 - DNA, 25 bp, Artificial
  probe
  misc_feature (1)..(25): SEQ ID NO: 4053; WAN024DWJ_at; Start 53; Stop 77
cagaaaatacatacacaaatgatag

SEQ ID NO: 174057 - DNA, 25 bp, Artificial
  probe
  misc_feature (1)..(25): SEQ ID NO: 4053; WAN024DWJ_at; Start 10; Stop 34
cctctttcaaacaagtttcatgttc

SEQ ID NO: 174058 - DNA, 25 bp, Artificial
  probe
  misc_feature (1)..(25): SEQ ID NO: 4053; WAN024DWJ_at; Start 2; Stop 26
tgcaattccctctttcaaacaagtt

SEQ ID NO: 174059 - DNA, 25 bp, Artificial
  probe
  misc_feature (1)..(25): SEQ ID NO: 4053; WAN024DWJ_at; Start 9; Stop 33
ccctctttcaaacaagtttcatgtt

SEQ ID NO: 174060 - DNA, 25 bp, Artificial
  probe
  misc_feature (1)..(25): SEQ ID NO: 4053; WAN024DWJ_at; Start 46; Stop 70
tttgagacagaaaatacatacacaa

SEQ ID NO: 174061 - DNA, 25 bp, Artificial
  probe
  misc_feature (1)..(25): SEQ ID NO: 4053; WAN024DWJ_at; Start 68; Stop 92
caaatgatagtcatttttctacaaa

SEQ ID NO: 174062 - DNA, 25 bp, Artificial
  probe
  misc_feature (1)..(25): SEQ ID NO: 4053; WAN024DWJ_at; Start 21; Stop 45
caagtttcatgttcagtatatagct

SEQ ID NO: 174063 - DNA, 25 bp, Artificial
  probe
  misc_feature (1)..(25): SEQ ID NO: 4053; WAN024DWJ_at; Start 44; Stop 68
cttttgagacagaaaatacatacac

SEQ ID NO: 174064 - DNA, 25 bp, Artificial
  probe
  misc_feature (1)..(25): SEQ ID NO: 4053; WAN024DWJ_at; Start 45; Stop 69
ttttgagacagaaaatacatacaca

SEQ ID NO: 174065 - DNA, 25 bp, Artificial
  probe
  misc_feature (1)..(25): SEQ ID NO: 4053; WAN024DWJ_at; Start 7; Stop 31
ttccctctttcaaacaagtttcatg

SEQ ID NO: 174066 - DNA, 25 bp, Artificial
  probe
  misc_feature (1)..(25): SEQ ID NO: 4053; WAN024DWJ_at; Start 49; Stop 73
gagacagaaaatacatacacaaatg

SEQ ID NO: 174067 - DNA, 25 bp, Artificial
  probe
  misc_feature (1)..(25): SEQ ID NO: 4053; WAN024DWJ_at; Start 39; Stop 63
tatagcttttgagacagaaaataca

SEQ ID NO: 174068 - DNA, 25 bp, Artificial
  probe
  misc_feature (1)..(25): SEQ ID NO: 4053; WAN024DWJ_at; Start 69; Stop 93
aaatgatagtcatttttctacaaaa

SEQ ID NO: 174069 - DNA, 25 bp, Artificial
  probe
  misc_feature (1)..(25): SEQ ID NO: 4053; WAN024DWJ_at; Start 51; Stop 75
gacagaaaatacatacacaaatgat

SEQ ID NO: 174070 - DNA, 25 bp, Artificial
  probe
  misc_feature (1)..(25): SEQ ID NO: 4053; WAN024DWJ_at; Start 16; Stop 40
tcaaacaagtttcatgttcagtata

SEQ ID NO: 174071 - DNA, 25 bp, Artificial
  probe
  misc_feature (1)..(25): SEQ ID NO: 4053; WAN024DWJ_at; Start 36; Stop 60
gtatatagcttttgagacagaaaat

SEQ ID NO: 174072 - DNA, 25 bp, Artificial
  probe
  misc_feature (1)..(25): SEQ ID NO: 4053; WAN024DWJ_at; Start 32; Stop 56
ttcagtatatagcttttgagacaga

SEQ ID NO: 174073 - DNA, 25 bp, Artificial
  probe
  misc_feature (1)..(25): SEQ ID NO: 4053; WAN024DWJ_at; Start 48; Stop 72
tgagacagaaaatacatacacaaat

SEQ ID NO: 174074 - DNA, 25 bp, Artificial
  probe
  misc_feature (1)..(25): SEQ ID NO: 4053; WAN024DWJ_at; Start 55; Stop 79
gaaaatacatacacaaatgatagtc

SEQ ID NO: 174075 - DNA, 25 bp, Artificial
  probe
  misc_feature (1)..(25): SEQ ID NO: 4053; WAN024DWJ_at; Start 57; Stop 81
aaatacatacacaaatgatagtcat

SEQ ID NO: 174076 - DNA, 25 bp, Artificial
  probe
  misc_feature (1)..(25): SEQ ID NO: 4053; WAN024DWJ_at; Start 42; Stop 66
agcttttgagacagaaaatacatac

SEQ ID NO: 174077 - DNA, 25 bp, Artificial
  probe
  misc_feature (1)..(25): SEQ ID NO: 4053; WAN024DWJ_at; Start 1; Stop 25
gtgcaattccctctttcaaacaagt

SEQ ID NO: 174078 - DNA, 25 bp, Artificial
  probe
  misc_feature (1)..(25): SEQ ID NO: 4053; WAN024DWJ_at; Start 41; Stop 65
tagcttttgagacagaaaatacata

SEQ ID NO: 174079 - DNA, 25 bp, Artificial
  probe
  misc_feature (1)..(25): SEQ ID NO: 4053; WAN024DWJ_at; Start 33; Stop 57
tcagtatatagcttttgagacagaa

SEQ ID NO: 174080 - DNA, 25 bp, Artificial
  probe
  misc_feature (1)..(25): SEQ ID NO: 4053; WAN024DWJ_at; Start 43; Stop 67
gcttttgagacagaaaatacataca

SEQ ID NO: 174081 - DNA, 25 bp, Artificial
  probe
  misc_feature (1)..(25): SEQ ID NO: 4053; WAN024DWJ_at; Start 66; Stop 90
cacaaatgatagtcatttttctaca

SEQ ID NO: 174082 - DNA, 25 bp, Artificial
  probe
  misc_feature (1)..(25): SEQ ID NO: 5774; WAN024DWK_at; Start 314; Stop 338
tgcgtcagaccattgcaggtttggt

SEQ ID NO: 174083 - DNA, 25 bp, Artificial
  probe
  misc_feature (1)..(25): SEQ ID NO: 5774; WAN024DWK_at; Start 551; Stop 575
ttgtcgcagcgactaaggaaattct

SEQ ID NO: 174084 - DNA, 25 bp, Artificial
  probe
  misc_feature (1)..(25): SEQ ID NO: 5774; WAN024DWK_at; Start 606; Stop 630
gaactctccttatcgttttgtccga

SEQ ID NO: 174085 - DNA, 25 bp, Artificial
  probe
  misc_feature (1)..(25): SEQ ID NO: 5774; WAN024DWK_at; Start 736; Stop 760
cagtatagttacttgattccgtcaa

SEQ ID NO: 174086 - DNA, 25 bp, Artificial
  probe
  misc_feature (1)..(25): SEQ ID NO: 5774; WAN024DWK_at; Start 829; Stop 853
cagagtgttattgctgatgccaagc

SEQ ID NO: 174087 - DNA, 25 bp, Artificial
  probe
  misc_feature (1)..(25): SEQ ID NO: 5774; WAN024DWK_at; Start 329; Stop 353
caggtttggtcaaacgtcagatgac

SEQ ID NO: 174088 - DNA, 25 bp, Artificial
  probe
  misc_feature (1)..(25): SEQ ID NO: 5774; WAN024DWK_at; Start 298; Stop 322
aaaagagatgccctcctgcgtcaga

SEQ ID NO: 174089 - DNA, 25 bp, Artificial
  probe
  misc_feature (1)..(25): SEQ ID NO: 5774; WAN024DWK_at; Start 782; Stop 806
tgggttatgtgcaagaaatcttcgc

SEQ ID NO: 174090 - DNA, 25 bp, Artificial
  probe
  misc_feature (1)..(25): SEQ ID NO: 5774; WAN024DWK_at; Start 1191; Stop 1215
gaaaaaattcttgctggatcagctg

SEQ ID NO: 174091 - DNA, 25 bp, Artificial
  probe
  misc_feature (1)..(25): SEQ ID NO: 5774; WAN024DWK_at; Start 858; Stop 882
tcaggatgaaatccaagaaggaatc

SEQ ID NO: 174092 - DNA, 25 bp, Artificial
  probe
  misc_feature (1)..(25): SEQ ID NO: 5774; WAN024DWK_at; Start 1169; Stop 1193
tgacaacaagagataaggcagagaa

SEQ ID NO: 174093 - DNA, 25 bp, Artificial
  probe
  misc_feature (1)..(25): SEQ ID NO: 5774; WAN024DWK_at; Start 1127; Stop 1151
tctatcgctatatctggccaatcgc

SEQ ID NO: 174094 - DNA, 25 bp, Artificial
  probe
  misc_feature (1)..(25): SEQ ID NO: 5774; WAN024DWK_at; Start 166; Stop 190
tgctacaccgataccttggacaata

SEQ ID NO: 174095 - DNA, 25 bp, Artificial
  probe
  misc_feature (1)..(25): SEQ ID NO: 5774; WAN024DWK_at; Start 1203; Stop 1227
gctggatcagctggttgcctgcgat

SEQ ID NO: 174096 - DNA, 25 bp, Artificial
  probe
  misc_feature (1)..(25): SEQ ID NO: 5774; WAN024DWK_at; Start 645; Stop 669
ggaagacaccttggtaaatgatggc

SEQ ID NO: 174097 - DNA, 25 bp, Artificial
  probe
  misc_feature (1)..(25): SEQ ID NO: 5774; WAN024DWK_at; Start 184; Stop 208
gacaatacggttgaaatcttagaag

SEQ ID NO: 174098 - DNA, 25 bp, Artificial
  probe
  misc_feature (1)..(25): SEQ ID NO: 5774; WAN024DWK_at; Start 844; Stop 868
gatgccaagcgtcttcaggatgaaa

SEQ ID NO: 174099 - DNA, 25 bp, Artificial
  probe
  misc_feature (1)..(25): SEQ ID NO: 5774; WAN024DWK_at; Start 812; Stop 836
taaacctagctgatagccagagtgt

SEQ ID NO: 174100 - DNA, 25 bp, Artificial
  probe
  misc_feature (1)..(25): SEQ ID NO: 5774; WAN024DWK_at; Start 1305; Stop 1329
taacatgatgttctgtgagttggtc

SEQ ID NO: 174101 - DNA, 25 bp, Artificial
  probe
  misc_feature (1)..(25): SEQ ID NO: 5774; WAN024DWK_at; Start 890; Stop 914
acgcttacaccaccaacagcaaggg

SEQ ID NO: 174102 - DNA, 25 bp, Artificial
  probe
  misc_feature (1)..(25): SEQ ID NO: 5774; WAN024DWK_at; Start 950; Stop 974
gaaatgccagcatcatggatgatcc

SEQ ID NO: 174103 - DNA, 25 bp, Artificial
  probe
  misc_feature (1)..(25): SEQ ID NO: 5774; WAN024DWK_at; Start 210; Stop 234
tggttcaacttttgtcttgactggg

SEQ ID NO: 174104 - DNA, 25 bp, Artificial
  probe
  misc_feature (1)..(25): SEQ ID NO: 5774; WAN024DWK_at; Start 940; Stop 964
gatggcctaggaaatgccagcatca

SEQ ID NO: 174105 - DNA, 25 bp, Artificial
  probe
  misc_feature (1)..(25): SEQ ID NO: 5774; WAN024DWK_at; Start 906; Stop 930
cagcaagggcgaaaagatttacgct

SEQ ID NO: 174106 - DNA, 25 bp, Artificial
  probe
  misc_feature (1)..(25): SEQ ID NO: 5774; WAN024DWK_at; Start 762; Stop 786
tatgtttgctgtagtagtcttgggt

SEQ ID NO: 174107 - DNA, 25 bp, Artificial
  probe
  misc_feature (1)..(25): SEQ ID NO: 5774; WAN024DWK_at; Start 341; Stop 365
aacgtcagatgaccttggtactcaa

SEQ ID NO: 174108 - DNA, 25 bp, Artificial
  probe
  misc_feature (1)..(25): SEQ ID NO: 5774; WAN024DWK_at; Start 1264; Stop 1288
gatgatccgaccctctactctcgtg

SEQ ID NO: 174109 - DNA, 25 bp, Artificial
  probe
  misc_feature (1)..(25): SEQ ID NO: 5774; WAN024DWK_at; Start 984; Stop 1008
aagtctactagctgcgccctatctg

SEQ ID NO: 174110 - DNA, 25 bp, Artificial
  probe
  misc_feature (1)..(25): SEQ ID NO: 5774; WAN024DWK_at; Start 1231; Stop 1255
ggtacaggtgtcatgcacgaaagct

SEQ ID NO: 174111 - DNA, 25 bp, Artificial
  probe
  misc_feature (1)..(25): SEQ ID NO: 5774; WAN024DWK_at; Start 15; Stop 39
tctgtctcaaaagctatatactgaa

SEQ ID NO: 174112 - DNA, 25 bp, Artificial
  probe
  misc_feature (1)..(25): SEQ ID NO: 5774; WAN024DWK_at; Start 1220; Stop 1244
cctgcgatggtggtacaggtgtcat

SEQ ID NO: 174113 - DNA, 25 bp, Artificial
  probe
  misc_feature (1)..(25): SEQ ID NO: 5774; WAN024DWK_at; Start 796; Stop 820
gaaatcttcgcagcattaaacctag

SEQ ID NO: 174114 - DNA, 25 bp, Artificial
  probe
  misc_feature (1)..(25): SEQ ID NO: 5774; WAN024DWK_at; Start 996; Stop 1020
tgcgccctatctgggctactgttcg

SEQ ID NO: 174115 - DNA, 25 bp, Artificial
  probe
  misc_feature (1)..(25): SEQ ID NO: 5774; WAN024DWK_at; Start 1142; Stop 1166
ggccaatcgccctttctatccaagg

SEQ ID NO: 174116 - DNA, 25 bp, Artificial
  probe
  misc_feature (1)..(25): SEQ ID NO: 3089; WAN024DWL_at; Start 54; Stop 78
ccttaagctctgcaaagattggctc

SEQ ID NO: 174117 - DNA, 25 bp, Artificial
  probe
  misc_feature (1)..(25): SEQ ID NO: 3089; WAN024DWL_at; Start 2; Stop 26
tgtttgagcaagattttagcatagc

SEQ ID NO: 174118 - DNA, 25 bp, Artificial
  probe
  misc_feature (1)..(25): SEQ ID NO: 3089; WAN024DWL_at; Start 214; Stop 238
tggtgtatcaatcactccgttttgg

SEQ ID NO: 174119 - DNA, 25 bp, Artificial
  probe
  misc_feature (1)..(25): SEQ ID NO: 3089; WAN024DWL_at; Start 136; Stop 160
gcggataaagtcttcataggcttcg

SEQ ID NO: 174120 - DNA, 25 bp, Artificial
  probe
  misc_feature (1)..(25): SEQ ID NO: 3089; WAN024DWL_at; Start 208; Stop 232
tacgaatggtgtatcaatcactccg

SEQ ID NO: 174121 - DNA, 25 bp, Artificial
  probe
  misc_feature (1)..(25): SEQ ID NO: 3089; WAN024DWL_at; Start 127; Stop 151
gtcttcaaagcggataaagtcttca

SEQ ID NO: 174122 - DNA, 25 bp, Artificial
  probe
  misc_feature (1)..(25): SEQ ID NO: 3089; WAN024DWL_at; Start 116; Stop 140
atgtccccacggtcttcaaagcgga

SEQ ID NO: 174123 - DNA, 25 bp, Artificial
  probe
  misc_feature (1)..(25): SEQ ID NO: 3089; WAN024DWL_at; Start 57; Stop 81
taagctctgcaaagattggctctgt

SEQ ID NO: 174124 - DNA, 25 bp, Artificial
  probe
  misc_feature (1)..(25): SEQ ID NO: 3089; WAN024DWL_at; Start 66; Stop 90
caaagattggctctgttccttttgg

SEQ ID NO: 174125 - DNA, 25 bp, Artificial
  probe
  misc_feature (1)..(25): SEQ ID NO: 3089; WAN024DWL_at; Start 132; Stop 156
caaagcggataaagtcttcataggc

SEQ ID NO: 174126 - DNA, 25 bp, Artificial
  probe
  misc_feature (1)..(25): SEQ ID NO: 3089; WAN024DWL_at; Start 184; Stop 208
gatgttgtcatccacactcaccgtt

SEQ ID NO: 174127 - DNA, 25 bp, Artificial
  probe
  misc_feature (1)..(25): SEQ ID NO: 3089; WAN024DWL_at; Start 94; Stop 118
gaaatagatatactcgtttccgatg

SEQ ID NO: 174128 - DNA, 25 bp, Artificial
  probe
  misc_feature (1)..(25): SEQ ID NO: 3089; WAN024DWL_at; Start 73; Stop 97
tggctctgttccttttggttggaaa

SEQ ID NO: 174129 - DNA, 25 bp, Artificial
  probe
  misc_feature (1)..(25): SEQ ID NO: 3089; WAN024DWL_at; Start 265; Stop 289
tccttccagcaattggaaggttgtc

SEQ ID NO: 174130 - DNA, 25 bp, Artificial
  probe
  misc_feature (1)..(25): SEQ ID NO: 3089; WAN024DWL_at; Start 146; Stop 170
tcttcataggcttcgtgagttgtct

SEQ ID NO: 174131 - DNA, 25 bp, Artificial
  probe
  misc_feature (1)..(25): SEQ ID NO: 3089; WAN024DWL_at; Start 141; Stop 165
taaagtcttcataggcttcgtgagt

SEQ ID NO: 174132 - DNA, 25 bp, Artificial
  probe
  misc_feature (1)..(25): SEQ ID NO: 3089; WAN024DWL_at; Start 176; Stop 200
tagactgtgatgttgtcatccacac

SEQ ID NO: 174133 - DNA, 25 bp, Artificial
  probe
  misc_feature (1)..(25): SEQ ID NO: 3089; WAN024DWL_at; Start 203; Stop 227
accgttacgaatggtgtatcaatca

SEQ ID NO: 174134 - DNA, 25 bp, Artificial
  probe
  misc_feature (1)..(25): SEQ ID NO: 3089; WAN024DWL_at; Start 119; Stop 143
tccccacggtcttcaaagcggataa

SEQ ID NO: 174135 - DNA, 25 bp, Artificial
  probe
  misc_feature (1)..(25): SEQ ID NO: 3089; WAN024DWL_at; Start 194; Stop 218
tccacactcaccgttacgaatggtg

SEQ ID NO: 174136 - DNA, 25 bp, Artificial
  probe
  misc_feature (1)..(25): SEQ ID NO: 3089; WAN024DWL_at; Start 274; Stop 298
caattggaaggttgtccaagaaagc

SEQ ID NO: 174137 - DNA, 25 bp, Artificial
  probe
  misc_feature (1)..(25): SEQ ID NO: 3089; WAN024DWL_at; Start 112; Stop 136
tccgatgtccccacggtcttcaaag

SEQ ID NO: 174138 - DNA, 25 bp, Artificial
  probe
  misc_feature (1)..(25): SEQ ID NO: 3089; WAN024DWL_at; Start 123; Stop 147
cacggtcttcaaagcggataaagtc

SEQ ID NO: 174139 - DNA, 25 bp, Artificial
  probe
  misc_feature (1)..(25): SEQ ID NO: 3089; WAN024DWL_at; Start 59; Stop 83
agctctgcaaagattggctctgttc

SEQ ID NO: 174140 - DNA, 25 bp, Artificial
  probe
  misc_feature (1)..(25): SEQ ID NO: 3089; WAN024DWL_at; Start 62; Stop 86
tctgcaaagattggctctgttcctt

SEQ ID NO: 174141 - DNA, 25 bp, Artificial
  probe
  misc_feature (1)..(25): SEQ ID NO: 3089; WAN024DWL_at; Start 187; Stop 211
gttgtcatccacactcaccgttacg

SEQ ID NO: 174142 - DNA, 25 bp, Artificial
  probe
  misc_feature (1)..(25): SEQ ID NO: 3089; WAN024DWL_at; Start 269; Stop 293
tccagcaattggaaggttgtccaag

SEQ ID NO: 174143 - DNA, 25 bp, Artificial
  probe
  misc_feature (1)..(25): SEQ ID NO: 3089; WAN024DWL_at; Start 198; Stop 222
cactcaccgttacgaatggtgtatc

SEQ ID NO: 174144 - DNA, 25 bp, Artificial
  probe
  misc_feature (1)..(25): SEQ ID NO: 3089; WAN024DWL_at; Start 173; Stop 197
tcatagactgtgatgttgtcatcca

SEQ ID NO: 174145 - DNA, 25 bp, Artificial
  probe
  misc_feature (1)..(25): SEQ ID NO: 3089; WAN024DWL_at; Start 221; Stop 245
tcaatcactccgttttggtaaatac

SEQ ID NO: 174146 - DNA, 25 bp, Artificial
  probe
  misc_feature (1)..(25): SEQ ID NO: 3089; WAN024DWL_at; Start 276; Stop 300
attggaaggttgtccaagaaagcgg

SEQ ID NO: 174147 - DNA, 25 bp, Artificial
  probe
  misc_feature (1)..(25): SEQ ID NO: 3089; WAN024DWL_at; Start 100; Stop 124
gatatactcgtttccgatgtcccca

SEQ ID NO: 174148 - DNA, 25 bp, Artificial
  probe
  misc_feature (1)..(25): SEQ ID NO: 3089; WAN024DWL_at; Start 70; Stop 94
gattggctctgttccttttggttgg

SEQ ID NO: 174149 - DNA, 25 bp, Artificial
  probe
  misc_feature (1)..(25): SEQ ID NO: 3089; WAN024DWL_at; Start 83; Stop 107
ccttttggttggaaatagatatact

SEQ ID NO: 174150 - DNA, 25 bp, Artificial
  probe
  misc_feature (1)..(25): SEQ ID NO: 4054; WAN024DWM_at; Start 13; Stop 37
gaaatcacaagtcgccacatcaatc

SEQ ID NO: 174151 - DNA, 25 bp, Artificial
  probe
  misc_feature (1)..(25): SEQ ID NO: 4054; WAN024DWM_at; Start 248; Stop 272
ggcgcattctgcaaaagtgttttcc

SEQ ID NO: 174152 - DNA, 25 bp, Artificial
  probe
  misc_feature (1)..(25): SEQ ID NO: 4054; WAN024DWM_at; Start 205; Stop 229
gcggtgaacttcgtccacgctacag

SEQ ID NO: 174153 - DNA, 25 bp, Artificial
  probe
  misc_feature (1)..(25): SEQ ID NO: 4054; WAN024DWM_at; Start 275; Stop 299
gcataggtcaactggtccttgtggt

SEQ ID NO: 174154 - DNA, 25 bp, Artificial
  probe
  misc_feature (1)..(25): SEQ ID NO: 4054; WAN024DWM_at; Start 187; Stop 211
aaaacgcgtttccatctcgcggtga

SEQ ID NO: 174155 - DNA, 25 bp, Artificial
  probe
  misc_feature (1)..(25): SEQ ID NO: 4054; WAN024DWM_at; Start 176; Stop 200
ttgaccttggcaaaacgcgtttcca

SEQ ID NO: 174156 - DNA, 25 bp, Artificial
  probe
  misc_feature (1)..(25): SEQ ID NO: 4054; WAN024DWM_at; Start 235; Stop 259
gatactatcatgtggcgcattctgc

SEQ ID NO: 174157 - DNA, 25 bp, Artificial
  probe
  misc_feature (1)..(25): SEQ ID NO: 4054; WAN024DWM_at; Start 321; Stop 345
tcaagggttctaccacttgctctag

SEQ ID NO: 174158 - DNA, 25 bp, Artificial
  probe
  misc_feature (1)..(25): SEQ ID NO: 4054; WAN024DWM_at; Start 265; Stop 289
tgttttccaagcataggtcaactgg

SEQ ID NO: 174159 - DNA, 25 bp, Artificial
  probe
  misc_feature (1)..(25): SEQ ID NO: 4054; WAN024DWM_at; Start 163; Stop 187
gtttcctacttggttgaccttggca

SEQ ID NO: 174160 - DNA, 25 bp, Artificial
  probe
  misc_feature (1)..(25): SEQ ID NO: 4054; WAN024DWM_at; Start 283; Stop 307
caactggtccttgtggttgtgtcca

SEQ ID NO: 174161 - DNA, 25 bp, Artificial
  probe
  misc_feature (1)..(25): SEQ ID NO: 4054; WAN024DWM_at; Start 55; Stop 79
gaccttatcatgcaagcctgtgtta

SEQ ID NO: 174162 - DNA, 25 bp, Artificial
  probe
  misc_feature (1)..(25): SEQ ID NO: 4054; WAN024DWM_at; Start 105; Stop 129
gagccttatccgtagcaattttacc

SEQ ID NO: 174163 - DNA, 25 bp, Artificial
  probe
  misc_feature (1)..(25): SEQ ID NO: 4054; WAN024DWM_at; Start 242; Stop 266
tcatgtggcgcattctgcaaaagtg

SEQ ID NO: 174164 - DNA, 25 bp, Artificial
  probe
  misc_feature (1)..(25): SEQ ID NO: 4054; WAN024DWM_at; Start 84; Stop 108
cagtaaagagatagtcactttgagc

SEQ ID NO: 174165 - DNA, 25 bp, Artificial
  probe
  misc_feature (1)..(25): SEQ ID NO: 4054; WAN024DWM_at; Start 259; Stop 283
caaaagtgttttccaagcataggtc

SEQ ID NO: 174166 - DNA, 25 bp, Artificial
  probe
  misc_feature (1)..(25): SEQ ID NO: 4054; WAN024DWM_at; Start 269; Stop 293
ttccaagcataggtcaactggtcct

SEQ ID NO: 174167 - DNA, 25 bp, Artificial
  probe
  misc_feature (1)..(25): SEQ ID NO: 4054; WAN024DWM_at; Start 302; Stop 326
tgtccaccagtgataatagtcaagg

SEQ ID NO: 174168 - DNA, 25 bp, Artificial
  probe
  misc_feature (1)..(25): SEQ ID NO: 4054; WAN024DWM_at; Start 169; Stop 193
tacttggttgaccttggcaaaacgc

SEQ ID NO: 174169 - DNA, 25 bp, Artificial
  probe
  misc_feature (1)..(25): SEQ ID NO: 4054; WAN024DWM_at; Start 288; Stop 312
ggtccttgtggttgtgtccaccagt

SEQ ID NO: 174170 - DNA, 25 bp, Artificial
  probe
  misc_feature (1)..(25): SEQ ID NO: 4054; WAN024DWM_at; Start 50; Stop 74
gtatcgaccttatcatgcaagcctg

SEQ ID NO: 174171 - DNA, 25 bp, Artificial
  probe
  misc_feature (1)..(25): SEQ ID NO: 4054; WAN024DWM_at; Start 120; Stop 144
caattttacccttccactcgttgag

SEQ ID NO: 174172 - DNA, 25 bp, Artificial
  probe
  misc_feature (1)..(25): SEQ ID NO: 4054; WAN024DWM_at; Start 313; Stop 337
gataatagtcaagggttctaccact

SEQ ID NO: 174173 - DNA, 25 bp, Artificial
  probe
  misc_feature (1)..(25): SEQ ID NO: 4054; WAN024DWM_at; Start 95; Stop 119
tagtcactttgagccttatccgtag

SEQ ID NO: 174174 - DNA, 25 bp, Artificial
  probe
  misc_feature (1)..(25): SEQ ID NO: 4054; WAN024DWM_at; Start 123; Stop 147
ttttacccttccactcgttgagcaa

SEQ ID NO: 174175 - DNA, 25 bp, Artificial
  probe
  misc_feature (1)..(25): SEQ ID NO: 4054; WAN024DWM_at; Start 26; Stop 50
gccacatcaatcactgtgcagacag

SEQ ID NO: 174176 - DNA, 25 bp, Artificial
  probe
  misc_feature (1)..(25): SEQ ID NO: 4054; WAN024DWM_at; Start 222; Stop 246
cgctacagccacagatactatcatg

SEQ ID NO: 174177 - DNA, 25 bp, Artificial
  probe
  misc_feature (1)..(25): SEQ ID NO: 4054; WAN024DWM_at; Start 75; Stop 99
tgttaatgacagtaaagagatagtc

SEQ ID NO: 174178 - DNA, 25 bp, Artificial
  probe
  misc_feature (1)..(25): SEQ ID NO: 4054; WAN024DWM_at; Start 46; Stop 70
gacagtatcgaccttatcatgcaag

SEQ ID NO: 174179 - DNA, 25 bp, Artificial
  probe
  misc_feature (1)..(25): SEQ ID NO: 4054; WAN024DWM_at; Start 2; Stop 26
tgcaattccttgaaatcacaagtcg

SEQ ID NO: 174180 - DNA, 25 bp, Artificial
  probe
  misc_feature (1)..(25): SEQ ID NO: 4054; WAN024DWM_at; Start 66; Stop 90
gcaagcctgtgttaatgacagtaaa

SEQ ID NO: 174181 - DNA, 25 bp, Artificial
  probe
  misc_feature (1)..(25): SEQ ID NO: 4054; WAN024DWM_at; Start 197; Stop 221
tccatctcgcggtgaacttcgtcca

SEQ ID NO: 174182 - DNA, 25 bp, Artificial
  probe
  misc_feature (1)..(25): SEQ ID NO: 4054; WAN024DWM_at; Start 40; Stop 64
tgtgcagacagtatcgaccttatca

SEQ ID NO: 174183 - DNA, 25 bp, Artificial
  probe
  misc_feature (1)..(25): SEQ ID NO: 4054; WAN024DWM_at; Start 214; Stop 238
ttcgtccacgctacagccacagata

SEQ ID NO: 174184 - DNA, 25 bp, Artificial
  probe
  misc_feature (1)..(25): SEQ ID NO: 4268; WAN024DWN_at; Start 166; Stop 190
tggtgttatccccaaggatttcgta

SEQ ID NO: 174185 - DNA, 25 bp, Artificial
  probe
  misc_feature (1)..(25): SEQ ID NO: 4268; WAN024DWN_at; Start 26; Stop 50
ataggctgagaagcgttcttgggct

SEQ ID NO: 174186 - DNA, 25 bp, Artificial
  probe
  misc_feature (1)..(25): SEQ ID NO: 4268; WAN024DWN_at; Start 38; Stop 62
gcgttcttgggcttggtggcattca

SEQ ID NO: 174187 - DNA, 25 bp, Artificial
  probe
  misc_feature (1)..(25): SEQ ID NO: 4268; WAN024DWN_at; Start 73; Stop 97
cgacttcaaactcccgcaagcattg

SEQ ID NO: 174188 - DNA, 25 bp, Artificial
  probe
  misc_feature (1)..(25): SEQ ID NO: 4268; WAN024DWN_at; Start 187; Stop 211
cgtattcattcaatcccttgttgga

SEQ ID NO: 174189 - DNA, 25 bp, Artificial
  probe
  misc_feature (1)..(25): SEQ ID NO: 4268; WAN024DWN_at; Start 222; Stop 246
cctttttcatcgtcatacagactga

SEQ ID NO: 174190 - DNA, 25 bp, Artificial
  probe
  misc_feature (1)..(25): SEQ ID NO: 4268; WAN024DWN_at; Start 160; Stop 184
cggcaatggtgttatccccaaggat

SEQ ID NO: 174191 - DNA, 25 bp, Artificial
  probe
  misc_feature (1)..(25): SEQ ID NO: 4268; WAN024DWN_at; Start 144; Stop 168
gcacgcaaaatggtcacggcaatgg

SEQ ID NO: 174192 - DNA, 25 bp, Artificial
  probe
  misc_feature (1)..(25): SEQ ID NO: 4268; WAN024DWN_at; Start 131; Stop 155
tagctcacctgatgcacgcaaaatg

SEQ ID NO: 174193 - DNA, 25 bp, Artificial
  probe
  misc_feature (1)..(25): SEQ ID NO: 4268; WAN024DWN_at; Start 106; Stop 130
gcgttgggaagtagccccagtcacc

SEQ ID NO: 174194 - DNA, 25 bp, Artificial
  probe
  misc_feature (1)..(25): SEQ ID NO: 4268; WAN024DWN_at; Start 68; Stop 92
aaactcgacttcaaactcccgcaag

SEQ ID NO: 174195 - DNA, 25 bp, Artificial
  probe
  misc_feature (1)..(25): SEQ ID NO: 4268; WAN024DWN_at; Start 124; Stop 148
agtcacctagctcacctgatgcacg

SEQ ID NO: 174196 - DNA, 25 bp, Artificial
  probe
  misc_feature (1)..(25): SEQ ID NO: 4268; WAN024DWN_at; Start 21; Stop 45
cgacgataggctgagaagcgttctt

SEQ ID NO: 174197 - DNA, 25 bp, Artificial
  probe
  misc_feature (1)..(25): SEQ ID NO: 4268; WAN024DWN_at; Start 56; Stop 80
gcattcaagtgcaaactcgacttca

SEQ ID NO: 174198 - DNA, 25 bp, Artificial
  probe
  misc_feature (1)..(25): SEQ ID NO: 4268; WAN024DWN_at; Start 212; Stop 236
tacagtcacccctttttcatcgtca

SEQ ID NO: 174199 - DNA, 25 bp, Artificial
  probe
  misc_feature (1)..(25): SEQ ID NO: 4268; WAN024DWN_at; Start 43; Stop 67
cttgggcttggtggcattcaagtgc

SEQ ID NO: 174200 - DNA, 25 bp, Artificial
  probe
  misc_feature (1)..(25): SEQ ID NO: 4268; WAN024DWN_at; Start 135; Stop 159
tcacctgatgcacgcaaaatggtca

SEQ ID NO: 174201 - DNA, 25 bp, Artificial
  probe
  misc_feature (1)..(25): SEQ ID NO: 4268; WAN024DWN_at; Start 147; Stop 171
cgcaaaatggtcacggcaatggtgt

SEQ ID NO: 174202 - DNA, 25 bp, Artificial
  probe
  misc_feature (1)..(25): SEQ ID NO: 4268; WAN024DWN_at; Start 218; Stop 242
cacccctttttcatcgtcatacaga

SEQ ID NO: 174203 - DNA, 25 bp, Artificial
  probe
  misc_feature (1)..(25): SEQ ID NO: 4268; WAN024DWN_at; Start 197; Stop 221
caatcccttgttggatacagtcacc

SEQ ID NO: 174204 - DNA, 25 bp, Artificial
  probe
  misc_feature (1)..(25): SEQ ID NO: 4268; WAN024DWN_at; Start 205; Stop 229
tgttggatacagtcacccctttttc

SEQ ID NO: 174205 - DNA, 25 bp, Artificial
  probe
  misc_feature (1)..(25): SEQ ID NO: 4268; WAN024DWN_at; Start 200; Stop 224
tcccttgttggatacagtcacccct

SEQ ID NO: 174206 - DNA, 25 bp, Artificial
  probe
  misc_feature (1)..(25): SEQ ID NO: 4268; WAN024DWN_at; Start 81; Stop 105
aactcccgcaagcattgtgcttctg

SEQ ID NO: 174207 - DNA, 25 bp, Artificial
  probe
  misc_feature (1)..(25): SEQ ID NO: 4268; WAN024DWN_at; Start 64; Stop 88
gtgcaaactcgacttcaaactcccg

SEQ ID NO: 174208 - DNA, 25 bp, Artificial
  probe
  misc_feature (1)..(25): SEQ ID NO: 4268; WAN024DWN_at; Start 157; Stop 181
tcacggcaatggtgttatccccaag

SEQ ID NO: 174209 - DNA, 25 bp, Artificial
  probe
  misc_feature (1)..(25): SEQ ID NO: 4268; WAN024DWN_at; Start 175; Stop 199
ccccaaggatttcgtattcattcaa

SEQ ID NO: 174210 - DNA, 25 bp, Artificial
  probe
  misc_feature (1)..(25): SEQ ID NO: 4268; WAN024DWN_at; Start 111; Stop 135
gggaagtagccccagtcacctagct

SEQ ID NO: 174211 - DNA, 25 bp, Artificial
  probe
  misc_feature (1)..(25): SEQ ID NO: 4268; WAN024DWN_at; Start 102; Stop 126
tctggcgttgggaagtagccccagt

SEQ ID NO: 174212 - DNA, 25 bp, Artificial
  probe
  misc_feature (1)..(25): SEQ ID NO: 4268; WAN024DWN_at; Start 152; Stop 176
aatggtcacggcaatggtgttatcc

SEQ ID NO: 174213 - DNA, 25 bp, Artificial
  probe
  misc_feature (1)..(25): SEQ ID NO: 4268; WAN024DWN_at; Start 140; Stop 164
tgatgcacgcaaaatggtcacggca

SEQ ID NO: 174214 - DNA, 25 bp, Artificial
  probe
  misc_feature (1)..(25): SEQ ID NO: 4268; WAN024DWN_at; Start 98; Stop 122
tgcttctggcgttgggaagtagccc

SEQ ID NO: 174215 - DNA, 25 bp, Artificial
  probe
  misc_feature (1)..(25): SEQ ID NO: 4268; WAN024DWN_at; Start 90; Stop 114
aagcattgtgcttctggcgttggga

SEQ ID NO: 174216 - DNA, 25 bp, Artificial
  probe
  misc_feature (1)..(25): SEQ ID NO: 4268; WAN024DWN_at; Start 52; Stop 76
ggtggcattcaagtgcaaactcgac

SEQ ID NO: 174217 - DNA, 25 bp, Artificial
  probe
  misc_feature (1)..(25): SEQ ID NO: 4268; WAN024DWN_at; Start 78; Stop 102
tcaaactcccgcaagcattgtgctt

SEQ ID NO: 174218 - DNA, 25 bp, Artificial
  probe
  misc_feature (1)..(25): SEQ ID NO: 5180; WAN024DWO_at; Start 304; Stop 328
cctgccagtacatttctgaaaactg

SEQ ID NO: 174219 - DNA, 25 bp, Artificial
  probe
  misc_feature (1)..(25): SEQ ID NO: 5180; WAN024DWO_at; Start 154; Stop 178
tcaaccattggttggtcgaagcgta

SEQ ID NO: 174220 - DNA, 25 bp, Artificial
  probe
  misc_feature (1)..(25): SEQ ID NO: 5180; WAN024DWO_at; Start 19; Stop 43
gcgcaccttctacagcttgaacata

SEQ ID NO: 174221 - DNA, 25 bp, Artificial
  probe
  misc_feature (1)..(25): SEQ ID NO: 5180; WAN024DWO_at; Start 100; Stop 124
gaatggcttcgctcagatttttctg

SEQ ID NO: 174222 - DNA, 25 bp, Artificial
  probe
  misc_feature (1)..(25): SEQ ID NO: 5180; WAN024DWO_at; Start 159; Stop 183
cattggttggtcgaagcgtaggcac

SEQ ID NO: 174223 - DNA, 25 bp, Artificial
  probe
  misc_feature (1)..(25): SEQ ID NO: 5180; WAN024DWO_at; Start 113; Stop 137
cagatttttctgtacaggctggtgg

SEQ ID NO: 174224 - DNA, 25 bp, Artificial
  probe
  misc_feature (1)..(25): SEQ ID NO: 5180; WAN024DWO_at; Start 300; Stop 324
acaccctgccagtacatttctgaaa

SEQ ID NO: 174225 - DNA, 25 bp, Artificial
  probe
  misc_feature (1)..(25): SEQ ID NO: 5180; WAN024DWO_at; Start 260; Stop 284
ccagttggcaaagagaatacctaaa

SEQ ID NO: 174226 - DNA, 25 bp, Artificial
  probe
  misc_feature (1)..(25): SEQ ID NO: 5180; WAN024DWO_at; Start 136; Stop 160
ggtcacagccgttcatcatcaacca

SEQ ID NO: 174227 - DNA, 25 bp, Artificial
  probe
  misc_feature (1)..(25): SEQ ID NO: 5180; WAN024DWO_at; Start 276; Stop 300
atacctaaaacacgactaccatcca

SEQ ID NO: 174228 - DNA, 25 bp, Artificial
  probe
  misc_feature (1)..(25): SEQ ID NO: 5180; WAN024DWO_at; Start 209; Stop 233
gaaggtcaaggcctcatctttgtca

SEQ ID NO: 174229 - DNA, 25 bp, Artificial
  probe
  misc_feature (1)..(25): SEQ ID NO: 5180; WAN024DWO_at; Start 15; Stop 39
ggaagcgcaccttctacagcttgaa

SEQ ID NO: 174230 - DNA, 25 bp, Artificial
  probe
  misc_feature (1)..(25): SEQ ID NO: 5180; WAN024DWO_at; Start 164; Stop 188
gttggtcgaagcgtaggcacgcaca

SEQ ID NO: 174231 - DNA, 25 bp, Artificial
  probe
  misc_feature (1)..(25): SEQ ID NO: 5180; WAN024DWO_at; Start 174; Stop 198
gcgtaggcacgcacatctgacaatt

SEQ ID NO: 174232 - DNA, 25 bp, Artificial
  probe
  misc_feature (1)..(25): SEQ ID NO: 5180; WAN024DWO_at; Start 1; Stop 25
ttgataagtgttcaggaagcgcacc

SEQ ID NO: 174233 - DNA, 25 bp, Artificial
  probe
  misc_feature (1)..(25): SEQ ID NO: 5180; WAN024DWO_at; Start 272; Stop 296
gagaatacctaaaacacgactacca

SEQ ID NO: 174234 - DNA, 25 bp, Artificial
  probe
  misc_feature (1)..(25): SEQ ID NO: 5180; WAN024DWO_at; Start 143; Stop 167
gccgttcatcatcaaccattggttg

SEQ ID NO: 174235 - DNA, 25 bp, Artificial
  probe
  misc_feature (1)..(25): SEQ ID NO: 5180; WAN024DWO_at; Start 46; Stop 70
catcaaaagaactatgaacaaagat

SEQ ID NO: 174236 - DNA, 25 bp, Artificial
  probe
  misc_feature (1)..(25): SEQ ID NO: 5180; WAN024DWO_at; Start 61; Stop 85
gaacaaagattacatccgggaagag

SEQ ID NO: 174237 - DNA, 25 bp, Artificial
  probe
  misc_feature (1)..(25): SEQ ID NO: 5180; WAN024DWO_at; Start 121; Stop 145
tctgtacaggctggtggtcacagcc

SEQ ID NO: 174238 - DNA, 25 bp, Artificial
  probe
  misc_feature (1)..(25): SEQ ID NO: 5180; WAN024DWO_at; Start 87; Stop 111
tcatttgccacacgaatggcttcgc

SEQ ID NO: 174239 - DNA, 25 bp, Artificial
  probe
  misc_feature (1)..(25): SEQ ID NO: 5180; WAN024DWO_at; Start 201; Stop 225
tgtttccagaaggtcaaggcctcat

SEQ ID NO: 174240 - DNA, 25 bp, Artificial
  probe
  misc_feature (1)..(25): SEQ ID NO: 5180; WAN024DWO_at; Start 5; Stop 29
taagtgttcaggaagcgcaccttct

SEQ ID NO: 174241 - DNA, 25 bp, Artificial
  probe
  misc_feature (1)..(25): SEQ ID NO: 5180; WAN024DWO_at; Start 130; Stop 154
gctggtggtcacagccgttcatcat

SEQ ID NO: 174242 - DNA, 25 bp, Artificial
  probe
  misc_feature (1)..(25): SEQ ID NO: 5180; WAN024DWO_at; Start 80; Stop 104
gaagagttcatttgccacacgaatg

SEQ ID NO: 174243 - DNA, 25 bp, Artificial
  probe
  misc_feature (1)..(25): SEQ ID NO: 5180; WAN024DWO_at; Start 92; Stop 116
tgccacacgaatggcttcgctcaga

SEQ ID NO: 174244 - DNA, 25 bp, Artificial
  probe
  misc_feature (1)..(25): SEQ ID NO: 5180; WAN024DWO_at; Start 252; Stop 276
ttactgtaccagttggcaaagagaa

SEQ ID NO: 174245 - DNA, 25 bp, Artificial
  probe
  misc_feature (1)..(25): SEQ ID NO: 5180; WAN024DWO_at; Start 265; Stop 289
tggcaaagagaatacctaaaacacg

SEQ ID NO: 174246 - DNA, 25 bp, Artificial
  probe
  misc_feature (1)..(25): SEQ ID NO: 5180; WAN024DWO_at; Start 77; Stop 101
cgggaagagttcatttgccacacga

SEQ ID NO: 174247 - DNA, 25 bp, Artificial
  probe
  misc_feature (1)..(25): SEQ ID NO: 5180; WAN024DWO_at; Start 179; Stop 203
ggcacgcacatctgacaatttttgt

SEQ ID NO: 174248 - DNA, 25 bp, Artificial
  probe
  misc_feature (1)..(25): SEQ ID NO: 5180; WAN024DWO_at; Start 31; Stop 55
cagcttgaacatattcatcaaaaga

SEQ ID NO: 174249 - DNA, 25 bp, Artificial
  probe
  misc_feature (1)..(25): SEQ ID NO: 5180; WAN024DWO_at; Start 71; Stop 95
tacatccgggaagagttcatttgcc

SEQ ID NO: 174250 - DNA, 25 bp, Artificial
  probe
  misc_feature (1)..(25): SEQ ID NO: 5180; WAN024DWO_at; Start 194; Stop 218
caatttttgtttccagaaggtcaag

SEQ ID NO: 174251 - DNA, 25 bp, Artificial
  probe
  misc_feature (1)..(25): SEQ ID NO: 5180; WAN024DWO_at; Start 214; Stop 238
tcaaggcctcatctttgtcaactgg

SEQ ID NO: 174252 - DNA, 25 bp, Artificial
  probe
  misc_feature (1)..(25): SEQ ID NO: 3054; WAN024DWP_at; Start 96; Stop 120
gacaaacttgcggtatgctgagaac

SEQ ID NO: 174253 - DNA, 25 bp, Artificial
  probe
  misc_feature (1)..(25): SEQ ID NO: 3054; WAN024DWP_at; Start 161; Stop 185
tcctgtctagcaagctgaaggctgg

SEQ ID NO: 174254 - DNA, 25 bp, Artificial
  probe
  misc_feature (1)..(25): SEQ ID NO: 3054; WAN024DWP_at; Start 14; Stop 38
ggcacacgtacattttcactacaca

SEQ ID NO: 174255 - DNA, 25 bp, Artificial
  probe
  misc_feature (1)..(25): SEQ ID NO: 3054; WAN024DWP_at; Start 89; Stop 113
gctgttggacaaacttgcggtatgc

SEQ ID NO: 174256 - DNA, 25 bp, Artificial
  probe
  misc_feature (1)..(25): SEQ ID NO: 3054; WAN024DWP_at; Start 106; Stop 130
cggtatgctgagaacagaatggctc

SEQ ID NO: 174257 - DNA, 25 bp, Artificial
  probe
  misc_feature (1)..(25): SEQ ID NO: 3054; WAN024DWP_at; Start 168; Stop 192
tagcaagctgaaggctggtaaacgg

SEQ ID NO: 174258 - DNA, 25 bp, Artificial
  probe
  misc_feature (1)..(25): SEQ ID NO: 3054; WAN024DWP_at; Start 154; Stop 178
gcttccttcctgtctagcaagctga

SEQ ID NO: 174259 - DNA, 25 bp, Artificial
  probe
  misc_feature (1)..(25): SEQ ID NO: 3054; WAN024DWP_at; Start 53; Stop 77
agcacatagccttcttcattttcag

SEQ ID NO: 174260 - DNA, 25 bp, Artificial
  probe
  misc_feature (1)..(25): SEQ ID NO: 3054; WAN024DWP_at; Start 69; Stop 93
cattttcagctaccttaaaggctgt

SEQ ID NO: 174261 - DNA, 25 bp, Artificial
  probe
  misc_feature (1)..(25): SEQ ID NO: 3054; WAN024DWP_at; Start 128; Stop 152
ctcaagaggctaccagtcgcaacca

SEQ ID NO: 174262 - DNA, 25 bp, Artificial
  probe
  misc_feature (1)..(25): SEQ ID NO: 3054; WAN024DWP_at; Start 75; Stop 99
cagctaccttaaaggctgttggaca

SEQ ID NO: 174263 - DNA, 25 bp, Artificial
  probe
  misc_feature (1)..(25): SEQ ID NO: 3054; WAN024DWP_at; Start 119; Stop 143
acagaatggctcaagaggctaccag

SEQ ID NO: 174264 - DNA, 25 bp, Artificial
  probe
  misc_feature (1)..(25): SEQ ID NO: 3054; WAN024DWP_at; Start 65; Stop 89
tcttcattttcagctaccttaaagg

SEQ ID NO: 174265 - DNA, 25 bp, Artificial
  probe
  misc_feature (1)..(25): SEQ ID NO: 3054; WAN024DWP_at; Start 117; Stop 141
gaacagaatggctcaagaggctacc

SEQ ID NO: 174266 - DNA, 25 bp, Artificial
  probe
  misc_feature (1)..(25): SEQ ID NO: 3054; WAN024DWP_at; Start 6; Stop 30
gactttctggcacacgtacattttc

SEQ ID NO: 174267 - DNA, 25 bp, Artificial
  probe
  misc_feature (1)..(25): SEQ ID NO: 3054; WAN024DWP_at; Start 164; Stop 188
tgtctagcaagctgaaggctggtaa

SEQ ID NO: 174268 - DNA, 25 bp, Artificial
  probe
  misc_feature (1)..(25): SEQ ID NO: 3054; WAN024DWP_at; Start 104; Stop 128
tgcggtatgctgagaacagaatggc

SEQ ID NO: 174269 - DNA, 25 bp, Artificial
  probe
  misc_feature (1)..(25): SEQ ID NO: 3054; WAN024DWP_at; Start 109; Stop 133
tatgctgagaacagaatggctcaag

SEQ ID NO: 174270 - DNA, 25 bp, Artificial
  probe
  misc_feature (1)..(25): SEQ ID NO: 3054; WAN024DWP_at; Start 92; Stop 116
gttggacaaacttgcggtatgctga

SEQ ID NO: 174271 - DNA, 25 bp, Artificial
  probe
  misc_feature (1)..(25): SEQ ID NO: 3054; WAN024DWP_at; Start 114; Stop 138
tgagaacagaatggctcaagaggct

SEQ ID NO: 174272 - DNA, 25 bp, Artificial
  probe
  misc_feature (1)..(25): SEQ ID NO: 3054; WAN024DWP_at; Start 84; Stop 108
taaaggctgttggacaaacttgcgg

SEQ ID NO: 174273 - DNA, 25 bp, Artificial
  probe
  misc_feature (1)..(25): SEQ ID NO: 3054; WAN024DWP_at; Start 1; Stop 25
atgttgactttctggcacacgtaca

SEQ ID NO: 174274 - DNA, 25 bp, Artificial
  probe
  misc_feature (1)..(25): SEQ ID NO: 3054; WAN024DWP_at; Start 46; Stop 70
gtaacgaagcacatagccttcttca

SEQ ID NO: 174275 - DNA, 25 bp, Artificial
  probe
  misc_feature (1)..(25): SEQ ID NO: 3054; WAN024DWP_at; Start 20; Stop 44
cgtacattttcactacacatattgt

SEQ ID NO: 174276 - DNA, 25 bp, Artificial
  probe
  misc_feature (1)..(25): SEQ ID NO: 3054; WAN024DWP_at; Start 42; Stop 66
tgtagtaacgaagcacatagccttc

SEQ ID NO: 174277 - DNA, 25 bp, Artificial
  probe
  misc_feature (1)..(25): SEQ ID NO: 3054; WAN024DWP_at; Start 182; Stop 206
ctggtaaacggtgtctgcaaggctt

SEQ ID NO: 174278 - DNA, 25 bp, Artificial
  probe
  misc_feature (1)..(25): SEQ ID NO: 3054; WAN024DWP_at; Start 98; Stop 122
caaacttgcggtatgctgagaacag

SEQ ID NO: 174279 - DNA, 25 bp, Artificial
  probe
  misc_feature (1)..(25): SEQ ID NO: 3054; WAN024DWP_at; Start 177; Stop 201
gaaggctggtaaacggtgtctgcaa

SEQ ID NO: 174280 - DNA, 25 bp, Artificial
  probe
  misc_feature (1)..(25): SEQ ID NO: 3054; WAN024DWP_at; Start 33; Stop 57
tacacatattgtagtaacgaagcac

SEQ ID NO: 174281 - DNA, 25 bp, Artificial
  probe
  misc_feature (1)..(25): SEQ ID NO: 3054; WAN024DWP_at; Start 172; Stop 196
aagctgaaggctggtaaacggtgtc

SEQ ID NO: 174282 - DNA, 25 bp, Artificial
  probe
  misc_feature (1)..(25): SEQ ID NO: 3054; WAN024DWP_at; Start 39; Stop 63
tattgtagtaacgaagcacatagcc

SEQ ID NO: 174283 - DNA, 25 bp, Artificial
  probe
  misc_feature (1)..(25): SEQ ID NO: 3054; WAN024DWP_at; Start 125; Stop 149
tggctcaagaggctaccagtcgcaa

SEQ ID NO: 174284 - DNA, 25 bp, Artificial
  probe
  misc_feature (1)..(25): SEQ ID NO: 3054; WAN024DWP_at; Start 10; Stop 34
ttctggcacacgtacattttcacta

SEQ ID NO: 174285 - DNA, 25 bp, Artificial
  probe
  misc_feature (1)..(25): SEQ ID NO: 3054; WAN024DWP_at; Start 133; Stop 157
gaggctaccagtcgcaaccacgctt

SEQ ID NO: 174286 - DNA, 25 bp, Artificial
  probe
  misc_feature (1)..(25): SEQ ID NO: 1591; WAN024DWQ_at; Start 693; Stop 717
gatgatgaacggctgtgaccaccag

SEQ ID NO: 174287 - DNA, 25 bp, Artificial
  probe
  misc_feature (1)..(25): SEQ ID NO: 1591; WAN024DWQ_at; Start 753; Stop 777
ggcaaatgaactcttcccggatgta

SEQ ID NO: 174288 - DNA, 25 bp, Artificial
  probe
  misc_feature (1)..(25): SEQ ID NO: 1591; WAN024DWQ_at; Start 1309; Stop 1333
gaaggctacaaaaagatggctgctc

SEQ ID NO: 174289 - DNA, 25 bp, Artificial
  probe
  misc_feature (1)..(25): SEQ ID NO: 1591; WAN024DWQ_at; Start 1224; Stop 1248
taacacaggcttgcatgataaggtc

SEQ ID NO: 174290 - DNA, 25 bp, Artificial
  probe
  misc_feature (1)..(25): SEQ ID NO: 1591; WAN024DWQ_at; Start 296; Stop 320
tgatctccagtgaagccaatgtccg

SEQ ID NO: 174291 - DNA, 25 bp, Artificial
  probe
  misc_feature (1)..(25): SEQ ID NO: 1591; WAN024DWQ_at; Start 2357; Stop 2381
aagccttgcagacaccgtttaccag

SEQ ID NO: 174292 - DNA, 25 bp, Artificial
  probe
  misc_feature (1)..(25): SEQ ID NO: 1591; WAN024DWQ_at; Start 2442; Stop 2466
tgttctcagcataccgcaagtttgt

SEQ ID NO: 174293 - DNA, 25 bp, Artificial
  probe
  misc_feature (1)..(25): SEQ ID NO: 1591; WAN024DWQ_at; Start 1463; Stop 1487
aagtgcgcgtgaccattccagttca

SEQ ID NO: 174294 - DNA, 25 bp, Artificial
  probe
  misc_feature (1)..(25): SEQ ID NO: 1591; WAN024DWQ_at; Start 1998; Stop 2022
cttggtcaagactcataacacgcgt

SEQ ID NO: 174295 - DNA, 25 bp, Artificial
  probe
  misc_feature (1)..(25): SEQ ID NO: 1591; WAN024DWQ_at; Start 805; Stop 829
tatgttcaagctgtagaaggtgcgc

SEQ ID NO: 174296 - DNA, 25 bp, Artificial
  probe
  misc_feature (1)..(25): SEQ ID NO: 1591; WAN024DWQ_at; Start 2406; Stop 2430
aagcgtggttgcgactggtagcctc

SEQ ID NO: 174297 - DNA, 25 bp, Artificial
  probe
  misc_feature (1)..(25): SEQ ID NO: 1591; WAN024DWQ_at; Start 625; Stop 649
gaggccttgaccttctggaaacaaa

SEQ ID NO: 174298 - DNA, 25 bp, Artificial
  probe
  misc_feature (1)..(25): SEQ ID NO: 1591; WAN024DWQ_at; Start 649; Stop 673
aaattgtcagatgtgcgtgcctacg

SEQ ID NO: 174299 - DNA, 25 bp, Artificial
  probe
  misc_feature (1)..(25): SEQ ID NO: 1591; WAN024DWQ_at; Start 2042; Stop 2066
gtatctatgaggtggtgacacgacc

SEQ ID NO: 174300 - DNA, 25 bp, Artificial
  probe
  misc_feature (1)..(25): SEQ ID NO: 1591; WAN024DWQ_at; Start 2056; Stop 2080
gtgacacgaccaaacaaaccagctg

SEQ ID NO: 174301 - DNA, 25 bp, Artificial
  probe
  misc_feature (1)..(25): SEQ ID NO: 1591; WAN024DWQ_at; Start 393; Stop 417
ctttggaaatatgggacaagcgcct

SEQ ID NO: 174302 - DNA, 25 bp, Artificial
  probe
  misc_feature (1)..(25): SEQ ID NO: 1591; WAN024DWQ_at; Start 871; Stop 895
caggaaacagatggctggtacacac

SEQ ID NO: 174303 - DNA, 25 bp, Artificial
  probe
  misc_feature (1)..(25): SEQ ID NO: 1591; WAN024DWQ_at; Start 223; Stop 247
gacaaggtccaacgctacattgacg

SEQ ID NO: 174304 - DNA, 25 bp, Artificial
  probe
  misc_feature (1)..(25): SEQ ID NO: 1591; WAN024DWQ_at; Start 1290; Stop 1314
caaggaattgcacccaacagaaggc

SEQ ID NO: 174305 - DNA, 25 bp, Artificial
  probe
  misc_feature (1)..(25): SEQ ID NO: 1591; WAN024DWQ_at; Start 610; Stop 634
ccagttgacaaagatgaggccttga

SEQ ID NO: 174306 - DNA, 25 bp, Artificial
  probe
  misc_feature (1)..(25): SEQ ID NO: 1591; WAN024DWQ_at; Start 956; Stop 980
tcctagagcaagtggtagaaccctt

SEQ ID NO: 174307 - DNA, 25 bp, Artificial
  probe
  misc_feature (1)..(25): SEQ ID NO: 1591; WAN024DWQ_at; Start 1182; Stop 1206
tgctacggataaggctcaaagtgac

SEQ ID NO: 174308 - DNA, 25 bp, Artificial
  probe
  misc_feature (1)..(25): SEQ ID NO: 1591; WAN024DWQ_at; Start 1015; Stop 1039
cagttgacctatgcttggaaaacac

SEQ ID NO: 174309 - DNA, 25 bp, Artificial
  probe
  misc_feature (1)..(25): SEQ ID NO: 1591; WAN024DWQ_at; Start 850; Stop 874
gttacaggcgagttgaccagtcagg

SEQ ID NO: 174310 - DNA, 25 bp, Artificial
  probe
  misc_feature (1)..(25): SEQ ID NO: 1591; WAN024DWQ_at; Start 1075; Stop 1099
tgtagcgtggacgaagttcaccgcg

SEQ ID NO: 174311 - DNA, 25 bp, Artificial
  probe
  misc_feature (1)..(25): SEQ ID NO: 1591; WAN024DWQ_at; Start 334; Stop 358
ggtcaacaagaagctgccaaatggg

SEQ ID NO: 174312 - DNA, 25 bp, Artificial
  probe
  misc_feature (1)..(25): SEQ ID NO: 1591; WAN024DWQ_at; Start 1794; Stop 1818
tgaattgaccgtgcctgtcagtgcg

SEQ ID NO: 174313 - DNA, 25 bp, Artificial
  probe
  misc_feature (1)..(25): SEQ ID NO: 1591; WAN024DWQ_at; Start 994; Stop 1018
ggtggacacaaccacaaggaccagt

SEQ ID NO: 174314 - DNA, 25 bp, Artificial
  probe
  misc_feature (1)..(25): SEQ ID NO: 1591; WAN024DWQ_at; Start 2016; Stop 2040
cacgcgtccaagcaatgattctgaa

SEQ ID NO: 174315 - DNA, 25 bp, Artificial
  probe
  misc_feature (1)..(25): SEQ ID NO: 1591; WAN024DWQ_at; Start 1968; Stop 1992
taacactgccaaggatcaccgtatc

SEQ ID NO: 174316 - DNA, 25 bp, Artificial
  probe
  misc_feature (1)..(25): SEQ ID NO: 1591; WAN024DWQ_at; Start 2217; Stop 2241
cattttgcgtgcatcaggtgagcta

SEQ ID NO: 174317 - DNA, 25 bp, Artificial
  probe
  misc_feature (1)..(25): SEQ ID NO: 1591; WAN024DWQ_at; Start 1712; Stop 1736
gaacagagccaatctttgcagagct

SEQ ID NO: 174318 - DNA, 25 bp, Artificial
  probe
  misc_feature (1)..(25): SEQ ID NO: 1591; WAN024DWQ_at; Start 1031; Stop 1055
ggaaaacacttttgcagaatgcgcc

SEQ ID NO: 174319 - DNA, 25 bp, Artificial
  probe
  misc_feature (1)..(25): SEQ ID NO: 1591; WAN024DWQ_at; Start 426; Stop 450
tcaaaaatcaggcattcacgtggcg

SEQ ID NO: 174320 - DNA, 25 bp, Artificial
  probe
  misc_feature (1)..(25): SEQ ID NO: 4036; WAN024DWR_at; Start 145; Stop 169
gatagcctaagtgtcaaacaaaaat

SEQ ID NO: 174321 - DNA, 25 bp, Artificial
  probe
  misc_feature (1)..(25): SEQ ID NO: 4036; WAN024DWR_at; Start 188; Stop 212
tcggtgatgaatggcgttttgaatg

SEQ ID NO: 174322 - DNA, 25 bp, Artificial
  probe
  misc_feature (1)..(25): SEQ ID NO: 4036; WAN024DWR_at; Start 226; Stop 250
gaaatcgagacagaggacgaagaag

SEQ ID NO: 174323 - DNA, 25 bp, Artificial
  probe
  misc_feature (1)..(25): SEQ ID NO: 4036; WAN024DWR_at; Start 281; Stop 305
cagaacaatatccagattatgatgg

SEQ ID NO: 174324 - DNA, 25 bp, Artificial
  probe
  misc_feature (1)..(25): SEQ ID NO: 4036; WAN024DWR_at; Start 308; Stop 332
ttgactatgaagaatggtaactaat

SEQ ID NO: 174325 - DNA, 25 bp, Artificial
  probe
  misc_feature (1)..(25): SEQ ID NO: 4036; WAN024DWR_at; Start 63; Stop 87
tgagtggagtcatgcagattcttac

SEQ ID NO: 174326 - DNA, 25 bp, Artificial
  probe
  misc_feature (1)..(25): SEQ ID NO: 4036; WAN024DWR_at; Start 66; Stop 90
gtggagtcatgcagattcttacttt

SEQ ID NO: 174327 - DNA, 25 bp, Artificial
  probe
  misc_feature (1)..(25): SEQ ID NO: 4036; WAN024DWR_at; Start 172; Stop 196
aagtttattttcgacttcggtgatg

SEQ ID NO: 174328 - DNA, 25 bp, Artificial
  probe
  misc_feature (1)..(25): SEQ ID NO: 4036; WAN024DWR_at; Start 99; Stop 123
tgttagtgacgatgttgaagaacgt

SEQ ID NO: 174329 - DNA, 25 bp, Artificial
  probe
  misc_feature (1)..(25): SEQ ID NO: 4036; WAN024DWR_at; Start 53; Stop 77
tggataatgttgagtggagtcatgc

SEQ ID NO: 174330 - DNA, 25 bp, Artificial
  probe
  misc_feature (1)..(25): SEQ ID NO: 4036; WAN024DWR_at; Start 57; Stop 81
taatgttgagtggagtcatgcagat

SEQ ID NO: 174331 - DNA, 25 bp, Artificial
  probe
  misc_feature (1)..(25): SEQ ID NO: 4036; WAN024DWR_at; Start 304; Stop 328
ggttttgactatgaagaatggtaac

SEQ ID NO: 174332 - DNA, 25 bp, Artificial
  probe
  misc_feature (1)..(25): SEQ ID NO: 4036; WAN024DWR_at; Start 43; Stop 67
gcatttttcatggataatgttgagt

SEQ ID NO: 174333 - DNA, 25 bp, Artificial
  probe
  misc_feature (1)..(25): SEQ ID NO: 4036; WAN024DWR_at; Start 279; Stop 303
gccagaacaatatccagattatgat

SEQ ID NO: 174334 - DNA, 25 bp, Artificial
  probe
  misc_feature (1)..(25): SEQ ID NO: 4036; WAN024DWR_at; Start 143; Stop 167
tggatagcctaagtgtcaaacaaaa

SEQ ID NO: 174335 - DNA, 25 bp, Artificial
  probe
  misc_feature (1)..(25): SEQ ID NO: 4036; WAN024DWR_at; Start 130; Stop 154
gaaaatgtctatctggatagcctaa

SEQ ID NO: 174336 - DNA, 25 bp, Artificial
  probe
  misc_feature (1)..(25): SEQ ID NO: 4036; WAN024DWR_at; Start 222; Stop 246
gagagaaatcgagacagaggacgaa

SEQ ID NO: 174337 - DNA, 25 bp, Artificial
  probe
  misc_feature (1)..(25): SEQ ID NO: 4036; WAN024DWR_at; Start 300; Stop 324
tgatggttttgactatgaagaatgg

SEQ ID NO: 174338 - DNA, 25 bp, Artificial
  probe
  misc_feature (1)..(25): SEQ ID NO: 4036; WAN024DWR_at; Start 103; Stop 127
agtgacgatgttgaagaacgttaca

SEQ ID NO: 174339 - DNA, 25 bp, Artificial
  probe
  misc_feature (1)..(25): SEQ ID NO: 4036; WAN024DWR_at; Start 55; Stop 79
gataatgttgagtggagtcatgcag

SEQ ID NO: 174340 - DNA, 25 bp, Artificial
  probe
  misc_feature (1)..(25): SEQ ID NO: 4036; WAN024DWR_at; Start 185; Stop 209
acttcggtgatgaatggcgttttga

SEQ ID NO: 174341 - DNA, 25 bp, Artificial
  probe
  misc_feature (1)..(25): SEQ ID NO: 4036; WAN024DWR_at; Start 141; Stop 165
tctggatagcctaagtgtcaaacaa

SEQ ID NO: 174342 - DNA, 25 bp, Artificial
  probe
  misc_feature (1)..(25): SEQ ID NO: 4036; WAN024DWR_at; Start 60; Stop 84
tgttgagtggagtcatgcagattct

SEQ ID NO: 174343 - DNA, 25 bp, Artificial
  probe
  misc_feature (1)..(25): SEQ ID NO: 4036; WAN024DWR_at; Start 193; Stop 217
gatgaatggcgttttgaatgccaag

SEQ ID NO: 174344 - DNA, 25 bp, Artificial
  probe
  misc_feature (1)..(25): SEQ ID NO: 4036; WAN024DWR_at; Start 137; Stop 161
tctatctggatagcctaagtgtcaa

SEQ ID NO: 174345 - DNA, 25 bp, Artificial
  probe
  misc_feature (1)..(25): SEQ ID NO: 4036; WAN024DWR_at; Start 139; Stop 163
tatctggatagcctaagtgtcaaac

SEQ ID NO: 174346 - DNA, 25 bp, Artificial
  probe
  misc_feature (1)..(25): SEQ ID NO: 4036; WAN024DWR_at; Start 102; Stop 126
tagtgacgatgttgaagaacgttac

SEQ ID NO: 174347 - DNA, 25 bp, Artificial
  probe
  misc_feature (1)..(25): SEQ ID NO: 4036; WAN024DWR_at; Start 179; Stop 203
ttttcgacttcggtgatgaatggcg

SEQ ID NO: 174348 - DNA, 25 bp, Artificial
  probe
  misc_feature (1)..(25): SEQ ID NO: 4036; WAN024DWR_at; Start 289; Stop 313
tatccagattatgatggttttgact

SEQ ID NO: 174349 - DNA, 25 bp, Artificial
  probe
  misc_feature (1)..(25): SEQ ID NO: 4036; WAN024DWR_at; Start 220; Stop 244
ctgagagaaatcgagacagaggacg

SEQ ID NO: 174350 - DNA, 25 bp, Artificial
  probe
  misc_feature (1)..(25): SEQ ID NO: 4036; WAN024DWR_at; Start 93; Stop 117
tagctttgttagtgacgatgttgaa

SEQ ID NO: 174351 - DNA, 25 bp, Artificial
  probe
  misc_feature (1)..(25): SEQ ID NO: 4036; WAN024DWR_at; Start 182; Stop 206
tcgacttcggtgatgaatggcgttt

SEQ ID NO: 174352 - DNA, 25 bp, Artificial
  probe
  misc_feature (1)..(25): SEQ ID NO: 4036; WAN024DWR_at; Start 293; Stop 317
cagattatgatggttttgactatga

SEQ ID NO: 174353 - DNA, 25 bp, Artificial
  probe
  misc_feature (1)..(25): SEQ ID NO: 4036; WAN024DWR_at; Start 50; Stop 74
tcatggataatgttgagtggagtca

SEQ ID NO: 174354 - DNA, 25 bp, Artificial
  probe
  misc_feature (1)..(25): SEQ ID NO: 5959; WAN024DWS_at; Start 37; Stop 61
caaaaaaaatgtgttatcctagtat

SEQ ID NO: 174355 - DNA, 25 bp, Artificial
  probe
  misc_feature (1)..(25): SEQ ID NO: 5959; WAN024DWS_at; Start 40; Stop 64
aaaaaatgtgttatcctagtatggt

SEQ ID NO: 174356 - DNA, 25 bp, Artificial
  probe
  misc_feature (1)..(25): SEQ ID NO: 5959; WAN024DWS_at; Start 72; Stop 96
aatcagtagattgaatcgaatataa

SEQ ID NO: 174357 - DNA, 25 bp, Artificial
  probe
  misc_feature (1)..(25): SEQ ID NO: 5959; WAN024DWS_at; Start 52; Stop 76
atcctagtatggttgatgaaaatca

SEQ ID NO: 174358 - DNA, 25 bp, Artificial
  probe
  misc_feature (1)..(25): SEQ ID NO: 5959; WAN024DWS_at; Start 59; Stop 83
tatggttgatgaaaatcagtagatt

SEQ ID NO: 174359 - DNA, 25 bp, Artificial
  probe
  misc_feature (1)..(25): SEQ ID NO: 5959; WAN024DWS_at; Start 69; Stop 93
gaaaatcagtagattgaatcgaata

SEQ ID NO: 174360 - DNA, 25 bp, Artificial
  probe
  misc_feature (1)..(25): SEQ ID NO: 5959; WAN024DWS_at; Start 70; Stop 94
aaaatcagtagattgaatcgaatat

SEQ ID NO: 174361 - DNA, 25 bp, Artificial
  probe
  misc_feature (1)..(25): SEQ ID NO: 5959; WAN024DWS_at; Start 45; Stop 69
atgtgttatcctagtatggttgatg

SEQ ID NO: 174362 - DNA, 25 bp, Artificial
  probe
  misc_feature (1)..(25): SEQ ID NO: 5959; WAN024DWS_at; Start 49; Stop 73
gttatcctagtatggttgatgaaaa

SEQ ID NO: 174363 - DNA, 25 bp, Artificial
  probe
  misc_feature (1)..(25): SEQ ID NO: 5959; WAN024DWS_at; Start 44; Stop 68
aatgtgttatcctagtatggttgat

SEQ ID NO: 174364 - DNA, 25 bp, Artificial
  probe
  misc_feature (1)..(25): SEQ ID NO: 5959; WAN024DWS_at; Start 66; Stop 90
gatgaaaatcagtagattgaatcga

SEQ ID NO: 174365 - DNA, 25 bp, Artificial
  probe
  misc_feature (1)..(25): SEQ ID NO: 5959; WAN024DWS_at; Start 65; Stop 89
tgatgaaaatcagtagattgaatcg

SEQ ID NO: 174366 - DNA, 25 bp, Artificial
  probe
  misc_feature (1)..(25): SEQ ID NO: 5959; WAN024DWS_at; Start 71; Stop 95
aaatcagtagattgaatcgaatata

SEQ ID NO: 174367 - DNA, 25 bp, Artificial
  probe
  misc_feature (1)..(25): SEQ ID NO: 5959; WAN024DWS_at; Start 57; Stop 81
agtatggttgatgaaaatcagtaga

SEQ ID NO: 174368 - DNA, 25 bp, Artificial
  probe
  misc_feature (1)..(25): SEQ ID NO: 5959; WAN024DWS_at; Start 60; Stop 84
atggttgatgaaaatcagtagattg

SEQ ID NO: 174369 - DNA, 25 bp, Artificial
  probe
  misc_feature (1)..(25): SEQ ID NO: 5959; WAN024DWS_at; Start 41; Stop 65
aaaaatgtgttatcctagtatggtt

SEQ ID NO: 174370 - DNA, 25 bp, Artificial
  probe
  misc_feature (1)..(25): SEQ ID NO: 5959; WAN024DWS_at; Start 47; Stop 71
gtgttatcctagtatggttgatgaa

SEQ ID NO: 174371 - DNA, 25 bp, Artificial
  probe
  misc_feature (1)..(25): SEQ ID NO: 5959; WAN024DWS_at; Start 68; Stop 92
tgaaaatcagtagattgaatcgaat

SEQ ID NO: 174372 - DNA, 25 bp, Artificial
  probe
  misc_feature (1)..(25): SEQ ID NO: 5959; WAN024DWS_at; Start 42; Stop 66
aaaatgtgttatcctagtatggttg

SEQ ID NO: 174373 - DNA, 25 bp, Artificial
  probe
  misc_feature (1)..(25): SEQ ID NO: 5959; WAN024DWS_at; Start 64; Stop 88
ttgatgaaaatcagtagattgaatc

SEQ ID NO: 174374 - DNA, 25 bp, Artificial
  probe
  misc_feature (1)..(25): SEQ ID NO: 5959; WAN024DWS_at; Start 54; Stop 78
cctagtatggttgatgaaaatcagt

SEQ ID NO: 174375 - DNA, 25 bp, Artificial
  probe
  misc_feature (1)..(25): SEQ ID NO: 5959; WAN024DWS_at; Start 61; Stop 85
tggttgatgaaaatcagtagattga

SEQ ID NO: 174376 - DNA, 25 bp, Artificial
  probe
  misc_feature (1)..(25): SEQ ID NO: 5959; WAN024DWS_at; Start 46; Stop 70
tgtgttatcctagtatggttgatga

SEQ ID NO: 174377 - DNA, 25 bp, Artificial
  probe
  misc_feature (1)..(25): SEQ ID NO: 5959; WAN024DWS_at; Start 53; Stop 77
tcctagtatggttgatgaaaatcag

SEQ ID NO: 174378 - DNA, 25 bp, Artificial
  probe
  misc_feature (1)..(25): SEQ ID NO: 5959; WAN024DWS_at; Start 63; Stop 87
gttgatgaaaatcagtagattgaat

SEQ ID NO: 174379 - DNA, 25 bp, Artificial
  probe
  misc_feature (1)..(25): SEQ ID NO: 5959; WAN024DWS_at; Start 62; Stop 86
ggttgatgaaaatcagtagattgaa

SEQ ID NO: 174380 - DNA, 25 bp, Artificial
  probe
  misc_feature (1)..(25): SEQ ID NO: 5959; WAN024DWS_at; Start 67; Stop 91
atgaaaatcagtagattgaatcgaa

SEQ ID NO: 174381 - DNA, 25 bp, Artificial
  probe
  misc_feature (1)..(25): SEQ ID NO: 5959; WAN024DWS_at; Start 55; Stop 79
ctagtatggttgatgaaaatcagta

SEQ ID NO: 174382 - DNA, 25 bp, Artificial
  probe
  misc_feature (1)..(25): SEQ ID NO: 5959; WAN024DWS_at; Start 48; Stop 72
tgttatcctagtatggttgatgaaa

SEQ ID NO: 174383 - DNA, 25 bp, Artificial
  probe
  misc_feature (1)..(25): SEQ ID NO: 5959; WAN024DWS_at; Start 58; Stop 82
gtatggttgatgaaaatcagtagat

SEQ ID NO: 174384 - DNA, 25 bp, Artificial
  probe
  misc_feature (1)..(25): SEQ ID NO: 5959; WAN024DWS_at; Start 56; Stop 80
tagtatggttgatgaaaatcagtag

SEQ ID NO: 174385 - DNA, 25 bp, Artificial
  probe
  misc_feature (1)..(25): SEQ ID NO: 5959; WAN024DWS_at; Start 51; Stop 75
tatcctagtatggttgatgaaaatc

SEQ ID NO: 174386 - DNA, 25 bp, Artificial
  probe
  misc_feature (1)..(25): SEQ ID NO: 5959; WAN024DWS_at; Start 43; Stop 67
aaatgtgttatcctagtatggttga

SEQ ID NO: 174387 - DNA, 25 bp, Artificial
  probe
  misc_feature (1)..(25): SEQ ID NO: 5959; WAN024DWS_at; Start 50; Stop 74
ttatcctagtatggttgatgaaaat

SEQ ID NO: 174388 - DNA, 25 bp, Artificial
  probe
  misc_feature (1)..(25): SEQ ID NO: 5221; WAN024DWT_at; Start 124; Stop 148
ctggattatccaataaataaatcgg

SEQ ID NO: 174389 - DNA, 25 bp, Artificial
  probe
  misc_feature (1)..(25): SEQ ID NO: 5221; WAN024DWT_at; Start 176; Stop 200
tatttcattcacaccttcatctggc

SEQ ID NO: 174390 - DNA, 25 bp, Artificial
  probe
  misc_feature (1)..(25): SEQ ID NO: 5221; WAN024DWT_at; Start 12; Stop 36
aaagtttgaacatgatttttatctc

SEQ ID NO: 174391 - DNA, 25 bp, Artificial
  probe
  misc_feature (1)..(25): SEQ ID NO: 5221; WAN024DWT_at; Start 192; Stop 216
tcatctggccgagcgtgaggaattg

SEQ ID NO: 174392 - DNA, 25 bp, Artificial
  probe
  misc_feature (1)..(25): SEQ ID NO: 5221; WAN024DWT_at; Start 197; Stop 221
tggccgagcgtgaggaattgctact

SEQ ID NO: 174393 - DNA, 25 bp, Artificial
  probe
  misc_feature (1)..(25): SEQ ID NO: 5221; WAN024DWT_at; Start 190; Stop 214
cttcatctggccgagcgtgaggaat

SEQ ID NO: 174394 - DNA, 25 bp, Artificial
  probe
  misc_feature (1)..(25): SEQ ID NO: 5221; WAN024DWT_at; Start 113; Stop 137
tacctcttgttctggattatccaat

SEQ ID NO: 174395 - DNA, 25 bp, Artificial
  probe
  misc_feature (1)..(25): SEQ ID NO: 5221; WAN024DWT_at; Start 195; Stop 219
tctggccgagcgtgaggaattgcta

SEQ ID NO: 174396 - DNA, 25 bp, Artificial
  probe
  misc_feature (1)..(25): SEQ ID NO: 5221; WAN024DWT_at; Start 57; Stop 81
gacaaagcctttaaatgactctcat

SEQ ID NO: 174397 - DNA, 25 bp, Artificial
  probe
  misc_feature (1)..(25): SEQ ID NO: 5221; WAN024DWT_at; Start 180; Stop 204
tcattcacaccttcatctggccgag

SEQ ID NO: 174398 - DNA, 25 bp, Artificial
  probe
  misc_feature (1)..(25): SEQ ID NO: 5221; WAN024DWT_at; Start 147; Stop 171
ggttcttccaaaactaacattgaca

SEQ ID NO: 174399 - DNA, 25 bp, Artificial
  probe
  misc_feature (1)..(25): SEQ ID NO: 5221; WAN024DWT_at; Start 93; Stop 117
gcaatacaaatcaacaatcttacct

SEQ ID NO: 174400 - DNA, 25 bp, Artificial
  probe
  misc_feature (1)..(25): SEQ ID NO: 5221; WAN024DWT_at; Start 77; Stop 101
ctcattatcaatggctgcaatacaa

SEQ ID NO: 174401 - DNA, 25 bp, Artificial
  probe
  misc_feature (1)..(25): SEQ ID NO: 5221; WAN024DWT_at; Start 2; Stop 26
tgatgatattaaagtttgaacatga

SEQ ID NO: 174402 - DNA, 25 bp, Artificial
  probe
  misc_feature (1)..(25): SEQ ID NO: 5221; WAN024DWT_at; Start 70; Stop 94
aatgactctcattatcaatggctgc

SEQ ID NO: 174403 - DNA, 25 bp, Artificial
  probe
  misc_feature (1)..(25): SEQ ID NO: 5221; WAN024DWT_at; Start 73; Stop 97
gactctcattatcaatggctgcaat

SEQ ID NO: 174404 - DNA, 25 bp, Artificial
  probe
  misc_feature (1)..(25): SEQ ID NO: 5221; WAN024DWT_at; Start 104; Stop 128
caacaatcttacctcttgttctgga

SEQ ID NO: 174405 - DNA, 25 bp, Artificial
  probe
  misc_feature (1)..(25): SEQ ID NO: 5221; WAN024DWT_at; Start 110; Stop 134
tcttacctcttgttctggattatcc

SEQ ID NO: 174406 - DNA, 25 bp, Artificial
  probe
  misc_feature (1)..(25): SEQ ID NO: 5221; WAN024DWT_at; Start 208; Stop 232
gaggaattgctactcccttccctaa

SEQ ID NO: 174407 - DNA, 25 bp, Artificial
  probe
  misc_feature (1)..(25): SEQ ID NO: 5221; WAN024DWT_at; Start 168; Stop 192
gacattcctatttcattcacacctt

SEQ ID NO: 174408 - DNA, 25 bp, Artificial
  probe
  misc_feature (1)..(25): SEQ ID NO: 5221; WAN024DWT_at; Start 132; Stop 156
tccaataaataaatcggttcttcca

SEQ ID NO: 174409 - DNA, 25 bp, Artificial
  probe
  misc_feature (1)..(25): SEQ ID NO: 5221; WAN024DWT_at; Start 186; Stop 210
acaccttcatctggccgagcgtgag

SEQ ID NO: 174410 - DNA, 25 bp, Artificial
  probe
  misc_feature (1)..(25): SEQ ID NO: 5221; WAN024DWT_at; Start 88; Stop 112
tggctgcaatacaaatcaacaatct

SEQ ID NO: 174411 - DNA, 25 bp, Artificial
  probe
  misc_feature (1)..(25): SEQ ID NO: 5221; WAN024DWT_at; Start 54; Stop 78
tgtgacaaagcctttaaatgactct

SEQ ID NO: 174412 - DNA, 25 bp, Artificial
  probe
  misc_feature (1)..(25): SEQ ID NO: 5221; WAN024DWT_at; Start 182; Stop 206
attcacaccttcatctggccgagcg

SEQ ID NO: 174413 - DNA, 25 bp, Artificial
  probe
  misc_feature (1)..(25): SEQ ID NO: 5221; WAN024DWT_at; Start 84; Stop 108
tcaatggctgcaatacaaatcaaca

SEQ ID NO: 174414 - DNA, 25 bp, Artificial
  probe
  misc_feature (1)..(25): SEQ ID NO: 5221; WAN024DWT_at; Start 200; Stop 224
ccgagcgtgaggaattgctactccc

SEQ ID NO: 174415 - DNA, 25 bp, Artificial
  probe
  misc_feature (1)..(25): SEQ ID NO: 5221; WAN024DWT_at; Start 204; Stop 228
gcgtgaggaattgctactcccttcc

SEQ ID NO: 174416 - DNA, 25 bp, Artificial
  probe
  misc_feature (1)..(25): SEQ ID NO: 5221; WAN024DWT_at; Start 45; Stop 69
gttgttaaatgtgacaaagccttta

SEQ ID NO: 174417 - DNA, 25 bp, Artificial
  probe
  misc_feature (1)..(25): SEQ ID NO: 5221; WAN024DWT_at; Start 153; Stop 177
tccaaaactaacattgacattccta

SEQ ID NO: 174418 - DNA, 25 bp, Artificial
  probe
  misc_feature (1)..(25): SEQ ID NO: 5221; WAN024DWT_at; Start 184; Stop 208
tcacaccttcatctggccgagcgtg

SEQ ID NO: 174419 - DNA, 25 bp, Artificial
  probe
  misc_feature (1)..(25): SEQ ID NO: 5221; WAN024DWT_at; Start 41; Stop 65
aattgttgttaaatgtgacaaagcc

SEQ ID NO: 174420 - DNA, 25 bp, Artificial
  probe
  misc_feature (1)..(25): SEQ ID NO: 5221; WAN024DWT_at; Start 202; Stop 226
gagcgtgaggaattgctactccctt

SEQ ID NO: 174421 - DNA, 25 bp, Artificial
  probe
  misc_feature (1)..(25): SEQ ID NO: 5221; WAN024DWT_at; Start 90; Stop 114
gctgcaatacaaatcaacaatctta

SEQ ID NO: 174422 - DNA, 25 bp, Artificial
  probe
  misc_feature (1)..(25): SEQ ID NO: 3090; WAN024DWU_at; Start 454; Stop 478
aagcaccgcttagcttttcaaatgg

SEQ ID NO: 174423 - DNA, 25 bp, Artificial
  probe
  misc_feature (1)..(25): SEQ ID NO: 3090; WAN024DWU_at; Start 938; Stop 962
gattgagagaaaatcttcgccgcca

SEQ ID NO: 174424 - DNA, 25 bp, Artificial
  probe
  misc_feature (1)..(25): SEQ ID NO: 3090; WAN024DWU_at; Start 439; Stop 463
ggttcagagtggaataagcaccgct

SEQ ID NO: 174425 - DNA, 25 bp, Artificial
  probe
  misc_feature (1)..(25): SEQ ID NO: 3090; WAN024DWU_at; Start 834; Stop 858
tgaaggtgaagtagatgttgctccg

SEQ ID NO: 174426 - DNA, 25 bp, Artificial
  probe
  misc_feature (1)..(25): SEQ ID NO: 3090; WAN024DWU_at; Start 1065; Stop 1089
agattctttgatgcccttgatggac

SEQ ID NO: 174427 - DNA, 25 bp, Artificial
  probe
  misc_feature (1)..(25): SEQ ID NO: 3090; WAN024DWU_at; Start 239; Stop 263
ttttaccaaagtcgactcgcttagc

SEQ ID NO: 174428 - DNA, 25 bp, Artificial
  probe
  misc_feature (1)..(25): SEQ ID NO: 3090; WAN024DWU_at; Start 1382; Stop 1406
cggttatgatgactgaagagcaagc

SEQ ID NO: 174429 - DNA, 25 bp, Artificial
  probe
  misc_feature (1)..(25): SEQ ID NO: 3090; WAN024DWU_at; Start 1096; Stop 1120
gacaatcccatacctgatagtgaaa

SEQ ID NO: 174430 - DNA, 25 bp, Artificial
  probe
  misc_feature (1)..(25): SEQ ID NO: 3090; WAN024DWU_at; Start 1396; Stop 1420
gaagagcaagcaatacaactagtag

SEQ ID NO: 174431 - DNA, 25 bp, Artificial
  probe
  misc_feature (1)..(25): SEQ ID NO: 3090; WAN024DWU_at; Start 190; Stop 214
aatcgtacgaagcagtctttgacag

SEQ ID NO: 174432 - DNA, 25 bp, Artificial
  probe
  misc_feature (1)..(25): SEQ ID NO: 3090; WAN024DWU_at; Start 973; Stop 997
gcttactatagattaaagttcggcc

SEQ ID NO: 174433 - DNA, 25 bp, Artificial
  probe
  misc_feature (1)..(25): SEQ ID NO: 3090; WAN024DWU_at; Start 222; Stop 246
taagtcggatgaattggttttacca

SEQ ID NO: 174434 - DNA, 25 bp, Artificial
  probe
  misc_feature (1)..(25): SEQ ID NO: 3090; WAN024DWU_at; Start 388; Stop 412
gataatgatttggagctagggtaca

SEQ ID NO: 174435 - DNA, 25 bp, Artificial
  probe
  misc_feature (1)..(25): SEQ ID NO: 3090; WAN024DWU_at; Start 653; Stop 677
tcattctgtgtaggtatcaaaggga

SEQ ID NO: 174436 - DNA, 25 bp, Artificial
  probe
  misc_feature (1)..(25): SEQ ID NO: 3090; WAN024DWU_at; Start 1154; Stop 1178
taaagaaagcagatactttgcctca

SEQ ID NO: 174437 - DNA, 25 bp, Artificial
  probe
  misc_feature (1)..(25): SEQ ID NO: 3090; WAN024DWU_at; Start 1692; Stop 1716
gataactgagaactaccctgaggca

SEQ ID NO: 174438 - DNA, 25 bp, Artificial
  probe
  misc_feature (1)..(25): SEQ ID NO: 3090; WAN024DWU_at; Start 1780; Stop 1804
cacgctcggccagatgaaggtgtga

SEQ ID NO: 174439 - DNA, 25 bp, Artificial
  probe
  misc_feature (1)..(25): SEQ ID NO: 3090; WAN024DWU_at; Start 1080; Stop 1104
cttgatggacgctattgacaatccc

SEQ ID NO: 174440 - DNA, 25 bp, Artificial
  probe
  misc_feature (1)..(25): SEQ ID NO: 3090; WAN024DWU_at; Start 1854; Stop 1878
ggataatccagaacaagaggtaaga

SEQ ID NO: 174441 - DNA, 25 bp, Artificial
  probe
  misc_feature (1)..(25): SEQ ID NO: 3090; WAN024DWU_at; Start 1343; Stop 1367
ccataaaggtggagacagaaaagcc

SEQ ID NO: 174442 - DNA, 25 bp, Artificial
  probe
  misc_feature (1)..(25): SEQ ID NO: 3090; WAN024DWU_at; Start 988; Stop 1012
aagttcggcctacctagttcaaatg

SEQ ID NO: 174443 - DNA, 25 bp, Artificial
  probe
  misc_feature (1)..(25): SEQ ID NO: 3090; WAN024DWU_at; Start 484; Stop 508
gagttgctggaatcctccataggga

SEQ ID NO: 174444 - DNA, 25 bp, Artificial
  probe
  misc_feature (1)..(25): SEQ ID NO: 3090; WAN024DWU_at; Start 1630; Stop 1654
caaaaattaggatggaaggaggcga

SEQ ID NO: 174445 - DNA, 25 bp, Artificial
  probe
  misc_feature (1)..(25): SEQ ID NO: 3090; WAN024DWU_at; Start 135; Stop 159
tctagctaataaagggatagtgctg

SEQ ID NO: 174446 - DNA, 25 bp, Artificial
  probe
  misc_feature (1)..(25): SEQ ID NO: 3090; WAN024DWU_at; Start 1749; Stop 1773
tattaatttagggaagggagtagca

SEQ ID NO: 174447 - DNA, 25 bp, Artificial
  probe
  misc_feature (1)..(25): SEQ ID NO: 3090; WAN024DWU_at; Start 1764; Stop 1788
gggagtagcaattcctcacgctcgg

SEQ ID NO: 174448 - DNA, 25 bp, Artificial
  probe
  misc_feature (1)..(25): SEQ ID NO: 3090; WAN024DWU_at; Start 1609; Stop 1633
gaaacctatcaggttagttcgcaaa

SEQ ID NO: 174449 - DNA, 25 bp, Artificial
  probe
  misc_feature (1)..(25): SEQ ID NO: 3090; WAN024DWU_at; Start 169; Stop 193
caaggtcgctatagtttatcaaatc

SEQ ID NO: 174450 - DNA, 25 bp, Artificial
  probe
  misc_feature (1)..(25): SEQ ID NO: 3090; WAN024DWU_at; Start 404; Stop 428
tagggtacagtagagcaaaaggtta

SEQ ID NO: 174451 - DNA, 25 bp, Artificial
  probe
  misc_feature (1)..(25): SEQ ID NO: 3090; WAN024DWU_at; Start 1705; Stop 1729
taccctgaggcaatgattcaaaaag

SEQ ID NO: 174452 - DNA, 25 bp, Artificial
  probe
  misc_feature (1)..(25): SEQ ID NO: 3090; WAN024DWU_at; Start 1568; Stop 1592
gaaaggaaattgtaccagtgctaga

SEQ ID NO: 174453 - DNA, 25 bp, Artificial
  probe
  misc_feature (1)..(25): SEQ ID NO: 3090; WAN024DWU_at; Start 423; Stop 447
aggttatactttacacggttcagag

SEQ ID NO: 174454 - DNA, 25 bp, Artificial
  probe
  misc_feature (1)..(25): SEQ ID NO: 3090; WAN024DWU_at; Start 1663; Stop 1687
gcagctaaaccgcttttggatcaag

SEQ ID NO: 174455 - DNA, 25 bp, Artificial
  probe
  misc_feature (1)..(25): SEQ ID NO: 3090; WAN024DWU_at; Start 1647; Stop 1671
ggaggcgattcgtttagcagctaaa

SEQ ID NO: 174456 - DNA, 25 bp, Artificial
  probe
  misc_feature (1)..(25): SEQ ID NO: 6578; WAN024DWV_at; Start 109; Stop 133
cgagcgattaagatattgaacacca

SEQ ID NO: 174457 - DNA, 25 bp, Artificial
  probe
  misc_feature (1)..(25): SEQ ID NO: 6578; WAN024DWV_at; Start 99; Stop 123
tcgagtaaaacgagcgattaagata

SEQ ID NO: 174458 - DNA, 25 bp, Artificial
  probe
  misc_feature (1)..(25): SEQ ID NO: 6578; WAN024DWV_at; Start 5; Stop 29
gaggcaagctagtaaagccagcaac

SEQ ID NO: 174459 - DNA, 25 bp, Artificial
  probe
  misc_feature (1)..(25): SEQ ID NO: 6578; WAN024DWV_at; Start 38; Stop 62
tgaccgcaatcatacatgccatata

SEQ ID NO: 174460 - DNA, 25 bp, Artificial
  probe
  misc_feature (1)..(25): SEQ ID NO: 6578; WAN024DWV_at; Start 158; Stop 182
tagctgagccatatgttgttaaagc

SEQ ID NO: 174461 - DNA, 25 bp, Artificial
  probe
  misc_feature (1)..(25): SEQ ID NO: 6578; WAN024DWV_at; Start 52; Stop 76
catgccatatatagagtgtggtgcc

SEQ ID NO: 174462 - DNA, 25 bp, Artificial
  probe
  misc_feature (1)..(25): SEQ ID NO: 6578; WAN024DWV_at; Start 91; Stop 115
tatttaaatcgagtaaaacgagcga

SEQ ID NO: 174463 - DNA, 25 bp, Artificial
  probe
  misc_feature (1)..(25): SEQ ID NO: 6578; WAN024DWV_at; Start 48; Stop 72
catacatgccatatatagagtgtgg

SEQ ID NO: 174464 - DNA, 25 bp, Artificial
  probe
  misc_feature (1)..(25): SEQ ID NO: 6578; WAN024DWV_at; Start 61; Stop 85
tatagagtgtggtgccctgttaaaa

SEQ ID NO: 174465 - DNA, 25 bp, Artificial
  probe
  misc_feature (1)..(25): SEQ ID NO: 6578; WAN024DWV_at; Start 155; Stop 179
cagtagctgagccatatgttgttaa

SEQ ID NO: 174466 - DNA, 25 bp, Artificial
  probe
  misc_feature (1)..(25): SEQ ID NO: 6578; WAN024DWV_at; Start 163; Stop 187
gagccatatgttgttaaagctacag

SEQ ID NO: 174467 - DNA, 25 bp, Artificial
  probe
  misc_feature (1)..(25): SEQ ID NO: 6578; WAN024DWV_at; Start 9; Stop 33
caagctagtaaagccagcaactgat

SEQ ID NO: 174468 - DNA, 25 bp, Artificial
  probe
  misc_feature (1)..(25): SEQ ID NO: 6578; WAN024DWV_at; Start 2; Stop 26
tgagaggcaagctagtaaagccagc

SEQ ID NO: 174469 - DNA, 25 bp, Artificial
  probe
  misc_feature (1)..(25): SEQ ID NO: 6578; WAN024DWV_at; Start 199; Stop 223
tcattattcggcacaacgccagata

SEQ ID NO: 174470 - DNA, 25 bp, Artificial
  probe
  misc_feature (1)..(25): SEQ ID NO: 6578; WAN024DWV_at; Start 174; Stop 198
tgttaaagctacagctacaattgct

SEQ ID NO: 174471 - DNA, 25 bp, Artificial
  probe
  misc_feature (1)..(25): SEQ ID NO: 6578; WAN024DWV_at; Start 177; Stop 201
taaagctacagctacaattgcttca

SEQ ID NO: 174472 - DNA, 25 bp, Artificial
  probe
  misc_feature (1)..(25): SEQ ID NO: 6578; WAN024DWV_at; Start 12; Stop 36
gctagtaaagccagcaactgataaa

SEQ ID NO: 174473 - DNA, 25 bp, Artificial
  probe
  misc_feature (1)..(25): SEQ ID NO: 6578; WAN024DWV_at; Start 189; Stop 213
tacaattgcttcattattcggcaca

SEQ ID NO: 174474 - DNA, 25 bp, Artificial
  probe
  misc_feature (1)..(25): SEQ ID NO: 6578; WAN024DWV_at; Start 203; Stop 227
tattcggcacaacgccagataaatg

SEQ ID NO: 174475 - DNA, 25 bp, Artificial
  probe
  misc_feature (1)..(25): SEQ ID NO: 6578; WAN024DWV_at; Start 185; Stop 209
cagctacaattgcttcattattcgg

SEQ ID NO: 174476 - DNA, 25 bp, Artificial
  probe
  misc_feature (1)..(25): SEQ ID NO: 6578; WAN024DWV_at; Start 125; Stop 149
tgaacaccatgcctgcaaacataat

SEQ ID NO: 174477 - DNA, 25 bp, Artificial
  probe
  misc_feature (1)..(25): SEQ ID NO: 6578; WAN024DWV_at; Start 21; Stop 45
gccagcaactgataaaatgaccgca

SEQ ID NO: 174478 - DNA, 25 bp, Artificial
  probe
  misc_feature (1)..(25): SEQ ID NO: 6578; WAN024DWV_at; Start 144; Stop 168
cataatcattgcagtagctgagcca

SEQ ID NO: 174479 - DNA, 25 bp, Artificial
  probe
  misc_feature (1)..(25): SEQ ID NO: 6578; WAN024DWV_at; Start 130; Stop 154
accatgcctgcaaacataatcattg

SEQ ID NO: 174480 - DNA, 25 bp, Artificial
  probe
  misc_feature (1)..(25): SEQ ID NO: 6578; WAN024DWV_at; Start 120; Stop 144
gatattgaacaccatgcctgcaaac

SEQ ID NO: 174481 - DNA, 25 bp, Artificial
  probe
  misc_feature (1)..(25): SEQ ID NO: 6578; WAN024DWV_at; Start 149; Stop 173
tcattgcagtagctgagccatatgt

SEQ ID NO: 174482 - DNA, 25 bp, Artificial
  probe
  misc_feature (1)..(25): SEQ ID NO: 6578; WAN024DWV_at; Start 57; Stop 81
catatatagagtgtggtgccctgtt

SEQ ID NO: 174483 - DNA, 25 bp, Artificial
  probe
  misc_feature (1)..(25): SEQ ID NO: 6578; WAN024DWV_at; Start 33; Stop 57
taaaatgaccgcaatcatacatgcc

SEQ ID NO: 174484 - DNA, 25 bp, Artificial
  probe
  misc_feature (1)..(25): SEQ ID NO: 6578; WAN024DWV_at; Start 25; Stop 49
gcaactgataaaatgaccgcaatca

SEQ ID NO: 174485 - DNA, 25 bp, Artificial
  probe
  misc_feature (1)..(25): SEQ ID NO: 6578; WAN024DWV_at; Start 195; Stop 219
tgcttcattattcggcacaacgcca

SEQ ID NO: 174486 - DNA, 25 bp, Artificial
  probe
  misc_feature (1)..(25): SEQ ID NO: 6578; WAN024DWV_at; Start 68; Stop 92
tgtggtgccctgttaaaaaaatata

SEQ ID NO: 174487 - DNA, 25 bp, Artificial
  probe
  misc_feature (1)..(25): SEQ ID NO: 6578; WAN024DWV_at; Start 113; Stop 137
cgattaagatattgaacaccatgcc

SEQ ID NO: 174488 - DNA, 25 bp, Artificial
  probe
  misc_feature (1)..(25): SEQ ID NO: 6578; WAN024DWV_at; Start 167; Stop 191
catatgttgttaaagctacagctac

SEQ ID NO: 174489 - DNA, 25 bp, Artificial
  probe
  misc_feature (1)..(25): SEQ ID NO: 6578; WAN024DWV_at; Start 117; Stop 141
taagatattgaacaccatgcctgca

SEQ ID NO: 174490 - DNA, 25 bp, Artificial
  probe
  misc_feature (1)..(25): SEQ ID NO: 1739; WAN024DWW_at; Start 462; Stop 486
tattattatgagtatttccccagca

SEQ ID NO: 174491 - DNA, 25 bp, Artificial
  probe
  misc_feature (1)..(25): SEQ ID NO: 1739; WAN024DWW_at; Start 854; Stop 878
cctttaaaggtatttcagagcgtct

SEQ ID NO: 174492 - DNA, 25 bp, Artificial
  probe
  misc_feature (1)..(25): SEQ ID NO: 1739; WAN024DWW_at; Start 775; Stop 799
caattagcaggtcaatttgcagcag

SEQ ID NO: 174493 - DNA, 25 bp, Artificial
  probe
  misc_feature (1)..(25): SEQ ID NO: 1739; WAN024DWW_at; Start 14; Stop 38
tattggatattgttagtacaccagc

SEQ ID NO: 174494 - DNA, 25 bp, Artificial
  probe
  misc_feature (1)..(25): SEQ ID NO: 1739; WAN024DWW_at; Start 1079; Stop 1103
catctggtggtgttcgtggagccac

SEQ ID NO: 174495 - DNA, 25 bp, Artificial
  probe
  misc_feature (1)..(25): SEQ ID NO: 1739; WAN024DWW_at; Start 254; Stop 278
tagctttaacaacatatggctcagc

SEQ ID NO: 174496 - DNA, 25 bp, Artificial
  probe
  misc_feature (1)..(25): SEQ ID NO: 1739; WAN024DWW_at; Start 592; Stop 616
ggtgacaaatcaaaatcaacagagg

SEQ ID NO: 174497 - DNA, 25 bp, Artificial
  probe
  misc_feature (1)..(25): SEQ ID NO: 1739; WAN024DWW_at; Start 359; Stop 383
cagggcaccacactctatatatggc

SEQ ID NO: 174498 - DNA, 25 bp, Artificial
  probe
  misc_feature (1)..(25): SEQ ID NO: 1739; WAN024DWW_at; Start 143; Stop 167
tatctggtggtgcaggaattgtaca

SEQ ID NO: 174499 - DNA, 25 bp, Artificial
  probe
  misc_feature (1)..(25): SEQ ID NO: 1739; WAN024DWW_at; Start 1183; Stop 1207
caaggatcaactttctcagatgcag

SEQ ID NO: 174500 - DNA, 25 bp, Artificial
  probe
  misc_feature (1)..(25): SEQ ID NO: 1739; WAN024DWW_at; Start 1201; Stop 1225
gatgcagattttggtctatcaggaa

SEQ ID NO: 174501 - DNA, 25 bp, Artificial
  probe
  misc_feature (1)..(25): SEQ ID NO: 1739; WAN024DWW_at; Start 576; Stop 600
tactggtagccttatcggtgacaaa

SEQ ID NO: 174502 - DNA, 25 bp, Artificial
  probe
  misc_feature (1)..(25): SEQ ID NO: 1739; WAN024DWW_at; Start 284; Stop 308
caatgattatgtttgcaggcatggt

SEQ ID NO: 174503 - DNA, 25 bp, Artificial
  probe
  misc_feature (1)..(25): SEQ ID NO: 1739; WAN024DWW_at; Start 736; Stop 760
gaaatcagtagtggtacaagtggtc

SEQ ID NO: 174504 - DNA, 25 bp, Artificial
  probe
  misc_feature (1)..(25): SEQ ID NO: 1739; WAN024DWW_at; Start 1004; Stop 1028
caggaacggttgttatcttaccagg

SEQ ID NO: 174505 - DNA, 25 bp, Artificial
  probe
  misc_feature (1)..(25): SEQ ID NO: 1739; WAN024DWW_at; Start 504; Stop 528
ggttcaattaactggaaatgacaag

SEQ ID NO: 174506 - DNA, 25 bp, Artificial
  probe
  misc_feature (1)..(25): SEQ ID NO: 1739; WAN024DWW_at; Start 1092; Stop 1116
tcgtggagccactattggagcattt

SEQ ID NO: 174507 - DNA, 25 bp, Artificial
  probe
  misc_feature (1)..(25): SEQ ID NO: 1739; WAN024DWW_at; Start 393; Stop 417
tgcggtcattttatcagttgctggc

SEQ ID NO: 174508 - DNA, 25 bp, Artificial
  probe
  misc_feature (1)..(25): SEQ ID NO: 1739; WAN024DWW_at; Start 890; Stop 914
caaaacctgctttggattgtccgat

SEQ ID NO: 174509 - DNA, 25 bp, Artificial
  probe
  misc_feature (1)..(25): SEQ ID NO: 1739; WAN024DWW_at; Start 916; Stop 940
gtttatacttatgcacccaatgcag

SEQ ID NO: 174510 - DNA, 25 bp, Artificial
  probe
  misc_feature (1)..(25): SEQ ID NO: 1739; WAN024DWW_at; Start 1242; Stop 1266
aaatcaatttggctcacaagcaggc

SEQ ID NO: 174511 - DNA, 25 bp, Artificial
  probe
  misc_feature (1)..(25): SEQ ID NO: 1739; WAN024DWW_at; Start 1256; Stop 1280
cacaagcaggcattgtgattggtct

SEQ ID NO: 174512 - DNA, 25 bp, Artificial
  probe
  misc_feature (1)..(25): SEQ ID NO: 1739; WAN024DWW_at; Start 199; Stop 223
gagcatgcttttcatttatctggcg

SEQ ID NO: 174513 - DNA, 25 bp, Artificial
  probe
  misc_feature (1)..(25): SEQ ID NO: 1739; WAN024DWW_at; Start 437; Stop 461
tcttactaggaggattagcactcgg

SEQ ID NO: 174514 - DNA, 25 bp, Artificial
  probe
  misc_feature (1)..(25): SEQ ID NO: 1739; WAN024DWW_at; Start 696; Stop 720
tattgtagctatctttgcagggtca

SEQ ID NO: 174515 - DNA, 25 bp, Artificial
  probe
  misc_feature (1)..(25): SEQ ID NO: 1739; WAN024DWW_at; Start 805; Stop 829
tttgttattttagcaggtgttcgcc

SEQ ID NO: 174516 - DNA, 25 bp, Artificial
  probe
  misc_feature (1)..(25): SEQ ID NO: 1739; WAN024DWW_at; Start 305; Stop 329
tggtgttcaatatcttaatcgctcg

SEQ ID NO: 174517 - DNA, 25 bp, Artificial
  probe
  misc_feature (1)..(25): SEQ ID NO: 1739; WAN024DWW_at; Start 1020; Stop 1044
cttaccaggtgttgtgcctcatttc

SEQ ID NO: 174518 - DNA, 25 bp, Artificial
  probe
  misc_feature (1)..(25): SEQ ID NO: 1739; WAN024DWW_at; Start 182; Stop 206
catttggtaccatgtttgagcatgc

SEQ ID NO: 174519 - DNA, 25 bp, Artificial
  probe
  misc_feature (1)..(25): SEQ ID NO: 1739; WAN024DWW_at; Start 869; Stop 893
cagagcgtcttgtacctaattcaaa

SEQ ID NO: 174520 - DNA, 25 bp, Artificial
  probe
  misc_feature (1)..(25): SEQ ID NO: 1739; WAN024DWW_at; Start 219; Stop 243
tggcgttgtgccgaataatgaagca

SEQ ID NO: 174521 - DNA, 25 bp, Artificial
  probe
  misc_feature (1)..(25): SEQ ID NO: 1739; WAN024DWW_at; Start 752; Stop 776
caagtggtctagtttatgctttaca

SEQ ID NO: 174522 - DNA, 25 bp, Artificial
  probe
  misc_feature (1)..(25): SEQ ID NO: 1739; WAN024DWW_at; Start 268; Stop 292
tatggctcagctactgcaatgatta

SEQ ID NO: 174523 - DNA, 25 bp, Artificial
  probe
  misc_feature (1)..(25): SEQ ID NO: 1739; WAN024DWW_at; Start 1145; Stop 1169
cagtctttttaatgccagttttggg

SEQ ID NO: 174524 - DNA, 25 bp, Artificial
  probe
  misc_feature (1)..(25): SEQ ID NO: 4225; WAN024DWX_at; Start 198; Stop 222
ccgcctcgatggagtccgcgatgat

SEQ ID NO: 174525 - DNA, 25 bp, Artificial
  probe
  misc_feature (1)..(25): SEQ ID NO: 4225; WAN024DWX_at; Start 181; Stop 205
gttgtgaccactcatagccgcctcg

SEQ ID NO: 174526 - DNA, 25 bp, Artificial
  probe
  misc_feature (1)..(25): SEQ ID NO: 4225; WAN024DWX_at; Start 142; Stop 166
gttcttgtcacagccaccgatagcg

SEQ ID NO: 174527 - DNA, 25 bp, Artificial
  probe
  misc_feature (1)..(25): SEQ ID NO: 4225; WAN024DWX_at; Start 166; Stop 190
gacgaaggcatccacgttgtgacca

SEQ ID NO: 174528 - DNA, 25 bp, Artificial
  probe
  misc_feature (1)..(25): SEQ ID NO: 4225; WAN024DWX_at; Start 36; Stop 60
ccaagtcgatatctttaccatcaag

SEQ ID NO: 174529 - DNA, 25 bp, Artificial
  probe
  misc_feature (1)..(25): SEQ ID NO: 4225; WAN024DWX_at; Start 53; Stop 77
ccatcaagatttcccggtgcaatag

SEQ ID NO: 174530 - DNA, 25 bp, Artificial
  probe
  misc_feature (1)..(25): SEQ ID NO: 4225; WAN024DWX_at; Start 205; Stop 229
gatggagtccgcgatgatgtcacga

SEQ ID NO: 174531 - DNA, 25 bp, Artificial
  probe
  misc_feature (1)..(25): SEQ ID NO: 4225; WAN024DWX_at; Start 146; Stop 170
ttgtcacagccaccgatagcgacga

SEQ ID NO: 174532 - DNA, 25 bp, Artificial
  probe
  misc_feature (1)..(25): SEQ ID NO: 4225; WAN024DWX_at; Start 8; Stop 32
cattttccgataccttcaaagacag

SEQ ID NO: 174533 - DNA, 25 bp, Artificial
  probe
  misc_feature (1)..(25): SEQ ID NO: 4225; WAN024DWX_at; Start 152; Stop 176
cagccaccgatagcgacgaaggcat

SEQ ID NO: 174534 - DNA, 25 bp, Artificial
  probe
  misc_feature (1)..(25): SEQ ID NO: 4225; WAN024DWX_at; Start 137; Stop 161
ggcatgttcttgtcacagccaccga

SEQ ID NO: 174535 - DNA, 25 bp, Artificial
  probe
  misc_feature (1)..(25): SEQ ID NO: 4225; WAN024DWX_at; Start 131; Stop 155
gatccaggcatgttcttgtcacagc

SEQ ID NO: 174536 - DNA, 25 bp, Artificial
  probe
  misc_feature (1)..(25): SEQ ID NO: 4225; WAN024DWX_at; Start 28; Stop 52
gacagaaaccaagtcgatatcttta

SEQ ID NO: 174537 - DNA, 25 bp, Artificial
  probe
  misc_feature (1)..(25): SEQ ID NO: 4225; WAN024DWX_at; Start 20; Stop 44
ccttcaaagacagaaaccaagtcga

SEQ ID NO: 174538 - DNA, 25 bp, Artificial
  probe
  misc_feature (1)..(25): SEQ ID NO: 4225; WAN024DWX_at; Start 47; Stop 71
tctttaccatcaagatttcccggtg

SEQ ID NO: 174539 - DNA, 25 bp, Artificial
  probe
  misc_feature (1)..(25): SEQ ID NO: 4225; WAN024DWX_at; Start 176; Stop 200
tccacgttgtgaccactcatagccg

SEQ ID NO: 174540 - DNA, 25 bp, Artificial
  probe
  misc_feature (1)..(25): SEQ ID NO: 4225; WAN024DWX_at; Start 94; Stop 118
aatagctgggatatccatattagca

SEQ ID NO: 174541 - DNA, 25 bp, Artificial
  probe
  misc_feature (1)..(25): SEQ ID NO: 4225; WAN024DWX_at; Start 170; Stop 194
aaggcatccacgttgtgaccactca

SEQ ID NO: 174542 - DNA, 25 bp, Artificial
  probe
  misc_feature (1)..(25): SEQ ID NO: 4225; WAN024DWX_at; Start 209; Stop 233
gagtccgcgatgatgtcacgagatg

SEQ ID NO: 174543 - DNA, 25 bp, Artificial
  probe
  misc_feature (1)..(25): SEQ ID NO: 4225; WAN024DWX_at; Start 120; Stop 144
tagcaatcatagatccaggcatgtt

SEQ ID NO: 174544 - DNA, 25 bp, Artificial
  probe
  misc_feature (1)..(25): SEQ ID NO: 4225; WAN024DWX_at; Start 16; Stop 40
gataccttcaaagacagaaaccaag

SEQ ID NO: 174545 - DNA, 25 bp, Artificial
  probe
  misc_feature (1)..(25): SEQ ID NO: 4225; WAN024DWX_at; Start 114; Stop 138
tagcaatagcaatcatagatccagg

SEQ ID NO: 174546 - DNA, 25 bp, Artificial
  probe
  misc_feature (1)..(25): SEQ ID NO: 4225; WAN024DWX_at; Start 191; Stop 215
ctcatagccgcctcgatggagtccg

SEQ ID NO: 174547 - DNA, 25 bp, Artificial
  probe
  misc_feature (1)..(25): SEQ ID NO: 4225; WAN024DWX_at; Start 84; Stop 108
cataggcgaaaatagctgggatatc

SEQ ID NO: 174548 - DNA, 25 bp, Artificial
  probe
  misc_feature (1)..(25): SEQ ID NO: 4225; WAN024DWX_at; Start 75; Stop 99
tagttccaccataggcgaaaatagc

SEQ ID NO: 174549 - DNA, 25 bp, Artificial
  probe
  misc_feature (1)..(25): SEQ ID NO: 4225; WAN024DWX_at; Start 70; Stop 94
tgcaatagttccaccataggcgaaa

SEQ ID NO: 174550 - DNA, 25 bp, Artificial
  probe
  misc_feature (1)..(25): SEQ ID NO: 4225; WAN024DWX_at; Start 1; Stop 25
gtggttccattttccgataccttca

SEQ ID NO: 174551 - DNA, 25 bp, Artificial
  probe
  misc_feature (1)..(25): SEQ ID NO: 4225; WAN024DWX_at; Start 57; Stop 81
caagatttcccggtgcaatagttcc

SEQ ID NO: 174552 - DNA, 25 bp, Artificial
  probe
  misc_feature (1)..(25): SEQ ID NO: 4225; WAN024DWX_at; Start 88; Stop 112
ggcgaaaatagctgggatatccata

SEQ ID NO: 174553 - DNA, 25 bp, Artificial
  probe
  misc_feature (1)..(25): SEQ ID NO: 4225; WAN024DWX_at; Start 160; Stop 184
gatagcgacgaaggcatccacgttg

SEQ ID NO: 174554 - DNA, 25 bp, Artificial
  probe
  misc_feature (1)..(25): SEQ ID NO: 4225; WAN024DWX_at; Start 60; Stop 84
gatttcccggtgcaatagttccacc

SEQ ID NO: 174555 - DNA, 25 bp, Artificial
  probe
  misc_feature (1)..(25): SEQ ID NO: 4225; WAN024DWX_at; Start 101; Stop 125
gggatatccatattagcaatagcaa

SEQ ID NO: 174556 - DNA, 25 bp, Artificial
  probe
  misc_feature (1)..(25): SEQ ID NO: 4225; WAN024DWX_at; Start 213; Stop 237
ccgcgatgatgtcacgagatgttag

SEQ ID NO: 174557 - DNA, 25 bp, Artificial
  probe
  misc_feature (1)..(25): SEQ ID NO: 4225; WAN024DWX_at; Start 79; Stop 103
tccaccataggcgaaaatagctggg

SEQ ID NO: 174558 - DNA, 25 bp, Artificial
  probe
  misc_feature (1)..(25): SEQ ID NO: 4179; WAN024DWY_at; Start 117; Stop 141
caaccgtaacgatatcgccggtacg

SEQ ID NO: 174559 - DNA, 25 bp, Artificial
  probe
  misc_feature (1)..(25): SEQ ID NO: 4179; WAN024DWY_at; Start 95; Stop 119
gaaatttctttggtatcttggtcaa

SEQ ID NO: 174560 - DNA, 25 bp, Artificial
  probe
  misc_feature (1)..(25): SEQ ID NO: 4179; WAN024DWY_at; Start 113; Stop 137
tggtcaaccgtaacgatatcgccgg

SEQ ID NO: 174561 - DNA, 25 bp, Artificial
  probe
  misc_feature (1)..(25): SEQ ID NO: 4179; WAN024DWY_at; Start 110; Stop 134
tcttggtcaaccgtaacgatatcgc

SEQ ID NO: 174562 - DNA, 25 bp, Artificial
  probe
  misc_feature (1)..(25): SEQ ID NO: 4179; WAN024DWY_at; Start 224; Stop 248
ccgtccgtcaagagggccaccttat

SEQ ID NO: 174563 - DNA, 25 bp, Artificial
  probe
  misc_feature (1)..(25): SEQ ID NO: 4179; WAN024DWY_at; Start 246; Stop 270
tatctccctgacctttaccaacaat

SEQ ID NO: 174564 - DNA, 25 bp, Artificial
  probe
  misc_feature (1)..(25): SEQ ID NO: 4179; WAN024DWY_at; Start 22; Stop 46
accacggctgtaaagtggtggcaag

SEQ ID NO: 174565 - DNA, 25 bp, Artificial
  probe
  misc_feature (1)..(25): SEQ ID NO: 4179; WAN024DWY_at; Start 146; Stop 170
taggcaattggtccaccatcctgag

SEQ ID NO: 174566 - DNA, 25 bp, Artificial
  probe
  misc_feature (1)..(25): SEQ ID NO: 4179; WAN024DWY_at; Start 198; Stop 222
gaccataagtaccaccagagaaacg

SEQ ID NO: 174567 - DNA, 25 bp, Artificial
  probe
  misc_feature (1)..(25): SEQ ID NO: 4179; WAN024DWY_at; Start 155; Stop 179
ggtccaccatcctgagcttcaggag

SEQ ID NO: 174568 - DNA, 25 bp, Artificial
  probe
  misc_feature (1)..(25): SEQ ID NO: 4179; WAN024DWY_at; Start 177; Stop 201
gagcgatatgtccaacaaccagacc

SEQ ID NO: 174569 - DNA, 25 bp, Artificial
  probe
  misc_feature (1)..(25): SEQ ID NO: 4179; WAN024DWY_at; Start 12; Stop 36
taccgaggacaccacggctgtaaag

SEQ ID NO: 174570 - DNA, 25 bp, Artificial
  probe
  misc_feature (1)..(25): SEQ ID NO: 4179; WAN024DWY_at; Start 152; Stop 176
attggtccaccatcctgagcttcag

SEQ ID NO: 174571 - DNA, 25 bp, Artificial
  probe
  misc_feature (1)..(25): SEQ ID NO: 4179; WAN024DWY_at; Start 33; Stop 57
aaagtggtggcaaggttgtttctgc

SEQ ID NO: 174572 - DNA, 25 bp, Artificial
  probe
  misc_feature (1)..(25): SEQ ID NO: 4179; WAN024DWY_at; Start 138; Stop 162
tacggagataggcaattggtccacc

SEQ ID NO: 174573 - DNA, 25 bp, Artificial
  probe
  misc_feature (1)..(25): SEQ ID NO: 4179; WAN024DWY_at; Start 1; Stop 25
gtgggcatatttaccgaggacacca

SEQ ID NO: 174574 - DNA, 25 bp, Artificial
  probe
  misc_feature (1)..(25): SEQ ID NO: 4179; WAN024DWY_at; Start 14; Stop 38
ccgaggacaccacggctgtaaagtg

SEQ ID NO: 174575 - DNA, 25 bp, Artificial
  probe
  misc_feature (1)..(25): SEQ ID NO: 4179; WAN024DWY_at; Start 69; Stop 93
caagttcttcttcggatacggccat

SEQ ID NO: 174576 - DNA, 25 bp, Artificial
  probe
  misc_feature (1)..(25): SEQ ID NO: 4179; WAN024DWY_at; Start 192; Stop 216
caaccagaccataagtaccaccaga

SEQ ID NO: 174577 - DNA, 25 bp, Artificial
  probe
  misc_feature (1)..(25): SEQ ID NO: 4179; WAN024DWY_at; Start 127; Stop 151
gatatcgccggtacggagataggca

SEQ ID NO: 174578 - DNA, 25 bp, Artificial
  probe
  misc_feature (1)..(25): SEQ ID NO: 4179; WAN024DWY_at; Start 101; Stop 125
tctttggtatcttggtcaaccgtaa

SEQ ID NO: 174579 - DNA, 25 bp, Artificial
  probe
  misc_feature (1)..(25): SEQ ID NO: 4179; WAN024DWY_at; Start 252; Stop 276
cctgacctttaccaacaatcattga

SEQ ID NO: 174580 - DNA, 25 bp, Artificial
  probe
  misc_feature (1)..(25): SEQ ID NO: 4179; WAN024DWY_at; Start 233; Stop 257
aagagggccaccttatctccctgac

SEQ ID NO: 174581 - DNA, 25 bp, Artificial
  probe
  misc_feature (1)..(25): SEQ ID NO: 4179; WAN024DWY_at; Start 170; Stop 194
gcttcaggagcgatatgtccaacaa

SEQ ID NO: 174582 - DNA, 25 bp, Artificial
  probe
  misc_feature (1)..(25): SEQ ID NO: 4179; WAN024DWY_at; Start 120; Stop 144
ccgtaacgatatcgccggtacggag

SEQ ID NO: 174583 - DNA, 25 bp, Artificial
  probe
  misc_feature (1)..(25): SEQ ID NO: 4179; WAN024DWY_at; Start 46; Stop 70
ggttgtttctgccttgcgtttttca

SEQ ID NO: 174584 - DNA, 25 bp, Artificial
  probe
  misc_feature (1)..(25): SEQ ID NO: 4179; WAN024DWY_at; Start 4; Stop 28
ggcatatttaccgaggacaccacgg

SEQ ID NO: 174585 - DNA, 25 bp, Artificial
  probe
  misc_feature (1)..(25): SEQ ID NO: 4179; WAN024DWY_at; Start 165; Stop 189
cctgagcttcaggagcgatatgtcc

SEQ ID NO: 174586 - DNA, 25 bp, Artificial
  probe
  misc_feature (1)..(25): SEQ ID NO: 4179; WAN024DWY_at; Start 8; Stop 32
tatttaccgaggacaccacggctgt

SEQ ID NO: 174587 - DNA, 25 bp, Artificial
  probe
  misc_feature (1)..(25): SEQ ID NO: 4179; WAN024DWY_at; Start 141; Stop 165
ggagataggcaattggtccaccatc

SEQ ID NO: 174588 - DNA, 25 bp, Artificial
  probe
  misc_feature (1)..(25): SEQ ID NO: 4179; WAN024DWY_at; Start 105; Stop 129
tggtatcttggtcaaccgtaacgat

SEQ ID NO: 174589 - DNA, 25 bp, Artificial
  probe
  misc_feature (1)..(25): SEQ ID NO: 4179; WAN024DWY_at; Start 134; Stop 158
ccggtacggagataggcaattggtc

SEQ ID NO: 174590 - DNA, 25 bp, Artificial
  probe
  misc_feature (1)..(25): SEQ ID NO: 4179; WAN024DWY_at; Start 60; Stop 84
tgcgtttttcaagttcttcttcgga

SEQ ID NO: 174591 - DNA, 25 bp, Artificial
  probe
  misc_feature (1)..(25): SEQ ID NO: 4179; WAN024DWY_at; Start 174; Stop 198
caggagcgatatgtccaacaaccag

SEQ ID NO: 174592 - DNA, 25 bp, Artificial
  probe
  misc_feature (1)..(25): SEQ ID NO: 1459; WAN024DWZ_at; Start 1069; Stop 1093
gactttgcagacttgactccaggcc

SEQ ID NO: 174593 - DNA, 25 bp, Artificial
  probe
  misc_feature (1)..(25): SEQ ID NO: 1459; WAN024DWZ_at; Start 445; Stop 469
ggaactattgcaccgggaaatcttg

SEQ ID NO: 174594 - DNA, 25 bp, Artificial
  probe
  misc_feature (1)..(25): SEQ ID NO: 1459; WAN024DWZ_at; Start 555; Stop 579
tcttgaatgtaatgcctgccctggc

SEQ ID NO: 174595 - DNA, 25 bp, Artificial
  probe
  misc_feature (1)..(25): SEQ ID NO: 1459; WAN024DWZ_at; Start 130; Stop 154
tcgacttgggcggaaaatacaccat

SEQ ID NO: 174596 - DNA, 25 bp, Artificial
  probe
  misc_feature (1)..(25): SEQ ID NO: 1459; WAN024DWZ_at; Start 360; Stop 384
cgctatcggtggctgtgacaagaac

SEQ ID NO: 174597 - DNA, 25 bp, Artificial
  probe
  misc_feature (1)..(25): SEQ ID NO: 1459; WAN024DWZ_at; Start 1117; Stop 1141
aatccaaaacgtgcggatggtccgc

SEQ ID NO: 174598 - DNA, 25 bp, Artificial
  probe
  misc_feature (1)..(25): SEQ ID NO: 1459; WAN024DWZ_at; Start 518; Stop 542
ggaaccacggtgacatgacagctga

SEQ ID NO: 174599 - DNA, 25 bp, Artificial
  probe
  misc_feature (1)..(25): SEQ ID NO: 1459; WAN024DWZ_at; Start 850; Stop 874
gcccatgccgcaaatgttgacttgt

SEQ ID NO: 174600 - DNA, 25 bp, Artificial
  probe
  misc_feature (1)..(25): SEQ ID NO: 1459; WAN024DWZ_at; Start 899; Stop 923
aagaacgtgtgcctcacttggccga

SEQ ID NO: 174601 - DNA, 25 bp, Artificial
  probe
  misc_feature (1)..(25): SEQ ID NO: 1459; WAN024DWZ_at; Start 198; Stop 222
tgtcaaatctgcaggcgcttggcct

SEQ ID NO: 174602 - DNA, 25 bp, Artificial
  probe
  misc_feature (1)..(25): SEQ ID NO: 1459; WAN024DWZ_at; Start 11; Stop 35
tagataaacgtcaccgcagtagcat

SEQ ID NO: 174603 - DNA, 25 bp, Artificial
  probe
  misc_feature (1)..(25): SEQ ID NO: 1459; WAN024DWZ_at; Start 1167; Stop 1191
tcctgacggtgcagttgccaaggta

SEQ ID NO: 174604 - DNA, 25 bp, Artificial
  probe
  misc_feature (1)..(25): SEQ ID NO: 1459; WAN024DWZ_at; Start 959; Stop 983
tctacgaagtcggtggtgtccctgc

SEQ ID NO: 174605 - DNA, 25 bp, Artificial
  probe
  misc_feature (1)..(25): SEQ ID NO: 1459; WAN024DWZ_at; Start 1388; Stop 1412
ataaggtggccctcttgacggacgg

SEQ ID NO: 174606 - DNA, 25 bp, Artificial
  probe
  misc_feature (1)..(25): SEQ ID NO: 1459; WAN024DWZ_at; Start 1004; Stop 1028
caaatggtttccttcacggagatcg

SEQ ID NO: 174607 - DNA, 25 bp, Artificial
  probe
  misc_feature (1)..(25): SEQ ID NO: 1459; WAN024DWZ_at; Start 330; Stop 354
tatgagtggtcacaacgtggatgcc

SEQ ID NO: 174608 - DNA, 25 bp, Artificial
  probe
  misc_feature (1)..(25): SEQ ID NO: 1459; WAN024DWZ_at; Start 531; Stop 555
catgacagctgaggacgtgaaacgt

SEQ ID NO: 174609 - DNA, 25 bp, Artificial
  probe
  misc_feature (1)..(25): SEQ ID NO: 1459; WAN024DWZ_at; Start 1320; Stop 1344
taaaggtggtcctggtatgcctgag

SEQ ID NO: 174610 - DNA, 25 bp, Artificial
  probe
  misc_feature (1)..(25): SEQ ID NO: 1459; WAN024DWZ_at; Start 1047; Stop 1071
gactgtagctgaaaacttggctgac

SEQ ID NO: 174611 - DNA, 25 bp, Artificial
  probe
  misc_feature (1)..(25): SEQ ID NO: 1459; WAN024DWZ_at; Start 1190; Stop 1214
tatcaggtgttaaagtgcgtcgtca

SEQ ID NO: 174612 - DNA, 25 bp, Artificial
  probe
  misc_feature (1)..(25): SEQ ID NO: 1459; WAN024DWZ_at; Start 311; Stop 335
cggactccatcgaggcggctatgag

SEQ ID NO: 174613 - DNA, 25 bp, Artificial
  probe
  misc_feature (1)..(25): SEQ ID NO: 1459; WAN024DWZ_at; Start 290; Stop 314
taacatctcgtgacatcatcgcgga

SEQ ID NO: 174614 - DNA, 25 bp, Artificial
  probe
  misc_feature (1)..(25): SEQ ID NO: 1459; WAN024DWZ_at; Start 60; Stop 84
taaccgtgctatgcttcgtgcgact

SEQ ID NO: 174615 - DNA, 25 bp, Artificial
  probe
  misc_feature (1)..(25): SEQ ID NO: 1459; WAN024DWZ_at; Start 914; Stop 938
acttggccgacttgaaaccatctgg

SEQ ID NO: 174616 - DNA, 25 bp, Artificial
  probe
  misc_feature (1)..(25): SEQ ID NO: 1459; WAN024DWZ_at; Start 1240; Stop 1264
tcagaagaagatgcgattcaggccg

SEQ ID NO: 174617 - DNA, 25 bp, Artificial
  probe
  misc_feature (1)..(25): SEQ ID NO: 1459; WAN024DWZ_at; Start 226; Stop 250
cagtttggaaccattaccgtagcgg

SEQ ID NO: 174618 - DNA, 25 bp, Artificial
  probe
  misc_feature (1)..(25): SEQ ID NO: 1459; WAN024DWZ_at; Start 1478; Stop 1502
gaccaattgcctatctccgtaccgg

SEQ ID NO: 174619 - DNA, 25 bp, Artificial
  probe
  misc_feature (1)..(25): SEQ ID NO: 1459; WAN024DWZ_at; Start 630; Stop 654
cgaagttctagggatgagtttgcca

SEQ ID NO: 174620 - DNA, 25 bp, Artificial
  probe
  misc_feature (1)..(25): SEQ ID NO: 1459; WAN024DWZ_at; Start 1603; Stop 1627
tacagccgtggtgtcctcggtaaat

SEQ ID NO: 174621 - DNA, 25 bp, Artificial
  probe
  misc_feature (1)..(25): SEQ ID NO: 1459; WAN024DWZ_at; Start 1459; Stop 1483
cctgaagctcaggatggtggaccaa

SEQ ID NO: 174622 - DNA, 25 bp, Artificial
  probe
  misc_feature (1)..(25): SEQ ID NO: 1459; WAN024DWZ_at; Start 1640; Stop 1664
tatcatctgcttcacgcggagccgt

SEQ ID NO: 174623 - DNA, 25 bp, Artificial
  probe
  misc_feature (1)..(25): SEQ ID NO: 1459; WAN024DWZ_at; Start 1021; Stop 1045
ggagatcgcatcacatgtactggta

SEQ ID NO: 174624 - DNA, 25 bp, Artificial
  probe
  misc_feature (1)..(25): SEQ ID NO: 1459; WAN024DWZ_at; Start 1151; Stop 1175
tgaacgggaaccttgctcctgacgg

SEQ ID NO: 174625 - DNA, 25 bp, Artificial
  probe
  misc_feature (1)..(25): SEQ ID NO: 1459; WAN024DWZ_at; Start 800; Stop 824
cgatggctctcggtggttctacaaa

SEQ ID NO: 174626 - DNA, 25 bp, Artificial
  probe
  misc_feature (1)..(25): SEQ ID NO: 861; WAN024DX2_at; Start 879; Stop 903
caatgattattttgggaagcagtcc

SEQ ID NO: 174627 - DNA, 25 bp, Artificial
  probe
  misc_feature (1)..(25): SEQ ID NO: 861; WAN024DX2_at; Start 596; Stop 620
catctgctgatggtgaaaacttaaa

SEQ ID NO: 174628 - DNA, 25 bp, Artificial
  probe
  misc_feature (1)..(25): SEQ ID NO: 861; WAN024DX2_at; Start 86; Stop 110
tggtctttatcgtctatgcatcgac

SEQ ID NO: 174629 - DNA, 25 bp, Artificial
  probe
  misc_feature (1)..(25): SEQ ID NO: 861; WAN024DX2_at; Start 268; Stop 292
gcagccctagttgttcagcaagcta

SEQ ID NO: 174630 - DNA, 25 bp, Artificial
  probe
  misc_feature (1)..(25): SEQ ID NO: 861; WAN024DX2_at; Start 1050; Stop 1074
catgaaaaatctagctccagaggtt

SEQ ID NO: 174631 - DNA, 25 bp, Artificial
  probe
  misc_feature (1)..(25): SEQ ID NO: 861; WAN024DX2_at; Start 801; Stop 825
gaatttttcttatacagaggcacta

SEQ ID NO: 174632 - DNA, 25 bp, Artificial
  probe
  misc_feature (1)..(25): SEQ ID NO: 861; WAN024DX2_at; Start 122; Stop 146
catcttttgctgttgctatggcgaa

SEQ ID NO: 174633 - DNA, 25 bp, Artificial
  probe
  misc_feature (1)..(25): SEQ ID NO: 861; WAN024DX2_at; Start 1027; Stop 1051
caaccaaagattagtgccatgctca

SEQ ID NO: 174634 - DNA, 25 bp, Artificial
  probe
  misc_feature (1)..(25): SEQ ID NO: 861; WAN024DX2_at; Start 1007; Stop 1031
tgtatgtgtctggtaaagttcaacc

SEQ ID NO: 174635 - DNA, 25 bp, Artificial
  probe
  misc_feature (1)..(25): SEQ ID NO: 861; WAN024DX2_at; Start 1121; Stop 1145
tacctgtgggaacagcttgtttttc

SEQ ID NO: 174636 - DNA, 25 bp, Artificial
  probe
  misc_feature (1)..(25): SEQ ID NO: 861; WAN024DX2_at; Start 545; Stop 569
tatcagccactatcctctttttagg

SEQ ID NO: 174637 - DNA, 25 bp, Artificial
  probe
  misc_feature (1)..(25): SEQ ID NO: 861; WAN024DX2_at; Start 230; Stop 254
tctatagcggtttgtttcaggcggt

SEQ ID NO: 174638 - DNA, 25 bp, Artificial
  probe
  misc_feature (1)..(25): SEQ ID NO: 861; WAN024DX2_at; Start 751; Stop 775
ggcgctttgggtggaatttataata

SEQ ID NO: 174639 - DNA, 25 bp, Artificial
  probe
  misc_feature (1)..(25): SEQ ID NO: 861; WAN024DX2_at; Start 630; Stop 654
gctttctatcaaagaccagttccta

SEQ ID NO: 174640 - DNA, 25 bp, Artificial
  probe
  misc_feature (1)..(25): SEQ ID NO: 861; WAN024DX2_at; Start 408; Stop 432
gatggaggcttattctttttcacag

SEQ ID NO: 174641 - DNA, 25 bp, Artificial
  probe
  misc_feature (1)..(25): SEQ ID NO: 861; WAN024DX2_at; Start 100; Stop 124
tatgcatcgaccttgtcacaagcat

SEQ ID NO: 174642 - DNA, 25 bp, Artificial
  probe
  misc_feature (1)..(25): SEQ ID NO: 861; WAN024DX2_at; Start 440; Stop 464
cctatatttcagctattggtggtca

SEQ ID NO: 174643 - DNA, 25 bp, Artificial
  probe
  misc_feature (1)..(25): SEQ ID NO: 861; WAN024DX2_at; Start 341; Stop 365
tcatcagtgattttgcaggtggcct

SEQ ID NO: 174644 - DNA, 25 bp, Artificial
  probe
  misc_feature (1)..(25): SEQ ID NO: 861; WAN024DX2_at; Start 970; Stop 994
caagtcgtgcttggtttgctatttc

SEQ ID NO: 174645 - DNA, 25 bp, Artificial
  probe
  misc_feature (1)..(25): SEQ ID NO: 861; WAN024DX2_at; Start 1138; Stop 1162
tgtttttcactagtagccgtatgga

SEQ ID NO: 174646 - DNA, 25 bp, Artificial
  probe
  misc_feature (1)..(25): SEQ ID NO: 861; WAN024DX2_at; Start 213; Stop 237
caaggtcaaatggatggtctatagc

SEQ ID NO: 174647 - DNA, 25 bp, Artificial
  probe
  misc_feature (1)..(25): SEQ ID NO: 861; WAN024DX2_at; Start 581; Stop 605
tgagcctgtcaatgtcatctgctga

SEQ ID NO: 174648 - DNA, 25 bp, Artificial
  probe
  misc_feature (1)..(25): SEQ ID NO: 861; WAN024DX2_at; Start 356; Stop 380
caggtggcctgcgtatgcctcttat

SEQ ID NO: 174649 - DNA, 25 bp, Artificial
  probe
  misc_feature (1)..(25): SEQ ID NO: 861; WAN024DX2_at; Start 857; Stop 881
tcatcatcagtagccttacgggcaa

SEQ ID NO: 174650 - DNA, 25 bp, Artificial
  probe
  misc_feature (1)..(25): SEQ ID NO: 861; WAN024DX2_at; Start 479; Stop 503
ggctcttagctctatcggtcaacaa

SEQ ID NO: 174651 - DNA, 25 bp, Artificial
  probe
  misc_feature (1)..(25): SEQ ID NO: 861; WAN024DX2_at; Start 464; Stop 488
aagctttcggagtctggctcttagc

SEQ ID NO: 174652 - DNA, 25 bp, Artificial
  probe
  misc_feature (1)..(25): SEQ ID NO: 861; WAN024DX2_at; Start 932; Stop 956
taggacttagtctagttggtttggc

SEQ ID NO: 174653 - DNA, 25 bp, Artificial
  probe
  misc_feature (1)..(25): SEQ ID NO: 861; WAN024DX2_at; Start 307; Stop 331
tctagcctgtgtttgatcaatgtca

SEQ ID NO: 174654 - DNA, 25 bp, Artificial
  probe
  misc_feature (1)..(25): SEQ ID NO: 861; WAN024DX2_at; Start 566; Stop 590
taggaaaaagcaaattgagcctgtc

SEQ ID NO: 174655 - DNA, 25 bp, Artificial
  probe
  misc_feature (1)..(25): SEQ ID NO: 861; WAN024DX2_at; Start 1184; Stop 1208
tatttgttggtctttccttgctagc

SEQ ID NO: 174656 - DNA, 25 bp, Artificial
  probe
  misc_feature (1)..(25): SEQ ID NO: 861; WAN024DX2_at; Start 894; Stop 918
gaagcagtccttgcctagattgatg

SEQ ID NO: 174657 - DNA, 25 bp, Artificial
  probe
  misc_feature (1)..(25): SEQ ID NO: 861; WAN024DX2_at; Start 1106; Stop 1130
tgtttaccttatccatacctgtggg

SEQ ID NO: 174658 - DNA, 25 bp, Artificial
  probe
  misc_feature (1)..(25): SEQ ID NO: 861; WAN024DX2_at; Start 453; Stop 477
tattggtggtcaagctttcggagtc

SEQ ID NO: 174659 - DNA, 25 bp, Artificial
  probe
  misc_feature (1)..(25): SEQ ID NO: 861; WAN024DX2_at; Start 731; Stop 755
tgcttattaattccttgggtggcgc

SEQ ID NO: 174660 - DNA, 25 bp, Artificial
  probe
  misc_feature (1)..(25): SEQ ID NO: 5879; WAN024DX3_at; Start 447; Stop 471
gatttccaagagtgttgaggtgcaa

SEQ ID NO: 174661 - DNA, 25 bp, Artificial
  probe
  misc_feature (1)..(25): SEQ ID NO: 5879; WAN024DX3_at; Start 490; Stop 514
gatttccttcaaaaaatgggctgcc

SEQ ID NO: 174662 - DNA, 25 bp, Artificial
  probe
  misc_feature (1)..(25): SEQ ID NO: 5879; WAN024DX3_at; Start 707; Stop 731
gcagttccttctggacggagggtaa

SEQ ID NO: 174663 - DNA, 25 bp, Artificial
  probe
  misc_feature (1)..(25): SEQ ID NO: 5879; WAN024DX3_at; Start 428; Stop 452
taggctgcacggctctcaggatttc

SEQ ID NO: 174664 - DNA, 25 bp, Artificial
  probe
  misc_feature (1)..(25): SEQ ID NO: 5879; WAN024DX3_at; Start 382; Stop 406
caaggtctccttgagcggtgtcaaa

SEQ ID NO: 174665 - DNA, 25 bp, Artificial
  probe
  misc_feature (1)..(25): SEQ ID NO: 5879; WAN024DX3_at; Start 831; Stop 855
taggcgtgcgcacttctgcatagtt

SEQ ID NO: 174666 - DNA, 25 bp, Artificial
  probe
  misc_feature (1)..(25): SEQ ID NO: 5879; WAN024DX3_at; Start 793; Stop 817
tccgacagagcgactgataacctcg

SEQ ID NO: 174667 - DNA, 25 bp, Artificial
  probe
  misc_feature (1)..(25): SEQ ID NO: 5879; WAN024DX3_at; Start 397; Stop 421
cggtgtcaaatagtcaatcaaggct

SEQ ID NO: 174668 - DNA, 25 bp, Artificial
  probe
  misc_feature (1)..(25): SEQ ID NO: 5879; WAN024DX3_at; Start 571; Stop 595
aatctggtggaattggcgcaagcgc

SEQ ID NO: 174669 - DNA, 25 bp, Artificial
  probe
  misc_feature (1)..(25): SEQ ID NO: 5879; WAN024DX3_at; Start 874; Stop 898
acgggcaaagccctcaacgtactgc

SEQ ID NO: 174670 - DNA, 25 bp, Artificial
  probe
  misc_feature (1)..(25): SEQ ID NO: 5879; WAN024DX3_at; Start 285; Stop 309
tagacggcgcattctctactgccac

SEQ ID NO: 174671 - DNA, 25 bp, Artificial
  probe
  misc_feature (1)..(25): SEQ ID NO: 5879; WAN024DX3_at; Start 468; Stop 492
gcaatttgacaccttgaataccgat

SEQ ID NO: 174672 - DNA, 25 bp, Artificial
  probe
  misc_feature (1)..(25): SEQ ID NO: 5879; WAN024DX3_at; Start 361; Stop 385
gcgacgttggctatccttagacaag

SEQ ID NO: 174673 - DNA, 25 bp, Artificial
  probe
  misc_feature (1)..(25): SEQ ID NO: 5879; WAN024DX3_at; Start 678; Stop 702
tattttccacataggaacggacaac

SEQ ID NO: 174674 - DNA, 25 bp, Artificial
  probe
  misc_feature (1)..(25): SEQ ID NO: 5879; WAN024DX3_at; Start 345; Stop 369
gaggattttcctccaagcgacgttg

SEQ ID NO: 174675 - DNA, 25 bp, Artificial
  probe
  misc_feature (1)..(25): SEQ ID NO: 5879; WAN024DX3_at; Start 270; Stop 294
caagaaagtccaagatagacggcgc

SEQ ID NO: 174676 - DNA, 25 bp, Artificial
  probe
  misc_feature (1)..(25): SEQ ID NO: 5879; WAN024DX3_at; Start 45; Stop 69
aaccaaatccagcagtttcagggcc

SEQ ID NO: 174677 - DNA, 25 bp, Artificial
  probe
  misc_feature (1)..(25): SEQ ID NO: 5879; WAN024DX3_at; Start 74; Stop 98
aagtaagcaaccaaaccatcgtagc

SEQ ID NO: 174678 - DNA, 25 bp, Artificial
  probe
  misc_feature (1)..(25): SEQ ID NO: 5879; WAN024DX3_at; Start 170; Stop 194
tagtccagaccacgcaccatattgg

SEQ ID NO: 174679 - DNA, 25 bp, Artificial
  probe
  misc_feature (1)..(25): SEQ ID NO: 5879; WAN024DX3_at; Start 327; Stop 351
tagagtccaagacacgaagaggatt

SEQ ID NO: 174680 - DNA, 25 bp, Artificial
  probe
  misc_feature (1)..(25): SEQ ID NO: 5879; WAN024DX3_at; Start 816; Stop 840
cgtaatgctcaaaaataggcgtgcg

SEQ ID NO: 174681 - DNA, 25 bp, Artificial
  probe
  misc_feature (1)..(25): SEQ ID NO: 5879; WAN024DX3_at; Start 508; Stop 532
ggctgccatagcgattgtttccaca

SEQ ID NO: 174682 - DNA, 25 bp, Artificial
  probe
  misc_feature (1)..(25): SEQ ID NO: 5879; WAN024DX3_at; Start 543; Stop 567
gattgctagagccaaaacactcaac

SEQ ID NO: 174683 - DNA, 25 bp, Artificial
  probe
  misc_feature (1)..(25): SEQ ID NO: 5879; WAN024DX3_at; Start 219; Stop 243
gattttccaacatctgacgcacagc

SEQ ID NO: 174684 - DNA, 25 bp, Artificial
  probe
  misc_feature (1)..(25): SEQ ID NO: 5879; WAN024DX3_at; Start 778; Stop 802
gatatccgttgtatctccgacagag

SEQ ID NO: 174685 - DNA, 25 bp, Artificial
  probe
  misc_feature (1)..(25): SEQ ID NO: 5879; WAN024DX3_at; Start 6; Stop 30
tttcaaggatgagaagcaggcgctc

SEQ ID NO: 174686 - DNA, 25 bp, Artificial
  probe
  misc_feature (1)..(25): SEQ ID NO: 5879; WAN024DX3_at; Start 737; Stop 761
cggtcacccttgtcataaaaatcgt

SEQ ID NO: 174687 - DNA, 25 bp, Artificial
  probe
  misc_feature (1)..(25): SEQ ID NO: 5879; WAN024DX3_at; Start 411; Stop 435
caatcaaggcttggcggtaggctgc

SEQ ID NO: 174688 - DNA, 25 bp, Artificial
  probe
  misc_feature (1)..(25): SEQ ID NO: 5879; WAN024DX3_at; Start 139; Stop 163
tgtgataaactcgaaaatggtgtgg

SEQ ID NO: 174689 - DNA, 25 bp, Artificial
  probe
  misc_feature (1)..(25): SEQ ID NO: 5879; WAN024DX3_at; Start 720; Stop 744
gacggagggtaatatgacggtcacc

SEQ ID NO: 174690 - DNA, 25 bp, Artificial
  probe
  misc_feature (1)..(25): SEQ ID NO: 5879; WAN024DX3_at; Start 527; Stop 551
tccacatcggtagctggattgctag

SEQ ID NO: 174691 - DNA, 25 bp, Artificial
  probe
  misc_feature (1)..(25): SEQ ID NO: 5879; WAN024DX3_at; Start 596; Stop 620
cctgcctgtggacgctcataacgga

SEQ ID NO: 174692 - DNA, 25 bp, Artificial
  probe
  misc_feature (1)..(25): SEQ ID NO: 5879; WAN024DX3_at; Start 60; Stop 84
tttcagggcctccaaagtaagcaac

SEQ ID NO: 174693 - DNA, 25 bp, Artificial
  probe
  misc_feature (1)..(25): SEQ ID NO: 5879; WAN024DX3_at; Start 609; Stop 633
gctcataacggaacataggtcccat

SEQ ID NO: 174694 - DNA, 25 bp, Artificial
  probe
  misc_feature (1)..(25): SEQ ID NO: 973; WAN024DX4_at; Start 406; Stop 430
tctagcaatccagctaccgatgtgg

SEQ ID NO: 174695 - DNA, 25 bp, Artificial
  probe
  misc_feature (1)..(25): SEQ ID NO: 973; WAN024DX4_at; Start 60; Stop 84
gcagtacgttgagggctttgcccgt

SEQ ID NO: 174696 - DNA, 25 bp, Artificial
  probe
  misc_feature (1)..(25): SEQ ID NO: 973; WAN024DX4_at; Start 287; Stop 311
tcgccccagaagtgcaaaagccaag

SEQ ID NO: 174697 - DNA, 25 bp, Artificial
  probe
  misc_feature (1)..(25): SEQ ID NO: 973; WAN024DX4_at; Start 1219; Stop 1243
caagtgtcacttgagacaatcagcc

SEQ ID NO: 174698 - DNA, 25 bp, Artificial
  probe
  misc_feature (1)..(25): SEQ ID NO: 973; WAN024DX4_at; Start 255; Stop 279
cgttgtccgttcctatgtggaaaat

SEQ ID NO: 174699 - DNA, 25 bp, Artificial
  probe
  misc_feature (1)..(25): SEQ ID NO: 973; WAN024DX4_at; Start 574; Stop 598
ttgtctaaggatagccaacgtcgct

SEQ ID NO: 174700 - DNA, 25 bp, Artificial
  probe
  misc_feature (1)..(25): SEQ ID NO: 973; WAN024DX4_at; Start 873; Stop 897
ggttgcttactttggaggccctgaa

SEQ ID NO: 174701 - DNA, 25 bp, Artificial
  probe
  misc_feature (1)..(25): SEQ ID NO: 973; WAN024DX4_at; Start 523; Stop 547
gcagcctaccgccaagccttgattg

SEQ ID NO: 174702 - DNA, 25 bp, Artificial
  probe
  misc_feature (1)..(25): SEQ ID NO: 973; WAN024DX4_at; Start 784; Stop 808
gactactacaaccacaccattttcg

SEQ ID NO: 174703 - DNA, 25 bp, Artificial
  probe
  misc_feature (1)..(25): SEQ ID NO: 973; WAN024DX4_at; Start 363; Stop 387
gcgcttgcgccaattccaccagatt

SEQ ID NO: 174704 - DNA, 25 bp, Artificial
  probe
  misc_feature (1)..(25): SEQ ID NO: 973; WAN024DX4_at; Start 326; Stop 350
tgggacctatgttccgttatgagcg

SEQ ID NO: 174705 - DNA, 25 bp, Artificial
  probe
  misc_feature (1)..(25): SEQ ID NO: 973; WAN024DX4_at; Start 501; Stop 525
tcttggaaatcctgagagccgtgca

SEQ ID NO: 174706 - DNA, 25 bp, Artificial
  probe
  misc_feature (1)..(25): SEQ ID NO: 973; WAN024DX4_at; Start 627; Stop 651
ctctaaggaaaaagaagacaaggtg

SEQ ID NO: 174707 - DNA, 25 bp, Artificial
  probe
  misc_feature (1)..(25): SEQ ID NO: 973; WAN024DX4_at; Start 765; Stop 789
caatatggtgcgtggtctggactac

SEQ ID NO: 174708 - DNA, 25 bp, Artificial
  probe
  misc_feature (1)..(25): SEQ ID NO: 973; WAN024DX4_at; Start 1053; Stop 1077
tcgccaacaaggtttcaaagcagag

SEQ ID NO: 174709 - DNA, 25 bp, Artificial
  probe
  misc_feature (1)..(25): SEQ ID NO: 973; WAN024DX4_at; Start 589; Stop 613
caacgtcgcttggaggaaaatcctc

SEQ ID NO: 174710 - DNA, 25 bp, Artificial
  probe
  misc_feature (1)..(25): SEQ ID NO: 973; WAN024DX4_at; Start 441; Stop 465
tatggcagcccattttttgaaggaa

SEQ ID NO: 174711 - DNA, 25 bp, Artificial
  probe
  misc_feature (1)..(25): SEQ ID NO: 973; WAN024DX4_at; Start 175; Stop 199
gatatcgtaaccaaggaaatgtacg

SEQ ID NO: 174712 - DNA, 25 bp, Artificial
  probe
  misc_feature (1)..(25): SEQ ID NO: 973; WAN024DX4_at; Start 798; Stop 822
caccattttcgagtttatcacagag

SEQ ID NO: 174713 - DNA, 25 bp, Artificial
  probe
  misc_feature (1)..(25): SEQ ID NO: 973; WAN024DX4_at; Start 982; Stop 1006
gccctagatgtctatatcgcagtct

SEQ ID NO: 174714 - DNA, 25 bp, Artificial
  probe
  misc_feature (1)..(25): SEQ ID NO: 973; WAN024DX4_at; Start 886; Stop 910
ggaggccctgaaactgctggatttg

SEQ ID NO: 174715 - DNA, 25 bp, Artificial
  probe
  misc_feature (1)..(25): SEQ ID NO: 973; WAN024DX4_at; Start 552; Stop 576
tttgacaccgctcaaggagaccttg

SEQ ID NO: 174716 - DNA, 25 bp, Artificial
  probe
  misc_feature (1)..(25): SEQ ID NO: 973; WAN024DX4_at; Start 394; Stop 418
gagtgttttggctctagcaatccag

SEQ ID NO: 174717 - DNA, 25 bp, Artificial
  probe
  misc_feature (1)..(25): SEQ ID NO: 973; WAN024DX4_at; Start 1197; Stop 1221
caaccaaacccgagaagaagtgcaa

SEQ ID NO: 174718 - DNA, 25 bp, Artificial
  probe
  misc_feature (1)..(25): SEQ ID NO: 973; WAN024DX4_at; Start 342; Stop 366
ttatgagcgtccacaggcagggcgc

SEQ ID NO: 174719 - DNA, 25 bp, Artificial
  probe
  misc_feature (1)..(25): SEQ ID NO: 973; WAN024DX4_at; Start 1065; Stop 1089
tttcaaagcagagcgtgattacctc

SEQ ID NO: 174720 - DNA, 25 bp, Artificial
  probe
  misc_feature (1)..(25): SEQ ID NO: 973; WAN024DX4_at; Start 227; Stop 251
ttaccctccgtccagaaggaactgc

SEQ ID NO: 174721 - DNA, 25 bp, Artificial
  probe
  misc_feature (1)..(25): SEQ ID NO: 973; WAN024DX4_at; Start 751; Stop 775
tacatcatcgataccaatatggtgc

SEQ ID NO: 174722 - DNA, 25 bp, Artificial
  probe
  misc_feature (1)..(25): SEQ ID NO: 973; WAN024DX4_at; Start 711; Stop 735
tgatgctgtgcgtcagatgttggaa

SEQ ID NO: 174723 - DNA, 25 bp, Artificial
  probe
  misc_feature (1)..(25): SEQ ID NO: 973; WAN024DX4_at; Start 1180; Stop 1204
caagtgacggtcaagaacaaccaaa

SEQ ID NO: 174724 - DNA, 25 bp, Artificial
  probe
  misc_feature (1)..(25): SEQ ID NO: 973; WAN024DX4_at; Start 462; Stop 486
ggaaatcggtattcaaggtgtcaaa

SEQ ID NO: 174725 - DNA, 25 bp, Artificial
  probe
  misc_feature (1)..(25): SEQ ID NO: 973; WAN024DX4_at; Start 538; Stop 562
gccttgattgactatttgacaccgc

SEQ ID NO: 174726 - DNA, 25 bp, Artificial
  probe
  misc_feature (1)..(25): SEQ ID NO: 973; WAN024DX4_at; Start 484; Stop 508
aaattgcacctcaacactcttggaa

SEQ ID NO: 174727 - DNA, 25 bp, Artificial
  probe
  misc_feature (1)..(25): SEQ ID NO: 973; WAN024DX4_at; Start 603; Stop 627
ggaaaatcctcttcgtgtcttggac

SEQ ID NO: 174728 - DNA, 25 bp, Artificial
  probe
  misc_feature (1)..(25): SEQ ID NO: 7435; WAN024DX5_at; Start 56; Stop 80
tttatgatttttgtcattttgcaaa

SEQ ID NO: 174729 - DNA, 25 bp, Artificial
  probe
  misc_feature (1)..(25): SEQ ID NO: 7435; WAN024DX5_at; Start 26; Stop 50
tcttttttgacaattatagttttca

SEQ ID NO: 174730 - DNA, 25 bp, Artificial
  probe
  misc_feature (1)..(25): SEQ ID NO: 7435; WAN024DX5_at; Start 53; Stop 77
aagtttatgatttttgtcattttgc

SEQ ID NO: 174731 - DNA, 25 bp, Artificial
  probe
  misc_feature (1)..(25): SEQ ID NO: 7435; WAN024DX5_at; Start 54; Stop 78
agtttatgatttttgtcattttgca

SEQ ID NO: 174732 - DNA, 25 bp, Artificial
  probe
  misc_feature (1)..(25): SEQ ID NO: 7435; WAN024DX5_at; Start 57; Stop 81
ttatgatttttgtcattttgcaaaa

SEQ ID NO: 174733 - DNA, 25 bp, Artificial
  probe
  misc_feature (1)..(25): SEQ ID NO: 7435; WAN024DX5_at; Start 49; Stop 73
caaaaagtttatgatttttgtcatt

SEQ ID NO: 174734 - DNA, 25 bp, Artificial
  probe
  misc_feature (1)..(25): SEQ ID NO: 7435; WAN024DX5_at; Start 47; Stop 71
ttcaaaaagtttatgatttttgtca

SEQ ID NO: 174735 - DNA, 25 bp, Artificial
  probe
  misc_feature (1)..(25): SEQ ID NO: 7435; WAN024DX5_at; Start 48; Stop 72
tcaaaaagtttatgatttttgtcat

SEQ ID NO: 174736 - DNA, 25 bp, Artificial
  probe
  misc_feature (1)..(25): SEQ ID NO: 7435; WAN024DX5_at; Start 15; Stop 39
acatatctttttcttttttgacaat

SEQ ID NO: 174737 - DNA, 25 bp, Artificial
  probe
  misc_feature (1)..(25): SEQ ID NO: 7435; WAN024DX5_at; Start 16; Stop 40
catatctttttcttttttgacaatt

SEQ ID NO: 174738 - DNA, 25 bp, Artificial
  probe
  misc_feature (1)..(25): SEQ ID NO: 7435; WAN024DX5_at; Start 55; Stop 79
gtttatgatttttgtcattttgcaa

SEQ ID NO: 174739 - DNA, 25 bp, Artificial
  probe
  misc_feature (1)..(25): SEQ ID NO: 5093; WAN024DX6_at; Start 59; Stop 83
cctactctccgtcaaattcaacggt

SEQ ID NO: 174740 - DNA, 25 bp, Artificial
  probe
  misc_feature (1)..(25): SEQ ID NO: 5093; WAN024DX6_at; Start 5; Stop 29
gaccatcgcgagctcgaagctcttt

SEQ ID NO: 174741 - DNA, 25 bp, Artificial
  probe
  misc_feature (1)..(25): SEQ ID NO: 5093; WAN024DX6_at; Start 196; Stop 220
atatacactcccgttataattggtt

SEQ ID NO: 174742 - DNA, 25 bp, Artificial
  probe
  misc_feature (1)..(25): SEQ ID NO: 5093; WAN024DX6_at; Start 125; Stop 149
ccgtattatctacacgtcgtagctt

SEQ ID NO: 174743 - DNA, 25 bp, Artificial
  probe
  misc_feature (1)..(25): SEQ ID NO: 5093; WAN024DX6_at; Start 51; Stop 75
gttacacacctactctccgtcaaat

SEQ ID NO: 174744 - DNA, 25 bp, Artificial
  probe
  misc_feature (1)..(25): SEQ ID NO: 5093; WAN024DX6_at; Start 64; Stop 88
tctccgtcaaattcaacggtttgga

SEQ ID NO: 174745 - DNA, 25 bp, Artificial
  probe
  misc_feature (1)..(25): SEQ ID NO: 5093; WAN024DX6_at; Start 14; Stop 38
gagctcgaagctcttttagacgatt

SEQ ID NO: 174746 - DNA, 25 bp, Artificial
  probe
  misc_feature (1)..(25): SEQ ID NO: 5093; WAN024DX6_at; Start 190; Stop 214
ggcccaatatacactcccgttataa

SEQ ID NO: 174747 - DNA, 25 bp, Artificial
  probe
  misc_feature (1)..(25): SEQ ID NO: 5093; WAN024DX6_at; Start 25; Stop 49
tcttttagacgattttttagttgca

SEQ ID NO: 174748 - DNA, 25 bp, Artificial
  probe
  misc_feature (1)..(25): SEQ ID NO: 5093; WAN024DX6_at; Start 241; Stop 265
aataatctcgacatttctgcgtttc

SEQ ID NO: 174749 - DNA, 25 bp, Artificial
  probe
  misc_feature (1)..(25): SEQ ID NO: 5093; WAN024DX6_at; Start 131; Stop 155
tatctacacgtcgtagctttaccca

SEQ ID NO: 174750 - DNA, 25 bp, Artificial
  probe
  misc_feature (1)..(25): SEQ ID NO: 5093; WAN024DX6_at; Start 142; Stop 166
cgtagctttacccattcctcatcaa

SEQ ID NO: 174751 - DNA, 25 bp, Artificial
  probe
  misc_feature (1)..(25): SEQ ID NO: 5093; WAN024DX6_at; Start 187; Stop 211
tctggcccaatatacactcccgtta

SEQ ID NO: 174752 - DNA, 25 bp, Artificial
  probe
  misc_feature (1)..(25): SEQ ID NO: 5093; WAN024DX6_at; Start 16; Stop 40
gctcgaagctcttttagacgatttt

SEQ ID NO: 174753 - DNA, 25 bp, Artificial
  probe
  misc_feature (1)..(25): SEQ ID NO: 5093; WAN024DX6_at; Start 250; Stop 274
gacatttctgcgtttcctttctctt

SEQ ID NO: 174754 - DNA, 25 bp, Artificial
  probe
  misc_feature (1)..(25): SEQ ID NO: 5093; WAN024DX6_at; Start 185; Stop 209
tatctggcccaatatacactcccgt

SEQ ID NO: 174755 - DNA, 25 bp, Artificial
  probe
  misc_feature (1)..(25): SEQ ID NO: 5093; WAN024DX6_at; Start 246; Stop 270
tctcgacatttctgcgtttcctttc

SEQ ID NO: 174756 - DNA, 25 bp, Artificial
  probe
  misc_feature (1)..(25): SEQ ID NO: 5093; WAN024DX6_at; Start 135; Stop 159
tacacgtcgtagctttacccattcc

SEQ ID NO: 174757 - DNA, 25 bp, Artificial
  probe
  misc_feature (1)..(25): SEQ ID NO: 5093; WAN024DX6_at; Start 122; Stop 146
ttcccgtattatctacacgtcgtag

SEQ ID NO: 174758 - DNA, 25 bp, Artificial
  probe
  misc_feature (1)..(25): SEQ ID NO: 5093; WAN024DX6_at; Start 95; Stop 119
caatacgttgcaacttgaatttttc

SEQ ID NO: 174759 - DNA, 25 bp, Artificial
  probe
  misc_feature (1)..(25): SEQ ID NO: 5093; WAN024DX6_at; Start 260; Stop 284
cgtttcctttctcttttcgctcaag

SEQ ID NO: 174760 - DNA, 25 bp, Artificial
  probe
  misc_feature (1)..(25): SEQ ID NO: 5093; WAN024DX6_at; Start 2; Stop 26
tgagaccatcgcgagctcgaagctc

SEQ ID NO: 174761 - DNA, 25 bp, Artificial
  probe
  misc_feature (1)..(25): SEQ ID NO: 5093; WAN024DX6_at; Start 167; Stop 191
catccacaacttcccagttatctgg

SEQ ID NO: 174762 - DNA, 25 bp, Artificial
  probe
  misc_feature (1)..(25): SEQ ID NO: 5093; WAN024DX6_at; Start 145; Stop 169
agctttacccattcctcatcaacat

SEQ ID NO: 174763 - DNA, 25 bp, Artificial
  probe
  misc_feature (1)..(25): SEQ ID NO: 5093; WAN024DX6_at; Start 184; Stop 208
ttatctggcccaatatacactcccg

SEQ ID NO: 174764 - DNA, 25 bp, Artificial
  probe
  misc_feature (1)..(25): SEQ ID NO: 5093; WAN024DX6_at; Start 138; Stop 162
acgtcgtagctttacccattcctca

SEQ ID NO: 174765 - DNA, 25 bp, Artificial
  probe
  misc_feature (1)..(25): SEQ ID NO: 5093; WAN024DX6_at; Start 162; Stop 186
atcaacatccacaacttcccagtta

SEQ ID NO: 174766 - DNA, 25 bp, Artificial
  probe
  misc_feature (1)..(25): SEQ ID NO: 5093; WAN024DX6_at; Start 290; Stop 314
tgattttattctctagtttcttgat

SEQ ID NO: 174767 - DNA, 25 bp, Artificial
  probe
  misc_feature (1)..(25): SEQ ID NO: 5093; WAN024DX6_at; Start 68; Stop 92
cgtcaaattcaacggtttggatatc

SEQ ID NO: 174768 - DNA, 25 bp, Artificial
  probe
  misc_feature (1)..(25): SEQ ID NO: 5093; WAN024DX6_at; Start 172; Stop 196
acaacttcccagttatctggcccaa

SEQ ID NO: 174769 - DNA, 25 bp, Artificial
  probe
  misc_feature (1)..(25): SEQ ID NO: 5093; WAN024DX6_at; Start 119; Stop 143
cttttcccgtattatctacacgtcg

SEQ ID NO: 174770 - DNA, 25 bp, Artificial
  probe
  misc_feature (1)..(25): SEQ ID NO: 5093; WAN024DX6_at; Start 12; Stop 36
gcgagctcgaagctcttttagacga

SEQ ID NO: 174771 - DNA, 25 bp, Artificial
  probe
  misc_feature (1)..(25): SEQ ID NO: 5093; WAN024DX6_at; Start 243; Stop 267
taatctcgacatttctgcgtttcct

SEQ ID NO: 174772 - DNA, 25 bp, Artificial
  probe
  misc_feature (1)..(25): SEQ ID NO: 5093; WAN024DX6_at; Start 8; Stop 32
catcgcgagctcgaagctcttttag

SEQ ID NO: 174773 - DNA, 25 bp, Artificial
  probe
  misc_feature (1)..(25): SEQ ID NO: 4281; WAN024DX7_at; Start 60; Stop 84
tcaaaccgacctagccaaactggca

SEQ ID NO: 174774 - DNA, 25 bp, Artificial
  probe
  misc_feature (1)..(25): SEQ ID NO: 4281; WAN024DX7_at; Start 183; Stop 207
cgaatcggtatttcgtttggaggag

SEQ ID NO: 174775 - DNA, 25 bp, Artificial
  probe
  misc_feature (1)..(25): SEQ ID NO: 4281; WAN024DX7_at; Start 170; Stop 194
tcaacgaaacagtcgaatcggtatt

SEQ ID NO: 174776 - DNA, 25 bp, Artificial
  probe
  misc_feature (1)..(25): SEQ ID NO: 4281; WAN024DX7_at; Start 91; Stop 115
tccagacagaccattagcctactag

SEQ ID NO: 174777 - DNA, 25 bp, Artificial
  probe
  misc_feature (1)..(25): SEQ ID NO: 4281; WAN024DX7_at; Start 53; Stop 77
gtctcaatcaaaccgacctagccaa

SEQ ID NO: 174778 - DNA, 25 bp, Artificial
  probe
  misc_feature (1)..(25): SEQ ID NO: 4281; WAN024DX7_at; Start 86; Stop 110
gggtttccagacagaccattagcct

SEQ ID NO: 174779 - DNA, 25 bp, Artificial
  probe
  misc_feature (1)..(25): SEQ ID NO: 4281; WAN024DX7_at; Start 141; Stop 165
tatcattgccctgaaaatatctcaa

SEQ ID NO: 174780 - DNA, 25 bp, Artificial
  probe
  misc_feature (1)..(25): SEQ ID NO: 4281; WAN024DX7_at; Start 113; Stop 137
tagaacgggatgagtacaccccatc

SEQ ID NO: 174781 - DNA, 25 bp, Artificial
  probe
  misc_feature (1)..(25): SEQ ID NO: 4281; WAN024DX7_at; Start 124; Stop 148
gagtacaccccatccattatcattg

SEQ ID NO: 174782 - DNA, 25 bp, Artificial
  probe
  misc_feature (1)..(25): SEQ ID NO: 4281; WAN024DX7_at; Start 174; Stop 198
cgaaacagtcgaatcggtatttcgt

SEQ ID NO: 174783 - DNA, 25 bp, Artificial
  probe
  misc_feature (1)..(25): SEQ ID NO: 4281; WAN024DX7_at; Start 51; Stop 75
tggtctcaatcaaaccgacctagcc

SEQ ID NO: 174784 - DNA, 25 bp, Artificial
  probe
  misc_feature (1)..(25): SEQ ID NO: 4281; WAN024DX7_at; Start 71; Stop 95
tagccaaactggcaggggtttccag

SEQ ID NO: 174785 - DNA, 25 bp, Artificial
  probe
  misc_feature (1)..(25): SEQ ID NO: 4281; WAN024DX7_at; Start 99; Stop 123
gaccattagcctactagaacgggat

SEQ ID NO: 174786 - DNA, 25 bp, Artificial
  probe
  misc_feature (1)..(25): SEQ ID NO: 4281; WAN024DX7_at; Start 58; Stop 82
aatcaaaccgacctagccaaactgg

SEQ ID NO: 174787 - DNA, 25 bp, Artificial
  probe
  misc_feature (1)..(25): SEQ ID NO: 4281; WAN024DX7_at; Start 115; Stop 139
gaacgggatgagtacaccccatcca

SEQ ID NO: 174788 - DNA, 25 bp, Artificial
  probe
  misc_feature (1)..(25): SEQ ID NO: 4281; WAN024DX7_at; Start 165; Stop 189
aattttcaacgaaacagtcgaatcg

SEQ ID NO: 174789 - DNA, 25 bp, Artificial
  probe
  misc_feature (1)..(25): SEQ ID NO: 4281; WAN024DX7_at; Start 45; Stop 69
tcgcgatggtctcaatcaaaccgac

SEQ ID NO: 174790 - DNA, 25 bp, Artificial
  probe
  misc_feature (1)..(25): SEQ ID NO: 4281; WAN024DX7_at; Start 63; Stop 87
aaccgacctagccaaactggcaggg

SEQ ID NO: 174791 - DNA, 25 bp, Artificial
  probe
  misc_feature (1)..(25): SEQ ID NO: 4281; WAN024DX7_at; Start 168; Stop 192
tttcaacgaaacagtcgaatcggta

SEQ ID NO: 174792 - DNA, 25 bp, Artificial
  probe
  misc_feature (1)..(25): SEQ ID NO: 4281; WAN024DX7_at; Start 144; Stop 168
cattgccctgaaaatatctcaaatt

SEQ ID NO: 174793 - DNA, 25 bp, Artificial
  probe
  misc_feature (1)..(25): SEQ ID NO: 4281; WAN024DX7_at; Start 95; Stop 119
gacagaccattagcctactagaacg

SEQ ID NO: 174794 - DNA, 25 bp, Artificial
  probe
  misc_feature (1)..(25): SEQ ID NO: 4281; WAN024DX7_at; Start 49; Stop 73
gatggtctcaatcaaaccgacctag

SEQ ID NO: 174795 - DNA, 25 bp, Artificial
  probe
  misc_feature (1)..(25): SEQ ID NO: 4281; WAN024DX7_at; Start 43; Stop 67
gctcgcgatggtctcaatcaaaccg

SEQ ID NO: 174796 - DNA, 25 bp, Artificial
  probe
  misc_feature (1)..(25): SEQ ID NO: 4281; WAN024DX7_at; Start 110; Stop 134
tactagaacgggatgagtacacccc

SEQ ID NO: 174797 - DNA, 25 bp, Artificial
  probe
  misc_feature (1)..(25): SEQ ID NO: 4281; WAN024DX7_at; Start 160; Stop 184
tctcaaattttcaacgaaacagtcg

SEQ ID NO: 174798 - DNA, 25 bp, Artificial
  probe
  misc_feature (1)..(25): SEQ ID NO: 4281; WAN024DX7_at; Start 179; Stop 203
cagtcgaatcggtatttcgtttgga

SEQ ID NO: 174799 - DNA, 25 bp, Artificial
  probe
  misc_feature (1)..(25): SEQ ID NO: 4281; WAN024DX7_at; Start 133; Stop 157
ccatccattatcattgccctgaaaa

SEQ ID NO: 174800 - DNA, 25 bp, Artificial
  probe
  misc_feature (1)..(25): SEQ ID NO: 4281; WAN024DX7_at; Start 101; Stop 125
ccattagcctactagaacgggatga

SEQ ID NO: 174801 - DNA, 25 bp, Artificial
  probe
  misc_feature (1)..(25): SEQ ID NO: 4281; WAN024DX7_at; Start 119; Stop 143
gggatgagtacaccccatccattat

SEQ ID NO: 174802 - DNA, 25 bp, Artificial
  probe
  misc_feature (1)..(25): SEQ ID NO: 4281; WAN024DX7_at; Start 97; Stop 121
cagaccattagcctactagaacggg

SEQ ID NO: 174803 - DNA, 25 bp, Artificial
  probe
  misc_feature (1)..(25): SEQ ID NO: 4281; WAN024DX7_at; Start 41; Stop 65
gagctcgcgatggtctcaatcaaac

SEQ ID NO: 174804 - DNA, 25 bp, Artificial
  probe
  misc_feature (1)..(25): SEQ ID NO: 4281; WAN024DX7_at; Start 102; Stop 126
cattagcctactagaacgggatgag

SEQ ID NO: 174805 - DNA, 25 bp, Artificial
  probe
  misc_feature (1)..(25): SEQ ID NO: 4281; WAN024DX7_at; Start 88; Stop 112
gtttccagacagaccattagcctac

SEQ ID NO: 174806 - DNA, 25 bp, Artificial
  probe
  misc_feature (1)..(25): SEQ ID NO: 4281; WAN024DX7_at; Start 105; Stop 129
tagcctactagaacgggatgagtac

SEQ ID NO: 174807 - DNA, 25 bp, Artificial
  probe
  misc_feature (1)..(25): SEQ ID NO: 1701; WAN024DX8_at; Start 259; Stop 283
aaaggaaacgcagaaatgtcgagat

SEQ ID NO: 174808 - DNA, 25 bp, Artificial
  probe
  misc_feature (1)..(25): SEQ ID NO: 1701; WAN024DX8_at; Start 254; Stop 278
aagagaaaggaaacgcagaaatgtc

SEQ ID NO: 174809 - DNA, 25 bp, Artificial
  probe
  misc_feature (1)..(25): SEQ ID NO: 1701; WAN024DX8_at; Start 332; Stop 356
ttgggccagataactgggaagttgt

SEQ ID NO: 174810 - DNA, 25 bp, Artificial
  probe
  misc_feature (1)..(25): SEQ ID NO: 1701; WAN024DX8_at; Start 438; Stop 462
tatccaaaccgttgaatttgacgga

SEQ ID NO: 174811 - DNA, 25 bp, Artificial
  probe
  misc_feature (1)..(25): SEQ ID NO: 1701; WAN024DX8_at; Start 246; Stop 270
tgagcgaaaagagaaaggaaacgca

SEQ ID NO: 174812 - DNA, 25 bp, Artificial
  probe
  misc_feature (1)..(25): SEQ ID NO: 1701; WAN024DX8_at; Start 252; Stop 276
aaaagagaaaggaaacgcagaaatg

SEQ ID NO: 174813 - DNA, 25 bp, Artificial
  probe
  misc_feature (1)..(25): SEQ ID NO: 1701; WAN024DX8_at; Start 255; Stop 279
agagaaaggaaacgcagaaatgtcg

SEQ ID NO: 174814 - DNA, 25 bp, Artificial
  probe
  misc_feature (1)..(25): SEQ ID NO: 1701; WAN024DX8_at; Start 326; Stop 350
tgtatattgggccagataactggga

SEQ ID NO: 174815 - DNA, 25 bp, Artificial
  probe
  misc_feature (1)..(25): SEQ ID NO: 1701; WAN024DX8_at; Start 314; Stop 338
ttataacgggagtgtatattgggcc

SEQ ID NO: 174816 - DNA, 25 bp, Artificial
  probe
  misc_feature (1)..(25): SEQ ID NO: 1701; WAN024DX8_at; Start 247; Stop 271
gagcgaaaagagaaaggaaacgcag

SEQ ID NO: 174817 - DNA, 25 bp, Artificial
  probe
  misc_feature (1)..(25): SEQ ID NO: 1701; WAN024DX8_at; Start 337; Stop 361
ccagataactgggaagttgtggatg

SEQ ID NO: 174818 - DNA, 25 bp, Artificial
  probe
  misc_feature (1)..(25): SEQ ID NO: 1701; WAN024DX8_at; Start 245; Stop 269
ttgagcgaaaagagaaaggaaacgc

SEQ ID NO: 174819 - DNA, 25 bp, Artificial
  probe
  misc_feature (1)..(25): SEQ ID NO: 1701; WAN024DX8_at; Start 441; Stop 465
ccaaaccgttgaatttgacggagag

SEQ ID NO: 174820 - DNA, 25 bp, Artificial
  probe
  misc_feature (1)..(25): SEQ ID NO: 1701; WAN024DX8_at; Start 258; Stop 282
gaaaggaaacgcagaaatgtcgaga

SEQ ID NO: 174821 - DNA, 25 bp, Artificial
  probe
  misc_feature (1)..(25): SEQ ID NO: 1701; WAN024DX8_at; Start 263; Stop 287
gaaacgcagaaatgtcgagattatt

SEQ ID NO: 174822 - DNA, 25 bp, Artificial
  probe
  misc_feature (1)..(25): SEQ ID NO: 1701; WAN024DX8_at; Start 436; Stop 460
gatatccaaaccgttgaatttgacg

SEQ ID NO: 174823 - DNA, 25 bp, Artificial
  probe
  misc_feature (1)..(25): SEQ ID NO: 1701; WAN024DX8_at; Start 353; Stop 377
ttgtggatgttgatgaggaatgggt

SEQ ID NO: 174824 - DNA, 25 bp, Artificial
  probe
  misc_feature (1)..(25): SEQ ID NO: 1701; WAN024DX8_at; Start 440; Stop 464
tccaaaccgttgaatttgacggaga

SEQ ID NO: 174825 - DNA, 25 bp, Artificial
  probe
  misc_feature (1)..(25): SEQ ID NO: 1701; WAN024DX8_at; Start 320; Stop 344
cgggagtgtatattgggccagataa

SEQ ID NO: 174826 - DNA, 25 bp, Artificial
  probe
  misc_feature (1)..(25): SEQ ID NO: 1701; WAN024DX8_at; Start 338; Stop 362
cagataactgggaagttgtggatgt

SEQ ID NO: 174827 - DNA, 25 bp, Artificial
  probe
  misc_feature (1)..(25): SEQ ID NO: 1701; WAN024DX8_at; Start 330; Stop 354
tattgggccagataactgggaagtt

SEQ ID NO: 174828 - DNA, 25 bp, Artificial
  probe
  misc_feature (1)..(25): SEQ ID NO: 1701; WAN024DX8_at; Start 244; Stop 268
cttgagcgaaaagagaaaggaaacg

SEQ ID NO: 174829 - DNA, 25 bp, Artificial
  probe
  misc_feature (1)..(25): SEQ ID NO: 1701; WAN024DX8_at; Start 442; Stop 466
caaaccgttgaatttgacggagagt

SEQ ID NO: 174830 - DNA, 25 bp, Artificial
  probe
  misc_feature (1)..(25): SEQ ID NO: 1701; WAN024DX8_at; Start 328; Stop 352
tatattgggccagataactgggaag

SEQ ID NO: 174831 - DNA, 25 bp, Artificial
  probe
  misc_feature (1)..(25): SEQ ID NO: 1701; WAN024DX8_at; Start 318; Stop 342
aacgggagtgtatattgggccagat

SEQ ID NO: 174832 - DNA, 25 bp, Artificial
  probe
  misc_feature (1)..(25): SEQ ID NO: 1701; WAN024DX8_at; Start 322; Stop 346
ggagtgtatattgggccagataact

SEQ ID NO: 174833 - DNA, 25 bp, Artificial
  probe
  misc_feature (1)..(25): SEQ ID NO: 1701; WAN024DX8_at; Start 261; Stop 285
aggaaacgcagaaatgtcgagatta

SEQ ID NO: 174834 - DNA, 25 bp, Artificial
  probe
  misc_feature (1)..(25): SEQ ID NO: 1701; WAN024DX8_at; Start 249; Stop 273
gcgaaaagagaaaggaaacgcagaa

SEQ ID NO: 174835 - DNA, 25 bp, Artificial
  probe
  misc_feature (1)..(25): SEQ ID NO: 1701; WAN024DX8_at; Start 319; Stop 343
acgggagtgtatattgggccagata

SEQ ID NO: 174836 - DNA, 25 bp, Artificial
  probe
  misc_feature (1)..(25): SEQ ID NO: 1701; WAN024DX8_at; Start 317; Stop 341
taacgggagtgtatattgggccaga

SEQ ID NO: 174837 - DNA, 25 bp, Artificial
  probe
  misc_feature (1)..(25): SEQ ID NO: 1701; WAN024DX8_at; Start 215; Stop 239
tcaagaaactagagaataaaatcaa

SEQ ID NO: 174838 - DNA, 25 bp, Artificial
  probe
  misc_feature (1)..(25): SEQ ID NO: 1701; WAN024DX8_at; Start 316; Stop 340
ataacgggagtgtatattgggccag

SEQ ID NO: 174839 - DNA, 25 bp, Artificial
  probe
  misc_feature (1)..(25): SEQ ID NO: 1701; WAN024DX8_at; Start 315; Stop 339
tataacgggagtgtatattgggcca

SEQ ID NO: 174840 - DNA, 25 bp, Artificial
  probe
  misc_feature (1)..(25): SEQ ID NO: 1701; WAN024DX8_at; Start 342; Stop 366
taactgggaagttgtggatgttgat

SEQ ID NO: 174841 - DNA, 25 bp, Artificial
  probe
  misc_feature (1)..(25): SEQ ID NO: 7405; WAN024DX9_at; Start 203; Stop 227
ttcacttgctagatttttggatttc

SEQ ID NO: 174842 - DNA, 25 bp, Artificial
  probe
  misc_feature (1)..(25): SEQ ID NO: 7405; WAN024DX9_at; Start 58; Stop 82
ggcatcaaggcttttacatctaaaa

SEQ ID NO: 174843 - DNA, 25 bp, Artificial
  probe
  misc_feature (1)..(25): SEQ ID NO: 7405; WAN024DX9_at; Start 191; Stop 215
tcattctcctttttcacttgctaga

SEQ ID NO: 174844 - DNA, 25 bp, Artificial
  probe
  misc_feature (1)..(25): SEQ ID NO: 7405; WAN024DX9_at; Start 165; Stop 189
taacaatctacgtttctttttcata

SEQ ID NO: 174845 - DNA, 25 bp, Artificial
  probe
  misc_feature (1)..(25): SEQ ID NO: 7405; WAN024DX9_at; Start 40; Stop 64
caaatagctgatatccatggcatca

SEQ ID NO: 174846 - DNA, 25 bp, Artificial
  probe
  misc_feature (1)..(25): SEQ ID NO: 7405; WAN024DX9_at; Start 96; Stop 120
ttcgacacgtgccttaaacatccct

SEQ ID NO: 174847 - DNA, 25 bp, Artificial
  probe
  misc_feature (1)..(25): SEQ ID NO: 7405; WAN024DX9_at; Start 72; Stop 96
tacatctaaaataatttcgtgggat

SEQ ID NO: 174848 - DNA, 25 bp, Artificial
  probe
  misc_feature (1)..(25): SEQ ID NO: 7405; WAN024DX9_at; Start 49; Stop 73
gatatccatggcatcaaggctttta

SEQ ID NO: 174849 - DNA, 25 bp, Artificial
  probe
  misc_feature (1)..(25): SEQ ID NO: 7405; WAN024DX9_at; Start 113; Stop 137
acatccctacaaacatgcccaagaa

SEQ ID NO: 174850 - DNA, 25 bp, Artificial
  probe
  misc_feature (1)..(25): SEQ ID NO: 7405; WAN024DX9_at; Start 80; Stop 104
aaataatttcgtgggattcgacacg

SEQ ID NO: 174851 - DNA, 25 bp, Artificial
  probe
  misc_feature (1)..(25): SEQ ID NO: 7405; WAN024DX9_at; Start 54; Stop 78
ccatggcatcaaggcttttacatct

SEQ ID NO: 174852 - DNA, 25 bp, Artificial
  probe
  misc_feature (1)..(25): SEQ ID NO: 7405; WAN024DX9_at; Start 103; Stop 127
cgtgccttaaacatccctacaaaca

SEQ ID NO: 174853 - DNA, 25 bp, Artificial
  probe
  misc_feature (1)..(25): SEQ ID NO: 7405; WAN024DX9_at; Start 89; Stop 113
cgtgggattcgacacgtgccttaaa

SEQ ID NO: 174854 - DNA, 25 bp, Artificial
  probe
  misc_feature (1)..(25): SEQ ID NO: 7405; WAN024DX9_at; Start 46; Stop 70
gctgatatccatggcatcaaggctt

SEQ ID NO: 174855 - DNA, 25 bp, Artificial
  probe
  misc_feature (1)..(25): SEQ ID NO: 7405; WAN024DX9_at; Start 94; Stop 118
gattcgacacgtgccttaaacatcc

SEQ ID NO: 174856 - DNA, 25 bp, Artificial
  probe
  misc_feature (1)..(25): SEQ ID NO: 7405; WAN024DX9_at; Start 11; Stop 35
aaaacatactaatgaaacctatcag

SEQ ID NO: 174857 - DNA, 25 bp, Artificial
  probe
  misc_feature (1)..(25): SEQ ID NO: 7405; WAN024DX9_at; Start 51; Stop 75
tatccatggcatcaaggcttttaca

SEQ ID NO: 174858 - DNA, 25 bp, Artificial
  probe
  misc_feature (1)..(25): SEQ ID NO: 7405; WAN024DX9_at; Start 44; Stop 68
tagctgatatccatggcatcaaggc

SEQ ID NO: 174859 - DNA, 25 bp, Artificial
  probe
  misc_feature (1)..(25): SEQ ID NO: 7405; WAN024DX9_at; Start 99; Stop 123
gacacgtgccttaaacatccctaca

SEQ ID NO: 174860 - DNA, 25 bp, Artificial
  probe
  misc_feature (1)..(25): SEQ ID NO: 7405; WAN024DX9_at; Start 175; Stop 199
cgtttctttttcatattcattctcc

SEQ ID NO: 174861 - DNA, 25 bp, Artificial
  probe
  misc_feature (1)..(25): SEQ ID NO: 7405; WAN024DX9_at; Start 1; Stop 25
ttgaaagtcaaaaacatactaatga

SEQ ID NO: 174862 - DNA, 25 bp, Artificial
  probe
  misc_feature (1)..(25): SEQ ID NO: 7405; WAN024DX9_at; Start 154; Stop 178
gacatcaaaaataacaatctacgtt

SEQ ID NO: 174863 - DNA, 25 bp, Artificial
  probe
  misc_feature (1)..(25): SEQ ID NO: 7405; WAN024DX9_at; Start 231; Stop 255
tcaatccattcaattactgggatga

SEQ ID NO: 174864 - DNA, 25 bp, Artificial
  probe
  misc_feature (1)..(25): SEQ ID NO: 7405; WAN024DX9_at; Start 23; Stop 47
tgaaacctatcagtaaacaaatagc

SEQ ID NO: 174865 - DNA, 25 bp, Artificial
  probe
  misc_feature (1)..(25): SEQ ID NO: 7405; WAN024DX9_at; Start 210; Stop 234
gctagatttttggatttcttttcaa

SEQ ID NO: 174866 - DNA, 25 bp, Artificial
  probe
  misc_feature (1)..(25): SEQ ID NO: 7405; WAN024DX9_at; Start 141; Stop 165
ccccaagacaatagacatcaaaaat

SEQ ID NO: 174867 - DNA, 25 bp, Artificial
  probe
  misc_feature (1)..(25): SEQ ID NO: 7405; WAN024DX9_at; Start 110; Stop 134
taaacatccctacaaacatgcccaa

SEQ ID NO: 174868 - DNA, 25 bp, Artificial
  probe
  misc_feature (1)..(25): SEQ ID NO: 7405; WAN024DX9_at; Start 198; Stop 222
cctttttcacttgctagatttttgg

SEQ ID NO: 174869 - DNA, 25 bp, Artificial
  probe
  misc_feature (1)..(25): SEQ ID NO: 7405; WAN024DX9_at; Start 86; Stop 110
tttcgtgggattcgacacgtgcctt

SEQ ID NO: 174870 - DNA, 25 bp, Artificial
  probe
  misc_feature (1)..(25): SEQ ID NO: 7405; WAN024DX9_at; Start 36; Stop 60
taaacaaatagctgatatccatggc

SEQ ID NO: 174871 - DNA, 25 bp, Artificial
  probe
  misc_feature (1)..(25): SEQ ID NO: 7405; WAN024DX9_at; Start 227; Stop 251
cttttcaatccattcaattactggg

SEQ ID NO: 174872 - DNA, 25 bp, Artificial
  probe
  misc_feature (1)..(25): SEQ ID NO: 7405; WAN024DX9_at; Start 92; Stop 116
gggattcgacacgtgccttaaacat

SEQ ID NO: 174873 - DNA, 25 bp, Artificial
  probe
  misc_feature (1)..(25): SEQ ID NO: 7405; WAN024DX9_at; Start 134; Stop 158
agaacccccccaagacaatagacat

SEQ ID NO: 174874 - DNA, 25 bp, Artificial
  probe
  misc_feature (1)..(25): SEQ ID NO: 7405; WAN024DX9_at; Start 83; Stop 107
taatttcgtgggattcgacacgtgc

SEQ ID NO: 174875 - DNA, 25 bp, Artificial
  probe
  misc_feature (1)..(25): SEQ ID NO: 4009; WAN024DXA_at; Start 61; Stop 85
tttctactgattgggatggacctaa

SEQ ID NO: 174876 - DNA, 25 bp, Artificial
  probe
  misc_feature (1)..(25): SEQ ID NO: 4009; WAN024DXA_at; Start 118; Stop 142
gtttgggtctactttgctctcatcc

SEQ ID NO: 174877 - DNA, 25 bp, Artificial
  probe
  misc_feature (1)..(25): SEQ ID NO: 4009; WAN024DXA_at; Start 106; Stop 130
agcgaccaatttgtttgggtctact

SEQ ID NO: 174878 - DNA, 25 bp, Artificial
  probe
  misc_feature (1)..(25): SEQ ID NO: 4009; WAN024DXA_at; Start 63; Stop 87
tctactgattgggatggacctaagc

SEQ ID NO: 174879 - DNA, 25 bp, Artificial
  probe
  misc_feature (1)..(25): SEQ ID NO: 4009; WAN024DXA_at; Start 32; Stop 56
tagtggtcatagctttattagtcag

SEQ ID NO: 174880 - DNA, 25 bp, Artificial
  probe
  misc_feature (1)..(25): SEQ ID NO: 4009; WAN024DXA_at; Start 60; Stop 84
atttctactgattgggatggaccta

SEQ ID NO: 174881 - DNA, 25 bp, Artificial
  probe
  misc_feature (1)..(25): SEQ ID NO: 4009; WAN024DXA_at; Start 59; Stop 83
tatttctactgattgggatggacct

SEQ ID NO: 174882 - DNA, 25 bp, Artificial
  probe
  misc_feature (1)..(25): SEQ ID NO: 4009; WAN024DXA_at; Start 103; Stop 127
caaagcgaccaatttgtttgggtct

SEQ ID NO: 174883 - DNA, 25 bp, Artificial
  probe
  misc_feature (1)..(25): SEQ ID NO: 4009; WAN024DXA_at; Start 1; Stop 25
gtgatgaacaagtataaagtgattt

SEQ ID NO: 174884 - DNA, 25 bp, Artificial
  probe
  misc_feature (1)..(25): SEQ ID NO: 4009; WAN024DXA_at; Start 58; Stop 82
gtatttctactgattgggatggacc

SEQ ID NO: 174885 - DNA, 25 bp, Artificial
  probe
  misc_feature (1)..(25): SEQ ID NO: 4009; WAN024DXA_at; Start 100; Stop 124
tatcaaagcgaccaatttgtttggg

SEQ ID NO: 174886 - DNA, 25 bp, Artificial
  probe
  misc_feature (1)..(25): SEQ ID NO: 4009; WAN024DXA_at; Start 64; Stop 88
ctactgattgggatggacctaagct

SEQ ID NO: 174887 - DNA, 25 bp, Artificial
  probe
  misc_feature (1)..(25): SEQ ID NO: 4009; WAN024DXA_at; Start 112; Stop 136
caatttgtttgggtctactttgctc

SEQ ID NO: 174888 - DNA, 25 bp, Artificial
  probe
  misc_feature (1)..(25): SEQ ID NO: 4009; WAN024DXA_at; Start 174; Stop 198
aaatctagcaagtgaaaaaggagaa

SEQ ID NO: 174889 - DNA, 25 bp, Artificial
  probe
  misc_feature (1)..(25): SEQ ID NO: 4009; WAN024DXA_at; Start 122; Stop 146
gggtctactttgctctcatcccagt

SEQ ID NO: 174890 - DNA, 25 bp, Artificial
  probe
  misc_feature (1)..(25): SEQ ID NO: 4009; WAN024DXA_at; Start 117; Stop 141
tgtttgggtctactttgctctcatc

SEQ ID NO: 174891 - DNA, 25 bp, Artificial
  probe
  misc_feature (1)..(25): SEQ ID NO: 4009; WAN024DXA_at; Start 169; Stop 193
tccaaaaatctagcaagtgaaaaag

SEQ ID NO: 174892 - DNA, 25 bp, Artificial
  probe
  misc_feature (1)..(25): SEQ ID NO: 4009; WAN024DXA_at; Start 73; Stop 97
gggatggacctaagctggtttaatc

SEQ ID NO: 174893 - DNA, 25 bp, Artificial
  probe
  misc_feature (1)..(25): SEQ ID NO: 4009; WAN024DXA_at; Start 160; Stop 184
gaaaagaaatccaaaaatctagcaa

SEQ ID NO: 174894 - DNA, 25 bp, Artificial
  probe
  misc_feature (1)..(25): SEQ ID NO: 4009; WAN024DXA_at; Start 15; Stop 39
taaagtgatttattatgtagtggtc

SEQ ID NO: 174895 - DNA, 25 bp, Artificial
  probe
  misc_feature (1)..(25): SEQ ID NO: 4009; WAN024DXA_at; Start 65; Stop 89
tactgattgggatggacctaagctg

SEQ ID NO: 174896 - DNA, 25 bp, Artificial
  probe
  misc_feature (1)..(25): SEQ ID NO: 4009; WAN024DXA_at; Start 115; Stop 139
tttgtttgggtctactttgctctca

SEQ ID NO: 174897 - DNA, 25 bp, Artificial
  probe
  misc_feature (1)..(25): SEQ ID NO: 4009; WAN024DXA_at; Start 21; Stop 45
gatttattatgtagtggtcatagct

SEQ ID NO: 174898 - DNA, 25 bp, Artificial
  probe
  misc_feature (1)..(25): SEQ ID NO: 4009; WAN024DXA_at; Start 70; Stop 94
attgggatggacctaagctggttta

SEQ ID NO: 174899 - DNA, 25 bp, Artificial
  probe
  misc_feature (1)..(25): SEQ ID NO: 4009; WAN024DXA_at; Start 102; Stop 126
tcaaagcgaccaatttgtttgggtc

SEQ ID NO: 174900 - DNA, 25 bp, Artificial
  probe
  misc_feature (1)..(25): SEQ ID NO: 4009; WAN024DXA_at; Start 67; Stop 91
ctgattgggatggacctaagctggt

SEQ ID NO: 174901 - DNA, 25 bp, Artificial
  probe
  misc_feature (1)..(25): SEQ ID NO: 4009; WAN024DXA_at; Start 66; Stop 90
actgattgggatggacctaagctgg

SEQ ID NO: 174902 - DNA, 25 bp, Artificial
  probe
  misc_feature (1)..(25): SEQ ID NO: 4009; WAN024DXA_at; Start 72; Stop 96
tgggatggacctaagctggtttaat

SEQ ID NO: 174903 - DNA, 25 bp, Artificial
  probe
  misc_feature (1)..(25): SEQ ID NO: 4009; WAN024DXA_at; Start 163; Stop 187
aagaaatccaaaaatctagcaagtg

SEQ ID NO: 174904 - DNA, 25 bp, Artificial
  probe
  misc_feature (1)..(25): SEQ ID NO: 4009; WAN024DXA_at; Start 30; Stop 54
tgtagtggtcatagctttattagtc

SEQ ID NO: 174905 - DNA, 25 bp, Artificial
  probe
  misc_feature (1)..(25): SEQ ID NO: 4009; WAN024DXA_at; Start 68; Stop 92
tgattgggatggacctaagctggtt

SEQ ID NO: 174906 - DNA, 25 bp, Artificial
  probe
  misc_feature (1)..(25): SEQ ID NO: 4009; WAN024DXA_at; Start 165; Stop 189
gaaatccaaaaatctagcaagtgaa

SEQ ID NO: 174907 - DNA, 25 bp, Artificial
  probe
  misc_feature (1)..(25): SEQ ID NO: 4009; WAN024DXA_at; Start 171; Stop 195
caaaaatctagcaagtgaaaaagga

SEQ ID NO: 174908 - DNA, 25 bp, Artificial
  probe
  misc_feature (1)..(25): SEQ ID NO: 4009; WAN024DXA_at; Start 158; Stop 182
ttgaaaagaaatccaaaaatctagc

SEQ ID NO: 174909 - DNA, 25 bp, Artificial
  probe
  misc_feature (1)..(25): SEQ ID NO: 1214; WAN024DXB_at; Start 567; Stop 591
tcgaattttattccaattacaccaa

SEQ ID NO: 174910 - DNA, 25 bp, Artificial
  probe
  misc_feature (1)..(25): SEQ ID NO: 1214; WAN024DXB_at; Start 56; Stop 80
tcttgggcatgtttgtagggatgtt

SEQ ID NO: 174911 - DNA, 25 bp, Artificial
  probe
  misc_feature (1)..(25): SEQ ID NO: 1214; WAN024DXB_at; Start 584; Stop 608
tacaccaatatgtcttaccagcctt

SEQ ID NO: 174912 - DNA, 25 bp, Artificial
  probe
  misc_feature (1)..(25): SEQ ID NO: 1214; WAN024DXB_at; Start 92; Stop 116
tcgaatcccacgaaattattttaga

SEQ ID NO: 174913 - DNA, 25 bp, Artificial
  probe
  misc_feature (1)..(25): SEQ ID NO: 1214; WAN024DXB_at; Start 363; Stop 387
gattatattgcatacaaaccctcaa

SEQ ID NO: 174914 - DNA, 25 bp, Artificial
  probe
  misc_feature (1)..(25): SEQ ID NO: 1214; WAN024DXB_at; Start 447; Stop 471
taaaaccattgcgattgttcgtcag

SEQ ID NO: 174915 - DNA, 25 bp, Artificial
  probe
  misc_feature (1)..(25): SEQ ID NO: 1214; WAN024DXB_at; Start 458; Stop 482
cgattgttcgtcagtttgatttgga

SEQ ID NO: 174916 - DNA, 25 bp, Artificial
  probe
  misc_feature (1)..(25): SEQ ID NO: 1214; WAN024DXB_at; Start 110; Stop 134
ttttagatgtaaaagccttgatgcc

SEQ ID NO: 174917 - DNA, 25 bp, Artificial
  probe
  misc_feature (1)..(25): SEQ ID NO: 1214; WAN024DXB_at; Start 624; Stop 648
tatcatttctttcttgacaggagag

SEQ ID NO: 174918 - DNA, 25 bp, Artificial
  probe
  misc_feature (1)..(25): SEQ ID NO: 1214; WAN024DXB_at; Start 350; Stop 374
cattaagtgaggtgattatattgca

SEQ ID NO: 174919 - DNA, 25 bp, Artificial
  probe
  misc_feature (1)..(25): SEQ ID NO: 1214; WAN024DXB_at; Start 260; Stop 284
cctattatgtgcaaatgtatcggaa

SEQ ID NO: 174920 - DNA, 25 bp, Artificial
  probe
  misc_feature (1)..(25): SEQ ID NO: 1214; WAN024DXB_at; Start 81; Stop 105
taaggcacgtgtcgaatcccacgaa

SEQ ID NO: 174921 - DNA, 25 bp, Artificial
  probe
  misc_feature (1)..(25): SEQ ID NO: 1214; WAN024DXB_at; Start 71; Stop 95
tagggatgtttaaggcacgtgtcga

SEQ ID NO: 174922 - DNA, 25 bp, Artificial
  probe
  misc_feature (1)..(25): SEQ ID NO: 1214; WAN024DXB_at; Start 194; Stop 218
tcttaaagaaaagcagaaaatttca

SEQ ID NO: 174923 - DNA, 25 bp, Artificial
  probe
  misc_feature (1)..(25): SEQ ID NO: 1214; WAN024DXB_at; Start 407; Stop 431
tactctttgtggtattcttagtcgc

SEQ ID NO: 174924 - DNA, 25 bp, Artificial
  probe
  misc_feature (1)..(25): SEQ ID NO: 1214; WAN024DXB_at; Start 665; Stop 689
tcttgcttgtaggagccatccatgt

SEQ ID NO: 174925 - DNA, 25 bp, Artificial
  probe
  misc_feature (1)..(25): SEQ ID NO: 1214; WAN024DXB_at; Start 315; Stop 339
tacaggtgtagcgattccattggct

SEQ ID NO: 174926 - DNA, 25 bp, Artificial
  probe
  misc_feature (1)..(25): SEQ ID NO: 1214; WAN024DXB_at; Start 656; Stop 680
tactagctttcttgcttgtaggagc

SEQ ID NO: 174927 - DNA, 25 bp, Artificial
  probe
  misc_feature (1)..(25): SEQ ID NO: 1214; WAN024DXB_at; Start 277; Stop 301
tatcggaatcttgagtttggaacca

SEQ ID NO: 174928 - DNA, 25 bp, Artificial
  probe
  misc_feature (1)..(25): SEQ ID NO: 1214; WAN024DXB_at; Start 296; Stop 320
gaaccattgcttttaatattacagg

SEQ ID NO: 174929 - DNA, 25 bp, Artificial
  probe
  misc_feature (1)..(25): SEQ ID NO: 1214; WAN024DXB_at; Start 490; Stop 514
gctacaccaaaggatgtcttgaact

SEQ ID NO: 174930 - DNA, 25 bp, Artificial
  probe
  misc_feature (1)..(25): SEQ ID NO: 1214; WAN024DXB_at; Start 538; Stop 562
gagcgtcaggctaatttggaacaga

SEQ ID NO: 174931 - DNA, 25 bp, Artificial
  probe
  misc_feature (1)..(25): SEQ ID NO: 1214; WAN024DXB_at; Start 119; Stop 143
taaaagccttgatgccatggatatc

SEQ ID NO: 174932 - DNA, 25 bp, Artificial
  probe
  misc_feature (1)..(25): SEQ ID NO: 1214; WAN024DXB_at; Start 695; Stop 719
tcaatgtgatgcagttacctatggt

SEQ ID NO: 174933 - DNA, 25 bp, Artificial
  probe
  misc_feature (1)..(25): SEQ ID NO: 1214; WAN024DXB_at; Start 704; Stop 728
tgcagttacctatggtaaaacgtta

SEQ ID NO: 174934 - DNA, 25 bp, Artificial
  probe
  misc_feature (1)..(25): SEQ ID NO: 1214; WAN024DXB_at; Start 226; Stop 250
tatcaagaggaaatggatgacgatc

SEQ ID NO: 174935 - DNA, 25 bp, Artificial
  probe
  misc_feature (1)..(25): SEQ ID NO: 1214; WAN024DXB_at; Start 547; Stop 571
gctaatttggaacagagttttcgaa

SEQ ID NO: 174936 - DNA, 25 bp, Artificial
  probe
  misc_feature (1)..(25): SEQ ID NO: 1214; WAN024DXB_at; Start 475; Stop 499
gatttggaatttttcgctacaccaa

SEQ ID NO: 174937 - DNA, 25 bp, Artificial
  probe
  misc_feature (1)..(25): SEQ ID NO: 1214; WAN024DXB_at; Start 676; Stop 700
ggagccatccatgtttatatcaatg

SEQ ID NO: 174938 - DNA, 25 bp, Artificial
  probe
  misc_feature (1)..(25): SEQ ID NO: 1214; WAN024DXB_at; Start 240; Stop 264
ggatgacgatctgaatgaaacctat

SEQ ID NO: 174939 - DNA, 25 bp, Artificial
  probe
  misc_feature (1)..(25): SEQ ID NO: 1214; WAN024DXB_at; Start 133; Stop 157
ccatggatatcagctatttgtttac

SEQ ID NO: 174940 - DNA, 25 bp, Artificial
  probe
  misc_feature (1)..(25): SEQ ID NO: 1214; WAN024DXB_at; Start 422; Stop 446
tcttagtcgctcaaaaatctctttt

SEQ ID NO: 174941 - DNA, 25 bp, Artificial
  probe
  misc_feature (1)..(25): SEQ ID NO: 1214; WAN024DXB_at; Start 639; Stop 663
gacaggagagattcagttactagct

SEQ ID NO: 174942 - DNA, 25 bp, Artificial
  probe
  misc_feature (1)..(25): SEQ ID NO: 1214; WAN024DXB_at; Start 3; Stop 27
gaatatgaaaaagaaacgtagattg

SEQ ID NO: 174943 - DNA, 25 bp, Artificial
  probe
  misc_feature (1)..(25): SEQ ID NO: 974; WAN024DXC_at; Start 623; Stop 647
tgatgattctcatgctataactaat

SEQ ID NO: 174944 - DNA, 25 bp, Artificial
  probe
  misc_feature (1)..(25): SEQ ID NO: 974; WAN024DXC_at; Start 496; Stop 520
ccaggtgatgtgcaacaattttttg

SEQ ID NO: 174945 - DNA, 25 bp, Artificial
  probe
  misc_feature (1)..(25): SEQ ID NO: 974; WAN024DXC_at; Start 76; Stop 100
gggctcgcgactgcgtcgcttgctt

SEQ ID NO: 174946 - DNA, 25 bp, Artificial
  probe
  misc_feature (1)..(25): SEQ ID NO: 974; WAN024DXC_at; Start 575; Stop 599
tggtctacagtatttctcttcacgc

SEQ ID NO: 174947 - DNA, 25 bp, Artificial
  probe
  misc_feature (1)..(25): SEQ ID NO: 974; WAN024DXC_at; Start 462; Stop 486
ggtatctagtcttctatttgccttg

SEQ ID NO: 174948 - DNA, 25 bp, Artificial
  probe
  misc_feature (1)..(25): SEQ ID NO: 974; WAN024DXC_at; Start 13; Stop 37
aaaaaccttggctggattcttctag

SEQ ID NO: 174949 - DNA, 25 bp, Artificial
  probe
  misc_feature (1)..(25): SEQ ID NO: 974; WAN024DXC_at; Start 610; Stop 634
ttagtcggctttttgatgattctca

SEQ ID NO: 174950 - DNA, 25 bp, Artificial
  probe
  misc_feature (1)..(25): SEQ ID NO: 974; WAN024DXC_at; Start 303; Stop 327
gcaaatagcgacagacttgaccttg

SEQ ID NO: 174951 - DNA, 25 bp, Artificial
  probe
  misc_feature (1)..(25): SEQ ID NO: 974; WAN024DXC_at; Start 275; Stop 299
tcttgccagatgatccttcagtaaa

SEQ ID NO: 174952 - DNA, 25 bp, Artificial
  probe
  misc_feature (1)..(25): SEQ ID NO: 974; WAN024DXC_at; Start 260; Stop 284
tggtcgttcaattcttcttgccaga

SEQ ID NO: 174953 - DNA, 25 bp, Artificial
  probe
  misc_feature (1)..(25): SEQ ID NO: 974; WAN024DXC_at; Start 595; Stop 619
cacgctttgaataatttagtcggct

SEQ ID NO: 174954 - DNA, 25 bp, Artificial
  probe
  misc_feature (1)..(25): SEQ ID NO: 974; WAN024DXC_at; Start 316; Stop 340
gacttgaccttgtctcaaccacttt

SEQ ID NO: 174955 - DNA, 25 bp, Artificial
  probe
  misc_feature (1)..(25): SEQ ID NO: 974; WAN024DXC_at; Start 288; Stop 312
tccttcagtaaatcagcaaatagcg

SEQ ID NO: 174956 - DNA, 25 bp, Artificial
  probe
  misc_feature (1)..(25): SEQ ID NO: 974; WAN024DXC_at; Start 160; Stop 184
tacggcatttacaaatggtatcaga

SEQ ID NO: 174957 - DNA, 25 bp, Artificial
  probe
  misc_feature (1)..(25): SEQ ID NO: 974; WAN024DXC_at; Start 88; Stop 112
gcgtcgcttgctttaggcgcttcac

SEQ ID NO: 174958 - DNA, 25 bp, Artificial
  probe
  misc_feature (1)..(25): SEQ ID NO: 974; WAN024DXC_at; Start 476; Stop 500
tatttgccttgattcattttccagg

SEQ ID NO: 174959 - DNA, 25 bp, Artificial
  probe
  misc_feature (1)..(25): SEQ ID NO: 974; WAN024DXC_at; Start 580; Stop 604
tacagtatttctcttcacgctttga

SEQ ID NO: 174960 - DNA, 25 bp, Artificial
  probe
  misc_feature (1)..(25): SEQ ID NO: 974; WAN024DXC_at; Start 145; Stop 169
gctggagtatatgtgtacggcattt

SEQ ID NO: 174961 - DNA, 25 bp, Artificial
  probe
  misc_feature (1)..(25): SEQ ID NO: 974; WAN024DXC_at; Start 115; Stop 139
tatgctgttactctactctatgtgg

SEQ ID NO: 174962 - DNA, 25 bp, Artificial
  probe
  misc_feature (1)..(25): SEQ ID NO: 974; WAN024DXC_at; Start 486; Stop 510
gattcattttccaggtgatgtgcaa

SEQ ID NO: 174963 - DNA, 25 bp, Artificial
  probe
  misc_feature (1)..(25): SEQ ID NO: 974; WAN024DXC_at; Start 360; Stop 384
tatttttgctcctttgacggaagag

SEQ ID NO: 174964 - DNA, 25 bp, Artificial
  probe
  misc_feature (1)..(25): SEQ ID NO: 974; WAN024DXC_at; Start 240; Stop 264
cttggtttggttcttatctctggtc

SEQ ID NO: 174965 - DNA, 25 bp, Artificial
  probe
  misc_feature (1)..(25): SEQ ID NO: 974; WAN024DXC_at; Start 331; Stop 355
caaccacttttctcattctttgctg

SEQ ID NO: 174966 - DNA, 25 bp, Artificial
  probe
  misc_feature (1)..(25): SEQ ID NO: 974; WAN024DXC_at; Start 387; Stop 411
tgtttttagagggatgttagcacgc

SEQ ID NO: 174967 - DNA, 25 bp, Artificial
  probe
  misc_feature (1)..(25): SEQ ID NO: 974; WAN024DXC_at; Start 344; Stop 368
cattctttgctgtggttatttttgc

SEQ ID NO: 174968 - DNA, 25 bp, Artificial
  probe
  misc_feature (1)..(25): SEQ ID NO: 974; WAN024DXC_at; Start 407; Stop 431
cacgctatctctttcctaagcagga

SEQ ID NO: 174969 - DNA, 25 bp, Artificial
  probe
  misc_feature (1)..(25): SEQ ID NO: 974; WAN024DXC_at; Start 367; Stop 391
gctcctttgacggaagagattgttt

SEQ ID NO: 174970 - DNA, 25 bp, Artificial
  probe
  misc_feature (1)..(25): SEQ ID NO: 974; WAN024DXC_at; Start 446; Stop 470
ccctgatttttcttctggtatctag

SEQ ID NO: 174971 - DNA, 25 bp, Artificial
  probe
  misc_feature (1)..(25): SEQ ID NO: 974; WAN024DXC_at; Start 428; Stop 452
aggacaatagtaaacgaaccctgat

SEQ ID NO: 174972 - DNA, 25 bp, Artificial
  probe
  misc_feature (1)..(25): SEQ ID NO: 974; WAN024DXC_at; Start 393; Stop 417
tagagggatgttagcacgctatctc

SEQ ID NO: 174973 - DNA, 25 bp, Artificial
  probe
  misc_feature (1)..(25): SEQ ID NO: 974; WAN024DXC_at; Start 103; Stop 127
ggcgcttcaccctatgctgttactc

SEQ ID NO: 174974 - DNA, 25 bp, Artificial
  probe
  misc_feature (1)..(25): SEQ ID NO: 974; WAN024DXC_at; Start 23; Stop 47
gctggattcttctagcccttctatc

SEQ ID NO: 174975 - DNA, 25 bp, Artificial
  probe
  misc_feature (1)..(25): SEQ ID NO: 974; WAN024DXC_at; Start 61; Stop 85
tatggctttattcaggggctcgcga

SEQ ID NO: 174976 - DNA, 25 bp, Artificial
  probe
  misc_feature (1)..(25): SEQ ID NO: 974; WAN024DXC_at; Start 419; Stop 443
ttcctaagcaggacaatagtaaacg

SEQ ID NO: 174977 - DNA, 25 bp, Artificial
  probe
  misc_feature (1)..(25): SEQ ID NO: 4020; WAN024DXD_at; Start 100; Stop 124
catggcctgcatacgcttttgctta

SEQ ID NO: 174978 - DNA, 25 bp, Artificial
  probe
  misc_feature (1)..(25): SEQ ID NO: 4020; WAN024DXD_at; Start 411; Stop 435
caaactggataaagaaggaactcat

SEQ ID NO: 174979 - DNA, 25 bp, Artificial
  probe
  misc_feature (1)..(25): SEQ ID NO: 4020; WAN024DXD_at; Start 457; Stop 481
gacggtgaacttatggccaatctga

SEQ ID NO: 174980 - DNA, 25 bp, Artificial
  probe
  misc_feature (1)..(25): SEQ ID NO: 4020; WAN024DXD_at; Start 19; Stop 43
tgcatcgtggatcatggttgctccg

SEQ ID NO: 174981 - DNA, 25 bp, Artificial
  probe
  misc_feature (1)..(25): SEQ ID NO: 4020; WAN024DXD_at; Start 201; Stop 225
tcaaacctgctatcagcatgatagt

SEQ ID NO: 174982 - DNA, 25 bp, Artificial
  probe
  misc_feature (1)..(25): SEQ ID NO: 4020; WAN024DXD_at; Start 303; Stop 327
caccactggagatattgtttcgaag

SEQ ID NO: 174983 - DNA, 25 bp, Artificial
  probe
  misc_feature (1)..(25): SEQ ID NO: 4020; WAN024DXD_at; Start 268; Stop 292
tttcttacgaatagtcaggctgacg

SEQ ID NO: 174984 - DNA, 25 bp, Artificial
  probe
  misc_feature (1)..(25): SEQ ID NO: 4020; WAN024DXD_at; Start 61; Stop 85
gattttttcaattaccttctctgga

SEQ ID NO: 174985 - DNA, 25 bp, Artificial
  probe
  misc_feature (1)..(25): SEQ ID NO: 4020; WAN024DXD_at; Start 146; Stop 170
cggctagagacaaagatggtaatca

SEQ ID NO: 174986 - DNA, 25 bp, Artificial
  probe
  misc_feature (1)..(25): SEQ ID NO: 4020; WAN024DXD_at; Start 216; Stop 240
gcatgatagttccatttaccaagaa

SEQ ID NO: 174987 - DNA, 25 bp, Artificial
  probe
  misc_feature (1)..(25): SEQ ID NO: 4020; WAN024DXD_at; Start 322; Stop 346
tcgaagagcaaaaccaatccccaaa

SEQ ID NO: 174988 - DNA, 25 bp, Artificial
  probe
  misc_feature (1)..(25): SEQ ID NO: 4020; WAN024DXD_at; Start 232; Stop 256
taccaagaaagaaatactaccgaca

SEQ ID NO: 174989 - DNA, 25 bp, Artificial
  probe
  misc_feature (1)..(25): SEQ ID NO: 4020; WAN024DXD_at; Start 38; Stop 62
gctccgcggtgcaattttttatgga

SEQ ID NO: 174990 - DNA, 25 bp, Artificial
  probe
  misc_feature (1)..(25): SEQ ID NO: 4020; WAN024DXD_at; Start 173; Stop 197
gaataaagagcgtatttccaaccaa

SEQ ID NO: 174991 - DNA, 25 bp, Artificial
  probe
  misc_feature (1)..(25): SEQ ID NO: 4020; WAN024DXD_at; Start 126; Stop 150
taaagactgcgtctgtcacacggct

SEQ ID NO: 174992 - DNA, 25 bp, Artificial
  probe
  misc_feature (1)..(25): SEQ ID NO: 4020; WAN024DXD_at; Start 279; Stop 303
tagtcaggctgacgatatccgtccc

SEQ ID NO: 174993 - DNA, 25 bp, Artificial
  probe
  misc_feature (1)..(25): SEQ ID NO: 4020; WAN024DXD_at; Start 318; Stop 342
tgtttcgaagagcaaaaccaatccc

SEQ ID NO: 174994 - DNA, 25 bp, Artificial
  probe
  misc_feature (1)..(25): SEQ ID NO: 4020; WAN024DXD_at; Start 366; Stop 390
aaagggaattgataatgggatcctc

SEQ ID NO: 174995 - DNA, 25 bp, Artificial
  probe
  misc_feature (1)..(25): SEQ ID NO: 4020; WAN024DXD_at; Start 468; Stop 492
tatggccaatctgataccaagctaa

SEQ ID NO: 174996 - DNA, 25 bp, Artificial
  probe
  misc_feature (1)..(25): SEQ ID NO: 4020; WAN024DXD_at; Start 28; Stop 52
gatcatggttgctccgcggtgcaat

SEQ ID NO: 174997 - DNA, 25 bp, Artificial
  probe
  misc_feature (1)..(25): SEQ ID NO: 4020; WAN024DXD_at; Start 392; Stop 416
gtcaaggttgccacagggacaaact

SEQ ID NO: 174998 - DNA, 25 bp, Artificial
  probe
  misc_feature (1)..(25): SEQ ID NO: 4020; WAN024DXD_at; Start 400; Stop 424
tgccacagggacaaactggataaag

SEQ ID NO: 174999 - DNA, 25 bp, Artificial
  probe
  misc_feature (1)..(25): SEQ ID NO: 4020; WAN024DXD_at; Start 292; Stop 316
gatatccgtcccaccactggagata

SEQ ID NO: 175000 - DNA, 25 bp, Artificial
  probe
  misc_feature (1)..(25): SEQ ID NO: 4020; WAN024DXD_at; Start 435; Stop 459
tagataccgtgataaaggtaaagac

SEQ ID NO: 175001 - DNA, 25 bp, Artificial
  probe
  misc_feature (1)..(25): SEQ ID NO: 4020; WAN024DXD_at; Start 111; Stop 135
tacgcttttgcttagtaaagactgc

SEQ ID NO: 175002 - DNA, 25 bp, Artificial
  probe
  misc_feature (1)..(25): SEQ ID NO: 4020; WAN024DXD_at; Start 87; Stop 111
gatttgtcacaatcatggcctgcat

SEQ ID NO: 175003 - DNA, 25 bp, Artificial
  probe
  misc_feature (1)..(25): SEQ ID NO: 4020; WAN024DXD_at; Start 6; Stop 30
tataggttccttctgcatcgtggat

SEQ ID NO: 175004 - DNA, 25 bp, Artificial
  probe
  misc_feature (1)..(25): SEQ ID NO: 4020; WAN024DXD_at; Start 141; Stop 165
tcacacggctagagacaaagatggt

SEQ ID NO: 175005 - DNA, 25 bp, Artificial
  probe
  misc_feature (1)..(25): SEQ ID NO: 4020; WAN024DXD_at; Start 424; Stop 448
gaaggaactcatagataccgtgata

SEQ ID NO: 175006 - DNA, 25 bp, Artificial
  probe
  misc_feature (1)..(25): SEQ ID NO: 4020; WAN024DXD_at; Start 160; Stop 184
gatggtaatcatagaataaagagcg

SEQ ID NO: 175007 - DNA, 25 bp, Artificial
  probe
  misc_feature (1)..(25): SEQ ID NO: 4020; WAN024DXD_at; Start 73; Stop 97
taccttctctggatgatttgtcaca

SEQ ID NO: 175008 - DNA, 25 bp, Artificial
  probe
  misc_feature (1)..(25): SEQ ID NO: 4020; WAN024DXD_at; Start 196; Stop 220
aaaggtcaaacctgctatcagcatg

SEQ ID NO: 175009 - DNA, 25 bp, Artificial
  probe
  misc_feature (1)..(25): SEQ ID NO: 4020; WAN024DXD_at; Start 452; Stop 476
gtaaagacggtgaacttatggccaa

SEQ ID NO: 175010 - DNA, 25 bp, Artificial
  probe
  misc_feature (1)..(25): SEQ ID NO: 4020; WAN024DXD_at; Start 180; Stop 204
gagcgtatttccaaccaaaggtcaa

SEQ ID NO: 175011 - DNA, 25 bp, Artificial
  probe
  misc_feature (1)..(25): SEQ ID NO: 814; WAN024DXE_at; Start 160; Stop 184
aatttctttttccaaccagggcatg

SEQ ID NO: 175012 - DNA, 25 bp, Artificial
  probe
  misc_feature (1)..(25): SEQ ID NO: 814; WAN024DXE_at; Start 656; Stop 680
cagacgcagtctttactaagcaaaa

SEQ ID NO: 175013 - DNA, 25 bp, Artificial
  probe
  misc_feature (1)..(25): SEQ ID NO: 814; WAN024DXE_at; Start 776; Stop 800
cagaaggaacctataatcacgagag

SEQ ID NO: 175014 - DNA, 25 bp, Artificial
  probe
  misc_feature (1)..(25): SEQ ID NO: 814; WAN024DXE_at; Start 285; Stop 309
taacttccctttgatggtcttagct

SEQ ID NO: 175015 - DNA, 25 bp, Artificial
  probe
  misc_feature (1)..(25): SEQ ID NO: 814; WAN024DXE_at; Start 99; Stop 123
aaagtatgatgagaagatttcggcc

SEQ ID NO: 175016 - DNA, 25 bp, Artificial
  probe
  misc_feature (1)..(25): SEQ ID NO: 814; WAN024DXE_at; Start 21; Stop 45
taagcggtggcgctattatctgcgc

SEQ ID NO: 175017 - DNA, 25 bp, Artificial
  probe
  misc_feature (1)..(25): SEQ ID NO: 814; WAN024DXE_at; Start 172; Stop 196
caaccagggcatgtgtattcgagtg

SEQ ID NO: 175018 - DNA, 25 bp, Artificial
  probe
  misc_feature (1)..(25): SEQ ID NO: 814; WAN024DXE_at; Start 73; Stop 97
cgtgtcttacaaagtatctctcgag

SEQ ID NO: 175019 - DNA, 25 bp, Artificial
  probe
  misc_feature (1)..(25): SEQ ID NO: 814; WAN024DXE_at; Start 699; Stop 723
tgtgacaaatcatccagagaaggta

SEQ ID NO: 175020 - DNA, 25 bp, Artificial
  probe
  misc_feature (1)..(25): SEQ ID NO: 814; WAN024DXE_at; Start 315; Stop 339
tcagattggccataagttcaccgtc

SEQ ID NO: 175021 - DNA, 25 bp, Artificial
  probe
  misc_feature (1)..(25): SEQ ID NO: 814; WAN024DXE_at; Start 348; Stop 372
tatcacggtatctatgagttccttc

SEQ ID NO: 175022 - DNA, 25 bp, Artificial
  probe
  misc_feature (1)..(25): SEQ ID NO: 814; WAN024DXE_at; Start 114; Stop 138
gatttcggcctctctggtctatggt

SEQ ID NO: 175023 - DNA, 25 bp, Artificial
  probe
  misc_feature (1)..(25): SEQ ID NO: 814; WAN024DXE_at; Start 471; Stop 495
tcgaaacaatatctccagtggtggg

SEQ ID NO: 175024 - DNA, 25 bp, Artificial
  probe
  misc_feature (1)..(25): SEQ ID NO: 814; WAN024DXE_at; Start 735; Stop 759
ccataaaaaattgcaccgcggagca

SEQ ID NO: 175025 - DNA, 25 bp, Artificial
  probe
  misc_feature (1)..(25): SEQ ID NO: 814; WAN024DXE_at; Start 875; Stop 899
caagctcctttgtctctgtctcgga

SEQ ID NO: 175026 - DNA, 25 bp, Artificial
  probe
  misc_feature (1)..(25): SEQ ID NO: 814; WAN024DXE_at; Start 238; Stop 262
cactggtttggttttcatattccga

SEQ ID NO: 175027 - DNA, 25 bp, Artificial
  probe
  misc_feature (1)..(25): SEQ ID NO: 814; WAN024DXE_at; Start 858; Stop 882
tatgacacaagtggatccaagctcc

SEQ ID NO: 175028 - DNA, 25 bp, Artificial
  probe
  misc_feature (1)..(25): SEQ ID NO: 814; WAN024DXE_at; Start 375; Stop 399
tatccagtttgtccctgtggcaacc

SEQ ID NO: 175029 - DNA, 25 bp, Artificial
  probe
  misc_feature (1)..(25): SEQ ID NO: 814; WAN024DXE_at; Start 627; Stop 651
gattaccatctttgtctctagccgt

SEQ ID NO: 175030 - DNA, 25 bp, Artificial
  probe
  misc_feature (1)..(25): SEQ ID NO: 814; WAN024DXE_at; Start 493; Stop 517
gggacggatatcgtcagcctgacta

SEQ ID NO: 175031 - DNA, 25 bp, Artificial
  probe
  misc_feature (1)..(25): SEQ ID NO: 814; WAN024DXE_at; Start 754; Stop 778
ggagcaaccatgatccacgatgcag

SEQ ID NO: 175032 - DNA, 25 bp, Artificial
  probe
  misc_feature (1)..(25): SEQ ID NO: 814; WAN024DXE_at; Start 41; Stop 65
tgcgccgctttgcttatcagataaa

SEQ ID NO: 175033 - DNA, 25 bp, Artificial
  probe
  misc_feature (1)..(25): SEQ ID NO: 814; WAN024DXE_at; Start 203; Stop 227
caggtctggcacagattatctctgc

SEQ ID NO: 175034 - DNA, 25 bp, Artificial
  probe
  misc_feature (1)..(25): SEQ ID NO: 814; WAN024DXE_at; Start 672; Stop 696
taagcaaaagcgtatgcaggccatg

SEQ ID NO: 175035 - DNA, 25 bp, Artificial
  probe
  misc_feature (1)..(25): SEQ ID NO: 814; WAN024DXE_at; Start 557; Stop 581
tcttggtaaatggaactatcatgct

SEQ ID NO: 175036 - DNA, 25 bp, Artificial
  probe
  misc_feature (1)..(25): SEQ ID NO: 814; WAN024DXE_at; Start 641; Stop 665
tctctagccgtgtgacagacgcagt

SEQ ID NO: 175037 - DNA, 25 bp, Artificial
  probe
  misc_feature (1)..(25): SEQ ID NO: 814; WAN024DXE_at; Start 11; Stop 35
caaaacgaattaagcggtggcgcta

SEQ ID NO: 175038 - DNA, 25 bp, Artificial
  probe
  misc_feature (1)..(25): SEQ ID NO: 814; WAN024DXE_at; Start 302; Stop 326
tcttagcttggtatcagattggcca

SEQ ID NO: 175039 - DNA, 25 bp, Artificial
  probe
  misc_feature (1)..(25): SEQ ID NO: 814; WAN024DXE_at; Start 789; Stop 813
taatcacgagagaaaggcagtttta

SEQ ID NO: 175040 - DNA, 25 bp, Artificial
  probe
  misc_feature (1)..(25): SEQ ID NO: 814; WAN024DXE_at; Start 187; Stop 211
tattcgagtggtgcaacaggtctgg

SEQ ID NO: 175041 - DNA, 25 bp, Artificial
  probe
  misc_feature (1)..(25): SEQ ID NO: 814; WAN024DXE_at; Start 219; Stop 243
tatctctgccttgagtaatcactgg

SEQ ID NO: 175042 - DNA, 25 bp, Artificial
  probe
  misc_feature (1)..(25): SEQ ID NO: 814; WAN024DXE_at; Start 684; Stop 708
tatgcaggccatgattgtgacaaat

SEQ ID NO: 175043 - DNA, 25 bp, Artificial
  probe
  misc_feature (1)..(25): SEQ ID NO: 814; WAN024DXE_at; Start 133; Stop 157
tatggttttttatcagcagtagcag

SEQ ID NO: 175044 - DNA, 25 bp, Artificial
  probe
  misc_feature (1)..(25): SEQ ID NO: 814; WAN024DXE_at; Start 812; Stop 836
taatcactgtcattacacgtgcaga

SEQ ID NO: 175045 - DNA, 25 bp, Artificial
  probe
  misc_feature (1)..(25): SEQ ID NO: 5534; WAN024DXF_at; Start 49; Stop 73
gatgttgcggaatttttgccaagcg

SEQ ID NO: 175046 - DNA, 25 bp, Artificial
  probe
  misc_feature (1)..(25): SEQ ID NO: 5534; WAN024DXF_at; Start 163; Stop 187
gagccaaccttgcatcataatcaag

SEQ ID NO: 175047 - DNA, 25 bp, Artificial
  probe
  misc_feature (1)..(25): SEQ ID NO: 5534; WAN024DXF_at; Start 236; Stop 260
tcaaggaaaggaaggaatttagcca

SEQ ID NO: 175048 - DNA, 25 bp, Artificial
  probe
  misc_feature (1)..(25): SEQ ID NO: 5534; WAN024DXF_at; Start 17; Stop 41
ggtgccgcaacagccaaaatcattg

SEQ ID NO: 175049 - DNA, 25 bp, Artificial
  probe
  misc_feature (1)..(25): SEQ ID NO: 5534; WAN024DXF_at; Start 189; Stop 213
caatcttagtccaagttgggtctgt

SEQ ID NO: 175050 - DNA, 25 bp, Artificial
  probe
  misc_feature (1)..(25): SEQ ID NO: 5534; WAN024DXF_at; Start 66; Stop 90
gccaagcgttggcaccgtcaatata

SEQ ID NO: 175051 - DNA, 25 bp, Artificial
  probe
  misc_feature (1)..(25): SEQ ID NO: 5534; WAN024DXF_at; Start 184; Stop 208
caaggcaatcttagtccaagttggg

SEQ ID NO: 175052 - DNA, 25 bp, Artificial
  probe
  misc_feature (1)..(25): SEQ ID NO: 5534; WAN024DXF_at; Start 155; Stop 179
gggaatccgagccaaccttgcatca

SEQ ID NO: 175053 - DNA, 25 bp, Artificial
  probe
  misc_feature (1)..(25): SEQ ID NO: 5534; WAN024DXF_at; Start 76; Stop 100
ggcaccgtcaatataagctgcttcg

SEQ ID NO: 175054 - DNA, 25 bp, Artificial
  probe
  misc_feature (1)..(25): SEQ ID NO: 5534; WAN024DXF_at; Start 245; Stop 269
ggaaggaatttagccaagattggca

SEQ ID NO: 175055 - DNA, 25 bp, Artificial
  probe
  misc_feature (1)..(25): SEQ ID NO: 5534; WAN024DXF_at; Start 6; Stop 30
taatcaaagtaggtgccgcaacagc

SEQ ID NO: 175056 - DNA, 25 bp, Artificial
  probe
  misc_feature (1)..(25): SEQ ID NO: 5534; WAN024DXF_at; Start 92; Stop 116
gctgcttcgtaaaggtcgttaggaa

SEQ ID NO: 175057 - DNA, 25 bp, Artificial
  probe
  misc_feature (1)..(25): SEQ ID NO: 5534; WAN024DXF_at; Start 230; Stop 254
gctccatcaaggaaaggaaggaatt

SEQ ID NO: 175058 - DNA, 25 bp, Artificial
  probe
  misc_feature (1)..(25): SEQ ID NO: 5534; WAN024DXF_at; Start 218; Stop 242
caaggaataagagctccatcaagga

SEQ ID NO: 175059 - DNA, 25 bp, Artificial
  probe
  misc_feature (1)..(25): SEQ ID NO: 5534; WAN024DXF_at; Start 152; Stop 176
tatgggaatccgagccaaccttgca

SEQ ID NO: 175060 - DNA, 25 bp, Artificial
  probe
  misc_feature (1)..(25): SEQ ID NO: 5534; WAN024DXF_at; Start 71; Stop 95
gcgttggcaccgtcaatataagctg

SEQ ID NO: 175061 - DNA, 25 bp, Artificial
  probe
  misc_feature (1)..(25): SEQ ID NO: 5534; WAN024DXF_at; Start 1; Stop 25
ttggctaatcaaagtaggtgccgca

SEQ ID NO: 175062 - DNA, 25 bp, Artificial
  probe
  misc_feature (1)..(25): SEQ ID NO: 5534; WAN024DXF_at; Start 225; Stop 249
taagagctccatcaaggaaaggaag

SEQ ID NO: 175063 - DNA, 25 bp, Artificial
  probe
  misc_feature (1)..(25): SEQ ID NO: 5534; WAN024DXF_at; Start 20; Stop 44
gccgcaacagccaaaatcattggga

SEQ ID NO: 175064 - DNA, 25 bp, Artificial
  probe
  misc_feature (1)..(25): SEQ ID NO: 5534; WAN024DXF_at; Start 111; Stop 135
taggaatagattgcaagatacccaa

SEQ ID NO: 175065 - DNA, 25 bp, Artificial
  probe
  misc_feature (1)..(25): SEQ ID NO: 5534; WAN024DXF_at; Start 101; Stop 125
taaaggtcgttaggaatagattgca

SEQ ID NO: 175066 - DNA, 25 bp, Artificial
  probe
  misc_feature (1)..(25): SEQ ID NO: 5534; WAN024DXF_at; Start 36; Stop 60
tcattgggaaagtgatgttgcggaa

SEQ ID NO: 175067 - DNA, 25 bp, Artificial
  probe
  misc_feature (1)..(25): SEQ ID NO: 5534; WAN024DXF_at; Start 142; Stop 166
aacgtagatgtatgggaatccgagc

SEQ ID NO: 175068 - DNA, 25 bp, Artificial
  probe
  misc_feature (1)..(25): SEQ ID NO: 5534; WAN024DXF_at; Start 87; Stop 111
tataagctgcttcgtaaaggtcgtt

SEQ ID NO: 175069 - DNA, 25 bp, Artificial
  probe
  misc_feature (1)..(25): SEQ ID NO: 5534; WAN024DXF_at; Start 213; Stop 237
ttttccaaggaataagagctccatc

SEQ ID NO: 175070 - DNA, 25 bp, Artificial
  probe
  misc_feature (1)..(25): SEQ ID NO: 5534; WAN024DXF_at; Start 257; Stop 281
gccaagattggcaatacttgagtgt

SEQ ID NO: 175071 - DNA, 25 bp, Artificial
  probe
  misc_feature (1)..(25): SEQ ID NO: 5534; WAN024DXF_at; Start 146; Stop 170
tagatgtatgggaatccgagccaac

SEQ ID NO: 175072 - DNA, 25 bp, Artificial
  probe
  misc_feature (1)..(25): SEQ ID NO: 5534; WAN024DXF_at; Start 27; Stop 51
cagccaaaatcattgggaaagtgat

SEQ ID NO: 175073 - DNA, 25 bp, Artificial
  probe
  misc_feature (1)..(25): SEQ ID NO: 5534; WAN024DXF_at; Start 58; Stop 82
gaatttttgccaagcgttggcaccg

SEQ ID NO: 175074 - DNA, 25 bp, Artificial
  probe
  misc_feature (1)..(25): SEQ ID NO: 5534; WAN024DXF_at; Start 54; Stop 78
tgcggaatttttgccaagcgttggc

SEQ ID NO: 175075 - DNA, 25 bp, Artificial
  probe
  misc_feature (1)..(25): SEQ ID NO: 5534; WAN024DXF_at; Start 205; Stop 229
tgggtctgttttccaaggaataaga

SEQ ID NO: 175076 - DNA, 25 bp, Artificial
  probe
  misc_feature (1)..(25): SEQ ID NO: 5534; WAN024DXF_at; Start 268; Stop 292
caatacttgagtgttgatagcaccg

SEQ ID NO: 175077 - DNA, 25 bp, Artificial
  probe
  misc_feature (1)..(25): SEQ ID NO: 5534; WAN024DXF_at; Start 14; Stop 38
gtaggtgccgcaacagccaaaatca

SEQ ID NO: 175078 - DNA, 25 bp, Artificial
  probe
  misc_feature (1)..(25): SEQ ID NO: 5534; WAN024DXF_at; Start 173; Stop 197
tgcatcataatcaaggcaatcttag

SEQ ID NO: 175079 - DNA, 25 bp, Artificial
  probe
  misc_feature (1)..(25): SEQ ID NO: 4312; WAN024DXG_at; Start 156; Stop 180
tacgatttgtaaagtagaagctgcc

SEQ ID NO: 175080 - DNA, 25 bp, Artificial
  probe
  misc_feature (1)..(25): SEQ ID NO: 4312; WAN024DXG_at; Start 228; Stop 252
gaaggtactcaagctccaaatgttt

SEQ ID NO: 175081 - DNA, 25 bp, Artificial
  probe
  misc_feature (1)..(25): SEQ ID NO: 4312; WAN024DXG_at; Start 214; Stop 238
ccaaaggcagaacggaaggtactca

SEQ ID NO: 175082 - DNA, 25 bp, Artificial
  probe
  misc_feature (1)..(25): SEQ ID NO: 4312; WAN024DXG_at; Start 269; Stop 293
caacccagtccaacaacttgtttgg

SEQ ID NO: 175083 - DNA, 25 bp, Artificial
  probe
  misc_feature (1)..(25): SEQ ID NO: 4312; WAN024DXG_at; Start 199; Stop 223
caagaaagaacagaaccaaaggcag

SEQ ID NO: 175084 - DNA, 25 bp, Artificial
  probe
  misc_feature (1)..(25): SEQ ID NO: 4312; WAN024DXG_at; Start 184; Stop 208
gcccaaatgatagtccaagaaagaa

SEQ ID NO: 175085 - DNA, 25 bp, Artificial
  probe
  misc_feature (1)..(25): SEQ ID NO: 4312; WAN024DXG_at; Start 278; Stop 302
ccaacaacttgtttggtggcaagtg

SEQ ID NO: 175086 - DNA, 25 bp, Artificial
  probe
  misc_feature (1)..(25): SEQ ID NO: 4312; WAN024DXG_at; Start 206; Stop 230
gaacagaaccaaaggcagaacggaa

SEQ ID NO: 175087 - DNA, 25 bp, Artificial
  probe
  misc_feature (1)..(25): SEQ ID NO: 4312; WAN024DXG_at; Start 92; Stop 116
caccaaagatacgttttcctttgat

SEQ ID NO: 175088 - DNA, 25 bp, Artificial
  probe
  misc_feature (1)..(25): SEQ ID NO: 4312; WAN024DXG_at; Start 66; Stop 90
gacagcccaaggaagaaggaaaata

SEQ ID NO: 175089 - DNA, 25 bp, Artificial
  probe
  misc_feature (1)..(25): SEQ ID NO: 4312; WAN024DXG_at; Start 39; Stop 63
gaatgtcaagatagtgatgaaggct

SEQ ID NO: 175090 - DNA, 25 bp, Artificial
  probe
  misc_feature (1)..(25): SEQ ID NO: 4312; WAN024DXG_at; Start 45; Stop 69
caagatagtgatgaaggctgggaca

SEQ ID NO: 175091 - DNA, 25 bp, Artificial
  probe
  misc_feature (1)..(25): SEQ ID NO: 4312; WAN024DXG_at; Start 165; Stop 189
taaagtagaagctgccaaagcccaa

SEQ ID NO: 175092 - DNA, 25 bp, Artificial
  probe
  misc_feature (1)..(25): SEQ ID NO: 4312; WAN024DXG_at; Start 98; Stop 122
agatacgttttcctttgataaatgg

SEQ ID NO: 175093 - DNA, 25 bp, Artificial
  probe
  misc_feature (1)..(25): SEQ ID NO: 4312; WAN024DXG_at; Start 178; Stop 202
gccaaagcccaaatgatagtccaag

SEQ ID NO: 175094 - DNA, 25 bp, Artificial
  probe
  misc_feature (1)..(25): SEQ ID NO: 4312; WAN024DXG_at; Start 116; Stop 140
taaatggttggttggcaatgatagc

SEQ ID NO: 175095 - DNA, 25 bp, Artificial
  probe
  misc_feature (1)..(25): SEQ ID NO: 4312; WAN024DXG_at; Start 231; Stop 255
ggtactcaagctccaaatgtttgta

SEQ ID NO: 175096 - DNA, 25 bp, Artificial
  probe
  misc_feature (1)..(25): SEQ ID NO: 4312; WAN024DXG_at; Start 51; Stop 75
agtgatgaaggctgggacagcccaa

SEQ ID NO: 175097 - DNA, 25 bp, Artificial
  probe
  misc_feature (1)..(25): SEQ ID NO: 4312; WAN024DXG_at; Start 175; Stop 199
gctgccaaagcccaaatgatagtcc

SEQ ID NO: 175098 - DNA, 25 bp, Artificial
  probe
  misc_feature (1)..(25): SEQ ID NO: 4312; WAN024DXG_at; Start 240; Stop 264
gctccaaatgtttgtaaagttggtc

SEQ ID NO: 175099 - DNA, 25 bp, Artificial
  probe
  misc_feature (1)..(25): SEQ ID NO: 4312; WAN024DXG_at; Start 282; Stop 306
caacttgtttggtggcaagtgttgg

SEQ ID NO: 175100 - DNA, 25 bp, Artificial
  probe
  misc_feature (1)..(25): SEQ ID NO: 4312; WAN024DXG_at; Start 172; Stop 196
gaagctgccaaagcccaaatgatag

SEQ ID NO: 175101 - DNA, 25 bp, Artificial
  probe
  misc_feature (1)..(25): SEQ ID NO: 4312; WAN024DXG_at; Start 26; Stop 50
taaacatgtttgagaatgtcaagat

SEQ ID NO: 175102 - DNA, 25 bp, Artificial
  probe
  misc_feature (1)..(25): SEQ ID NO: 4312; WAN024DXG_at; Start 163; Stop 187
tgtaaagtagaagctgccaaagccc

SEQ ID NO: 175103 - DNA, 25 bp, Artificial
  probe
  misc_feature (1)..(25): SEQ ID NO: 4312; WAN024DXG_at; Start 108; Stop 132
tcctttgataaatggttggttggca

SEQ ID NO: 175104 - DNA, 25 bp, Artificial
  probe
  misc_feature (1)..(25): SEQ ID NO: 4312; WAN024DXG_at; Start 128; Stop 152
tggcaatgatagctgtgaagatacc

SEQ ID NO: 175105 - DNA, 25 bp, Artificial
  probe
  misc_feature (1)..(25): SEQ ID NO: 4312; WAN024DXG_at; Start 260; Stop 284
tggtcaaaccaacccagtccaacaa

SEQ ID NO: 175106 - DNA, 25 bp, Artificial
  probe
  misc_feature (1)..(25): SEQ ID NO: 4312; WAN024DXG_at; Start 62; Stop 86
ctgggacagcccaaggaagaaggaa

SEQ ID NO: 175107 - DNA, 25 bp, Artificial
  probe
  misc_feature (1)..(25): SEQ ID NO: 4312; WAN024DXG_at; Start 223; Stop 247
gaacggaaggtactcaagctccaaa

SEQ ID NO: 175108 - DNA, 25 bp, Artificial
  probe
  misc_feature (1)..(25): SEQ ID NO: 4312; WAN024DXG_at; Start 135; Stop 159
gatagctgtgaagataccaattacg

SEQ ID NO: 175109 - DNA, 25 bp, Artificial
  probe
  misc_feature (1)..(25): SEQ ID NO: 4312; WAN024DXG_at; Start 191; Stop 215
tgatagtccaagaaagaacagaacc

SEQ ID NO: 175110 - DNA, 25 bp, Artificial
  probe
  misc_feature (1)..(25): SEQ ID NO: 4312; WAN024DXG_at; Start 219; Stop 243
ggcagaacggaaggtactcaagctc

SEQ ID NO: 175111 - DNA, 25 bp, Artificial
  probe
  misc_feature (1)..(25): SEQ ID NO: 4312; WAN024DXG_at; Start 291; Stop 315
tggtggcaagtgttggaagtcgtag

SEQ ID NO: 175112 - DNA, 25 bp, Artificial
  probe
  misc_feature (1)..(25): SEQ ID NO: 4312; WAN024DXG_at; Start 141; Stop 165
tgtgaagataccaattacgatttgt

SEQ ID NO: 175113 - DNA, 25 bp, Artificial
  probe
  misc_feature (1)..(25): SEQ ID NO: 5322; WAN024DXH_at; Start 347; Stop 371
acaacttcttggctcgtaaacaaag

SEQ ID NO: 175114 - DNA, 25 bp, Artificial
  probe
  misc_feature (1)..(25): SEQ ID NO: 5322; WAN024DXH_at; Start 644; Stop 668
tacaagctctctgggccttcatggg

SEQ ID NO: 175115 - DNA, 25 bp, Artificial
  probe
  misc_feature (1)..(25): SEQ ID NO: 5322; WAN024DXH_at; Start 866; Stop 890
caagtggtggcgacaagggataact

SEQ ID NO: 175116 - DNA, 25 bp, Artificial
  probe
  misc_feature (1)..(25): SEQ ID NO: 5322; WAN024DXH_at; Start 446; Stop 470
tgttgaacgcccttaaccacaactg

SEQ ID NO: 175117 - DNA, 25 bp, Artificial
  probe
  misc_feature (1)..(25): SEQ ID NO: 5322; WAN024DXH_at; Start 499; Stop 523
ggtatcccgatgaatgcttggctca

SEQ ID NO: 175118 - DNA, 25 bp, Artificial
  probe
  misc_feature (1)..(25): SEQ ID NO: 5322; WAN024DXH_at; Start 253; Stop 277
ggtacttggtacctcaacactttga

SEQ ID NO: 175119 - DNA, 25 bp, Artificial
  probe
  misc_feature (1)..(25): SEQ ID NO: 5322; WAN024DXH_at; Start 852; Stop 876
tgtttcaggacttacaagtggtggc

SEQ ID NO: 175120 - DNA, 25 bp, Artificial
  probe
  misc_feature (1)..(25): SEQ ID NO: 5322; WAN024DXH_at; Start 525; Stop 549
gaaaggctacttcgatacagtgcca

SEQ ID NO: 175121 - DNA, 25 bp, Artificial
  probe
  misc_feature (1)..(25): SEQ ID NO: 5322; WAN024DXH_at; Start 389; Stop 413
tcatccaaatggtgccaactatggc

SEQ ID NO: 175122 - DNA, 25 bp, Artificial
  probe
  misc_feature (1)..(25): SEQ ID NO: 5322; WAN024DXH_at; Start 756; Stop 780
caatgcgaaaaacttgaagattgcc

SEQ ID NO: 175123 - DNA, 25 bp, Artificial
  probe
  misc_feature (1)..(25): SEQ ID NO: 5322; WAN024DXH_at; Start 134; Stop 158
cactgttgattaccattatgtcagc

SEQ ID NO: 175124 - DNA, 25 bp, Artificial
  probe
  misc_feature (1)..(25): SEQ ID NO: 5322; WAN024DXH_at; Start 65; Stop 89
tcaaacgtagactgactcaaagcct

SEQ ID NO: 175125 - DNA, 25 bp, Artificial
  probe
  misc_feature (1)..(25): SEQ ID NO: 5322; WAN024DXH_at; Start 150; Stop 174
tatgtcagcctttaaagcaggtaac

SEQ ID NO: 175126 - DNA, 25 bp, Artificial
  probe
  misc_feature (1)..(25): SEQ ID NO: 5322; WAN024DXH_at; Start 771; Stop 795
gaagattgcctacttctcagcaggt

SEQ ID NO: 175127 - DNA, 25 bp, Artificial
  probe
  misc_feature (1)..(25): SEQ ID NO: 5322; WAN024DXH_at; Start 466; Stop 490
aactggttcctcatcttcctctacg

SEQ ID NO: 175128 - DNA, 25 bp, Artificial
  probe
  misc_feature (1)..(25): SEQ ID NO: 5322; WAN024DXH_at; Start 514; Stop 538
gcttggctcatgaaaggctacttcg

SEQ ID NO: 175129 - DNA, 25 bp, Artificial
  probe
  misc_feature (1)..(25): SEQ ID NO: 5322; WAN024DXH_at; Start 785; Stop 809
tctcagcaggtgctatcctcatcgc

SEQ ID NO: 175130 - DNA, 25 bp, Artificial
  probe
  misc_feature (1)..(25): SEQ ID NO: 5322; WAN024DXH_at; Start 404; Stop 428
caactatggccgctttgacagcctt

SEQ ID NO: 175131 - DNA, 25 bp, Artificial
  probe
  misc_feature (1)..(25): SEQ ID NO: 5322; WAN024DXH_at; Start 557; Stop 581
tagacgaatctgcaaaactagacgg

SEQ ID NO: 175132 - DNA, 25 bp, Artificial
  probe
  misc_feature (1)..(25): SEQ ID NO: 5322; WAN024DXH_at; Start 166; Stop 190
gcaggtaacgtctcagcctttaaac

SEQ ID NO: 175133 - DNA, 25 bp, Artificial
  probe
  misc_feature (1)..(25): SEQ ID NO: 5322; WAN024DXH_at; Start 297; Stop 321
ggctgttcaaacaagtatcatcgta

SEQ ID NO: 175134 - DNA, 25 bp, Artificial
  probe
  misc_feature (1)..(25): SEQ ID NO: 5322; WAN024DXH_at; Start 334; Stop 358
gcttacagccgttacaacttcttgg

SEQ ID NO: 175135 - DNA, 25 bp, Artificial
  probe
  misc_feature (1)..(25): SEQ ID NO: 5322; WAN024DXH_at; Start 723; Stop 747
tactgttgccgtaggtctccaaacc

SEQ ID NO: 175136 - DNA, 25 bp, Artificial
  probe
  misc_feature (1)..(25): SEQ ID NO: 5322; WAN024DXH_at; Start 276; Stop 300
gattatcgccttaattaccatggct

SEQ ID NO: 175137 - DNA, 25 bp, Artificial
  probe
  misc_feature (1)..(25): SEQ ID NO: 5322; WAN024DXH_at; Start 419; Stop 443
tgacagccttcttcgttatggcgct

SEQ ID NO: 175138 - DNA, 25 bp, Artificial
  probe
  misc_feature (1)..(25): SEQ ID NO: 5322; WAN024DXH_at; Start 572; Stop 596
aactagacggtgcaggacacttccg

SEQ ID NO: 175139 - DNA, 25 bp, Artificial
  probe
  misc_feature (1)..(25): SEQ ID NO: 5322; WAN024DXH_at; Start 593; Stop 617
tccgccgcttctggcaaattgttct

SEQ ID NO: 175140 - DNA, 25 bp, Artificial
  probe
  misc_feature (1)..(25): SEQ ID NO: 5322; WAN024DXH_at; Start 26; Stop 50
tgatatggaggacgtctaagatgaa

SEQ ID NO: 175141 - DNA, 25 bp, Artificial
  probe
  misc_feature (1)..(25): SEQ ID NO: 5322; WAN024DXH_at; Start 320; Stop 344
tacttgctggttatgcttacagccg

SEQ ID NO: 175142 - DNA, 25 bp, Artificial
  probe
  misc_feature (1)..(25): SEQ ID NO: 5322; WAN024DXH_at; Start 237; Stop 261
cactgaaaccttgtacggtacttgg

SEQ ID NO: 175143 - DNA, 25 bp, Artificial
  probe
  misc_feature (1)..(25): SEQ ID NO: 5322; WAN024DXH_at; Start 738; Stop 762
tctccaaaccttcgttaacaatgcg

SEQ ID NO: 175144 - DNA, 25 bp, Artificial
  probe
  misc_feature (1)..(25): SEQ ID NO: 5322; WAN024DXH_at; Start 538; Stop 562
gatacagtgccaatgtctttagacg

SEQ ID NO: 175145 - DNA, 25 bp, Artificial
  probe
  misc_feature (1)..(25): SEQ ID NO: 5322; WAN024DXH_at; Start 627; Stop 651
tcgcccaatggttgccgtacaagct

SEQ ID NO: 175146 - DNA, 25 bp, Artificial
  probe
  misc_feature (1)..(25): SEQ ID NO: 5322; WAN024DXH_at; Start 483; Stop 507
cctctacgttggtggtggtatcccg

SEQ ID NO: 175147 - DNA, 25 bp, Artificial
  probe
  misc_feature (1)..(25): SEQ ID NO: 904; WAN024DXI_at; Start 771; Stop 795
tgtcggtgctatcaacactcaagta

SEQ ID NO: 175148 - DNA, 25 bp, Artificial
  probe
  misc_feature (1)..(25): SEQ ID NO: 904; WAN024DXI_at; Start 1138; Stop 1162
ggagctggttcaaccgatatcttga

SEQ ID NO: 175149 - DNA, 25 bp, Artificial
  probe
  misc_feature (1)..(25): SEQ ID NO: 904; WAN024DXI_at; Start 626; Stop 650
aaatcgtaattggtatcttcacagc

SEQ ID NO: 175150 - DNA, 25 bp, Artificial
  probe
  misc_feature (1)..(25): SEQ ID NO: 904; WAN024DXI_at; Start 989; Stop 1013
ccaacgcttggcaaaaattccgcaa

SEQ ID NO: 175151 - DNA, 25 bp, Artificial
  probe
  misc_feature (1)..(25): SEQ ID NO: 904; WAN024DXI_at; Start 1212; Stop 1236
ggcggcagctgttaccttgattatc

SEQ ID NO: 175152 - DNA, 25 bp, Artificial
  probe
  misc_feature (1)..(25): SEQ ID NO: 904; WAN024DXI_at; Start 372; Stop 396
tgaaaatggcttcccttacctcttg

SEQ ID NO: 175153 - DNA, 25 bp, Artificial
  probe
  misc_feature (1)..(25): SEQ ID NO: 904; WAN024DXI_at; Start 1197; Stop 1221
tcctcaatactcaatggcggcagct

SEQ ID NO: 175154 - DNA, 25 bp, Artificial
  probe
  misc_feature (1)..(25): SEQ ID NO: 904; WAN024DXI_at; Start 167; Stop 191
tgagcaacctcatcactcttggtga

SEQ ID NO: 175155 - DNA, 25 bp, Artificial
  probe
  misc_feature (1)..(25): SEQ ID NO: 904; WAN024DXI_at; Start 146; Stop 170
tagcacttgcaacccctgaattgag

SEQ ID NO: 175156 - DNA, 25 bp, Artificial
  probe
  misc_feature (1)..(25): SEQ ID NO: 904; WAN024DXI_at; Start 608; Stop 632
tggcagcttctactttacaaatcgt

SEQ ID NO: 175157 - DNA, 25 bp, Artificial
  probe
  misc_feature (1)..(25): SEQ ID NO: 904; WAN024DXI_at; Start 1178; Stop 1202
gtttgacaacaggtacatctcctca

SEQ ID NO: 175158 - DNA, 25 bp, Artificial
  probe
  misc_feature (1)..(25): SEQ ID NO: 904; WAN024DXI_at; Start 497; Stop 521
caaacaagttgttggactgggttgg

SEQ ID NO: 175159 - DNA, 25 bp, Artificial
  probe
  misc_feature (1)..(25): SEQ ID NO: 904; WAN024DXI_at; Start 887; Stop 911
tgatgcaaggttggctcggattccc

SEQ ID NO: 175160 - DNA, 25 bp, Artificial
  probe
  misc_feature (1)..(25): SEQ ID NO: 904; WAN024DXI_at; Start 534; Stop 558
tacaaacatttggagcttgagtacc

SEQ ID NO: 175161 - DNA, 25 bp, Artificial
  probe
  misc_feature (1)..(25): SEQ ID NO: 904; WAN024DXI_at; Start 456; Stop 480
gatgatcgcctttaccaactacgac

SEQ ID NO: 175162 - DNA, 25 bp, Artificial
  probe
  misc_feature (1)..(25): SEQ ID NO: 904; WAN024DXI_at; Start 1041; Stop 1065
tgcggcacctactttgattagccaa

SEQ ID NO: 175163 - DNA, 25 bp, Artificial
  probe
  misc_feature (1)..(25): SEQ ID NO: 904; WAN024DXI_at; Start 551; Stop 575
tgagtaccttccgttctgcctttgg

SEQ ID NO: 175164 - DNA, 25 bp, Artificial
  probe
  misc_feature (1)..(25): SEQ ID NO: 904; WAN024DXI_at; Start 951; Stop 975
tcctaacgacctttacgaagcagct

SEQ ID NO: 175165 - DNA, 25 bp, Artificial
  probe
  misc_feature (1)..(25): SEQ ID NO: 904; WAN024DXI_at; Start 1161; Stop 1185
gatctcatggatctaccgtttgaca

SEQ ID NO: 175166 - DNA, 25 bp, Artificial
  probe
  misc_feature (1)..(25): SEQ ID NO: 904; WAN024DXI_at; Start 24; Stop 48
gcaacaacctagtaaagcagccctg

SEQ ID NO: 175167 - DNA, 25 bp, Artificial
  probe
  misc_feature (1)..(25): SEQ ID NO: 904; WAN024DXI_at; Start 409; Stop 433
tatgttgccatgaccttcgcgatta

SEQ ID NO: 175168 - DNA, 25 bp, Artificial
  probe
  misc_feature (1)..(25): SEQ ID NO: 904; WAN024DXI_at; Start 218; Stop 242
ttatgctgattcgtggtgccttcca

SEQ ID NO: 175169 - DNA, 25 bp, Artificial
  probe
  misc_feature (1)..(25): SEQ ID NO: 904; WAN024DXI_at; Start 856; Stop 880
gacccaacttggactaagattgcct

SEQ ID NO: 175170 - DNA, 25 bp, Artificial
  probe
  misc_feature (1)..(25): SEQ ID NO: 904; WAN024DXI_at; Start 899; Stop 923
ggctcggattcccatacatctacgt

SEQ ID NO: 175171 - DNA, 25 bp, Artificial
  probe
  misc_feature (1)..(25): SEQ ID NO: 904; WAN024DXI_at; Start 971; Stop 995
cagcttatattgacggtgccaacgc

SEQ ID NO: 175172 - DNA, 25 bp, Artificial
  probe
  misc_feature (1)..(25): SEQ ID NO: 904; WAN024DXI_at; Start 182; Stop 206
ctcttggtgacaaaccaggtcgtga

SEQ ID NO: 175173 - DNA, 25 bp, Artificial
  probe
  misc_feature (1)..(25): SEQ ID NO: 904; WAN024DXI_at; Start 590; Stop 614
ggactatcatttgggctttggcagc

SEQ ID NO: 175174 - DNA, 25 bp, Artificial
  probe
  misc_feature (1)..(25): SEQ ID NO: 904; WAN024DXI_at; Start 1025; Stop 1049
caatgattttggctgttgcggcacc

SEQ ID NO: 175175 - DNA, 25 bp, Artificial
  probe
  misc_feature (1)..(25): SEQ ID NO: 904; WAN024DXI_at; Start 829; Stop 853
gatggagctcttattccttggaaaa

SEQ ID NO: 175176 - DNA, 25 bp, Artificial
  probe
  misc_feature (1)..(25): SEQ ID NO: 904; WAN024DXI_at; Start 1094; Stop 1118
tcatgtacctcttcaatggtggagg

SEQ ID NO: 175177 - DNA, 25 bp, Artificial
  probe
  misc_feature (1)..(25): SEQ ID NO: 904; WAN024DXI_at; Start 441; Stop 465
agttatcgtaaccttgatgatcgcc

SEQ ID NO: 175178 - DNA, 25 bp, Artificial
  probe
  misc_feature (1)..(25): SEQ ID NO: 904; WAN024DXI_at; Start 57; Stop 81
cattcctgggttaggacagatttac

SEQ ID NO: 175179 - DNA, 25 bp, Artificial
  probe
  misc_feature (1)..(25): SEQ ID NO: 904; WAN024DXI_at; Start 292; Stop 316
gatgcacatacgattgcaaaacgca

SEQ ID NO: 175180 - DNA, 25 bp, Artificial
  probe
  misc_feature (1)..(25): SEQ ID NO: 904; WAN024DXI_at; Start 334; Stop 358
gttccacgcacactcaaagacatga

SEQ ID NO: 175181 - DNA, 25 bp, Artificial
  probe
  misc_feature (1)..(25): SEQ ID NO: 5838; WAN024DXJ_at; Start 212; Stop 236
ccttcttggaattgagtttggatta

SEQ ID NO: 175182 - DNA, 25 bp, Artificial
  probe
  misc_feature (1)..(25): SEQ ID NO: 5838; WAN024DXJ_at; Start 99; Stop 123
cagcatattcttttccatttggaag

SEQ ID NO: 175183 - DNA, 25 bp, Artificial
  probe
  misc_feature (1)..(25): SEQ ID NO: 5838; WAN024DXJ_at; Start 6; Stop 30
gttcagttgcaacaaggaagtctac

SEQ ID NO: 175184 - DNA, 25 bp, Artificial
  probe
  misc_feature (1)..(25): SEQ ID NO: 5838; WAN024DXJ_at; Start 28; Stop 52
tacaaatttttgagaagcttcaagg

SEQ ID NO: 175185 - DNA, 25 bp, Artificial
  probe
  misc_feature (1)..(25): SEQ ID NO: 5838; WAN024DXJ_at; Start 180; Stop 204
tccaaggtccgtcgatgatagcagc

SEQ ID NO: 175186 - DNA, 25 bp, Artificial
  probe
  misc_feature (1)..(25): SEQ ID NO: 5838; WAN024DXJ_at; Start 18; Stop 42
caaggaagtctacaaatttttgaga

SEQ ID NO: 175187 - DNA, 25 bp, Artificial
  probe
  misc_feature (1)..(25): SEQ ID NO: 5838; WAN024DXJ_at; Start 124; Stop 148
agttgggatagttgcaactccgtag

SEQ ID NO: 175188 - DNA, 25 bp, Artificial
  probe
  misc_feature (1)..(25): SEQ ID NO: 5838; WAN024DXJ_at; Start 54; Stop 78
tcttaacggcttgaggaatgaccca

SEQ ID NO: 175189 - DNA, 25 bp, Artificial
  probe
  misc_feature (1)..(25): SEQ ID NO: 5838; WAN024DXJ_at; Start 2; Stop 26
tgttgttcagttgcaacaaggaagt

SEQ ID NO: 175190 - DNA, 25 bp, Artificial
  probe
  misc_feature (1)..(25): SEQ ID NO: 5838; WAN024DXJ_at; Start 9; Stop 33
cagttgcaacaaggaagtctacaaa

SEQ ID NO: 175191 - DNA, 25 bp, Artificial
  probe
  misc_feature (1)..(25): SEQ ID NO: 5838; WAN024DXJ_at; Start 90; Stop 114
caccgaatgcagcatattcttttcc

SEQ ID NO: 175192 - DNA, 25 bp, Artificial
  probe
  misc_feature (1)..(25): SEQ ID NO: 5838; WAN024DXJ_at; Start 154; Stop 178
tttagcatctttaaaggcttgagct

SEQ ID NO: 175193 - DNA, 25 bp, Artificial
  probe
  misc_feature (1)..(25): SEQ ID NO: 5838; WAN024DXJ_at; Start 57; Stop 81
taacggcttgaggaatgacccaagc

SEQ ID NO: 175194 - DNA, 25 bp, Artificial
  probe
  misc_feature (1)..(25): SEQ ID NO: 5838; WAN024DXJ_at; Start 159; Stop 183
catctttaaaggcttgagctttcca

SEQ ID NO: 175195 - DNA, 25 bp, Artificial
  probe
  misc_feature (1)..(25): SEQ ID NO: 5838; WAN024DXJ_at; Start 114; Stop 138
catttggaagagttgggatagttgc

SEQ ID NO: 175196 - DNA, 25 bp, Artificial
  probe
  misc_feature (1)..(25): SEQ ID NO: 5838; WAN024DXJ_at; Start 173; Stop 197
tgagctttccaaggtccgtcgatga

SEQ ID NO: 175197 - DNA, 25 bp, Artificial
  probe
  misc_feature (1)..(25): SEQ ID NO: 5838; WAN024DXJ_at; Start 82; Stop 106
tttaccaccaccgaatgcagcatat

SEQ ID NO: 175198 - DNA, 25 bp, Artificial
  probe
  misc_feature (1)..(25): SEQ ID NO: 5838; WAN024DXJ_at; Start 78; Stop 102
aagctttaccaccaccgaatgcagc

SEQ ID NO: 175199 - DNA, 25 bp, Artificial
  probe
  misc_feature (1)..(25): SEQ ID NO: 5838; WAN024DXJ_at; Start 47; Stop 71
tcaaggttcttaacggcttgaggaa

SEQ ID NO: 175200 - DNA, 25 bp, Artificial
  probe
  misc_feature (1)..(25): SEQ ID NO: 5838; WAN024DXJ_at; Start 39; Stop 63
gagaagcttcaaggttcttaacggc

SEQ ID NO: 175201 - DNA, 25 bp, Artificial
  probe
  misc_feature (1)..(25): SEQ ID NO: 5838; WAN024DXJ_at; Start 182; Stop 206
caaggtccgtcgatgatagcagctg

SEQ ID NO: 175202 - DNA, 25 bp, Artificial
  probe
  misc_feature (1)..(25): SEQ ID NO: 5838; WAN024DXJ_at; Start 176; Stop 200
gctttccaaggtccgtcgatgatag

SEQ ID NO: 175203 - DNA, 25 bp, Artificial
  probe
  misc_feature (1)..(25): SEQ ID NO: 5838; WAN024DXJ_at; Start 165; Stop 189
taaaggcttgagctttccaaggtcc

SEQ ID NO: 175204 - DNA, 25 bp, Artificial
  probe
  misc_feature (1)..(25): SEQ ID NO: 5838; WAN024DXJ_at; Start 196; Stop 220
gatagcagctgttttaccttcttgg

SEQ ID NO: 175205 - DNA, 25 bp, Artificial
  probe
  misc_feature (1)..(25): SEQ ID NO: 5838; WAN024DXJ_at; Start 185; Stop 209
ggtccgtcgatgatagcagctgttt

SEQ ID NO: 175206 - DNA, 25 bp, Artificial
  probe
  misc_feature (1)..(25): SEQ ID NO: 5838; WAN024DXJ_at; Start 203; Stop 227
gctgttttaccttcttggaattgag

SEQ ID NO: 175207 - DNA, 25 bp, Artificial
  probe
  misc_feature (1)..(25): SEQ ID NO: 5838; WAN024DXJ_at; Start 198; Stop 222
tagcagctgttttaccttcttggaa

SEQ ID NO: 175208 - DNA, 25 bp, Artificial
  probe
  misc_feature (1)..(25): SEQ ID NO: 5838; WAN024DXJ_at; Start 13; Stop 37
tgcaacaaggaagtctacaaatttt

SEQ ID NO: 175209 - DNA, 25 bp, Artificial
  probe
  misc_feature (1)..(25): SEQ ID NO: 5838; WAN024DXJ_at; Start 170; Stop 194
gcttgagctttccaaggtccgtcga

SEQ ID NO: 175210 - DNA, 25 bp, Artificial
  probe
  misc_feature (1)..(25): SEQ ID NO: 5838; WAN024DXJ_at; Start 138; Stop 162
caactccgtagtttactttagcatc

SEQ ID NO: 175211 - DNA, 25 bp, Artificial
  probe
  misc_feature (1)..(25): SEQ ID NO: 5838; WAN024DXJ_at; Start 189; Stop 213
cgtcgatgatagcagctgttttacc

SEQ ID NO: 175212 - DNA, 25 bp, Artificial
  probe
  misc_feature (1)..(25): SEQ ID NO: 5838; WAN024DXJ_at; Start 65; Stop 89
tgaggaatgacccaagctttaccac

SEQ ID NO: 175213 - DNA, 25 bp, Artificial
  probe
  misc_feature (1)..(25): SEQ ID NO: 5838; WAN024DXJ_at; Start 129; Stop 153
ggatagttgcaactccgtagtttac

SEQ ID NO: 175214 - DNA, 25 bp, Artificial
  probe
  misc_feature (1)..(25): SEQ ID NO: 5838; WAN024DXJ_at; Start 67; Stop 91
aggaatgacccaagctttaccacca

SEQ ID NO: 175215 - DNA, 25 bp, Artificial
  probe
  misc_feature (1)..(25): SEQ ID NO: 2877; WAN024DXK_at; Start 925; Stop 949
tgggtcattcctcaagccgttaaga

SEQ ID NO: 175216 - DNA, 25 bp, Artificial
  probe
  misc_feature (1)..(25): SEQ ID NO: 2877; WAN024DXK_at; Start 779; Stop 803
aattccaagaaggtaaaacagctgc

SEQ ID NO: 175217 - DNA, 25 bp, Artificial
  probe
  misc_feature (1)..(25): SEQ ID NO: 2877; WAN024DXK_at; Start 220; Stop 244
aaaactggtgatgctctaggaggtc

SEQ ID NO: 175218 - DNA, 25 bp, Artificial
  probe
  misc_feature (1)..(25): SEQ ID NO: 2877; WAN024DXK_at; Start 601; Stop 625
tatggacttcttgccggtaacggtg

SEQ ID NO: 175219 - DNA, 25 bp, Artificial
  probe
  misc_feature (1)..(25): SEQ ID NO: 2877; WAN024DXK_at; Start 809; Stop 833
tcgacggaccttggaaagctcaagc

SEQ ID NO: 175220 - DNA, 25 bp, Artificial
  probe
  misc_feature (1)..(25): SEQ ID NO: 2877; WAN024DXK_at; Start 127; Stop 151
gaactcactgtatatgtagacgagg

SEQ ID NO: 175221 - DNA, 25 bp, Artificial
  probe
  misc_feature (1)..(25): SEQ ID NO: 2877; WAN024DXK_at; Start 80; Stop 104
gcaaaactgctgataagcctgctga

SEQ ID NO: 175222 - DNA, 25 bp, Artificial
  probe
  misc_feature (1)..(25): SEQ ID NO: 2877; WAN024DXK_at; Start 430; Stop 454
cctgccgttatcgagtcacttgtta

SEQ ID NO: 175223 - DNA, 25 bp, Artificial
  probe
  misc_feature (1)..(25): SEQ ID NO: 2877; WAN024DXK_at; Start 1014; Stop 1038
tgataagactaacgaaatcccagct

SEQ ID NO: 175224 - DNA, 25 bp, Artificial
  probe
  misc_feature (1)..(25): SEQ ID NO: 2877; WAN024DXK_at; Start 527; Stop 551
gcaaatacgcattcgctggtgaaga

SEQ ID NO: 175225 - DNA, 25 bp, Artificial
  probe
  misc_feature (1)..(25): SEQ ID NO: 2877; WAN024DXK_at; Start 851; Stop 875
taaactacggagttgcaactatccc

SEQ ID NO: 175226 - DNA, 25 bp, Artificial
  probe
  misc_feature (1)..(25): SEQ ID NO: 2877; WAN024DXK_at; Start 794; Stop 818
aaacagctgctatcatcgacggacc

SEQ ID NO: 175227 - DNA, 25 bp, Artificial
  probe
  misc_feature (1)..(25): SEQ ID NO: 2877; WAN024DXK_at; Start 896; Stop 920
aatatgctgcattcggtggtggtaa

SEQ ID NO: 175228 - DNA, 25 bp, Artificial
  probe
  misc_feature (1)..(25): SEQ ID NO: 2877; WAN024DXK_at; Start 1068; Stop 1092
taaaaacgatgagttgacaacagct

SEQ ID NO: 175229 - DNA, 25 bp, Artificial
  probe
  misc_feature (1)..(25): SEQ ID NO: 2877; WAN024DXK_at; Start 543; Stop 567
tggtgaagatggtaaaactactgcc

SEQ ID NO: 175230 - DNA, 25 bp, Artificial
  probe
  misc_feature (1)..(25): SEQ ID NO: 2877; WAN024DXK_at; Start 264; Stop 288
caaccaatctggtaatgtccctgat

SEQ ID NO: 175231 - DNA, 25 bp, Artificial
  probe
  misc_feature (1)..(25): SEQ ID NO: 2877; WAN024DXK_at; Start 411; Stop 435
tggtaaagtttacggtgctcctgcc

SEQ ID NO: 175232 - DNA, 25 bp, Artificial
  probe
  misc_feature (1)..(25): SEQ ID NO: 2877; WAN024DXK_at; Start 618; Stop 642
taacggtgcttacgtctttggccaa

SEQ ID NO: 175233 - DNA, 25 bp, Artificial
  probe
  misc_feature (1)..(25): SEQ ID NO: 2877; WAN024DXK_at; Start 465; Stop 489
caaagacttggtgaaagatgctcca

SEQ ID NO: 175234 - DNA, 25 bp, Artificial
  probe
  misc_feature (1)..(25): SEQ ID NO: 2877; WAN024DXK_at; Start 747; Stop 771
tacagaaggtgctggaaacttaatc

SEQ ID NO: 175235 - DNA, 25 bp, Artificial
  probe
  misc_feature (1)..(25): SEQ ID NO: 2877; WAN024DXK_at; Start 661; Stop 685
gacatcggtcttgcaaacgacggtt

SEQ ID NO: 175236 - DNA, 25 bp, Artificial
  probe
  misc_feature (1)..(25): SEQ ID NO: 2877; WAN024DXK_at; Start 1047; Stop 1071
ggctcgttcatacgctgaaggtaaa

SEQ ID NO: 175237 - DNA, 25 bp, Artificial
  probe
  misc_feature (1)..(25): SEQ ID NO: 2877; WAN024DXK_at; Start 96; Stop 120
gcctgctgattctggttcatctgaa

SEQ ID NO: 175238 - DNA, 25 bp, Artificial
  probe
  misc_feature (1)..(25): SEQ ID NO: 2877; WAN024DXK_at; Start 279; Stop 303
tgtccctgatgttatgatggctcca

SEQ ID NO: 175239 - DNA, 25 bp, Artificial
  probe
  misc_feature (1)..(25): SEQ ID NO: 2877; WAN024DXK_at; Start 1032; Stop 1056
cccagctaatactgaggctcgttca

SEQ ID NO: 175240 - DNA, 25 bp, Artificial
  probe
  misc_feature (1)..(25): SEQ ID NO: 2877; WAN024DXK_at; Start 1182; Stop 1206
tgctgtaagtggtcaaaaagatgct

SEQ ID NO: 175241 - DNA, 25 bp, Artificial
  probe
  misc_feature (1)..(25): SEQ ID NO: 2877; WAN024DXK_at; Start 344; Stop 368
cagaagtgaaattgagcgatggtgc

SEQ ID NO: 175242 - DNA, 25 bp, Artificial
  probe
  misc_feature (1)..(25): SEQ ID NO: 2877; WAN024DXK_at; Start 645; Stop 669
cggtaaagacgctaaagacatcggt

SEQ ID NO: 175243 - DNA, 25 bp, Artificial
  probe
  misc_feature (1)..(25): SEQ ID NO: 2877; WAN024DXK_at; Start 558; Stop 582
aactactgccttcctagctgactgg

SEQ ID NO: 175244 - DNA, 25 bp, Artificial
  probe
  misc_feature (1)..(25): SEQ ID NO: 2877; WAN024DXK_at; Start 494; Stop 518
catttgctgacttggaaaaccttgc

SEQ ID NO: 175245 - DNA, 25 bp, Artificial
  probe
  misc_feature (1)..(25): SEQ ID NO: 2877; WAN024DXK_at; Start 1153; Stop 1177
tgggatccagcgaaaaatatgctct

SEQ ID NO: 175246 - DNA, 25 bp, Artificial
  probe
  misc_feature (1)..(25): SEQ ID NO: 2877; WAN024DXK_at; Start 1139; Stop 1163
aaatgtctgcagtttgggatccagc

SEQ ID NO: 175247 - DNA, 25 bp, Artificial
  probe
  misc_feature (1)..(25): SEQ ID NO: 2877; WAN024DXK_at; Start 1203; Stop 1227
tgctaaaacagctgctaacgatgct

SEQ ID NO: 175248 - DNA, 25 bp, Artificial
  probe
  misc_feature (1)..(25): SEQ ID NO: 2877; WAN024DXK_at; Start 359; Stop 383
gcgatggtgctaaaacagacgacac

SEQ ID NO: 175249 - DNA, 25 bp, Artificial
  probe
  misc_feature (1)..(25): SEQ ID NO: 637; WAN024DXL_at; Start 1025; Stop 1049
aagaccttggcttcatgacagatga

SEQ ID NO: 175250 - DNA, 25 bp, Artificial
  probe
  misc_feature (1)..(25): SEQ ID NO: 637; WAN024DXL_at; Start 970; Stop 994
tacaagctttttgcagccgttaagg

SEQ ID NO: 175251 - DNA, 25 bp, Artificial
  probe
  misc_feature (1)..(25): SEQ ID NO: 637; WAN024DXL_at; Start 641; Stop 665
gggacatgccaatctacgtagcgga

SEQ ID NO: 175252 - DNA, 25 bp, Artificial
  probe
  misc_feature (1)..(25): SEQ ID NO: 637; WAN024DXL_at; Start 316; Stop 340
tatgcacgtcgtcctcttttagaaa

SEQ ID NO: 175253 - DNA, 25 bp, Artificial
  probe
  misc_feature (1)..(25): SEQ ID NO: 637; WAN024DXL_at; Start 823; Stop 847
tacaaatggtggattgaacgcttgc

SEQ ID NO: 175254 - DNA, 25 bp, Artificial
  probe
  misc_feature (1)..(25): SEQ ID NO: 637; WAN024DXL_at; Start 702; Stop 726
caaaacagatgtcaatggtaaggct

SEQ ID NO: 175255 - DNA, 25 bp, Artificial
  probe
  misc_feature (1)..(25): SEQ ID NO: 637; WAN024DXL_at; Start 524; Stop 548
gctatcgtgagcaattggcagacaa

SEQ ID NO: 175256 - DNA, 25 bp, Artificial
  probe
  misc_feature (1)..(25): SEQ ID NO: 637; WAN024DXL_at; Start 736; Stop 760
gcaggatgcccaccagatgagtttt

SEQ ID NO: 175257 - DNA, 25 bp, Artificial
  probe
  misc_feature (1)..(25): SEQ ID NO: 637; WAN024DXL_at; Start 1066; Stop 1090
gaacgtactggcttcccaggaatga

SEQ ID NO: 175258 - DNA, 25 bp, Artificial
  probe
  misc_feature (1)..(25): SEQ ID NO: 637; WAN024DXL_at; Start 1209; Stop 1233
ccgtaatgagattgatgatgcgact

SEQ ID NO: 175259 - DNA, 25 bp, Artificial
  probe
  misc_feature (1)..(25): SEQ ID NO: 637; WAN024DXL_at; Start 27; Stop 51
gatgcacatctcttctcttccagga

SEQ ID NO: 175260 - DNA, 25 bp, Artificial
  probe
  misc_feature (1)..(25): SEQ ID NO: 637; WAN024DXL_at; Start 391; Stop 415
tttgctcaagacaaccaatcatggc

SEQ ID NO: 175261 - DNA, 25 bp, Artificial
  probe
  misc_feature (1)..(25): SEQ ID NO: 637; WAN024DXL_at; Start 1159; Stop 1183
tcagttatgtacacaggaacacacg

SEQ ID NO: 175262 - DNA, 25 bp, Artificial
  probe
  misc_feature (1)..(25): SEQ ID NO: 637; WAN024DXL_at; Start 791; Stop 815
tctatgactgggaagcaatggacaa

SEQ ID NO: 175263 - DNA, 25 bp, Artificial
  probe
  misc_feature (1)..(25): SEQ ID NO: 637; WAN024DXL_at; Start 1426; Stop 1450
gatcaattgacaccagctgtcgagg

SEQ ID NO: 175264 - DNA, 25 bp, Artificial
  probe
  misc_feature (1)..(25): SEQ ID NO: 637; WAN024DXL_at; Start 1270; Stop 1294
tacgaaacagtggtacacgctatgc

SEQ ID NO: 175265 - DNA, 25 bp, Artificial
  probe
  misc_feature (1)..(25): SEQ ID NO: 637; WAN024DXL_at; Start 474; Stop 498
tgaatggccagatgcagatgctcgt

SEQ ID NO: 175266 - DNA, 25 bp, Artificial
  probe
  misc_feature (1)..(25): SEQ ID NO: 637; WAN024DXL_at; Start 175; Stop 199
caatctttctcagccttcgcaggaa

SEQ ID NO: 175267 - DNA, 25 bp, Artificial
  probe
  misc_feature (1)..(25): SEQ ID NO: 637; WAN024DXL_at; Start 1377; Stop 1401
gaacttcccatctacccttggtgga

SEQ ID NO: 175268 - DNA, 25 bp, Artificial
  probe
  misc_feature (1)..(25): SEQ ID NO: 637; WAN024DXL_at; Start 490; Stop 514
gatgctcgtgctcgtaaagcttcag

SEQ ID NO: 175269 - DNA, 25 bp, Artificial
  probe
  misc_feature (1)..(25): SEQ ID NO: 637; WAN024DXL_at; Start 138; Stop 162
tccattaggagcaactagttacggg

SEQ ID NO: 175270 - DNA, 25 bp, Artificial
  probe
  misc_feature (1)..(25): SEQ ID NO: 637; WAN024DXL_at; Start 1391; Stop 1415
cccttggtggaaactggtcttggcg

SEQ ID NO: 175271 - DNA, 25 bp, Artificial
  probe
  misc_feature (1)..(25): SEQ ID NO: 637; WAN024DXL_at; Start 872; Stop 896
tcgttcgtatcgaccacttccgtgg

SEQ ID NO: 175272 - DNA, 25 bp, Artificial
  probe
  misc_feature (1)..(25): SEQ ID NO: 637; WAN024DXL_at; Start 1446; Stop 1470
cgaggaaggtttgcttgacttgaca

SEQ ID NO: 175273 - DNA, 25 bp, Artificial
  probe
  misc_feature (1)..(25): SEQ ID NO: 637; WAN024DXL_at; Start 1349; Stop 1373
tactagaattggatgaggcagctcg

SEQ ID NO: 175274 - DNA, 25 bp, Artificial
  probe
  misc_feature (1)..(25): SEQ ID NO: 637; WAN024DXL_at; Start 459; Stop 483
caatcttgcttggactgaatggcca

SEQ ID NO: 175275 - DNA, 25 bp, Artificial
  probe
  misc_feature (1)..(25): SEQ ID NO: 637; WAN024DXL_at; Start 891; Stop 915
ccgtggcttcgaatcttactgggaa

SEQ ID NO: 175276 - DNA, 25 bp, Artificial
  probe
  misc_feature (1)..(25): SEQ ID NO: 637; WAN024DXL_at; Start 720; Stop 744
taaggctacttgtatcgcaggatgc

SEQ ID NO: 175277 - DNA, 25 bp, Artificial
  probe
  misc_feature (1)..(25): SEQ ID NO: 637; WAN024DXL_at; Start 1120; Stop 1144
gacgaaagcattgatagcccacact

SEQ ID NO: 175278 - DNA, 25 bp, Artificial
  probe
  misc_feature (1)..(25): SEQ ID NO: 637; WAN024DXL_at; Start 913; Stop 937
gaaatccctgctggttccgatacag

SEQ ID NO: 175279 - DNA, 25 bp, Artificial
  probe
  misc_feature (1)..(25): SEQ ID NO: 637; WAN024DXL_at; Start 45; Stop 69
tccaggagcttacggaatcggatca

SEQ ID NO: 175280 - DNA, 25 bp, Artificial
  probe
  misc_feature (1)..(25): SEQ ID NO: 637; WAN024DXL_at; Start 1230; Stop 1254
gactcgtgagtacatggctcgttac

SEQ ID NO: 175281 - DNA, 25 bp, Artificial
  probe
  misc_feature (1)..(25): SEQ ID NO: 637; WAN024DXL_at; Start 1010; Stop 1034
taaacatcatcgcagaagaccttgg

SEQ ID NO: 175282 - DNA, 25 bp, Artificial
  probe
  misc_feature (1)..(25): SEQ ID NO: 637; WAN024DXL_at; Start 928; Stop 952
tccgatacagcagcacctggtgagt

SEQ ID NO: 175283 - DNA, 25 bp, Artificial
  probe
  misc_feature (1)..(25): SEQ ID NO: 2321; WAN024DXM_at; Start 656; Stop 680
aattcaagaggccatttttcaagcg

SEQ ID NO: 175284 - DNA, 25 bp, Artificial
  probe
  misc_feature (1)..(25): SEQ ID NO: 2321; WAN024DXM_at; Start 707; Stop 731
taggcagtcatgctacgaacaattg

SEQ ID NO: 175285 - DNA, 25 bp, Artificial
  probe
  misc_feature (1)..(25): SEQ ID NO: 2321; WAN024DXM_at; Start 61; Stop 85
gattggacgagcagggatgttacca

SEQ ID NO: 175286 - DNA, 25 bp, Artificial
  probe
  misc_feature (1)..(25): SEQ ID NO: 2321; WAN024DXM_at; Start 7; Stop 31
aatgtcttgagcgattgtgtaggct

SEQ ID NO: 175287 - DNA, 25 bp, Artificial
  probe
  misc_feature (1)..(25): SEQ ID NO: 2321; WAN024DXM_at; Start 374; Stop 398
ttagcatgcataagccaacgacgga

SEQ ID NO: 175288 - DNA, 25 bp, Artificial
  probe
  misc_feature (1)..(25): SEQ ID NO: 2321; WAN024DXM_at; Start 337; Stop 361
tccaagaatctcatccaagtagtga

SEQ ID NO: 175289 - DNA, 25 bp, Artificial
  probe
  misc_feature (1)..(25): SEQ ID NO: 2321; WAN024DXM_at; Start 493; Stop 517
tgcaaccccgttaacactgtatccg

SEQ ID NO: 175290 - DNA, 25 bp, Artificial
  probe
  misc_feature (1)..(25): SEQ ID NO: 2321; WAN024DXM_at; Start 600; Stop 624
cacgacggtccaattcttcgatgat

SEQ ID NO: 175291 - DNA, 25 bp, Artificial
  probe
  misc_feature (1)..(25): SEQ ID NO: 2321; WAN024DXM_at; Start 619; Stop 643
gatgattggtaccaagtgaggaacc

SEQ ID NO: 175292 - DNA, 25 bp, Artificial
  probe
  misc_feature (1)..(25): SEQ ID NO: 2321; WAN024DXM_at; Start 222; Stop 246
gagccaatttacgtttgttgtgagc

SEQ ID NO: 175293 - DNA, 25 bp, Artificial
  probe
  misc_feature (1)..(25): SEQ ID NO: 2321; WAN024DXM_at; Start 95; Stop 119
tcaaggtatttgtggatcacgtaca

SEQ ID NO: 175294 - DNA, 25 bp, Artificial
  probe
  misc_feature (1)..(25): SEQ ID NO: 2321; WAN024DXM_at; Start 441; Stop 465
ggtcgtagaaggctttcaactcaga

SEQ ID NO: 175295 - DNA, 25 bp, Artificial
  probe
  misc_feature (1)..(25): SEQ ID NO: 2321; WAN024DXM_at; Start 237; Stop 261
tgttgtgagccttgatgctttccaa

SEQ ID NO: 175296 - DNA, 25 bp, Artificial
  probe
  misc_feature (1)..(25): SEQ ID NO: 2321; WAN024DXM_at; Start 185; Stop 209
ggattgatttccacaccttggtgtt

SEQ ID NO: 175297 - DNA, 25 bp, Artificial
  probe
  misc_feature (1)..(25): SEQ ID NO: 2321; WAN024DXM_at; Start 684; Stop 708
cagcaaggattgtgtggttagtgta

SEQ ID NO: 175298 - DNA, 25 bp, Artificial
  probe
  misc_feature (1)..(25): SEQ ID NO: 2321; WAN024DXM_at; Start 634; Stop 658
gtgaggaaccacttcttgcaagaat

SEQ ID NO: 175299 - DNA, 25 bp, Artificial
  probe
  misc_feature (1)..(25): SEQ ID NO: 2321; WAN024DXM_at; Start 515; Stop 539
ccgtagtggatatccatgtgagcca

SEQ ID NO: 175300 - DNA, 25 bp, Artificial
  probe
  misc_feature (1)..(25): SEQ ID NO: 2321; WAN024DXM_at; Start 583; Stop 607
tttgtactctgccttcacacgacgg

SEQ ID NO: 175301 - DNA, 25 bp, Artificial
  probe
  misc_feature (1)..(25): SEQ ID NO: 2321; WAN024DXM_at; Start 359; Stop 383
tgagacaatcttgggttagcatgca

SEQ ID NO: 175302 - DNA, 25 bp, Artificial
  probe
  misc_feature (1)..(25): SEQ ID NO: 2321; WAN024DXM_at; Start 76; Stop 100
gatgttaccagctttgatgtcaagg

SEQ ID NO: 175303 - DNA, 25 bp, Artificial
  probe
  misc_feature (1)..(25): SEQ ID NO: 2321; WAN024DXM_at; Start 323; Stop 347
tggtgccaaccatctccaagaatct

SEQ ID NO: 175304 - DNA, 25 bp, Artificial
  probe
  misc_feature (1)..(25): SEQ ID NO: 2321; WAN024DXM_at; Start 204; Stop 228
ggtgttctttcaagtgacgagccaa

SEQ ID NO: 175305 - DNA, 25 bp, Artificial
  probe
  misc_feature (1)..(25): SEQ ID NO: 2321; WAN024DXM_at; Start 108; Stop 132
ggatcacgtacaaagcgttcatttg

SEQ ID NO: 175306 - DNA, 25 bp, Artificial
  probe
  misc_feature (1)..(25): SEQ ID NO: 2321; WAN024DXM_at; Start 389; Stop 413
caacgacggaaagtgataccgtttg

SEQ ID NO: 175307 - DNA, 25 bp, Artificial
  probe
  misc_feature (1)..(25): SEQ ID NO: 2321; WAN024DXM_at; Start 308; Stop 332
agctcatctgcttcatggtgccaac

SEQ ID NO: 175308 - DNA, 25 bp, Artificial
  probe
  misc_feature (1)..(25): SEQ ID NO: 2321; WAN024DXM_at; Start 48; Stop 72
caaagaagattgtgattggacgagc

SEQ ID NO: 175309 - DNA, 25 bp, Artificial
  probe
  misc_feature (1)..(25): SEQ ID NO: 2321; WAN024DXM_at; Start 558; Stop 582
catcgatgatttgaacagctggatc

SEQ ID NO: 175310 - DNA, 25 bp, Artificial
  probe
  misc_feature (1)..(25): SEQ ID NO: 2321; WAN024DXM_at; Start 147; Stop 171
cgtgaagacgtttgatttggatatc

SEQ ID NO: 175311 - DNA, 25 bp, Artificial
  probe
  misc_feature (1)..(25): SEQ ID NO: 2321; WAN024DXM_at; Start 131; Stop 155
tgttggcgtttgtactcgtgaagac

SEQ ID NO: 175312 - DNA, 25 bp, Artificial
  probe
  misc_feature (1)..(25): SEQ ID NO: 2321; WAN024DXM_at; Start 543; Stop 567
gaacacgtccgctctcatcgatgat

SEQ ID NO: 175313 - DNA, 25 bp, Artificial
  probe
  misc_feature (1)..(25): SEQ ID NO: 2321; WAN024DXM_at; Start 570; Stop 594
gaacagctggatctttgtactctgc

SEQ ID NO: 175314 - DNA, 25 bp, Artificial
  probe
  misc_feature (1)..(25): SEQ ID NO: 2321; WAN024DXM_at; Start 293; Stop 317
gacaaaagtttttcaagctcatctg

SEQ ID NO: 175315 - DNA, 25 bp, Artificial
  probe
  misc_feature (1)..(25): SEQ ID NO: 2321; WAN024DXM_at; Start 31; Stop 55
tggagctgctttaccaccaaagaag

SEQ ID NO: 175316 - DNA, 25 bp, Artificial
  probe
  misc_feature (1)..(25): SEQ ID NO: 2321; WAN024DXM_at; Start 531; Stop 555
tgtgagccatgtgaacacgtccgct

SEQ ID NO: 175317 - DNA, 25 bp, Artificial
  probe
  misc_feature (1)..(25): SEQ ID NO: 3019; WAN024DXN_at; Start 235; Stop 259
gcagctgcaggtaaagacttgatcg

SEQ ID NO: 175318 - DNA, 25 bp, Artificial
  probe
  misc_feature (1)..(25): SEQ ID NO: 3019; WAN024DXN_at; Start 666; Stop 690
cctttacccagatgatagtgaccgt

SEQ ID NO: 175319 - DNA, 25 bp, Artificial
  probe
  misc_feature (1)..(25): SEQ ID NO: 3019; WAN024DXN_at; Start 1651; Stop 1675
gaagttattgctaacgatccagcag

SEQ ID NO: 175320 - DNA, 25 bp, Artificial
  probe
  misc_feature (1)..(25): SEQ ID NO: 3019; WAN024DXN_at; Start 1399; Stop 1423
cgtaaattggctcgtcacttgaaag

SEQ ID NO: 175321 - DNA, 25 bp, Artificial
  probe
  misc_feature (1)..(25): SEQ ID NO: 3019; WAN024DXN_at; Start 1915; Stop 1939
gaaactgttatcgacctttacgcaa

SEQ ID NO: 175322 - DNA, 25 bp, Artificial
  probe
  misc_feature (1)..(25): SEQ ID NO: 3019; WAN024DXN_at; Start 454; Stop 478
caaaactggttggttcgctcaagcc

SEQ ID NO: 175323 - DNA, 25 bp, Artificial
  probe
  misc_feature (1)..(25): SEQ ID NO: 3019; WAN024DXN_at; Start 87; Stop 111
taactacagcaagcttgcaagcagc

SEQ ID NO: 175324 - DNA, 25 bp, Artificial
  probe
  misc_feature (1)..(25): SEQ ID NO: 3019; WAN024DXN_at; Start 1501; Stop 1525
caaatgaacgctttgtacgtgatcc

SEQ ID NO: 175325 - DNA, 25 bp, Artificial
  probe
  misc_feature (1)..(25): SEQ ID NO: 3019; WAN024DXN_at; Start 103; Stop 127
gcaagcagccaaaaaccagtcaaca

SEQ ID NO: 175326 - DNA, 25 bp, Artificial
  probe
  misc_feature (1)..(25): SEQ ID NO: 3019; WAN024DXN_at; Start 902; Stop 926
caattgttcgtagcatgactgccta

SEQ ID NO: 175327 - DNA, 25 bp, Artificial
  probe
  misc_feature (1)..(25): SEQ ID NO: 3019; WAN024DXN_at; Start 1062; Stop 1086
tcaaatcatcgatgagagcggacgt

SEQ ID NO: 175328 - DNA, 25 bp, Artificial
  probe
  misc_feature (1)..(25): SEQ ID NO: 3019; WAN024DXN_at; Start 1034; Stop 1058
tgaaggcagagtacaaagatccagc

SEQ ID NO: 175329 - DNA, 25 bp, Artificial
  probe
  misc_feature (1)..(25): SEQ ID NO: 3019; WAN024DXN_at; Start 1285; Stop 1309
gagattcttggagatggttggcacc

SEQ ID NO: 175330 - DNA, 25 bp, Artificial
  probe
  misc_feature (1)..(25): SEQ ID NO: 3019; WAN024DXN_at; Start 2020; Stop 2044
cttgcagctggaaacaaagagcgct

SEQ ID NO: 175331 - DNA, 25 bp, Artificial
  probe
  misc_feature (1)..(25): SEQ ID NO: 3019; WAN024DXN_at; Start 1580; Stop 1604
tctttggtggtaaagcagctccagc

SEQ ID NO: 175332 - DNA, 25 bp, Artificial
  probe
  misc_feature (1)..(25): SEQ ID NO: 3019; WAN024DXN_at; Start 1379; Stop 1403
gcatcaaggctcacaacaaacgtaa

SEQ ID NO: 175333 - DNA, 25 bp, Artificial
  probe
  misc_feature (1)..(25): SEQ ID NO: 3019; WAN024DXN_at; Start 1537; Stop 1561
gacatcaaagctggtaacatccctg

SEQ ID NO: 175334 - DNA, 25 bp, Artificial
  probe
  misc_feature (1)..(25): SEQ ID NO: 3019; WAN024DXN_at; Start 221; Stop 245
ttaaaaaagaacttgcagctgcagg

SEQ ID NO: 175335 - DNA, 25 bp, Artificial
  probe
  misc_feature (1)..(25): SEQ ID NO: 3019; WAN024DXN_at; Start 952; Stop 976
gcgcttgaaaaatggcctcttgaat

SEQ ID NO: 175336 - DNA, 25 bp, Artificial
  probe
  misc_feature (1)..(25): SEQ ID NO: 3019; WAN024DXN_at; Start 2143; Stop 2167
tacgaagaccgtgacgcatggttgg

SEQ ID NO: 175337 - DNA, 25 bp, Artificial
  probe
  misc_feature (1)..(25): SEQ ID NO: 3019; WAN024DXN_at; Start 1300; Stop 1324
ggttggcaccatgaagcagatgagc

SEQ ID NO: 175338 - DNA, 25 bp, Artificial
  probe
  misc_feature (1)..(25): SEQ ID NO: 3019; WAN024DXN_at; Start 1078; Stop 1102
agcggacgtgttcacatggctcaca

SEQ ID NO: 175339 - DNA, 25 bp, Artificial
  probe
  misc_feature (1)..(25): SEQ ID NO: 3019; WAN024DXN_at; Start 631; Stop 655
gacaagacagatatcgctcgcaact

SEQ ID NO: 175340 - DNA, 25 bp, Artificial
  probe
  misc_feature (1)..(25): SEQ ID NO: 3019; WAN024DXN_at; Start 1969; Stop 1993
gctcgtgaagctatcaaaccattgg

SEQ ID NO: 175341 - DNA, 25 bp, Artificial
  probe
  misc_feature (1)..(25): SEQ ID NO: 3019; WAN024DXN_at; Start 432; Stop 456
tccaaatgcatggttgacagagcaa

SEQ ID NO: 175342 - DNA, 25 bp, Artificial
  probe
  misc_feature (1)..(25): SEQ ID NO: 3019; WAN024DXN_at; Start 2239; Stop 2263
gacatctggcacttgaactaactaa

SEQ ID NO: 175343 - DNA, 25 bp, Artificial
  probe
  misc_feature (1)..(25): SEQ ID NO: 3019; WAN024DXN_at; Start 2192; Stop 2216
aagcaggattcttctcatctgaccg

SEQ ID NO: 175344 - DNA, 25 bp, Artificial
  probe
  misc_feature (1)..(25): SEQ ID NO: 3019; WAN024DXN_at; Start 685; Stop 709
gaccgtcaaggtgaattgctccgta

SEQ ID NO: 175345 - DNA, 25 bp, Artificial
  probe
  misc_feature (1)..(25): SEQ ID NO: 3019; WAN024DXN_at; Start 2128; Stop 2152
caaatgcttgctgactacgaagacc

SEQ ID NO: 175346 - DNA, 25 bp, Artificial
  probe
  misc_feature (1)..(25): SEQ ID NO: 3019; WAN024DXN_at; Start 1007; Stop 1031
caatcatcgaagaattggaccgtcg

SEQ ID NO: 175347 - DNA, 25 bp, Artificial
  probe
  misc_feature (1)..(25): SEQ ID NO: 3019; WAN024DXN_at; Start 785; Stop 809
tgcatgaccttgctgactacgcagt

SEQ ID NO: 175348 - DNA, 25 bp, Artificial
  probe
  misc_feature (1)..(25): SEQ ID NO: 3019; WAN024DXN_at; Start 1248; Stop 1272
tatgcatgctaacccaagattgtct

SEQ ID NO: 175349 - DNA, 25 bp, Artificial
  probe
  misc_feature (1)..(25): SEQ ID NO: 3019; WAN024DXN_at; Start 1817; Stop 1841
tgaacggagctttgacacttggtac

SEQ ID NO: 175350 - DNA, 25 bp, Artificial
  probe
  misc_feature (1)..(25): SEQ ID NO: 3019; WAN024DXN_at; Start 734; Stop 758
caaacggtgcgcaattgatcatcga

SEQ ID NO: 175351 - DNA, 25 bp, Artificial
  probe
  misc_feature (1)..(25): SEQ ID NO: 5387; WAN024DXO_at; Start 223; Stop 247
caacatggagacgatgtcttgcaag

SEQ ID NO: 175352 - DNA, 25 bp, Artificial
  probe
  misc_feature (1)..(25): SEQ ID NO: 5387; WAN024DXO_at; Start 185; Stop 209
tgaaagacgagctagatgcatctgt

SEQ ID NO: 175353 - DNA, 25 bp, Artificial
  probe
  misc_feature (1)..(25): SEQ ID NO: 5387; WAN024DXO_at; Start 125; Stop 149
tcttagcaagtaaggaagctaaaaa

SEQ ID NO: 175354 - DNA, 25 bp, Artificial
  probe
  misc_feature (1)..(25): SEQ ID NO: 5387; WAN024DXO_at; Start 202; Stop 226
gcatctgtttctgttgtgaagcaac

SEQ ID NO: 175355 - DNA, 25 bp, Artificial
  probe
  misc_feature (1)..(25): SEQ ID NO: 5387; WAN024DXO_at; Start 108; Stop 132
tacccttggtttgaaaatcttagca

SEQ ID NO: 175356 - DNA, 25 bp, Artificial
  probe
  misc_feature (1)..(25): SEQ ID NO: 5387; WAN024DXO_at; Start 199; Stop 223
gatgcatctgtttctgttgtgaagc

SEQ ID NO: 175357 - DNA, 25 bp, Artificial
  probe
  misc_feature (1)..(25): SEQ ID NO: 5387; WAN024DXO_at; Start 238; Stop 262
gtcttgcaagatgccaaatatttgt

SEQ ID NO: 175358 - DNA, 25 bp, Artificial
  probe
  misc_feature (1)..(25): SEQ ID NO: 5387; WAN024DXO_at; Start 45; Stop 69
agtattaaccgttgcaaaagttgcg

SEQ ID NO: 175359 - DNA, 25 bp, Artificial
  probe
  misc_feature (1)..(25): SEQ ID NO: 5387; WAN024DXO_at; Start 86; Stop 110
ttttgggtggtgtcgcatttggtac

SEQ ID NO: 175360 - DNA, 25 bp, Artificial
  probe
  misc_feature (1)..(25): SEQ ID NO: 5387; WAN024DXO_at; Start 77; Stop 101
cttcattatttttgggtggtgtcgc

SEQ ID NO: 175361 - DNA, 25 bp, Artificial
  probe
  misc_feature (1)..(25): SEQ ID NO: 5387; WAN024DXO_at; Start 219; Stop 243
gaagcaacatggagacgatgtcttg

SEQ ID NO: 175362 - DNA, 25 bp, Artificial
  probe
  misc_feature (1)..(25): SEQ ID NO: 5387; WAN024DXO_at; Start 244; Stop 268
caagatgccaaatatttgtacgagc

SEQ ID NO: 175363 - DNA, 25 bp, Artificial
  probe
  misc_feature (1)..(25): SEQ ID NO: 5387; WAN024DXO_at; Start 47; Stop 71
tattaaccgttgcaaaagttgcgaa

SEQ ID NO: 175364 - DNA, 25 bp, Artificial
  probe
  misc_feature (1)..(25): SEQ ID NO: 5387; WAN024DXO_at; Start 98; Stop 122
tcgcatttggtacccttggtttgaa

SEQ ID NO: 175365 - DNA, 25 bp, Artificial
  probe
  misc_feature (1)..(25): SEQ ID NO: 5387; WAN024DXO_at; Start 190; Stop 214
gacgagctagatgcatctgtttctg

SEQ ID NO: 175366 - DNA, 25 bp, Artificial
  probe
  misc_feature (1)..(25): SEQ ID NO: 5387; WAN024DXO_at; Start 58; Stop 82
gcaaaagttgcgaaaaaatcttcat

SEQ ID NO: 175367 - DNA, 25 bp, Artificial
  probe
  misc_feature (1)..(25): SEQ ID NO: 5387; WAN024DXO_at; Start 216; Stop 240
tgtgaagcaacatggagacgatgtc

SEQ ID NO: 175368 - DNA, 25 bp, Artificial
  probe
  misc_feature (1)..(25): SEQ ID NO: 5387; WAN024DXO_at; Start 256; Stop 280
tatttgtacgagcaagagaaaaaag

SEQ ID NO: 175369 - DNA, 25 bp, Artificial
  probe
  misc_feature (1)..(25): SEQ ID NO: 5387; WAN024DXO_at; Start 274; Stop 298
aaaaaagaagagcaattagatagcc

SEQ ID NO: 175370 - DNA, 25 bp, Artificial
  probe
  misc_feature (1)..(25): SEQ ID NO: 5387; WAN024DXO_at; Start 250; Stop 274
gccaaatatttgtacgagcaagaga

SEQ ID NO: 175371 - DNA, 25 bp, Artificial
  probe
  misc_feature (1)..(25): SEQ ID NO: 5387; WAN024DXO_at; Start 175; Stop 199
gcttacaagttgaaagacgagctag

SEQ ID NO: 175372 - DNA, 25 bp, Artificial
  probe
  misc_feature (1)..(25): SEQ ID NO: 5387; WAN024DXO_at; Start 91; Stop 115
ggtggtgtcgcatttggtacccttg

SEQ ID NO: 175373 - DNA, 25 bp, Artificial
  probe
  misc_feature (1)..(25): SEQ ID NO: 5387; WAN024DXO_at; Start 211; Stop 235
tctgttgtgaagcaacatggagacg

SEQ ID NO: 175374 - DNA, 25 bp, Artificial
  probe
  misc_feature (1)..(25): SEQ ID NO: 5387; WAN024DXO_at; Start 120; Stop 144
gaaaatcttagcaagtaaggaagct

SEQ ID NO: 175375 - DNA, 25 bp, Artificial
  probe
  misc_feature (1)..(25): SEQ ID NO: 5387; WAN024DXO_at; Start 2; Stop 26
tgctatataataatgataaggagga

SEQ ID NO: 175376 - DNA, 25 bp, Artificial
  probe
  misc_feature (1)..(25): SEQ ID NO: 5387; WAN024DXO_at; Start 152; Stop 176
gttattctaaagctttggctaaggc

SEQ ID NO: 175377 - DNA, 25 bp, Artificial
  probe
  misc_feature (1)..(25): SEQ ID NO: 5387; WAN024DXO_at; Start 292; Stop 316
gatagccttataggtgaataactaa

SEQ ID NO: 175378 - DNA, 25 bp, Artificial
  probe
  misc_feature (1)..(25): SEQ ID NO: 5387; WAN024DXO_at; Start 232; Stop 256
gacgatgtcttgcaagatgccaaat

SEQ ID NO: 175379 - DNA, 25 bp, Artificial
  probe
  misc_feature (1)..(25): SEQ ID NO: 5387; WAN024DXO_at; Start 12; Stop 36
taatgataaggaggaaataagtatg

SEQ ID NO: 175380 - DNA, 25 bp, Artificial
  probe
  misc_feature (1)..(25): SEQ ID NO: 5387; WAN024DXO_at; Start 169; Stop 193
gctaaggcttacaagttgaaagacg

SEQ ID NO: 175381 - DNA, 25 bp, Artificial
  probe
  misc_feature (1)..(25): SEQ ID NO: 5387; WAN024DXO_at; Start 159; Stop 183
taaagctttggctaaggcttacaag

SEQ ID NO: 175382 - DNA, 25 bp, Artificial
  probe
  misc_feature (1)..(25): SEQ ID NO: 5387; WAN024DXO_at; Start 283; Stop 307
gagcaattagatagccttataggtg

SEQ ID NO: 175383 - DNA, 25 bp, Artificial
  probe
  misc_feature (1)..(25): SEQ ID NO: 5387; WAN024DXO_at; Start 229; Stop 253
ggagacgatgtcttgcaagatgcca

SEQ ID NO: 175384 - DNA, 25 bp, Artificial
  probe
  misc_feature (1)..(25): SEQ ID NO: 5387; WAN024DXO_at; Start 180; Stop 204
caagttgaaagacgagctagatgca

SEQ ID NO: 175385 - DNA, 25 bp, Artificial
  probe
  misc_feature (1)..(25): SEQ ID NO: 1240; WAN024DXP_at; Start 168; Stop 192
gataaatgtgttcctcaagacaggc

SEQ ID NO: 175386 - DNA, 25 bp, Artificial
  probe
  misc_feature (1)..(25): SEQ ID NO: 1240; WAN024DXP_at; Start 113; Stop 137
tcatgttcaattccctctatctcag

SEQ ID NO: 175387 - DNA, 25 bp, Artificial
  probe
  misc_feature (1)..(25): SEQ ID NO: 1240; WAN024DXP_at; Start 83; Stop 107
gcgatatattggagtttcccatgca

SEQ ID NO: 175388 - DNA, 25 bp, Artificial
  probe
  misc_feature (1)..(25): SEQ ID NO: 1240; WAN024DXP_at; Start 147; Stop 171
cgatggcattagcaataggatgata

SEQ ID NO: 175389 - DNA, 25 bp, Artificial
  probe
  misc_feature (1)..(25): SEQ ID NO: 1240; WAN024DXP_at; Start 70; Stop 94
gatccccttgcttgcgatatattgg

SEQ ID NO: 175390 - DNA, 25 bp, Artificial
  probe
  misc_feature (1)..(25): SEQ ID NO: 1240; WAN024DXP_at; Start 9; Stop 33
gctcatcctgcatcaagacataatt

SEQ ID NO: 175391 - DNA, 25 bp, Artificial
  probe
  misc_feature (1)..(25): SEQ ID NO: 1240; WAN024DXP_at; Start 202; Stop 226
gagaatatcttcctcactatagtct

SEQ ID NO: 175392 - DNA, 25 bp, Artificial
  probe
  misc_feature (1)..(25): SEQ ID NO: 1240; WAN024DXP_at; Start 196; Stop 220
gattctgagaatatcttcctcacta

SEQ ID NO: 175393 - DNA, 25 bp, Artificial
  probe
  misc_feature (1)..(25): SEQ ID NO: 1240; WAN024DXP_at; Start 60; Stop 84
tatgagatttgatccccttgcttgc

SEQ ID NO: 175394 - DNA, 25 bp, Artificial
  probe
  misc_feature (1)..(25): SEQ ID NO: 1240; WAN024DXP_at; Start 18; Stop 42
gcatcaagacataattcccaataag

SEQ ID NO: 175395 - DNA, 25 bp, Artificial
  probe
  misc_feature (1)..(25): SEQ ID NO: 1240; WAN024DXP_at; Start 159; Stop 183
caataggatgataaatgtgttcctc

SEQ ID NO: 175396 - DNA, 25 bp, Artificial
  probe
  misc_feature (1)..(25): SEQ ID NO: 1240; WAN024DXP_at; Start 74; Stop 98
cccttgcttgcgatatattggagtt

SEQ ID NO: 175397 - DNA, 25 bp, Artificial
  probe
  misc_feature (1)..(25): SEQ ID NO: 1240; WAN024DXP_at; Start 178; Stop 202
ttcctcaagacaggcactgattctg

SEQ ID NO: 175398 - DNA, 25 bp, Artificial
  probe
  misc_feature (1)..(25): SEQ ID NO: 1240; WAN024DXP_at; Start 170; Stop 194
taaatgtgttcctcaagacaggcac

SEQ ID NO: 175399 - DNA, 25 bp, Artificial
  probe
  misc_feature (1)..(25): SEQ ID NO: 1240; WAN024DXP_at; Start 33; Stop 57
tcccaataagaactggttggccatc

SEQ ID NO: 175400 - DNA, 25 bp, Artificial
  probe
  misc_feature (1)..(25): SEQ ID NO: 1240; WAN024DXP_at; Start 79; Stop 103
gcttgcgatatattggagtttccca

SEQ ID NO: 175401 - DNA, 25 bp, Artificial
  probe
  misc_feature (1)..(25): SEQ ID NO: 1240; WAN024DXP_at; Start 14; Stop 38
tcctgcatcaagacataattcccaa

SEQ ID NO: 175402 - DNA, 25 bp, Artificial
  probe
  misc_feature (1)..(25): SEQ ID NO: 1240; WAN024DXP_at; Start 141; Stop 165
gcttgacgatggcattagcaatagg

SEQ ID NO: 175403 - DNA, 25 bp, Artificial
  probe
  misc_feature (1)..(25): SEQ ID NO: 1240; WAN024DXP_at; Start 174; Stop 198
tgtgttcctcaagacaggcactgat

SEQ ID NO: 175404 - DNA, 25 bp, Artificial
  probe
  misc_feature (1)..(25): SEQ ID NO: 1240; WAN024DXP_at; Start 42; Stop 66
gaactggttggccatctatatgaga

SEQ ID NO: 175405 - DNA, 25 bp, Artificial
  probe
  misc_feature (1)..(25): SEQ ID NO: 1240; WAN024DXP_at; Start 121; Stop 145
aattccctctatctcagcttgcttg

SEQ ID NO: 175406 - DNA, 25 bp, Artificial
  probe
  misc_feature (1)..(25): SEQ ID NO: 1240; WAN024DXP_at; Start 52; Stop 76
gccatctatatgagatttgatcccc

SEQ ID NO: 175407 - DNA, 25 bp, Artificial
  probe
  misc_feature (1)..(25): SEQ ID NO: 1240; WAN024DXP_at; Start 182; Stop 206
tcaagacaggcactgattctgagaa

SEQ ID NO: 175408 - DNA, 25 bp, Artificial
  probe
  misc_feature (1)..(25): SEQ ID NO: 1240; WAN024DXP_at; Start 29; Stop 53
taattcccaataagaactggttggc

SEQ ID NO: 175409 - DNA, 25 bp, Artificial
  probe
  misc_feature (1)..(25): SEQ ID NO: 1240; WAN024DXP_at; Start 93; Stop 117
ggagtttcccatgcatttcctcatg

SEQ ID NO: 175410 - DNA, 25 bp, Artificial
  probe
  misc_feature (1)..(25): SEQ ID NO: 1240; WAN024DXP_at; Start 186; Stop 210
gacaggcactgattctgagaatatc

SEQ ID NO: 175411 - DNA, 25 bp, Artificial
  probe
  misc_feature (1)..(25): SEQ ID NO: 1240; WAN024DXP_at; Start 134; Stop 158
tcagcttgcttgacgatggcattag

SEQ ID NO: 175412 - DNA, 25 bp, Artificial
  probe
  misc_feature (1)..(25): SEQ ID NO: 1240; WAN024DXP_at; Start 130; Stop 154
tatctcagcttgcttgacgatggca

SEQ ID NO: 175413 - DNA, 25 bp, Artificial
  probe
  misc_feature (1)..(25): SEQ ID NO: 1240; WAN024DXP_at; Start 36; Stop 60
caataagaactggttggccatctat

SEQ ID NO: 175414 - DNA, 25 bp, Artificial
  probe
  misc_feature (1)..(25): SEQ ID NO: 1240; WAN024DXP_at; Start 213; Stop 237
cctcactatagtctccaaaaggtaa

SEQ ID NO: 175415 - DNA, 25 bp, Artificial
  probe
  misc_feature (1)..(25): SEQ ID NO: 1240; WAN024DXP_at; Start 2; Stop 26
tgaatctgctcatcctgcatcaaga

SEQ ID NO: 175416 - DNA, 25 bp, Artificial
  probe
  misc_feature (1)..(25): SEQ ID NO: 1240; WAN024DXP_at; Start 64; Stop 88
agatttgatccccttgcttgcgata

SEQ ID NO: 175417 - DNA, 25 bp, Artificial
  probe
  misc_feature (1)..(25): SEQ ID NO: 1240; WAN024DXP_at; Start 104; Stop 128
tgcatttcctcatgttcaattccct

SEQ ID NO: 175418 - DNA, 25 bp, Artificial
  probe
  misc_feature (1)..(25): SEQ ID NO: 1240; WAN024DXP_at; Start 144; Stop 168
tgacgatggcattagcaataggatg

SEQ ID NO: 175419 - DNA, 25 bp, Artificial
  probe
  misc_feature (1)..(25): SEQ ID NO: 3900; WAN024DXQ_at; Start 295; Stop 319
tcaggtgcagcggttaagcgtgtac

SEQ ID NO: 175420 - DNA, 25 bp, Artificial
  probe
  misc_feature (1)..(25): SEQ ID NO: 3900; WAN024DXQ_at; Start 404; Stop 428
cactagcgcgtaaggaactaacgat

SEQ ID NO: 175421 - DNA, 25 bp, Artificial
  probe
  misc_feature (1)..(25): SEQ ID NO: 3900; WAN024DXQ_at; Start 258; Stop 282
tcccattcgtagagaagagagtgct

SEQ ID NO: 175422 - DNA, 25 bp, Artificial
  probe
  misc_feature (1)..(25): SEQ ID NO: 3900; WAN024DXQ_at; Start 1418; Stop 1442
tcttgatgcaggatgagcagattca

SEQ ID NO: 175423 - DNA, 25 bp, Artificial
  probe
  misc_feature (1)..(25): SEQ ID NO: 3900; WAN024DXQ_at; Start 629; Stop 653
tcaagagttccgatgttcaaatagg

SEQ ID NO: 175424 - DNA, 25 bp, Artificial
  probe
  misc_feature (1)..(25): SEQ ID NO: 3900; WAN024DXQ_at; Start 923; Stop 947
tcaagatggcggataaagtcgtcaa

SEQ ID NO: 175425 - DNA, 25 bp, Artificial
  probe
  misc_feature (1)..(25): SEQ ID NO: 3900; WAN024DXQ_at; Start 1327; Stop 1351
catgaggaaatgcatgggaaactcc

SEQ ID NO: 175426 - DNA, 25 bp, Artificial
  probe
  misc_feature (1)..(25): SEQ ID NO: 3900; WAN024DXQ_at; Start 468; Stop 492
tatgaaccaatccaagacagctagc

SEQ ID NO: 175427 - DNA, 25 bp, Artificial
  probe
  misc_feature (1)..(25): SEQ ID NO: 3900; WAN024DXQ_at; Start 1036; Stop 1060
gctttgaaaatctctactcctgtag

SEQ ID NO: 175428 - DNA, 25 bp, Artificial
  probe
  misc_feature (1)..(25): SEQ ID NO: 3900; WAN024DXQ_at; Start 1287; Stop 1311
taatgccatcgtcaagcaagctgag

SEQ ID NO: 175429 - DNA, 25 bp, Artificial
  probe
  misc_feature (1)..(25): SEQ ID NO: 3900; WAN024DXQ_at; Start 1019; Stop 1043
tggtcgatttctcctgcgctttgaa

SEQ ID NO: 175430 - DNA, 25 bp, Artificial
  probe
  misc_feature (1)..(25): SEQ ID NO: 3900; WAN024DXQ_at; Start 577; Stop 601
cttgcaaaagagagcgatgtattcc

SEQ ID NO: 175431 - DNA, 25 bp, Artificial
  probe
  misc_feature (1)..(25): SEQ ID NO: 3900; WAN024DXQ_at; Start 596; Stop 620
tattcctagtacagggcgatacggt

SEQ ID NO: 175432 - DNA, 25 bp, Artificial
  probe
  misc_feature (1)..(25): SEQ ID NO: 3900; WAN024DXQ_at; Start 736; Stop 760
tccttgacaggagagagttttccag

SEQ ID NO: 175433 - DNA, 25 bp, Artificial
  probe
  misc_feature (1)..(25): SEQ ID NO: 3900; WAN024DXQ_at; Start 966; Stop 990
tgggctgacttacctattgacaggt

SEQ ID NO: 175434 - DNA, 25 bp, Artificial
  probe
  misc_feature (1)..(25): SEQ ID NO: 3900; WAN024DXQ_at; Start 1378; Stop 1402
tctcatatagatggccaaccagttc

SEQ ID NO: 175435 - DNA, 25 bp, Artificial
  probe
  misc_feature (1)..(25): SEQ ID NO: 3900; WAN024DXQ_at; Start 1346; Stop 1370
aactccaatatatcgcaagcaaggg

SEQ ID NO: 175436 - DNA, 25 bp, Artificial
  probe
  misc_feature (1)..(25): SEQ ID NO: 3900; WAN024DXQ_at; Start 162; Stop 186
tactctacgcataaaagaaggcttt

SEQ ID NO: 175437 - DNA, 25 bp, Artificial
  probe
  misc_feature (1)..(25): SEQ ID NO: 3900; WAN024DXQ_at; Start 283; Stop 307
tattctattgtttcaggtgcagcgg

SEQ ID NO: 175438 - DNA, 25 bp, Artificial
  probe
  misc_feature (1)..(25): SEQ ID NO: 3900; WAN024DXQ_at; Start 1758; Stop 1782
agatggattgaatgactcagcggct

SEQ ID NO: 175439 - DNA, 25 bp, Artificial
  probe
  misc_feature (1)..(25): SEQ ID NO: 3900; WAN024DXQ_at; Start 803; Stop 827
tagaaactggagagttacgcattcg

SEQ ID NO: 175440 - DNA, 25 bp, Artificial
  probe
  misc_feature (1)..(25): SEQ ID NO: 3900; WAN024DXQ_at; Start 1881; Stop 1905
ccaagagttggattcgttatcatca

SEQ ID NO: 175441 - DNA, 25 bp, Artificial
  probe
  misc_feature (1)..(25): SEQ ID NO: 3900; WAN024DXQ_at; Start 830; Stop 854
taacagataatcagatgaacagccg

SEQ ID NO: 175442 - DNA, 25 bp, Artificial
  probe
  misc_feature (1)..(25): SEQ ID NO: 3900; WAN024DXQ_at; Start 1244; Stop 1268
gaatcagtgcctgtcttgaggaaca

SEQ ID NO: 175443 - DNA, 25 bp, Artificial
  probe
  misc_feature (1)..(25): SEQ ID NO: 3900; WAN024DXQ_at; Start 135; Stop 159
ccagttttacatggatcaacagcac

SEQ ID NO: 175444 - DNA, 25 bp, Artificial
  probe
  misc_feature (1)..(25): SEQ ID NO: 3900; WAN024DXQ_at; Start 16; Stop 40
tttaaagtgctacatagaggatacc

SEQ ID NO: 175445 - DNA, 25 bp, Artificial
  probe
  misc_feature (1)..(25): SEQ ID NO: 3900; WAN024DXQ_at; Start 709; Stop 733
tcaggtttaggtatggtcaacgaaa

SEQ ID NO: 175446 - DNA, 25 bp, Artificial
  probe
  misc_feature (1)..(25): SEQ ID NO: 3900; WAN024DXQ_at; Start 1719; Stop 1743
gaaactgcagaaagcaggtcacact

SEQ ID NO: 175447 - DNA, 25 bp, Artificial
  probe
  misc_feature (1)..(25): SEQ ID NO: 3900; WAN024DXQ_at; Start 86; Stop 110
aagactatcttcgttccttggcgag

SEQ ID NO: 175448 - DNA, 25 bp, Artificial
  probe
  misc_feature (1)..(25): SEQ ID NO: 3900; WAN024DXQ_at; Start 356; Stop 380
tatggacttgttatcaggctttggg

SEQ ID NO: 175449 - DNA, 25 bp, Artificial
  probe
  misc_feature (1)..(25): SEQ ID NO: 3900; WAN024DXQ_at; Start 1678; Stop 1702
tatacagacttgaaacctgatggga

SEQ ID NO: 175450 - DNA, 25 bp, Artificial
  probe
  misc_feature (1)..(25): SEQ ID NO: 3900; WAN024DXQ_at; Start 908; Stop 932
aacaacgctatttcatcaagatggc

SEQ ID NO: 175451 - DNA, 25 bp, Artificial
  probe
  misc_feature (1)..(25): SEQ ID NO: 3900; WAN024DXQ_at; Start 389; Stop 413
gagaagcctatcaaacactagcgcg

SEQ ID NO: 175452 - DNA, 25 bp, Artificial
  probe
  misc_feature (1)..(25): SEQ ID NO: 3900; WAN024DXQ_at; Start 1161; Stop 1185
taagacaggaacaatcacaactagt

SEQ ID NO: 175453 - DNA, 25 bp, Artificial
  probe
  misc_feature (1)..(25): SEQ ID NO: 3930; WAN024DXR_at; Start 195; Stop 219
tactcatcatgtagttgaccgtgaa

SEQ ID NO: 175454 - DNA, 25 bp, Artificial
  probe
  misc_feature (1)..(25): SEQ ID NO: 3930; WAN024DXR_at; Start 387; Stop 411
tacgttcagcatctttgaaggacgg

SEQ ID NO: 175455 - DNA, 25 bp, Artificial
  probe
  misc_feature (1)..(25): SEQ ID NO: 3930; WAN024DXR_at; Start 335; Stop 359
tgtccttggatagacttgacccagc

SEQ ID NO: 175456 - DNA, 25 bp, Artificial
  probe
  misc_feature (1)..(25): SEQ ID NO: 3930; WAN024DXR_at; Start 124; Stop 148
cccttgcatgatttggtaagcgaac

SEQ ID NO: 175457 - DNA, 25 bp, Artificial
  probe
  misc_feature (1)..(25): SEQ ID NO: 3930; WAN024DXR_at; Start 1; Stop 25
gtgaccagtcttgtccgccttacga

SEQ ID NO: 175458 - DNA, 25 bp, Artificial
  probe
  misc_feature (1)..(25): SEQ ID NO: 3930; WAN024DXR_at; Start 312; Stop 336
caaagtcaagaaaacgagaaagttg

SEQ ID NO: 175459 - DNA, 25 bp, Artificial
  probe
  misc_feature (1)..(25): SEQ ID NO: 3930; WAN024DXR_at; Start 217; Stop 241
gaagtattttccaatatcacggagg

SEQ ID NO: 175460 - DNA, 25 bp, Artificial
  probe
  misc_feature (1)..(25): SEQ ID NO: 3930; WAN024DXR_at; Start 360; Stop 384
catctactgtgtcttttgtttggag

SEQ ID NO: 175461 - DNA, 25 bp, Artificial
  probe
  misc_feature (1)..(25): SEQ ID NO: 3930; WAN024DXR_at; Start 431; Stop 455
gcaccgccaacgagcgcataaggtt

SEQ ID NO: 175462 - DNA, 25 bp, Artificial
  probe
  misc_feature (1)..(25): SEQ ID NO: 3930; WAN024DXR_at; Start 412; Stop 436
atctccgatgagacctgtagcaccg

SEQ ID NO: 175463 - DNA, 25 bp, Artificial
  probe
  misc_feature (1)..(25): SEQ ID NO: 3930; WAN024DXR_at; Start 346; Stop 370
agacttgacccagccatctactgtg

SEQ ID NO: 175464 - DNA, 25 bp, Artificial
  probe
  misc_feature (1)..(25): SEQ ID NO: 3930; WAN024DXR_at; Start 88; Stop 112
gacattatggtcttggttaaggacg

SEQ ID NO: 175465 - DNA, 25 bp, Artificial
  probe
  misc_feature (1)..(25): SEQ ID NO: 3930; WAN024DXR_at; Start 283; Stop 307
gaccatgacagccttgttttcgcca

SEQ ID NO: 175466 - DNA, 25 bp, Artificial
  probe
  misc_feature (1)..(25): SEQ ID NO: 3930; WAN024DXR_at; Start 138; Stop 162
ggtaagcgaactcagtgtaagaaat

SEQ ID NO: 175467 - DNA, 25 bp, Artificial
  probe
  misc_feature (1)..(25): SEQ ID NO: 3930; WAN024DXR_at; Start 37; Stop 61
ggtaccagctgtcatatttccccac

SEQ ID NO: 175468 - DNA, 25 bp, Artificial
  probe
  misc_feature (1)..(25): SEQ ID NO: 3930; WAN024DXR_at; Start 27; Stop 51
gaagcaattcggtaccagctgtcat

SEQ ID NO: 175469 - DNA, 25 bp, Artificial
  probe
  misc_feature (1)..(25): SEQ ID NO: 3930; WAN024DXR_at; Start 14; Stop 38
tccgccttacgacgaagcaattcgg

SEQ ID NO: 175470 - DNA, 25 bp, Artificial
  probe
  misc_feature (1)..(25): SEQ ID NO: 3930; WAN024DXR_at; Start 259; Stop 283
gctgccaaaccagtcgtagttgttg

SEQ ID NO: 175471 - DNA, 25 bp, Artificial
  probe
  misc_feature (1)..(25): SEQ ID NO: 3930; WAN024DXR_at; Start 231; Stop 255
tatcacggaggaagtcaatgaagct

SEQ ID NO: 175472 - DNA, 25 bp, Artificial
  probe
  misc_feature (1)..(25): SEQ ID NO: 3930; WAN024DXR_at; Start 372; Stop 396
cttttgtttggagactacgttcagc

SEQ ID NO: 175473 - DNA, 25 bp, Artificial
  probe
  misc_feature (1)..(25): SEQ ID NO: 3930; WAN024DXR_at; Start 325; Stop 349
acgagaaagttgtccttggatagac

SEQ ID NO: 175474 - DNA, 25 bp, Artificial
  probe
  misc_feature (1)..(25): SEQ ID NO: 3930; WAN024DXR_at; Start 49; Stop 73
catatttccccactggtcagaacca

SEQ ID NO: 175475 - DNA, 25 bp, Artificial
  probe
  misc_feature (1)..(25): SEQ ID NO: 3930; WAN024DXR_at; Start 206; Stop 230
tagttgaccgtgaagtattttccaa

SEQ ID NO: 175476 - DNA, 25 bp, Artificial
  probe
  misc_feature (1)..(25): SEQ ID NO: 3930; WAN024DXR_at; Start 402; Stop 426
tgaaggacggatctccgatgagacc

SEQ ID NO: 175477 - DNA, 25 bp, Artificial
  probe
  misc_feature (1)..(25): SEQ ID NO: 3930; WAN024DXR_at; Start 75; Stop 99
cgatttgaagagtgacattatggtc

SEQ ID NO: 175478 - DNA, 25 bp, Artificial
  probe
  misc_feature (1)..(25): SEQ ID NO: 3930; WAN024DXR_at; Start 62; Stop 86
tggtcagaaccaccgatttgaagag

SEQ ID NO: 175479 - DNA, 25 bp, Artificial
  probe
  misc_feature (1)..(25): SEQ ID NO: 3930; WAN024DXR_at; Start 297; Stop 321
tgttttcgccattttcaaagtcaag

SEQ ID NO: 175480 - DNA, 25 bp, Artificial
  probe
  misc_feature (1)..(25): SEQ ID NO: 3930; WAN024DXR_at; Start 109; Stop 133
gacgaagaagtcatacccttgcatg

SEQ ID NO: 175481 - DNA, 25 bp, Artificial
  probe
  misc_feature (1)..(25): SEQ ID NO: 3930; WAN024DXR_at; Start 101; Stop 125
tggttaaggacgaagaagtcatacc

SEQ ID NO: 175482 - DNA, 25 bp, Artificial
  probe
  misc_feature (1)..(25): SEQ ID NO: 3930; WAN024DXR_at; Start 153; Stop 177
tgtaagaaattcctgtttcgatccg

SEQ ID NO: 175483 - DNA, 25 bp, Artificial
  probe
  misc_feature (1)..(25): SEQ ID NO: 3930; WAN024DXR_at; Start 245; Stop 269
tcaatgaagctgatgctgccaaacc

SEQ ID NO: 175484 - DNA, 25 bp, Artificial
  probe
  misc_feature (1)..(25): SEQ ID NO: 3930; WAN024DXR_at; Start 184; Stop 208
aacagattccttactcatcatgtag

SEQ ID NO: 175485 - DNA, 25 bp, Artificial
  probe
  misc_feature (1)..(25): SEQ ID NO: 3930; WAN024DXR_at; Start 272; Stop 296
tcgtagttgttgaccatgacagcct

SEQ ID NO: 175486 - DNA, 25 bp, Artificial
  probe
  misc_feature (1)..(25): SEQ ID NO: 3930; WAN024DXR_at; Start 444; Stop 468
gcgcataaggtttgtgacctgctag

SEQ ID NO: 175487 - DNA, 25 bp, Artificial
  probe
  misc_feature (1)..(25): SEQ ID NO: 1938; WAN024DXS_at; Start 209; Stop 233
gcggtgctacaggtctcatcggaga

SEQ ID NO: 175488 - DNA, 25 bp, Artificial
  probe
  misc_feature (1)..(25): SEQ ID NO: 1938; WAN024DXS_at; Start 1086; Stop 1110
tatagttaactcaaaacgccaagcc

SEQ ID NO: 175489 - DNA, 25 bp, Artificial
  probe
  misc_feature (1)..(25): SEQ ID NO: 1938; WAN024DXS_at; Start 709; Stop 733
gccgtctggctcaatcccgaaaaga

SEQ ID NO: 175490 - DNA, 25 bp, Artificial
  probe
  misc_feature (1)..(25): SEQ ID NO: 1938; WAN024DXS_at; Start 44; Stop 68
aaacgactgatgaagaagctttgcg

SEQ ID NO: 175491 - DNA, 25 bp, Artificial
  probe
  misc_feature (1)..(25): SEQ ID NO: 1938; WAN024DXS_at; Start 558; Stop 582
cactcttcaaatcggtggttctgac

SEQ ID NO: 175492 - DNA, 25 bp, Artificial
  probe
  misc_feature (1)..(25): SEQ ID NO: 1938; WAN024DXS_at; Start 1130; Stop 1154
gagccatctacgtaaacggcgaccg

SEQ ID NO: 175493 - DNA, 25 bp, Artificial
  probe
  misc_feature (1)..(25): SEQ ID NO: 1938; WAN024DXS_at; Start 64; Stop 88
ttgcgtaaagccctagaagaaggtc

SEQ ID NO: 175494 - DNA, 25 bp, Artificial
  probe
  misc_feature (1)..(25): SEQ ID NO: 1938; WAN024DXS_at; Start 498; Stop 522
gttcgcttaccaaatcatgcaaggg

SEQ ID NO: 175495 - DNA, 25 bp, Artificial
  probe
  misc_feature (1)..(25): SEQ ID NO: 1938; WAN024DXS_at; Start 137; Stop 161
taggccaccttgtcgcaatcttgac

SEQ ID NO: 175496 - DNA, 25 bp, Artificial
  probe
  misc_feature (1)..(25): SEQ ID NO: 1938; WAN024DXS_at; Start 290; Stop 314
gggtcaagtctatccaaggacaact

SEQ ID NO: 175497 - DNA, 25 bp, Artificial
  probe
  misc_feature (1)..(25): SEQ ID NO: 1938; WAN024DXS_at; Start 755; Stop 779
aattctggatgaacgtgatggacgc

SEQ ID NO: 175498 - DNA, 25 bp, Artificial
  probe
  misc_feature (1)..(25): SEQ ID NO: 1938; WAN024DXS_at; Start 161; Stop 185
caagtcgtcgcttgcaactagcagg

SEQ ID NO: 175499 - DNA, 25 bp, Artificial
  probe
  misc_feature (1)..(25): SEQ ID NO: 1938; WAN024DXS_at; Start 1113; Stop 1137
tgaagacgtccaaaacggagccatc

SEQ ID NO: 175500 - DNA, 25 bp, Artificial
  probe
  misc_feature (1)..(25): SEQ ID NO: 1938; WAN024DXS_at; Start 348; Stop 372
caaggctgtcatggtcaacaactac

SEQ ID NO: 175501 - DNA, 25 bp, Artificial
  probe
  misc_feature (1)..(25): SEQ ID NO: 1938; WAN024DXS_at; Start 363; Stop 387
caacaactacgactggtttggcagc

SEQ ID NO: 175502 - DNA, 25 bp, Artificial
  probe
  misc_feature (1)..(25): SEQ ID NO: 1938; WAN024DXS_at; Start 588; Stop 612
gggaaatatgacagctggtaccgaa

SEQ ID NO: 175503 - DNA, 25 bp, Artificial
  probe
  misc_feature (1)..(25): SEQ ID NO: 1938; WAN024DXS_at; Start 333; Stop 357
tgaaaatggcgaaaacaaggctgtc

SEQ ID NO: 175504 - DNA, 25 bp, Artificial
  probe
  misc_feature (1)..(25): SEQ ID NO: 1938; WAN024DXS_at; Start 243; Stop 267
caaagatgctgaacgtagtctccaa

SEQ ID NO: 175505 - DNA, 25 bp, Artificial
  probe
  misc_feature (1)..(25): SEQ ID NO: 1938; WAN024DXS_at; Start 1204; Stop 1228
gaactgactgttatccgtcgtggga

SEQ ID NO: 175506 - DNA, 25 bp, Artificial
  probe
  misc_feature (1)..(25): SEQ ID NO: 1938; WAN024DXS_at; Start 276; Stop 300
cacagtagatggctgggtcaagtct

SEQ ID NO: 175507 - DNA, 25 bp, Artificial
  probe
  misc_feature (1)..(25): SEQ ID NO: 1938; WAN024DXS_at; Start 775; Stop 799
gacgctgacgctgttcgcttcttga

SEQ ID NO: 175508 - DNA, 25 bp, Artificial
  probe
  misc_feature (1)..(25): SEQ ID NO: 1938; WAN024DXS_at; Start 621; Stop 645
tcgtaaggcggacaagactggtcac

SEQ ID NO: 175509 - DNA, 25 bp, Artificial
  probe
  misc_feature (1)..(25): SEQ ID NO: 1938; WAN024DXS_at; Start 690; Stop 714
tggtaaatcagaaggaaatgccgtc

SEQ ID NO: 175510 - DNA, 25 bp, Artificial
  probe
  misc_feature (1)..(25): SEQ ID NO: 1938; WAN024DXS_at; Start 937; Stop 961
gaagcacttaacatcactgagcaac

SEQ ID NO: 175511 - DNA, 25 bp, Artificial
  probe
  misc_feature (1)..(25): SEQ ID NO: 1938; WAN024DXS_at; Start 1056; Stop 1080
caatatcgtggaactgctcgtctca

SEQ ID NO: 175512 - DNA, 25 bp, Artificial
  probe
  misc_feature (1)..(25): SEQ ID NO: 1938; WAN024DXS_at; Start 227; Stop 251
tcggagatccgtccttcaaagatgc

SEQ ID NO: 175513 - DNA, 25 bp, Artificial
  probe
  misc_feature (1)..(25): SEQ ID NO: 1938; WAN024DXS_at; Start 906; Stop 930
tacacttgttcacggagaagaagcc

SEQ ID NO: 175514 - DNA, 25 bp, Artificial
  probe
  misc_feature (1)..(25): SEQ ID NO: 1938; WAN024DXS_at; Start 1001; Stop 1025
tcaaacaaggacttcgtggtgtgcc

SEQ ID NO: 175515 - DNA, 25 bp, Artificial
  probe
  misc_feature (1)..(25): SEQ ID NO: 1938; WAN024DXS_at; Start 606; Stop 630
taccgaattgcttcgtcgtaaggcg

SEQ ID NO: 175516 - DNA, 25 bp, Artificial
  probe
  misc_feature (1)..(25): SEQ ID NO: 1938; WAN024DXS_at; Start 868; Stop 892
gaacgcttggctcaaaaagtcttgg

SEQ ID NO: 175517 - DNA, 25 bp, Artificial
  probe
  misc_feature (1)..(25): SEQ ID NO: 1938; WAN024DXS_at; Start 418; Stop 442
ggaaaatacttcacggtcaactaca

SEQ ID NO: 175518 - DNA, 25 bp, Artificial
  probe
  misc_feature (1)..(25): SEQ ID NO: 1938; WAN024DXS_at; Start 100; Stop 124
tatactggctacgatccaactgctg

SEQ ID NO: 175519 - DNA, 25 bp, Artificial
  probe
  misc_feature (1)..(25): SEQ ID NO: 1938; WAN024DXS_at; Start 190; Stop 214
aaaccttatgcgctcgttggcggtg

SEQ ID NO: 175520 - DNA, 25 bp, Artificial
  probe
  misc_feature (1)..(25): SEQ ID NO: 1938; WAN024DXS_at; Start 636; Stop 660
gactggtcacgttatcactgttcca

SEQ ID NO: 175521 - DNA, 25 bp, Artificial
  probe
  misc_feature (1)..(25): SEQ ID NO: 5181; WAN024DXT_at; Start 54; Stop 78
ggtaacaatagctcctgctgcgaca

SEQ ID NO: 175522 - DNA, 25 bp, Artificial
  probe
  misc_feature (1)..(25): SEQ ID NO: 5181; WAN024DXT_at; Start 85; Stop 109
ccactaccgatttggactccttcga

SEQ ID NO: 175523 - DNA, 25 bp, Artificial
  probe
  misc_feature (1)..(25): SEQ ID NO: 5181; WAN024DXT_at; Start 405; Stop 429
aactgcagaattacgagcatcttgc

SEQ ID NO: 175524 - DNA, 25 bp, Artificial
  probe
  misc_feature (1)..(25): SEQ ID NO: 5181; WAN024DXT_at; Start 163; Stop 187
gcactagctggctcaatcacacctg

SEQ ID NO: 175525 - DNA, 25 bp, Artificial
  probe
  misc_feature (1)..(25): SEQ ID NO: 5181; WAN024DXT_at; Start 280; Stop 304
atttcagcaccgatattgataacag

SEQ ID NO: 175526 - DNA, 25 bp, Artificial
  probe
  misc_feature (1)..(25): SEQ ID NO: 5181; WAN024DXT_at; Start 133; Stop 157
agaacattgtctccgacacggactg

SEQ ID NO: 175527 - DNA, 25 bp, Artificial
  probe
  misc_feature (1)..(25): SEQ ID NO: 5181; WAN024DXT_at; Start 388; Stop 412
cgcttatctagcaaaggaactgcag

SEQ ID NO: 175528 - DNA, 25 bp, Artificial
  probe
  misc_feature (1)..(25): SEQ ID NO: 5181; WAN024DXT_at; Start 399; Stop 423
caaaggaactgcagaattacgagca

SEQ ID NO: 175529 - DNA, 25 bp, Artificial
  probe
  misc_feature (1)..(25): SEQ ID NO: 5181; WAN024DXT_at; Start 172; Stop 196
ggctcaatcacacctgccaaaactg

SEQ ID NO: 175530 - DNA, 25 bp, Artificial
  probe
  misc_feature (1)..(25): SEQ ID NO: 5181; WAN024DXT_at; Start 98; Stop 122
ggactccttcgataaccactgcatt

SEQ ID NO: 175531 - DNA, 25 bp, Artificial
  probe
  misc_feature (1)..(25): SEQ ID NO: 5181; WAN024DXT_at; Start 2; Stop 26
tgataatacgagctggaacacctgc

SEQ ID NO: 175532 - DNA, 25 bp, Artificial
  probe
  misc_feature (1)..(25): SEQ ID NO: 5181; WAN024DXT_at; Start 75; Stop 99
gacaactgaaccactaccgatttgg

SEQ ID NO: 175533 - DNA, 25 bp, Artificial
  probe
  misc_feature (1)..(25): SEQ ID NO: 5181; WAN024DXT_at; Start 144; Stop 168
tccgacacggactggttcagcacta

SEQ ID NO: 175534 - DNA, 25 bp, Artificial
  probe
  misc_feature (1)..(25): SEQ ID NO: 5181; WAN024DXT_at; Start 380; Stop 404
tgatagcacgcttatctagcaaagg

SEQ ID NO: 175535 - DNA, 25 bp, Artificial
  probe
  misc_feature (1)..(25): SEQ ID NO: 5181; WAN024DXT_at; Start 202; Stop 226
gcaccaacgtggctattttttccaa

SEQ ID NO: 175536 - DNA, 25 bp, Artificial
  probe
  misc_feature (1)..(25): SEQ ID NO: 5181; WAN024DXT_at; Start 229; Stop 253
atggcacggccaccaaggatggcac

SEQ ID NO: 175537 - DNA, 25 bp, Artificial
  probe
  misc_feature (1)..(25): SEQ ID NO: 5181; WAN024DXT_at; Start 255; Stop 279
catgtcaatcatggttccagcaccg

SEQ ID NO: 175538 - DNA, 25 bp, Artificial
  probe
  misc_feature (1)..(25): SEQ ID NO: 5181; WAN024DXT_at; Start 274; Stop 298
gcaccgatttcagcaccgatattga

SEQ ID NO: 175539 - DNA, 25 bp, Artificial
  probe
  misc_feature (1)..(25): SEQ ID NO: 5181; WAN024DXT_at; Start 215; Stop 239
tattttttccaacgatggcacggcc

SEQ ID NO: 175540 - DNA, 25 bp, Artificial
  probe
  misc_feature (1)..(25): SEQ ID NO: 5181; WAN024DXT_at; Start 306; Stop 330
tcccatcatgataacagcattgtca

SEQ ID NO: 175541 - DNA, 25 bp, Artificial
  probe
  misc_feature (1)..(25): SEQ ID NO: 5181; WAN024DXT_at; Start 367; Stop 391
tcgatacgagcgttgatagcacgct

SEQ ID NO: 175542 - DNA, 25 bp, Artificial
  probe
  misc_feature (1)..(25): SEQ ID NO: 5181; WAN024DXT_at; Start 8; Stop 32
tacgagctggaacacctgctactac

SEQ ID NO: 175543 - DNA, 25 bp, Artificial
  probe
  misc_feature (1)..(25): SEQ ID NO: 5181; WAN024DXT_at; Start 268; Stop 292
gttccagcaccgatttcagcaccga

SEQ ID NO: 175544 - DNA, 25 bp, Artificial
  probe
  misc_feature (1)..(25): SEQ ID NO: 5181; WAN024DXT_at; Start 33; Stop 57
cacgttttctgggacatcttgggta

SEQ ID NO: 175545 - DNA, 25 bp, Artificial
  probe
  misc_feature (1)..(25): SEQ ID NO: 5181; WAN024DXT_at; Start 241; Stop 265
ccaaggatggcacccatgtcaatca

SEQ ID NO: 175546 - DNA, 25 bp, Artificial
  probe
  misc_feature (1)..(25): SEQ ID NO: 5181; WAN024DXT_at; Start 153; Stop 177
gactggttcagcactagctggctca

SEQ ID NO: 175547 - DNA, 25 bp, Artificial
  probe
  misc_feature (1)..(25): SEQ ID NO: 5181; WAN024DXT_at; Start 189; Stop 213
caaaactgcacctgcaccaacgtgg

SEQ ID NO: 175548 - DNA, 25 bp, Artificial
  probe
  misc_feature (1)..(25): SEQ ID NO: 5181; WAN024DXT_at; Start 47; Stop 71
catcttgggtaacaatagctcctgc

SEQ ID NO: 175549 - DNA, 25 bp, Artificial
  probe
  misc_feature (1)..(25): SEQ ID NO: 5181; WAN024DXT_at; Start 416; Stop 440
tacgagcatcttgctcgacaacata

SEQ ID NO: 175550 - DNA, 25 bp, Artificial
  probe
  misc_feature (1)..(25): SEQ ID NO: 5181; WAN024DXT_at; Start 60; Stop 84
aatagctcctgctgcgacaactgaa

SEQ ID NO: 175551 - DNA, 25 bp, Artificial
  probe
  misc_feature (1)..(25): SEQ ID NO: 5181; WAN024DXT_at; Start 358; Stop 382
gcacctggctcgatacgagcgttga

SEQ ID NO: 175552 - DNA, 25 bp, Artificial
  probe
  misc_feature (1)..(25): SEQ ID NO: 5181; WAN024DXT_at; Start 321; Stop 345
agcattgtcaccaatttccacctgg

SEQ ID NO: 175553 - DNA, 25 bp, Artificial
  probe
  misc_feature (1)..(25): SEQ ID NO: 5181; WAN024DXT_at; Start 332; Stop 356
caatttccacctggtcacggataat

SEQ ID NO: 175554 - DNA, 25 bp, Artificial
  probe
  misc_feature (1)..(25): SEQ ID NO: 5181; WAN024DXT_at; Start 22; Stop 46
cctgctactaccacgttttctggga

SEQ ID NO: 175555 - DNA, 25 bp, Artificial
  probe
  misc_feature (1)..(25): SEQ ID NO: 1467; WAN024DXU_at; Start 309; Stop 333
tgacaatgctgttatcatgatggga

SEQ ID NO: 175556 - DNA, 25 bp, Artificial
  probe
  misc_feature (1)..(25): SEQ ID NO: 1467; WAN024DXU_at; Start 65; Stop 89
ccagtgtcaaagtaacctttgaggg

SEQ ID NO: 175557 - DNA, 25 bp, Artificial
  probe
  misc_feature (1)..(25): SEQ ID NO: 1467; WAN024DXU_at; Start 285; Stop 309
tatccgtgaccaggtggaaattggt

SEQ ID NO: 175558 - DNA, 25 bp, Artificial
  probe
  misc_feature (1)..(25): SEQ ID NO: 1467; WAN024DXU_at; Start 342; Stop 366
caatatcggtgctgaaatcggtgct

SEQ ID NO: 175559 - DNA, 25 bp, Artificial
  probe
  misc_feature (1)..(25): SEQ ID NO: 1467; WAN024DXU_at; Start 679; Stop 703
gatgcgcttcgtaccttgtaactaa

SEQ ID NO: 175560 - DNA, 25 bp, Artificial
  probe
  misc_feature (1)..(25): SEQ ID NO: 1467; WAN024DXU_at; Start 48; Stop 72
caatgctgaaaagaaaaccagtgtc

SEQ ID NO: 175561 - DNA, 25 bp, Artificial
  probe
  misc_feature (1)..(25): SEQ ID NO: 1467; WAN024DXU_at; Start 165; Stop 189
tccgcttcttgaaggtttggtagaa

SEQ ID NO: 175562 - DNA, 25 bp, Artificial
  probe
  misc_feature (1)..(25): SEQ ID NO: 1467; WAN024DXU_at; Start 257; Stop 281
tcaacgctcgtatcgagccaggtgc

SEQ ID NO: 175563 - DNA, 25 bp, Artificial
  probe
  misc_feature (1)..(25): SEQ ID NO: 1467; WAN024DXU_at; Start 88; Stop 112
gggcaactcgcaactgctgtgccta

SEQ ID NO: 175564 - DNA, 25 bp, Artificial
  probe
  misc_feature (1)..(25): SEQ ID NO: 1467; WAN024DXU_at; Start 211; Stop 235
caagatgctcgtaattctgcagttc

SEQ ID NO: 175565 - DNA, 25 bp, Artificial
  probe
  misc_feature (1)..(25): SEQ ID NO: 1467; WAN024DXU_at; Start 530; Stop 554
tcgaaggagtccaaatcggtagtgg

SEQ ID NO: 175566 - DNA, 25 bp, Artificial
  probe
  misc_feature (1)..(25): SEQ ID NO: 1467; WAN024DXU_at; Start 458; Stop 482
tgattgagccagctagtgctgaacc

SEQ ID NO: 175567 - DNA, 25 bp, Artificial
  probe
  misc_feature (1)..(25): SEQ ID NO: 1467; WAN024DXU_at; Start 100; Stop 124
actgctgtgcctagctctgttgtca

SEQ ID NO: 175568 - DNA, 25 bp, Artificial
  probe
  misc_feature (1)..(25): SEQ ID NO: 1467; WAN024DXU_at; Start 359; Stop 383
tcggtgctggaaccatgattgacat

SEQ ID NO: 175569 - DNA, 25 bp, Artificial
  probe
  misc_feature (1)..(25): SEQ ID NO: 1467; WAN024DXU_at; Start 471; Stop 495
tagtgctgaaccagtccgtgtcgga

SEQ ID NO: 175570 - DNA, 25 bp, Artificial
  probe
  misc_feature (1)..(25): SEQ ID NO: 1467; WAN024DXU_at; Start 17; Stop 41
tgaacgctcaagaaattatccaatt

SEQ ID NO: 175571 - DNA, 25 bp, Artificial
  probe
  misc_feature (1)..(25): SEQ ID NO: 1467; WAN024DXU_at; Start 542; Stop 566
aaatcggtagtggttcagttgtcgc

SEQ ID NO: 175572 - DNA, 25 bp, Artificial
  probe
  misc_feature (1)..(25): SEQ ID NO: 1467; WAN024DXU_at; Start 593; Stop 617
tcccagaaaacgtggtagtagcagg

SEQ ID NO: 175573 - DNA, 25 bp, Artificial
  probe
  misc_feature (1)..(25): SEQ ID NO: 1467; WAN024DXU_at; Start 196; Stop 220
gattatgttgtcgagcaagatgctc

SEQ ID NO: 175574 - DNA, 25 bp, Artificial
  probe
  misc_feature (1)..(25): SEQ ID NO: 1467; WAN024DXU_at; Start 33; Stop 57
tatccaatttatcgccaatgctgaa

SEQ ID NO: 175575 - DNA, 25 bp, Artificial
  probe
  misc_feature (1)..(25): SEQ ID NO: 1467; WAN024DXU_at; Start 294; Stop 318
ccaggtggaaattggtgacaatgct

SEQ ID NO: 175576 - DNA, 25 bp, Artificial
  probe
  misc_feature (1)..(25): SEQ ID NO: 1467; WAN024DXU_at; Start 608; Stop 632
tagtagcaggtgttccagctcgtat

SEQ ID NO: 175577 - DNA, 25 bp, Artificial
  probe
  misc_feature (1)..(25): SEQ ID NO: 1467; WAN024DXU_at; Start 517; Stop 541
aatgcagtggttatcgaaggagtcc

SEQ ID NO: 175578 - DNA, 25 bp, Artificial
  probe
  misc_feature (1)..(25): SEQ ID NO: 1467; WAN024DXU_at; Start 582; Stop 606
tacccaagatgtcccagaaaacgtg

SEQ ID NO: 175579 - DNA, 25 bp, Artificial
  probe
  misc_feature (1)..(25): SEQ ID NO: 1467; WAN024DXU_at; Start 227; Stop 251
ctgcagttcctttgctagataagcg

SEQ ID NO: 175580 - DNA, 25 bp, Artificial
  probe
  misc_feature (1)..(25): SEQ ID NO: 1467; WAN024DXU_at; Start 115; Stop 139
tctgttgtcaaactaggaaatgtcc

SEQ ID NO: 175581 - DNA, 25 bp, Artificial
  probe
  misc_feature (1)..(25): SEQ ID NO: 1467; WAN024DXU_at; Start 443; Stop 467
cagttttggcaggtgtgattgagcc

SEQ ID NO: 175582 - DNA, 25 bp, Artificial
  probe
  misc_feature (1)..(25): SEQ ID NO: 1467; WAN024DXU_at; Start 482; Stop 506
cagtccgtgtcggagacaatgttct

SEQ ID NO: 175583 - DNA, 25 bp, Artificial
  probe
  misc_feature (1)..(25): SEQ ID NO: 1467; WAN024DXU_at; Start 661; Stop 685
caaaaaacagcgctagaggatgcgc

SEQ ID NO: 175584 - DNA, 25 bp, Artificial
  probe
  misc_feature (1)..(25): SEQ ID NO: 1467; WAN024DXU_at; Start 2; Stop 26
tgactgctacaaaaatgaacgctca

SEQ ID NO: 175585 - DNA, 25 bp, Artificial
  probe
  misc_feature (1)..(25): SEQ ID NO: 1467; WAN024DXU_at; Start 130; Stop 154
ggaaatgtcctattcggagactgga

SEQ ID NO: 175586 - DNA, 25 bp, Artificial
  probe
  misc_feature (1)..(25): SEQ ID NO: 1467; WAN024DXU_at; Start 419; Stop 443
aaaatagccacgttggtgcaggtgc

SEQ ID NO: 175587 - DNA, 25 bp, Artificial
  probe
  misc_feature (1)..(25): SEQ ID NO: 1467; WAN024DXU_at; Start 374; Stop 398
tgattgacatgggtgccatccttgg

SEQ ID NO: 175588 - DNA, 25 bp, Artificial
  probe
  misc_feature (1)..(25): SEQ ID NO: 1467; WAN024DXU_at; Start 242; Stop 266
tagataagcgtgctatcaacgctcg

SEQ ID NO: 175589 - DNA, 25 bp, Artificial
  probe
  misc_feature (1)..(25): SEQ ID NO: 5582; WAN024DXV_at; Start 131; Stop 155
gcaatctggccgactttcaaatctg

SEQ ID NO: 175590 - DNA, 25 bp, Artificial
  probe
  misc_feature (1)..(25): SEQ ID NO: 5582; WAN024DXV_at; Start 209; Stop 233
tcctcatacatgagcataccaccag

SEQ ID NO: 175591 - DNA, 25 bp, Artificial
  probe
  misc_feature (1)..(25): SEQ ID NO: 5582; WAN024DXV_at; Start 215; Stop 239
tacatgagcataccaccagcttcat

SEQ ID NO: 175592 - DNA, 25 bp, Artificial
  probe
  misc_feature (1)..(25): SEQ ID NO: 5582; WAN024DXV_at; Start 5; Stop 29
gtcacaaagtaactagccgccacca

SEQ ID NO: 175593 - DNA, 25 bp, Artificial
  probe
  misc_feature (1)..(25): SEQ ID NO: 5582; WAN024DXV_at; Start 152; Stop 176
tctggacgaacatggagaccataga

SEQ ID NO: 175594 - DNA, 25 bp, Artificial
  probe
  misc_feature (1)..(25): SEQ ID NO: 5582; WAN024DXV_at; Start 50; Stop 74
ggaaaagctgcgtggccacctttgc

SEQ ID NO: 175595 - DNA, 25 bp, Artificial
  probe
  misc_feature (1)..(25): SEQ ID NO: 5582; WAN024DXV_at; Start 168; Stop 192
gaccatagaattgatctggcaacca

SEQ ID NO: 175596 - DNA, 25 bp, Artificial
  probe
  misc_feature (1)..(25): SEQ ID NO: 5582; WAN024DXV_at; Start 147; Stop 171
tcaaatctggacgaacatggagacc

SEQ ID NO: 175597 - DNA, 25 bp, Artificial
  probe
  misc_feature (1)..(25): SEQ ID NO: 5582; WAN024DXV_at; Start 42; Stop 66
cttcatgaggaaaagctgcgtggcc

SEQ ID NO: 175598 - DNA, 25 bp, Artificial
  probe
  misc_feature (1)..(25): SEQ ID NO: 5582; WAN024DXV_at; Start 73; Stop 97
gcctttgaaacggatcttcacctcg

SEQ ID NO: 175599 - DNA, 25 bp, Artificial
  probe
  misc_feature (1)..(25): SEQ ID NO: 5582; WAN024DXV_at; Start 98; Stop 122
caagttcctgcaaagagtgtatgag

SEQ ID NO: 175600 - DNA, 25 bp, Artificial
  probe
  misc_feature (1)..(25): SEQ ID NO: 5582; WAN024DXV_at; Start 120; Stop 144
gagtattagtcgcaatctggccgac

SEQ ID NO: 175601 - DNA, 25 bp, Artificial
  probe
  misc_feature (1)..(25): SEQ ID NO: 5582; WAN024DXV_at; Start 58; Stop 82
tgcgtggccacctttgcctttgaaa

SEQ ID NO: 175602 - DNA, 25 bp, Artificial
  probe
  misc_feature (1)..(25): SEQ ID NO: 5582; WAN024DXV_at; Start 142; Stop 166
gactttcaaatctggacgaacatgg

SEQ ID NO: 175603 - DNA, 25 bp, Artificial
  probe
  misc_feature (1)..(25): SEQ ID NO: 5582; WAN024DXV_at; Start 79; Stop 103
gaaacggatcttcacctcgcaagtt

SEQ ID NO: 175604 - DNA, 25 bp, Artificial
  probe
  misc_feature (1)..(25): SEQ ID NO: 5582; WAN024DXV_at; Start 23; Stop 47
gccaccaaggcgtcattggcttcat

SEQ ID NO: 175605 - DNA, 25 bp, Artificial
  probe
  misc_feature (1)..(25): SEQ ID NO: 5582; WAN024DXV_at; Start 84; Stop 108
ggatcttcacctcgcaagttcctgc

SEQ ID NO: 175606 - DNA, 25 bp, Artificial
  probe
  misc_feature (1)..(25): SEQ ID NO: 5582; WAN024DXV_at; Start 95; Stop 119
tcgcaagttcctgcaaagagtgtat

SEQ ID NO: 175607 - DNA, 25 bp, Artificial
  probe
  misc_feature (1)..(25): SEQ ID NO: 5582; WAN024DXV_at; Start 47; Stop 71
tgaggaaaagctgcgtggccacctt

SEQ ID NO: 175608 - DNA, 25 bp, Artificial
  probe
  misc_feature (1)..(25): SEQ ID NO: 5582; WAN024DXV_at; Start 1; Stop 25
ttgggtcacaaagtaactagccgcc

SEQ ID NO: 175609 - DNA, 25 bp, Artificial
  probe
  misc_feature (1)..(25): SEQ ID NO: 5582; WAN024DXV_at; Start 13; Stop 37
gtaactagccgccaccaaggcgtca

SEQ ID NO: 175610 - DNA, 25 bp, Artificial
  probe
  misc_feature (1)..(25): SEQ ID NO: 5582; WAN024DXV_at; Start 135; Stop 159
tctggccgactttcaaatctggacg

SEQ ID NO: 175611 - DNA, 25 bp, Artificial
  probe
  misc_feature (1)..(25): SEQ ID NO: 5582; WAN024DXV_at; Start 108; Stop 132
caaagagtgtatgagtattagtcgc

SEQ ID NO: 175612 - DNA, 25 bp, Artificial
  probe
  misc_feature (1)..(25): SEQ ID NO: 5582; WAN024DXV_at; Start 64; Stop 88
gccacctttgcctttgaaacggatc

SEQ ID NO: 175613 - DNA, 25 bp, Artificial
  probe
  misc_feature (1)..(25): SEQ ID NO: 5582; WAN024DXV_at; Start 162; Stop 186
catggagaccatagaattgatctgg

SEQ ID NO: 175614 - DNA, 25 bp, Artificial
  probe
  misc_feature (1)..(25): SEQ ID NO: 5582; WAN024DXV_at; Start 36; Stop 60
cattggcttcatgaggaaaagctgc

SEQ ID NO: 175615 - DNA, 25 bp, Artificial
  probe
  misc_feature (1)..(25): SEQ ID NO: 5582; WAN024DXV_at; Start 180; Stop 204
gatctggcaaccaatctccaaaagc

SEQ ID NO: 175616 - DNA, 25 bp, Artificial
  probe
  misc_feature (1)..(25): SEQ ID NO: 5582; WAN024DXV_at; Start 44; Stop 68
tcatgaggaaaagctgcgtggccac

SEQ ID NO: 175617 - DNA, 25 bp, Artificial
  probe
  misc_feature (1)..(25): SEQ ID NO: 5582; WAN024DXV_at; Start 28; Stop 52
caaggcgtcattggcttcatgagga

SEQ ID NO: 175618 - DNA, 25 bp, Artificial
  probe
  misc_feature (1)..(25): SEQ ID NO: 5582; WAN024DXV_at; Start 90; Stop 114
tcacctcgcaagttcctgcaaagag

SEQ ID NO: 175619 - DNA, 25 bp, Artificial
  probe
  misc_feature (1)..(25): SEQ ID NO: 5582; WAN024DXV_at; Start 117; Stop 141
tatgagtattagtcgcaatctggcc

SEQ ID NO: 175620 - DNA, 25 bp, Artificial
  probe
  misc_feature (1)..(25): SEQ ID NO: 5582; WAN024DXV_at; Start 227; Stop 251
ccaccagcttcattttcttcagcag

SEQ ID NO: 175621 - DNA, 25 bp, Artificial
  probe
  misc_feature (1)..(25): SEQ ID NO: 5582; WAN024DXV_at; Start 175; Stop 199
gaattgatctggcaaccaatctcca

SEQ ID NO: 175622 - DNA, 25 bp, Artificial
  probe
  misc_feature (1)..(25): SEQ ID NO: 5582; WAN024DXV_at; Start 18; Stop 42
tagccgccaccaaggcgtcattggc

SEQ ID NO: 175623 - DNA, 25 bp, Artificial
  probe
  misc_feature (1)..(25): SEQ ID NO: 3014; WAN024DXW_at; Start 30; Stop 54
tttacaccagattccagagattggc

SEQ ID NO: 175624 - DNA, 25 bp, Artificial
  probe
  misc_feature (1)..(25): SEQ ID NO: 3014; WAN024DXW_at; Start 543; Stop 567
tttcaaaggcaaaggtggccacgca

SEQ ID NO: 175625 - DNA, 25 bp, Artificial
  probe
  misc_feature (1)..(25): SEQ ID NO: 3014; WAN024DXW_at; Start 887; Stop 911
ccttggcgcgtgaactgatggactt

SEQ ID NO: 175626 - DNA, 25 bp, Artificial
  probe
  misc_feature (1)..(25): SEQ ID NO: 3014; WAN024DXW_at; Start 655; Stop 679
ccaatcgagggagcagtggtgacct

SEQ ID NO: 175627 - DNA, 25 bp, Artificial
  probe
  misc_feature (1)..(25): SEQ ID NO: 3014; WAN024DXW_at; Start 522; Stop 546
aacttgcgaggtgaagatccgtttc

SEQ ID NO: 175628 - DNA, 25 bp, Artificial
  probe
  misc_feature (1)..(25): SEQ ID NO: 3014; WAN024DXW_at; Start 639; Stop 663
tagccgcaatgtcaacccaatcgag

SEQ ID NO: 175629 - DNA, 25 bp, Artificial
  probe
  misc_feature (1)..(25): SEQ ID NO: 3014; WAN024DXW_at; Start 959; Stop 983
tgacaggcgaggactttggttatct

SEQ ID NO: 175630 - DNA, 25 bp, Artificial
  probe
  misc_feature (1)..(25): SEQ ID NO: 3014; WAN024DXW_at; Start 218; Stop 242
tgcctatcgtcgaacaaacaggtct

SEQ ID NO: 175631 - DNA, 25 bp, Artificial
  probe
  misc_feature (1)..(25): SEQ ID NO: 3014; WAN024DXW_at; Start 622; Stop 646
caagtgcagtcagttgttagccgca

SEQ ID NO: 175632 - DNA, 25 bp, Artificial
  probe
  misc_feature (1)..(25): SEQ ID NO: 3014; WAN024DXW_at; Start 249; Stop 273
tgcttctcaacaccaaggtcgcatg

SEQ ID NO: 175633 - DNA, 25 bp, Artificial
  probe
  misc_feature (1)..(25): SEQ ID NO: 3014; WAN024DXW_at; Start 155; Stop 179
tggtctacctgcagggaagtcagcc

SEQ ID NO: 175634 - DNA, 25 bp, Artificial
  probe
  misc_feature (1)..(25): SEQ ID NO: 3014; WAN024DXW_at; Start 719; Stop 743
cagacacagcttttttacatggaac

SEQ ID NO: 175635 - DNA, 25 bp, Artificial
  probe
  misc_feature (1)..(25): SEQ ID NO: 3014; WAN024DXW_at; Start 507; Stop 531
tacactctttgcaggaacttgcgag

SEQ ID NO: 175636 - DNA, 25 bp, Artificial
  probe
  misc_feature (1)..(25): SEQ ID NO: 3014; WAN024DXW_at; Start 943; Stop 967
gatatcgaacctgctatgacaggcg

SEQ ID NO: 175637 - DNA, 25 bp, Artificial
  probe
  misc_feature (1)..(25): SEQ ID NO: 3014; WAN024DXW_at; Start 606; Stop 630
tagttactttgtgacccaagtgcag

SEQ ID NO: 175638 - DNA, 25 bp, Artificial
  probe
  misc_feature (1)..(25): SEQ ID NO: 3014; WAN024DXW_at; Start 171; Stop 195
aagtcagccggagcgaaccattggt

SEQ ID NO: 175639 - DNA, 25 bp, Artificial
  probe
  misc_feature (1)..(25): SEQ ID NO: 3014; WAN024DXW_at; Start 675; Stop 699
gaccttcggcgtttttcaagctgga

SEQ ID NO: 175640 - DNA, 25 bp, Artificial
  probe
  misc_feature (1)..(25): SEQ ID NO: 3014; WAN024DXW_at; Start 305; Stop 329
ttgccttaggctgtcttgagcgcgc

SEQ ID NO: 175641 - DNA, 25 bp, Artificial
  probe
  misc_feature (1)..(25): SEQ ID NO: 3014; WAN024DXW_at; Start 184; Stop 208
cgaaccattggttggcggacagata

SEQ ID NO: 175642 - DNA, 25 bp, Artificial
  probe
  misc_feature (1)..(25): SEQ ID NO: 3014; WAN024DXW_at; Start 870; Stop 894
tgttgagaacaatccagccttggcg

SEQ ID NO: 175643 - DNA, 25 bp, Artificial
  probe
  misc_feature (1)..(25): SEQ ID NO: 3014; WAN024DXW_at; Start 54; Stop 78
cttggaggagttcaagactcaggct

SEQ ID NO: 175644 - DNA, 25 bp, Artificial
  probe
  misc_feature (1)..(25): SEQ ID NO: 3014; WAN024DXW_at; Start 760; Stop 784
caggacatgagtctcttggtgcaaa

SEQ ID NO: 175645 - DNA, 25 bp, Artificial
  probe
  misc_feature (1)..(25): SEQ ID NO: 3014; WAN024DXW_at; Start 558; Stop 582
tggccacgcagcttttcctcatgaa

SEQ ID NO: 175646 - DNA, 25 bp, Artificial
  probe
  misc_feature (1)..(25): SEQ ID NO: 3014; WAN024DXW_at; Start 96; Stop 120
tgagaaattgactacgggcaaggat

SEQ ID NO: 175647 - DNA, 25 bp, Artificial
  probe
  misc_feature (1)..(25): SEQ ID NO: 3014; WAN024DXW_at; Start 576; Stop 600
tcatgaagccaatgacgccttggtg

SEQ ID NO: 175648 - DNA, 25 bp, Artificial
  probe
  misc_feature (1)..(25): SEQ ID NO: 3014; WAN024DXW_at; Start 484; Stop 508
ggccagattgcgactaatactcata

SEQ ID NO: 175649 - DNA, 25 bp, Artificial
  probe
  misc_feature (1)..(25): SEQ ID NO: 3014; WAN024DXW_at; Start 690; Stop 714
tcaagctggaaccaccaacaatgtc

SEQ ID NO: 175650 - DNA, 25 bp, Artificial
  probe
  misc_feature (1)..(25): SEQ ID NO: 3014; WAN024DXW_at; Start 836; Stop 860
tcgaagtggaactcaaacaaggtgg

SEQ ID NO: 175651 - DNA, 25 bp, Artificial
  probe
  misc_feature (1)..(25): SEQ ID NO: 3014; WAN024DXW_at; Start 739; Stop 763
ggaactattcgtgccttgacacagg

SEQ ID NO: 175652 - DNA, 25 bp, Artificial
  probe
  misc_feature (1)..(25): SEQ ID NO: 3014; WAN024DXW_at; Start 127; Stop 151
caaattcgtacttggcggacaggga

SEQ ID NO: 175653 - DNA, 25 bp, Artificial
  probe
  misc_feature (1)..(25): SEQ ID NO: 3014; WAN024DXW_at; Start 333; Stop 357
tgaggagcaacccaagaataatctg

SEQ ID NO: 175654 - DNA, 25 bp, Artificial
  probe
  misc_feature (1)..(25): SEQ ID NO: 3014; WAN024DXW_at; Start 810; Stop 834
ggttgcagctgcctttgatatggaa

SEQ ID NO: 175655 - DNA, 25 bp, Artificial
  probe
  misc_feature (1)..(25): SEQ ID NO: 3014; WAN024DXW_at; Start 1090; Stop 1114
gctgcggtgtctagtttcctgaaaa

SEQ ID NO: 175656 - DNA, 25 bp, Artificial
  probe
  misc_feature (1)..(25): SEQ ID NO: 3014; WAN024DXW_at; Start 466; Stop 490
cgtccagatttgaaagtcggccaga

SEQ ID NO: 175657 - DNA, 25 bp, Artificial
  probe
  misc_feature (1)..(25): SEQ ID NO: 5735; WAN024DXX_at; Start 13; Stop 37
tcggaattacgcaagcaagtcttgc

SEQ ID NO: 175658 - DNA, 25 bp, Artificial
  probe
  misc_feature (1)..(25): SEQ ID NO: 5735; WAN024DXX_at; Start 64; Stop 88
caaaaacaggctatagaccaagctt

SEQ ID NO: 175659 - DNA, 25 bp, Artificial
  probe
  misc_feature (1)..(25): SEQ ID NO: 5735; WAN024DXX_at; Start 227; Stop 251
aaacttatcccaaggggcgcatgga

SEQ ID NO: 175660 - DNA, 25 bp, Artificial
  probe
  misc_feature (1)..(25): SEQ ID NO: 5735; WAN024DXX_at; Start 495; Stop 519
aaaccatgatattcctgttcaggag

SEQ ID NO: 175661 - DNA, 25 bp, Artificial
  probe
  misc_feature (1)..(25): SEQ ID NO: 5735; WAN024DXX_at; Start 507; Stop 531
tcctgttcaggaggtattaattgat

SEQ ID NO: 175662 - DNA, 25 bp, Artificial
  probe
  misc_feature (1)..(25): SEQ ID NO: 5735; WAN024DXX_at; Start 412; Stop 436
tattatgaccgctatctggaacatt

SEQ ID NO: 175663 - DNA, 25 bp, Artificial
  probe
  misc_feature (1)..(25): SEQ ID NO: 5735; WAN024DXX_at; Start 16; Stop 40
gaattacgcaagcaagtcttgcatg

SEQ ID NO: 175664 - DNA, 25 bp, Artificial
  probe
  misc_feature (1)..(25): SEQ ID NO: 5735; WAN024DXX_at; Start 74; Stop 98
ctatagaccaagctttaaccgagcg

SEQ ID NO: 175665 - DNA, 25 bp, Artificial
  probe
  misc_feature (1)..(25): SEQ ID NO: 5735; WAN024DXX_at; Start 6; Stop 30
tatgaaatcggaattacgcaagcaa

SEQ ID NO: 175666 - DNA, 25 bp, Artificial
  probe
  misc_feature (1)..(25): SEQ ID NO: 5735; WAN024DXX_at; Start 194; Stop 218
cgctgaaggacggcaagaaggtttt

SEQ ID NO: 175667 - DNA, 25 bp, Artificial
  probe
  misc_feature (1)..(25): SEQ ID NO: 5735; WAN024DXX_at; Start 124; Stop 148
gaagccaaggtcatcgcaacctacc

SEQ ID NO: 175668 - DNA, 25 bp, Artificial
  probe
  misc_feature (1)..(25): SEQ ID NO: 5735; WAN024DXX_at; Start 486; Stop 510
tatacctgaaaaccatgatattcct

SEQ ID NO: 175669 - DNA, 25 bp, Artificial
  probe
  misc_feature (1)..(25): SEQ ID NO: 5735; WAN024DXX_at; Start 418; Stop 442
gaccgctatctggaacatttttctg

SEQ ID NO: 175670 - DNA, 25 bp, Artificial
  probe
  misc_feature (1)..(25): SEQ ID NO: 5735; WAN024DXX_at; Start 72; Stop 96
ggctatagaccaagctttaaccgag

SEQ ID NO: 175671 - DNA, 25 bp, Artificial
  probe
  misc_feature (1)..(25): SEQ ID NO: 5735; WAN024DXX_at; Start 514; Stop 538
caggaggtattaattgatgaaggaa

SEQ ID NO: 175672 - DNA, 25 bp, Artificial
  probe
  misc_feature (1)..(25): SEQ ID NO: 5735; WAN024DXX_at; Start 1; Stop 25
ttgtctatgaaatcggaattacgca

SEQ ID NO: 175673 - DNA, 25 bp, Artificial
  probe
  misc_feature (1)..(25): SEQ ID NO: 5735; WAN024DXX_at; Start 139; Stop 163
gcaacctacctctctttttctcatg

SEQ ID NO: 175674 - DNA, 25 bp, Artificial
  probe
  misc_feature (1)..(25): SEQ ID NO: 5735; WAN024DXX_at; Start 498; Stop 522
ccatgatattcctgttcaggaggta

SEQ ID NO: 175675 - DNA, 25 bp, Artificial
  probe
  misc_feature (1)..(25): SEQ ID NO: 5735; WAN024DXX_at; Start 4; Stop 28
tctatgaaatcggaattacgcaagc

SEQ ID NO: 175676 - DNA, 25 bp, Artificial
  probe
  misc_feature (1)..(25): SEQ ID NO: 5735; WAN024DXX_at; Start 341; Stop 365
agattgatttgattcatgttcctgg

SEQ ID NO: 175677 - DNA, 25 bp, Artificial
  probe
  misc_feature (1)..(25): SEQ ID NO: 5735; WAN024DXX_at; Start 27; Stop 51
gcaagtcttgcatgaaatgaaggct

SEQ ID NO: 175678 - DNA, 25 bp, Artificial
  probe
  misc_feature (1)..(25): SEQ ID NO: 5735; WAN024DXX_at; Start 480; Stop 504
ggactttatacctgaaaaccatgat

SEQ ID NO: 175679 - DNA, 25 bp, Artificial
  probe
  misc_feature (1)..(25): SEQ ID NO: 5735; WAN024DXX_at; Start 121; Stop 145
caagaagccaaggtcatcgcaacct

SEQ ID NO: 175680 - DNA, 25 bp, Artificial
  probe
  misc_feature (1)..(25): SEQ ID NO: 5735; WAN024DXX_at; Start 467; Stop 491
cttgtcaaattcaggactttatacc

SEQ ID NO: 175681 - DNA, 25 bp, Artificial
  probe
  misc_feature (1)..(25): SEQ ID NO: 5735; WAN024DXX_at; Start 179; Stop 203
aactgattgagcaggcgctgaagga

SEQ ID NO: 175682 - DNA, 25 bp, Artificial
  probe
  misc_feature (1)..(25): SEQ ID NO: 5735; WAN024DXX_at; Start 9; Stop 33
gaaatcggaattacgcaagcaagtc

SEQ ID NO: 175683 - DNA, 25 bp, Artificial
  probe
  misc_feature (1)..(25): SEQ ID NO: 5735; WAN024DXX_at; Start 180; Stop 204
actgattgagcaggcgctgaaggac

SEQ ID NO: 175684 - DNA, 25 bp, Artificial
  probe
  misc_feature (1)..(25): SEQ ID NO: 5735; WAN024DXX_at; Start 132; Stop 156
ggtcatcgcaacctacctctctttt

SEQ ID NO: 175685 - DNA, 25 bp, Artificial
  probe
  misc_feature (1)..(25): SEQ ID NO: 5735; WAN024DXX_at; Start 517; Stop 541
gaggtattaattgatgaaggaaatc

SEQ ID NO: 175686 - DNA, 25 bp, Artificial
  probe
  misc_feature (1)..(25): SEQ ID NO: 5735; WAN024DXX_at; Start 151; Stop 175
tctttttctcatgagtttcaaacgc

SEQ ID NO: 175687 - DNA, 25 bp, Artificial
  probe
  misc_feature (1)..(25): SEQ ID NO: 5735; WAN024DXX_at; Start 338; Stop 362
ctcagattgatttgattcatgttcc

SEQ ID NO: 175688 - DNA, 25 bp, Artificial
  probe
  misc_feature (1)..(25): SEQ ID NO: 5735; WAN024DXX_at; Start 421; Stop 445
cgctatctggaacatttttctggtc

SEQ ID NO: 175689 - DNA, 25 bp, Artificial
  probe
  misc_feature (1)..(25): SEQ ID NO: 5735; WAN024DXX_at; Start 493; Stop 517
gaaaaccatgatattcctgttcagg

SEQ ID NO: 175690 - DNA, 25 bp, Artificial
  probe
  misc_feature (1)..(25): SEQ ID NO: 5735; WAN024DXX_at; Start 24; Stop 48
caagcaagtcttgcatgaaatgaag

SEQ ID NO: 175691 - DNA, 25 bp, Artificial
  probe
  misc_feature (1)..(25): SEQ ID NO: 5209; WAN024DXY_at; Start 489; Stop 513
tattggaagtgttctgattccagga

SEQ ID NO: 175692 - DNA, 25 bp, Artificial
  probe
  misc_feature (1)..(25): SEQ ID NO: 5209; WAN024DXY_at; Start 519; Stop 543
cctagcaggccatatcggtggtgca

SEQ ID NO: 175693 - DNA, 25 bp, Artificial
  probe
  misc_feature (1)..(25): SEQ ID NO: 5209; WAN024DXY_at; Start 632; Stop 656
tgttcgtaggactcgccattttgct

SEQ ID NO: 175694 - DNA, 25 bp, Artificial
  probe
  misc_feature (1)..(25): SEQ ID NO: 5209; WAN024DXY_at; Start 205; Stop 229
catattgggtgggaacatttcattg

SEQ ID NO: 175695 - DNA, 25 bp, Artificial
  probe
  misc_feature (1)..(25): SEQ ID NO: 5209; WAN024DXY_at; Start 369; Stop 393
aggcgcctctacctctctttatggg

SEQ ID NO: 175696 - DNA, 25 bp, Artificial
  probe
  misc_feature (1)..(25): SEQ ID NO: 5209; WAN024DXY_at; Start 560; Stop 584
tagcagttatctttccagttagagg

SEQ ID NO: 175697 - DNA, 25 bp, Artificial
  probe
  misc_feature (1)..(25): SEQ ID NO: 5209; WAN024DXY_at; Start 194; Stop 218
ccatttttgttcatattgggtggga

SEQ ID NO: 175698 - DNA, 25 bp, Artificial
  probe
  misc_feature (1)..(25): SEQ ID NO: 5209; WAN024DXY_at; Start 104; Stop 128
ttgacagggcagatacattatttcg

SEQ ID NO: 175699 - DNA, 25 bp, Artificial
  probe
  misc_feature (1)..(25): SEQ ID NO: 5209; WAN024DXY_at; Start 138; Stop 162
catgtatgggccagctattcgcctc

SEQ ID NO: 175700 - DNA, 25 bp, Artificial
  probe
  misc_feature (1)..(25): SEQ ID NO: 5209; WAN024DXY_at; Start 126; Stop 150
tcgatttggagccatgtatgggcca

SEQ ID NO: 175701 - DNA, 25 bp, Artificial
  probe
  misc_feature (1)..(25): SEQ ID NO: 5209; WAN024DXY_at; Start 537; Stop 561
tggtgcagttggtggcgcatttcta

SEQ ID NO: 175702 - DNA, 25 bp, Artificial
  probe
  misc_feature (1)..(25): SEQ ID NO: 5209; WAN024DXY_at; Start 179; Stop 203
ggcgtctcttgtctgccatttttgt

SEQ ID NO: 175703 - DNA, 25 bp, Artificial
  probe
  misc_feature (1)..(25): SEQ ID NO: 5209; WAN024DXY_at; Start 354; Stop 378
taaatccttagcagcaggcgcctct

SEQ ID NO: 175704 - DNA, 25 bp, Artificial
  probe
  misc_feature (1)..(25): SEQ ID NO: 5209; WAN024DXY_at; Start 311; Stop 335
tatcaggaatgatgggcaatctctt

SEQ ID NO: 175705 - DNA, 25 bp, Artificial
  probe
  misc_feature (1)..(25): SEQ ID NO: 5209; WAN024DXY_at; Start 150; Stop 174
agctattcgcctctttcccgagcag

SEQ ID NO: 175706 - DNA, 25 bp, Artificial
  probe
  misc_feature (1)..(25): SEQ ID NO: 5209; WAN024DXY_at; Start 86; Stop 110
tcactgcaggcggaaactttgacag

SEQ ID NO: 175707 - DNA, 25 bp, Artificial
  probe
  misc_feature (1)..(25): SEQ ID NO: 5209; WAN024DXY_at; Start 546; Stop 570
tggtggcgcatttctagcagttatc

SEQ ID NO: 175708 - DNA, 25 bp, Artificial
  probe
  misc_feature (1)..(25): SEQ ID NO: 5209; WAN024DXY_at; Start 95; Stop 119
gcggaaactttgacagggcagatac

SEQ ID NO: 175709 - DNA, 25 bp, Artificial
  probe
  misc_feature (1)..(25): SEQ ID NO: 5209; WAN024DXY_at; Start 344; Stop 368
tatttagtcctaaatccttagcagc

SEQ ID NO: 175710 - DNA, 25 bp, Artificial
  probe
  misc_feature (1)..(25): SEQ ID NO: 5209; WAN024DXY_at; Start 606; Stop 630
cagccagagattaggagcggtagtc

SEQ ID NO: 175711 - DNA, 25 bp, Artificial
  probe
  misc_feature (1)..(25): SEQ ID NO: 5209; WAN024DXY_at; Start 574; Stop 598
ccagttagaggagaaaaacggatgt

SEQ ID NO: 175712 - DNA, 25 bp, Artificial
  probe
  misc_feature (1)..(25): SEQ ID NO: 5209; WAN024DXY_at; Start 457; Stop 481
caatcctatctgacactttttgtgg

SEQ ID NO: 175713 - DNA, 25 bp, Artificial
  probe
  misc_feature (1)..(25): SEQ ID NO: 5209; WAN024DXY_at; Start 504; Stop 528
gattccaggaatcagcctagcaggc

SEQ ID NO: 175714 - DNA, 25 bp, Artificial
  probe
  misc_feature (1)..(25): SEQ ID NO: 5209; WAN024DXY_at; Start 21; Stop 45
tagacgttaccctgtgacgagtttc

SEQ ID NO: 175715 - DNA, 25 bp, Artificial
  probe
  misc_feature (1)..(25): SEQ ID NO: 5209; WAN024DXY_at; Start 74; Stop 98
tactaatgttggtcactgcaggcgg

SEQ ID NO: 175716 - DNA, 25 bp, Artificial
  probe
  misc_feature (1)..(25): SEQ ID NO: 5209; WAN024DXY_at; Start 646; Stop 670
gccattttgcttttctacaagggaa

SEQ ID NO: 175717 - DNA, 25 bp, Artificial
  probe
  misc_feature (1)..(25): SEQ ID NO: 5209; WAN024DXY_at; Start 241; Stop 265
tcactttattatcttggaaggcagg

SEQ ID NO: 175718 - DNA, 25 bp, Artificial
  probe
  misc_feature (1)..(25): SEQ ID NO: 5209; WAN024DXY_at; Start 10; Stop 34
gaaatctttgatagacgttaccctg

SEQ ID NO: 175719 - DNA, 25 bp, Artificial
  probe
  misc_feature (1)..(25): SEQ ID NO: 5209; WAN024DXY_at; Start 247; Stop 271
tattatcttggaaggcaggtagagg

SEQ ID NO: 175720 - DNA, 25 bp, Artificial
  probe
  misc_feature (1)..(25): SEQ ID NO: 5209; WAN024DXY_at; Start 115; Stop 139
gatacattatttcgatttggagcca

SEQ ID NO: 175721 - DNA, 25 bp, Artificial
  probe
  misc_feature (1)..(25): SEQ ID NO: 5209; WAN024DXY_at; Start 621; Stop 645
agcggtagtcttgttcgtaggactc

SEQ ID NO: 175722 - DNA, 25 bp, Artificial
  probe
  misc_feature (1)..(25): SEQ ID NO: 5209; WAN024DXY_at; Start 384; Stop 408
tctttatgggctatttgccgcgatt

SEQ ID NO: 175723 - DNA, 25 bp, Artificial
  probe
  misc_feature (1)..(25): SEQ ID NO: 5209; WAN024DXY_at; Start 47; Stop 71
tcctcttagtgacggccttggtatt

SEQ ID NO: 175724 - DNA, 25 bp, Artificial
  probe
  misc_feature (1)..(25): SEQ ID NO: 5209; WAN024DXY_at; Start 36; Stop 60
gacgagtttcttcctcttagtgacg

SEQ ID NO: 175725 - DNA, 25 bp, Artificial
  probe
  misc_feature (1)..(25): SEQ ID NO: 6443; WAN024DXZ_at; Start 320; Stop 344
gtcgtatcgggccttttatagctag

SEQ ID NO: 175726 - DNA, 25 bp, Artificial
  probe
  misc_feature (1)..(25): SEQ ID NO: 6443; WAN024DXZ_at; Start 1125; Stop 1149
tacttgggattttattgttaatgaa

SEQ ID NO: 175727 - DNA, 25 bp, Artificial
  probe
  misc_feature (1)..(25): SEQ ID NO: 6443; WAN024DXZ_at; Start 519; Stop 543
tatccagaatgactataagcaatat

SEQ ID NO: 175728 - DNA, 25 bp, Artificial
  probe
  misc_feature (1)..(25): SEQ ID NO: 6443; WAN024DXZ_at; Start 241; Stop 265
gatattgctgctgtgaataaagcga

SEQ ID NO: 175729 - DNA, 25 bp, Artificial
  probe
  misc_feature (1)..(25): SEQ ID NO: 6443; WAN024DXZ_at; Start 552; Stop 576
gacgacttatattgcttacgggacg

SEQ ID NO: 175730 - DNA, 25 bp, Artificial
  probe
  misc_feature (1)..(25): SEQ ID NO: 6443; WAN024DXZ_at; Start 357; Stop 381
gattcaagctatcggaggtactctg

SEQ ID NO: 175731 - DNA, 25 bp, Artificial
  probe
  misc_feature (1)..(25): SEQ ID NO: 6443; WAN024DXZ_at; Start 351; Stop 375
gaaaaagattcaagctatcggaggt

SEQ ID NO: 175732 - DNA, 25 bp, Artificial
  probe
  misc_feature (1)..(25): SEQ ID NO: 6443; WAN024DXZ_at; Start 510; Stop 534
tgaaaaatatatccagaatgactat

SEQ ID NO: 175733 - DNA, 25 bp, Artificial
  probe
  misc_feature (1)..(25): SEQ ID NO: 6443; WAN024DXZ_at; Start 557; Stop 581
cttatattgcttacgggacggatac

SEQ ID NO: 175734 - DNA, 25 bp, Artificial
  probe
  misc_feature (1)..(25): SEQ ID NO: 6443; WAN024DXZ_at; Start 326; Stop 350
tcgggccttttatagctagacttaa

SEQ ID NO: 175735 - DNA, 25 bp, Artificial
  probe
  misc_feature (1)..(25): SEQ ID NO: 6443; WAN024DXZ_at; Start 247; Stop 271
gctgctgtgaataaagcgattgaaa

SEQ ID NO: 175736 - DNA, 25 bp, Artificial
  probe
  misc_feature (1)..(25): SEQ ID NO: 6443; WAN024DXZ_at; Start 370; Stop 394
ggaggtactctgtttgtcaatccag

SEQ ID NO: 175737 - DNA, 25 bp, Artificial
  probe
  misc_feature (1)..(25): SEQ ID NO: 6443; WAN024DXZ_at; Start 932; Stop 956
tactagaagctctagcatccacaaa

SEQ ID NO: 175738 - DNA, 25 bp, Artificial
  probe
  misc_feature (1)..(25): SEQ ID NO: 6443; WAN024DXZ_at; Start 583; Stop 607
agtccgtctatcctgaaatccgaag

SEQ ID NO: 175739 - DNA, 25 bp, Artificial
  probe
  misc_feature (1)..(25): SEQ ID NO: 6443; WAN024DXZ_at; Start 922; Stop 946
aacccttctctactagaagctctag

SEQ ID NO: 175740 - DNA, 25 bp, Artificial
  probe
  misc_feature (1)..(25): SEQ ID NO: 6443; WAN024DXZ_at; Start 563; Stop 587
ttgcttacgggacggatacaagtcc

SEQ ID NO: 175741 - DNA, 25 bp, Artificial
  probe
  misc_feature (1)..(25): SEQ ID NO: 6443; WAN024DXZ_at; Start 1088; Stop 1112
tagatattctatctacagagcaggt

SEQ ID NO: 175742 - DNA, 25 bp, Artificial
  probe
  misc_feature (1)..(25): SEQ ID NO: 6443; WAN024DXZ_at; Start 276; Stop 300
taagaaaaacaaagatgaagctcct

SEQ ID NO: 175743 - DNA, 25 bp, Artificial
  probe
  misc_feature (1)..(25): SEQ ID NO: 6443; WAN024DXZ_at; Start 867; Stop 891
gtacattcgtgaaaatgcttttgcc

SEQ ID NO: 175744 - DNA, 25 bp, Artificial
  probe
  misc_feature (1)..(25): SEQ ID NO: 6443; WAN024DXZ_at; Start 262; Stop 286
gcgattgaaatagctaagaaaaaca

SEQ ID NO: 175745 - DNA, 25 bp, Artificial
  probe
  misc_feature (1)..(25): SEQ ID NO: 6443; WAN024DXZ_at; Start 611; Stop 635
taaaaattcgtagttggtatcagga

SEQ ID NO: 175746 - DNA, 25 bp, Artificial
  probe
  misc_feature (1)..(25): SEQ ID NO: 6443; WAN024DXZ_at; Start 1103; Stop 1127
cagagcaggtagaaaaaagatttac

SEQ ID NO: 175747 - DNA, 25 bp, Artificial
  probe
  misc_feature (1)..(25): SEQ ID NO: 6443; WAN024DXZ_at; Start 676; Stop 700
cgattcgtccctgaaaacaactacg

SEQ ID NO: 175748 - DNA, 25 bp, Artificial
  probe
  misc_feature (1)..(25): SEQ ID NO: 6443; WAN024DXZ_at; Start 596; Stop 620
tgaaatccgaagatctaaaaattcg

SEQ ID NO: 175749 - DNA, 25 bp, Artificial
  probe
  misc_feature (1)..(25): SEQ ID NO: 6443; WAN024DXZ_at; Start 1009; Stop 1033
gctatttattggagaaaagataatc

SEQ ID NO: 175750 - DNA, 25 bp, Artificial
  probe
  misc_feature (1)..(25): SEQ ID NO: 6443; WAN024DXZ_at; Start 229; Stop 253
gccattgcttatgatattgctgctg

SEQ ID NO: 175751 - DNA, 25 bp, Artificial
  probe
  misc_feature (1)..(25): SEQ ID NO: 6443; WAN024DXZ_at; Start 850; Stop 874
gaccaagaattgcttaagtacattc

SEQ ID NO: 175752 - DNA, 25 bp, Artificial
  probe
  misc_feature (1)..(25): SEQ ID NO: 6443; WAN024DXZ_at; Start 534; Stop 558
taagcaatatcaaccaaagacgact

SEQ ID NO: 175753 - DNA, 25 bp, Artificial
  probe
  misc_feature (1)..(25): SEQ ID NO: 6443; WAN024DXZ_at; Start 285; Stop 309
caaagatgaagctcctattttttac

SEQ ID NO: 175754 - DNA, 25 bp, Artificial
  probe
  misc_feature (1)..(25): SEQ ID NO: 6443; WAN024DXZ_at; Start 384; Stop 408
tgtcaatccagatggacatgagtgg

SEQ ID NO: 175755 - DNA, 25 bp, Artificial
  probe
  misc_feature (1)..(25): SEQ ID NO: 6443; WAN024DXZ_at; Start 537; Stop 561
gcaatatcaaccaaagacgacttat

SEQ ID NO: 175756 - DNA, 25 bp, Artificial
  probe
  misc_feature (1)..(25): SEQ ID NO: 6443; WAN024DXZ_at; Start 579; Stop 603
tacaagtccgtctatcctgaaatcc

SEQ ID NO: 175757 - DNA, 25 bp, Artificial
  probe
  misc_feature (1)..(25): SEQ ID NO: 6443; WAN024DXZ_at; Start 684; Stop 708
ccctgaaaacaactacgaaaccatg

SEQ ID NO: 175758 - DNA, 25 bp, Artificial
  probe
  misc_feature (1)..(25): SEQ ID NO: 6443; WAN024DXZ_at; Start 338; Stop 362
tagctagacttaagaaaaagattca

SEQ ID NO: 175759 - DNA, 25 bp, Artificial
  probe
  misc_feature (1)..(25): SEQ ID NO: 7203; WAN024DY2_at; Start 261; Stop 285
tatcacagatgacaacgctgtacct

SEQ ID NO: 175760 - DNA, 25 bp, Artificial
  probe
  misc_feature (1)..(25): SEQ ID NO: 7203; WAN024DY2_at; Start 94; Stop 118
gaaaaaggcaaacatgacttgctaa

SEQ ID NO: 175761 - DNA, 25 bp, Artificial
  probe
  misc_feature (1)..(25): SEQ ID NO: 7203; WAN024DY2_at; Start 276; Stop 300
cgctgtacctttgacaaaacaattg

SEQ ID NO: 175762 - DNA, 25 bp, Artificial
  probe
  misc_feature (1)..(25): SEQ ID NO: 7203; WAN024DY2_at; Start 164; Stop 188
aaagccatcctcgtggtcttggcga

SEQ ID NO: 175763 - DNA, 25 bp, Artificial
  probe
  misc_feature (1)..(25): SEQ ID NO: 7203; WAN024DY2_at; Start 171; Stop 195
tcctcgtggtcttggcgatgctgtc

SEQ ID NO: 175764 - DNA, 25 bp, Artificial
  probe
  misc_feature (1)..(25): SEQ ID NO: 7203; WAN024DY2_at; Start 236; Stop 260
tcatgcttggtgacgacctaatgga

SEQ ID NO: 175765 - DNA, 25 bp, Artificial
  probe
  misc_feature (1)..(25): SEQ ID NO: 7203; WAN024DY2_at; Start 473; Stop 497
caattatcgggcgctatctgctcac

SEQ ID NO: 175766 - DNA, 25 bp, Artificial
  probe
  misc_feature (1)..(25): SEQ ID NO: 7203; WAN024DY2_at; Start 348; Stop 372
tgtccctcatgaagaagtttcagca

SEQ ID NO: 175767 - DNA, 25 bp, Artificial
  probe
  misc_feature (1)..(25): SEQ ID NO: 7203; WAN024DY2_at; Start 118; Stop 142
aaattggtagacgaaacaactggca

SEQ ID NO: 175768 - DNA, 25 bp, Artificial
  probe
  misc_feature (1)..(25): SEQ ID NO: 7203; WAN024DY2_at; Start 203; Stop 227
caaaagcttttgttgcgaatgaacc

SEQ ID NO: 175769 - DNA, 25 bp, Artificial
  probe
  misc_feature (1)..(25): SEQ ID NO: 7203; WAN024DY2_at; Start 342; Stop 366
tatgcctgtccctcatgaagaagtt

SEQ ID NO: 175770 - DNA, 25 bp, Artificial
  probe
  misc_feature (1)..(25): SEQ ID NO: 7203; WAN024DY2_at; Start 300; Stop 324
gatgaatgattacgagtcgactcac

SEQ ID NO: 175771 - DNA, 25 bp, Artificial
  probe
  misc_feature (1)..(25): SEQ ID NO: 7203; WAN024DY2_at; Start 303; Stop 327
gaatgattacgagtcgactcacgca

SEQ ID NO: 175772 - DNA, 25 bp, Artificial
  probe
  misc_feature (1)..(25): SEQ ID NO: 7203; WAN024DY2_at; Start 180; Stop 204
tcttggcgatgctgtcttacaagca

SEQ ID NO: 175773 - DNA, 25 bp, Artificial
  probe
  misc_feature (1)..(25): SEQ ID NO: 7203; WAN024DY2_at; Start 357; Stop 381
tgaagaagtttcagcatatggagtt

SEQ ID NO: 175774 - DNA, 25 bp, Artificial
  probe
  misc_feature (1)..(25): SEQ ID NO: 7203; WAN024DY2_at; Start 122; Stop 146
tggtagacgaaacaactggcattcg

SEQ ID NO: 175775 - DNA, 25 bp, Artificial
  probe
  misc_feature (1)..(25): SEQ ID NO: 7203; WAN024DY2_at; Start 266; Stop 290
cagatgacaacgctgtacctttgac

SEQ ID NO: 175776 - DNA, 25 bp, Artificial
  probe
  misc_feature (1)..(25): SEQ ID NO: 7203; WAN024DY2_at; Start 332; Stop 356
caattgctgttatgcctgtccctca

SEQ ID NO: 175777 - DNA, 25 bp, Artificial
  probe
  misc_feature (1)..(25): SEQ ID NO: 7203; WAN024DY2_at; Start 231; Stop 255
cgttgtcatgcttggtgacgaccta

SEQ ID NO: 175778 - DNA, 25 bp, Artificial
  probe
  misc_feature (1)..(25): SEQ ID NO: 7203; WAN024DY2_at; Start 130; Stop 154
gaaacaactggcattcgccttcact

SEQ ID NO: 175779 - DNA, 25 bp, Artificial
  probe
  misc_feature (1)..(25): SEQ ID NO: 7203; WAN024DY2_at; Start 310; Stop 334
tacgagtcgactcacgcatcaacaa

SEQ ID NO: 175780 - DNA, 25 bp, Artificial
  probe
  misc_feature (1)..(25): SEQ ID NO: 7203; WAN024DY2_at; Start 247; Stop 271
gacgacctaatggatatcacagatg

SEQ ID NO: 175781 - DNA, 25 bp, Artificial
  probe
  misc_feature (1)..(25): SEQ ID NO: 7203; WAN024DY2_at; Start 450; Stop 474
agaggatgctccaagtgatttagca

SEQ ID NO: 175782 - DNA, 25 bp, Artificial
  probe
  misc_feature (1)..(25): SEQ ID NO: 7203; WAN024DY2_at; Start 106; Stop 130
catgacttgctaaaattggtagacg

SEQ ID NO: 175783 - DNA, 25 bp, Artificial
  probe
  misc_feature (1)..(25): SEQ ID NO: 7203; WAN024DY2_at; Start 140; Stop 164
gcattcgccttcactttatccgtca

SEQ ID NO: 175784 - DNA, 25 bp, Artificial
  probe
  misc_feature (1)..(25): SEQ ID NO: 7203; WAN024DY2_at; Start 155; Stop 179
ttatccgtcaaagccatcctcgtgg

SEQ ID NO: 175785 - DNA, 25 bp, Artificial
  probe
  misc_feature (1)..(25): SEQ ID NO: 7203; WAN024DY2_at; Start 328; Stop 352
tcaacaattgctgttatgcctgtcc

SEQ ID NO: 175786 - DNA, 25 bp, Artificial
  probe
  misc_feature (1)..(25): SEQ ID NO: 7203; WAN024DY2_at; Start 271; Stop 295
gacaacgctgtacctttgacaaaac

SEQ ID NO: 175787 - DNA, 25 bp, Artificial
  probe
  misc_feature (1)..(25): SEQ ID NO: 7203; WAN024DY2_at; Start 316; Stop 340
tcgactcacgcatcaacaattgctg

SEQ ID NO: 175788 - DNA, 25 bp, Artificial
  probe
  misc_feature (1)..(25): SEQ ID NO: 7203; WAN024DY2_at; Start 337; Stop 361
gctgttatgcctgtccctcatgaag

SEQ ID NO: 175789 - DNA, 25 bp, Artificial
  probe
  misc_feature (1)..(25): SEQ ID NO: 7203; WAN024DY2_at; Start 249; Stop 273
cgacctaatggatatcacagatgac

SEQ ID NO: 175790 - DNA, 25 bp, Artificial
  probe
  misc_feature (1)..(25): SEQ ID NO: 7203; WAN024DY2_at; Start 223; Stop 247
gaacccttcgttgtcatgcttggtg

SEQ ID NO: 175791 - DNA, 25 bp, Artificial
  probe
  misc_feature (1)..(25): SEQ ID NO: 7203; WAN024DY2_at; Start 186; Stop 210
cgatgctgtcttacaagcaaaagct

SEQ ID NO: 175792 - DNA, 25 bp, Artificial
  probe
  misc_feature (1)..(25): SEQ ID NO: 7203; WAN024DY2_at; Start 158; Stop 182
tccgtcaaagccatcctcgtggtct

SEQ ID NO: 175793 - DNA, 25 bp, Artificial
  probe
  misc_feature (1)..(25): SEQ ID NO: 6323; WAN024DY3_at; Start 1117; Stop 1141
gagcgcttctcttgggatttgatag

SEQ ID NO: 175794 - DNA, 25 bp, Artificial
  probe
  misc_feature (1)..(25): SEQ ID NO: 6323; WAN024DY3_at; Start 844; Stop 868
gtctacaaccaagagcttctaaagt

SEQ ID NO: 175795 - DNA, 25 bp, Artificial
  probe
  misc_feature (1)..(25): SEQ ID NO: 6323; WAN024DY3_at; Start 836; Stop 860
tagggacagtctacaaccaagagct

SEQ ID NO: 175796 - DNA, 25 bp, Artificial
  probe
  misc_feature (1)..(25): SEQ ID NO: 6323; WAN024DY3_at; Start 838; Stop 862
gggacagtctacaaccaagagcttc

SEQ ID NO: 175797 - DNA, 25 bp, Artificial
  probe
  misc_feature (1)..(25): SEQ ID NO: 6323; WAN024DY3_at; Start 1114; Stop 1138
acggagcgcttctcttgggatttga

SEQ ID NO: 175798 - DNA, 25 bp, Artificial
  probe
  misc_feature (1)..(25): SEQ ID NO: 6323; WAN024DY3_at; Start 1103; Stop 1127
caaagcaagtgacggagcgcttctc

SEQ ID NO: 175799 - DNA, 25 bp, Artificial
  probe
  misc_feature (1)..(25): SEQ ID NO: 6323; WAN024DY3_at; Start 679; Stop 703
tttgttccagagaataactatgaat

SEQ ID NO: 175800 - DNA, 25 bp, Artificial
  probe
  misc_feature (1)..(25): SEQ ID NO: 6323; WAN024DY3_at; Start 993; Stop 1017
agtagctgaggatggtgctgattac

SEQ ID NO: 175801 - DNA, 25 bp, Artificial
  probe
  misc_feature (1)..(25): SEQ ID NO: 6323; WAN024DY3_at; Start 1001; Stop 1025
aggatggtgctgattactgggaaaa

SEQ ID NO: 175802 - DNA, 25 bp, Artificial
  probe
  misc_feature (1)..(25): SEQ ID NO: 6323; WAN024DY3_at; Start 537; Stop 561
acagttccaacctaagaccacctat

SEQ ID NO: 175803 - DNA, 25 bp, Artificial
  probe
  misc_feature (1)..(25): SEQ ID NO: 6323; WAN024DY3_at; Start 1092; Stop 1116
tatactgtcaacaaagcaagtgacg

SEQ ID NO: 175804 - DNA, 25 bp, Artificial
  probe
  misc_feature (1)..(25): SEQ ID NO: 6323; WAN024DY3_at; Start 847; Stop 871
tacaaccaagagcttctaaagtata

SEQ ID NO: 175805 - DNA, 25 bp, Artificial
  probe
  misc_feature (1)..(25): SEQ ID NO: 6323; WAN024DY3_at; Start 711; Stop 735
tcttggcttcttggcttctaactct

SEQ ID NO: 175806 - DNA, 25 bp, Artificial
  probe
  misc_feature (1)..(25): SEQ ID NO: 6323; WAN024DY3_at; Start 1089; Stop 1113
aaatatactgtcaacaaagcaagtg

SEQ ID NO: 175807 - DNA, 25 bp, Artificial
  probe
  misc_feature (1)..(25): SEQ ID NO: 6323; WAN024DY3_at; Start 1006; Stop 1030
ggtgctgattactgggaaaaagata

SEQ ID NO: 175808 - DNA, 25 bp, Artificial
  probe
  misc_feature (1)..(25): SEQ ID NO: 6323; WAN024DY3_at; Start 1099; Stop 1123
tcaacaaagcaagtgacggagcgct

SEQ ID NO: 175809 - DNA, 25 bp, Artificial
  probe
  misc_feature (1)..(25): SEQ ID NO: 6323; WAN024DY3_at; Start 684; Stop 708
tccagagaataactatgaatctatg

SEQ ID NO: 175810 - DNA, 25 bp, Artificial
  probe
  misc_feature (1)..(25): SEQ ID NO: 6323; WAN024DY3_at; Start 532; Stop 556
tataaacagttccaacctaagacca

SEQ ID NO: 175811 - DNA, 25 bp, Artificial
  probe
  misc_feature (1)..(25): SEQ ID NO: 6323; WAN024DY3_at; Start 1013; Stop 1037
attactgggaaaaagataatcttca

SEQ ID NO: 175812 - DNA, 25 bp, Artificial
  probe
  misc_feature (1)..(25): SEQ ID NO: 6323; WAN024DY3_at; Start 702; Stop 726
atctatgattcttggcttcttggct

SEQ ID NO: 175813 - DNA, 25 bp, Artificial
  probe
  misc_feature (1)..(25): SEQ ID NO: 6323; WAN024DY3_at; Start 1057; Stop 1081
gaacaaaaaacacaagaagagataa

SEQ ID NO: 175814 - DNA, 25 bp, Artificial
  probe
  misc_feature (1)..(25): SEQ ID NO: 6323; WAN024DY3_at; Start 1107; Stop 1131
gcaagtgacggagcgcttctcttgg

SEQ ID NO: 175815 - DNA, 25 bp, Artificial
  probe
  misc_feature (1)..(25): SEQ ID NO: 6323; WAN024DY3_at; Start 830; Stop 854
aatttgtagggacagtctacaacca

SEQ ID NO: 175816 - DNA, 25 bp, Artificial
  probe
  misc_feature (1)..(25): SEQ ID NO: 6323; WAN024DY3_at; Start 1111; Stop 1135
gtgacggagcgcttctcttgggatt

SEQ ID NO: 175817 - DNA, 25 bp, Artificial
  probe
  misc_feature (1)..(25): SEQ ID NO: 6323; WAN024DY3_at; Start 1066; Stop 1090
acacaagaagagataaatgaaaaaa

SEQ ID NO: 175818 - DNA, 25 bp, Artificial
  probe
  misc_feature (1)..(25): SEQ ID NO: 6323; WAN024DY3_at; Start 995; Stop 1019
tagctgaggatggtgctgattactg

SEQ ID NO: 175819 - DNA, 25 bp, Artificial
  probe
  misc_feature (1)..(25): SEQ ID NO: 6323; WAN024DY3_at; Start 1121; Stop 1145
gcttctcttgggatttgatagttaa

SEQ ID NO: 175820 - DNA, 25 bp, Artificial
  probe
  misc_feature (1)..(25): SEQ ID NO: 6323; WAN024DY3_at; Start 850; Stop 874
aaccaagagcttctaaagtatattc

SEQ ID NO: 175821 - DNA, 25 bp, Artificial
  probe
  misc_feature (1)..(25): SEQ ID NO: 6323; WAN024DY3_at; Start 840; Stop 864
gacagtctacaaccaagagcttcta

SEQ ID NO: 175822 - DNA, 25 bp, Artificial
  probe
  misc_feature (1)..(25): SEQ ID NO: 6323; WAN024DY3_at; Start 720; Stop 744
cttggcttctaactctaagaaggac

SEQ ID NO: 175823 - DNA, 25 bp, Artificial
  probe
  misc_feature (1)..(25): SEQ ID NO: 6323; WAN024DY3_at; Start 708; Stop 732
gattcttggcttcttggcttctaac

SEQ ID NO: 175824 - DNA, 25 bp, Artificial
  probe
  misc_feature (1)..(25): SEQ ID NO: 6323; WAN024DY3_at; Start 715; Stop 739
ggcttcttggcttctaactctaaga

SEQ ID NO: 175825 - DNA, 25 bp, Artificial
  probe
  misc_feature (1)..(25): SEQ ID NO: 6323; WAN024DY3_at; Start 1003; Stop 1027
gatggtgctgattactgggaaaaag

SEQ ID NO: 175826 - DNA, 25 bp, Artificial
  probe
  misc_feature (1)..(25): SEQ ID NO: 6323; WAN024DY3_at; Start 1094; Stop 1118
tactgtcaacaaagcaagtgacgga

SEQ ID NO: 175827 - DNA, 25 bp, Artificial
  probe
  misc_feature (1)..(25): SEQ ID NO: 7204; WAN024DY4_at; Start 175; Stop 199
cgcggtcttggagacgctgtcctac

SEQ ID NO: 175828 - DNA, 25 bp, Artificial
  probe
  misc_feature (1)..(25): SEQ ID NO: 7204; WAN024DY4_at; Start 308; Stop 332
attacgaaaagacacacgcatcaac

SEQ ID NO: 175829 - DNA, 25 bp, Artificial
  probe
  misc_feature (1)..(25): SEQ ID NO: 7204; WAN024DY4_at; Start 454; Stop 478
gaggctccaagtgatctagctatta

SEQ ID NO: 175830 - DNA, 25 bp, Artificial
  probe
  misc_feature (1)..(25): SEQ ID NO: 7204; WAN024DY4_at; Start 255; Stop 279
tatggacattactaacgacaaggct

SEQ ID NO: 175831 - DNA, 25 bp, Artificial
  probe
  misc_feature (1)..(25): SEQ ID NO: 7204; WAN024DY4_at; Start 250; Stop 274
gaccttatggacattactaacgaca

SEQ ID NO: 175832 - DNA, 25 bp, Artificial
  probe
  misc_feature (1)..(25): SEQ ID NO: 7204; WAN024DY4_at; Start 259; Stop 283
gacattactaacgacaaggctatcc

SEQ ID NO: 175833 - DNA, 25 bp, Artificial
  probe
  misc_feature (1)..(25): SEQ ID NO: 7204; WAN024DY4_at; Start 544; Stop 568
aatgagattcagcttacggatgcaa

SEQ ID NO: 175834 - DNA, 25 bp, Artificial
  probe
  misc_feature (1)..(25): SEQ ID NO: 7204; WAN024DY4_at; Start 276; Stop 300
ggctatcccattgacaaaacaactg

SEQ ID NO: 175835 - DNA, 25 bp, Artificial
  probe
  misc_feature (1)..(25): SEQ ID NO: 7204; WAN024DY4_at; Start 242; Stop 266
tgggcgatgaccttatggacattac

SEQ ID NO: 175836 - DNA, 25 bp, Artificial
  probe
  misc_feature (1)..(25): SEQ ID NO: 7204; WAN024DY4_at; Start 542; Stop 566
gaaatgagattcagcttacggatgc

SEQ ID NO: 175837 - DNA, 25 bp, Artificial
  probe
  misc_feature (1)..(25): SEQ ID NO: 7204; WAN024DY4_at; Start 261; Stop 285
cattactaacgacaaggctatccca

SEQ ID NO: 175838 - DNA, 25 bp, Artificial
  probe
  misc_feature (1)..(25): SEQ ID NO: 7204; WAN024DY4_at; Start 451; Stop 475
gaggaggctccaagtgatctagcta

SEQ ID NO: 175839 - DNA, 25 bp, Artificial
  probe
  misc_feature (1)..(25): SEQ ID NO: 7204; WAN024DY4_at; Start 459; Stop 483
tccaagtgatctagctattatcggt

SEQ ID NO: 175840 - DNA, 25 bp, Artificial
  probe
  misc_feature (1)..(25): SEQ ID NO: 7204; WAN024DY4_at; Start 528; Stop 552
agctcccggtgctggaaatgagatt

SEQ ID NO: 175841 - DNA, 25 bp, Artificial
  probe
  misc_feature (1)..(25): SEQ ID NO: 7204; WAN024DY4_at; Start 267; Stop 291
taacgacaaggctatcccattgaca

SEQ ID NO: 175842 - DNA, 25 bp, Artificial
  probe
  misc_feature (1)..(25): SEQ ID NO: 7204; WAN024DY4_at; Start 270; Stop 294
cgacaaggctatcccattgacaaaa

SEQ ID NO: 175843 - DNA, 25 bp, Artificial
  probe
  misc_feature (1)..(25): SEQ ID NO: 7204; WAN024DY4_at; Start 240; Stop 264
gctgggcgatgaccttatggacatt

SEQ ID NO: 175844 - DNA, 25 bp, Artificial
  probe
  misc_feature (1)..(25): SEQ ID NO: 7204; WAN024DY4_at; Start 533; Stop 557
ccggtgctggaaatgagattcagct

SEQ ID NO: 175845 - DNA, 25 bp, Artificial
  probe
  misc_feature (1)..(25): SEQ ID NO: 7204; WAN024DY4_at; Start 254; Stop 278
ttatggacattactaacgacaaggc

SEQ ID NO: 175846 - DNA, 25 bp, Artificial
  probe
  misc_feature (1)..(25): SEQ ID NO: 7204; WAN024DY4_at; Start 547; Stop 571
gagattcagcttacggatgcaatcg

SEQ ID NO: 175847 - DNA, 25 bp, Artificial
  probe
  misc_feature (1)..(25): SEQ ID NO: 7204; WAN024DY4_at; Start 304; Stop 328
aatgattacgaaaagacacacgcat

SEQ ID NO: 175848 - DNA, 25 bp, Artificial
  probe
  misc_feature (1)..(25): SEQ ID NO: 7204; WAN024DY4_at; Start 257; Stop 281
tggacattactaacgacaaggctat

SEQ ID NO: 175849 - DNA, 25 bp, Artificial
  probe
  misc_feature (1)..(25): SEQ ID NO: 7204; WAN024DY4_at; Start 530; Stop 554
ctcccggtgctggaaatgagattca

SEQ ID NO: 175850 - DNA, 25 bp, Artificial
  probe
  misc_feature (1)..(25): SEQ ID NO: 7204; WAN024DY4_at; Start 173; Stop 197
ctcgcggtcttggagacgctgtcct

SEQ ID NO: 175851 - DNA, 25 bp, Artificial
  probe
  misc_feature (1)..(25): SEQ ID NO: 7204; WAN024DY4_at; Start 456; Stop 480
ggctccaagtgatctagctattatc

SEQ ID NO: 175852 - DNA, 25 bp, Artificial
  probe
  misc_feature (1)..(25): SEQ ID NO: 7204; WAN024DY4_at; Start 264; Stop 288
tactaacgacaaggctatcccattg

SEQ ID NO: 175853 - DNA, 25 bp, Artificial
  probe
  misc_feature (1)..(25): SEQ ID NO: 7204; WAN024DY4_at; Start 177; Stop 201
cggtcttggagacgctgtcctacaa

SEQ ID NO: 175854 - DNA, 25 bp, Artificial
  probe
  misc_feature (1)..(25): SEQ ID NO: 7204; WAN024DY4_at; Start 552; Stop 576
tcagcttacggatgcaatcgatact

SEQ ID NO: 175855 - DNA, 25 bp, Artificial
  probe
  misc_feature (1)..(25): SEQ ID NO: 7204; WAN024DY4_at; Start 300; Stop 324
gatgaatgattacgaaaagacacac

SEQ ID NO: 175856 - DNA, 25 bp, Artificial
  probe
  misc_feature (1)..(25): SEQ ID NO: 7204; WAN024DY4_at; Start 244; Stop 268
ggcgatgaccttatggacattacta

SEQ ID NO: 175857 - DNA, 25 bp, Artificial
  probe
  misc_feature (1)..(25): SEQ ID NO: 7204; WAN024DY4_at; Start 531; Stop 555
tcccggtgctggaaatgagattcag

SEQ ID NO: 175858 - DNA, 25 bp, Artificial
  probe
  misc_feature (1)..(25): SEQ ID NO: 7204; WAN024DY4_at; Start 539; Stop 563
ctggaaatgagattcagcttacgga

SEQ ID NO: 175859 - DNA, 25 bp, Artificial
  probe
  misc_feature (1)..(25): SEQ ID NO: 7204; WAN024DY4_at; Start 273; Stop 297
caaggctatcccattgacaaaacaa

SEQ ID NO: 175860 - DNA, 25 bp, Artificial
  probe
  misc_feature (1)..(25): SEQ ID NO: 7204; WAN024DY4_at; Start 247; Stop 271
gatgaccttatggacattactaacg

SEQ ID NO: 175861 - DNA, 25 bp, Artificial
  probe
  misc_feature (1)..(25): SEQ ID NO: 820; WAN024DY5_at; Start 1115; Stop 1139
gaattgaaacagcatatagttggca

SEQ ID NO: 175862 - DNA, 25 bp, Artificial
  probe
  misc_feature (1)..(25): SEQ ID NO: 820; WAN024DY5_at; Start 1070; Stop 1094
aggatgagacgtttcgggaaaagct

SEQ ID NO: 175863 - DNA, 25 bp, Artificial
  probe
  misc_feature (1)..(25): SEQ ID NO: 820; WAN024DY5_at; Start 805; Stop 829
ggtttcgacaaggatccaagagtca

SEQ ID NO: 175864 - DNA, 25 bp, Artificial
  probe
  misc_feature (1)..(25): SEQ ID NO: 820; WAN024DY5_at; Start 1088; Stop 1112
aaaagcttggcttaatggcgaaaga

SEQ ID NO: 175865 - DNA, 25 bp, Artificial
  probe
  misc_feature (1)..(25): SEQ ID NO: 820; WAN024DY5_at; Start 1131; Stop 1155
tagttggcaattcattgaaaaagag

SEQ ID NO: 175866 - DNA, 25 bp, Artificial
  probe
  misc_feature (1)..(25): SEQ ID NO: 820; WAN024DY5_at; Start 813; Stop 837
caaggatccaagagtcaaatttgtg

SEQ ID NO: 175867 - DNA, 25 bp, Artificial
  probe
  misc_feature (1)..(25): SEQ ID NO: 820; WAN024DY5_at; Start 1151; Stop 1175
aagagtataaggagatttgggatga

SEQ ID NO: 175868 - DNA, 25 bp, Artificial
  probe
  misc_feature (1)..(25): SEQ ID NO: 820; WAN024DY5_at; Start 942; Stop 966
ccttgcatcaacaaaactaaatttg

SEQ ID NO: 175869 - DNA, 25 bp, Artificial
  probe
  misc_feature (1)..(25): SEQ ID NO: 820; WAN024DY5_at; Start 1124; Stop 1148
cagcatatagttggcaattcattga

SEQ ID NO: 175870 - DNA, 25 bp, Artificial
  probe
  misc_feature (1)..(25): SEQ ID NO: 820; WAN024DY5_at; Start 1082; Stop 1106
ttcgggaaaagcttggcttaatggc

SEQ ID NO: 175871 - DNA, 25 bp, Artificial
  probe
  misc_feature (1)..(25): SEQ ID NO: 820; WAN024DY5_at; Start 828; Stop 852
caaatttgtgggaacagtctatgac

SEQ ID NO: 175872 - DNA, 25 bp, Artificial
  probe
  misc_feature (1)..(25): SEQ ID NO: 820; WAN024DY5_at; Start 1033; Stop 1057
ggtgatttagccagattaattgaca

SEQ ID NO: 175873 - DNA, 25 bp, Artificial
  probe
  misc_feature (1)..(25): SEQ ID NO: 820; WAN024DY5_at; Start 1042; Stop 1066
gccagattaattgacattgttgaca

SEQ ID NO: 175874 - DNA, 25 bp, Artificial
  probe
  misc_feature (1)..(25): SEQ ID NO: 820; WAN024DY5_at; Start 1023; Stop 1047
aaaagatgttggtgatttagccaga

SEQ ID NO: 175875 - DNA, 25 bp, Artificial
  probe
  misc_feature (1)..(25): SEQ ID NO: 820; WAN024DY5_at; Start 1059; Stop 1083
tgttgacagaaaggatgagacgttt

SEQ ID NO: 175876 - DNA, 25 bp, Artificial
  probe
  misc_feature (1)..(25): SEQ ID NO: 820; WAN024DY5_at; Start 802; Stop 826
acaggtttcgacaaggatccaagag

SEQ ID NO: 175877 - DNA, 25 bp, Artificial
  probe
  misc_feature (1)..(25): SEQ ID NO: 820; WAN024DY5_at; Start 787; Stop 811
cagttgctgaaggaaacaggtttcg

SEQ ID NO: 175878 - DNA, 25 bp, Artificial
  probe
  misc_feature (1)..(25): SEQ ID NO: 820; WAN024DY5_at; Start 799; Stop 823
gaaacaggtttcgacaaggatccaa

SEQ ID NO: 175879 - DNA, 25 bp, Artificial
  probe
  misc_feature (1)..(25): SEQ ID NO: 820; WAN024DY5_at; Start 1049; Stop 1073
taattgacattgttgacagaaagga

SEQ ID NO: 175880 - DNA, 25 bp, Artificial
  probe
  misc_feature (1)..(25): SEQ ID NO: 820; WAN024DY5_at; Start 1105; Stop 1129
gcgaaagatagaattgaaacagcat

SEQ ID NO: 175881 - DNA, 25 bp, Artificial
  probe
  misc_feature (1)..(25): SEQ ID NO: 820; WAN024DY5_at; Start 809; Stop 833
tcgacaaggatccaagagtcaaatt

SEQ ID NO: 175882 - DNA, 25 bp, Artificial
  probe
  misc_feature (1)..(25): SEQ ID NO: 820; WAN024DY5_at; Start 821; Stop 845
caagagtcaaatttgtgggaacagt

SEQ ID NO: 175883 - DNA, 25 bp, Artificial
  probe
  misc_feature (1)..(25): SEQ ID NO: 820; WAN024DY5_at; Start 1097; Stop 1121
gcttaatggcgaaagatagaattga

SEQ ID NO: 175884 - DNA, 25 bp, Artificial
  probe
  misc_feature (1)..(25): SEQ ID NO: 820; WAN024DY5_at; Start 1065; Stop 1089
cagaaaggatgagacgtttcgggaa

SEQ ID NO: 175885 - DNA, 25 bp, Artificial
  probe
  misc_feature (1)..(25): SEQ ID NO: 820; WAN024DY5_at; Start 1143; Stop 1167
cattgaaaaagagtataaggagatt

SEQ ID NO: 175886 - DNA, 25 bp, Artificial
  probe
  misc_feature (1)..(25): SEQ ID NO: 820; WAN024DY5_at; Start 817; Stop 841
gatccaagagtcaaatttgtgggaa

SEQ ID NO: 175887 - DNA, 25 bp, Artificial
  probe
  misc_feature (1)..(25): SEQ ID NO: 820; WAN024DY5_at; Start 783; Stop 807
cgatcagttgctgaaggaaacaggt

SEQ ID NO: 175888 - DNA, 25 bp, Artificial
  probe
  misc_feature (1)..(25): SEQ ID NO: 820; WAN024DY5_at; Start 937; Stop 961
gaagcccttgcatcaacaaaactaa

SEQ ID NO: 175889 - DNA, 25 bp, Artificial
  probe
  misc_feature (1)..(25): SEQ ID NO: 820; WAN024DY5_at; Start 934; Stop 958
ttagaagcccttgcatcaacaaaac

SEQ ID NO: 175890 - DNA, 25 bp, Artificial
  probe
  misc_feature (1)..(25): SEQ ID NO: 820; WAN024DY5_at; Start 1020; Stop 1044
gaaaaaagatgttggtgatttagcc

SEQ ID NO: 175891 - DNA, 25 bp, Artificial
  probe
  misc_feature (1)..(25): SEQ ID NO: 820; WAN024DY5_at; Start 1161; Stop 1185
ggagatttgggatgaggaagcgata

SEQ ID NO: 175892 - DNA, 25 bp, Artificial
  probe
  misc_feature (1)..(25): SEQ ID NO: 820; WAN024DY5_at; Start 1120; Stop 1144
gaaacagcatatagttggcaattca

SEQ ID NO: 175893 - DNA, 25 bp, Artificial
  probe
  misc_feature (1)..(25): SEQ ID NO: 820; WAN024DY5_at; Start 1092; Stop 1116
gcttggcttaatggcgaaagataga

SEQ ID NO: 175894 - DNA, 25 bp, Artificial
  probe
  misc_feature (1)..(25): SEQ ID NO: 820; WAN024DY5_at; Start 1056; Stop 1080
cattgttgacagaaaggatgagacg

SEQ ID NO: 175895 - DNA, 25 bp, Artificial
  probe
  misc_feature (1)..(25): SEQ ID NO: 819; WAN024DY6_at; Start 1085; Stop 1109
aattagacgaaaggtctagccaacg

SEQ ID NO: 175896 - DNA, 25 bp, Artificial
  probe
  misc_feature (1)..(25): SEQ ID NO: 819; WAN024DY6_at; Start 1113; Stop 1137
tgcggatgcatttacgtgggaaaag

SEQ ID NO: 175897 - DNA, 25 bp, Artificial
  probe
  misc_feature (1)..(25): SEQ ID NO: 819; WAN024DY6_at; Start 957; Stop 981
gcttaatttactgctagatgttggc

SEQ ID NO: 175898 - DNA, 25 bp, Artificial
  probe
  misc_feature (1)..(25): SEQ ID NO: 819; WAN024DY6_at; Start 552; Stop 576
gacgacttatatcgcctatggaaca

SEQ ID NO: 175899 - DNA, 25 bp, Artificial
  probe
  misc_feature (1)..(25): SEQ ID NO: 819; WAN024DY6_at; Start 946; Stop 970
gcttcaacaaagcttaatttactgc

SEQ ID NO: 175900 - DNA, 25 bp, Artificial
  probe
  misc_feature (1)..(25): SEQ ID NO: 819; WAN024DY6_at; Start 1089; Stop 1113
agacgaaaggtctagccaacgaatt

SEQ ID NO: 175901 - DNA, 25 bp, Artificial
  probe
  misc_feature (1)..(25): SEQ ID NO: 819; WAN024DY6_at; Start 581; Stop 605
caagcaagtctattttaaaacctga

SEQ ID NO: 175902 - DNA, 25 bp, Artificial
  probe
  misc_feature (1)..(25): SEQ ID NO: 819; WAN024DY6_at; Start 1037; Stop 1061
cgcatgtaatcgaagaagtggaacg

SEQ ID NO: 175903 - DNA, 25 bp, Artificial
  probe
  misc_feature (1)..(25): SEQ ID NO: 819; WAN024DY6_at; Start 1052; Stop 1076
aagtggaacgatttgatgaaggtgc

SEQ ID NO: 175904 - DNA, 25 bp, Artificial
  probe
  misc_feature (1)..(25): SEQ ID NO: 819; WAN024DY6_at; Start 1108; Stop 1132
cgaattgcggatgcatttacgtggg

SEQ ID NO: 175905 - DNA, 25 bp, Artificial
  probe
  misc_feature (1)..(25): SEQ ID NO: 819; WAN024DY6_at; Start 566; Stop 590
cctatggaacagatacaagcaagtc

SEQ ID NO: 175906 - DNA, 25 bp, Artificial
  probe
  misc_feature (1)..(25): SEQ ID NO: 819; WAN024DY6_at; Start 589; Stop 613
tctattttaaaacctgatgacgaaa

SEQ ID NO: 175907 - DNA, 25 bp, Artificial
  probe
  misc_feature (1)..(25): SEQ ID NO: 819; WAN024DY6_at; Start 561; Stop 585
tatcgcctatggaacagatacaagc

SEQ ID NO: 175908 - DNA, 25 bp, Artificial
  probe
  misc_feature (1)..(25): SEQ ID NO: 819; WAN024DY6_at; Start 654; Stop 678
cggatattatctagttgtgggacga

SEQ ID NO: 175909 - DNA, 25 bp, Artificial
  probe
  misc_feature (1)..(25): SEQ ID NO: 819; WAN024DY6_at; Start 627; Stop 651
gtatcaggaaaaaggcgttgctgaa

SEQ ID NO: 175910 - DNA, 25 bp, Artificial
  probe
  misc_feature (1)..(25): SEQ ID NO: 819; WAN024DY6_at; Start 640; Stop 664
ggcgttgctgaaaacggatattatc

SEQ ID NO: 175911 - DNA, 25 bp, Artificial
  probe
  misc_feature (1)..(25): SEQ ID NO: 819; WAN024DY6_at; Start 555; Stop 579
gacttatatcgcctatggaacagat

SEQ ID NO: 175912 - DNA, 25 bp, Artificial
  probe
  misc_feature (1)..(25): SEQ ID NO: 819; WAN024DY6_at; Start 1069; Stop 1093
gaaggtgctatttcggaattagacg

SEQ ID NO: 175913 - DNA, 25 bp, Artificial
  probe
  misc_feature (1)..(25): SEQ ID NO: 819; WAN024DY6_at; Start 1101; Stop 1125
tagccaacgaattgcggatgcattt

SEQ ID NO: 175914 - DNA, 25 bp, Artificial
  probe
  misc_feature (1)..(25): SEQ ID NO: 819; WAN024DY6_at; Start 1117; Stop 1141
gatgcatttacgtgggaaaagattg

SEQ ID NO: 175915 - DNA, 25 bp, Artificial
  probe
  misc_feature (1)..(25): SEQ ID NO: 819; WAN024DY6_at; Start 937; Stop 961
gaagctcttgcttcaacaaagctta

SEQ ID NO: 175916 - DNA, 25 bp, Artificial
  probe
  misc_feature (1)..(25): SEQ ID NO: 819; WAN024DY6_at; Start 601; Stop 625
cctgatgacgaaaaagttcgtaatt

SEQ ID NO: 175917 - DNA, 25 bp, Artificial
  probe
  misc_feature (1)..(25): SEQ ID NO: 819; WAN024DY6_at; Start 1105; Stop 1129
caacgaattgcggatgcatttacgt

SEQ ID NO: 175918 - DNA, 25 bp, Artificial
  probe
  misc_feature (1)..(25): SEQ ID NO: 819; WAN024DY6_at; Start 1033; Stop 1057
ctagcgcatgtaatcgaagaagtgg

SEQ ID NO: 175919 - DNA, 25 bp, Artificial
  probe
  misc_feature (1)..(25): SEQ ID NO: 819; WAN024DY6_at; Start 1081; Stop 1105
tcggaattagacgaaaggtctagcc

SEQ ID NO: 175920 - DNA, 25 bp, Artificial
  probe
  misc_feature (1)..(25): SEQ ID NO: 819; WAN024DY6_at; Start 571; Stop 595
ggaacagatacaagcaagtctattt

SEQ ID NO: 175921 - DNA, 25 bp, Artificial
  probe
  misc_feature (1)..(25): SEQ ID NO: 819; WAN024DY6_at; Start 1061; Stop 1085
gatttgatgaaggtgctatttcgga

SEQ ID NO: 175922 - DNA, 25 bp, Artificial
  probe
  misc_feature (1)..(25): SEQ ID NO: 819; WAN024DY6_at; Start 549; Stop 573
caagacgacttatatcgcctatgga

SEQ ID NO: 175923 - DNA, 25 bp, Artificial
  probe
  misc_feature (1)..(25): SEQ ID NO: 819; WAN024DY6_at; Start 1055; Stop 1079
tggaacgatttgatgaaggtgctat

SEQ ID NO: 175924 - DNA, 25 bp, Artificial
  probe
  misc_feature (1)..(25): SEQ ID NO: 819; WAN024DY6_at; Start 1030; Stop 1054
gagctagcgcatgtaatcgaagaag

SEQ ID NO: 175925 - DNA, 25 bp, Artificial
  probe
  misc_feature (1)..(25): SEQ ID NO: 819; WAN024DY6_at; Start 609; Stop 633
cgaaaaagttcgtaattggtatcag

SEQ ID NO: 175926 - DNA, 25 bp, Artificial
  probe
  misc_feature (1)..(25): SEQ ID NO: 819; WAN024DY6_at; Start 1047; Stop 1071
cgaagaagtggaacgatttgatgaa

SEQ ID NO: 175927 - DNA, 25 bp, Artificial
  probe
  misc_feature (1)..(25): SEQ ID NO: 819; WAN024DY6_at; Start 631; Stop 655
caggaaaaaggcgttgctgaaaacg

SEQ ID NO: 175928 - DNA, 25 bp, Artificial
  probe
  misc_feature (1)..(25): SEQ ID NO: 819; WAN024DY6_at; Start 1027; Stop 1051
gatgagctagcgcatgtaatcgaag

SEQ ID NO: 175929 - DNA, 25 bp, Artificial
  probe
  misc_feature (1)..(25): SEQ ID NO: 1661; WAN024DY7_at; Start 885; Stop 909
gcctttgcatatttacatggtcatg

SEQ ID NO: 175930 - DNA, 25 bp, Artificial
  probe
  misc_feature (1)..(25): SEQ ID NO: 1661; WAN024DY7_at; Start 408; Stop 432
tggctacgagaaaaatggagtttac

SEQ ID NO: 175931 - DNA, 25 bp, Artificial
  probe
  misc_feature (1)..(25): SEQ ID NO: 1661; WAN024DY7_at; Start 1074; Stop 1098
gcaactatcgcaaacttaaatttta

SEQ ID NO: 175932 - DNA, 25 bp, Artificial
  probe
  misc_feature (1)..(25): SEQ ID NO: 1661; WAN024DY7_at; Start 783; Stop 807
tacgacaagttgcttcgggaaacag

SEQ ID NO: 175933 - DNA, 25 bp, Artificial
  probe
  misc_feature (1)..(25): SEQ ID NO: 1661; WAN024DY7_at; Start 813; Stop 837
gaccaagacccaagaatcaaatttg

SEQ ID NO: 175934 - DNA, 25 bp, Artificial
  probe
  misc_feature (1)..(25): SEQ ID NO: 1661; WAN024DY7_at; Start 805; Stop 829
caggttttgaccaagacccaagaat

SEQ ID NO: 175935 - DNA, 25 bp, Artificial
  probe
  misc_feature (1)..(25): SEQ ID NO: 1661; WAN024DY7_at; Start 1041; Stop 1065
cgagtcatcgaatatgtggaaacga

SEQ ID NO: 175936 - DNA, 25 bp, Artificial
  probe
  misc_feature (1)..(25): SEQ ID NO: 1661; WAN024DY7_at; Start 681; Stop 705
tttgtccctgagaataactatgaag

SEQ ID NO: 175937 - DNA, 25 bp, Artificial
  probe
  misc_feature (1)..(25): SEQ ID NO: 1661; WAN024DY7_at; Start 775; Stop 799
ataaattttacgacaagttgcttcg

SEQ ID NO: 175938 - DNA, 25 bp, Artificial
  probe
  misc_feature (1)..(25): SEQ ID NO: 1661; WAN024DY7_at; Start 686; Stop 710
ccctgagaataactatgaagctatg

SEQ ID NO: 175939 - DNA, 25 bp, Artificial
  probe
  misc_feature (1)..(25): SEQ ID NO: 1661; WAN024DY7_at; Start 821; Stop 845
cccaagaatcaaatttgttggtact

SEQ ID NO: 175940 - DNA, 25 bp, Artificial
  probe
  misc_feature (1)..(25): SEQ ID NO: 1661; WAN024DY7_at; Start 793; Stop 817
tgcttcgggaaacaggttttgacca

SEQ ID NO: 175941 - DNA, 25 bp, Artificial
  probe
  misc_feature (1)..(25): SEQ ID NO: 1661; WAN024DY7_at; Start 1142; Stop 1166
tgtggcagattatgaaggagtattt

SEQ ID NO: 175942 - DNA, 25 bp, Artificial
  probe
  misc_feature (1)..(25): SEQ ID NO: 1661; WAN024DY7_at; Start 1023; Stop 1047
caaaaagatgaactttcacgagtca

SEQ ID NO: 175943 - DNA, 25 bp, Artificial
  probe
  misc_feature (1)..(25): SEQ ID NO: 1661; WAN024DY7_at; Start 1156; Stop 1180
aaggagtattttgttttgcgaagag

SEQ ID NO: 175944 - DNA, 25 bp, Artificial
  probe
  misc_feature (1)..(25): SEQ ID NO: 1661; WAN024DY7_at; Start 740; Stop 764
aaaggattttgtcctcattacaaat

SEQ ID NO: 175945 - DNA, 25 bp, Artificial
  probe
  misc_feature (1)..(25): SEQ ID NO: 1661; WAN024DY7_at; Start 1122; Stop 1146
gatttcacatgggaaaaaattgtgg

SEQ ID NO: 175946 - DNA, 25 bp, Artificial
  probe
  misc_feature (1)..(25): SEQ ID NO: 1661; WAN024DY7_at; Start 1096; Stop 1120
ttaaatcaacccaaagaatcctctc

SEQ ID NO: 175947 - DNA, 25 bp, Artificial
  probe
  misc_feature (1)..(25): SEQ ID NO: 1661; WAN024DY7_at; Start 716; Stop 740
tgaatttatcaaatcccagtctaaa

SEQ ID NO: 175948 - DNA, 25 bp, Artificial
  probe
  misc_feature (1)..(25): SEQ ID NO: 1661; WAN024DY7_at; Start 722; Stop 746
tatcaaatcccagtctaaaaaggat

SEQ ID NO: 175949 - DNA, 25 bp, Artificial
  probe
  misc_feature (1)..(25): SEQ ID NO: 1661; WAN024DY7_at; Start 921; Stop 945
acaaatccatcacttttagaggctt

SEQ ID NO: 175950 - DNA, 25 bp, Artificial
  probe
  misc_feature (1)..(25): SEQ ID NO: 1661; WAN024DY7_at; Start 1137; Stop 1161
aaaattgtggcagattatgaaggag

SEQ ID NO: 175951 - DNA, 25 bp, Artificial
  probe
  misc_feature (1)..(25): SEQ ID NO: 1661; WAN024DY7_at; Start 872; Stop 896
tattcgagaaaatgcctttgcatat

SEQ ID NO: 175952 - DNA, 25 bp, Artificial
  probe
  misc_feature (1)..(25): SEQ ID NO: 1661; WAN024DY7_at; Start 1012; Stop 1036
ctatttattggcaaaaagatgaact

SEQ ID NO: 175953 - DNA, 25 bp, Artificial
  probe
  misc_feature (1)..(25): SEQ ID NO: 1661; WAN024DY7_at; Start 1064; Stop 1088
gataaatcaagcaactatcgcaaac

SEQ ID NO: 175954 - DNA, 25 bp, Artificial
  probe
  misc_feature (1)..(25): SEQ ID NO: 1661; WAN024DY7_at; Start 732; Stop 756
cagtctaaaaaggattttgtcctca

SEQ ID NO: 175955 - DNA, 25 bp, Artificial
  probe
  misc_feature (1)..(25): SEQ ID NO: 1661; WAN024DY7_at; Start 958; Stop 982
agttaaatttgttgcttgatgttgg

SEQ ID NO: 175956 - DNA, 25 bp, Artificial
  probe
  misc_feature (1)..(25): SEQ ID NO: 1661; WAN024DY7_at; Start 836; Stop 860
tgttggtactgtttatgatcaggaa

SEQ ID NO: 175957 - DNA, 25 bp, Artificial
  probe
  misc_feature (1)..(25): SEQ ID NO: 1661; WAN024DY7_at; Start 855; Stop 879
caggaattgttaaaatatattcgag

SEQ ID NO: 175958 - DNA, 25 bp, Artificial
  probe
  misc_feature (1)..(25): SEQ ID NO: 1661; WAN024DY7_at; Start 892; Stop 916
catatttacatggtcatgaggtggg

SEQ ID NO: 175959 - DNA, 25 bp, Artificial
  probe
  misc_feature (1)..(25): SEQ ID NO: 1661; WAN024DY7_at; Start 1055; Stop 1079
tgtggaaacgataaatcaagcaact

SEQ ID NO: 175960 - DNA, 25 bp, Artificial
  probe
  misc_feature (1)..(25): SEQ ID NO: 1661; WAN024DY7_at; Start 931; Stop 955
cacttttagaggctttaggatcaac

SEQ ID NO: 175961 - DNA, 25 bp, Artificial
  probe
  misc_feature (1)..(25): SEQ ID NO: 1661; WAN024DY7_at; Start 939; Stop 963
gaggctttaggatcaacaaagttaa

SEQ ID NO: 175962 - DNA, 25 bp, Artificial
  probe
  misc_feature (1)..(25): SEQ ID NO: 1661; WAN024DY7_at; Start 1032; Stop 1056
gaactttcacgagtcatcgaatatg

SEQ ID NO: 175963 - DNA, 25 bp, Artificial
  probe
  misc_feature (1)..(25): SEQ ID NO: 644; WAN024DY8_at; Start 404; Stop 428
tgcggagcaataaccccgtaagcag

SEQ ID NO: 175964 - DNA, 25 bp, Artificial
  probe
  misc_feature (1)..(25): SEQ ID NO: 644; WAN024DY8_at; Start 298; Stop 322
cgtgaggaggtagcgtccgataata

SEQ ID NO: 175965 - DNA, 25 bp, Artificial
  probe
  misc_feature (1)..(25): SEQ ID NO: 644; WAN024DY8_at; Start 369; Stop 393
tttcaacactgtaaagaccatcttt

SEQ ID NO: 175966 - DNA, 25 bp, Artificial
  probe
  misc_feature (1)..(25): SEQ ID NO: 644; WAN024DY8_at; Start 626; Stop 650
tgagtttggcggataaaatgcagac

SEQ ID NO: 175967 - DNA, 25 bp, Artificial
  probe
  misc_feature (1)..(25): SEQ ID NO: 644; WAN024DY8_at; Start 79; Stop 103
gaggtaattcttcaaatcatctttg

SEQ ID NO: 175968 - DNA, 25 bp, Artificial
  probe
  misc_feature (1)..(25): SEQ ID NO: 644; WAN024DY8_at; Start 504; Stop 528
tggtaagtggaacagccttttcgtc

SEQ ID NO: 175969 - DNA, 25 bp, Artificial
  probe
  misc_feature (1)..(25): SEQ ID NO: 644; WAN024DY8_at; Start 631; Stop 655
ttggcggataaaatgcagacgcatg

SEQ ID NO: 175970 - DNA, 25 bp, Artificial
  probe
  misc_feature (1)..(25): SEQ ID NO: 644; WAN024DY8_at; Start 318; Stop 342
taatagcaaggtcgctaggagcgtc

SEQ ID NO: 175971 - DNA, 25 bp, Artificial
  probe
  misc_feature (1)..(25): SEQ ID NO: 644; WAN024DY8_at; Start 448; Stop 472
tggcatgacagcgatagtagacgcg

SEQ ID NO: 175972 - DNA, 25 bp, Artificial
  probe
  misc_feature (1)..(25): SEQ ID NO: 644; WAN024DY8_at; Start 428; Stop 452
gatacttcgtcatgagggactggca

SEQ ID NO: 175973 - DNA, 25 bp, Artificial
  probe
  misc_feature (1)..(25): SEQ ID NO: 644; WAN024DY8_at; Start 397; Stop 421
ttcgccttgcggagcaataaccccg

SEQ ID NO: 175974 - DNA, 25 bp, Artificial
  probe
  misc_feature (1)..(25): SEQ ID NO: 644; WAN024DY8_at; Start 384; Stop 408
gaccatcttttccttcgccttgcgg

SEQ ID NO: 175975 - DNA, 25 bp, Artificial
  probe
  misc_feature (1)..(25): SEQ ID NO: 644; WAN024DY8_at; Start 287; Stop 311
aaaatttcaggcgtgaggaggtagc

SEQ ID NO: 175976 - DNA, 25 bp, Artificial
  probe
  misc_feature (1)..(25): SEQ ID NO: 644; WAN024DY8_at; Start 556; Stop 580
cataacgacaaaaggttcatttccg

SEQ ID NO: 175977 - DNA, 25 bp, Artificial
  probe
  misc_feature (1)..(25): SEQ ID NO: 644; WAN024DY8_at; Start 599; Stop 623
aaaacagcatctccgagaccgcgtg

SEQ ID NO: 175978 - DNA, 25 bp, Artificial
  probe
  misc_feature (1)..(25): SEQ ID NO: 644; WAN024DY8_at; Start 545; Stop 569
tcatcaccaagcataacgacaaaag

SEQ ID NO: 175979 - DNA, 25 bp, Artificial
  probe
  misc_feature (1)..(25): SEQ ID NO: 644; WAN024DY8_at; Start 437; Stop 461
tcatgagggactggcatgacagcga

SEQ ID NO: 175980 - DNA, 25 bp, Artificial
  probe
  misc_feature (1)..(25): SEQ ID NO: 644; WAN024DY8_at; Start 414; Stop 438
taaccccgtaagcagatacttcgtc

SEQ ID NO: 175981 - DNA, 25 bp, Artificial
  probe
  misc_feature (1)..(25): SEQ ID NO: 644; WAN024DY8_at; Start 306; Stop 330
ggtagcgtccgataatagcaaggtc

SEQ ID NO: 175982 - DNA, 25 bp, Artificial
  probe
  misc_feature (1)..(25): SEQ ID NO: 644; WAN024DY8_at; Start 87; Stop 111
tcttcaaatcatctttgacttgtgg

SEQ ID NO: 175983 - DNA, 25 bp, Artificial
  probe
  misc_feature (1)..(25): SEQ ID NO: 644; WAN024DY8_at; Start 571; Stop 595
ttcatttccgacgaaagccttggct

SEQ ID NO: 175984 - DNA, 25 bp, Artificial
  probe
  misc_feature (1)..(25): SEQ ID NO: 644; WAN024DY8_at; Start 68; Stop 92
ccaagttggatgaggtaattcttca

SEQ ID NO: 175985 - DNA, 25 bp, Artificial
  probe
  misc_feature (1)..(25): SEQ ID NO: 644; WAN024DY8_at; Start 360; Stop 384
caacaaaggtttcaacactgtaaag

SEQ ID NO: 175986 - DNA, 25 bp, Artificial
  probe
  misc_feature (1)..(25): SEQ ID NO: 644; WAN024DY8_at; Start 609; Stop 633
ctccgagaccgcgtggatgagtttg

SEQ ID NO: 175987 - DNA, 25 bp, Artificial
  probe
  misc_feature (1)..(25): SEQ ID NO: 644; WAN024DY8_at; Start 53; Stop 77
tcagtcaattcttttccaagttgga

SEQ ID NO: 175988 - DNA, 25 bp, Artificial
  probe
  misc_feature (1)..(25): SEQ ID NO: 644; WAN024DY8_at; Start 583; Stop 607
gaaagccttggcttgcaaaacagca

SEQ ID NO: 175989 - DNA, 25 bp, Artificial
  probe
  misc_feature (1)..(25): SEQ ID NO: 644; WAN024DY8_at; Start 485; Stop 509
tagtcatccatgagttgtttggtaa

SEQ ID NO: 175990 - DNA, 25 bp, Artificial
  probe
  misc_feature (1)..(25): SEQ ID NO: 644; WAN024DY8_at; Start 344; Stop 368
tctggagctggtttttcaacaaagg

SEQ ID NO: 175991 - DNA, 25 bp, Artificial
  probe
  misc_feature (1)..(25): SEQ ID NO: 644; WAN024DY8_at; Start 532; Stop 556
gatatccatcaagtcatcaccaagc

SEQ ID NO: 175992 - DNA, 25 bp, Artificial
  probe
  misc_feature (1)..(25): SEQ ID NO: 644; WAN024DY8_at; Start 492; Stop 516
ccatgagttgtttggtaagtggaac

SEQ ID NO: 175993 - DNA, 25 bp, Artificial
  probe
  misc_feature (1)..(25): SEQ ID NO: 644; WAN024DY8_at; Start 332; Stop 356
ctaggagcgtcctctggagctggtt

SEQ ID NO: 175994 - DNA, 25 bp, Artificial
  probe
  misc_feature (1)..(25): SEQ ID NO: 644; WAN024DY8_at; Start 591; Stop 615
tggcttgcaaaacagcatctccgag

SEQ ID NO: 175995 - DNA, 25 bp, Artificial
  probe
  misc_feature (1)..(25): SEQ ID NO: 644; WAN024DY8_at; Start 455; Stop 479
acagcgatagtagacgcgtgggtac

SEQ ID NO: 175996 - DNA, 25 bp, Artificial
  probe
  misc_feature (1)..(25): SEQ ID NO: 644; WAN024DY8_at; Start 518; Stop 542
gccttttcgtctgtgatatccatca

SEQ ID NO: 175997 - DNA, 25 bp, Artificial
  probe
  misc_feature (1)..(25): SEQ ID NO: 3122; WAN024DY9_at; Start 113; Stop 137
taccagtgacaactagaatatcttc

SEQ ID NO: 175998 - DNA, 25 bp, Artificial
  probe
  misc_feature (1)..(25): SEQ ID NO: 3122; WAN024DY9_at; Start 268; Stop 292
gcctttctaacttttgatgtcataa

SEQ ID NO: 175999 - DNA, 25 bp, Artificial
  probe
  misc_feature (1)..(25): SEQ ID NO: 3122; WAN024DY9_at; Start 283; Stop 307
gatgtcataaaaatcctttctatag

SEQ ID NO: 176000 - DNA, 25 bp, Artificial
  probe
  misc_feature (1)..(25): SEQ ID NO: 3122; WAN024DY9_at; Start 239; Stop 263
gagttcctagtccagcagcagggat

SEQ ID NO: 176001 - DNA, 25 bp, Artificial
  probe
  misc_feature (1)..(25): SEQ ID NO: 3122; WAN024DY9_at; Start 195; Stop 219
tggcaacatttctttggcaagggcc

SEQ ID NO: 176002 - DNA, 25 bp, Artificial
  probe
  misc_feature (1)..(25): SEQ ID NO: 3122; WAN024DY9_at; Start 181; Stop 205
ggtttgtctacgattggcaacattt

SEQ ID NO: 176003 - DNA, 25 bp, Artificial
  probe
  misc_feature (1)..(25): SEQ ID NO: 3122; WAN024DY9_at; Start 59; Stop 83
tatattccaattcgaagtttgaatc

SEQ ID NO: 176004 - DNA, 25 bp, Artificial
  probe
  misc_feature (1)..(25): SEQ ID NO: 3122; WAN024DY9_at; Start 106; Stop 130
tttgatttaccagtgacaactagaa

SEQ ID NO: 176005 - DNA, 25 bp, Artificial
  probe
  misc_feature (1)..(25): SEQ ID NO: 3122; WAN024DY9_at; Start 21; Stop 45
tagcttcaaaagatctgttttccct

SEQ ID NO: 176006 - DNA, 25 bp, Artificial
  probe
  misc_feature (1)..(25): SEQ ID NO: 3122; WAN024DY9_at; Start 120; Stop 144
gacaactagaatatcttcaatacct

SEQ ID NO: 176007 - DNA, 25 bp, Artificial
  probe
  misc_feature (1)..(25): SEQ ID NO: 3122; WAN024DY9_at; Start 231; Stop 255
taaaaatcgagttcctagtccagca

SEQ ID NO: 176008 - DNA, 25 bp, Artificial
  probe
  misc_feature (1)..(25): SEQ ID NO: 3122; WAN024DY9_at; Start 176; Stop 200
tagttggtttgtctacgattggcaa

SEQ ID NO: 176009 - DNA, 25 bp, Artificial
  probe
  misc_feature (1)..(25): SEQ ID NO: 3122; WAN024DY9_at; Start 218; Stop 242
ccttggttgctggtaaaaatcgagt

SEQ ID NO: 176010 - DNA, 25 bp, Artificial
  probe
  misc_feature (1)..(25): SEQ ID NO: 3122; WAN024DY9_at; Start 16; Stop 40
tcaactagcttcaaaagatctgttt

SEQ ID NO: 176011 - DNA, 25 bp, Artificial
  probe
  misc_feature (1)..(25): SEQ ID NO: 3122; WAN024DY9_at; Start 49; Stop 73
tctttgaggttatattccaattcga

SEQ ID NO: 176012 - DNA, 25 bp, Artificial
  probe
  misc_feature (1)..(25): SEQ ID NO: 3122; WAN024DY9_at; Start 211; Stop 235
gcaagggccttggttgctggtaaaa

SEQ ID NO: 176013 - DNA, 25 bp, Artificial
  probe
  misc_feature (1)..(25): SEQ ID NO: 3122; WAN024DY9_at; Start 197; Stop 221
gcaacatttctttggcaagggcctt

SEQ ID NO: 176014 - DNA, 25 bp, Artificial
  probe
  misc_feature (1)..(25): SEQ ID NO: 3122; WAN024DY9_at; Start 201; Stop 225
catttctttggcaagggccttggtt

SEQ ID NO: 176015 - DNA, 25 bp, Artificial
  probe
  misc_feature (1)..(25): SEQ ID NO: 3122; WAN024DY9_at; Start 288; Stop 312
cataaaaatcctttctatagagggt

SEQ ID NO: 176016 - DNA, 25 bp, Artificial
  probe
  misc_feature (1)..(25): SEQ ID NO: 3122; WAN024DY9_at; Start 225; Stop 249
tgctggtaaaaatcgagttcctagt

SEQ ID NO: 176017 - DNA, 25 bp, Artificial
  probe
  misc_feature (1)..(25): SEQ ID NO: 3122; WAN024DY9_at; Start 164; Stop 188
cgataaactggatagttggtttgtc

SEQ ID NO: 176018 - DNA, 25 bp, Artificial
  probe
  misc_feature (1)..(25): SEQ ID NO: 3122; WAN024DY9_at; Start 221; Stop 245
tggttgctggtaaaaatcgagttcc

SEQ ID NO: 176019 - DNA, 25 bp, Artificial
  probe
  misc_feature (1)..(25): SEQ ID NO: 3122; WAN024DY9_at; Start 237; Stop 261
tcgagttcctagtccagcagcaggg

SEQ ID NO: 176020 - DNA, 25 bp, Artificial
  probe
  misc_feature (1)..(25): SEQ ID NO: 3122; WAN024DY9_at; Start 95; Stop 119
caatagaacgttttgatttaccagt

SEQ ID NO: 176021 - DNA, 25 bp, Artificial
  probe
  misc_feature (1)..(25): SEQ ID NO: 3122; WAN024DY9_at; Start 85; Stop 109
aagtggtcctcaatagaacgttttg

SEQ ID NO: 176022 - DNA, 25 bp, Artificial
  probe
  misc_feature (1)..(25): SEQ ID NO: 3122; WAN024DY9_at; Start 235; Stop 259
aatcgagttcctagtccagcagcag

SEQ ID NO: 176023 - DNA, 25 bp, Artificial
  probe
  misc_feature (1)..(25): SEQ ID NO: 3122; WAN024DY9_at; Start 128; Stop 152
gaatatcttcaatacctgatttgag

SEQ ID NO: 176024 - DNA, 25 bp, Artificial
  probe
  misc_feature (1)..(25): SEQ ID NO: 3122; WAN024DY9_at; Start 233; Stop 257
aaaatcgagttcctagtccagcagc

SEQ ID NO: 176025 - DNA, 25 bp, Artificial
  probe
  misc_feature (1)..(25): SEQ ID NO: 3122; WAN024DY9_at; Start 216; Stop 240
ggccttggttgctggtaaaaatcga

SEQ ID NO: 176026 - DNA, 25 bp, Artificial
  probe
  misc_feature (1)..(25): SEQ ID NO: 3122; WAN024DY9_at; Start 192; Stop 216
gattggcaacatttctttggcaagg

SEQ ID NO: 176027 - DNA, 25 bp, Artificial
  probe
  misc_feature (1)..(25): SEQ ID NO: 3122; WAN024DY9_at; Start 189; Stop 213
tacgattggcaacatttctttggca

SEQ ID NO: 176028 - DNA, 25 bp, Artificial
  probe
  misc_feature (1)..(25): SEQ ID NO: 3122; WAN024DY9_at; Start 169; Stop 193
aactggatagttggtttgtctacga

SEQ ID NO: 176029 - DNA, 25 bp, Artificial
  probe
  misc_feature (1)..(25): SEQ ID NO: 3122; WAN024DY9_at; Start 56; Stop 80
ggttatattccaattcgaagtttga

SEQ ID NO: 176030 - DNA, 25 bp, Artificial
  probe
  misc_feature (1)..(25): SEQ ID NO: 3122; WAN024DY9_at; Start 265; Stop 289
actgcctttctaacttttgatgtca

SEQ ID NO: 176031 - DNA, 25 bp, Artificial
  probe
  misc_feature (1)..(25): SEQ ID NO: 3762; WAN024DYA_at; Start 448; Stop 472
cccgaagatgcaccaagtgatttag

SEQ ID NO: 176032 - DNA, 25 bp, Artificial
  probe
  misc_feature (1)..(25): SEQ ID NO: 3762; WAN024DYA_at; Start 106; Stop 130
acagatctgttaaaattagtagatg

SEQ ID NO: 176033 - DNA, 25 bp, Artificial
  probe
  misc_feature (1)..(25): SEQ ID NO: 3762; WAN024DYA_at; Start 104; Stop 128
aaacagatctgttaaaattagtaga

SEQ ID NO: 176034 - DNA, 25 bp, Artificial
  probe
  misc_feature (1)..(25): SEQ ID NO: 3762; WAN024DYA_at; Start 446; Stop 470
ctcccgaagatgcaccaagtgattt

SEQ ID NO: 176035 - DNA, 25 bp, Artificial
  probe
  misc_feature (1)..(25): SEQ ID NO: 3762; WAN024DYA_at; Start 108; Stop 132
agatctgttaaaattagtagatgaa

SEQ ID NO: 176036 - DNA, 25 bp, Artificial
  probe
  misc_feature (1)..(25): SEQ ID NO: 3762; WAN024DYA_at; Start 444; Stop 468
agctcccgaagatgcaccaagtgat

SEQ ID NO: 176037 - DNA, 25 bp, Artificial
  probe
  misc_feature (1)..(25): SEQ ID NO: 3762; WAN024DYA_at; Start 445; Stop 469
gctcccgaagatgcaccaagtgatt

SEQ ID NO: 176038 - DNA, 25 bp, Artificial
  probe
  misc_feature (1)..(25): SEQ ID NO: 3762; WAN024DYA_at; Start 438; Stop 462
aaaaccagctcccgaagatgcacca

SEQ ID NO: 176039 - DNA, 25 bp, Artificial
  probe
  misc_feature (1)..(25): SEQ ID NO: 3762; WAN024DYA_at; Start 439; Stop 463
aaaccagctcccgaagatgcaccaa

SEQ ID NO: 176040 - DNA, 25 bp, Artificial
  probe
  misc_feature (1)..(25): SEQ ID NO: 3762; WAN024DYA_at; Start 443; Stop 467
cagctcccgaagatgcaccaagtga

SEQ ID NO: 176041 - DNA, 25 bp, Artificial
  probe
  misc_feature (1)..(25): SEQ ID NO: 3762; WAN024DYA_at; Start 440; Stop 464
aaccagctcccgaagatgcaccaag

SEQ ID NO: 176042 - DNA, 25 bp, Artificial
  probe
  misc_feature (1)..(25): SEQ ID NO: 3762; WAN024DYA_at; Start 105; Stop 129
aacagatctgttaaaattagtagat

SEQ ID NO: 176043 - DNA, 25 bp, Artificial
  probe
  misc_feature (1)..(25): SEQ ID NO: 3762; WAN024DYA_at; Start 442; Stop 466
ccagctcccgaagatgcaccaagtg

SEQ ID NO: 176044 - DNA, 25 bp, Artificial
  probe
  misc_feature (1)..(25): SEQ ID NO: 3762; WAN024DYA_at; Start 441; Stop 465
accagctcccgaagatgcaccaagt

SEQ ID NO: 176045 - DNA, 25 bp, Artificial
  probe
  misc_feature (1)..(25): SEQ ID NO: 3762; WAN024DYA_at; Start 447; Stop 471
tcccgaagatgcaccaagtgattta

SEQ ID NO: 176046 - DNA, 25 bp, Artificial
  probe
  misc_feature (1)..(25): SEQ ID NO: 3762; WAN024DYA_at; Start 450; Stop 474
cgaagatgcaccaagtgatttagca

SEQ ID NO: 176047 - DNA, 25 bp, Artificial
  probe
  misc_feature (1)..(25): SEQ ID NO: 3762; WAN024DYA_at; Start 107; Stop 131
cagatctgttaaaattagtagatga

SEQ ID NO: 176048 - DNA, 25 bp, Artificial
  probe
  misc_feature (1)..(25): SEQ ID NO: 3762; WAN024DYA_at; Start 103; Stop 127
aaaacagatctgttaaaattagtag

SEQ ID NO: 176049 - DNA, 25 bp, Artificial
  probe
  misc_feature (1)..(25): SEQ ID NO: 3762; WAN024DYA_at; Start 449; Stop 473
ccgaagatgcaccaagtgatttagc

SEQ ID NO: 176050 - DNA, 25 bp, Artificial
  probe
  misc_feature (1)..(25): SEQ ID NO: 821; WAN024DYB_at; Start 390; Stop 414
tcctgatggtcatgaatggttgcga

SEQ ID NO: 176051 - DNA, 25 bp, Artificial
  probe
  misc_feature (1)..(25): SEQ ID NO: 821; WAN024DYB_at; Start 456; Stop 480
agagcagctcatggtcaaacatgca

SEQ ID NO: 176052 - DNA, 25 bp, Artificial
  probe
  misc_feature (1)..(25): SEQ ID NO: 821; WAN024DYB_at; Start 309; Stop 333
cattctagcttgtcgcattggtcct

SEQ ID NO: 176053 - DNA, 25 bp, Artificial
  probe
  misc_feature (1)..(25): SEQ ID NO: 821; WAN024DYB_at; Start 211; Stop 235
aatattggaccagctcgtgccatcg

SEQ ID NO: 176054 - DNA, 25 bp, Artificial
  probe
  misc_feature (1)..(25): SEQ ID NO: 821; WAN024DYB_at; Start 548; Stop 572
caaagaccacctatattgcctatgg

SEQ ID NO: 176055 - DNA, 25 bp, Artificial
  probe
  misc_feature (1)..(25): SEQ ID NO: 821; WAN024DYB_at; Start 408; Stop 432
gttgcgagcaaagtggagtttacca

SEQ ID NO: 176056 - DNA, 25 bp, Artificial
  probe
  misc_feature (1)..(25): SEQ ID NO: 821; WAN024DYB_at; Start 1066; Stop 1090
gatcaggcagcaataactgacttgg

SEQ ID NO: 176057 - DNA, 25 bp, Artificial
  probe
  misc_feature (1)..(25): SEQ ID NO: 821; WAN024DYB_at; Start 1021; Stop 1045
aaaaaagatgagttggctcgtgtca

SEQ ID NO: 176058 - DNA, 25 bp, Artificial
  probe
  misc_feature (1)..(25): SEQ ID NO: 821; WAN024DYB_at; Start 322; Stop 346
cgcattggtccttttatttctgggc

SEQ ID NO: 176059 - DNA, 25 bp, Artificial
  probe
  misc_feature (1)..(25): SEQ ID NO: 821; WAN024DYB_at; Start 488; Stop 512
tggtctgtgacagtaaaaacattga

SEQ ID NO: 176060 - DNA, 25 bp, Artificial
  probe
  misc_feature (1)..(25): SEQ ID NO: 821; WAN024DYB_at; Start 532; Stop 556
tataagcagtaccaaccaaagacca

SEQ ID NO: 176061 - DNA, 25 bp, Artificial
  probe
  misc_feature (1)..(25): SEQ ID NO: 821; WAN024DYB_at; Start 139; Stop 163
tcagctaaatctggcatcatggatg

SEQ ID NO: 176062 - DNA, 25 bp, Artificial
  probe
  misc_feature (1)..(25): SEQ ID NO: 821; WAN024DYB_at; Start 129; Stop 153
gcgtgaaaattcagctaaatctggc

SEQ ID NO: 176063 - DNA, 25 bp, Artificial
  probe
  misc_feature (1)..(25): SEQ ID NO: 821; WAN024DYB_at; Start 1052; Stop 1076
aagtagaaggatttgatcaggcagc

SEQ ID NO: 176064 - DNA, 25 bp, Artificial
  probe
  misc_feature (1)..(25): SEQ ID NO: 821; WAN024DYB_at; Start 1036; Stop 1060
gctcgtgtcattgaggaagtagaag

SEQ ID NO: 176065 - DNA, 25 bp, Artificial
  probe
  misc_feature (1)..(25): SEQ ID NO: 821; WAN024DYB_at; Start 153; Stop 177
catcatggatgatcagtttgagcac

SEQ ID NO: 176066 - DNA, 25 bp, Artificial
  probe
  misc_feature (1)..(25): SEQ ID NO: 821; WAN024DYB_at; Start 107; Stop 131
tacaatactatgttgcttgtatgcg

SEQ ID NO: 176067 - DNA, 25 bp, Artificial
  probe
  misc_feature (1)..(25): SEQ ID NO: 821; WAN024DYB_at; Start 1094; Stop 1118
tcaagtcaagccaaagaatcctctc

SEQ ID NO: 176068 - DNA, 25 bp, Artificial
  probe
  misc_feature (1)..(25): SEQ ID NO: 821; WAN024DYB_at; Start 684; Stop 708
tcctgaaaataactacgaagcaatg

SEQ ID NO: 176069 - DNA, 25 bp, Artificial
  probe
  misc_feature (1)..(25): SEQ ID NO: 821; WAN024DYB_at; Start 868; Stop 892
tacatccgtgagtatgcctttgcct

SEQ ID NO: 176070 - DNA, 25 bp, Artificial
  probe
  misc_feature (1)..(25): SEQ ID NO: 821; WAN024DYB_at; Start 79; Stop 103
ttaaccgaatatcaaaaagacagca

SEQ ID NO: 176071 - DNA, 25 bp, Artificial
  probe
  misc_feature (1)..(25): SEQ ID NO: 821; WAN024DYB_at; Start 853; Stop 877
caagagttgctcaagtacatccgtg

SEQ ID NO: 176072 - DNA, 25 bp, Artificial
  probe
  misc_feature (1)..(25): SEQ ID NO: 821; WAN024DYB_at; Start 577; Stop 601
gatactactccttcaatcctgaaag

SEQ ID NO: 176073 - DNA, 25 bp, Artificial
  probe
  misc_feature (1)..(25): SEQ ID NO: 821; WAN024DYB_at; Start 444; Stop 468
ttggaaattttcagagcagctcatg

SEQ ID NO: 176074 - DNA, 25 bp, Artificial
  probe
  misc_feature (1)..(25): SEQ ID NO: 821; WAN024DYB_at; Start 181; Stop 205
ggagccatttgtttcaacatcgatg

SEQ ID NO: 176075 - DNA, 25 bp, Artificial
  probe
  misc_feature (1)..(25): SEQ ID NO: 821; WAN024DYB_at; Start 354; Stop 378
aaaaattcgtgccatcggaggccgg

SEQ ID NO: 176076 - DNA, 25 bp, Artificial
  probe
  misc_feature (1)..(25): SEQ ID NO: 821; WAN024DYB_at; Start 371; Stop 395
gaggccggttgttggtaaatcctga

SEQ ID NO: 176077 - DNA, 25 bp, Artificial
  probe
  misc_feature (1)..(25): SEQ ID NO: 821; WAN024DYB_at; Start 521; Stop 545
tccaagaggattataagcagtacca

SEQ ID NO: 176078 - DNA, 25 bp, Artificial
  probe
  misc_feature (1)..(25): SEQ ID NO: 821; WAN024DYB_at; Start 196; Stop 220
aacatcgatgtacccaatattggac

SEQ ID NO: 176079 - DNA, 25 bp, Artificial
  probe
  misc_feature (1)..(25): SEQ ID NO: 821; WAN024DYB_at; Start 274; Stop 298
gctaagaaaaataaggacgaagctc

SEQ ID NO: 176080 - DNA, 25 bp, Artificial
  probe
  misc_feature (1)..(25): SEQ ID NO: 821; WAN024DYB_at; Start 927; Stop 951
ttctctattggaagccctagcatcc

SEQ ID NO: 176081 - DNA, 25 bp, Artificial
  probe
  misc_feature (1)..(25): SEQ ID NO: 821; WAN024DYB_at; Start 563; Stop 587
ttgcctatggaacggatactactcc

SEQ ID NO: 176082 - DNA, 25 bp, Artificial
  probe
  misc_feature (1)..(25): SEQ ID NO: 821; WAN024DYB_at; Start 165; Stop 189
tcagtttgagcacaatggagccatt

SEQ ID NO: 176083 - DNA, 25 bp, Artificial
  probe
  misc_feature (1)..(25): SEQ ID NO: 821; WAN024DYB_at; Start 590; Stop 614
caatcctgaaagcagaagatgccaa

SEQ ID NO: 176084 - DNA, 25 bp, Artificial
  probe
  misc_feature (1)..(25): SEQ ID NO: 1076; WAN024DYC_at; Start 735; Stop 759
taaaaaagactttgttctcattaca

SEQ ID NO: 176085 - DNA, 25 bp, Artificial
  probe
  misc_feature (1)..(25): SEQ ID NO: 1076; WAN024DYC_at; Start 941; Stop 965
cattggcatccactaggcttaatct

SEQ ID NO: 176086 - DNA, 25 bp, Artificial
  probe
  misc_feature (1)..(25): SEQ ID NO: 1076; WAN024DYC_at; Start 1056; Stop 1080
ggagcaatttgatgagaacgccatt

SEQ ID NO: 176087 - DNA, 25 bp, Artificial
  probe
  misc_feature (1)..(25): SEQ ID NO: 1076; WAN024DYC_at; Start 963; Stop 987
tctattactagatgtaggttttaac

SEQ ID NO: 176088 - DNA, 25 bp, Artificial
  probe
  misc_feature (1)..(25): SEQ ID NO: 1076; WAN024DYC_at; Start 892; Stop 916
tattttcacggtcatgaagtgggag

SEQ ID NO: 176089 - DNA, 25 bp, Artificial
  probe
  misc_feature (1)..(25): SEQ ID NO: 1076; WAN024DYC_at; Start 1074; Stop 1098
cgccatttctgaactagataaaaaa

SEQ ID NO: 176090 - DNA, 25 bp, Artificial
  probe
  misc_feature (1)..(25): SEQ ID NO: 1076; WAN024DYC_at; Start 1005; Stop 1029
tggtgccatctattggagaaaagat

SEQ ID NO: 176091 - DNA, 25 bp, Artificial
  probe
  misc_feature (1)..(25): SEQ ID NO: 1076; WAN024DYC_at; Start 765; Stop 789
ggaacagaataagttttacgatcag

SEQ ID NO: 176092 - DNA, 25 bp, Artificial
  probe
  misc_feature (1)..(25): SEQ ID NO: 1076; WAN024DYC_at; Start 720; Stop 744
tatgaagtctaattctaaaaaagac

SEQ ID NO: 176093 - DNA, 25 bp, Artificial
  probe
  misc_feature (1)..(25): SEQ ID NO: 1076; WAN024DYC_at; Start 1108; Stop 1132
cgaattgcagaagcttttacgtggg

SEQ ID NO: 176094 - DNA, 25 bp, Artificial
  probe
  misc_feature (1)..(25): SEQ ID NO: 1076; WAN024DYC_at; Start 1114; Stop 1138
gcagaagcttttacgtgggaagaga

SEQ ID NO: 176095 - DNA, 25 bp, Artificial
  probe
  misc_feature (1)..(25): SEQ ID NO: 1076; WAN024DYC_at; Start 935; Stop 959
ttgaagcattggcatccactaggct

SEQ ID NO: 176096 - DNA, 25 bp, Artificial
  probe
  misc_feature (1)..(25): SEQ ID NO: 1076; WAN024DYC_at; Start 1000; Stop 1024
gagaatggtgccatctattggagaa

SEQ ID NO: 176097 - DNA, 25 bp, Artificial
  probe
  misc_feature (1)..(25): SEQ ID NO: 1076; WAN024DYC_at; Start 911; Stop 935
tgggagggaccaatccatccttgct

SEQ ID NO: 176098 - DNA, 25 bp, Artificial
  probe
  misc_feature (1)..(25): SEQ ID NO: 1076; WAN024DYC_at; Start 1088; Stop 1112
tagataaaaaatctagccaacgaat

SEQ ID NO: 176099 - DNA, 25 bp, Artificial
  probe
  misc_feature (1)..(25): SEQ ID NO: 1076; WAN024DYC_at; Start 883; Stop 907
gcttttgcctattttcacggtcatg

SEQ ID NO: 176100 - DNA, 25 bp, Artificial
  probe
  misc_feature (1)..(25): SEQ ID NO: 1076; WAN024DYC_at; Start 1101; Stop 1125
tagccaacgaattgcagaagctttt

SEQ ID NO: 176101 - DNA, 25 bp, Artificial
  probe
  misc_feature (1)..(25): SEQ ID NO: 1076; WAN024DYC_at; Start 950; Stop 974
ccactaggcttaatctattactaga

SEQ ID NO: 176102 - DNA, 25 bp, Artificial
  probe
  misc_feature (1)..(25): SEQ ID NO: 1076; WAN024DYC_at; Start 903; Stop 927
tcatgaagtgggagggaccaatcca

SEQ ID NO: 176103 - DNA, 25 bp, Artificial
  probe
  misc_feature (1)..(25): SEQ ID NO: 1076; WAN024DYC_at; Start 1037; Stop 1061
cgcgcgttattgaagcagtggagca

SEQ ID NO: 176104 - DNA, 25 bp, Artificial
  probe
  misc_feature (1)..(25): SEQ ID NO: 1076; WAN024DYC_at; Start 990; Stop 1014
tgaagtcggagagaatggtgccatc

SEQ ID NO: 176105 - DNA, 25 bp, Artificial
  probe
  misc_feature (1)..(25): SEQ ID NO: 1076; WAN024DYC_at; Start 1071; Stop 1095
gaacgccatttctgaactagataaa

SEQ ID NO: 176106 - DNA, 25 bp, Artificial
  probe
  misc_feature (1)..(25): SEQ ID NO: 1076; WAN024DYC_at; Start 907; Stop 931
gaagtgggagggaccaatccatcct

SEQ ID NO: 176107 - DNA, 25 bp, Artificial
  probe
  misc_feature (1)..(25): SEQ ID NO: 1076; WAN024DYC_at; Start 1030; Stop 1054
gagctagcgcgcgttattgaagcag

SEQ ID NO: 176108 - DNA, 25 bp, Artificial
  probe
  misc_feature (1)..(25): SEQ ID NO: 1076; WAN024DYC_at; Start 1139; Stop 1163
tagtggtggattatgaggaagagtt

SEQ ID NO: 176109 - DNA, 25 bp, Artificial
  probe
  misc_feature (1)..(25): SEQ ID NO: 1076; WAN024DYC_at; Start 929; Stop 953
ccttgcttgaagcattggcatccac

SEQ ID NO: 176110 - DNA, 25 bp, Artificial
  probe
  misc_feature (1)..(25): SEQ ID NO: 1076; WAN024DYC_at; Start 982; Stop 1006
tttaaccgtgaagtcggagagaatg

SEQ ID NO: 176111 - DNA, 25 bp, Artificial
  probe
  misc_feature (1)..(25): SEQ ID NO: 1076; WAN024DYC_at; Start 1047; Stop 1071
tgaagcagtggagcaatttgatgag

SEQ ID NO: 176112 - DNA, 25 bp, Artificial
  probe
  misc_feature (1)..(25): SEQ ID NO: 1076; WAN024DYC_at; Start 914; Stop 938
gagggaccaatccatccttgcttga

SEQ ID NO: 176113 - DNA, 25 bp, Artificial
  probe
  misc_feature (1)..(25): SEQ ID NO: 1076; WAN024DYC_at; Start 1121; Stop 1145
cttttacgtgggaagagatagtggt

SEQ ID NO: 176114 - DNA, 25 bp, Artificial
  probe
  misc_feature (1)..(25): SEQ ID NO: 1076; WAN024DYC_at; Start 918; Stop 942
gaccaatccatccttgcttgaagca

SEQ ID NO: 176115 - DNA, 25 bp, Artificial
  probe
  misc_feature (1)..(25): SEQ ID NO: 1076; WAN024DYC_at; Start 1052; Stop 1076
cagtggagcaatttgatgagaacgc

SEQ ID NO: 176116 - DNA, 25 bp, Artificial
  probe
  misc_feature (1)..(25): SEQ ID NO: 1076; WAN024DYC_at; Start 1066; Stop 1090
gatgagaacgccatttctgaactag

SEQ ID NO: 176117 - DNA, 25 bp, Artificial
  probe
  misc_feature (1)..(25): SEQ ID NO: 1076; WAN024DYC_at; Start 1060; Stop 1084
caatttgatgagaacgccatttctg

SEQ ID NO: 176118 - DNA, 25 bp, Artificial
  probe
  misc_feature (1)..(25): SEQ ID NO: 1385; WAN024DYD_at; Start 694; Stop 718
gaaatccaacttactgatgcaatcg

SEQ ID NO: 176119 - DNA, 25 bp, Artificial
  probe
  misc_feature (1)..(25): SEQ ID NO: 1385; WAN024DYD_at; Start 693; Stop 717
tgaaatccaacttactgatgcaatc

SEQ ID NO: 176120 - DNA, 25 bp, Artificial
  probe
  misc_feature (1)..(25): SEQ ID NO: 1385; WAN024DYD_at; Start 219; Stop 243
tgagcttgaatacaatcttaaggaa

SEQ ID NO: 176121 - DNA, 25 bp, Artificial
  probe
  misc_feature (1)..(25): SEQ ID NO: 1385; WAN024DYD_at; Start 744; Stop 768
ctttgcccgtgaatttacaggaact

SEQ ID NO: 176122 - DNA, 25 bp, Artificial
  probe
  misc_feature (1)..(25): SEQ ID NO: 1385; WAN024DYD_at; Start 751; Stop 775
cgtgaatttacaggaactcgttacg

SEQ ID NO: 176123 - DNA, 25 bp, Artificial
  probe
  misc_feature (1)..(25): SEQ ID NO: 1385; WAN024DYD_at; Start 753; Stop 777
tgaatttacaggaactcgttacgac

SEQ ID NO: 176124 - DNA, 25 bp, Artificial
  probe
  misc_feature (1)..(25): SEQ ID NO: 1385; WAN024DYD_at; Start 214; Stop 238
aactttgagcttgaatacaatctta

SEQ ID NO: 176125 - DNA, 25 bp, Artificial
  probe
  misc_feature (1)..(25): SEQ ID NO: 1385; WAN024DYD_at; Start 226; Stop 250
gaatacaatcttaaggaaaaaggca

SEQ ID NO: 176126 - DNA, 25 bp, Artificial
  probe
  misc_feature (1)..(25): SEQ ID NO: 1385; WAN024DYD_at; Start 699; Stop 723
ccaacttactgatgcaatcgatact

SEQ ID NO: 176127 - DNA, 25 bp, Artificial
  probe
  misc_feature (1)..(25): SEQ ID NO: 1385; WAN024DYD_at; Start 741; Stop 765
tgtctttgcccgtgaatttacagga

SEQ ID NO: 176128 - DNA, 25 bp, Artificial
  probe
  misc_feature (1)..(25): SEQ ID NO: 1385; WAN024DYD_at; Start 786; Stop 810
taagtttggctttatgaaaacatct

SEQ ID NO: 176129 - DNA, 25 bp, Artificial
  probe
  misc_feature (1)..(25): SEQ ID NO: 1385; WAN024DYD_at; Start 745; Stop 769
tttgcccgtgaatttacaggaactc

SEQ ID NO: 176130 - DNA, 25 bp, Artificial
  probe
  misc_feature (1)..(25): SEQ ID NO: 1385; WAN024DYD_at; Start 225; Stop 249
tgaatacaatcttaaggaaaaaggc

SEQ ID NO: 176131 - DNA, 25 bp, Artificial
  probe
  misc_feature (1)..(25): SEQ ID NO: 1385; WAN024DYD_at; Start 747; Stop 771
tgcccgtgaatttacaggaactcgt

SEQ ID NO: 176132 - DNA, 25 bp, Artificial
  probe
  misc_feature (1)..(25): SEQ ID NO: 1385; WAN024DYD_at; Start 742; Stop 766
gtctttgcccgtgaatttacaggaa

SEQ ID NO: 176133 - DNA, 25 bp, Artificial
  probe
  misc_feature (1)..(25): SEQ ID NO: 1385; WAN024DYD_at; Start 217; Stop 241
tttgagcttgaatacaatcttaagg

SEQ ID NO: 176134 - DNA, 25 bp, Artificial
  probe
  misc_feature (1)..(25): SEQ ID NO: 1385; WAN024DYD_at; Start 794; Stop 818
gctttatgaaaacatctattgacta

SEQ ID NO: 176135 - DNA, 25 bp, Artificial
  probe
  misc_feature (1)..(25): SEQ ID NO: 1385; WAN024DYD_at; Start 695; Stop 719
aaatccaacttactgatgcaatcga

SEQ ID NO: 176136 - DNA, 25 bp, Artificial
  probe
  misc_feature (1)..(25): SEQ ID NO: 1385; WAN024DYD_at; Start 688; Stop 712
ggaaatgaaatccaacttactgatg

SEQ ID NO: 176137 - DNA, 25 bp, Artificial
  probe
  misc_feature (1)..(25): SEQ ID NO: 1385; WAN024DYD_at; Start 798; Stop 822
tatgaaaacatctattgactacgcc

SEQ ID NO: 176138 - DNA, 25 bp, Artificial
  probe
  misc_feature (1)..(25): SEQ ID NO: 1385; WAN024DYD_at; Start 752; Stop 776
gtgaatttacaggaactcgttacga

SEQ ID NO: 176139 - DNA, 25 bp, Artificial
  probe
  misc_feature (1)..(25): SEQ ID NO: 1385; WAN024DYD_at; Start 740; Stop 764
gtgtctttgcccgtgaatttacagg

SEQ ID NO: 176140 - DNA, 25 bp, Artificial
  probe
  misc_feature (1)..(25): SEQ ID NO: 1385; WAN024DYD_at; Start 746; Stop 770
ttgcccgtgaatttacaggaactcg

SEQ ID NO: 176141 - DNA, 25 bp, Artificial
  probe
  misc_feature (1)..(25): SEQ ID NO: 1385; WAN024DYD_at; Start 222; Stop 246
gcttgaatacaatcttaaggaaaaa

SEQ ID NO: 176142 - DNA, 25 bp, Artificial
  probe
  misc_feature (1)..(25): SEQ ID NO: 1385; WAN024DYD_at; Start 797; Stop 821
ttatgaaaacatctattgactacgc

SEQ ID NO: 176143 - DNA, 25 bp, Artificial
  probe
  misc_feature (1)..(25): SEQ ID NO: 1385; WAN024DYD_at; Start 689; Stop 713
gaaatgaaatccaacttactgatgc

SEQ ID NO: 176144 - DNA, 25 bp, Artificial
  probe
  misc_feature (1)..(25): SEQ ID NO: 1385; WAN024DYD_at; Start 690; Stop 714
aaatgaaatccaacttactgatgca

SEQ ID NO: 176145 - DNA, 25 bp, Artificial
  probe
  misc_feature (1)..(25): SEQ ID NO: 1385; WAN024DYD_at; Start 743; Stop 767
tctttgcccgtgaatttacaggaac

SEQ ID NO: 176146 - DNA, 25 bp, Artificial
  probe
  misc_feature (1)..(25): SEQ ID NO: 1385; WAN024DYD_at; Start 793; Stop 817
ggctttatgaaaacatctattgact

SEQ ID NO: 176147 - DNA, 25 bp, Artificial
  probe
  misc_feature (1)..(25): SEQ ID NO: 1385; WAN024DYD_at; Start 691; Stop 715
aatgaaatccaacttactgatgcaa

SEQ ID NO: 176148 - DNA, 25 bp, Artificial
  probe
  misc_feature (1)..(25): SEQ ID NO: 1385; WAN024DYD_at; Start 220; Stop 244
gagcttgaatacaatcttaaggaaa

SEQ ID NO: 176149 - DNA, 25 bp, Artificial
  probe
  misc_feature (1)..(25): SEQ ID NO: 1385; WAN024DYD_at; Start 696; Stop 720
aatccaacttactgatgcaatcgat

SEQ ID NO: 176150 - DNA, 25 bp, Artificial
  probe
  misc_feature (1)..(25): SEQ ID NO: 1385; WAN024DYD_at; Start 698; Stop 722
tccaacttactgatgcaatcgatac

SEQ ID NO: 176151 - DNA, 25 bp, Artificial
  probe
  misc_feature (1)..(25): SEQ ID NO: 1385; WAN024DYD_at; Start 792; Stop 816
tggctttatgaaaacatctattgac

SEQ ID NO: 176152 - DNA, 25 bp, Artificial
  probe
  misc_feature (1)..(25): SEQ ID NO: 1386; WAN024DYE_at; Start 541; Stop 565
ggcgaaggaaaagatggtctttaca

SEQ ID NO: 176153 - DNA, 25 bp, Artificial
  probe
  misc_feature (1)..(25): SEQ ID NO: 1386; WAN024DYE_at; Start 397; Stop 421
gacttgatggatatcacagacgaaa

SEQ ID NO: 176154 - DNA, 25 bp, Artificial
  probe
  misc_feature (1)..(25): SEQ ID NO: 1386; WAN024DYE_at; Start 399; Stop 423
cttgatggatatcacagacgaaaag

SEQ ID NO: 176155 - DNA, 25 bp, Artificial
  probe
  misc_feature (1)..(25): SEQ ID NO: 1386; WAN024DYE_at; Start 594; Stop 618
tccagaggacgctcctagcgacctt

SEQ ID NO: 176156 - DNA, 25 bp, Artificial
  probe
  misc_feature (1)..(25): SEQ ID NO: 1386; WAN024DYE_at; Start 526; Stop 550
gttattgctccgcaaggcgaaggaa

SEQ ID NO: 176157 - DNA, 25 bp, Artificial
  probe
  misc_feature (1)..(25): SEQ ID NO: 1386; WAN024DYE_at; Start 536; Stop 560
cgcaaggcgaaggaaaagatggtct

SEQ ID NO: 176158 - DNA, 25 bp, Artificial
  probe
  misc_feature (1)..(25): SEQ ID NO: 1386; WAN024DYE_at; Start 534; Stop 558
tccgcaaggcgaaggaaaagatggt

SEQ ID NO: 176159 - DNA, 25 bp, Artificial
  probe
  misc_feature (1)..(25): SEQ ID NO: 1386; WAN024DYE_at; Start 553; Stop 577
gatggtctttacagtgttgaaacct

SEQ ID NO: 176160 - DNA, 25 bp, Artificial
  probe
  misc_feature (1)..(25): SEQ ID NO: 1386; WAN024DYE_at; Start 491; Stop 515
tgccagtccctcatgacgaagtatc

SEQ ID NO: 176161 - DNA, 25 bp, Artificial
  probe
  misc_feature (1)..(25): SEQ ID NO: 1386; WAN024DYE_at; Start 606; Stop 630
tcctagcgaccttgctattatcgga

SEQ ID NO: 176162 - DNA, 25 bp, Artificial
  probe
  misc_feature (1)..(25): SEQ ID NO: 1386; WAN024DYE_at; Start 482; Stop 506
tcgctgtcatgccagtccctcatga

SEQ ID NO: 176163 - DNA, 25 bp, Artificial
  probe
  misc_feature (1)..(25): SEQ ID NO: 1386; WAN024DYE_at; Start 548; Stop 572
gaaaagatggtctttacagtgttga

SEQ ID NO: 176164 - DNA, 25 bp, Artificial
  probe
  misc_feature (1)..(25): SEQ ID NO: 1386; WAN024DYE_at; Start 559; Stop 583
ctttacagtgttgaaacctttgttg

SEQ ID NO: 176165 - DNA, 25 bp, Artificial
  probe
  misc_feature (1)..(25): SEQ ID NO: 1386; WAN024DYE_at; Start 532; Stop 556
gctccgcaaggcgaaggaaaagatg

SEQ ID NO: 176166 - DNA, 25 bp, Artificial
  probe
  misc_feature (1)..(25): SEQ ID NO: 1386; WAN024DYE_at; Start 488; Stop 512
tcatgccagtccctcatgacgaagt

SEQ ID NO: 176167 - DNA, 25 bp, Artificial
  probe
  misc_feature (1)..(25): SEQ ID NO: 1386; WAN024DYE_at; Start 601; Stop 625
gacgctcctagcgaccttgctatta

SEQ ID NO: 176168 - DNA, 25 bp, Artificial
  probe
  misc_feature (1)..(25): SEQ ID NO: 1386; WAN024DYE_at; Start 598; Stop 622
gaggacgctcctagcgaccttgcta

SEQ ID NO: 176169 - DNA, 25 bp, Artificial
  probe
  misc_feature (1)..(25): SEQ ID NO: 1386; WAN024DYE_at; Start 477; Stop 501
tactatcgctgtcatgccagtccct

SEQ ID NO: 176170 - DNA, 25 bp, Artificial
  probe
  misc_feature (1)..(25): SEQ ID NO: 1386; WAN024DYE_at; Start 528; Stop 552
tattgctccgcaaggcgaaggaaaa

SEQ ID NO: 176171 - DNA, 25 bp, Artificial
  probe
  misc_feature (1)..(25): SEQ ID NO: 1386; WAN024DYE_at; Start 393; Stop 417
tgatgacttgatggatatcacagac

SEQ ID NO: 176172 - DNA, 25 bp, Artificial
  probe
  misc_feature (1)..(25): SEQ ID NO: 1386; WAN024DYE_at; Start 613; Stop 637
gaccttgctattatcggacgctacc

SEQ ID NO: 176173 - DNA, 25 bp, Artificial
  probe
  misc_feature (1)..(25): SEQ ID NO: 1386; WAN024DYE_at; Start 464; Stop 488
gtacccacgcgtctactatcgctgt

SEQ ID NO: 176174 - DNA, 25 bp, Artificial
  probe
  misc_feature (1)..(25): SEQ ID NO: 1386; WAN024DYE_at; Start 496; Stop 520
gtccctcatgacgaagtatctgctt

SEQ ID NO: 176175 - DNA, 25 bp, Artificial
  probe
  misc_feature (1)..(25): SEQ ID NO: 1386; WAN024DYE_at; Start 494; Stop 518
cagtccctcatgacgaagtatctgc

SEQ ID NO: 176176 - DNA, 25 bp, Artificial
  probe
  misc_feature (1)..(25): SEQ ID NO: 1386; WAN024DYE_at; Start 469; Stop 493
cacgcgtctactatcgctgtcatgc

SEQ ID NO: 176177 - DNA, 25 bp, Artificial
  probe
  misc_feature (1)..(25): SEQ ID NO: 1386; WAN024DYE_at; Start 514; Stop 538
tctgcttacggggttattgctccgc

SEQ ID NO: 176178 - DNA, 25 bp, Artificial
  probe
  misc_feature (1)..(25): SEQ ID NO: 1386; WAN024DYE_at; Start 614; Stop 638
accttgctattatcggacgctacct

SEQ ID NO: 176179 - DNA, 25 bp, Artificial
  probe
  misc_feature (1)..(25): SEQ ID NO: 1386; WAN024DYE_at; Start 611; Stop 635
gcgaccttgctattatcggacgcta

SEQ ID NO: 176180 - DNA, 25 bp, Artificial
  probe
  misc_feature (1)..(25): SEQ ID NO: 1386; WAN024DYE_at; Start 609; Stop 633
tagcgaccttgctattatcggacgc

SEQ ID NO: 176181 - DNA, 25 bp, Artificial
  probe
  misc_feature (1)..(25): SEQ ID NO: 1386; WAN024DYE_at; Start 538; Stop 562
caaggcgaaggaaaagatggtcttt

SEQ ID NO: 176182 - DNA, 25 bp, Artificial
  probe
  misc_feature (1)..(25): SEQ ID NO: 1386; WAN024DYE_at; Start 425; Stop 449
ctgttccacttaccaaacaactcat

SEQ ID NO: 176183 - DNA, 25 bp, Artificial
  probe
  misc_feature (1)..(25): SEQ ID NO: 1386; WAN024DYE_at; Start 501; Stop 525
tcatgacgaagtatctgcttacggg

SEQ ID NO: 176184 - DNA, 25 bp, Artificial
  probe
  misc_feature (1)..(25): SEQ ID NO: 1386; WAN024DYE_at; Start 590; Stop 614
cagctccagaggacgctcctagcga

SEQ ID NO: 176185 - DNA, 25 bp, Artificial
  probe
  misc_feature (1)..(25): SEQ ID NO: 1386; WAN024DYE_at; Start 473; Stop 497
cgtctactatcgctgtcatgccagt

SEQ ID NO: 176186 - DNA, 25 bp, Artificial
  probe
  misc_feature (1)..(25): SEQ ID NO: 5265; WAN024DYF_at; Start 181; Stop 205
gcattactggggtatggtggaaaaa

SEQ ID NO: 176187 - DNA, 25 bp, Artificial
  probe
  misc_feature (1)..(25): SEQ ID NO: 5265; WAN024DYF_at; Start 27; Stop 51
aatacgtacctcgtgtccattgtca

SEQ ID NO: 176188 - DNA, 25 bp, Artificial
  probe
  misc_feature (1)..(25): SEQ ID NO: 5265; WAN024DYF_at; Start 36; Stop 60
ctcgtgtccattgtcatttaagact

SEQ ID NO: 176189 - DNA, 25 bp, Artificial
  probe
  misc_feature (1)..(25): SEQ ID NO: 5265; WAN024DYF_at; Start 25; Stop 49
caaatacgtacctcgtgtccattgt

SEQ ID NO: 176190 - DNA, 25 bp, Artificial
  probe
  misc_feature (1)..(25): SEQ ID NO: 5265; WAN024DYF_at; Start 23; Stop 47
cccaaatacgtacctcgtgtccatt

SEQ ID NO: 176191 - DNA, 25 bp, Artificial
  probe
  misc_feature (1)..(25): SEQ ID NO: 5265; WAN024DYF_at; Start 112; Stop 136
ttttccatgatttcctccttgatag

SEQ ID NO: 176192 - DNA, 25 bp, Artificial
  probe
  misc_feature (1)..(25): SEQ ID NO: 5265; WAN024DYF_at; Start 7; Stop 31
tgctcgggaagatttccccaaatac

SEQ ID NO: 176193 - DNA, 25 bp, Artificial
  probe
  misc_feature (1)..(25): SEQ ID NO: 5265; WAN024DYF_at; Start 26; Stop 50
aaatacgtacctcgtgtccattgtc

SEQ ID NO: 176194 - DNA, 25 bp, Artificial
  probe
  misc_feature (1)..(25): SEQ ID NO: 5265; WAN024DYF_at; Start 40; Stop 64
tgtccattgtcatttaagacttgtg

SEQ ID NO: 176195 - DNA, 25 bp, Artificial
  probe
  misc_feature (1)..(25): SEQ ID NO: 5265; WAN024DYF_at; Start 47; Stop 71
tgtcatttaagacttgtgaaagggc

SEQ ID NO: 176196 - DNA, 25 bp, Artificial
  probe
  misc_feature (1)..(25): SEQ ID NO: 5265; WAN024DYF_at; Start 34; Stop 58
acctcgtgtccattgtcatttaaga

SEQ ID NO: 176197 - DNA, 25 bp, Artificial
  probe
  misc_feature (1)..(25): SEQ ID NO: 5265; WAN024DYF_at; Start 49; Stop 73
tcatttaagacttgtgaaagggcgg

SEQ ID NO: 176198 - DNA, 25 bp, Artificial
  probe
  misc_feature (1)..(25): SEQ ID NO: 5265; WAN024DYF_at; Start 6; Stop 30
ttgctcgggaagatttccccaaata

SEQ ID NO: 176199 - DNA, 25 bp, Artificial
  probe
  misc_feature (1)..(25): SEQ ID NO: 5265; WAN024DYF_at; Start 29; Stop 53
tacgtacctcgtgtccattgtcatt

SEQ ID NO: 176200 - DNA, 25 bp, Artificial
  probe
  misc_feature (1)..(25): SEQ ID NO: 5265; WAN024DYF_at; Start 167; Stop 191
gggattttgcacttgcattactggg

SEQ ID NO: 176201 - DNA, 25 bp, Artificial
  probe
  misc_feature (1)..(25): SEQ ID NO: 5265; WAN024DYF_at; Start 98; Stop 122
cggcgacggtttgtttttccatgat

SEQ ID NO: 176202 - DNA, 25 bp, Artificial
  probe
  misc_feature (1)..(25): SEQ ID NO: 5265; WAN024DYF_at; Start 86; Stop 110
caggccccaagacggcgacggtttg

SEQ ID NO: 176203 - DNA, 25 bp, Artificial
  probe
  misc_feature (1)..(25): SEQ ID NO: 5265; WAN024DYF_at; Start 113; Stop 137
tttccatgatttcctccttgataga

SEQ ID NO: 176204 - DNA, 25 bp, Artificial
  probe
  misc_feature (1)..(25): SEQ ID NO: 5265; WAN024DYF_at; Start 33; Stop 57
tacctcgtgtccattgtcatttaag

SEQ ID NO: 176205 - DNA, 25 bp, Artificial
  probe
  misc_feature (1)..(25): SEQ ID NO: 5265; WAN024DYF_at; Start 173; Stop 197
ttgcacttgcattactggggtatgg

SEQ ID NO: 176206 - DNA, 25 bp, Artificial
  probe
  misc_feature (1)..(25): SEQ ID NO: 5265; WAN024DYF_at; Start 187; Stop 211
ctggggtatggtggaaaaatacaca

SEQ ID NO: 176207 - DNA, 25 bp, Artificial
  probe
  misc_feature (1)..(25): SEQ ID NO: 5265; WAN024DYF_at; Start 2; Stop 26
tgatttgctcgggaagatttcccca

SEQ ID NO: 176208 - DNA, 25 bp, Artificial
  probe
  misc_feature (1)..(25): SEQ ID NO: 5265; WAN024DYF_at; Start 31; Stop 55
cgtacctcgtgtccattgtcattta

SEQ ID NO: 176209 - DNA, 25 bp, Artificial
  probe
  misc_feature (1)..(25): SEQ ID NO: 5265; WAN024DYF_at; Start 154; Stop 178
tatcatattctaggggattttgcac

SEQ ID NO: 176210 - DNA, 25 bp, Artificial
  probe
  misc_feature (1)..(25): SEQ ID NO: 5265; WAN024DYF_at; Start 38; Stop 62
cgtgtccattgtcatttaagacttg

SEQ ID NO: 176211 - DNA, 25 bp, Artificial
  probe
  misc_feature (1)..(25): SEQ ID NO: 5265; WAN024DYF_at; Start 24; Stop 48
ccaaatacgtacctcgtgtccattg

SEQ ID NO: 176212 - DNA, 25 bp, Artificial
  probe
  misc_feature (1)..(25): SEQ ID NO: 5265; WAN024DYF_at; Start 43; Stop 67
ccattgtcatttaagacttgtgaaa

SEQ ID NO: 176213 - DNA, 25 bp, Artificial
  probe
  misc_feature (1)..(25): SEQ ID NO: 5265; WAN024DYF_at; Start 144; Stop 168
tctcttattctatcatattctaggg

SEQ ID NO: 176214 - DNA, 25 bp, Artificial
  probe
  misc_feature (1)..(25): SEQ ID NO: 5265; WAN024DYF_at; Start 50; Stop 74
catttaagacttgtgaaagggcggt

SEQ ID NO: 176215 - DNA, 25 bp, Artificial
  probe
  misc_feature (1)..(25): SEQ ID NO: 5265; WAN024DYF_at; Start 35; Stop 59
cctcgtgtccattgtcatttaagac

SEQ ID NO: 176216 - DNA, 25 bp, Artificial
  probe
  misc_feature (1)..(25): SEQ ID NO: 5265; WAN024DYF_at; Start 3; Stop 27
gatttgctcgggaagatttccccaa

SEQ ID NO: 176217 - DNA, 25 bp, Artificial
  probe
  misc_feature (1)..(25): SEQ ID NO: 5265; WAN024DYF_at; Start 32; Stop 56
gtacctcgtgtccattgtcatttaa

SEQ ID NO: 176218 - DNA, 25 bp, Artificial
  probe
  misc_feature (1)..(25): SEQ ID NO: 5265; WAN024DYF_at; Start 109; Stop 133
tgtttttccatgatttcctccttga

SEQ ID NO: 176219 - DNA, 25 bp, Artificial
  probe
  misc_feature (1)..(25): SEQ ID NO: 5265; WAN024DYF_at; Start 81; Stop 105
agaaccaggccccaagacggcgacg

SEQ ID NO: 176220 - DNA, 25 bp, Artificial
  probe
  misc_feature (1)..(25): SEQ ID NO: 2133; WAN024DYG_at; Start 175; Stop 199
gaaaatatcattgcctacaccgact

SEQ ID NO: 176221 - DNA, 25 bp, Artificial
  probe
  misc_feature (1)..(25): SEQ ID NO: 2133; WAN024DYG_at; Start 223; Stop 247
gatgcgattttgtttgttgtcccaa

SEQ ID NO: 176222 - DNA, 25 bp, Artificial
  probe
  misc_feature (1)..(25): SEQ ID NO: 2133; WAN024DYG_at; Start 480; Stop 504
tttacaaacagctcaatacgttcag

SEQ ID NO: 176223 - DNA, 25 bp, Artificial
  probe
  misc_feature (1)..(25): SEQ ID NO: 2133; WAN024DYG_at; Start 739; Stop 763
gatttgatcgtaacgggaacttcca

SEQ ID NO: 176224 - DNA, 25 bp, Artificial
  probe
  misc_feature (1)..(25): SEQ ID NO: 2133; WAN024DYG_at; Start 431; Stop 455
aagagaccattgtgcgtgacctaac

SEQ ID NO: 176225 - DNA, 25 bp, Artificial
  probe
  misc_feature (1)..(25): SEQ ID NO: 2133; WAN024DYG_at; Start 446; Stop 470
gtgacctaactttaataactgctgc

SEQ ID NO: 176226 - DNA, 25 bp, Artificial
  probe
  misc_feature (1)..(25): SEQ ID NO: 2133; WAN024DYG_at; Start 237; Stop 261
tgttgtcccaacaaaagtgacacga

SEQ ID NO: 176227 - DNA, 25 bp, Artificial
  probe
  misc_feature (1)..(25): SEQ ID NO: 2133; WAN024DYG_at; Start 889; Stop 913
caagaacttggagtctatatgccca

SEQ ID NO: 176228 - DNA, 25 bp, Artificial
  probe
  misc_feature (1)..(25): SEQ ID NO: 2133; WAN024DYG_at; Start 582; Stop 606
aaatattattgctgtcggtgctgga

SEQ ID NO: 176229 - DNA, 25 bp, Artificial
  probe
  misc_feature (1)..(25): SEQ ID NO: 2133; WAN024DYG_at; Start 97; Stop 121
ggaaatcttcccgagcaaatcaatg

SEQ ID NO: 176230 - DNA, 25 bp, Artificial
  probe
  misc_feature (1)..(25): SEQ ID NO: 2133; WAN024DYG_at; Start 831; Stop 855
taatatgggcatggtaatcgaagga

SEQ ID NO: 176231 - DNA, 25 bp, Artificial
  probe
  misc_feature (1)..(25): SEQ ID NO: 2133; WAN024DYG_at; Start 65; Stop 89
taaatgacaatggacacgaggtacg

SEQ ID NO: 176232 - DNA, 25 bp, Artificial
  probe
  misc_feature (1)..(25): SEQ ID NO: 2133; WAN024DYG_at; Start 292; Stop 316
gaccataaggttatcatcatgcacg

SEQ ID NO: 176233 - DNA, 25 bp, Artificial
  probe
  misc_feature (1)..(25): SEQ ID NO: 2133; WAN024DYG_at; Start 755; Stop 779
gaacttccatccactctcgtaactg

SEQ ID NO: 176234 - DNA, 25 bp, Artificial
  probe
  misc_feature (1)..(25): SEQ ID NO: 2133; WAN024DYG_at; Start 562; Stop 586
gaaactgctggtgctcttaaaaata

SEQ ID NO: 176235 - DNA, 25 bp, Artificial
  probe
  misc_feature (1)..(25): SEQ ID NO: 2133; WAN024DYG_at; Start 874; Stop 898
gcctatgaactagcccaagaacttg

SEQ ID NO: 176236 - DNA, 25 bp, Artificial
  probe
  misc_feature (1)..(25): SEQ ID NO: 2133; WAN024DYG_at; Start 623; Stop 647
gatttggtgataatgctaaggcagc

SEQ ID NO: 176237 - DNA, 25 bp, Artificial
  probe
  misc_feature (1)..(25): SEQ ID NO: 2133; WAN024DYG_at; Start 597; Stop 621
cggtgctggagctttacatggtctt

SEQ ID NO: 176238 - DNA, 25 bp, Artificial
  probe
  misc_feature (1)..(25): SEQ ID NO: 2133; WAN024DYG_at; Start 845; Stop 869
taatcgaaggaatttcaacgactcg

SEQ ID NO: 176239 - DNA, 25 bp, Artificial
  probe
  misc_feature (1)..(25): SEQ ID NO: 2133; WAN024DYG_at; Start 639; Stop 663
taaggcagccatcatcgctcgaggt

SEQ ID NO: 176240 - DNA, 25 bp, Artificial
  probe
  misc_feature (1)..(25): SEQ ID NO: 2133; WAN024DYG_at; Start 190; Stop 214
tacaccgacttagcagaaacattga

SEQ ID NO: 176241 - DNA, 25 bp, Artificial
  probe
  misc_feature (1)..(25): SEQ ID NO: 2133; WAN024DYG_at; Start 533; Stop 557
tttataccaatacggatgttatcgg

SEQ ID NO: 176242 - DNA, 25 bp, Artificial
  probe
  misc_feature (1)..(25): SEQ ID NO: 2133; WAN024DYG_at; Start 663; Stop 687
tttagcagaaatcacccgcctaggg

SEQ ID NO: 176243 - DNA, 25 bp, Artificial
  probe
  misc_feature (1)..(25): SEQ ID NO: 2133; WAN024DYG_at; Start 326; Stop 350
gattagaacctgatagccataaacg

SEQ ID NO: 176244 - DNA, 25 bp, Artificial
  probe
  misc_feature (1)..(25): SEQ ID NO: 2133; WAN024DYG_at; Start 252; Stop 276
agtgacacgacttgttgcccagcaa

SEQ ID NO: 176245 - DNA, 25 bp, Artificial
  probe
  misc_feature (1)..(25): SEQ ID NO: 2133; WAN024DYG_at; Start 714; Stop 738
ctatagcggcttatctggtgtggga

SEQ ID NO: 176246 - DNA, 25 bp, Artificial
  probe
  misc_feature (1)..(25): SEQ ID NO: 2133; WAN024DYG_at; Start 267; Stop 291
tgcccagcaagttgcacaaaccttg

SEQ ID NO: 176247 - DNA, 25 bp, Artificial
  probe
  misc_feature (1)..(25): SEQ ID NO: 2133; WAN024DYG_at; Start 771; Stop 795
tcgtaactggagagctggagatgct

SEQ ID NO: 176248 - DNA, 25 bp, Artificial
  probe
  misc_feature (1)..(25): SEQ ID NO: 2133; WAN024DYG_at; Start 397; Stop 421
gatatcgtcgttgtttcagggccta

SEQ ID NO: 176249 - DNA, 25 bp, Artificial
  probe
  misc_feature (1)..(25): SEQ ID NO: 2133; WAN024DYG_at; Start 311; Stop 335
tgcacgcatcaaagggattagaacc

SEQ ID NO: 176250 - DNA, 25 bp, Artificial
  probe
  misc_feature (1)..(25): SEQ ID NO: 2133; WAN024DYG_at; Start 942; Stop 966
tcacggaaccaatatcaaagatgcc

SEQ ID NO: 176251 - DNA, 25 bp, Artificial
  probe
  misc_feature (1)..(25): SEQ ID NO: 2133; WAN024DYG_at; Start 928; Stop 952
taccaagttatttatcacggaacca

SEQ ID NO: 176252 - DNA, 25 bp, Artificial
  probe
  misc_feature (1)..(25): SEQ ID NO: 2133; WAN024DYG_at; Start 795; Stop 819
tctcggacgaggagaatccctagct

SEQ ID NO: 176253 - DNA, 25 bp, Artificial
  probe
  misc_feature (1)..(25): SEQ ID NO: 2133; WAN024DYG_at; Start 373; Stop 397
gaaattcctgaacatctccgtagtg

SEQ ID NO: 176254 - DNA, 25 bp, Artificial
  probe
  misc_feature (1)..(25): SEQ ID NO: 7113; WAN024DYH_at; Start 64; Stop 88
cttcctgagttgtttacctctatta

SEQ ID NO: 176255 - DNA, 25 bp, Artificial
  probe
  misc_feature (1)..(25): SEQ ID NO: 7113; WAN024DYH_at; Start 60; Stop 84
agaacttcctgagttgtttacctct

SEQ ID NO: 176256 - DNA, 25 bp, Artificial
  probe
  misc_feature (1)..(25): SEQ ID NO: 7113; WAN024DYH_at; Start 42; Stop 66
aaactctcgcaacctacaagaactt

SEQ ID NO: 176257 - DNA, 25 bp, Artificial
  probe
  misc_feature (1)..(25): SEQ ID NO: 7113; WAN024DYH_at; Start 73; Stop 97
ttgtttacctctattataagcatat

SEQ ID NO: 176258 - DNA, 25 bp, Artificial
  probe
  misc_feature (1)..(25): SEQ ID NO: 7113; WAN024DYH_at; Start 67; Stop 91
cctgagttgtttacctctattataa

SEQ ID NO: 176259 - DNA, 25 bp, Artificial
  probe
  misc_feature (1)..(25): SEQ ID NO: 7113; WAN024DYH_at; Start 69; Stop 93
tgagttgtttacctctattataagc

SEQ ID NO: 176260 - DNA, 25 bp, Artificial
  probe
  misc_feature (1)..(25): SEQ ID NO: 7113; WAN024DYH_at; Start 46; Stop 70
tctcgcaacctacaagaacttcctg

SEQ ID NO: 176261 - DNA, 25 bp, Artificial
  probe
  misc_feature (1)..(25): SEQ ID NO: 7113; WAN024DYH_at; Start 39; Stop 63
gccaaactctcgcaacctacaagaa

SEQ ID NO: 176262 - DNA, 25 bp, Artificial
  probe
  misc_feature (1)..(25): SEQ ID NO: 7113; WAN024DYH_at; Start 33; Stop 57
tttttcgccaaactctcgcaaccta

SEQ ID NO: 176263 - DNA, 25 bp, Artificial
  probe
  misc_feature (1)..(25): SEQ ID NO: 7113; WAN024DYH_at; Start 52; Stop 76
aacctacaagaacttcctgagttgt

SEQ ID NO: 176264 - DNA, 25 bp, Artificial
  probe
  misc_feature (1)..(25): SEQ ID NO: 7113; WAN024DYH_at; Start 61; Stop 85
gaacttcctgagttgtttacctcta

SEQ ID NO: 176265 - DNA, 25 bp, Artificial
  probe
  misc_feature (1)..(25): SEQ ID NO: 7113; WAN024DYH_at; Start 70; Stop 94
gagttgtttacctctattataagca

SEQ ID NO: 176266 - DNA, 25 bp, Artificial
  probe
  misc_feature (1)..(25): SEQ ID NO: 7113; WAN024DYH_at; Start 72; Stop 96
gttgtttacctctattataagcata

SEQ ID NO: 176267 - DNA, 25 bp, Artificial
  probe
  misc_feature (1)..(25): SEQ ID NO: 7113; WAN024DYH_at; Start 29; Stop 53
taattttttcgccaaactctcgcaa

SEQ ID NO: 176268 - DNA, 25 bp, Artificial
  probe
  misc_feature (1)..(25): SEQ ID NO: 7113; WAN024DYH_at; Start 56; Stop 80
tacaagaacttcctgagttgtttac

SEQ ID NO: 176269 - DNA, 25 bp, Artificial
  probe
  misc_feature (1)..(25): SEQ ID NO: 7113; WAN024DYH_at; Start 68; Stop 92
ctgagttgtttacctctattataag

SEQ ID NO: 176270 - DNA, 25 bp, Artificial
  probe
  misc_feature (1)..(25): SEQ ID NO: 7113; WAN024DYH_at; Start 50; Stop 74
gcaacctacaagaacttcctgagtt

SEQ ID NO: 176271 - DNA, 25 bp, Artificial
  probe
  misc_feature (1)..(25): SEQ ID NO: 7113; WAN024DYH_at; Start 58; Stop 82
caagaacttcctgagttgtttacct

SEQ ID NO: 176272 - DNA, 25 bp, Artificial
  probe
  misc_feature (1)..(25): SEQ ID NO: 7113; WAN024DYH_at; Start 66; Stop 90
tcctgagttgtttacctctattata

SEQ ID NO: 176273 - DNA, 25 bp, Artificial
  probe
  misc_feature (1)..(25): SEQ ID NO: 7113; WAN024DYH_at; Start 71; Stop 95
agttgtttacctctattataagcat

SEQ ID NO: 176274 - DNA, 25 bp, Artificial
  probe
  misc_feature (1)..(25): SEQ ID NO: 7113; WAN024DYH_at; Start 75; Stop 99
gtttacctctattataagcatatac

SEQ ID NO: 176275 - DNA, 25 bp, Artificial
  probe
  misc_feature (1)..(25): SEQ ID NO: 7113; WAN024DYH_at; Start 55; Stop 79
ctacaagaacttcctgagttgttta

SEQ ID NO: 176276 - DNA, 25 bp, Artificial
  probe
  misc_feature (1)..(25): SEQ ID NO: 7113; WAN024DYH_at; Start 53; Stop 77
acctacaagaacttcctgagttgtt

SEQ ID NO: 176277 - DNA, 25 bp, Artificial
  probe
  misc_feature (1)..(25): SEQ ID NO: 7113; WAN024DYH_at; Start 47; Stop 71
ctcgcaacctacaagaacttcctga

SEQ ID NO: 176278 - DNA, 25 bp, Artificial
  probe
  misc_feature (1)..(25): SEQ ID NO: 7113; WAN024DYH_at; Start 51; Stop 75
caacctacaagaacttcctgagttg

SEQ ID NO: 176279 - DNA, 25 bp, Artificial
  probe
  misc_feature (1)..(25): SEQ ID NO: 7113; WAN024DYH_at; Start 65; Stop 89
ttcctgagttgtttacctctattat

SEQ ID NO: 176280 - DNA, 25 bp, Artificial
  probe
  misc_feature (1)..(25): SEQ ID NO: 7113; WAN024DYH_at; Start 41; Stop 65
caaactctcgcaacctacaagaact

SEQ ID NO: 176281 - DNA, 25 bp, Artificial
  probe
  misc_feature (1)..(25): SEQ ID NO: 7113; WAN024DYH_at; Start 54; Stop 78
cctacaagaacttcctgagttgttt

SEQ ID NO: 176282 - DNA, 25 bp, Artificial
  probe
  misc_feature (1)..(25): SEQ ID NO: 7113; WAN024DYH_at; Start 49; Stop 73
cgcaacctacaagaacttcctgagt

SEQ ID NO: 176283 - DNA, 25 bp, Artificial
  probe
  misc_feature (1)..(25): SEQ ID NO: 7113; WAN024DYH_at; Start 74; Stop 98
tgtttacctctattataagcatata

SEQ ID NO: 176284 - DNA, 25 bp, Artificial
  probe
  misc_feature (1)..(25): SEQ ID NO: 7113; WAN024DYH_at; Start 48; Stop 72
tcgcaacctacaagaacttcctgag

SEQ ID NO: 176285 - DNA, 25 bp, Artificial
  probe
  misc_feature (1)..(25): SEQ ID NO: 7113; WAN024DYH_at; Start 63; Stop 87
acttcctgagttgtttacctctatt

SEQ ID NO: 176286 - DNA, 25 bp, Artificial
  probe
  misc_feature (1)..(25): SEQ ID NO: 7113; WAN024DYH_at; Start 43; Stop 67
aactctcgcaacctacaagaacttc

SEQ ID NO: 176287 - DNA, 25 bp, Artificial
  probe
  misc_feature (1)..(25): SEQ ID NO: 7113; WAN024DYH_at; Start 62; Stop 86
aacttcctgagttgtttacctctat

SEQ ID NO: 176288 - DNA, 25 bp, Artificial
  probe
  misc_feature (1)..(25): SEQ ID NO: 3388; WAN024DYI_at; Start 47; Stop 71
ctcgaacatcagaaattaagcaaaa

SEQ ID NO: 176289 - DNA, 25 bp, Artificial
  probe
  misc_feature (1)..(25): SEQ ID NO: 3388; WAN024DYI_at; Start 88; Stop 112
atttcaactagcttttctggtaatt

SEQ ID NO: 176290 - DNA, 25 bp, Artificial
  probe
  misc_feature (1)..(25): SEQ ID NO: 3388; WAN024DYI_at; Start 72; Stop 96
tcaccagaaggacagtatttcaact

SEQ ID NO: 176291 - DNA, 25 bp, Artificial
  probe
  misc_feature (1)..(25): SEQ ID NO: 3388; WAN024DYI_at; Start 45; Stop 69
gtctcgaacatcagaaattaagcaa

SEQ ID NO: 176292 - DNA, 25 bp, Artificial
  probe
  misc_feature (1)..(25): SEQ ID NO: 3388; WAN024DYI_at; Start 58; Stop 82
gaaattaagcaaaatcaccagaagg

SEQ ID NO: 176293 - DNA, 25 bp, Artificial
  probe
  misc_feature (1)..(25): SEQ ID NO: 3388; WAN024DYI_at; Start 73; Stop 97
caccagaaggacagtatttcaacta

SEQ ID NO: 176294 - DNA, 25 bp, Artificial
  probe
  misc_feature (1)..(25): SEQ ID NO: 3388; WAN024DYI_at; Start 60; Stop 84
aattaagcaaaatcaccagaaggac

SEQ ID NO: 176295 - DNA, 25 bp, Artificial
  probe
  misc_feature (1)..(25): SEQ ID NO: 3388; WAN024DYI_at; Start 55; Stop 79
tcagaaattaagcaaaatcaccaga

SEQ ID NO: 176296 - DNA, 25 bp, Artificial
  probe
  misc_feature (1)..(25): SEQ ID NO: 3388; WAN024DYI_at; Start 44; Stop 68
tgtctcgaacatcagaaattaagca

SEQ ID NO: 176297 - DNA, 25 bp, Artificial
  probe
  misc_feature (1)..(25): SEQ ID NO: 3388; WAN024DYI_at; Start 62; Stop 86
ttaagcaaaatcaccagaaggacag

SEQ ID NO: 176298 - DNA, 25 bp, Artificial
  probe
  misc_feature (1)..(25): SEQ ID NO: 3388; WAN024DYI_at; Start 53; Stop 77
catcagaaattaagcaaaatcacca

SEQ ID NO: 176299 - DNA, 25 bp, Artificial
  probe
  misc_feature (1)..(25): SEQ ID NO: 3388; WAN024DYI_at; Start 63; Stop 87
taagcaaaatcaccagaaggacagt

SEQ ID NO: 176300 - DNA, 25 bp, Artificial
  probe
  misc_feature (1)..(25): SEQ ID NO: 3388; WAN024DYI_at; Start 86; Stop 110
gtatttcaactagcttttctggtaa

SEQ ID NO: 176301 - DNA, 25 bp, Artificial
  probe
  misc_feature (1)..(25): SEQ ID NO: 3388; WAN024DYI_at; Start 67; Stop 91
caaaatcaccagaaggacagtattt

SEQ ID NO: 176302 - DNA, 25 bp, Artificial
  probe
  misc_feature (1)..(25): SEQ ID NO: 3388; WAN024DYI_at; Start 65; Stop 89
agcaaaatcaccagaaggacagtat

SEQ ID NO: 176303 - DNA, 25 bp, Artificial
  probe
  misc_feature (1)..(25): SEQ ID NO: 3388; WAN024DYI_at; Start 56; Stop 80
cagaaattaagcaaaatcaccagaa

SEQ ID NO: 176304 - DNA, 25 bp, Artificial
  probe
  misc_feature (1)..(25): SEQ ID NO: 3388; WAN024DYI_at; Start 70; Stop 94
aatcaccagaaggacagtatttcaa

SEQ ID NO: 176305 - DNA, 25 bp, Artificial
  probe
  misc_feature (1)..(25): SEQ ID NO: 3388; WAN024DYI_at; Start 14; Stop 38
ggaaaaaatcaagacaaatctcctc

SEQ ID NO: 176306 - DNA, 25 bp, Artificial
  probe
  misc_feature (1)..(25): SEQ ID NO: 3388; WAN024DYI_at; Start 75; Stop 99
ccagaaggacagtatttcaactagc

SEQ ID NO: 176307 - DNA, 25 bp, Artificial
  probe
  misc_feature (1)..(25): SEQ ID NO: 3388; WAN024DYI_at; Start 12; Stop 36
taggaaaaaatcaagacaaatctcc

SEQ ID NO: 176308 - DNA, 25 bp, Artificial
  probe
  misc_feature (1)..(25): SEQ ID NO: 3388; WAN024DYI_at; Start 66; Stop 90
gcaaaatcaccagaaggacagtatt

SEQ ID NO: 176309 - DNA, 25 bp, Artificial
  probe
  misc_feature (1)..(25): SEQ ID NO: 3388; WAN024DYI_at; Start 84; Stop 108
cagtatttcaactagcttttctggt

SEQ ID NO: 176310 - DNA, 25 bp, Artificial
  probe
  misc_feature (1)..(25): SEQ ID NO: 3388; WAN024DYI_at; Start 82; Stop 106
gacagtatttcaactagcttttctg

SEQ ID NO: 176311 - DNA, 25 bp, Artificial
  probe
  misc_feature (1)..(25): SEQ ID NO: 3388; WAN024DYI_at; Start 80; Stop 104
aggacagtatttcaactagcttttc

SEQ ID NO: 176312 - DNA, 25 bp, Artificial
  probe
  misc_feature (1)..(25): SEQ ID NO: 3388; WAN024DYI_at; Start 64; Stop 88
aagcaaaatcaccagaaggacagta

SEQ ID NO: 176313 - DNA, 25 bp, Artificial
  probe
  misc_feature (1)..(25): SEQ ID NO: 3388; WAN024DYI_at; Start 43; Stop 67
atgtctcgaacatcagaaattaagc

SEQ ID NO: 176314 - DNA, 25 bp, Artificial
  probe
  misc_feature (1)..(25): SEQ ID NO: 3388; WAN024DYI_at; Start 17; Stop 41
aaaaatcaagacaaatctcctcaat

SEQ ID NO: 176315 - DNA, 25 bp, Artificial
  probe
  misc_feature (1)..(25): SEQ ID NO: 3388; WAN024DYI_at; Start 78; Stop 102
gaaggacagtatttcaactagcttt

SEQ ID NO: 176316 - DNA, 25 bp, Artificial
  probe
  misc_feature (1)..(25): SEQ ID NO: 3388; WAN024DYI_at; Start 11; Stop 35
ttaggaaaaaatcaagacaaatctc

SEQ ID NO: 176317 - DNA, 25 bp, Artificial
  probe
  misc_feature (1)..(25): SEQ ID NO: 3388; WAN024DYI_at; Start 69; Stop 93
aaatcaccagaaggacagtatttca

SEQ ID NO: 176318 - DNA, 25 bp, Artificial
  probe
  misc_feature (1)..(25): SEQ ID NO: 3388; WAN024DYI_at; Start 61; Stop 85
attaagcaaaatcaccagaaggaca

SEQ ID NO: 176319 - DNA, 25 bp, Artificial
  probe
  misc_feature (1)..(25): SEQ ID NO: 3388; WAN024DYI_at; Start 49; Stop 73
cgaacatcagaaattaagcaaaatc

SEQ ID NO: 176320 - DNA, 25 bp, Artificial
  probe
  misc_feature (1)..(25): SEQ ID NO: 3388; WAN024DYI_at; Start 76; Stop 100
cagaaggacagtatttcaactagct

SEQ ID NO: 176321 - DNA, 25 bp, Artificial
  probe
  misc_feature (1)..(25): SEQ ID NO: 3388; WAN024DYI_at; Start 15; Stop 39
gaaaaaatcaagacaaatctcctca

SEQ ID NO: 176322 - DNA, 25 bp, Artificial
  probe
  misc_feature (1)..(25): SEQ ID NO: 3952; WAN024DYJ_at; Start 463; Stop 487
aactacacagttcaaaaattaccag

SEQ ID NO: 176323 - DNA, 25 bp, Artificial
  probe
  misc_feature (1)..(25): SEQ ID NO: 3952; WAN024DYJ_at; Start 363; Stop 387
gaaagagagtgtttttgataagatt

SEQ ID NO: 176324 - DNA, 25 bp, Artificial
  probe
  misc_feature (1)..(25): SEQ ID NO: 3952; WAN024DYJ_at; Start 125; Stop 149
aaatcagtcgttcagaattttgtgg

SEQ ID NO: 176325 - DNA, 25 bp, Artificial
  probe
  misc_feature (1)..(25): SEQ ID NO: 3952; WAN024DYJ_at; Start 47; Stop 71
tagaggtaaacaactcaggaagttc

SEQ ID NO: 176326 - DNA, 25 bp, Artificial
  probe
  misc_feature (1)..(25): SEQ ID NO: 3952; WAN024DYJ_at; Start 340; Stop 364
gaagatgaaactatcgcccaaaaga

SEQ ID NO: 176327 - DNA, 25 bp, Artificial
  probe
  misc_feature (1)..(25): SEQ ID NO: 3952; WAN024DYJ_at; Start 277; Stop 301
tatatagagttggataaggaatacc

SEQ ID NO: 176328 - DNA, 25 bp, Artificial
  probe
  misc_feature (1)..(25): SEQ ID NO: 3952; WAN024DYJ_at; Start 482; Stop 506
taccagaaaagctagttgaaatact

SEQ ID NO: 176329 - DNA, 25 bp, Artificial
  probe
  misc_feature (1)..(25): SEQ ID NO: 3952; WAN024DYJ_at; Start 151; Stop 175
gatgagtctgaattaagtatccgtc

SEQ ID NO: 176330 - DNA, 25 bp, Artificial
  probe
  misc_feature (1)..(25): SEQ ID NO: 3952; WAN024DYJ_at; Start 281; Stop 305
tagagttggataaggaatacctaga

SEQ ID NO: 176331 - DNA, 25 bp, Artificial
  probe
  misc_feature (1)..(25): SEQ ID NO: 3952; WAN024DYJ_at; Start 54; Stop 78
aaacaactcaggaagttcttgtagg

SEQ ID NO: 176332 - DNA, 25 bp, Artificial
  probe
  misc_feature (1)..(25): SEQ ID NO: 3952; WAN024DYJ_at; Start 69; Stop 93
ttcttgtaggttgcgagagtttggc

SEQ ID NO: 176333 - DNA, 25 bp, Artificial
  probe
  misc_feature (1)..(25): SEQ ID NO: 3952; WAN024DYJ_at; Start 137; Stop 161
cagaattttgtggtgatgagtctga

SEQ ID NO: 176334 - DNA, 25 bp, Artificial
  probe
  misc_feature (1)..(25): SEQ ID NO: 3952; WAN024DYJ_at; Start 62; Stop 86
caggaagttcttgtaggttgcgaga

SEQ ID NO: 176335 - DNA, 25 bp, Artificial
  probe
  misc_feature (1)..(25): SEQ ID NO: 3952; WAN024DYJ_at; Start 335; Stop 359
catacgaagatgaaactatcgccca

SEQ ID NO: 176336 - DNA, 25 bp, Artificial
  probe
  misc_feature (1)..(25): SEQ ID NO: 3952; WAN024DYJ_at; Start 164; Stop 188
taagtatccgtcaattaattagaat

SEQ ID NO: 176337 - DNA, 25 bp, Artificial
  probe
  misc_feature (1)..(25): SEQ ID NO: 3952; WAN024DYJ_at; Start 182; Stop 206
ttagaattgaaaatggagaatccag

SEQ ID NO: 176338 - DNA, 25 bp, Artificial
  probe
  misc_feature (1)..(25): SEQ ID NO: 3952; WAN024DYJ_at; Start 351; Stop 375
tatcgcccaaaagaaagagagtgtt

SEQ ID NO: 176339 - DNA, 25 bp, Artificial
  probe
  misc_feature (1)..(25): SEQ ID NO: 3952; WAN024DYJ_at; Start 487; Stop 511
gaaaagctagttgaaatactgtcct

SEQ ID NO: 176340 - DNA, 25 bp, Artificial
  probe
  misc_feature (1)..(25): SEQ ID NO: 3952; WAN024DYJ_at; Start 346; Stop 370
gaaactatcgcccaaaagaaagaga

SEQ ID NO: 176341 - DNA, 25 bp, Artificial
  probe
  misc_feature (1)..(25): SEQ ID NO: 3952; WAN024DYJ_at; Start 115; Stop 139
ttggctaaaaaaatcagtcgttcag

SEQ ID NO: 176342 - DNA, 25 bp, Artificial
  probe
  misc_feature (1)..(25): SEQ ID NO: 3952; WAN024DYJ_at; Start 330; Stop 354
tcctacatacgaagatgaaactatc

SEQ ID NO: 176343 - DNA, 25 bp, Artificial
  probe
  misc_feature (1)..(25): SEQ ID NO: 3952; WAN024DYJ_at; Start 425; Stop 449
gatttatcatcccaaattattcata

SEQ ID NO: 176344 - DNA, 25 bp, Artificial
  probe
  misc_feature (1)..(25): SEQ ID NO: 3952; WAN024DYJ_at; Start 19; Stop 43
gatagtttgattcagtatatgctta

SEQ ID NO: 176345 - DNA, 25 bp, Artificial
  probe
  misc_feature (1)..(25): SEQ ID NO: 3952; WAN024DYJ_at; Start 154; Stop 178
gagtctgaattaagtatccgtcaat

SEQ ID NO: 176346 - DNA, 25 bp, Artificial
  probe
  misc_feature (1)..(25): SEQ ID NO: 3952; WAN024DYJ_at; Start 261; Stop 285
caagttgatgccaagttatatagag

SEQ ID NO: 176347 - DNA, 25 bp, Artificial
  probe
  misc_feature (1)..(25): SEQ ID NO: 3952; WAN024DYJ_at; Start 475; Stop 499
caaaaattaccagaaaagctagttg

SEQ ID NO: 176348 - DNA, 25 bp, Artificial
  probe
  misc_feature (1)..(25): SEQ ID NO: 3952; WAN024DYJ_at; Start 304; Stop 328
gaattgaagtatttcttgatgagga

SEQ ID NO: 176349 - DNA, 25 bp, Artificial
  probe
  misc_feature (1)..(25): SEQ ID NO: 3952; WAN024DYJ_at; Start 289; Stop 313
gataaggaatacctagaattgaagt

SEQ ID NO: 176350 - DNA, 25 bp, Artificial
  probe
  misc_feature (1)..(25): SEQ ID NO: 3952; WAN024DYJ_at; Start 186; Stop 210
aattgaaaatggagaatccagacca

SEQ ID NO: 176351 - DNA, 25 bp, Artificial
  probe
  misc_feature (1)..(25): SEQ ID NO: 3952; WAN024DYJ_at; Start 39; Stop 63
gcttataatagaggtaaacaactca

SEQ ID NO: 176352 - DNA, 25 bp, Artificial
  probe
  misc_feature (1)..(25): SEQ ID NO: 3952; WAN024DYJ_at; Start 30; Stop 54
tcagtatatgcttataatagaggta

SEQ ID NO: 176353 - DNA, 25 bp, Artificial
  probe
  misc_feature (1)..(25): SEQ ID NO: 3952; WAN024DYJ_at; Start 492; Stop 516
gctagttgaaatactgtccttctgg

SEQ ID NO: 176354 - DNA, 25 bp, Artificial
  probe
  misc_feature (1)..(25): SEQ ID NO: 3952; WAN024DYJ_at; Start 256; Stop 280
gattacaagttgatgccaagttata

SEQ ID NO: 176355 - DNA, 25 bp, Artificial
  probe
  misc_feature (1)..(25): SEQ ID NO: 3952; WAN024DYJ_at; Start 3; Stop 27
gagaagaaatctgatagatagtttg

SEQ ID NO: 176356 - DNA, 25 bp, Artificial
  probe
  misc_feature (1)..(25): SEQ ID NO: 5026; WAN024DYK_at; Start 153; Stop 177
tccagctaaaatacctggcatggca

SEQ ID NO: 176357 - DNA, 25 bp, Artificial
  probe
  misc_feature (1)..(25): SEQ ID NO: 5026; WAN024DYK_at; Start 157; Stop 181
gctaaaatacctggcatggcaactg

SEQ ID NO: 176358 - DNA, 25 bp, Artificial
  probe
  misc_feature (1)..(25): SEQ ID NO: 5026; WAN024DYK_at; Start 7; Stop 31
tgtagcccctcacttgacagcatat

SEQ ID NO: 176359 - DNA, 25 bp, Artificial
  probe
  misc_feature (1)..(25): SEQ ID NO: 5026; WAN024DYK_at; Start 3; Stop 27
gacatgtagcccctcacttgacagc

SEQ ID NO: 176360 - DNA, 25 bp, Artificial
  probe
  misc_feature (1)..(25): SEQ ID NO: 5026; WAN024DYK_at; Start 164; Stop 188
tacctggcatggcaactggtagaac

SEQ ID NO: 176361 - DNA, 25 bp, Artificial
  probe
  misc_feature (1)..(25): SEQ ID NO: 5026; WAN024DYK_at; Start 14; Stop 38
cctcacttgacagcatatacatatg

SEQ ID NO: 176362 - DNA, 25 bp, Artificial
  probe
  misc_feature (1)..(25): SEQ ID NO: 5026; WAN024DYK_at; Start 121; Stop 145
tcaccaacgatacggccaatagcta

SEQ ID NO: 176363 - DNA, 25 bp, Artificial
  probe
  misc_feature (1)..(25): SEQ ID NO: 5026; WAN024DYK_at; Start 159; Stop 183
taaaatacctggcatggcaactggt

SEQ ID NO: 176364 - DNA, 25 bp, Artificial
  probe
  misc_feature (1)..(25): SEQ ID NO: 5026; WAN024DYK_at; Start 207; Stop 231
taacttacctgccccaagtccataa

SEQ ID NO: 176365 - DNA, 25 bp, Artificial
  probe
  misc_feature (1)..(25): SEQ ID NO: 5026; WAN024DYK_at; Start 147; Stop 171
tatcactccagctaaaatacctggc

SEQ ID NO: 176366 - DNA, 25 bp, Artificial
  probe
  misc_feature (1)..(25): SEQ ID NO: 5026; WAN024DYK_at; Start 169; Stop 193
ggcatggcaactggtagaacaattc

SEQ ID NO: 176367 - DNA, 25 bp, Artificial
  probe
  misc_feature (1)..(25): SEQ ID NO: 5026; WAN024DYK_at; Start 200; Stop 224
cagtccgtaacttacctgccccaag

SEQ ID NO: 176368 - DNA, 25 bp, Artificial
  probe
  misc_feature (1)..(25): SEQ ID NO: 5026; WAN024DYK_at; Start 125; Stop 149
caacgatacggccaatagctagtat

SEQ ID NO: 176369 - DNA, 25 bp, Artificial
  probe
  misc_feature (1)..(25): SEQ ID NO: 5026; WAN024DYK_at; Start 94; Stop 118
cctaatgtatacatgagggcagctg

SEQ ID NO: 176370 - DNA, 25 bp, Artificial
  probe
  misc_feature (1)..(25): SEQ ID NO: 5026; WAN024DYK_at; Start 166; Stop 190
cctggcatggcaactggtagaacaa

SEQ ID NO: 176371 - DNA, 25 bp, Artificial
  probe
  misc_feature (1)..(25): SEQ ID NO: 5026; WAN024DYK_at; Start 131; Stop 155
tacggccaatagctagtatcactcc

SEQ ID NO: 176372 - DNA, 25 bp, Artificial
  probe
  misc_feature (1)..(25): SEQ ID NO: 5026; WAN024DYK_at; Start 161; Stop 185
aaatacctggcatggcaactggtag

SEQ ID NO: 176373 - DNA, 25 bp, Artificial
  probe
  misc_feature (1)..(25): SEQ ID NO: 5026; WAN024DYK_at; Start 171; Stop 195
catggcaactggtagaacaattcta

SEQ ID NO: 176374 - DNA, 25 bp, Artificial
  probe
  misc_feature (1)..(25): SEQ ID NO: 5026; WAN024DYK_at; Start 95; Stop 119
ctaatgtatacatgagggcagctgt

SEQ ID NO: 176375 - DNA, 25 bp, Artificial
  probe
  misc_feature (1)..(25): SEQ ID NO: 5026; WAN024DYK_at; Start 137; Stop 161
caatagctagtatcactccagctaa

SEQ ID NO: 176376 - DNA, 25 bp, Artificial
  probe
  misc_feature (1)..(25): SEQ ID NO: 5026; WAN024DYK_at; Start 48; Stop 72
agaacggcctgaagacatgagacta

SEQ ID NO: 176377 - DNA, 25 bp, Artificial
  probe
  misc_feature (1)..(25): SEQ ID NO: 5026; WAN024DYK_at; Start 44; Stop 68
ctagagaacggcctgaagacatgag

SEQ ID NO: 176378 - DNA, 25 bp, Artificial
  probe
  misc_feature (1)..(25): SEQ ID NO: 5026; WAN024DYK_at; Start 74; Stop 98
ttggcgtattggtagaggtacctaa

SEQ ID NO: 176379 - DNA, 25 bp, Artificial
  probe
  misc_feature (1)..(25): SEQ ID NO: 5026; WAN024DYK_at; Start 88; Stop 112
gaggtacctaatgtatacatgaggg

SEQ ID NO: 176380 - DNA, 25 bp, Artificial
  probe
  misc_feature (1)..(25): SEQ ID NO: 5026; WAN024DYK_at; Start 174; Stop 198
ggcaactggtagaacaattctaaaa

SEQ ID NO: 176381 - DNA, 25 bp, Artificial
  probe
  misc_feature (1)..(25): SEQ ID NO: 5026; WAN024DYK_at; Start 9; Stop 33
tagcccctcacttgacagcatatac

SEQ ID NO: 176382 - DNA, 25 bp, Artificial
  probe
  misc_feature (1)..(25): SEQ ID NO: 5026; WAN024DYK_at; Start 142; Stop 166
gctagtatcactccagctaaaatac

SEQ ID NO: 176383 - DNA, 25 bp, Artificial
  probe
  misc_feature (1)..(25): SEQ ID NO: 5026; WAN024DYK_at; Start 180; Stop 204
tggtagaacaattctaaaaacagtc

SEQ ID NO: 176384 - DNA, 25 bp, Artificial
  probe
  misc_feature (1)..(25): SEQ ID NO: 5026; WAN024DYK_at; Start 92; Stop 116
tacctaatgtatacatgagggcagc

SEQ ID NO: 176385 - DNA, 25 bp, Artificial
  probe
  misc_feature (1)..(25): SEQ ID NO: 5026; WAN024DYK_at; Start 167; Stop 191
ctggcatggcaactggtagaacaat

SEQ ID NO: 176386 - DNA, 25 bp, Artificial
  probe
  misc_feature (1)..(25): SEQ ID NO: 5026; WAN024DYK_at; Start 78; Stop 102
cgtattggtagaggtacctaatgta

SEQ ID NO: 176387 - DNA, 25 bp, Artificial
  probe
  misc_feature (1)..(25): SEQ ID NO: 5026; WAN024DYK_at; Start 134; Stop 158
ggccaatagctagtatcactccagc

SEQ ID NO: 176388 - DNA, 25 bp, Artificial
  probe
  misc_feature (1)..(25): SEQ ID NO: 5026; WAN024DYK_at; Start 46; Stop 70
agagaacggcctgaagacatgagac

SEQ ID NO: 176389 - DNA, 25 bp, Artificial
  probe
  misc_feature (1)..(25): SEQ ID NO: 5026; WAN024DYK_at; Start 84; Stop 108
ggtagaggtacctaatgtatacatg

SEQ ID NO: 176390 - DNA, 25 bp, Artificial
  probe
  misc_feature (1)..(25): SEQ ID NO: 1599; WAN024DYL_at; Start 208; Stop 232
gccttgcccatagggatttttgctg

SEQ ID NO: 176391 - DNA, 25 bp, Artificial
  probe
  misc_feature (1)..(25): SEQ ID NO: 1599; WAN024DYL_at; Start 767; Stop 791
atactctatcaagcttattatctcg

SEQ ID NO: 176392 - DNA, 25 bp, Artificial
  probe
  misc_feature (1)..(25): SEQ ID NO: 1599; WAN024DYL_at; Start 609; Stop 633
catgtatacattaggtacctctacc

SEQ ID NO: 176393 - DNA, 25 bp, Artificial
  probe
  misc_feature (1)..(25): SEQ ID NO: 1599; WAN024DYL_at; Start 572; Stop 596
tagctattggccgtatcgttggtga

SEQ ID NO: 176394 - DNA, 25 bp, Artificial
  probe
  misc_feature (1)..(25): SEQ ID NO: 1599; WAN024DYL_at; Start 125; Stop 149
cttggacttatacttctgagaacat

SEQ ID NO: 176395 - DNA, 25 bp, Artificial
  probe
  misc_feature (1)..(25): SEQ ID NO: 1599; WAN024DYL_at; Start 4; Stop 28
agtaaatacctgctaaaacttctcg

SEQ ID NO: 176396 - DNA, 25 bp, Artificial
  probe
  misc_feature (1)..(25): SEQ ID NO: 1599; WAN024DYL_at; Start 339; Stop 363
tggcatgctcttctttgtagtcttc

SEQ ID NO: 176397 - DNA, 25 bp, Artificial
  probe
  misc_feature (1)..(25): SEQ ID NO: 1599; WAN024DYL_at; Start 524; Stop 548
gaattgttctaccagttgccatgcc

SEQ ID NO: 176398 - DNA, 25 bp, Artificial
  probe
  misc_feature (1)..(25): SEQ ID NO: 1599; WAN024DYL_at; Start 177; Stop 201
cgttattctggtctttggtgctctt

SEQ ID NO: 176399 - DNA, 25 bp, Artificial
  probe
  misc_feature (1)..(25): SEQ ID NO: 1599; WAN024DYL_at; Start 536; Stop 560
cagttgccatgccaggtattttagc

SEQ ID NO: 176400 - DNA, 25 bp, Artificial
  probe
  misc_feature (1)..(25): SEQ ID NO: 1599; WAN024DYL_at; Start 354; Stop 378
tgtagtcttcttaggttttcaatac

SEQ ID NO: 176401 - DNA, 25 bp, Artificial
  probe
  misc_feature (1)..(25): SEQ ID NO: 1599; WAN024DYL_at; Start 471; Stop 495
catgcgtcaagcaagttatggactt

SEQ ID NO: 176402 - DNA, 25 bp, Artificial
  probe
  misc_feature (1)..(25): SEQ ID NO: 1599; WAN024DYL_at; Start 442; Stop 466
gaagaagcccttttatctgttagtg

SEQ ID NO: 176403 - DNA, 25 bp, Artificial
  probe
  misc_feature (1)..(25): SEQ ID NO: 1599; WAN024DYL_at; Start 193; Stop 217
ggtgctcttcttttagccttgccca

SEQ ID NO: 176404 - DNA, 25 bp, Artificial
  probe
  misc_feature (1)..(25): SEQ ID NO: 1599; WAN024DYL_at; Start 559; Stop 583
gctggagtgatactagctattggcc

SEQ ID NO: 176405 - DNA, 25 bp, Artificial
  probe
  misc_feature (1)..(25): SEQ ID NO: 1599; WAN024DYL_at; Start 264; Stop 288
ttccctttgtgttaaaatcatgcga

SEQ ID NO: 176406 - DNA, 25 bp, Artificial
  probe
  misc_feature (1)..(25): SEQ ID NO: 1599; WAN024DYL_at; Start 429; Stop 453
tattcgctcaacagaagaagccctt

SEQ ID NO: 176407 - DNA, 25 bp, Artificial
  probe
  misc_feature (1)..(25): SEQ ID NO: 1599; WAN024DYL_at; Start 368; Stop 392
gttttcaatactctctgttatcagg

SEQ ID NO: 176408 - DNA, 25 bp, Artificial
  probe
  misc_feature (1)..(25): SEQ ID NO: 1599; WAN024DYL_at; Start 414; Stop 438
ggtgttgccagtcattattcgctca

SEQ ID NO: 176409 - DNA, 25 bp, Artificial
  probe
  misc_feature (1)..(25): SEQ ID NO: 1599; WAN024DYL_at; Start 383; Stop 407
tgttatcaggaatcttaacctcagt

SEQ ID NO: 176410 - DNA, 25 bp, Artificial
  probe
  misc_feature (1)..(25): SEQ ID NO: 1599; WAN024DYL_at; Start 40; Stop 64
tcagctttaacctttggctctctct

SEQ ID NO: 176411 - DNA, 25 bp, Artificial
  probe
  misc_feature (1)..(25): SEQ ID NO: 1599; WAN024DYL_at; Start 107; Stop 131
taagtctatccctcttttcttggac

SEQ ID NO: 176412 - DNA, 25 bp, Artificial
  probe
  misc_feature (1)..(25): SEQ ID NO: 1599; WAN024DYL_at; Start 457; Stop 481
tctgttagtgatagcatgcgtcaag

SEQ ID NO: 176413 - DNA, 25 bp, Artificial
  probe
  misc_feature (1)..(25): SEQ ID NO: 1599; WAN024DYL_at; Start 679; Stop 703
catatgtatatgctgtcaagtgagg

SEQ ID NO: 176414 - DNA, 25 bp, Artificial
  probe
  misc_feature (1)..(25): SEQ ID NO: 1599; WAN024DYL_at; Start 709; Stop 733
catgtcaatgaagcctatgctaccg

SEQ ID NO: 176415 - DNA, 25 bp, Artificial
  probe
  misc_feature (1)..(25): SEQ ID NO: 1599; WAN024DYL_at; Start 324; Stop 348
tgtttttggtctgtttggcatgctc

SEQ ID NO: 176416 - DNA, 25 bp, Artificial
  probe
  misc_feature (1)..(25): SEQ ID NO: 1599; WAN024DYL_at; Start 619; Stop 643
ttaggtacctctaccaatacgccaa

SEQ ID NO: 176417 - DNA, 25 bp, Artificial
  probe
  misc_feature (1)..(25): SEQ ID NO: 1599; WAN024DYL_at; Start 71; Stop 95
tcattggttttatcctcatcaaagg

SEQ ID NO: 176418 - DNA, 25 bp, Artificial
  probe
  misc_feature (1)..(25): SEQ ID NO: 1599; WAN024DYL_at; Start 599; Stop 623
cagctgccctcatgtatacattagg

SEQ ID NO: 176419 - DNA, 25 bp, Artificial
  probe
  misc_feature (1)..(25): SEQ ID NO: 1599; WAN024DYL_at; Start 156; Stop 180
tatgccagcgattatttccaccgtt

SEQ ID NO: 176420 - DNA, 25 bp, Artificial
  probe
  misc_feature (1)..(25): SEQ ID NO: 1599; WAN024DYL_at; Start 547; Stop 571
ccaggtattttagctggagtgatac

SEQ ID NO: 176421 - DNA, 25 bp, Artificial
  probe
  misc_feature (1)..(25): SEQ ID NO: 1599; WAN024DYL_at; Start 308; Stop 332
ctgggattccttccattgtttttgg

SEQ ID NO: 176422 - DNA, 25 bp, Artificial
  probe
  misc_feature (1)..(25): SEQ ID NO: 1599; WAN024DYL_at; Start 142; Stop 166
gagaacatttcccttatgccagcga

SEQ ID NO: 176423 - DNA, 25 bp, Artificial
  probe
  misc_feature (1)..(25): SEQ ID NO: 1599; WAN024DYL_at; Start 279; Stop 303
aatcatgcgattggcctcagatacc

SEQ ID NO: 176424 - DNA, 25 bp, Artificial
  probe
  misc_feature (1)..(25): SEQ ID NO: 4040; WAN024DYM_at; Start 589; Stop 613
gcgagatctggtattttatcagcag

SEQ ID NO: 176425 - DNA, 25 bp, Artificial
  probe
  misc_feature (1)..(25): SEQ ID NO: 4040; WAN024DYM_at; Start 386; Stop 410
tattggtgccttggattagaagctt

SEQ ID NO: 176426 - DNA, 25 bp, Artificial
  probe
  misc_feature (1)..(25): SEQ ID NO: 4040; WAN024DYM_at; Start 540; Stop 564
tctaggagctagtcatgaacggagt

SEQ ID NO: 176427 - DNA, 25 bp, Artificial
  probe
  misc_feature (1)..(25): SEQ ID NO: 4040; WAN024DYM_at; Start 289; Stop 313
tattattgtccaaagcccgtctatg

SEQ ID NO: 176428 - DNA, 25 bp, Artificial
  probe
  misc_feature (1)..(25): SEQ ID NO: 4040; WAN024DYM_at; Start 688; Stop 712
ccaagtggactcttttcaggaacca

SEQ ID NO: 176429 - DNA, 25 bp, Artificial
  probe
  misc_feature (1)..(25): SEQ ID NO: 4040; WAN024DYM_at; Start 370; Stop 394
tttttcggcctacaattattggtgc

SEQ ID NO: 176430 - DNA, 25 bp, Artificial
  probe
  misc_feature (1)..(25): SEQ ID NO: 4040; WAN024DYM_at; Start 722; Stop 746
caaccaatattgttctggaaatggc

SEQ ID NO: 176431 - DNA, 25 bp, Artificial
  probe
  misc_feature (1)..(25): SEQ ID NO: 4040; WAN024DYM_at; Start 228; Stop 252
taccttaggagcgattgtgattggg

SEQ ID NO: 176432 - DNA, 25 bp, Artificial
  probe
  misc_feature (1)..(25): SEQ ID NO: 4040; WAN024DYM_at; Start 149; Stop 173
tattaggcagtgattggtcgccaac

SEQ ID NO: 176433 - DNA, 25 bp, Artificial
  probe
  misc_feature (1)..(25): SEQ ID NO: 4040; WAN024DYM_at; Start 635; Stop 659
cagtaggtgaaaccatggcagttat

SEQ ID NO: 176434 - DNA, 25 bp, Artificial
  probe
  misc_feature (1)..(25): SEQ ID NO: 4040; WAN024DYM_at; Start 523; Stop 547
tattctggtagcttggctctaggag

SEQ ID NO: 176435 - DNA, 25 bp, Artificial
  probe
  misc_feature (1)..(25): SEQ ID NO: 4040; WAN024DYM_at; Start 255; Stop 279
gccaacaggcatcttgacatcggtg

SEQ ID NO: 176436 - DNA, 25 bp, Artificial
  probe
  misc_feature (1)..(25): SEQ ID NO: 4040; WAN024DYM_at; Start 203; Stop 227
caatgatcgttggttccttattaat

SEQ ID NO: 176437 - DNA, 25 bp, Artificial
  probe
  misc_feature (1)..(25): SEQ ID NO: 4040; WAN024DYM_at; Start 556; Stop 580
gaacggagtatttttagtgtcatct

SEQ ID NO: 176438 - DNA, 25 bp, Artificial
  probe
  misc_feature (1)..(25): SEQ ID NO: 4040; WAN024DYM_at; Start 703; Stop 727
tcaggaaccagaaccttaacaacca

SEQ ID NO: 176439 - DNA, 25 bp, Artificial
  probe
  misc_feature (1)..(25): SEQ ID NO: 4040; WAN024DYM_at; Start 304; Stop 328
cccgtctatggcttcttaaaatcag

SEQ ID NO: 176440 - DNA, 25 bp, Artificial
  probe
  misc_feature (1)..(25): SEQ ID NO: 4040; WAN024DYM_at; Start 626; Stop 650
tcggtcgcgcagtaggtgaaaccat

SEQ ID NO: 176441 - DNA, 25 bp, Artificial
  probe
  misc_feature (1)..(25): SEQ ID NO: 4040; WAN024DYM_at; Start 404; Stop 428
gaagctttttaggaaatggcatgag

SEQ ID NO: 176442 - DNA, 25 bp, Artificial
  probe
  misc_feature (1)..(25): SEQ ID NO: 4040; WAN024DYM_at; Start 570; Stop 594
tagtgtcatcttgccagctgcgaga

SEQ ID NO: 176443 - DNA, 25 bp, Artificial
  probe
  misc_feature (1)..(25): SEQ ID NO: 4040; WAN024DYM_at; Start 832; Stop 856
gcctacttgaaaggaaaatcatctt

SEQ ID NO: 176444 - DNA, 25 bp, Artificial
  probe
  misc_feature (1)..(25): SEQ ID NO: 4040; WAN024DYM_at; Start 506; Stop 530
cagttcccaaaacgtattattctgg

SEQ ID NO: 176445 - DNA, 25 bp, Artificial
  probe
  misc_feature (1)..(25): SEQ ID NO: 4040; WAN024DYM_at; Start 320; Stop 344
taaaatcagctatcaacttgatggc

SEQ ID NO: 176446 - DNA, 25 bp, Artificial
  probe
  misc_feature (1)..(25): SEQ ID NO: 4040; WAN024DYM_at; Start 737; Stop 761
tggaaatggcttacgcatcaggtca

SEQ ID NO: 176447 - DNA, 25 bp, Artificial
  probe
  misc_feature (1)..(25): SEQ ID NO: 4040; WAN024DYM_at; Start 468; Stop 492
gccaaccattatcagtttgtcagaa

SEQ ID NO: 176448 - DNA, 25 bp, Artificial
  probe
  misc_feature (1)..(25): SEQ ID NO: 4040; WAN024DYM_at; Start 179; Stop 203
ttccggcaagctatggtattttacc

SEQ ID NO: 176449 - DNA, 25 bp, Artificial
  probe
  misc_feature (1)..(25): SEQ ID NO: 4040; WAN024DYM_at; Start 819; Stop 843
taatgcctactttgcctacttgaaa

SEQ ID NO: 176450 - DNA, 25 bp, Artificial
  probe
  misc_feature (1)..(25): SEQ ID NO: 4040; WAN024DYM_at; Start 452; Stop 476
taggaataatgattttgccaaccat

SEQ ID NO: 176451 - DNA, 25 bp, Artificial
  probe
  misc_feature (1)..(25): SEQ ID NO: 4040; WAN024DYM_at; Start 769; Stop 793
gaagcccttattgcaacctcagcag

SEQ ID NO: 176452 - DNA, 25 bp, Artificial
  probe
  misc_feature (1)..(25): SEQ ID NO: 4040; WAN024DYM_at; Start 437; Stop 461
ccgcttcgttactattaggaataat

SEQ ID NO: 176453 - DNA, 25 bp, Artificial
  probe
  misc_feature (1)..(25): SEQ ID NO: 4040; WAN024DYM_at; Start 43; Stop 67
tttttcatgagtgcaacagtagctg

SEQ ID NO: 176454 - DNA, 25 bp, Artificial
  probe
  misc_feature (1)..(25): SEQ ID NO: 4040; WAN024DYM_at; Start 752; Stop 776
catcaggtcagcatagggaagccct

SEQ ID NO: 176455 - DNA, 25 bp, Artificial
  probe
  misc_feature (1)..(25): SEQ ID NO: 4040; WAN024DYM_at; Start 164; Stop 188
ggtcgccaacgaacattccggcaag

SEQ ID NO: 176456 - DNA, 25 bp, Artificial
  probe
  misc_feature (1)..(25): SEQ ID NO: 4040; WAN024DYM_at; Start 485; Stop 509
tgtcagaatctgctatccgaacagt

SEQ ID NO: 176457 - DNA, 25 bp, Artificial
  probe
  misc_feature (1)..(25): SEQ ID NO: 4040; WAN024DYM_at; Start 420; Stop 444
tggcatgagtgtcctaaccgcttcg

SEQ ID NO: 176458 - DNA, 25 bp, Artificial
  probe
  misc_feature (1)..(25): SEQ ID NO: 7337; WAN024DYN_at; Start 62; Stop 86
acttgttgaccttgtttggagtgga

SEQ ID NO: 176459 - DNA, 25 bp, Artificial
  probe
  misc_feature (1)..(25): SEQ ID NO: 7337; WAN024DYN_at; Start 3; Stop 27
gttggcttgtatattccgtggtttc

SEQ ID NO: 176460 - DNA, 25 bp, Artificial
  probe
  misc_feature (1)..(25): SEQ ID NO: 7337; WAN024DYN_at; Start 72; Stop 96
cttgtttggagtggataaagctgat

SEQ ID NO: 176461 - DNA, 25 bp, Artificial
  probe
  misc_feature (1)..(25): SEQ ID NO: 7337; WAN024DYN_at; Start 51; Stop 75
tatctgtgaccacttgttgaccttg

SEQ ID NO: 176462 - DNA, 25 bp, Artificial
  probe
  misc_feature (1)..(25): SEQ ID NO: 7337; WAN024DYN_at; Start 43; Stop 67
aaatttattatctgtgaccacttgt

SEQ ID NO: 176463 - DNA, 25 bp, Artificial
  probe
  misc_feature (1)..(25): SEQ ID NO: 7337; WAN024DYN_at; Start 42; Stop 66
taaatttattatctgtgaccacttg

SEQ ID NO: 176464 - DNA, 25 bp, Artificial
  probe
  misc_feature (1)..(25): SEQ ID NO: 7337; WAN024DYN_at; Start 93; Stop 117
tgataaaatcttgaccctaactaat

SEQ ID NO: 176465 - DNA, 25 bp, Artificial
  probe
  misc_feature (1)..(25): SEQ ID NO: 7337; WAN024DYN_at; Start 52; Stop 76
atctgtgaccacttgttgaccttgt

SEQ ID NO: 176466 - DNA, 25 bp, Artificial
  probe
  misc_feature (1)..(25): SEQ ID NO: 7337; WAN024DYN_at; Start 53; Stop 77
tctgtgaccacttgttgaccttgtt

SEQ ID NO: 176467 - DNA, 25 bp, Artificial
  probe
  misc_feature (1)..(25): SEQ ID NO: 7337; WAN024DYN_at; Start 74; Stop 98
tgtttggagtggataaagctgataa

SEQ ID NO: 176468 - DNA, 25 bp, Artificial
  probe
  misc_feature (1)..(25): SEQ ID NO: 7337; WAN024DYN_at; Start 60; Stop 84
ccacttgttgaccttgtttggagtg

SEQ ID NO: 176469 - DNA, 25 bp, Artificial
  probe
  misc_feature (1)..(25): SEQ ID NO: 7337; WAN024DYN_at; Start 59; Stop 83
accacttgttgaccttgtttggagt

SEQ ID NO: 176470 - DNA, 25 bp, Artificial
  probe
  misc_feature (1)..(25): SEQ ID NO: 7337; WAN024DYN_at; Start 55; Stop 79
tgtgaccacttgttgaccttgtttg

SEQ ID NO: 176471 - DNA, 25 bp, Artificial
  probe
  misc_feature (1)..(25): SEQ ID NO: 7337; WAN024DYN_at; Start 63; Stop 87
cttgttgaccttgtttggagtggat

SEQ ID NO: 176472 - DNA, 25 bp, Artificial
  probe
  misc_feature (1)..(25): SEQ ID NO: 7337; WAN024DYN_at; Start 1; Stop 25
gtgttggcttgtatattccgtggtt

SEQ ID NO: 176473 - DNA, 25 bp, Artificial
  probe
  misc_feature (1)..(25): SEQ ID NO: 7337; WAN024DYN_at; Start 56; Stop 80
gtgaccacttgttgaccttgtttgg

SEQ ID NO: 176474 - DNA, 25 bp, Artificial
  probe
  misc_feature (1)..(25): SEQ ID NO: 7337; WAN024DYN_at; Start 85; Stop 109
gataaagctgataaaatcttgaccc

SEQ ID NO: 176475 - DNA, 25 bp, Artificial
  probe
  misc_feature (1)..(25): SEQ ID NO: 7337; WAN024DYN_at; Start 69; Stop 93
gaccttgtttggagtggataaagct

SEQ ID NO: 176476 - DNA, 25 bp, Artificial
  probe
  misc_feature (1)..(25): SEQ ID NO: 7337; WAN024DYN_at; Start 71; Stop 95
ccttgtttggagtggataaagctga

SEQ ID NO: 176477 - DNA, 25 bp, Artificial
  probe
  misc_feature (1)..(25): SEQ ID NO: 7337; WAN024DYN_at; Start 58; Stop 82
gaccacttgttgaccttgtttggag

SEQ ID NO: 176478 - DNA, 25 bp, Artificial
  probe
  misc_feature (1)..(25): SEQ ID NO: 7337; WAN024DYN_at; Start 80; Stop 104
gagtggataaagctgataaaatctt

SEQ ID NO: 176479 - DNA, 25 bp, Artificial
  probe
  misc_feature (1)..(25): SEQ ID NO: 7337; WAN024DYN_at; Start 87; Stop 111
taaagctgataaaatcttgacccta

SEQ ID NO: 176480 - DNA, 25 bp, Artificial
  probe
  misc_feature (1)..(25): SEQ ID NO: 7337; WAN024DYN_at; Start 66; Stop 90
gttgaccttgtttggagtggataaa

SEQ ID NO: 176481 - DNA, 25 bp, Artificial
  probe
  misc_feature (1)..(25): SEQ ID NO: 7337; WAN024DYN_at; Start 39; Stop 63
caataaatttattatctgtgaccac

SEQ ID NO: 176482 - DNA, 25 bp, Artificial
  probe
  misc_feature (1)..(25): SEQ ID NO: 7337; WAN024DYN_at; Start 48; Stop 72
tattatctgtgaccacttgttgacc

SEQ ID NO: 176483 - DNA, 25 bp, Artificial
  probe
  misc_feature (1)..(25): SEQ ID NO: 7337; WAN024DYN_at; Start 83; Stop 107
tggataaagctgataaaatcttgac

SEQ ID NO: 176484 - DNA, 25 bp, Artificial
  probe
  misc_feature (1)..(25): SEQ ID NO: 7337; WAN024DYN_at; Start 89; Stop 113
aagctgataaaatcttgaccctaac

SEQ ID NO: 176485 - DNA, 25 bp, Artificial
  probe
  misc_feature (1)..(25): SEQ ID NO: 7337; WAN024DYN_at; Start 5; Stop 29
tggcttgtatattccgtggtttcgg

SEQ ID NO: 176486 - DNA, 25 bp, Artificial
  probe
  misc_feature (1)..(25): SEQ ID NO: 7337; WAN024DYN_at; Start 91; Stop 115
gctgataaaatcttgaccctaacta

SEQ ID NO: 176487 - DNA, 25 bp, Artificial
  probe
  misc_feature (1)..(25): SEQ ID NO: 7337; WAN024DYN_at; Start 78; Stop 102
tggagtggataaagctgataaaatc

SEQ ID NO: 176488 - DNA, 25 bp, Artificial
  probe
  misc_feature (1)..(25): SEQ ID NO: 7337; WAN024DYN_at; Start 57; Stop 81
tgaccacttgttgaccttgtttgga

SEQ ID NO: 176489 - DNA, 25 bp, Artificial
  probe
  misc_feature (1)..(25): SEQ ID NO: 7337; WAN024DYN_at; Start 65; Stop 89
tgttgaccttgtttggagtggataa

SEQ ID NO: 176490 - DNA, 25 bp, Artificial
  probe
  misc_feature (1)..(25): SEQ ID NO: 7337; WAN024DYN_at; Start 68; Stop 92
tgaccttgtttggagtggataaagc

SEQ ID NO: 176491 - DNA, 25 bp, Artificial
  probe
  misc_feature (1)..(25): SEQ ID NO: 7337; WAN024DYN_at; Start 61; Stop 85
cacttgttgaccttgtttggagtgg

SEQ ID NO: 176492 - DNA, 25 bp, Artificial
  probe
  misc_feature (1)..(25): SEQ ID NO: 2280; WAN024DYO_at; Start 130; Stop 154
gcaatagcatcatgggtgagactct

SEQ ID NO: 176493 - DNA, 25 bp, Artificial
  probe
  misc_feature (1)..(25): SEQ ID NO: 2280; WAN024DYO_at; Start 246; Stop 270
ggtaatatcaatcgtaacttctgga

SEQ ID NO: 176494 - DNA, 25 bp, Artificial
  probe
  misc_feature (1)..(25): SEQ ID NO: 2280; WAN024DYO_at; Start 60; Stop 84
tgcaagttcagccatactgacttgg

SEQ ID NO: 176495 - DNA, 25 bp, Artificial
  probe
  misc_feature (1)..(25): SEQ ID NO: 2280; WAN024DYO_at; Start 11; Stop 35
cattttatttaatcttgtcccaggt

SEQ ID NO: 176496 - DNA, 25 bp, Artificial
  probe
  misc_feature (1)..(25): SEQ ID NO: 2280; WAN024DYO_at; Start 235; Stop 259
gacccattagaggtaatatcaatcg

SEQ ID NO: 176497 - DNA, 25 bp, Artificial
  probe
  misc_feature (1)..(25): SEQ ID NO: 2280; WAN024DYO_at; Start 108; Stop 132
cacaacagcaataccgtctaaagca

SEQ ID NO: 176498 - DNA, 25 bp, Artificial
  probe
  misc_feature (1)..(25): SEQ ID NO: 2280; WAN024DYO_at; Start 196; Stop 220
tcagcggttttctccttaacagcgg

SEQ ID NO: 176499 - DNA, 25 bp, Artificial
  probe
  misc_feature (1)..(25): SEQ ID NO: 2280; WAN024DYO_at; Start 23; Stop 47
tcttgtcccaggtggttaatttgcc

SEQ ID NO: 176500 - DNA, 25 bp, Artificial
  probe
  misc_feature (1)..(25): SEQ ID NO: 2280; WAN024DYO_at; Start 149; Stop 173
gactcttaccttcttcaggagttaa

SEQ ID NO: 176501 - DNA, 25 bp, Artificial
  probe
  misc_feature (1)..(25): SEQ ID NO: 2280; WAN024DYO_at; Start 74; Stop 98
tactgacttggcttgccttattgtc

SEQ ID NO: 176502 - DNA, 25 bp, Artificial
  probe
  misc_feature (1)..(25): SEQ ID NO: 2280; WAN024DYO_at; Start 134; Stop 158
tagcatcatgggtgagactcttacc

SEQ ID NO: 176503 - DNA, 25 bp, Artificial
  probe
  misc_feature (1)..(25): SEQ ID NO: 2280; WAN024DYO_at; Start 50; Stop 74
taaaaacgtctgcaagttcagccat

SEQ ID NO: 176504 - DNA, 25 bp, Artificial
  probe
  misc_feature (1)..(25): SEQ ID NO: 2280; WAN024DYO_at; Start 228; Stop 252
tgctgaagacccattagaggtaata

SEQ ID NO: 176505 - DNA, 25 bp, Artificial
  probe
  misc_feature (1)..(25): SEQ ID NO: 2280; WAN024DYO_at; Start 119; Stop 143
taccgtctaaagcaatagcatcatg

SEQ ID NO: 176506 - DNA, 25 bp, Artificial
  probe
  misc_feature (1)..(25): SEQ ID NO: 2280; WAN024DYO_at; Start 254; Stop 278
caatcgtaacttctggattttcttt

SEQ ID NO: 176507 - DNA, 25 bp, Artificial
  probe
  misc_feature (1)..(25): SEQ ID NO: 2280; WAN024DYO_at; Start 124; Stop 148
tctaaagcaatagcatcatgggtga

SEQ ID NO: 176508 - DNA, 25 bp, Artificial
  probe
  misc_feature (1)..(25): SEQ ID NO: 2280; WAN024DYO_at; Start 144; Stop 168
ggtgagactcttaccttcttcagga

SEQ ID NO: 176509 - DNA, 25 bp, Artificial
  probe
  misc_feature (1)..(25): SEQ ID NO: 2280; WAN024DYO_at; Start 113; Stop 137
cagcaataccgtctaaagcaatagc

SEQ ID NO: 176510 - DNA, 25 bp, Artificial
  probe
  misc_feature (1)..(25): SEQ ID NO: 2280; WAN024DYO_at; Start 38; Stop 62
ttaatttgccactaaaaacgtctgc

SEQ ID NO: 176511 - DNA, 25 bp, Artificial
  probe
  misc_feature (1)..(25): SEQ ID NO: 2280; WAN024DYO_at; Start 101; Stop 125
tattgaccacaacagcaataccgtc

SEQ ID NO: 176512 - DNA, 25 bp, Artificial
  probe
  misc_feature (1)..(25): SEQ ID NO: 2280; WAN024DYO_at; Start 92; Stop 116
tattgtcattattgaccacaacagc

SEQ ID NO: 176513 - DNA, 25 bp, Artificial
  probe
  misc_feature (1)..(25): SEQ ID NO: 2280; WAN024DYO_at; Start 205; Stop 229
ttctccttaacagcggtaatacctg

SEQ ID NO: 176514 - DNA, 25 bp, Artificial
  probe
  misc_feature (1)..(25): SEQ ID NO: 2280; WAN024DYO_at; Start 44; Stop 68
tgccactaaaaacgtctgcaagttc

SEQ ID NO: 176515 - DNA, 25 bp, Artificial
  probe
  misc_feature (1)..(25): SEQ ID NO: 2280; WAN024DYO_at; Start 186; Stop 210
cataccaatatcagcggttttctcc

SEQ ID NO: 176516 - DNA, 25 bp, Artificial
  probe
  misc_feature (1)..(25): SEQ ID NO: 2280; WAN024DYO_at; Start 157; Stop 181
ccttcttcaggagttaattccctag

SEQ ID NO: 176517 - DNA, 25 bp, Artificial
  probe
  misc_feature (1)..(25): SEQ ID NO: 2280; WAN024DYO_at; Start 16; Stop 40
tatttaatcttgtcccaggtggtta

SEQ ID NO: 176518 - DNA, 25 bp, Artificial
  probe
  misc_feature (1)..(25): SEQ ID NO: 2280; WAN024DYO_at; Start 222; Stop 246
aatacctgctgaagacccattagag

SEQ ID NO: 176519 - DNA, 25 bp, Artificial
  probe
  misc_feature (1)..(25): SEQ ID NO: 2280; WAN024DYO_at; Start 179; Stop 203
tagaaaccataccaatatcagcggt

SEQ ID NO: 176520 - DNA, 25 bp, Artificial
  probe
  misc_feature (1)..(25): SEQ ID NO: 2280; WAN024DYO_at; Start 54; Stop 78
aacgtctgcaagttcagccatactg

SEQ ID NO: 176521 - DNA, 25 bp, Artificial
  probe
  misc_feature (1)..(25): SEQ ID NO: 2280; WAN024DYO_at; Start 218; Stop 242
cggtaatacctgctgaagacccatt

SEQ ID NO: 176522 - DNA, 25 bp, Artificial
  probe
  misc_feature (1)..(25): SEQ ID NO: 2280; WAN024DYO_at; Start 83; Stop 107
ggcttgccttattgtcattattgac

SEQ ID NO: 176523 - DNA, 25 bp, Artificial
  probe
  misc_feature (1)..(25): SEQ ID NO: 2280; WAN024DYO_at; Start 26; Stop 50
tgtcccaggtggttaatttgccact

SEQ ID NO: 176524 - DNA, 25 bp, Artificial
  probe
  misc_feature (1)..(25): SEQ ID NO: 2280; WAN024DYO_at; Start 70; Stop 94
gccatactgacttggcttgccttat

SEQ ID NO: 176525 - DNA, 25 bp, Artificial
  probe
  misc_feature (1)..(25): SEQ ID NO: 2280; WAN024DYO_at; Start 164; Stop 188
caggagttaattccctagaaaccat

SEQ ID NO: 176526 - DNA, 25 bp, Artificial
  probe
  misc_feature (1)..(25): SEQ ID NO: 5794; WAN024DYP_at; Start 506; Stop 530
tcagctttatccactccaaacaagg

SEQ ID NO: 176527 - DNA, 25 bp, Artificial
  probe
  misc_feature (1)..(25): SEQ ID NO: 5794; WAN024DYP_at; Start 381; Stop 405
caaggctttagagattgatggtgtc

SEQ ID NO: 176528 - DNA, 25 bp, Artificial
  probe
  misc_feature (1)..(25): SEQ ID NO: 5794; WAN024DYP_at; Start 77; Stop 101
aaatgcttactcttgcagccattgg

SEQ ID NO: 176529 - DNA, 25 bp, Artificial
  probe
  misc_feature (1)..(25): SEQ ID NO: 5794; WAN024DYP_at; Start 92; Stop 116
cagccattggcttatcaggatttgg

SEQ ID NO: 176530 - DNA, 25 bp, Artificial
  probe
  misc_feature (1)..(25): SEQ ID NO: 5794; WAN024DYP_at; Start 522; Stop 546
caaacaaggtcaacaagtggtcaca

SEQ ID NO: 176531 - DNA, 25 bp, Artificial
  probe
  misc_feature (1)..(25): SEQ ID NO: 5794; WAN024DYP_at; Start 362; Stop 386
gatctttaacgaaatctgtcaaggc

SEQ ID NO: 176532 - DNA, 25 bp, Artificial
  probe
  misc_feature (1)..(25): SEQ ID NO: 5794; WAN024DYP_at; Start 144; Stop 168
tgcttccaaacagtcagcttcagga

SEQ ID NO: 176533 - DNA, 25 bp, Artificial
  probe
  misc_feature (1)..(25): SEQ ID NO: 5794; WAN024DYP_at; Start 827; Stop 851
tagacggtattgctgttgtggtcaa

SEQ ID NO: 176534 - DNA, 25 bp, Artificial
  probe
  misc_feature (1)..(25): SEQ ID NO: 5794; WAN024DYP_at; Start 714; Stop 738
tgggtcttcagcaggtattaccgct

SEQ ID NO: 176535 - DNA, 25 bp, Artificial
  probe
  misc_feature (1)..(25): SEQ ID NO: 5794; WAN024DYP_at; Start 847; Stop 871
gtcaataatgacaataaggcaagcc

SEQ ID NO: 176536 - DNA, 25 bp, Artificial
  probe
  misc_feature (1)..(25): SEQ ID NO: 5794; WAN024DYP_at; Start 608; Stop 632
gcaagttgtctgttgtaggttccac

SEQ ID NO: 176537 - DNA, 25 bp, Artificial
  probe
  misc_feature (1)..(25): SEQ ID NO: 5794; WAN024DYP_at; Start 447; Stop 471
tcaacgtcccttcaacattgtttgg

SEQ ID NO: 176538 - DNA, 25 bp, Artificial
  probe
  misc_feature (1)..(25): SEQ ID NO: 5794; WAN024DYP_at; Start 886; Stop 910
gaacttgcagacgtttttagtggca

SEQ ID NO: 176539 - DNA, 25 bp, Artificial
  probe
  misc_feature (1)..(25): SEQ ID NO: 5794; WAN024DYP_at; Start 811; Stop 835
catgatgctattgctttagacggta

SEQ ID NO: 176540 - DNA, 25 bp, Artificial
  probe
  misc_feature (1)..(25): SEQ ID NO: 5794; WAN024DYP_at; Start 734; Stop 758
ccgctgttaaggagaaaaccgctga

SEQ ID NO: 176541 - DNA, 25 bp, Artificial
  probe
  misc_feature (1)..(25): SEQ ID NO: 5794; WAN024DYP_at; Start 767; Stop 791
tggtttctagggaattaactcctga

SEQ ID NO: 176542 - DNA, 25 bp, Artificial
  probe
  misc_feature (1)..(25): SEQ ID NO: 5794; WAN024DYP_at; Start 396; Stop 420
tgatggtgtcaaggctagtcgagac

SEQ ID NO: 176543 - DNA, 25 bp, Artificial
  probe
  misc_feature (1)..(25): SEQ ID NO: 5794; WAN024DYP_at; Start 324; Stop 348
tcaagggaatgctaatgctatcggc

SEQ ID NO: 176544 - DNA, 25 bp, Artificial
  probe
  misc_feature (1)..(25): SEQ ID NO: 5794; WAN024DYP_at; Start 485; Stop 509
ccaagctaggtcaagattttatcag

SEQ ID NO: 176545 - DNA, 25 bp, Artificial
  probe
  misc_feature (1)..(25): SEQ ID NO: 5794; WAN024DYP_at; Start 307; Stop 331
ggtgttctctcagcagttcaaggga

SEQ ID NO: 176546 - DNA, 25 bp, Artificial
  probe
  misc_feature (1)..(25): SEQ ID NO: 5794; WAN024DYP_at; Start 125; Stop 149
cctgtggcaatcagtcagctgcttc

SEQ ID NO: 176547 - DNA, 25 bp, Artificial
  probe
  misc_feature (1)..(25): SEQ ID NO: 5794; WAN024DYP_at; Start 163; Stop 187
tcaggaacgattgaggtgatttcac

SEQ ID NO: 176548 - DNA, 25 bp, Artificial
  probe
  misc_feature (1)..(25): SEQ ID NO: 5794; WAN024DYP_at; Start 411; Stop 435
tagtcgagacacagttttagatggt

SEQ ID NO: 176549 - DNA, 25 bp, Artificial
  probe
  misc_feature (1)..(25): SEQ ID NO: 5794; WAN024DYP_at; Start 906; Stop 930
tggcaaattaaccacctgggacaag

SEQ ID NO: 176550 - DNA, 25 bp, Artificial
  probe
  misc_feature (1)..(25): SEQ ID NO: 5794; WAN024DYP_at; Start 786; Stop 810
tcctgaagaaggtaagagtctcacc

SEQ ID NO: 176551 - DNA, 25 bp, Artificial
  probe
  misc_feature (1)..(25): SEQ ID NO: 5794; WAN024DYP_at; Start 861; Stop 885
taaggcaagccaagtcagtatggct

SEQ ID NO: 176552 - DNA, 25 bp, Artificial
  probe
  misc_feature (1)..(25): SEQ ID NO: 5794; WAN024DYP_at; Start 339; Stop 363
tgctatcggctacatctccttggga

SEQ ID NO: 176553 - DNA, 25 bp, Artificial
  probe
  misc_feature (1)..(25): SEQ ID NO: 5794; WAN024DYP_at; Start 291; Stop 315
tcaaaatagtacagaaggtgttctc

SEQ ID NO: 176554 - DNA, 25 bp, Artificial
  probe
  misc_feature (1)..(25): SEQ ID NO: 5794; WAN024DYP_at; Start 684; Stop 708
tccagaagttacgattgatattacc

SEQ ID NO: 176555 - DNA, 25 bp, Artificial
  probe
  misc_feature (1)..(25): SEQ ID NO: 5794; WAN024DYP_at; Start 227; Stop 251
tcacagggattctcaaaaaagacgg

SEQ ID NO: 176556 - DNA, 25 bp, Artificial
  probe
  misc_feature (1)..(25): SEQ ID NO: 5794; WAN024DYP_at; Start 110; Stop 134
gatttgggcttgttgcctgtggcaa

SEQ ID NO: 176557 - DNA, 25 bp, Artificial
  probe
  misc_feature (1)..(25): SEQ ID NO: 5794; WAN024DYP_at; Start 179; Stop 203
tgatttcacgagaaaatggctctgg

SEQ ID NO: 176558 - DNA, 25 bp, Artificial
  probe
  misc_feature (1)..(25): SEQ ID NO: 5794; WAN024DYP_at; Start 210; Stop 234
gggtgccttcacagaaatcacaggg

SEQ ID NO: 176559 - DNA, 25 bp, Artificial
  probe
  misc_feature (1)..(25): SEQ ID NO: 5794; WAN024DYP_at; Start 264; Stop 288
tgacaacactgccaaaacagctgtg

SEQ ID NO: 176560 - DNA, 25 bp, Artificial
  probe
  misc_feature (1)..(25): SEQ ID NO: 3455; WAN024DYQ_at; Start 47; Stop 71
ctgccaagctgactcgtcaccgtga

SEQ ID NO: 176561 - DNA, 25 bp, Artificial
  probe
  misc_feature (1)..(25): SEQ ID NO: 3455; WAN024DYQ_at; Start 3; Stop 27
gtgcgaaagattggttaggaagaaa

SEQ ID NO: 176562 - DNA, 25 bp, Artificial
  probe
  misc_feature (1)..(25): SEQ ID NO: 3455; WAN024DYQ_at; Start 34; Stop 58
gaagcaactgcctctgccaagctga

SEQ ID NO: 176563 - DNA, 25 bp, Artificial
  probe
  misc_feature (1)..(25): SEQ ID NO: 3455; WAN024DYQ_at; Start 11; Stop 35
gattggttaggaagaaaaatcgtga

SEQ ID NO: 176564 - DNA, 25 bp, Artificial
  probe
  misc_feature (1)..(25): SEQ ID NO: 3455; WAN024DYQ_at; Start 23; Stop 47
agaaaaatcgtgaagcaactgcctc

SEQ ID NO: 176565 - DNA, 25 bp, Artificial
  probe
  misc_feature (1)..(25): SEQ ID NO: 3455; WAN024DYQ_at; Start 30; Stop 54
tcgtgaagcaactgcctctgccaag

SEQ ID NO: 176566 - DNA, 25 bp, Artificial
  probe
  misc_feature (1)..(25): SEQ ID NO: 3455; WAN024DYQ_at; Start 33; Stop 57
tgaagcaactgcctctgccaagctg

SEQ ID NO: 176567 - DNA, 25 bp, Artificial
  probe
  misc_feature (1)..(25): SEQ ID NO: 3455; WAN024DYQ_at; Start 36; Stop 60
agcaactgcctctgccaagctgact

SEQ ID NO: 176568 - DNA, 25 bp, Artificial
  probe
  misc_feature (1)..(25): SEQ ID NO: 3455; WAN024DYQ_at; Start 42; Stop 66
tgcctctgccaagctgactcgtcac

SEQ ID NO: 176569 - DNA, 25 bp, Artificial
  probe
  misc_feature (1)..(25): SEQ ID NO: 3455; WAN024DYQ_at; Start 55; Stop 79
ctgactcgtcaccgtgacttggcca

SEQ ID NO: 176570 - DNA, 25 bp, Artificial
  probe
  misc_feature (1)..(25): SEQ ID NO: 3455; WAN024DYQ_at; Start 31; Stop 55
cgtgaagcaactgcctctgccaagc

SEQ ID NO: 176571 - DNA, 25 bp, Artificial
  probe
  misc_feature (1)..(25): SEQ ID NO: 3455; WAN024DYQ_at; Start 24; Stop 48
gaaaaatcgtgaagcaactgcctct

SEQ ID NO: 176572 - DNA, 25 bp, Artificial
  probe
  misc_feature (1)..(25): SEQ ID NO: 3455; WAN024DYQ_at; Start 26; Stop 50
aaaatcgtgaagcaactgcctctgc

SEQ ID NO: 176573 - DNA, 25 bp, Artificial
  probe
  misc_feature (1)..(25): SEQ ID NO: 3455; WAN024DYQ_at; Start 49; Stop 73
gccaagctgactcgtcaccgtgact

SEQ ID NO: 176574 - DNA, 25 bp, Artificial
  probe
  misc_feature (1)..(25): SEQ ID NO: 3455; WAN024DYQ_at; Start 28; Stop 52
aatcgtgaagcaactgcctctgcca

SEQ ID NO: 176575 - DNA, 25 bp, Artificial
  probe
  misc_feature (1)..(25): SEQ ID NO: 3455; WAN024DYQ_at; Start 51; Stop 75
caagctgactcgtcaccgtgacttg

SEQ ID NO: 176576 - DNA, 25 bp, Artificial
  probe
  misc_feature (1)..(25): SEQ ID NO: 3455; WAN024DYQ_at; Start 48; Stop 72
tgccaagctgactcgtcaccgtgac

SEQ ID NO: 176577 - DNA, 25 bp, Artificial
  probe
  misc_feature (1)..(25): SEQ ID NO: 3455; WAN024DYQ_at; Start 40; Stop 64
actgcctctgccaagctgactcgtc

SEQ ID NO: 176578 - DNA, 25 bp, Artificial
  probe
  misc_feature (1)..(25): SEQ ID NO: 3455; WAN024DYQ_at; Start 53; Stop 77
agctgactcgtcaccgtgacttggc

SEQ ID NO: 176579 - DNA, 25 bp, Artificial
  probe
  misc_feature (1)..(25): SEQ ID NO: 3455; WAN024DYQ_at; Start 29; Stop 53
atcgtgaagcaactgcctctgccaa

SEQ ID NO: 176580 - DNA, 25 bp, Artificial
  probe
  misc_feature (1)..(25): SEQ ID NO: 3455; WAN024DYQ_at; Start 4; Stop 28
tgcgaaagattggttaggaagaaaa

SEQ ID NO: 176581 - DNA, 25 bp, Artificial
  probe
  misc_feature (1)..(25): SEQ ID NO: 3455; WAN024DYQ_at; Start 57; Stop 81
gactcgtcaccgtgacttggccacc

SEQ ID NO: 176582 - DNA, 25 bp, Artificial
  probe
  misc_feature (1)..(25): SEQ ID NO: 3455; WAN024DYQ_at; Start 27; Stop 51
aaatcgtgaagcaactgcctctgcc

SEQ ID NO: 176583 - DNA, 25 bp, Artificial
  probe
  misc_feature (1)..(25): SEQ ID NO: 3455; WAN024DYQ_at; Start 39; Stop 63
aactgcctctgccaagctgactcgt

SEQ ID NO: 176584 - DNA, 25 bp, Artificial
  probe
  misc_feature (1)..(25): SEQ ID NO: 3455; WAN024DYQ_at; Start 37; Stop 61
gcaactgcctctgccaagctgactc

SEQ ID NO: 176585 - DNA, 25 bp, Artificial
  probe
  misc_feature (1)..(25): SEQ ID NO: 3455; WAN024DYQ_at; Start 52; Stop 76
aagctgactcgtcaccgtgacttgg

SEQ ID NO: 176586 - DNA, 25 bp, Artificial
  probe
  misc_feature (1)..(25): SEQ ID NO: 3455; WAN024DYQ_at; Start 54; Stop 78
gctgactcgtcaccgtgacttggcc

SEQ ID NO: 176587 - DNA, 25 bp, Artificial
  probe
  misc_feature (1)..(25): SEQ ID NO: 3455; WAN024DYQ_at; Start 46; Stop 70
tctgccaagctgactcgtcaccgtg

SEQ ID NO: 176588 - DNA, 25 bp, Artificial
  probe
  misc_feature (1)..(25): SEQ ID NO: 3455; WAN024DYQ_at; Start 35; Stop 59
aagcaactgcctctgccaagctgac

SEQ ID NO: 176589 - DNA, 25 bp, Artificial
  probe
  misc_feature (1)..(25): SEQ ID NO: 3455; WAN024DYQ_at; Start 43; Stop 67
gcctctgccaagctgactcgtcacc

SEQ ID NO: 176590 - DNA, 25 bp, Artificial
  probe
  misc_feature (1)..(25): SEQ ID NO: 3455; WAN024DYQ_at; Start 56; Stop 80
tgactcgtcaccgtgacttggccac

SEQ ID NO: 176591 - DNA, 25 bp, Artificial
  probe
  misc_feature (1)..(25): SEQ ID NO: 3455; WAN024DYQ_at; Start 25; Stop 49
aaaaatcgtgaagcaactgcctctg

SEQ ID NO: 176592 - DNA, 25 bp, Artificial
  probe
  misc_feature (1)..(25): SEQ ID NO: 3455; WAN024DYQ_at; Start 41; Stop 65
ctgcctctgccaagctgactcgtca

SEQ ID NO: 176593 - DNA, 25 bp, Artificial
  probe
  misc_feature (1)..(25): SEQ ID NO: 3455; WAN024DYQ_at; Start 10; Stop 34
agattggttaggaagaaaaatcgtg

SEQ ID NO: 176594 - DNA, 25 bp, Artificial
  probe
  misc_feature (1)..(25): SEQ ID NO: 5858; WAN024DYR_at; Start 164; Stop 188
tttccaaaggcaaaagagccagtag

SEQ ID NO: 176595 - DNA, 25 bp, Artificial
  probe
  misc_feature (1)..(25): SEQ ID NO: 5858; WAN024DYR_at; Start 16; Stop 40
ccttgtattgctgatcctgttggga

SEQ ID NO: 176596 - DNA, 25 bp, Artificial
  probe
  misc_feature (1)..(25): SEQ ID NO: 5858; WAN024DYR_at; Start 27; Stop 51
tgatcctgttgggagactttggttt

SEQ ID NO: 176597 - DNA, 25 bp, Artificial
  probe
  misc_feature (1)..(25): SEQ ID NO: 5858; WAN024DYR_at; Start 153; Stop 177
gcaacttcccatttccaaaggcaaa

SEQ ID NO: 176598 - DNA, 25 bp, Artificial
  probe
  misc_feature (1)..(25): SEQ ID NO: 5858; WAN024DYR_at; Start 21; Stop 45
tattgctgatcctgttgggagactt

SEQ ID NO: 176599 - DNA, 25 bp, Artificial
  probe
  misc_feature (1)..(25): SEQ ID NO: 5858; WAN024DYR_at; Start 207; Stop 231
agggctagaagaaagagaccgatgc

SEQ ID NO: 176600 - DNA, 25 bp, Artificial
  probe
  misc_feature (1)..(25): SEQ ID NO: 5858; WAN024DYR_at; Start 135; Stop 159
tggtgcaaggtctcaaaagcaactt

SEQ ID NO: 176601 - DNA, 25 bp, Artificial
  probe
  misc_feature (1)..(25): SEQ ID NO: 5858; WAN024DYR_at; Start 162; Stop 186
catttccaaaggcaaaagagccagt

SEQ ID NO: 176602 - DNA, 25 bp, Artificial
  probe
  misc_feature (1)..(25): SEQ ID NO: 5858; WAN024DYR_at; Start 111; Stop 135
tattcactactggtcaagagaggtt

SEQ ID NO: 176603 - DNA, 25 bp, Artificial
  probe
  misc_feature (1)..(25): SEQ ID NO: 5858; WAN024DYR_at; Start 166; Stop 190
tccaaaggcaaaagagccagtagcc

SEQ ID NO: 176604 - DNA, 25 bp, Artificial
  probe
  misc_feature (1)..(25): SEQ ID NO: 5858; WAN024DYR_at; Start 216; Stop 240
agaaagagaccgatgcctttactga

SEQ ID NO: 176605 - DNA, 25 bp, Artificial
  probe
  misc_feature (1)..(25): SEQ ID NO: 5858; WAN024DYR_at; Start 140; Stop 164
caaggtctcaaaagcaacttcccat

SEQ ID NO: 176606 - DNA, 25 bp, Artificial
  probe
  misc_feature (1)..(25): SEQ ID NO: 5858; WAN024DYR_at; Start 169; Stop 193
aaaggcaaaagagccagtagccacc

SEQ ID NO: 176607 - DNA, 25 bp, Artificial
  probe
  misc_feature (1)..(25): SEQ ID NO: 5858; WAN024DYR_at; Start 106; Stop 130
aaaagtattcactactggtcaagag

SEQ ID NO: 176608 - DNA, 25 bp, Artificial
  probe
  misc_feature (1)..(25): SEQ ID NO: 5858; WAN024DYR_at; Start 151; Stop 175
aagcaacttcccatttccaaaggca

SEQ ID NO: 176609 - DNA, 25 bp, Artificial
  probe
  misc_feature (1)..(25): SEQ ID NO: 5858; WAN024DYR_at; Start 200; Stop 224
caaagaaagggctagaagaaagaga

SEQ ID NO: 176610 - DNA, 25 bp, Artificial
  probe
  misc_feature (1)..(25): SEQ ID NO: 5858; WAN024DYR_at; Start 62; Stop 86
cacatactgagccaaagactttaag

SEQ ID NO: 176611 - DNA, 25 bp, Artificial
  probe
  misc_feature (1)..(25): SEQ ID NO: 5858; WAN024DYR_at; Start 212; Stop 236
tagaagaaagagaccgatgccttta

SEQ ID NO: 176612 - DNA, 25 bp, Artificial
  probe
  misc_feature (1)..(25): SEQ ID NO: 5858; WAN024DYR_at; Start 130; Stop 154
gaggttggtgcaaggtctcaaaagc

SEQ ID NO: 176613 - DNA, 25 bp, Artificial
  probe
  misc_feature (1)..(25): SEQ ID NO: 5858; WAN024DYR_at; Start 138; Stop 162
tgcaaggtctcaaaagcaacttccc

SEQ ID NO: 176614 - DNA, 25 bp, Artificial
  probe
  misc_feature (1)..(25): SEQ ID NO: 5858; WAN024DYR_at; Start 64; Stop 88
catactgagccaaagactttaagtc

SEQ ID NO: 176615 - DNA, 25 bp, Artificial
  probe
  misc_feature (1)..(25): SEQ ID NO: 5858; WAN024DYR_at; Start 24; Stop 48
tgctgatcctgttgggagactttgg

SEQ ID NO: 176616 - DNA, 25 bp, Artificial
  probe
  misc_feature (1)..(25): SEQ ID NO: 5858; WAN024DYR_at; Start 159; Stop 183
tcccatttccaaaggcaaaagagcc

SEQ ID NO: 176617 - DNA, 25 bp, Artificial
  probe
  misc_feature (1)..(25): SEQ ID NO: 5858; WAN024DYR_at; Start 74; Stop 98
caaagactttaagtcttcttgccct

SEQ ID NO: 176618 - DNA, 25 bp, Artificial
  probe
  misc_feature (1)..(25): SEQ ID NO: 5858; WAN024DYR_at; Start 204; Stop 228
gaaagggctagaagaaagagaccga

SEQ ID NO: 176619 - DNA, 25 bp, Artificial
  probe
  misc_feature (1)..(25): SEQ ID NO: 5858; WAN024DYR_at; Start 143; Stop 167
ggtctcaaaagcaacttcccatttc

SEQ ID NO: 176620 - DNA, 25 bp, Artificial
  probe
  misc_feature (1)..(25): SEQ ID NO: 5858; WAN024DYR_at; Start 109; Stop 133
agtattcactactggtcaagagagg

SEQ ID NO: 176621 - DNA, 25 bp, Artificial
  probe
  misc_feature (1)..(25): SEQ ID NO: 5858; WAN024DYR_at; Start 210; Stop 234
gctagaagaaagagaccgatgcctt

SEQ ID NO: 176622 - DNA, 25 bp, Artificial
  probe
  misc_feature (1)..(25): SEQ ID NO: 5858; WAN024DYR_at; Start 58; Stop 82
cagacacatactgagccaaagactt

SEQ ID NO: 176623 - DNA, 25 bp, Artificial
  probe
  misc_feature (1)..(25): SEQ ID NO: 5858; WAN024DYR_at; Start 117; Stop 141
ctactggtcaagagaggttggtgca

SEQ ID NO: 176624 - DNA, 25 bp, Artificial
  probe
  misc_feature (1)..(25): SEQ ID NO: 5858; WAN024DYR_at; Start 19; Stop 43
tgtattgctgatcctgttgggagac

SEQ ID NO: 176625 - DNA, 25 bp, Artificial
  probe
  misc_feature (1)..(25): SEQ ID NO: 5858; WAN024DYR_at; Start 101; Stop 125
ttctaaaaagtattcactactggtc

SEQ ID NO: 176626 - DNA, 25 bp, Artificial
  probe
  misc_feature (1)..(25): SEQ ID NO: 5858; WAN024DYR_at; Start 114; Stop 138
tcactactggtcaagagaggttggt

SEQ ID NO: 176627 - DNA, 25 bp, Artificial
  probe
  misc_feature (1)..(25): SEQ ID NO: 5858; WAN024DYR_at; Start 125; Stop 149
caagagaggttggtgcaaggtctca

SEQ ID NO: 176628 - DNA, 25 bp, Artificial
  probe
  misc_feature (1)..(25): SEQ ID NO: 5769; WAN024DYS_at; Start 32; Stop 56
aaaaatggctgctcctaaaaatagc

SEQ ID NO: 176629 - DNA, 25 bp, Artificial
  probe
  misc_feature (1)..(25): SEQ ID NO: 5769; WAN024DYS_at; Start 33; Stop 57
aaaatggctgctcctaaaaatagct

SEQ ID NO: 176630 - DNA, 25 bp, Artificial
  probe
  misc_feature (1)..(25): SEQ ID NO: 5769; WAN024DYS_at; Start 64; Stop 88
attattagtcctgtgcgaaagattg

SEQ ID NO: 176631 - DNA, 25 bp, Artificial
  probe
  misc_feature (1)..(25): SEQ ID NO: 5769; WAN024DYS_at; Start 39; Stop 63
gctgctcctaaaaatagctttaaaa

SEQ ID NO: 176632 - DNA, 25 bp, Artificial
  probe
  misc_feature (1)..(25): SEQ ID NO: 5769; WAN024DYS_at; Start 26; Stop 50
cttttgaaaaatggctgctcctaaa

SEQ ID NO: 176633 - DNA, 25 bp, Artificial
  probe
  misc_feature (1)..(25): SEQ ID NO: 5769; WAN024DYS_at; Start 24; Stop 48
cacttttgaaaaatggctgctccta

SEQ ID NO: 176634 - DNA, 25 bp, Artificial
  probe
  misc_feature (1)..(25): SEQ ID NO: 5769; WAN024DYS_at; Start 35; Stop 59
aatggctgctcctaaaaatagcttt

SEQ ID NO: 176635 - DNA, 25 bp, Artificial
  probe
  misc_feature (1)..(25): SEQ ID NO: 5769; WAN024DYS_at; Start 34; Stop 58
aaatggctgctcctaaaaatagctt

SEQ ID NO: 176636 - DNA, 25 bp, Artificial
  probe
  misc_feature (1)..(25): SEQ ID NO: 5769; WAN024DYS_at; Start 63; Stop 87
aattattagtcctgtgcgaaagatt

SEQ ID NO: 176637 - DNA, 25 bp, Artificial
  probe
  misc_feature (1)..(25): SEQ ID NO: 5769; WAN024DYS_at; Start 57; Stop 81
tttaaaaattattagtcctgtgcga

SEQ ID NO: 176638 - DNA, 25 bp, Artificial
  probe
  misc_feature (1)..(25): SEQ ID NO: 5769; WAN024DYS_at; Start 60; Stop 84
aaaaattattagtcctgtgcgaaag

SEQ ID NO: 176639 - DNA, 25 bp, Artificial
  probe
  misc_feature (1)..(25): SEQ ID NO: 5769; WAN024DYS_at; Start 58; Stop 82
ttaaaaattattagtcctgtgcgaa

SEQ ID NO: 176640 - DNA, 25 bp, Artificial
  probe
  misc_feature (1)..(25): SEQ ID NO: 5769; WAN024DYS_at; Start 36; Stop 60
atggctgctcctaaaaatagcttta

SEQ ID NO: 176641 - DNA, 25 bp, Artificial
  probe
  misc_feature (1)..(25): SEQ ID NO: 5769; WAN024DYS_at; Start 22; Stop 46
gccacttttgaaaaatggctgctcc

SEQ ID NO: 176642 - DNA, 25 bp, Artificial
  probe
  misc_feature (1)..(25): SEQ ID NO: 5769; WAN024DYS_at; Start 31; Stop 55
gaaaaatggctgctcctaaaaatag

SEQ ID NO: 176643 - DNA, 25 bp, Artificial
  probe
  misc_feature (1)..(25): SEQ ID NO: 5769; WAN024DYS_at; Start 56; Stop 80
ctttaaaaattattagtcctgtgcg

SEQ ID NO: 176644 - DNA, 25 bp, Artificial
  probe
  misc_feature (1)..(25): SEQ ID NO: 5769; WAN024DYS_at; Start 20; Stop 44
aagccacttttgaaaaatggctgct

SEQ ID NO: 176645 - DNA, 25 bp, Artificial
  probe
  misc_feature (1)..(25): SEQ ID NO: 5769; WAN024DYS_at; Start 61; Stop 85
aaaattattagtcctgtgcgaaaga

SEQ ID NO: 176646 - DNA, 25 bp, Artificial
  probe
  misc_feature (1)..(25): SEQ ID NO: 5769; WAN024DYS_at; Start 38; Stop 62
ggctgctcctaaaaatagctttaaa

SEQ ID NO: 176647 - DNA, 25 bp, Artificial
  probe
  misc_feature (1)..(25): SEQ ID NO: 5769; WAN024DYS_at; Start 21; Stop 45
agccacttttgaaaaatggctgctc

SEQ ID NO: 176648 - DNA, 25 bp, Artificial
  probe
  misc_feature (1)..(25): SEQ ID NO: 5769; WAN024DYS_at; Start 37; Stop 61
tggctgctcctaaaaatagctttaa

SEQ ID NO: 176649 - DNA, 25 bp, Artificial
  probe
  misc_feature (1)..(25): SEQ ID NO: 5769; WAN024DYS_at; Start 62; Stop 86
aaattattagtcctgtgcgaaagat

SEQ ID NO: 176650 - DNA, 25 bp, Artificial
  probe
  misc_feature (1)..(25): SEQ ID NO: 5769; WAN024DYS_at; Start 30; Stop 54
tgaaaaatggctgctcctaaaaata

SEQ ID NO: 176651 - DNA, 25 bp, Artificial
  probe
  misc_feature (1)..(25): SEQ ID NO: 5769; WAN024DYS_at; Start 23; Stop 47
ccacttttgaaaaatggctgctcct

SEQ ID NO: 176652 - DNA, 25 bp, Artificial
  probe
  misc_feature (1)..(25): SEQ ID NO: 5769; WAN024DYS_at; Start 25; Stop 49
acttttgaaaaatggctgctcctaa

SEQ ID NO: 176653 - DNA, 25 bp, Artificial
  probe
  misc_feature (1)..(25): SEQ ID NO: 5769; WAN024DYS_at; Start 19; Stop 43
aaagccacttttgaaaaatggctgc

SEQ ID NO: 176654 - DNA, 25 bp, Artificial
  probe
  misc_feature (1)..(25): SEQ ID NO: 5769; WAN024DYS_at; Start 27; Stop 51
ttttgaaaaatggctgctcctaaaa

SEQ ID NO: 176655 - DNA, 25 bp, Artificial
  probe
  misc_feature (1)..(25): SEQ ID NO: 5769; WAN024DYS_at; Start 18; Stop 42
aaaagccacttttgaaaaatggctg

SEQ ID NO: 176656 - DNA, 25 bp, Artificial
  probe
  misc_feature (1)..(25): SEQ ID NO: 5769; WAN024DYS_at; Start 59; Stop 83
taaaaattattagtcctgtgcgaaa

SEQ ID NO: 176657 - DNA, 25 bp, Artificial
  probe
  misc_feature (1)..(25): SEQ ID NO: 5769; WAN024DYS_at; Start 29; Stop 53
ttgaaaaatggctgctcctaaaaat

SEQ ID NO: 176658 - DNA, 25 bp, Artificial
  probe
  misc_feature (1)..(25): SEQ ID NO: 5769; WAN024DYS_at; Start 28; Stop 52
tttgaaaaatggctgctcctaaaaa

SEQ ID NO: 176659 - DNA, 25 bp, Artificial
  probe
  misc_feature (1)..(25): SEQ ID NO: 845; WAN024DYT_at; Start 307; Stop 331
ctagccgaaacaatggaggttcttc

SEQ ID NO: 176660 - DNA, 25 bp, Artificial
  probe
  misc_feature (1)..(25): SEQ ID NO: 845; WAN024DYT_at; Start 1026; Stop 1050
tgccatccgttacactgaacaaggg

SEQ ID NO: 176661 - DNA, 25 bp, Artificial
  probe
  misc_feature (1)..(25): SEQ ID NO: 845; WAN024DYT_at; Start 938; Stop 962
tacagctaaaggtgcaggtgccaga

SEQ ID NO: 176662 - DNA, 25 bp, Artificial
  probe
  misc_feature (1)..(25): SEQ ID NO: 845; WAN024DYT_at; Start 406; Stop 430
cattattttcccgatgtggacggcg

SEQ ID NO: 176663 - DNA, 25 bp, Artificial
  probe
  misc_feature (1)..(25): SEQ ID NO: 845; WAN024DYT_at; Start 378; Stop 402
gatgttattatccagtcgctctctg

SEQ ID NO: 176664 - DNA, 25 bp, Artificial
  probe
  misc_feature (1)..(25): SEQ ID NO: 845; WAN024DYT_at; Start 751; Stop 775
gaagcgctcaaggatgactttctag

SEQ ID NO: 176665 - DNA, 25 bp, Artificial
  probe
  misc_feature (1)..(25): SEQ ID NO: 845; WAN024DYT_at; Start 735; Stop 759
gatgtcagctgaagaagaagcgctc

SEQ ID NO: 176666 - DNA, 25 bp, Artificial
  probe
  misc_feature (1)..(25): SEQ ID NO: 845; WAN024DYT_at; Start 86; Stop 110
aaggcatcggtctctttcttctagc

SEQ ID NO: 176667 - DNA, 25 bp, Artificial
  probe
  misc_feature (1)..(25): SEQ ID NO: 845; WAN024DYT_at; Start 359; Stop 383
tagtttccgctcaaggtcagatgtt

SEQ ID NO: 176668 - DNA, 25 bp, Artificial
  probe
  misc_feature (1)..(25): SEQ ID NO: 845; WAN024DYT_at; Start 584; Stop 608
cccaatctgtggaagctgtgctcgt

SEQ ID NO: 176669 - DNA, 25 bp, Artificial
  probe
  misc_feature (1)..(25): SEQ ID NO: 845; WAN024DYT_at; Start 1122; Stop 1146
tattagtcaattagagcaggatcgt

SEQ ID NO: 176670 - DNA, 25 bp, Artificial
  probe
  misc_feature (1)..(25): SEQ ID NO: 845; WAN024DYT_at; Start 422; Stop 446
tggacggcgacataagttcacttga

SEQ ID NO: 176671 - DNA, 25 bp, Artificial
  probe
  misc_feature (1)..(25): SEQ ID NO: 845; WAN024DYT_at; Start 160; Stop 184
gaagttgcttttgagaccttgcacc

SEQ ID NO: 176672 - DNA, 25 bp, Artificial
  probe
  misc_feature (1)..(25): SEQ ID NO: 845; WAN024DYT_at; Start 45; Stop 69
cctcattctgattgcagggatggca

SEQ ID NO: 176673 - DNA, 25 bp, Artificial
  probe
  misc_feature (1)..(25): SEQ ID NO: 845; WAN024DYT_at; Start 897; Stop 921
tttgactcaaagcttgcaacctcag

SEQ ID NO: 176674 - DNA, 25 bp, Artificial
  probe
  misc_feature (1)..(25): SEQ ID NO: 845; WAN024DYT_at; Start 273; Stop 297
caaagtctcccaacaggatcagcaa

SEQ ID NO: 176675 - DNA, 25 bp, Artificial
  probe
  misc_feature (1)..(25): SEQ ID NO: 845; WAN024DYT_at; Start 440; Stop 464
cacttgatgacctcaaacggatgga

SEQ ID NO: 176676 - DNA, 25 bp, Artificial
  probe
  misc_feature (1)..(25): SEQ ID NO: 845; WAN024DYT_at; Start 918; Stop 942
tcagctcaagaagaaggatttacag

SEQ ID NO: 176677 - DNA, 25 bp, Artificial
  probe
  misc_feature (1)..(25): SEQ ID NO: 845; WAN024DYT_at; Start 138; Stop 162
gctcttttgcctttggaaatgggaa

SEQ ID NO: 176678 - DNA, 25 bp, Artificial
  probe
  misc_feature (1)..(25): SEQ ID NO: 845; WAN024DYT_at; Start 71; Stop 95
taacttggatcagtaaaggcatcgg

SEQ ID NO: 176679 - DNA, 25 bp, Artificial
  probe
  misc_feature (1)..(25): SEQ ID NO: 845; WAN024DYT_at; Start 1308; Stop 1332
taaccaatctttcgcacaggactaa

SEQ ID NO: 176680 - DNA, 25 bp, Artificial
  probe
  misc_feature (1)..(25): SEQ ID NO: 845; WAN024DYT_at; Start 1241; Stop 1265
tattaggtggccaagtcacggtgac

SEQ ID NO: 176681 - DNA, 25 bp, Artificial
  probe
  misc_feature (1)..(25): SEQ ID NO: 845; WAN024DYT_at; Start 1164; Stop 1188
ccgagttaataaaggtcgaagcaga

SEQ ID NO: 176682 - DNA, 25 bp, Artificial
  probe
  misc_feature (1)..(25): SEQ ID NO: 845; WAN024DYT_at; Start 1179; Stop 1203
tcgaagcagacaaactggtggcact

SEQ ID NO: 176683 - DNA, 25 bp, Artificial
  probe
  misc_feature (1)..(25): SEQ ID NO: 845; WAN024DYT_at; Start 857; Stop 881
tacaatggacgaccctttctttggc

SEQ ID NO: 176684 - DNA, 25 bp, Artificial
  probe
  misc_feature (1)..(25): SEQ ID NO: 845; WAN024DYT_at; Start 1211; Stop 1235
gccttgccattgtcaaagaactcag

SEQ ID NO: 176685 - DNA, 25 bp, Artificial
  probe
  misc_feature (1)..(25): SEQ ID NO: 845; WAN024DYT_at; Start 236; Stop 260
taaagtctttggctcagtatgtgtc

SEQ ID NO: 176686 - DNA, 25 bp, Artificial
  probe
  misc_feature (1)..(25): SEQ ID NO: 845; WAN024DYT_at; Start 964; Stop 988
gatgtcaccctcgtatcagatagtc

SEQ ID NO: 176687 - DNA, 25 bp, Artificial
  probe
  misc_feature (1)..(25): SEQ ID NO: 845; WAN024DYT_at; Start 546; Stop 570
gattttagaagtgacagcagttccc

SEQ ID NO: 176688 - DNA, 25 bp, Artificial
  probe
  misc_feature (1)..(25): SEQ ID NO: 845; WAN024DYT_at; Start 677; Stop 701
cccatgaattgaggacaccagttac

SEQ ID NO: 176689 - DNA, 25 bp, Artificial
  probe
  misc_feature (1)..(25): SEQ ID NO: 845; WAN024DYT_at; Start 184; Stop 208
caacctctcttgaccagtagtgaat

SEQ ID NO: 176690 - DNA, 25 bp, Artificial
  probe
  misc_feature (1)..(25): SEQ ID NO: 845; WAN024DYT_at; Start 1071; Stop 1095
ccaaaaggtgaacgaaggcattaag

SEQ ID NO: 176691 - DNA, 25 bp, Artificial
  probe
  misc_feature (1)..(25): SEQ ID NO: 845; WAN024DYT_at; Start 3; Stop 27
gaaacgctaccttcaattttggcta

SEQ ID NO: 176692 - DNA, 25 bp, Artificial
  probe
  misc_feature (1)..(25): SEQ ID NO: 845; WAN024DYT_at; Start 1269; Stop 1293
tcagcttggcagaggcagttgcttc

SEQ ID NO: 176693 - DNA, 25 bp, Artificial
  probe
  misc_feature (1)..(25): SEQ ID NO: 5326; WAN024DYU_at; Start 154; Stop 178
ttcgtcgccccattttttgtaggca

SEQ ID NO: 176694 - DNA, 25 bp, Artificial
  probe
  misc_feature (1)..(25): SEQ ID NO: 5326; WAN024DYU_at; Start 106; Stop 130
gacatagagtttaaggagttcatcg

SEQ ID NO: 176695 - DNA, 25 bp, Artificial
  probe
  misc_feature (1)..(25): SEQ ID NO: 5326; WAN024DYU_at; Start 81; Stop 105
cattttcagcttcagcgttgatgcg

SEQ ID NO: 176696 - DNA, 25 bp, Artificial
  probe
  misc_feature (1)..(25): SEQ ID NO: 5326; WAN024DYU_at; Start 112; Stop 136
gagtttaaggagttcatcgattgga

SEQ ID NO: 176697 - DNA, 25 bp, Artificial
  probe
  misc_feature (1)..(25): SEQ ID NO: 5326; WAN024DYU_at; Start 59; Stop 83
gcttcttcatccaagctagggtcat

SEQ ID NO: 176698 - DNA, 25 bp, Artificial
  probe
  misc_feature (1)..(25): SEQ ID NO: 5326; WAN024DYU_at; Start 117; Stop 141
taaggagttcatcgattggatgagc

SEQ ID NO: 176699 - DNA, 25 bp, Artificial
  probe
  misc_feature (1)..(25): SEQ ID NO: 5326; WAN024DYU_at; Start 9; Stop 33
gagcgagagcttcctcatctccatt

SEQ ID NO: 176700 - DNA, 25 bp, Artificial
  probe
  misc_feature (1)..(25): SEQ ID NO: 5326; WAN024DYU_at; Start 41; Stop 65
ttacggaaccattcgcgcgcttctt

SEQ ID NO: 176701 - DNA, 25 bp, Artificial
  probe
  misc_feature (1)..(25): SEQ ID NO: 5326; WAN024DYU_at; Start 195; Stop 219
attgtttaccccagtctcccaaatg

SEQ ID NO: 176702 - DNA, 25 bp, Artificial
  probe
  misc_feature (1)..(25): SEQ ID NO: 5326; WAN024DYU_at; Start 86; Stop 110
tcagcttcagcgttgatgcggacat

SEQ ID NO: 176703 - DNA, 25 bp, Artificial
  probe
  misc_feature (1)..(25): SEQ ID NO: 5326; WAN024DYU_at; Start 1; Stop 25
ttgccaaagagcgagagcttcctca

SEQ ID NO: 176704 - DNA, 25 bp, Artificial
  probe
  misc_feature (1)..(25): SEQ ID NO: 5326; WAN024DYU_at; Start 102; Stop 126
tgcggacatagagtttaaggagttc

SEQ ID NO: 176705 - DNA, 25 bp, Artificial
  probe
  misc_feature (1)..(25): SEQ ID NO: 5326; WAN024DYU_at; Start 214; Stop 238
caaatggttgaccttgaccgtttga

SEQ ID NO: 176706 - DNA, 25 bp, Artificial
  probe
  misc_feature (1)..(25): SEQ ID NO: 5326; WAN024DYU_at; Start 65; Stop 89
tcatccaagctagggtcattttcag

SEQ ID NO: 176707 - DNA, 25 bp, Artificial
  probe
  misc_feature (1)..(25): SEQ ID NO: 5326; WAN024DYU_at; Start 74; Stop 98
ctagggtcattttcagcttcagcgt

SEQ ID NO: 176708 - DNA, 25 bp, Artificial
  probe
  misc_feature (1)..(25): SEQ ID NO: 5326; WAN024DYU_at; Start 173; Stop 197
taggcaacaatcaacatcccaaatt

SEQ ID NO: 176709 - DNA, 25 bp, Artificial
  probe
  misc_feature (1)..(25): SEQ ID NO: 5326; WAN024DYU_at; Start 158; Stop 182
tcgccccattttttgtaggcaacaa

SEQ ID NO: 176710 - DNA, 25 bp, Artificial
  probe
  misc_feature (1)..(25): SEQ ID NO: 5326; WAN024DYU_at; Start 55; Stop 79
gcgcgcttcttcatccaagctaggg

SEQ ID NO: 176711 - DNA, 25 bp, Artificial
  probe
  misc_feature (1)..(25): SEQ ID NO: 5326; WAN024DYU_at; Start 15; Stop 39
gagcttcctcatctccattttcaag

SEQ ID NO: 176712 - DNA, 25 bp, Artificial
  probe
  misc_feature (1)..(25): SEQ ID NO: 5326; WAN024DYU_at; Start 187; Stop 211
catcccaaattgtttaccccagtct

SEQ ID NO: 176713 - DNA, 25 bp, Artificial
  probe
  misc_feature (1)..(25): SEQ ID NO: 5326; WAN024DYU_at; Start 168; Stop 192
ttttgtaggcaacaatcaacatccc

SEQ ID NO: 176714 - DNA, 25 bp, Artificial
  probe
  misc_feature (1)..(25): SEQ ID NO: 5326; WAN024DYU_at; Start 222; Stop 246
tgaccttgaccgtttgataaccgat

SEQ ID NO: 176715 - DNA, 25 bp, Artificial
  probe
  misc_feature (1)..(25): SEQ ID NO: 5326; WAN024DYU_at; Start 5; Stop 29
caaagagcgagagcttcctcatctc

SEQ ID NO: 176716 - DNA, 25 bp, Artificial
  probe
  misc_feature (1)..(25): SEQ ID NO: 5326; WAN024DYU_at; Start 206; Stop 230
cagtctcccaaatggttgaccttga

SEQ ID NO: 176717 - DNA, 25 bp, Artificial
  probe
  misc_feature (1)..(25): SEQ ID NO: 5326; WAN024DYU_at; Start 137; Stop 161
tgagcttttacagcttcttcgtcgc

SEQ ID NO: 176718 - DNA, 25 bp, Artificial
  probe
  misc_feature (1)..(25): SEQ ID NO: 5326; WAN024DYU_at; Start 23; Stop 47
tcatctccattttcaagtttacgga

SEQ ID NO: 176719 - DNA, 25 bp, Artificial
  probe
  misc_feature (1)..(25): SEQ ID NO: 5326; WAN024DYU_at; Start 89; Stop 113
gcttcagcgttgatgcggacataga

SEQ ID NO: 176720 - DNA, 25 bp, Artificial
  probe
  misc_feature (1)..(25): SEQ ID NO: 5326; WAN024DYU_at; Start 142; Stop 166
ttttacagcttcttcgtcgccccat

SEQ ID NO: 176721 - DNA, 25 bp, Artificial
  probe
  misc_feature (1)..(25): SEQ ID NO: 5326; WAN024DYU_at; Start 35; Stop 59
tcaagtttacggaaccattcgcgcg

SEQ ID NO: 176722 - DNA, 25 bp, Artificial
  probe
  misc_feature (1)..(25): SEQ ID NO: 5326; WAN024DYU_at; Start 209; Stop 233
tctcccaaatggttgaccttgaccg

SEQ ID NO: 176723 - DNA, 25 bp, Artificial
  probe
  misc_feature (1)..(25): SEQ ID NO: 5326; WAN024DYU_at; Start 200; Stop 224
ttaccccagtctcccaaatggttga

SEQ ID NO: 176724 - DNA, 25 bp, Artificial
  probe
  misc_feature (1)..(25): SEQ ID NO: 5326; WAN024DYU_at; Start 126; Stop 150
catcgattggatgagcttttacagc

SEQ ID NO: 176725 - DNA, 25 bp, Artificial
  probe
  misc_feature (1)..(25): SEQ ID NO: 5326; WAN024DYU_at; Start 37; Stop 61
aagtttacggaaccattcgcgcgct

SEQ ID NO: 176726 - DNA, 25 bp, Artificial
  probe
  misc_feature (1)..(25): SEQ ID NO: 5326; WAN024DYU_at; Start 95; Stop 119
gcgttgatgcggacatagagtttaa

SEQ ID NO: 176727 - DNA, 25 bp, Artificial
  probe
  misc_feature (1)..(25): SEQ ID NO: 5870; WAN024DYV_at; Start 104; Stop 128
ggtcctgttgcgacaactttttcaa

SEQ ID NO: 176728 - DNA, 25 bp, Artificial
  probe
  misc_feature (1)..(25): SEQ ID NO: 5870; WAN024DYV_at; Start 51; Stop 75
cttgcaatacttgagcagaaatggc

SEQ ID NO: 176729 - DNA, 25 bp, Artificial
  probe
  misc_feature (1)..(25): SEQ ID NO: 5870; WAN024DYV_at; Start 109; Stop 133
tgttgcgacaactttttcaaaggct

SEQ ID NO: 176730 - DNA, 25 bp, Artificial
  probe
  misc_feature (1)..(25): SEQ ID NO: 5870; WAN024DYV_at; Start 20; Stop 44
tcagcatagtgttctttttcagtgg

SEQ ID NO: 176731 - DNA, 25 bp, Artificial
  probe
  misc_feature (1)..(25): SEQ ID NO: 5870; WAN024DYV_at; Start 38; Stop 62
tcagtggtaacagcttgcaatactt

SEQ ID NO: 176732 - DNA, 25 bp, Artificial
  probe
  misc_feature (1)..(25): SEQ ID NO: 5870; WAN024DYV_at; Start 142; Stop 166
cattttttcagccagttcagccgca

SEQ ID NO: 176733 - DNA, 25 bp, Artificial
  probe
  misc_feature (1)..(25): SEQ ID NO: 5870; WAN024DYV_at; Start 73; Stop 97
ggcagatttatcaaggaaaaagtta

SEQ ID NO: 176734 - DNA, 25 bp, Artificial
  probe
  misc_feature (1)..(25): SEQ ID NO: 5870; WAN024DYV_at; Start 213; Stop 237
ggaaagcaatgtctcccatttctga

SEQ ID NO: 176735 - DNA, 25 bp, Artificial
  probe
  misc_feature (1)..(25): SEQ ID NO: 5870; WAN024DYV_at; Start 94; Stop 118
gttaacgtaaggtcctgttgcgaca

SEQ ID NO: 176736 - DNA, 25 bp, Artificial
  probe
  misc_feature (1)..(25): SEQ ID NO: 5870; WAN024DYV_at; Start 24; Stop 48
catagtgttctttttcagtggtaac

SEQ ID NO: 176737 - DNA, 25 bp, Artificial
  probe
  misc_feature (1)..(25): SEQ ID NO: 5870; WAN024DYV_at; Start 120; Stop 144
ctttttcaaaggcttggctgttcat

SEQ ID NO: 176738 - DNA, 25 bp, Artificial
  probe
  misc_feature (1)..(25): SEQ ID NO: 5870; WAN024DYV_at; Start 45; Stop 69
taacagcttgcaatacttgagcaga

SEQ ID NO: 176739 - DNA, 25 bp, Artificial
  probe
  misc_feature (1)..(25): SEQ ID NO: 5870; WAN024DYV_at; Start 203; Stop 227
gaaaaagcagggaaagcaatgtctc

SEQ ID NO: 176740 - DNA, 25 bp, Artificial
  probe
  misc_feature (1)..(25): SEQ ID NO: 5870; WAN024DYV_at; Start 32; Stop 56
tctttttcagtggtaacagcttgca

SEQ ID NO: 176741 - DNA, 25 bp, Artificial
  probe
  misc_feature (1)..(25): SEQ ID NO: 5870; WAN024DYV_at; Start 179; Stop 203
gctttacgttcgacttttgcaagag

SEQ ID NO: 176742 - DNA, 25 bp, Artificial
  probe
  misc_feature (1)..(25): SEQ ID NO: 5870; WAN024DYV_at; Start 55; Stop 79
caatacttgagcagaaatggcagat

SEQ ID NO: 176743 - DNA, 25 bp, Artificial
  probe
  misc_feature (1)..(25): SEQ ID NO: 5870; WAN024DYV_at; Start 60; Stop 84
cttgagcagaaatggcagatttatc

SEQ ID NO: 176744 - DNA, 25 bp, Artificial
  probe
  misc_feature (1)..(25): SEQ ID NO: 5870; WAN024DYV_at; Start 206; Stop 230
aaagcagggaaagcaatgtctccca

SEQ ID NO: 176745 - DNA, 25 bp, Artificial
  probe
  misc_feature (1)..(25): SEQ ID NO: 5870; WAN024DYV_at; Start 161; Stop 185
gccgcaatcatttgtggtgctttac

SEQ ID NO: 176746 - DNA, 25 bp, Artificial
  probe
  misc_feature (1)..(25): SEQ ID NO: 5870; WAN024DYV_at; Start 149; Stop 173
tcagccagttcagccgcaatcattt

SEQ ID NO: 176747 - DNA, 25 bp, Artificial
  probe
  misc_feature (1)..(25): SEQ ID NO: 5870; WAN024DYV_at; Start 42; Stop 66
tggtaacagcttgcaatacttgagc

SEQ ID NO: 176748 - DNA, 25 bp, Artificial
  probe
  misc_feature (1)..(25): SEQ ID NO: 5870; WAN024DYV_at; Start 10; Stop 34
aatattttggtcagcatagtgttct

SEQ ID NO: 176749 - DNA, 25 bp, Artificial
  probe
  misc_feature (1)..(25): SEQ ID NO: 5870; WAN024DYV_at; Start 65; Stop 89
gcagaaatggcagatttatcaagga

SEQ ID NO: 176750 - DNA, 25 bp, Artificial
  probe
  misc_feature (1)..(25): SEQ ID NO: 5870; WAN024DYV_at; Start 99; Stop 123
cgtaaggtcctgttgcgacaacttt

SEQ ID NO: 176751 - DNA, 25 bp, Artificial
  probe
  misc_feature (1)..(25): SEQ ID NO: 5870; WAN024DYV_at; Start 146; Stop 170
ttttcagccagttcagccgcaatca

SEQ ID NO: 176752 - DNA, 25 bp, Artificial
  probe
  misc_feature (1)..(25): SEQ ID NO: 5870; WAN024DYV_at; Start 176; Stop 200
ggtgctttacgttcgacttttgcaa

SEQ ID NO: 176753 - DNA, 25 bp, Artificial
  probe
  misc_feature (1)..(25): SEQ ID NO: 5870; WAN024DYV_at; Start 96; Stop 120
taacgtaaggtcctgttgcgacaac

SEQ ID NO: 176754 - DNA, 25 bp, Artificial
  probe
  misc_feature (1)..(25): SEQ ID NO: 5870; WAN024DYV_at; Start 138; Stop 162
tgttcattttttcagccagttcagc

SEQ ID NO: 176755 - DNA, 25 bp, Artificial
  probe
  misc_feature (1)..(25): SEQ ID NO: 5870; WAN024DYV_at; Start 115; Stop 139
gacaactttttcaaaggcttggctg

SEQ ID NO: 176756 - DNA, 25 bp, Artificial
  probe
  misc_feature (1)..(25): SEQ ID NO: 5870; WAN024DYV_at; Start 126; Stop 150
caaaggcttggctgttcattttttc

SEQ ID NO: 176757 - DNA, 25 bp, Artificial
  probe
  misc_feature (1)..(25): SEQ ID NO: 5870; WAN024DYV_at; Start 198; Stop 222
caagagaaaaagcagggaaagcaat

SEQ ID NO: 176758 - DNA, 25 bp, Artificial
  probe
  misc_feature (1)..(25): SEQ ID NO: 5870; WAN024DYV_at; Start 154; Stop 178
cagttcagccgcaatcatttgtggt

SEQ ID NO: 176759 - DNA, 25 bp, Artificial
  probe
  misc_feature (1)..(25): SEQ ID NO: 5870; WAN024DYV_at; Start 168; Stop 192
tcatttgtggtgctttacgttcgac

SEQ ID NO: 176760 - DNA, 25 bp, Artificial
  probe
  misc_feature (1)..(25): SEQ ID NO: 5870; WAN024DYV_at; Start 183; Stop 207
tacgttcgacttttgcaagagaaaa

SEQ ID NO: 176761 - DNA, 25 bp, Artificial
  probe
  misc_feature (1)..(25): SEQ ID NO: 4237; WAN024DYW_at; Start 162; Stop 186
gagttgcaccatcagacttcttgat

SEQ ID NO: 176762 - DNA, 25 bp, Artificial
  probe
  misc_feature (1)..(25): SEQ ID NO: 4237; WAN024DYW_at; Start 120; Stop 144
ttttacggtagagggctgcagccaa

SEQ ID NO: 176763 - DNA, 25 bp, Artificial
  probe
  misc_feature (1)..(25): SEQ ID NO: 4237; WAN024DYW_at; Start 125; Stop 149
cggtagagggctgcagccaagtcac

SEQ ID NO: 176764 - DNA, 25 bp, Artificial
  probe
  misc_feature (1)..(25): SEQ ID NO: 4237; WAN024DYW_at; Start 195; Stop 219
gatgttcaattccatatttctcaag

SEQ ID NO: 176765 - DNA, 25 bp, Artificial
  probe
  misc_feature (1)..(25): SEQ ID NO: 4237; WAN024DYW_at; Start 128; Stop 152
tagagggctgcagccaagtcacgtg

SEQ ID NO: 176766 - DNA, 25 bp, Artificial
  probe
  misc_feature (1)..(25): SEQ ID NO: 4237; WAN024DYW_at; Start 219; Stop 243
gattcacaacttgggcaccttctga

SEQ ID NO: 176767 - DNA, 25 bp, Artificial
  probe
  misc_feature (1)..(25): SEQ ID NO: 4237; WAN024DYW_at; Start 149; Stop 173
cgtgtgatatagagagttgcaccat

SEQ ID NO: 176768 - DNA, 25 bp, Artificial
  probe
  misc_feature (1)..(25): SEQ ID NO: 4237; WAN024DYW_at; Start 167; Stop 191
gcaccatcagacttcttgatgaggg

SEQ ID NO: 176769 - DNA, 25 bp, Artificial
  probe
  misc_feature (1)..(25): SEQ ID NO: 4237; WAN024DYW_at; Start 93; Stop 117
agatagatttagcaaattggtattc

SEQ ID NO: 176770 - DNA, 25 bp, Artificial
  probe
  misc_feature (1)..(25): SEQ ID NO: 4237; WAN024DYW_at; Start 183; Stop 207
tgatgagggctggatgttcaattcc

SEQ ID NO: 176771 - DNA, 25 bp, Artificial
  probe
  misc_feature (1)..(25): SEQ ID NO: 4237; WAN024DYW_at; Start 177; Stop 201
acttcttgatgagggctggatgttc

SEQ ID NO: 176772 - DNA, 25 bp, Artificial
  probe
  misc_feature (1)..(25): SEQ ID NO: 4237; WAN024DYW_at; Start 215; Stop 239
tcaagattcacaacttgggcacctt

SEQ ID NO: 176773 - DNA, 25 bp, Artificial
  probe
  misc_feature (1)..(25): SEQ ID NO: 4237; WAN024DYW_at; Start 136; Stop 160
tgcagccaagtcacgtgtgatatag

SEQ ID NO: 176774 - DNA, 25 bp, Artificial
  probe
  misc_feature (1)..(25): SEQ ID NO: 4237; WAN024DYW_at; Start 141; Stop 165
ccaagtcacgtgtgatatagagagt

SEQ ID NO: 176775 - DNA, 25 bp, Artificial
  probe
  misc_feature (1)..(25): SEQ ID NO: 4237; WAN024DYW_at; Start 156; Stop 180
tatagagagttgcaccatcagactt

SEQ ID NO: 176776 - DNA, 25 bp, Artificial
  probe
  misc_feature (1)..(25): SEQ ID NO: 4237; WAN024DYW_at; Start 158; Stop 182
tagagagttgcaccatcagacttct

SEQ ID NO: 176777 - DNA, 25 bp, Artificial
  probe
  misc_feature (1)..(25): SEQ ID NO: 4237; WAN024DYW_at; Start 119; Stop 143
tttttacggtagagggctgcagcca

SEQ ID NO: 176778 - DNA, 25 bp, Artificial
  probe
  misc_feature (1)..(25): SEQ ID NO: 4237; WAN024DYW_at; Start 23; Stop 47
tcgtagcccatctcttgcaagacag

SEQ ID NO: 176779 - DNA, 25 bp, Artificial
  probe
  misc_feature (1)..(25): SEQ ID NO: 4237; WAN024DYW_at; Start 132; Stop 156
gggctgcagccaagtcacgtgtgat

SEQ ID NO: 176780 - DNA, 25 bp, Artificial
  probe
  misc_feature (1)..(25): SEQ ID NO: 4237; WAN024DYW_at; Start 30; Stop 54
ccatctcttgcaagacagctttgag

SEQ ID NO: 176781 - DNA, 25 bp, Artificial
  probe
  misc_feature (1)..(25): SEQ ID NO: 4237; WAN024DYW_at; Start 213; Stop 237
tctcaagattcacaacttgggcacc

SEQ ID NO: 176782 - DNA, 25 bp, Artificial
  probe
  misc_feature (1)..(25): SEQ ID NO: 4237; WAN024DYW_at; Start 171; Stop 195
catcagacttcttgatgagggctgg

SEQ ID NO: 176783 - DNA, 25 bp, Artificial
  probe
  misc_feature (1)..(25): SEQ ID NO: 4237; WAN024DYW_at; Start 134; Stop 158
gctgcagccaagtcacgtgtgatat

SEQ ID NO: 176784 - DNA, 25 bp, Artificial
  probe
  misc_feature (1)..(25): SEQ ID NO: 4237; WAN024DYW_at; Start 209; Stop 233
tatttctcaagattcacaacttggg

SEQ ID NO: 176785 - DNA, 25 bp, Artificial
  probe
  misc_feature (1)..(25): SEQ ID NO: 4237; WAN024DYW_at; Start 147; Stop 171
cacgtgtgatatagagagttgcacc

SEQ ID NO: 176786 - DNA, 25 bp, Artificial
  probe
  misc_feature (1)..(25): SEQ ID NO: 4237; WAN024DYW_at; Start 160; Stop 184
gagagttgcaccatcagacttcttg

SEQ ID NO: 176787 - DNA, 25 bp, Artificial
  probe
  misc_feature (1)..(25): SEQ ID NO: 4237; WAN024DYW_at; Start 144; Stop 168
agtcacgtgtgatatagagagttgc

SEQ ID NO: 176788 - DNA, 25 bp, Artificial
  probe
  misc_feature (1)..(25): SEQ ID NO: 4237; WAN024DYW_at; Start 174; Stop 198
cagacttcttgatgagggctggatg

SEQ ID NO: 176789 - DNA, 25 bp, Artificial
  probe
  misc_feature (1)..(25): SEQ ID NO: 4237; WAN024DYW_at; Start 154; Stop 178
gatatagagagttgcaccatcagac

SEQ ID NO: 176790 - DNA, 25 bp, Artificial
  probe
  misc_feature (1)..(25): SEQ ID NO: 4237; WAN024DYW_at; Start 187; Stop 211
gagggctggatgttcaattccatat

SEQ ID NO: 176791 - DNA, 25 bp, Artificial
  probe
  misc_feature (1)..(25): SEQ ID NO: 4237; WAN024DYW_at; Start 25; Stop 49
gtagcccatctcttgcaagacagct

SEQ ID NO: 176792 - DNA, 25 bp, Artificial
  probe
  misc_feature (1)..(25): SEQ ID NO: 4237; WAN024DYW_at; Start 28; Stop 52
gcccatctcttgcaagacagctttg

SEQ ID NO: 176793 - DNA, 25 bp, Artificial
  probe
  misc_feature (1)..(25): SEQ ID NO: 4237; WAN024DYW_at; Start 138; Stop 162
cagccaagtcacgtgtgatatagag

SEQ ID NO: 176794 - DNA, 25 bp, Artificial
  probe
  misc_feature (1)..(25): SEQ ID NO: 4237; WAN024DYW_at; Start 190; Stop 214
ggctggatgttcaattccatatttc

SEQ ID NO: 176795 - DNA, 25 bp, Artificial
  probe
  misc_feature (1)..(25): SEQ ID NO: 1194; WAN024DYX_at; Start 1475; Stop 1499
cacgtattatcaaccgtgcggcaga

SEQ ID NO: 176796 - DNA, 25 bp, Artificial
  probe
  misc_feature (1)..(25): SEQ ID NO: 1194; WAN024DYX_at; Start 1672; Stop 1696
gaagcgccagagaagatgtaactaa

SEQ ID NO: 176797 - DNA, 25 bp, Artificial
  probe
  misc_feature (1)..(25): SEQ ID NO: 1194; WAN024DYX_at; Start 1170; Stop 1194
tagccgtgccaaggtccaaatcgag

SEQ ID NO: 176798 - DNA, 25 bp, Artificial
  probe
  misc_feature (1)..(25): SEQ ID NO: 1194; WAN024DYX_at; Start 748; Stop 772
tttgacagctataacggagaagcct

SEQ ID NO: 176799 - DNA, 25 bp, Artificial
  probe
  misc_feature (1)..(25): SEQ ID NO: 1194; WAN024DYX_at; Start 141; Stop 165
agtcgaacgtaaagcaccacaaatg

SEQ ID NO: 176800 - DNA, 25 bp, Artificial
  probe
  misc_feature (1)..(25): SEQ ID NO: 1194; WAN024DYX_at; Start 1489; Stop 1513
cgtgcggcagataactttgaacctt

SEQ ID NO: 176801 - DNA, 25 bp, Artificial
  probe
  misc_feature (1)..(25): SEQ ID NO: 1194; WAN024DYX_at; Start 459; Stop 483
caaggtcaaccatttgggagactgg

SEQ ID NO: 176802 - DNA, 25 bp, Artificial
  probe
  misc_feature (1)..(25): SEQ ID NO: 1194; WAN024DYX_at; Start 562; Stop 586
gaactccttaaactctatgtccgca

SEQ ID NO: 176803 - DNA, 25 bp, Artificial
  probe
  misc_feature (1)..(25): SEQ ID NO: 1194; WAN024DYX_at; Start 763; Stop 787
ggagaagccttctacaatgataaga

SEQ ID NO: 176804 - DNA, 25 bp, Artificial
  probe
  misc_feature (1)..(25): SEQ ID NO: 1194; WAN024DYX_at; Start 1115; Stop 1139
tctctactcgtaaagggaatgtcat

SEQ ID NO: 176805 - DNA, 25 bp, Artificial
  probe
  misc_feature (1)..(25): SEQ ID NO: 1194; WAN024DYX_at; Start 1650; Stop 1674
agcccttcgcttgcttggagtagaa

SEQ ID NO: 176806 - DNA, 25 bp, Artificial
  probe
  misc_feature (1)..(25): SEQ ID NO: 1194; WAN024DYX_at; Start 212; Stop 236
aagttgtcgcaacaggaccttacgt

SEQ ID NO: 176807 - DNA, 25 bp, Artificial
  probe
  misc_feature (1)..(25): SEQ ID NO: 1194; WAN024DYX_at; Start 384; Stop 408
tattggccacctgcgttcaactgtt

SEQ ID NO: 176808 - DNA, 25 bp, Artificial
  probe
  misc_feature (1)..(25): SEQ ID NO: 1194; WAN024DYX_at; Start 1339; Stop 1363
ggaccttacgttcaatatgcctacg

SEQ ID NO: 176809 - DNA, 25 bp, Artificial
  probe
  misc_feature (1)..(25): SEQ ID NO: 1194; WAN024DYX_at; Start 1319; Stop 1343
tatccttcgagggtgaaactggacc

SEQ ID NO: 176810 - DNA, 25 bp, Artificial
  probe
  misc_feature (1)..(25): SEQ ID NO: 1194; WAN024DYX_at; Start 590; Stop 614
acgctgaagctgaaaatgaccctag

SEQ ID NO: 176811 - DNA, 25 bp, Artificial
  probe
  misc_feature (1)..(25): SEQ ID NO: 1194; WAN024DYX_at; Start 538; Stop 562
gctgtaaaagctcatccaatcgatg

SEQ ID NO: 176812 - DNA, 25 bp, Artificial
  probe
  misc_feature (1)..(25): SEQ ID NO: 1194; WAN024DYX_at; Start 1405; Stop 1429
gaaacagctggcaactatagcttga

SEQ ID NO: 176813 - DNA, 25 bp, Artificial
  probe
  misc_feature (1)..(25): SEQ ID NO: 1194; WAN024DYX_at; Start 830; Stop 854
ttgaatcagaaggtgcccaagttgt

SEQ ID NO: 176814 - DNA, 25 bp, Artificial
  probe
  misc_feature (1)..(25): SEQ ID NO: 1194; WAN024DYX_at; Start 292; Stop 316
actgaaaaagaacactatgctgacc

SEQ ID NO: 176815 - DNA, 25 bp, Artificial
  probe
  misc_feature (1)..(25): SEQ ID NO: 1194; WAN024DYX_at; Start 1382; Stop 1406
tacgcaaagccgatttcaaaccaga

SEQ ID NO: 176816 - DNA, 25 bp, Artificial
  probe
  misc_feature (1)..(25): SEQ ID NO: 1194; WAN024DYX_at; Start 1150; Stop 1174
cctactgttgcagaggctgttagcc

SEQ ID NO: 176817 - DNA, 25 bp, Artificial
  probe
  misc_feature (1)..(25): SEQ ID NO: 1194; WAN024DYX_at; Start 907; Stop 931
ggtgcaactctctatatcacacgtg

SEQ ID NO: 176818 - DNA, 25 bp, Artificial
  probe
  misc_feature (1)..(25): SEQ ID NO: 1194; WAN024DYX_at; Start 678; Stop 702
tctttggcaatggttccgcgatgaa

SEQ ID NO: 176819 - DNA, 25 bp, Artificial
  probe
  misc_feature (1)..(25): SEQ ID NO: 1194; WAN024DYX_at; Start 349; Stop 373
gacatgtctagtccgaatatcgcta

SEQ ID NO: 176820 - DNA, 25 bp, Artificial
  probe
  misc_feature (1)..(25): SEQ ID NO: 1194; WAN024DYX_at; Start 625; Stop 649
gaagcgcgcgaatggttccgtaaac

SEQ ID NO: 176821 - DNA, 25 bp, Artificial
  probe
  misc_feature (1)..(25): SEQ ID NO: 1194; WAN024DYX_at; Start 1583; Stop 1607
tggatgaaagcccagaacgcgacag

SEQ ID NO: 176822 - DNA, 25 bp, Artificial
  probe
  misc_feature (1)..(25): SEQ ID NO: 1194; WAN024DYX_at; Start 1130; Stop 1154
ggaatgtcatcttgctagagcctac

SEQ ID NO: 176823 - DNA, 25 bp, Artificial
  probe
  misc_feature (1)..(25): SEQ ID NO: 1194; WAN024DYX_at; Start 577; Stop 601
tatgtccgcatcaacgctgaagctg

SEQ ID NO: 176824 - DNA, 25 bp, Artificial
  probe
  misc_feature (1)..(25): SEQ ID NO: 1194; WAN024DYX_at; Start 663; Stop 687
tgaggaagctctcgctctttggcaa

SEQ ID NO: 176825 - DNA, 25 bp, Artificial
  probe
  misc_feature (1)..(25): SEQ ID NO: 1194; WAN024DYX_at; Start 1283; Stop 1307
gtacaaatggatacgacttcgacct

SEQ ID NO: 176826 - DNA, 25 bp, Artificial
  probe
  misc_feature (1)..(25): SEQ ID NO: 1194; WAN024DYX_at; Start 443; Stop 467
tcggttatcaaacggtcaaggtcaa

SEQ ID NO: 176827 - DNA, 25 bp, Artificial
  probe
  misc_feature (1)..(25): SEQ ID NO: 1194; WAN024DYX_at; Start 1570; Stop 1594
catacacgtatcttggatgaaagcc

SEQ ID NO: 176828 - DNA, 25 bp, Artificial
  probe
  misc_feature (1)..(25): SEQ ID NO: 1194; WAN024DYX_at; Start 1619; Stop 1643
tcagctacgcaaccgcagtcgttct

SEQ ID NO: 176829 - DNA, 25 bp, Artificial
  probe
  misc_feature (1)..(25): SEQ ID NO: 4125; WAN024DYY_at; Start 170; Stop 194
caaagagtgaaatctgttcagtgac

SEQ ID NO: 176830 - DNA, 25 bp, Artificial
  probe
  misc_feature (1)..(25): SEQ ID NO: 4125; WAN024DYY_at; Start 194; Stop 218
cagcactagtttgtctcatgggagg

SEQ ID NO: 176831 - DNA, 25 bp, Artificial
  probe
  misc_feature (1)..(25): SEQ ID NO: 4125; WAN024DYY_at; Start 13; Stop 37
caaagaagtctccttgatacagcta

SEQ ID NO: 176832 - DNA, 25 bp, Artificial
  probe
  misc_feature (1)..(25): SEQ ID NO: 4125; WAN024DYY_at; Start 155; Stop 179
gctcttctgccctatcaaagagtga

SEQ ID NO: 176833 - DNA, 25 bp, Artificial
  probe
  misc_feature (1)..(25): SEQ ID NO: 4125; WAN024DYY_at; Start 4; Stop 28
gagaattgtcaaagaagtctccttg

SEQ ID NO: 176834 - DNA, 25 bp, Artificial
  probe
  misc_feature (1)..(25): SEQ ID NO: 4125; WAN024DYY_at; Start 45; Stop 69
tagtgagtcttggttttatagtttc

SEQ ID NO: 176835 - DNA, 25 bp, Artificial
  probe
  misc_feature (1)..(25): SEQ ID NO: 4125; WAN024DYY_at; Start 205; Stop 229
tgtctcatgggaggaggactctctg

SEQ ID NO: 176836 - DNA, 25 bp, Artificial
  probe
  misc_feature (1)..(25): SEQ ID NO: 4125; WAN024DYY_at; Start 35; Stop 59
ctagattaactagtgagtcttggtt

SEQ ID NO: 176837 - DNA, 25 bp, Artificial
  probe
  misc_feature (1)..(25): SEQ ID NO: 4125; WAN024DYY_at; Start 104; Stop 128
taggtgtcatattatacacatccag

SEQ ID NO: 176838 - DNA, 25 bp, Artificial
  probe
  misc_feature (1)..(25): SEQ ID NO: 4125; WAN024DYY_at; Start 139; Stop 163
tctgctaggataggatgctcttctg

SEQ ID NO: 176839 - DNA, 25 bp, Artificial
  probe
  misc_feature (1)..(25): SEQ ID NO: 4125; WAN024DYY_at; Start 93; Stop 117
cataacctgcataggtgtcatatta

SEQ ID NO: 176840 - DNA, 25 bp, Artificial
  probe
  misc_feature (1)..(25): SEQ ID NO: 4125; WAN024DYY_at; Start 17; Stop 41
gaagtctccttgatacagctagatt

SEQ ID NO: 176841 - DNA, 25 bp, Artificial
  probe
  misc_feature (1)..(25): SEQ ID NO: 4125; WAN024DYY_at; Start 111; Stop 135
catattatacacatccagtttagct

SEQ ID NO: 176842 - DNA, 25 bp, Artificial
  probe
  misc_feature (1)..(25): SEQ ID NO: 4125; WAN024DYY_at; Start 30; Stop 54
tacagctagattaactagtgagtct

SEQ ID NO: 176843 - DNA, 25 bp, Artificial
  probe
  misc_feature (1)..(25): SEQ ID NO: 4125; WAN024DYY_at; Start 174; Stop 198
gagtgaaatctgttcagtgacagca

SEQ ID NO: 176844 - DNA, 25 bp, Artificial
  probe
  misc_feature (1)..(25): SEQ ID NO: 4125; WAN024DYY_at; Start 98; Stop 122
cctgcataggtgtcatattatacac

SEQ ID NO: 176845 - DNA, 25 bp, Artificial
  probe
  misc_feature (1)..(25): SEQ ID NO: 4125; WAN024DYY_at; Start 124; Stop 148
tccagtttagctaattctgctagga

SEQ ID NO: 176846 - DNA, 25 bp, Artificial
  probe
  misc_feature (1)..(25): SEQ ID NO: 4125; WAN024DYY_at; Start 197; Stop 221
cactagtttgtctcatgggaggagg

SEQ ID NO: 176847 - DNA, 25 bp, Artificial
  probe
  misc_feature (1)..(25): SEQ ID NO: 4125; WAN024DYY_at; Start 144; Stop 168
taggataggatgctcttctgcccta

SEQ ID NO: 176848 - DNA, 25 bp, Artificial
  probe
  misc_feature (1)..(25): SEQ ID NO: 4125; WAN024DYY_at; Start 118; Stop 142
tacacatccagtttagctaattctg

SEQ ID NO: 176849 - DNA, 25 bp, Artificial
  probe
  misc_feature (1)..(25): SEQ ID NO: 4125; WAN024DYY_at; Start 203; Stop 227
tttgtctcatgggaggaggactctc

SEQ ID NO: 176850 - DNA, 25 bp, Artificial
  probe
  misc_feature (1)..(25): SEQ ID NO: 4125; WAN024DYY_at; Start 23; Stop 47
tccttgatacagctagattaactag

SEQ ID NO: 176851 - DNA, 25 bp, Artificial
  probe
  misc_feature (1)..(25): SEQ ID NO: 4125; WAN024DYY_at; Start 150; Stop 174
aggatgctcttctgccctatcaaag

SEQ ID NO: 176852 - DNA, 25 bp, Artificial
  probe
  misc_feature (1)..(25): SEQ ID NO: 4125; WAN024DYY_at; Start 84; Stop 108
taagacattcataacctgcataggt

SEQ ID NO: 176853 - DNA, 25 bp, Artificial
  probe
  misc_feature (1)..(25): SEQ ID NO: 4125; WAN024DYY_at; Start 178; Stop 202
gaaatctgttcagtgacagcactag

SEQ ID NO: 176854 - DNA, 25 bp, Artificial
  probe
  misc_feature (1)..(25): SEQ ID NO: 4125; WAN024DYY_at; Start 184; Stop 208
tgttcagtgacagcactagtttgtc

SEQ ID NO: 176855 - DNA, 25 bp, Artificial
  probe
  misc_feature (1)..(25): SEQ ID NO: 4125; WAN024DYY_at; Start 162; Stop 186
tgccctatcaaagagtgaaatctgt

SEQ ID NO: 176856 - DNA, 25 bp, Artificial
  probe
  misc_feature (1)..(25): SEQ ID NO: 4125; WAN024DYY_at; Start 66; Stop 90
tttctgttttaactctactaagaca

SEQ ID NO: 176857 - DNA, 25 bp, Artificial
  probe
  misc_feature (1)..(25): SEQ ID NO: 4125; WAN024DYY_at; Start 209; Stop 233
tcatgggaggaggactctctgttcc

SEQ ID NO: 176858 - DNA, 25 bp, Artificial
  probe
  misc_feature (1)..(25): SEQ ID NO: 4125; WAN024DYY_at; Start 134; Stop 158
ctaattctgctaggataggatgctc

SEQ ID NO: 176859 - DNA, 25 bp, Artificial
  probe
  misc_feature (1)..(25): SEQ ID NO: 4125; WAN024DYY_at; Start 79; Stop 103
tctactaagacattcataacctgca

SEQ ID NO: 176860 - DNA, 25 bp, Artificial
  probe
  misc_feature (1)..(25): SEQ ID NO: 4125; WAN024DYY_at; Start 142; Stop 166
gctaggataggatgctcttctgccc

SEQ ID NO: 176861 - DNA, 25 bp, Artificial
  probe
  misc_feature (1)..(25): SEQ ID NO: 4125; WAN024DYY_at; Start 212; Stop 236
tgggaggaggactctctgttccttg

SEQ ID NO: 176862 - DNA, 25 bp, Artificial
  probe
  misc_feature (1)..(25): SEQ ID NO: 4125; WAN024DYY_at; Start 89; Stop 113
cattcataacctgcataggtgtcat

SEQ ID NO: 176863 - DNA, 25 bp, Artificial
  probe
  misc_feature (1)..(25): SEQ ID NO: 5249; WAN024DYZ_at; Start 74; Stop 98
cctggcgtaatgacctgaacaacct

SEQ ID NO: 176864 - DNA, 25 bp, Artificial
  probe
  misc_feature (1)..(25): SEQ ID NO: 5249; WAN024DYZ_at; Start 128; Stop 152
ggatcttccatctgctctgcgatag

SEQ ID NO: 176865 - DNA, 25 bp, Artificial
  probe
  misc_feature (1)..(25): SEQ ID NO: 5249; WAN024DYZ_at; Start 108; Stop 132
caaccccaactgcttgtttaggatc

SEQ ID NO: 176866 - DNA, 25 bp, Artificial
  probe
  misc_feature (1)..(25): SEQ ID NO: 5249; WAN024DYZ_at; Start 36; Stop 60
tattctgactgtccggcttactgct

SEQ ID NO: 176867 - DNA, 25 bp, Artificial
  probe
  misc_feature (1)..(25): SEQ ID NO: 5249; WAN024DYZ_at; Start 145; Stop 169
tgcgatagccaccttataaccctgc

SEQ ID NO: 176868 - DNA, 25 bp, Artificial
  probe
  misc_feature (1)..(25): SEQ ID NO: 5249; WAN024DYZ_at; Start 200; Stop 224
gaatgatagggaacacccgccatag

SEQ ID NO: 176869 - DNA, 25 bp, Artificial
  probe
  misc_feature (1)..(25): SEQ ID NO: 5249; WAN024DYZ_at; Start 214; Stop 238
acccgccatagggatcggattgtcg

SEQ ID NO: 176870 - DNA, 25 bp, Artificial
  probe
  misc_feature (1)..(25): SEQ ID NO: 5249; WAN024DYZ_at; Start 54; Stop 78
tactgctatcgaccactgtccctgg

SEQ ID NO: 176871 - DNA, 25 bp, Artificial
  probe
  misc_feature (1)..(25): SEQ ID NO: 5249; WAN024DYZ_at; Start 18; Stop 42
ctatggaaaccaaaaaattattctg

SEQ ID NO: 176872 - DNA, 25 bp, Artificial
  probe
  misc_feature (1)..(25): SEQ ID NO: 5249; WAN024DYZ_at; Start 196; Stop 220
ggcagaatgatagggaacacccgcc

SEQ ID NO: 176873 - DNA, 25 bp, Artificial
  probe
  misc_feature (1)..(25): SEQ ID NO: 5249; WAN024DYZ_at; Start 138; Stop 162
tctgctctgcgatagccaccttata

SEQ ID NO: 176874 - DNA, 25 bp, Artificial
  probe
  misc_feature (1)..(25): SEQ ID NO: 5249; WAN024DYZ_at; Start 220; Stop 244
catagggatcggattgtcggcattc

SEQ ID NO: 176875 - DNA, 25 bp, Artificial
  probe
  misc_feature (1)..(25): SEQ ID NO: 5249; WAN024DYZ_at; Start 47; Stop 71
tccggcttactgctatcgaccactg

SEQ ID NO: 176876 - DNA, 25 bp, Artificial
  probe
  misc_feature (1)..(25): SEQ ID NO: 5249; WAN024DYZ_at; Start 60; Stop 84
tatcgaccactgtccctggcgtaat

SEQ ID NO: 176877 - DNA, 25 bp, Artificial
  probe
  misc_feature (1)..(25): SEQ ID NO: 5249; WAN024DYZ_at; Start 28; Stop 52
caaaaaattattctgactgtccggc

SEQ ID NO: 176878 - DNA, 25 bp, Artificial
  probe
  misc_feature (1)..(25): SEQ ID NO: 5249; WAN024DYZ_at; Start 237; Stop 261
cggcattcttgttgcgactcgttaa

SEQ ID NO: 176879 - DNA, 25 bp, Artificial
  probe
  misc_feature (1)..(25): SEQ ID NO: 5249; WAN024DYZ_at; Start 160; Stop 184
ataaccctgctcaatcaagacatcg

SEQ ID NO: 176880 - DNA, 25 bp, Artificial
  probe
  misc_feature (1)..(25): SEQ ID NO: 5249; WAN024DYZ_at; Start 229; Stop 253
cggattgtcggcattcttgttgcga

SEQ ID NO: 176881 - DNA, 25 bp, Artificial
  probe
  misc_feature (1)..(25): SEQ ID NO: 5249; WAN024DYZ_at; Start 178; Stop 202
gacatcgatatactgttgggcagaa

SEQ ID NO: 176882 - DNA, 25 bp, Artificial
  probe
  misc_feature (1)..(25): SEQ ID NO: 5249; WAN024DYZ_at; Start 113; Stop 137
ccaactgcttgtttaggatcttcca

SEQ ID NO: 176883 - DNA, 25 bp, Artificial
  probe
  misc_feature (1)..(25): SEQ ID NO: 5249; WAN024DYZ_at; Start 85; Stop 109
gacctgaacaacctctcgtttaaca

SEQ ID NO: 176884 - DNA, 25 bp, Artificial
  probe
  misc_feature (1)..(25): SEQ ID NO: 5249; WAN024DYZ_at; Start 68; Stop 92
actgtccctggcgtaatgacctgaa

SEQ ID NO: 176885 - DNA, 25 bp, Artificial
  probe
  misc_feature (1)..(25): SEQ ID NO: 5249; WAN024DYZ_at; Start 209; Stop 233
ggaacacccgccatagggatcggat

SEQ ID NO: 176886 - DNA, 25 bp, Artificial
  probe
  misc_feature (1)..(25): SEQ ID NO: 5249; WAN024DYZ_at; Start 99; Stop 123
ctcgtttaacaaccccaactgcttg

SEQ ID NO: 176887 - DNA, 25 bp, Artificial
  probe
  misc_feature (1)..(25): SEQ ID NO: 5249; WAN024DYZ_at; Start 50; Stop 74
ggcttactgctatcgaccactgtcc

SEQ ID NO: 176888 - DNA, 25 bp, Artificial
  probe
  misc_feature (1)..(25): SEQ ID NO: 5249; WAN024DYZ_at; Start 148; Stop 172
gatagccaccttataaccctgctca

SEQ ID NO: 176889 - DNA, 25 bp, Artificial
  probe
  misc_feature (1)..(25): SEQ ID NO: 5249; WAN024DYZ_at; Start 7; Stop 31
gccttcgcggtctatggaaaccaaa

SEQ ID NO: 176890 - DNA, 25 bp, Artificial
  probe
  misc_feature (1)..(25): SEQ ID NO: 5249; WAN024DYZ_at; Start 78; Stop 102
gcgtaatgacctgaacaacctctcg

SEQ ID NO: 176891 - DNA, 25 bp, Artificial
  probe
  misc_feature (1)..(25): SEQ ID NO: 5249; WAN024DYZ_at; Start 4; Stop 28
attgccttcgcggtctatggaaacc

SEQ ID NO: 176892 - DNA, 25 bp, Artificial
  probe
  misc_feature (1)..(25): SEQ ID NO: 5249; WAN024DYZ_at; Start 203; Stop 227
tgatagggaacacccgccataggga

SEQ ID NO: 176893 - DNA, 25 bp, Artificial
  probe
  misc_feature (1)..(25): SEQ ID NO: 5249; WAN024DYZ_at; Start 174; Stop 198
tcaagacatcgatatactgttgggc

SEQ ID NO: 176894 - DNA, 25 bp, Artificial
  probe
  misc_feature (1)..(25): SEQ ID NO: 5249; WAN024DYZ_at; Start 42; Stop 66
gactgtccggcttactgctatcgac

SEQ ID NO: 176895 - DNA, 25 bp, Artificial
  probe
  misc_feature (1)..(25): SEQ ID NO: 5249; WAN024DYZ_at; Start 124; Stop 148
tttaggatcttccatctgctctgcg

SEQ ID NO: 176896 - DNA, 25 bp, Artificial
  probe
  misc_feature (1)..(25): SEQ ID NO: 5249; WAN024DYZ_at; Start 192; Stop 216
gttgggcagaatgatagggaacacc

SEQ ID NO: 176897 - DNA, 25 bp, Artificial
  probe
  misc_feature (1)..(25): SEQ ID NO: 5397; WAN024DZ2_at; Start 56; Stop 80
tatcacccggcatgcaacagtatgt

SEQ ID NO: 176898 - DNA, 25 bp, Artificial
  probe
  misc_feature (1)..(25): SEQ ID NO: 5397; WAN024DZ2_at; Start 2075; Stop 2099
tctttgatgaattgggacgtggaac

SEQ ID NO: 176899 - DNA, 25 bp, Artificial
  probe
  misc_feature (1)..(25): SEQ ID NO: 5397; WAN024DZ2_at; Start 1918; Stop 1942
tatgttcctgctgaaagcgcccatt

SEQ ID NO: 176900 - DNA, 25 bp, Artificial
  probe
  misc_feature (1)..(25): SEQ ID NO: 5397; WAN024DZ2_at; Start 1554; Stop 1578
gaagtcagccaacctcgaatacgaa

SEQ ID NO: 176901 - DNA, 25 bp, Artificial
  probe
  misc_feature (1)..(25): SEQ ID NO: 5397; WAN024DZ2_at; Start 1632; Stop 1656
tctagcccaaggaattgcgacggtt

SEQ ID NO: 176902 - DNA, 25 bp, Artificial
  probe
  misc_feature (1)..(25): SEQ ID NO: 5397; WAN024DZ2_at; Start 422; Stop 446
tggtttccatagaccgcgaaggcaa

SEQ ID NO: 176903 - DNA, 25 bp, Artificial
  probe
  misc_feature (1)..(25): SEQ ID NO: 5397; WAN024DZ2_at; Start 315; Stop 339
ggaagatcctaaacaagcagttggg

SEQ ID NO: 176904 - DNA, 25 bp, Artificial
  probe
  misc_feature (1)..(25): SEQ ID NO: 5397; WAN024DZ2_at; Start 1107; Stop 1131
gactaccttgtctagtgtgccacgg

SEQ ID NO: 176905 - DNA, 25 bp, Artificial
  probe
  misc_feature (1)..(25): SEQ ID NO: 5397; WAN024DZ2_at; Start 1602; Stop 1626
ggtcggcaagtacatccagcgttta

SEQ ID NO: 176906 - DNA, 25 bp, Artificial
  probe
  misc_feature (1)..(25): SEQ ID NO: 5397; WAN024DZ2_at; Start 2280; Stop 2304
tcacaagattgaaccgggaccagct

SEQ ID NO: 176907 - DNA, 25 bp, Artificial
  probe
  misc_feature (1)..(25): SEQ ID NO: 5397; WAN024DZ2_at; Start 1857; Stop 1881
tgggaagtctacctatatgcgtcag

SEQ ID NO: 176908 - DNA, 25 bp, Artificial
  probe
  misc_feature (1)..(25): SEQ ID NO: 5397; WAN024DZ2_at; Start 190; Stop 214
ttaacgagtcgcaacaagaatgccg

SEQ ID NO: 176909 - DNA, 25 bp, Artificial
  probe
  misc_feature (1)..(25): SEQ ID NO: 5397; WAN024DZ2_at; Start 2460; Stop 2484
ctttgatagggcagaagagcatcct

SEQ ID NO: 176910 - DNA, 25 bp, Artificial
  probe
  misc_feature (1)..(25): SEQ ID NO: 5397; WAN024DZ2_at; Start 1687; Stop 1711
gaaacccagcatttgattcgacctg

SEQ ID NO: 176911 - DNA, 25 bp, Artificial
  probe
  misc_feature (1)..(25): SEQ ID NO: 5397; WAN024DZ2_at; Start 987; Stop 1011
cgaccatttctttgagcgtagtgac

SEQ ID NO: 176912 - DNA, 25 bp, Artificial
  probe
  misc_feature (1)..(25): SEQ ID NO: 5397; WAN024DZ2_at; Start 1492; Stop 1516
tcagaacgctttggaaccgaagaat

SEQ ID NO: 176913 - DNA, 25 bp, Artificial
  probe
  misc_feature (1)..(25): SEQ ID NO: 5397; WAN024DZ2_at; Start 677; Stop 701
caacggtggagcaaacggcatctag

SEQ ID NO: 176914 - DNA, 25 bp, Artificial
  probe
  misc_feature (1)..(25): SEQ ID NO: 5397; WAN024DZ2_at; Start 300; Stop 324
tatcgcagagcagatggaagatcct

SEQ ID NO: 176915 - DNA, 25 bp, Artificial
  probe
  misc_feature (1)..(25): SEQ ID NO: 5397; WAN024DZ2_at; Start 1472; Stop 1496
gcaaggcgacgctgaaaaactcaga

SEQ ID NO: 176916 - DNA, 25 bp, Artificial
  probe
  misc_feature (1)..(25): SEQ ID NO: 5397; WAN024DZ2_at; Start 529; Stop 553
gaaatccgtaacctcaaggctcgag

SEQ ID NO: 176917 - DNA, 25 bp, Artificial
  probe
  misc_feature (1)..(25): SEQ ID NO: 5397; WAN024DZ2_at; Start 2140; Stop 2164
gaatatatccatgagcacatcggag

SEQ ID NO: 176918 - DNA, 25 bp, Artificial
  probe
  misc_feature (1)..(25): SEQ ID NO: 5397; WAN024DZ2_at; Start 2416; Stop 2440
cctcccatgagacaaactagtgctg

SEQ ID NO: 176919 - DNA, 25 bp, Artificial
  probe
  misc_feature (1)..(25): SEQ ID NO: 5397; WAN024DZ2_at; Start 1728; Stop 1752
acaaattgatatccggaaagggcgc

SEQ ID NO: 176920 - DNA, 25 bp, Artificial
  probe
  misc_feature (1)..(25): SEQ ID NO: 5397; WAN024DZ2_at; Start 1366; Stop 1390
gaaaactctggtatcagcacgctca

SEQ ID NO: 176921 - DNA, 25 bp, Artificial
  probe
  misc_feature (1)..(25): SEQ ID NO: 5397; WAN024DZ2_at; Start 378; Stop 402
gacagtggtcgatagcagtaagccg

SEQ ID NO: 176922 - DNA, 25 bp, Artificial
  probe
  misc_feature (1)..(25): SEQ ID NO: 5397; WAN024DZ2_at; Start 1743; Stop 1767
gaaagggcgccatgctgtcgttgaa

SEQ ID NO: 176923 - DNA, 25 bp, Artificial
  probe
  misc_feature (1)..(25): SEQ ID NO: 5397; WAN024DZ2_at; Start 1584; Stop 1608
tatgcgcattcgtgaagaggtcggc

SEQ ID NO: 176924 - DNA, 25 bp, Artificial
  probe
  misc_feature (1)..(25): SEQ ID NO: 5397; WAN024DZ2_at; Start 727; Stop 751
actcagatgagggaattgaaccacc

SEQ ID NO: 176925 - DNA, 25 bp, Artificial
  probe
  misc_feature (1)..(25): SEQ ID NO: 5397; WAN024DZ2_at; Start 583; Stop 607
gaagaagaacaaatcctcagccgcc

SEQ ID NO: 176926 - DNA, 25 bp, Artificial
  probe
  misc_feature (1)..(25): SEQ ID NO: 5397; WAN024DZ2_at; Start 2096; Stop 2120
gaactgcaacttatgacgggatggc

SEQ ID NO: 176927 - DNA, 25 bp, Artificial
  probe
  misc_feature (1)..(25): SEQ ID NO: 5397; WAN024DZ2_at; Start 357; Stop 381
tgttcaggtcattacgccagggaca

SEQ ID NO: 176928 - DNA, 25 bp, Artificial
  probe
  misc_feature (1)..(25): SEQ ID NO: 5397; WAN024DZ2_at; Start 796; Stop 820
gattatgcgaccaaggctagtctgg

SEQ ID NO: 176929 - DNA, 25 bp, Artificial
  probe
  misc_feature (1)..(25): SEQ ID NO: 5397; WAN024DZ2_at; Start 834; Stop 858
tgctcgctcaggtaagaaacaaggc

SEQ ID NO: 176930 - DNA, 25 bp, Artificial
  probe
  misc_feature (1)..(25): SEQ ID NO: 5397; WAN024DZ2_at; Start 2394; Stop 2418
gaatcaaggaacagagagtcctcct

SEQ ID NO: 176931 - DNA, 25 bp, Artificial
  probe
  misc_feature (1)..(25): SEQ ID NO: 5005; WAN024DZ3_at; Start 98; Stop 122
gaaaaaataatctgagaatcgagga

SEQ ID NO: 176932 - DNA, 25 bp, Artificial
  probe
  misc_feature (1)..(25): SEQ ID NO: 5005; WAN024DZ3_at; Start 101; Stop 125
aaaataatctgagaatcgaggaaaa

SEQ ID NO: 176933 - DNA, 25 bp, Artificial
  probe
  misc_feature (1)..(25): SEQ ID NO: 5005; WAN024DZ3_at; Start 47; Stop 71
caggtagtttaggatggcaaatgac

SEQ ID NO: 176934 - DNA, 25 bp, Artificial
  probe
  misc_feature (1)..(25): SEQ ID NO: 5005; WAN024DZ3_at; Start 15; Stop 39
cgaagagtataagcattttactgaa

SEQ ID NO: 176935 - DNA, 25 bp, Artificial
  probe
  misc_feature (1)..(25): SEQ ID NO: 5005; WAN024DZ3_at; Start 69; Stop 93
gacattccctgtcaaaaatggtaaa

SEQ ID NO: 176936 - DNA, 25 bp, Artificial
  probe
  misc_feature (1)..(25): SEQ ID NO: 5005; WAN024DZ3_at; Start 113; Stop 137
gaatcgaggaaaaaagatgcaagaa

SEQ ID NO: 176937 - DNA, 25 bp, Artificial
  probe
  misc_feature (1)..(25): SEQ ID NO: 5005; WAN024DZ3_at; Start 57; Stop 81
aggatggcaaatgacattccctgtc

SEQ ID NO: 176938 - DNA, 25 bp, Artificial
  probe
  misc_feature (1)..(25): SEQ ID NO: 5005; WAN024DZ3_at; Start 71; Stop 95
cattccctgtcaaaaatggtaaaat

SEQ ID NO: 176939 - DNA, 25 bp, Artificial
  probe
  misc_feature (1)..(25): SEQ ID NO: 5005; WAN024DZ3_at; Start 95; Stop 119
taagaaaaaataatctgagaatcga

SEQ ID NO: 176940 - DNA, 25 bp, Artificial
  probe
  misc_feature (1)..(25): SEQ ID NO: 5005; WAN024DZ3_at; Start 54; Stop 78
tttaggatggcaaatgacattccct

SEQ ID NO: 176941 - DNA, 25 bp, Artificial
  probe
  misc_feature (1)..(25): SEQ ID NO: 5005; WAN024DZ3_at; Start 13; Stop 37
ttcgaagagtataagcattttactg

SEQ ID NO: 176942 - DNA, 25 bp, Artificial
  probe
  misc_feature (1)..(25): SEQ ID NO: 5005; WAN024DZ3_at; Start 42; Stop 66
tttatcaggtagtttaggatggcaa

SEQ ID NO: 176943 - DNA, 25 bp, Artificial
  probe
  misc_feature (1)..(25): SEQ ID NO: 5005; WAN024DZ3_at; Start 16; Stop 40
gaagagtataagcattttactgaaa

SEQ ID NO: 176944 - DNA, 25 bp, Artificial
  probe
  misc_feature (1)..(25): SEQ ID NO: 5005; WAN024DZ3_at; Start 41; Stop 65
ttttatcaggtagtttaggatggca

SEQ ID NO: 176945 - DNA, 25 bp, Artificial
  probe
  misc_feature (1)..(25): SEQ ID NO: 5005; WAN024DZ3_at; Start 58; Stop 82
ggatggcaaatgacattccctgtca

SEQ ID NO: 176946 - DNA, 25 bp, Artificial
  probe
  misc_feature (1)..(25): SEQ ID NO: 5005; WAN024DZ3_at; Start 105; Stop 129
taatctgagaatcgaggaaaaaaga

SEQ ID NO: 176947 - DNA, 25 bp, Artificial
  probe
  misc_feature (1)..(25): SEQ ID NO: 5005; WAN024DZ3_at; Start 109; Stop 133
ctgagaatcgaggaaaaaagatgca

SEQ ID NO: 176948 - DNA, 25 bp, Artificial
  probe
  misc_feature (1)..(25): SEQ ID NO: 5005; WAN024DZ3_at; Start 117; Stop 141
cgaggaaaaaagatgcaagaaaaga

SEQ ID NO: 176949 - DNA, 25 bp, Artificial
  probe
  misc_feature (1)..(25): SEQ ID NO: 5005; WAN024DZ3_at; Start 26; Stop 50
agcattttactgaaattttatcagg

SEQ ID NO: 176950 - DNA, 25 bp, Artificial
  probe
  misc_feature (1)..(25): SEQ ID NO: 5005; WAN024DZ3_at; Start 53; Stop 77
gtttaggatggcaaatgacattccc

SEQ ID NO: 176951 - DNA, 25 bp, Artificial
  probe
  misc_feature (1)..(25): SEQ ID NO: 5005; WAN024DZ3_at; Start 108; Stop 132
tctgagaatcgaggaaaaaagatgc

SEQ ID NO: 176952 - DNA, 25 bp, Artificial
  probe
  misc_feature (1)..(25): SEQ ID NO: 5005; WAN024DZ3_at; Start 59; Stop 83
gatggcaaatgacattccctgtcaa

SEQ ID NO: 176953 - DNA, 25 bp, Artificial
  probe
  misc_feature (1)..(25): SEQ ID NO: 5005; WAN024DZ3_at; Start 49; Stop 73
ggtagtttaggatggcaaatgacat

SEQ ID NO: 176954 - DNA, 25 bp, Artificial
  probe
  misc_feature (1)..(25): SEQ ID NO: 5005; WAN024DZ3_at; Start 44; Stop 68
tatcaggtagtttaggatggcaaat

SEQ ID NO: 176955 - DNA, 25 bp, Artificial
  probe
  misc_feature (1)..(25): SEQ ID NO: 5005; WAN024DZ3_at; Start 116; Stop 140
tcgaggaaaaaagatgcaagaaaag

SEQ ID NO: 176956 - DNA, 25 bp, Artificial
  probe
  misc_feature (1)..(25): SEQ ID NO: 5005; WAN024DZ3_at; Start 56; Stop 80
taggatggcaaatgacattccctgt

SEQ ID NO: 176957 - DNA, 25 bp, Artificial
  probe
  misc_feature (1)..(25): SEQ ID NO: 5005; WAN024DZ3_at; Start 62; Stop 86
ggcaaatgacattccctgtcaaaaa

SEQ ID NO: 176958 - DNA, 25 bp, Artificial
  probe
  misc_feature (1)..(25): SEQ ID NO: 5005; WAN024DZ3_at; Start 66; Stop 90
aatgacattccctgtcaaaaatggt

SEQ ID NO: 176959 - DNA, 25 bp, Artificial
  probe
  misc_feature (1)..(25): SEQ ID NO: 5005; WAN024DZ3_at; Start 55; Stop 79
ttaggatggcaaatgacattccctg

SEQ ID NO: 176960 - DNA, 25 bp, Artificial
  probe
  misc_feature (1)..(25): SEQ ID NO: 5005; WAN024DZ3_at; Start 119; Stop 143
aggaaaaaagatgcaagaaaagatt

SEQ ID NO: 176961 - DNA, 25 bp, Artificial
  probe
  misc_feature (1)..(25): SEQ ID NO: 5005; WAN024DZ3_at; Start 52; Stop 76
agtttaggatggcaaatgacattcc

SEQ ID NO: 176962 - DNA, 25 bp, Artificial
  probe
  misc_feature (1)..(25): SEQ ID NO: 5005; WAN024DZ3_at; Start 111; Stop 135
gagaatcgaggaaaaaagatgcaag

SEQ ID NO: 176963 - DNA, 25 bp, Artificial
  probe
  misc_feature (1)..(25): SEQ ID NO: 5005; WAN024DZ3_at; Start 65; Stop 89
aaatgacattccctgtcaaaaatgg

SEQ ID NO: 176964 - DNA, 25 bp, Artificial
  probe
  misc_feature (1)..(25): SEQ ID NO: 5005; WAN024DZ3_at; Start 61; Stop 85
tggcaaatgacattccctgtcaaaa

SEQ ID NO: 176965 - DNA, 25 bp, Artificial
  probe
  misc_feature (1)..(25): SEQ ID NO: 5515; WAN024DZ4_at; Start 688; Stop 712
caaaaagccgtgattgtgcaaggaa

SEQ ID NO: 176966 - DNA, 25 bp, Artificial
  probe
  misc_feature (1)..(25): SEQ ID NO: 5515; WAN024DZ4_at; Start 885; Stop 909
tattgaaacaagtacagccctaggt

SEQ ID NO: 176967 - DNA, 25 bp, Artificial
  probe
  misc_feature (1)..(25): SEQ ID NO: 5515; WAN024DZ4_at; Start 672; Stop 696
tgagagcatctcaggccaaaaagcc

SEQ ID NO: 176968 - DNA, 25 bp, Artificial
  probe
  misc_feature (1)..(25): SEQ ID NO: 5515; WAN024DZ4_at; Start 108; Stop 132
catcctgatgattgttctggcgact

SEQ ID NO: 176969 - DNA, 25 bp, Artificial
  probe
  misc_feature (1)..(25): SEQ ID NO: 5515; WAN024DZ4_at; Start 639; Stop 663
gaaagaggtagggaagctcaacgcc

SEQ ID NO: 176970 - DNA, 25 bp, Artificial
  probe
  misc_feature (1)..(25): SEQ ID NO: 5515; WAN024DZ4_at; Start 1161; Stop 1185
ccctaaaggccagatgacagcagtt

SEQ ID NO: 176971 - DNA, 25 bp, Artificial
  probe
  misc_feature (1)..(25): SEQ ID NO: 5515; WAN024DZ4_at; Start 951; Stop 975
gcctattatccaagttgcagcgagt

SEQ ID NO: 176972 - DNA, 25 bp, Artificial
  probe
  misc_feature (1)..(25): SEQ ID NO: 5515; WAN024DZ4_at; Start 170; Stop 194
cggtgacgcagctagccaatttagt

SEQ ID NO: 176973 - DNA, 25 bp, Artificial
  probe
  misc_feature (1)..(25): SEQ ID NO: 5515; WAN024DZ4_at; Start 1529; Stop 1553
caatcgctcgaaccctgatgacaga

SEQ ID NO: 176974 - DNA, 25 bp, Artificial
  probe
  misc_feature (1)..(25): SEQ ID NO: 5515; WAN024DZ4_at; Start 1723; Stop 1747
gaagtcattgaacgtggtaaccacc

SEQ ID NO: 176975 - DNA, 25 bp, Artificial
  probe
  misc_feature (1)..(25): SEQ ID NO: 5515; WAN024DZ4_at; Start 392; Stop 416
tctttgaccgtcgacaagatggcga

SEQ ID NO: 176976 - DNA, 25 bp, Artificial
  probe
  misc_feature (1)..(25): SEQ ID NO: 5515; WAN024DZ4_at; Start 1336; Stop 1360
gattcggtcttgtttagcggaacga

SEQ ID NO: 176977 - DNA, 25 bp, Artificial
  probe
  misc_feature (1)..(25): SEQ ID NO: 5515; WAN024DZ4_at; Start 995; Stop 1019
cctttactggagctgaacgaattca

SEQ ID NO: 176978 - DNA, 25 bp, Artificial
  probe
  misc_feature (1)..(25): SEQ ID NO: 5515; WAN024DZ4_at; Start 657; Stop 681
caacgcctatatggatgagagcatc

SEQ ID NO: 176979 - DNA, 25 bp, Artificial
  probe
  misc_feature (1)..(25): SEQ ID NO: 5515; WAN024DZ4_at; Start 229; Stop 253
tggcaaagcctatcaggaatcatgg

SEQ ID NO: 176980 - DNA, 25 bp, Artificial
  probe
  misc_feature (1)..(25): SEQ ID NO: 5515; WAN024DZ4_at; Start 469; Stop 493
gaaagcttgattcaggtcatgagca

SEQ ID NO: 176981 - DNA, 25 bp, Artificial
  probe
  misc_feature (1)..(25): SEQ ID NO: 5515; WAN024DZ4_at; Start 245; Stop 269
gaatcatggtcaatcttggcctgct

SEQ ID NO: 176982 - DNA, 25 bp, Artificial
  probe
  misc_feature (1)..(25): SEQ ID NO: 5515; WAN024DZ4_at; Start 1747; Stop 1771
catgaacttttgaagctaggtggct

SEQ ID NO: 176983 - DNA, 25 bp, Artificial
  probe
  misc_feature (1)..(25): SEQ ID NO: 5515; WAN024DZ4_at; Start 527; Stop 551
tgttttcgagaaatgtgacgctggc

SEQ ID NO: 176984 - DNA, 25 bp, Artificial
  probe
  misc_feature (1)..(25): SEQ ID NO: 5515; WAN024DZ4_at; Start 1576; Stop 1600
gaagcaacttcaaacgtagatacgg

SEQ ID NO: 176985 - DNA, 25 bp, Artificial
  probe
  misc_feature (1)..(25): SEQ ID NO: 5515; WAN024DZ4_at; Start 1649; Stop 1673
gaactagtttcgtcattgcccaccg

SEQ ID NO: 176986 - DNA, 25 bp, Artificial
  probe
  misc_feature (1)..(25): SEQ ID NO: 5515; WAN024DZ4_at; Start 738; Stop 762
tcttgaacaaaatgagcgcgtgcgc

SEQ ID NO: 176987 - DNA, 25 bp, Artificial
  probe
  misc_feature (1)..(25): SEQ ID NO: 5515; WAN024DZ4_at; Start 753; Stop 777
gcgcgtgcgcaaggcaacctttaaa

SEQ ID NO: 176988 - DNA, 25 bp, Artificial
  probe
  misc_feature (1)..(25): SEQ ID NO: 5515; WAN024DZ4_at; Start 929; Stop 953
aattttcacagcagtactaccagcc

SEQ ID NO: 176989 - DNA, 25 bp, Artificial
  probe
  misc_feature (1)..(25): SEQ ID NO: 5515; WAN024DZ4_at; Start 327; Stop 351
tgcagaatcgaccaacgagatgcgc

SEQ ID NO: 176990 - DNA, 25 bp, Artificial
  probe
  misc_feature (1)..(25): SEQ ID NO: 5515; WAN024DZ4_at; Start 155; Stop 179
tcttttctggacaagcggtgacgca

SEQ ID NO: 176991 - DNA, 25 bp, Artificial
  probe
  misc_feature (1)..(25): SEQ ID NO: 5515; WAN024DZ4_at; Start 297; Stop 321
aatatacatgtgtctcatgacgcgc

SEQ ID NO: 176992 - DNA, 25 bp, Artificial
  probe
  misc_feature (1)..(25): SEQ ID NO: 5515; WAN024DZ4_at; Start 312; Stop 336
catgacgcgcgtgattgcagaatcg

SEQ ID NO: 176993 - DNA, 25 bp, Artificial
  probe
  misc_feature (1)..(25): SEQ ID NO: 5515; WAN024DZ4_at; Start 1028; Stop 1052
ttgatgcagaggaggaaatccgacc

SEQ ID NO: 176994 - DNA, 25 bp, Artificial
  probe
  misc_feature (1)..(25): SEQ ID NO: 5515; WAN024DZ4_at; Start 214; Stop 238
aatccagaacttgtatggcaaagcc

SEQ ID NO: 176995 - DNA, 25 bp, Artificial
  probe
  misc_feature (1)..(25): SEQ ID NO: 5515; WAN024DZ4_at; Start 1042; Stop 1066
gaaatccgacctgaaaaggctccaa

SEQ ID NO: 176996 - DNA, 25 bp, Artificial
  probe
  misc_feature (1)..(25): SEQ ID NO: 5515; WAN024DZ4_at; Start 805; Stop 829
cctgtcatgaatgggatgagcctga

SEQ ID NO: 176997 - DNA, 25 bp, Artificial
  probe
  misc_feature (1)..(25): SEQ ID NO: 5515; WAN024DZ4_at; Start 1144; Stop 1168
gatgtcagcatttctgcccctaaag

SEQ ID NO: 176998 - DNA, 25 bp, Artificial
  probe
  misc_feature (1)..(25): SEQ ID NO: 5515; WAN024DZ4_at; Start 1410; Stop 1434
tgaggtagcagcaaaagcaacccac

SEQ ID NO: 176999 - DNA, 25 bp, Artificial
  probe
  misc_feature (1)..(25): SEQ ID NO: 5337; WAN024DZ5_at; Start 48; Stop 72
cattgacaagttggacaccgcgaca

SEQ ID NO: 177000 - DNA, 25 bp, Artificial
  probe
  misc_feature (1)..(25): SEQ ID NO: 5337; WAN024DZ5_at; Start 28; Stop 52
gagggttccaccaaaggcaacattg

SEQ ID NO: 177001 - DNA, 25 bp, Artificial
  probe
  misc_feature (1)..(25): SEQ ID NO: 5337; WAN024DZ5_at; Start 109; Stop 133
cttcaagagtgccaattcaaattcg

SEQ ID NO: 177002 - DNA, 25 bp, Artificial
  probe
  misc_feature (1)..(25): SEQ ID NO: 5337; WAN024DZ5_at; Start 225; Stop 249
tgtcaatcatttccacataatcacg

SEQ ID NO: 177003 - DNA, 25 bp, Artificial
  probe
  misc_feature (1)..(25): SEQ ID NO: 5337; WAN024DZ5_at; Start 57; Stop 81
gttggacaccgcgacagattgccat

SEQ ID NO: 177004 - DNA, 25 bp, Artificial
  probe
  misc_feature (1)..(25): SEQ ID NO: 5337; WAN024DZ5_at; Start 219; Stop 243
tgagtttgtcaatcatttccacata

SEQ ID NO: 177005 - DNA, 25 bp, Artificial
  probe
  misc_feature (1)..(25): SEQ ID NO: 5337; WAN024DZ5_at; Start 35; Stop 59
ccaccaaaggcaacattgacaagtt

SEQ ID NO: 177006 - DNA, 25 bp, Artificial
  probe
  misc_feature (1)..(25): SEQ ID NO: 5337; WAN024DZ5_at; Start 24; Stop 48
gattgagggttccaccaaaggcaac

SEQ ID NO: 177007 - DNA, 25 bp, Artificial
  probe
  misc_feature (1)..(25): SEQ ID NO: 5337; WAN024DZ5_at; Start 104; Stop 128
gcttccttcaagagtgccaattcaa

SEQ ID NO: 177008 - DNA, 25 bp, Artificial
  probe
  misc_feature (1)..(25): SEQ ID NO: 5337; WAN024DZ5_at; Start 60; Stop 84
ggacaccgcgacagattgccataat

SEQ ID NO: 177009 - DNA, 25 bp, Artificial
  probe
  misc_feature (1)..(25): SEQ ID NO: 5337; WAN024DZ5_at; Start 52; Stop 76
gacaagttggacaccgcgacagatt

SEQ ID NO: 177010 - DNA, 25 bp, Artificial
  probe
  misc_feature (1)..(25): SEQ ID NO: 5337; WAN024DZ5_at; Start 205; Stop 229
gcctcctgtcaaaatgagtttgtca

SEQ ID NO: 177011 - DNA, 25 bp, Artificial
  probe
  misc_feature (1)..(25): SEQ ID NO: 5337; WAN024DZ5_at; Start 65; Stop 89
ccgcgacagattgccataattggtt

SEQ ID NO: 177012 - DNA, 25 bp, Artificial
  probe
  misc_feature (1)..(25): SEQ ID NO: 5337; WAN024DZ5_at; Start 132; Stop 156
cgtcacggaccagattgtaatcatc

SEQ ID NO: 177013 - DNA, 25 bp, Artificial
  probe
  misc_feature (1)..(25): SEQ ID NO: 5337; WAN024DZ5_at; Start 144; Stop 168
gattgtaatcatcgctctcgacggt

SEQ ID NO: 177014 - DNA, 25 bp, Artificial
  probe
  misc_feature (1)..(25): SEQ ID NO: 5337; WAN024DZ5_at; Start 161; Stop 185
tcgacggtctttttctctccataaa

SEQ ID NO: 177015 - DNA, 25 bp, Artificial
  probe
  misc_feature (1)..(25): SEQ ID NO: 5337; WAN024DZ5_at; Start 81; Stop 105
taattggtttattctgacgaagcgc

SEQ ID NO: 177016 - DNA, 25 bp, Artificial
  probe
  misc_feature (1)..(25): SEQ ID NO: 5337; WAN024DZ5_at; Start 149; Stop 173
taatcatcgctctcgacggtctttt

SEQ ID NO: 177017 - DNA, 25 bp, Artificial
  probe
  misc_feature (1)..(25): SEQ ID NO: 5337; WAN024DZ5_at; Start 99; Stop 123
gaagcgcttccttcaagagtgccaa

SEQ ID NO: 177018 - DNA, 25 bp, Artificial
  probe
  misc_feature (1)..(25): SEQ ID NO: 5337; WAN024DZ5_at; Start 234; Stop 258
tttccacataatcacgtacaactga

SEQ ID NO: 177019 - DNA, 25 bp, Artificial
  probe
  misc_feature (1)..(25): SEQ ID NO: 5337; WAN024DZ5_at; Start 183; Stop 207
aaaactgaggatgaacattttggcc

SEQ ID NO: 177020 - DNA, 25 bp, Artificial
  probe
  misc_feature (1)..(25): SEQ ID NO: 5337; WAN024DZ5_at; Start 202; Stop 226
ttggcctcctgtcaaaatgagtttg

SEQ ID NO: 177021 - DNA, 25 bp, Artificial
  probe
  misc_feature (1)..(25): SEQ ID NO: 5337; WAN024DZ5_at; Start 192; Stop 216
gatgaacattttggcctcctgtcaa

SEQ ID NO: 177022 - DNA, 25 bp, Artificial
  probe
  misc_feature (1)..(25): SEQ ID NO: 5337; WAN024DZ5_at; Start 46; Stop 70
aacattgacaagttggacaccgcga

SEQ ID NO: 177023 - DNA, 25 bp, Artificial
  probe
  misc_feature (1)..(25): SEQ ID NO: 5337; WAN024DZ5_at; Start 31; Stop 55
ggttccaccaaaggcaacattgaca

SEQ ID NO: 177024 - DNA, 25 bp, Artificial
  probe
  misc_feature (1)..(25): SEQ ID NO: 5337; WAN024DZ5_at; Start 139; Stop 163
gaccagattgtaatcatcgctctcg

SEQ ID NO: 177025 - DNA, 25 bp, Artificial
  probe
  misc_feature (1)..(25): SEQ ID NO: 5337; WAN024DZ5_at; Start 121; Stop 145
caattcaaattcgtcacggaccaga

SEQ ID NO: 177026 - DNA, 25 bp, Artificial
  probe
  misc_feature (1)..(25): SEQ ID NO: 5337; WAN024DZ5_at; Start 16; Stop 40
gatttcttgattgagggttccacca

SEQ ID NO: 177027 - DNA, 25 bp, Artificial
  probe
  misc_feature (1)..(25): SEQ ID NO: 5337; WAN024DZ5_at; Start 115; Stop 139
gagtgccaattcaaattcgtcacgg

SEQ ID NO: 177028 - DNA, 25 bp, Artificial
  probe
  misc_feature (1)..(25): SEQ ID NO: 5337; WAN024DZ5_at; Start 1; Stop 25
ttgccagtgaccttcgatttcttga

SEQ ID NO: 177029 - DNA, 25 bp, Artificial
  probe
  misc_feature (1)..(25): SEQ ID NO: 5337; WAN024DZ5_at; Start 86; Stop 110
ggtttattctgacgaagcgcttcct

SEQ ID NO: 177030 - DNA, 25 bp, Artificial
  probe
  misc_feature (1)..(25): SEQ ID NO: 5337; WAN024DZ5_at; Start 125; Stop 149
tcaaattcgtcacggaccagattgt

SEQ ID NO: 177031 - DNA, 25 bp, Artificial
  probe
  misc_feature (1)..(25): SEQ ID NO: 5337; WAN024DZ5_at; Start 174; Stop 198
tctctccataaaactgaggatgaac

SEQ ID NO: 177032 - DNA, 25 bp, Artificial
  probe
  misc_feature (1)..(25): SEQ ID NO: 5337; WAN024DZ5_at; Start 95; Stop 119
tgacgaagcgcttccttcaagagtg

SEQ ID NO: 177033 - DNA, 25 bp, Artificial
  probe
  misc_feature (1)..(25): SEQ ID NO: 5366; WAN024DZ6_at; Start 63; Stop 87
caatcgttacagttcattcaataaa

SEQ ID NO: 177034 - DNA, 25 bp, Artificial
  probe
  misc_feature (1)..(25): SEQ ID NO: 5366; WAN024DZ6_at; Start 141; Stop 165
ccactgtaaaccgataatgcggtgc

SEQ ID NO: 177035 - DNA, 25 bp, Artificial
  probe
  misc_feature (1)..(25): SEQ ID NO: 5366; WAN024DZ6_at; Start 9; Stop 33
aatgccacattctaaaaattttgaa

SEQ ID NO: 177036 - DNA, 25 bp, Artificial
  probe
  misc_feature (1)..(25): SEQ ID NO: 5366; WAN024DZ6_at; Start 153; Stop 177
gataatgcggtgctcgtcgatagac

SEQ ID NO: 177037 - DNA, 25 bp, Artificial
  probe
  misc_feature (1)..(25): SEQ ID NO: 5366; WAN024DZ6_at; Start 113; Stop 137
cttcttcattaaccagaaactctgg

SEQ ID NO: 177038 - DNA, 25 bp, Artificial
  probe
  misc_feature (1)..(25): SEQ ID NO: 5366; WAN024DZ6_at; Start 171; Stop 195
gatagactcaatcgcttcaatagtt

SEQ ID NO: 177039 - DNA, 25 bp, Artificial
  probe
  misc_feature (1)..(25): SEQ ID NO: 5366; WAN024DZ6_at; Start 175; Stop 199
gactcaatcgcttcaatagtttggt

SEQ ID NO: 177040 - DNA, 25 bp, Artificial
  probe
  misc_feature (1)..(25): SEQ ID NO: 5366; WAN024DZ6_at; Start 2; Stop 26
tgcgtaaaatgccacattctaaaaa

SEQ ID NO: 177041 - DNA, 25 bp, Artificial
  probe
  misc_feature (1)..(25): SEQ ID NO: 5366; WAN024DZ6_at; Start 122; Stop 146
taaccagaaactctggatgccactg

SEQ ID NO: 177042 - DNA, 25 bp, Artificial
  probe
  misc_feature (1)..(25): SEQ ID NO: 5366; WAN024DZ6_at; Start 191; Stop 215
tagtttggtctcttgaatcaatagc

SEQ ID NO: 177043 - DNA, 25 bp, Artificial
  probe
  misc_feature (1)..(25): SEQ ID NO: 5366; WAN024DZ6_at; Start 72; Stop 96
cagttcattcaataaatactcaaat

SEQ ID NO: 177044 - DNA, 25 bp, Artificial
  probe
  misc_feature (1)..(25): SEQ ID NO: 5366; WAN024DZ6_at; Start 205; Stop 229
gaatcaatagcagttacacggaaat

SEQ ID NO: 177045 - DNA, 25 bp, Artificial
  probe
  misc_feature (1)..(25): SEQ ID NO: 5366; WAN024DZ6_at; Start 201; Stop 225
tcttgaatcaatagcagttacacgg

SEQ ID NO: 177046 - DNA, 25 bp, Artificial
  probe
  misc_feature (1)..(25): SEQ ID NO: 5366; WAN024DZ6_at; Start 219; Stop 243
tacacggaaattaggtgccaaatct

SEQ ID NO: 177047 - DNA, 25 bp, Artificial
  probe
  misc_feature (1)..(25): SEQ ID NO: 5366; WAN024DZ6_at; Start 179; Stop 203
caatcgcttcaatagtttggtctct

SEQ ID NO: 177048 - DNA, 25 bp, Artificial
  probe
  misc_feature (1)..(25): SEQ ID NO: 5366; WAN024DZ6_at; Start 35; Stop 59
aaataaaagaaagaacgaccagatg

SEQ ID NO: 177049 - DNA, 25 bp, Artificial
  probe
  misc_feature (1)..(25): SEQ ID NO: 5366; WAN024DZ6_at; Start 209; Stop 233
caatagcagttacacggaaattagg

SEQ ID NO: 177050 - DNA, 25 bp, Artificial
  probe
  misc_feature (1)..(25): SEQ ID NO: 5366; WAN024DZ6_at; Start 125; Stop 149
ccagaaactctggatgccactgtaa

SEQ ID NO: 177051 - DNA, 25 bp, Artificial
  probe
  misc_feature (1)..(25): SEQ ID NO: 5366; WAN024DZ6_at; Start 51; Stop 75
gaccagatgttccaatcgttacagt

SEQ ID NO: 177052 - DNA, 25 bp, Artificial
  probe
  misc_feature (1)..(25): SEQ ID NO: 5366; WAN024DZ6_at; Start 166; Stop 190
tcgtcgatagactcaatcgcttcaa

SEQ ID NO: 177053 - DNA, 25 bp, Artificial
  probe
  misc_feature (1)..(25): SEQ ID NO: 5366; WAN024DZ6_at; Start 230; Stop 254
taggtgccaaatctttaatgctttg

SEQ ID NO: 177054 - DNA, 25 bp, Artificial
  probe
  misc_feature (1)..(25): SEQ ID NO: 5366; WAN024DZ6_at; Start 104; Stop 128
aattgccatcttcttcattaaccag

SEQ ID NO: 177055 - DNA, 25 bp, Artificial
  probe
  misc_feature (1)..(25): SEQ ID NO: 5366; WAN024DZ6_at; Start 54; Stop 78
cagatgttccaatcgttacagttca

SEQ ID NO: 177056 - DNA, 25 bp, Artificial
  probe
  misc_feature (1)..(25): SEQ ID NO: 5366; WAN024DZ6_at; Start 161; Stop 185
ggtgctcgtcgatagactcaatcgc

SEQ ID NO: 177057 - DNA, 25 bp, Artificial
  probe
  misc_feature (1)..(25): SEQ ID NO: 5366; WAN024DZ6_at; Start 158; Stop 182
tgcggtgctcgtcgatagactcaat

SEQ ID NO: 177058 - DNA, 25 bp, Artificial
  probe
  misc_feature (1)..(25): SEQ ID NO: 5366; WAN024DZ6_at; Start 133; Stop 157
tctggatgccactgtaaaccgataa

SEQ ID NO: 177059 - DNA, 25 bp, Artificial
  probe
  misc_feature (1)..(25): SEQ ID NO: 5366; WAN024DZ6_at; Start 147; Stop 171
taaaccgataatgcggtgctcgtcg

SEQ ID NO: 177060 - DNA, 25 bp, Artificial
  probe
  misc_feature (1)..(25): SEQ ID NO: 5366; WAN024DZ6_at; Start 221; Stop 245
cacggaaattaggtgccaaatcttt

SEQ ID NO: 177061 - DNA, 25 bp, Artificial
  probe
  misc_feature (1)..(25): SEQ ID NO: 5366; WAN024DZ6_at; Start 128; Stop 152
gaaactctggatgccactgtaaacc

SEQ ID NO: 177062 - DNA, 25 bp, Artificial
  probe
  misc_feature (1)..(25): SEQ ID NO: 5366; WAN024DZ6_at; Start 44; Stop 68
aaagaacgaccagatgttccaatcg

SEQ ID NO: 177063 - DNA, 25 bp, Artificial
  probe
  misc_feature (1)..(25): SEQ ID NO: 5366; WAN024DZ6_at; Start 88; Stop 112
tactcaaataattctaaattgccat

SEQ ID NO: 177064 - DNA, 25 bp, Artificial
  probe
  misc_feature (1)..(25): SEQ ID NO: 5366; WAN024DZ6_at; Start 155; Stop 179
taatgcggtgctcgtcgatagactc

SEQ ID NO: 177065 - DNA, 25 bp, Artificial
  probe
  misc_feature (1)..(25): SEQ ID NO: 5366; WAN024DZ6_at; Start 214; Stop 238
gcagttacacggaaattaggtgcca

SEQ ID NO: 177066 - DNA, 25 bp, Artificial
  probe
  misc_feature (1)..(25): SEQ ID NO: 5366; WAN024DZ6_at; Start 137; Stop 161
gatgccactgtaaaccgataatgcg

SEQ ID NO: 177067 - DNA, 25 bp, Artificial
  probe
  misc_feature (1)..(25): SEQ ID NO: 5438; WAN024DZ7_at; Start 126; Stop 150
taagcgttatgatagaaaagaagaa

SEQ ID NO: 177068 - DNA, 25 bp, Artificial
  probe
  misc_feature (1)..(25): SEQ ID NO: 5438; WAN024DZ7_at; Start 4; Stop 28
gaacatctggtcgttctttctttta

SEQ ID NO: 177069 - DNA, 25 bp, Artificial
  probe
  misc_feature (1)..(25): SEQ ID NO: 5438; WAN024DZ7_at; Start 2; Stop 26
tggaacatctggtcgttctttcttt

SEQ ID NO: 177070 - DNA, 25 bp, Artificial
  probe
  misc_feature (1)..(25): SEQ ID NO: 5438; WAN024DZ7_at; Start 145; Stop 169
gaagaaatattggaggaagaacatg

SEQ ID NO: 177071 - DNA, 25 bp, Artificial
  probe
  misc_feature (1)..(25): SEQ ID NO: 5438; WAN024DZ7_at; Start 116; Stop 140
aaaacgaaggtaagcgttatgatag

SEQ ID NO: 177072 - DNA, 25 bp, Artificial
  probe
  misc_feature (1)..(25): SEQ ID NO: 5438; WAN024DZ7_at; Start 43; Stop 67
ttagaatgtggcattttacgcaaac

SEQ ID NO: 177073 - DNA, 25 bp, Artificial
  probe
  misc_feature (1)..(25): SEQ ID NO: 5438; WAN024DZ7_at; Start 150; Stop 174
aatattggaggaagaacatgtcaca

SEQ ID NO: 177074 - DNA, 25 bp, Artificial
  probe
  misc_feature (1)..(25): SEQ ID NO: 5438; WAN024DZ7_at; Start 149; Stop 173
aaatattggaggaagaacatgtcac

SEQ ID NO: 177075 - DNA, 25 bp, Artificial
  probe
  misc_feature (1)..(25): SEQ ID NO: 5438; WAN024DZ7_at; Start 133; Stop 157
tatgatagaaaagaagaaatattgg

SEQ ID NO: 177076 - DNA, 25 bp, Artificial
  probe
  misc_feature (1)..(25): SEQ ID NO: 5438; WAN024DZ7_at; Start 151; Stop 175
atattggaggaagaacatgtcacat

SEQ ID NO: 177077 - DNA, 25 bp, Artificial
  probe
  misc_feature (1)..(25): SEQ ID NO: 5438; WAN024DZ7_at; Start 7; Stop 31
catctggtcgttctttcttttattt

SEQ ID NO: 177078 - DNA, 25 bp, Artificial
  probe
  misc_feature (1)..(25): SEQ ID NO: 5438; WAN024DZ7_at; Start 120; Stop 144
cgaaggtaagcgttatgatagaaaa

SEQ ID NO: 177079 - DNA, 25 bp, Artificial
  probe
  misc_feature (1)..(25): SEQ ID NO: 5438; WAN024DZ7_at; Start 33; Stop 57
ttcaaaatttttagaatgtggcatt

SEQ ID NO: 177080 - DNA, 25 bp, Artificial
  probe
  misc_feature (1)..(25): SEQ ID NO: 5438; WAN024DZ7_at; Start 45; Stop 69
agaatgtggcattttacgcaaacgt

SEQ ID NO: 177081 - DNA, 25 bp, Artificial
  probe
  misc_feature (1)..(25): SEQ ID NO: 5438; WAN024DZ7_at; Start 148; Stop 172
gaaatattggaggaagaacatgtca

SEQ ID NO: 177082 - DNA, 25 bp, Artificial
  probe
  misc_feature (1)..(25): SEQ ID NO: 5438; WAN024DZ7_at; Start 153; Stop 177
attggaggaagaacatgtcacatat

SEQ ID NO: 177083 - DNA, 25 bp, Artificial
  probe
  misc_feature (1)..(25): SEQ ID NO: 5438; WAN024DZ7_at; Start 143; Stop 167
aagaagaaatattggaggaagaaca

SEQ ID NO: 177084 - DNA, 25 bp, Artificial
  probe
  misc_feature (1)..(25): SEQ ID NO: 5438; WAN024DZ7_at; Start 156; Stop 180
ggaggaagaacatgtcacatattaa

SEQ ID NO: 177085 - DNA, 25 bp, Artificial
  probe
  misc_feature (1)..(25): SEQ ID NO: 5438; WAN024DZ7_at; Start 40; Stop 64
tttttagaatgtggcattttacgca

SEQ ID NO: 177086 - DNA, 25 bp, Artificial
  probe
  misc_feature (1)..(25): SEQ ID NO: 5438; WAN024DZ7_at; Start 129; Stop 153
gcgttatgatagaaaagaagaaata

SEQ ID NO: 177087 - DNA, 25 bp, Artificial
  probe
  misc_feature (1)..(25): SEQ ID NO: 5438; WAN024DZ7_at; Start 121; Stop 145
gaaggtaagcgttatgatagaaaag

SEQ ID NO: 177088 - DNA, 25 bp, Artificial
  probe
  misc_feature (1)..(25): SEQ ID NO: 5438; WAN024DZ7_at; Start 1; Stop 25
ttggaacatctggtcgttctttctt

SEQ ID NO: 177089 - DNA, 25 bp, Artificial
  probe
  misc_feature (1)..(25): SEQ ID NO: 5438; WAN024DZ7_at; Start 140; Stop 164
gaaaagaagaaatattggaggaaga

SEQ ID NO: 177090 - DNA, 25 bp, Artificial
  probe
  misc_feature (1)..(25): SEQ ID NO: 5438; WAN024DZ7_at; Start 124; Stop 148
ggtaagcgttatgatagaaaagaag

SEQ ID NO: 177091 - DNA, 25 bp, Artificial
  probe
  misc_feature (1)..(25): SEQ ID NO: 5438; WAN024DZ7_at; Start 78; Stop 102
tgataaaaattggagaaattcgaca

SEQ ID NO: 177092 - DNA, 25 bp, Artificial
  probe
  misc_feature (1)..(25): SEQ ID NO: 5438; WAN024DZ7_at; Start 79; Stop 103
gataaaaattggagaaattcgacaa

SEQ ID NO: 177093 - DNA, 25 bp, Artificial
  probe
  misc_feature (1)..(25): SEQ ID NO: 5438; WAN024DZ7_at; Start 117; Stop 141
aaacgaaggtaagcgttatgataga

SEQ ID NO: 177094 - DNA, 25 bp, Artificial
  probe
  misc_feature (1)..(25): SEQ ID NO: 5438; WAN024DZ7_at; Start 138; Stop 162
tagaaaagaagaaatattggaggaa

SEQ ID NO: 177095 - DNA, 25 bp, Artificial
  probe
  misc_feature (1)..(25): SEQ ID NO: 5438; WAN024DZ7_at; Start 154; Stop 178
ttggaggaagaacatgtcacatatt

SEQ ID NO: 177096 - DNA, 25 bp, Artificial
  probe
  misc_feature (1)..(25): SEQ ID NO: 5438; WAN024DZ7_at; Start 147; Stop 171
agaaatattggaggaagaacatgtc

SEQ ID NO: 177097 - DNA, 25 bp, Artificial
  probe
  misc_feature (1)..(25): SEQ ID NO: 5438; WAN024DZ7_at; Start 152; Stop 176
tattggaggaagaacatgtcacata

SEQ ID NO: 177098 - DNA, 25 bp, Artificial
  probe
  misc_feature (1)..(25): SEQ ID NO: 5438; WAN024DZ7_at; Start 44; Stop 68
tagaatgtggcattttacgcaaacg

SEQ ID NO: 177099 - DNA, 25 bp, Artificial
  probe
  misc_feature (1)..(25): SEQ ID NO: 5438; WAN024DZ7_at; Start 136; Stop 160
gatagaaaagaagaaatattggagg

SEQ ID NO: 177100 - DNA, 25 bp, Artificial
  probe
  misc_feature (1)..(25): SEQ ID NO: 5438; WAN024DZ7_at; Start 155; Stop 179
tggaggaagaacatgtcacatatta

SEQ ID NO: 177101 - DNA, 25 bp, Artificial
  probe
  misc_feature (1)..(25): SEQ ID NO: 5156; WAN024DZ8_at; Start 226; Stop 250
gacaaactcattttgacaggaggcc

SEQ ID NO: 177102 - DNA, 25 bp, Artificial
  probe
  misc_feature (1)..(25): SEQ ID NO: 5156; WAN024DZ8_at; Start 130; Stop 154
tgtagattcgcagagatcattcgtc

SEQ ID NO: 177103 - DNA, 25 bp, Artificial
  probe
  misc_feature (1)..(25): SEQ ID NO: 5156; WAN024DZ8_at; Start 176; Stop 200
tcattcctgttggtgatgagtcagt

SEQ ID NO: 177104 - DNA, 25 bp, Artificial
  probe
  misc_feature (1)..(25): SEQ ID NO: 5156; WAN024DZ8_at; Start 461; Stop 485
ctttcgggacatctcactctattga

SEQ ID NO: 177105 - DNA, 25 bp, Artificial
  probe
  misc_feature (1)..(25): SEQ ID NO: 5156; WAN024DZ8_at; Start 658; Stop 682
ttacagtggcatccagagtttctgg

SEQ ID NO: 177106 - DNA, 25 bp, Artificial
  probe
  misc_feature (1)..(25): SEQ ID NO: 5156; WAN024DZ8_at; Start 312; Stop 336
ggtccgtgacgaatttgaattggca

SEQ ID NO: 177107 - DNA, 25 bp, Artificial
  probe
  misc_feature (1)..(25): SEQ ID NO: 5156; WAN024DZ8_at; Start 445; Stop 469
cactggcaaggactacctttcggga

SEQ ID NO: 177108 - DNA, 25 bp, Artificial
  probe
  misc_feature (1)..(25): SEQ ID NO: 5156; WAN024DZ8_at; Start 29; Stop 53
cattcgaaaggagaggcatcatggc

SEQ ID NO: 177109 - DNA, 25 bp, Artificial
  probe
  misc_feature (1)..(25): SEQ ID NO: 5156; WAN024DZ8_at; Start 581; Stop 605
tccgtgtaactgctattgattcaag

SEQ ID NO: 177110 - DNA, 25 bp, Artificial
  probe
  misc_feature (1)..(25): SEQ ID NO: 5156; WAN024DZ8_at; Start 269; Stop 293
tttatggagagaaaaagaccgtcga

SEQ ID NO: 177111 - DNA, 25 bp, Artificial
  probe
  misc_feature (1)..(25): SEQ ID NO: 5156; WAN024DZ8_at; Start 526; Stop 550
gaaagtcaggtcaactcagtccatc

SEQ ID NO: 177112 - DNA, 25 bp, Artificial
  probe
  misc_feature (1)..(25): SEQ ID NO: 5156; WAN024DZ8_at; Start 602; Stop 626
caagagaccaaactattgaagcgat

SEQ ID NO: 177113 - DNA, 25 bp, Artificial
  probe
  misc_feature (1)..(25): SEQ ID NO: 5156; WAN024DZ8_at; Start 328; Stop 352
gaattggcactcttgaaggaagcgc

SEQ ID NO: 177114 - DNA, 25 bp, Artificial
  probe
  misc_feature (1)..(25): SEQ ID NO: 5156; WAN024DZ8_at; Start 565; Stop 589
gatttggcacctaatttccgtgtaa

SEQ ID NO: 177115 - DNA, 25 bp, Artificial
  probe
  misc_feature (1)..(25): SEQ ID NO: 5156; WAN024DZ8_at; Start 146; Stop 170
tcattcgtcaagtcggtggtctccc

SEQ ID NO: 177116 - DNA, 25 bp, Artificial
  probe
  misc_feature (1)..(25): SEQ ID NO: 5156; WAN024DZ8_at; Start 160; Stop 184
ggtggtctccctttagtcattcctg

SEQ ID NO: 177117 - DNA, 25 bp, Artificial
  probe
  misc_feature (1)..(25): SEQ ID NO: 5156; WAN024DZ8_at; Start 44; Stop 68
gcatcatggctagaacggttgtagg

SEQ ID NO: 177118 - DNA, 25 bp, Artificial
  probe
  misc_feature (1)..(25): SEQ ID NO: 5156; WAN024DZ8_at; Start 480; Stop 504
tattgagacagtagaaggaagcgtg

SEQ ID NO: 177119 - DNA, 25 bp, Artificial
  probe
  misc_feature (1)..(25): SEQ ID NO: 5156; WAN024DZ8_at; Start 365; Stop 389
aaccaattatggcaatctgtcgcgg

SEQ ID NO: 177120 - DNA, 25 bp, Artificial
  probe
  misc_feature (1)..(25): SEQ ID NO: 5156; WAN024DZ8_at; Start 395; Stop 419
aacttgtcaatgttgcctttggtgg

SEQ ID NO: 177121 - DNA, 25 bp, Artificial
  probe
  misc_feature (1)..(25): SEQ ID NO: 5156; WAN024DZ8_at; Start 541; Stop 565
tcagtccatcgtcaaagcattaaag

SEQ ID NO: 177122 - DNA, 25 bp, Artificial
  probe
  misc_feature (1)..(25): SEQ ID NO: 5156; WAN024DZ8_at; Start 346; Stop 370
gaagcgcttcgtcagaataaaccaa

SEQ ID NO: 177123 - DNA, 25 bp, Artificial
  probe
  misc_feature (1)..(25): SEQ ID NO: 5156; WAN024DZ8_at; Start 415; Stop 439
ggtggaaccctcaatcaagaaatcg

SEQ ID NO: 177124 - DNA, 25 bp, Artificial
  probe
  misc_feature (1)..(25): SEQ ID NO: 5156; WAN024DZ8_at; Start 83; Stop 107
tatgtcccgtagacgcagaaggcaa

SEQ ID NO: 177125 - DNA, 25 bp, Artificial
  probe
  misc_feature (1)..(25): SEQ ID NO: 5156; WAN024DZ8_at; Start 68; Stop 92
gagttgctgcaaatctatgtcccgt

SEQ ID NO: 177126 - DNA, 25 bp, Artificial
  probe
  misc_feature (1)..(25): SEQ ID NO: 5156; WAN024DZ8_at; Start 633; Stop 657
tatcgacgagcaccgcattatcggt

SEQ ID NO: 177127 - DNA, 25 bp, Artificial
  probe
  misc_feature (1)..(25): SEQ ID NO: 5156; WAN024DZ8_at; Start 501; Stop 525
cgtggtggctaagctatttgggaaa

SEQ ID NO: 177128 - DNA, 25 bp, Artificial
  probe
  misc_feature (1)..(25): SEQ ID NO: 5156; WAN024DZ8_at; Start 12; Stop 36
gataggactatcgttagcattcgaa

SEQ ID NO: 177129 - DNA, 25 bp, Artificial
  probe
  misc_feature (1)..(25): SEQ ID NO: 5156; WAN024DZ8_at; Start 648; Stop 672
cattatcggtttacagtggcatcca

SEQ ID NO: 177130 - DNA, 25 bp, Artificial
  probe
  misc_feature (1)..(25): SEQ ID NO: 5156; WAN024DZ8_at; Start 619; Stop 643
gaagcgattgagtctatcgacgagc

SEQ ID NO: 177131 - DNA, 25 bp, Artificial
  probe
  misc_feature (1)..(25): SEQ ID NO: 5156; WAN024DZ8_at; Start 380; Stop 404
tctgtcgcggtgtccaacttgtcaa

SEQ ID NO: 177132 - DNA, 25 bp, Artificial
  probe
  misc_feature (1)..(25): SEQ ID NO: 5156; WAN024DZ8_at; Start 239; Stop 263
tgacaggaggccaaaatgttcatcc

SEQ ID NO: 177133 - DNA, 25 bp, Artificial
  probe
  misc_feature (1)..(25): SEQ ID NO: 5156; WAN024DZ8_at; Start 298; Stop 322
gatgattacaatctggtccgtgacg

SEQ ID NO: 177134 - DNA, 25 bp, Artificial
  probe
  misc_feature (1)..(25): SEQ ID NO: 5156; WAN024DZ8_at; Start 430; Stop 454
caagaaatcgaaggtcactggcaag

SEQ ID NO: 177135 - DNA, 25 bp, Artificial
  probe
  misc_feature (1)..(25): SEQ ID NO: 5399; WAN024DZ9_at; Start 33; Stop 57
catcaccatctgtgtgggcaagaag

SEQ ID NO: 177136 - DNA, 25 bp, Artificial
  probe
  misc_feature (1)..(25): SEQ ID NO: 5399; WAN024DZ9_at; Start 29; Stop 53
ggtacatcaccatctgtgtgggcaa

SEQ ID NO: 177137 - DNA, 25 bp, Artificial
  probe
  misc_feature (1)..(25): SEQ ID NO: 5399; WAN024DZ9_at; Start 45; Stop 69
tgtgggcaagaagaacaccgtcagt

SEQ ID NO: 177138 - DNA, 25 bp, Artificial
  probe
  misc_feature (1)..(25): SEQ ID NO: 5399; WAN024DZ9_at; Start 43; Stop 67
tgtgtgggcaagaagaacaccgtca

SEQ ID NO: 177139 - DNA, 25 bp, Artificial
  probe
  misc_feature (1)..(25): SEQ ID NO: 5399; WAN024DZ9_at; Start 195; Stop 219
tgatacgagttccttcttggataaa

SEQ ID NO: 177140 - DNA, 25 bp, Artificial
  probe
  misc_feature (1)..(25): SEQ ID NO: 5399; WAN024DZ9_at; Start 168; Stop 192
tgtcaacacggacaactgtttcaaa

SEQ ID NO: 177141 - DNA, 25 bp, Artificial
  probe
  misc_feature (1)..(25): SEQ ID NO: 5399; WAN024DZ9_at; Start 16; Stop 40
cacatacatgtttggtacatcacca

SEQ ID NO: 177142 - DNA, 25 bp, Artificial
  probe
  misc_feature (1)..(25): SEQ ID NO: 5399; WAN024DZ9_at; Start 84; Stop 108
caaagtcaacgtcttttccttgaag

SEQ ID NO: 177143 - DNA, 25 bp, Artificial
  probe
  misc_feature (1)..(25): SEQ ID NO: 5399; WAN024DZ9_at; Start 162; Stop 186
gaggtttgtcaacacggacaactgt

SEQ ID NO: 177144 - DNA, 25 bp, Artificial
  probe
  misc_feature (1)..(25): SEQ ID NO: 5399; WAN024DZ9_at; Start 36; Stop 60
caccatctgtgtgggcaagaagaac

SEQ ID NO: 177145 - DNA, 25 bp, Artificial
  probe
  misc_feature (1)..(25): SEQ ID NO: 5399; WAN024DZ9_at; Start 26; Stop 50
tttggtacatcaccatctgtgtggg

SEQ ID NO: 177146 - DNA, 25 bp, Artificial
  probe
  misc_feature (1)..(25): SEQ ID NO: 5399; WAN024DZ9_at; Start 102; Stop 126
cttgaaggtaaccaagtccgtcaag

SEQ ID NO: 177147 - DNA, 25 bp, Artificial
  probe
  misc_feature (1)..(25): SEQ ID NO: 5399; WAN024DZ9_at; Start 114; Stop 138
caagtccgtcaaggtcttcttccaa

SEQ ID NO: 177148 - DNA, 25 bp, Artificial
  probe
  misc_feature (1)..(25): SEQ ID NO: 5399; WAN024DZ9_at; Start 191; Stop 215
aacatgatacgagttccttcttgga

SEQ ID NO: 177149 - DNA, 25 bp, Artificial
  probe
  misc_feature (1)..(25): SEQ ID NO: 5399; WAN024DZ9_at; Start 22; Stop 46
catgtttggtacatcaccatctgtg

SEQ ID NO: 177150 - DNA, 25 bp, Artificial
  probe
  misc_feature (1)..(25): SEQ ID NO: 5399; WAN024DZ9_at; Start 159; Stop 183
tacgaggtttgtcaacacggacaac

SEQ ID NO: 177151 - DNA, 25 bp, Artificial
  probe
  misc_feature (1)..(25): SEQ ID NO: 5399; WAN024DZ9_at; Start 3; Stop 27
gctctggaagagtcacatacatgtt

SEQ ID NO: 177152 - DNA, 25 bp, Artificial
  probe
  misc_feature (1)..(25): SEQ ID NO: 5399; WAN024DZ9_at; Start 184; Stop 208
tgtttcaaacatgatacgagttcct

SEQ ID NO: 177153 - DNA, 25 bp, Artificial
  probe
  misc_feature (1)..(25): SEQ ID NO: 5399; WAN024DZ9_at; Start 120; Stop 144
cgtcaaggtcttcttccaaagtagg

SEQ ID NO: 177154 - DNA, 25 bp, Artificial
  probe
  misc_feature (1)..(25): SEQ ID NO: 5399; WAN024DZ9_at; Start 5; Stop 29
tctggaagagtcacatacatgtttg

SEQ ID NO: 177155 - DNA, 25 bp, Artificial
  probe
  misc_feature (1)..(25): SEQ ID NO: 5399; WAN024DZ9_at; Start 100; Stop 124
tccttgaaggtaaccaagtccgtca

SEQ ID NO: 177156 - DNA, 25 bp, Artificial
  probe
  misc_feature (1)..(25): SEQ ID NO: 5399; WAN024DZ9_at; Start 56; Stop 80
agaacaccgtcagttgcttttttgt

SEQ ID NO: 177157 - DNA, 25 bp, Artificial
  probe
  misc_feature (1)..(25): SEQ ID NO: 5399; WAN024DZ9_at; Start 132; Stop 156
cttccaaagtaggaataagcacgtt

SEQ ID NO: 177158 - DNA, 25 bp, Artificial
  probe
  misc_feature (1)..(25): SEQ ID NO: 5399; WAN024DZ9_at; Start 206; Stop 230
ccttcttggataaattgaccaagtg

SEQ ID NO: 177159 - DNA, 25 bp, Artificial
  probe
  misc_feature (1)..(25): SEQ ID NO: 5399; WAN024DZ9_at; Start 50; Stop 74
gcaagaagaacaccgtcagttgctt

SEQ ID NO: 177160 - DNA, 25 bp, Artificial
  probe
  misc_feature (1)..(25): SEQ ID NO: 5399; WAN024DZ9_at; Start 174; Stop 198
cacggacaactgtttcaaacatgat

SEQ ID NO: 177161 - DNA, 25 bp, Artificial
  probe
  misc_feature (1)..(25): SEQ ID NO: 5399; WAN024DZ9_at; Start 41; Stop 65
tctgtgtgggcaagaagaacaccgt

SEQ ID NO: 177162 - DNA, 25 bp, Artificial
  probe
  misc_feature (1)..(25): SEQ ID NO: 5399; WAN024DZ9_at; Start 201; Stop 225
gagttccttcttggataaattgacc

SEQ ID NO: 177163 - DNA, 25 bp, Artificial
  probe
  misc_feature (1)..(25): SEQ ID NO: 5399; WAN024DZ9_at; Start 123; Stop 147
caaggtcttcttccaaagtaggaat

SEQ ID NO: 177164 - DNA, 25 bp, Artificial
  probe
  misc_feature (1)..(25): SEQ ID NO: 5399; WAN024DZ9_at; Start 157; Stop 181
tttacgaggtttgtcaacacggaca

SEQ ID NO: 177165 - DNA, 25 bp, Artificial
  probe
  misc_feature (1)..(25): SEQ ID NO: 5399; WAN024DZ9_at; Start 47; Stop 71
tgggcaagaagaacaccgtcagttg

SEQ ID NO: 177166 - DNA, 25 bp, Artificial
  probe
  misc_feature (1)..(25): SEQ ID NO: 5399; WAN024DZ9_at; Start 130; Stop 154
ttcttccaaagtaggaataagcacg

SEQ ID NO: 177167 - DNA, 25 bp, Artificial
  probe
  misc_feature (1)..(25): SEQ ID NO: 5399; WAN024DZ9_at; Start 9; Stop 33
gaagagtcacatacatgtttggtac

SEQ ID NO: 177168 - DNA, 25 bp, Artificial
  probe
  misc_feature (1)..(25): SEQ ID NO: 5399; WAN024DZ9_at; Start 116; Stop 140
agtccgtcaaggtcttcttccaaag

SEQ ID NO: 177169 - DNA, 25 bp, Artificial
  probe
  misc_feature (1)..(25): SEQ ID NO: 3985; WAN024DZA_at; Start 217; Stop 241
tgtagtctttgcgagctgcattcgc

SEQ ID NO: 177170 - DNA, 25 bp, Artificial
  probe
  misc_feature (1)..(25): SEQ ID NO: 3985; WAN024DZA_at; Start 66; Stop 90
gattcaccagccaattgtttccacc

SEQ ID NO: 177171 - DNA, 25 bp, Artificial
  probe
  misc_feature (1)..(25): SEQ ID NO: 3985; WAN024DZA_at; Start 222; Stop 246
tctttgcgagctgcattcgcacctt

SEQ ID NO: 177172 - DNA, 25 bp, Artificial
  probe
  misc_feature (1)..(25): SEQ ID NO: 3985; WAN024DZA_at; Start 128; Stop 152
caagatctcagttgcatagccttta

SEQ ID NO: 177173 - DNA, 25 bp, Artificial
  probe
  misc_feature (1)..(25): SEQ ID NO: 3985; WAN024DZA_at; Start 8; Stop 32
caagtcagttgagaagttggctgaa

SEQ ID NO: 177174 - DNA, 25 bp, Artificial
  probe
  misc_feature (1)..(25): SEQ ID NO: 3985; WAN024DZA_at; Start 213; Stop 237
gaagtgtagtctttgcgagctgcat

SEQ ID NO: 177175 - DNA, 25 bp, Artificial
  probe
  misc_feature (1)..(25): SEQ ID NO: 3985; WAN024DZA_at; Start 156; Stop 180
taaaggatgttacgaacagctgcgt

SEQ ID NO: 177176 - DNA, 25 bp, Artificial
  probe
  misc_feature (1)..(25): SEQ ID NO: 3985; WAN024DZA_at; Start 208; Stop 232
tgtctgaagtgtagtctttgcgagc

SEQ ID NO: 177177 - DNA, 25 bp, Artificial
  probe
  misc_feature (1)..(25): SEQ ID NO: 3985; WAN024DZA_at; Start 177; Stop 201
gcgtattggtaagcttcgttttcag

SEQ ID NO: 177178 - DNA, 25 bp, Artificial
  probe
  misc_feature (1)..(25): SEQ ID NO: 3985; WAN024DZA_at; Start 180; Stop 204
tattggtaagcttcgttttcagaga

SEQ ID NO: 177179 - DNA, 25 bp, Artificial
  probe
  misc_feature (1)..(25): SEQ ID NO: 3985; WAN024DZA_at; Start 136; Stop 160
cagttgcatagcctttacgataaag

SEQ ID NO: 177180 - DNA, 25 bp, Artificial
  probe
  misc_feature (1)..(25): SEQ ID NO: 3985; WAN024DZA_at; Start 77; Stop 101
caattgtttccaccattctgagaag

SEQ ID NO: 177181 - DNA, 25 bp, Artificial
  probe
  misc_feature (1)..(25): SEQ ID NO: 3985; WAN024DZA_at; Start 98; Stop 122
gaagtattgaagtgatggctcatag

SEQ ID NO: 177182 - DNA, 25 bp, Artificial
  probe
  misc_feature (1)..(25): SEQ ID NO: 3985; WAN024DZA_at; Start 75; Stop 99
gccaattgtttccaccattctgaga

SEQ ID NO: 177183 - DNA, 25 bp, Artificial
  probe
  misc_feature (1)..(25): SEQ ID NO: 3985; WAN024DZA_at; Start 22; Stop 46
agttggctgaagttgggtagatacc

SEQ ID NO: 177184 - DNA, 25 bp, Artificial
  probe
  misc_feature (1)..(25): SEQ ID NO: 3985; WAN024DZA_at; Start 131; Stop 155
gatctcagttgcatagcctttacga

SEQ ID NO: 177185 - DNA, 25 bp, Artificial
  probe
  misc_feature (1)..(25): SEQ ID NO: 3985; WAN024DZA_at; Start 114; Stop 138
ggctcatagtttaccaagatctcag

SEQ ID NO: 177186 - DNA, 25 bp, Artificial
  probe
  misc_feature (1)..(25): SEQ ID NO: 3985; WAN024DZA_at; Start 85; Stop 109
tccaccattctgagaagtattgaag

SEQ ID NO: 177187 - DNA, 25 bp, Artificial
  probe
  misc_feature (1)..(25): SEQ ID NO: 3985; WAN024DZA_at; Start 52; Stop 76
ggtcttttccttctgattcaccagc

SEQ ID NO: 177188 - DNA, 25 bp, Artificial
  probe
  misc_feature (1)..(25): SEQ ID NO: 3985; WAN024DZA_at; Start 199; Stop 223
cagagattttgtctgaagtgtagtc

SEQ ID NO: 177189 - DNA, 25 bp, Artificial
  probe
  misc_feature (1)..(25): SEQ ID NO: 3985; WAN024DZA_at; Start 118; Stop 142
catagtttaccaagatctcagttgc

SEQ ID NO: 177190 - DNA, 25 bp, Artificial
  probe
  misc_feature (1)..(25): SEQ ID NO: 3985; WAN024DZA_at; Start 167; Stop 191
acgaacagctgcgtattggtaagct

SEQ ID NO: 177191 - DNA, 25 bp, Artificial
  probe
  misc_feature (1)..(25): SEQ ID NO: 3985; WAN024DZA_at; Start 24; Stop 48
ttggctgaagttgggtagatacctt

SEQ ID NO: 177192 - DNA, 25 bp, Artificial
  probe
  misc_feature (1)..(25): SEQ ID NO: 3985; WAN024DZA_at; Start 151; Stop 175
tacgataaaggatgttacgaacagc

SEQ ID NO: 177193 - DNA, 25 bp, Artificial
  probe
  misc_feature (1)..(25): SEQ ID NO: 3985; WAN024DZA_at; Start 161; Stop 185
gatgttacgaacagctgcgtattgg

SEQ ID NO: 177194 - DNA, 25 bp, Artificial
  probe
  misc_feature (1)..(25): SEQ ID NO: 3985; WAN024DZA_at; Start 125; Stop 149
taccaagatctcagttgcatagcct

SEQ ID NO: 177195 - DNA, 25 bp, Artificial
  probe
  misc_feature (1)..(25): SEQ ID NO: 3985; WAN024DZA_at; Start 106; Stop 130
gaagtgatggctcatagtttaccaa

SEQ ID NO: 177196 - DNA, 25 bp, Artificial
  probe
  misc_feature (1)..(25): SEQ ID NO: 3985; WAN024DZA_at; Start 93; Stop 117
tctgagaagtattgaagtgatggct

SEQ ID NO: 177197 - DNA, 25 bp, Artificial
  probe
  misc_feature (1)..(25): SEQ ID NO: 3985; WAN024DZA_at; Start 63; Stop 87
tctgattcaccagccaattgtttcc

SEQ ID NO: 177198 - DNA, 25 bp, Artificial
  probe
  misc_feature (1)..(25): SEQ ID NO: 3985; WAN024DZA_at; Start 227; Stop 251
gcgagctgcattcgcaccttccata

SEQ ID NO: 177199 - DNA, 25 bp, Artificial
  probe
  misc_feature (1)..(25): SEQ ID NO: 3985; WAN024DZA_at; Start 187; Stop 211
aagcttcgttttcagagattttgtc

SEQ ID NO: 177200 - DNA, 25 bp, Artificial
  probe
  misc_feature (1)..(25): SEQ ID NO: 3985; WAN024DZA_at; Start 170; Stop 194
aacagctgcgtattggtaagcttcg

SEQ ID NO: 177201 - DNA, 25 bp, Artificial
  probe
  misc_feature (1)..(25): SEQ ID NO: 3985; WAN024DZA_at; Start 2; Stop 26
tgagtgcaagtcagttgagaagttg

SEQ ID NO: 177202 - DNA, 25 bp, Artificial
  probe
  misc_feature (1)..(25): SEQ ID NO: 3985; WAN024DZA_at; Start 28; Stop 52
ctgaagttgggtagatacctttttg

SEQ ID NO: 177203 - DNA, 25 bp, Artificial
  probe
  misc_feature (1)..(25): SEQ ID NO: 2849; WAN024DZB_at; Start 951; Stop 975
tatccaagaaggaactcgtatcatg

SEQ ID NO: 177204 - DNA, 25 bp, Artificial
  probe
  misc_feature (1)..(25): SEQ ID NO: 2849; WAN024DZB_at; Start 256; Stop 280
taccttggtgcaaaagcagcaatcg

SEQ ID NO: 177205 - DNA, 25 bp, Artificial
  probe
  misc_feature (1)..(25): SEQ ID NO: 2849; WAN024DZB_at; Start 201; Stop 225
tgagcaaatcaagtcagacagcgat

SEQ ID NO: 177206 - DNA, 25 bp, Artificial
  probe
  misc_feature (1)..(25): SEQ ID NO: 2849; WAN024DZB_at; Start 561; Stop 585
taaggttgaagcagacgctaacggt

SEQ ID NO: 177207 - DNA, 25 bp, Artificial
  probe
  misc_feature (1)..(25): SEQ ID NO: 2849; WAN024DZB_at; Start 1113; Stop 1137
tcttgcccacacagatggtgatgta

SEQ ID NO: 177208 - DNA, 25 bp, Artificial
  probe
  misc_feature (1)..(25): SEQ ID NO: 2849; WAN024DZB_at; Start 623; Stop 647
gcttctcagtattgacagccgttgg

SEQ ID NO: 177209 - DNA, 25 bp, Artificial
  probe
  misc_feature (1)..(25): SEQ ID NO: 2849; WAN024DZB_at; Start 742; Stop 766
gaaaacgaagcttaccaatacgcag

SEQ ID NO: 177210 - DNA, 25 bp, Artificial
  probe
  misc_feature (1)..(25): SEQ ID NO: 2849; WAN024DZB_at; Start 175; Stop 199
gaatttgaccgcatcttgaaagctg

SEQ ID NO: 177211 - DNA, 25 bp, Artificial
  probe
  misc_feature (1)..(25): SEQ ID NO: 2849; WAN024DZB_at; Start 1255; Stop 1279
caaccaggtgttgaagcttataaac

SEQ ID NO: 177212 - DNA, 25 bp, Artificial
  probe
  misc_feature (1)..(25): SEQ ID NO: 2849; WAN024DZB_at; Start 1322; Stop 1346
tgagcaaagaacttaacgcacgtct

SEQ ID NO: 177213 - DNA, 25 bp, Artificial
  probe
  misc_feature (1)..(25): SEQ ID NO: 2849; WAN024DZB_at; Start 1097; Stop 1121
caactgacggtgttcttcttgccca

SEQ ID NO: 177214 - DNA, 25 bp, Artificial
  probe
  misc_feature (1)..(25): SEQ ID NO: 2849; WAN024DZB_at; Start 437; Stop 461
caggtacaacaactgaaccagcgat

SEQ ID NO: 177215 - DNA, 25 bp, Artificial
  probe
  misc_feature (1)..(25): SEQ ID NO: 2849; WAN024DZB_at; Start 524; Stop 548
gtatctatgcaacaactgaccgcca

SEQ ID NO: 177216 - DNA, 25 bp, Artificial
  probe
  misc_feature (1)..(25): SEQ ID NO: 2849; WAN024DZB_at; Start 1279; Stop 1303
cgtaacatgtttgcccttcttggaa

SEQ ID NO: 177217 - DNA, 25 bp, Artificial
  probe
  misc_feature (1)..(25): SEQ ID NO: 2849; WAN024DZB_at; Start 1028; Stop 1052
ctttggaagaagaccttgacggact

SEQ ID NO: 177218 - DNA, 25 bp, Artificial
  probe
  misc_feature (1)..(25): SEQ ID NO: 2849; WAN024DZB_at; Start 37; Stop 61
gacaaatttgttgcaccacatgaag

SEQ ID NO: 177219 - DNA, 25 bp, Artificial
  probe
  misc_feature (1)..(25): SEQ ID NO: 2849; WAN024DZB_at; Start 455; Stop 479
cagcgattgctttccgtgtctttaa

SEQ ID NO: 177220 - DNA, 25 bp, Artificial
  probe
  misc_feature (1)..(25): SEQ ID NO: 2849; WAN024DZB_at; Start 1141; Stop 1165
aacatgtatgtgactcttccagagc

SEQ ID NO: 177221 - DNA, 25 bp, Artificial
  probe
  misc_feature (1)..(25): SEQ ID NO: 2849; WAN024DZB_at; Start 1155; Stop 1179
tcttccagagcaagacgctttcact

SEQ ID NO: 177222 - DNA, 25 bp, Artificial
  probe
  misc_feature (1)..(25): SEQ ID NO: 2849; WAN024DZB_at; Start 329; Stop 353
aagctccacaaatcctttacgcagg

SEQ ID NO: 177223 - DNA, 25 bp, Artificial
  probe
  misc_feature (1)..(25): SEQ ID NO: 2849; WAN024DZB_at; Start 787; Stop 811
cgtaaaggctatgcaactgagatct

SEQ ID NO: 177224 - DNA, 25 bp, Artificial
  probe
  misc_feature (1)..(25): SEQ ID NO: 2849; WAN024DZB_at; Start 108; Stop 132
taaaggaactggtgctggtagcgac

SEQ ID NO: 177225 - DNA, 25 bp, Artificial
  probe
  misc_feature (1)..(25): SEQ ID NO: 2849; WAN024DZB_at; Start 394; Stop 418
tatgttgcagacaaagacttctcag

SEQ ID NO: 177226 - DNA, 25 bp, Artificial
  probe
  misc_feature (1)..(25): SEQ ID NO: 2849; WAN024DZB_at; Start 607; Stop 631
gatgatatcggtggacgcttctcag

SEQ ID NO: 177227 - DNA, 25 bp, Artificial
  probe
  misc_feature (1)..(25): SEQ ID NO: 2849; WAN024DZB_at; Start 130; Stop 154
gacttcttgggatggttggaccttc

SEQ ID NO: 177228 - DNA, 25 bp, Artificial
  probe
  misc_feature (1)..(25): SEQ ID NO: 2849; WAN024DZB_at; Start 842; Stop 866
tctcagaatggtggaaacaattggc

SEQ ID NO: 177229 - DNA, 25 bp, Artificial
  probe
  misc_feature (1)..(25): SEQ ID NO: 2849; WAN024DZB_at; Start 72; Stop 96
gcaatcacaagtaacagcagcagat

SEQ ID NO: 177230 - DNA, 25 bp, Artificial
  probe
  misc_feature (1)..(25): SEQ ID NO: 2849; WAN024DZB_at; Start 540; Stop 564
tgaccgccaaaagggtgctgttaag

SEQ ID NO: 177231 - DNA, 25 bp, Artificial
  probe
  misc_feature (1)..(25): SEQ ID NO: 2849; WAN024DZB_at; Start 803; Stop 827
ctgagatcttggtaaactatgagcc

SEQ ID NO: 177232 - DNA, 25 bp, Artificial
  probe
  misc_feature (1)..(25): SEQ ID NO: 2849; WAN024DZB_at; Start 865; Stop 889
gctggtgaatcagaaggaaaagacc

SEQ ID NO: 177233 - DNA, 25 bp, Artificial
  probe
  misc_feature (1)..(25): SEQ ID NO: 2849; WAN024DZB_at; Start 344; Stop 368
tttacgcaggaaactcaatctcatc

SEQ ID NO: 177234 - DNA, 25 bp, Artificial
  probe
  misc_feature (1)..(25): SEQ ID NO: 2849; WAN024DZB_at; Start 499; Stop 523
tacggtcaagaagaagctaacaaac

SEQ ID NO: 177235 - DNA, 25 bp, Artificial
  probe
  misc_feature (1)..(25): SEQ ID NO: 2849; WAN024DZB_at; Start 702; Stop 726
gaatgcagctcgcaaagactacact

SEQ ID NO: 177236 - DNA, 25 bp, Artificial
  probe
  misc_feature (1)..(25): SEQ ID NO: 2849; WAN024DZB_at; Start 686; Stop 710
ctcttatggaaggtgcgaatgcagc

SEQ ID NO: 177237 - DNA, 25 bp, Artificial
  probe
  misc_feature (1)..(25): SEQ ID NO: 5863; WAN024DZC_at; Start 3; Stop 27
gtttgctggagggaaatttggtata

SEQ ID NO: 177238 - DNA, 25 bp, Artificial
  probe
  misc_feature (1)..(25): SEQ ID NO: 5863; WAN024DZC_at; Start 2; Stop 26
tgtttgctggagggaaatttggtat

SEQ ID NO: 177239 - DNA, 25 bp, Artificial
  probe
  misc_feature (1)..(25): SEQ ID NO: 5863; WAN024DZC_at; Start 5; Stop 29
ttgctggagggaaatttggtataat

SEQ ID NO: 177240 - DNA, 25 bp, Artificial
  probe
  misc_feature (1)..(25): SEQ ID NO: 5863; WAN024DZC_at; Start 7; Stop 31
gctggagggaaatttggtataatag

SEQ ID NO: 177241 - DNA, 25 bp, Artificial
  probe
  misc_feature (1)..(25): SEQ ID NO: 5863; WAN024DZC_at; Start 49; Stop 73
gaaaaggagtttcattatgaagaaa

SEQ ID NO: 177242 - DNA, 25 bp, Artificial
  probe
  misc_feature (1)..(25): SEQ ID NO: 5863; WAN024DZC_at; Start 22; Stop 46
ggtataatagcaaagtattgtaaaa

SEQ ID NO: 177243 - DNA, 25 bp, Artificial
  probe
  misc_feature (1)..(25): SEQ ID NO: 5863; WAN024DZC_at; Start 46; Stop 70
aaagaaaaggagtttcattatgaag

SEQ ID NO: 177244 - DNA, 25 bp, Artificial
  probe
  misc_feature (1)..(25): SEQ ID NO: 5863; WAN024DZC_at; Start 10; Stop 34
ggagggaaatttggtataatagcaa

SEQ ID NO: 177245 - DNA, 25 bp, Artificial
  probe
  misc_feature (1)..(25): SEQ ID NO: 5863; WAN024DZC_at; Start 20; Stop 44
ttggtataatagcaaagtattgtaa

SEQ ID NO: 177246 - DNA, 25 bp, Artificial
  probe
  misc_feature (1)..(25): SEQ ID NO: 5863; WAN024DZC_at; Start 1; Stop 25
ttgtttgctggagggaaatttggta

SEQ ID NO: 177247 - DNA, 25 bp, Artificial
  probe
  misc_feature (1)..(25): SEQ ID NO: 5863; WAN024DZC_at; Start 53; Stop 77
aggagtttcattatgaagaaaaaga

SEQ ID NO: 177248 - DNA, 25 bp, Artificial
  probe
  misc_feature (1)..(25): SEQ ID NO: 5863; WAN024DZC_at; Start 25; Stop 49
ataatagcaaagtattgtaaaaaag

SEQ ID NO: 177249 - DNA, 25 bp, Artificial
  probe
  misc_feature (1)..(25): SEQ ID NO: 5863; WAN024DZC_at; Start 52; Stop 76
aaggagtttcattatgaagaaaaag

SEQ ID NO: 177250 - DNA, 25 bp, Artificial
  probe
  misc_feature (1)..(25): SEQ ID NO: 5863; WAN024DZC_at; Start 23; Stop 47
gtataatagcaaagtattgtaaaaa

SEQ ID NO: 177251 - DNA, 25 bp, Artificial
  probe
  misc_feature (1)..(25): SEQ ID NO: 5863; WAN024DZC_at; Start 47; Stop 71
aagaaaaggagtttcattatgaaga

SEQ ID NO: 177252 - DNA, 25 bp, Artificial
  probe
  misc_feature (1)..(25): SEQ ID NO: 5863; WAN024DZC_at; Start 4; Stop 28
tttgctggagggaaatttggtataa

SEQ ID NO: 177253 - DNA, 25 bp, Artificial
  probe
  misc_feature (1)..(25): SEQ ID NO: 5863; WAN024DZC_at; Start 19; Stop 43
tttggtataatagcaaagtattgta

SEQ ID NO: 177254 - DNA, 25 bp, Artificial
  probe
  misc_feature (1)..(25): SEQ ID NO: 5863; WAN024DZC_at; Start 55; Stop 79
gagtttcattatgaagaaaaagaat

SEQ ID NO: 177255 - DNA, 25 bp, Artificial
  probe
  misc_feature (1)..(25): SEQ ID NO: 5863; WAN024DZC_at; Start 21; Stop 45
tggtataatagcaaagtattgtaaa

SEQ ID NO: 177256 - DNA, 25 bp, Artificial
  probe
  misc_feature (1)..(25): SEQ ID NO: 5863; WAN024DZC_at; Start 12; Stop 36
agggaaatttggtataatagcaaag

SEQ ID NO: 177257 - DNA, 25 bp, Artificial
  probe
  misc_feature (1)..(25): SEQ ID NO: 5863; WAN024DZC_at; Start 15; Stop 39
gaaatttggtataatagcaaagtat

SEQ ID NO: 177258 - DNA, 25 bp, Artificial
  probe
  misc_feature (1)..(25): SEQ ID NO: 5863; WAN024DZC_at; Start 9; Stop 33
tggagggaaatttggtataatagca

SEQ ID NO: 177259 - DNA, 25 bp, Artificial
  probe
  misc_feature (1)..(25): SEQ ID NO: 5863; WAN024DZC_at; Start 11; Stop 35
gagggaaatttggtataatagcaaa

SEQ ID NO: 177260 - DNA, 25 bp, Artificial
  probe
  misc_feature (1)..(25): SEQ ID NO: 5863; WAN024DZC_at; Start 16; Stop 40
aaatttggtataatagcaaagtatt

SEQ ID NO: 177261 - DNA, 25 bp, Artificial
  probe
  misc_feature (1)..(25): SEQ ID NO: 5863; WAN024DZC_at; Start 26; Stop 50
taatagcaaagtattgtaaaaaaga

SEQ ID NO: 177262 - DNA, 25 bp, Artificial
  probe
  misc_feature (1)..(25): SEQ ID NO: 5863; WAN024DZC_at; Start 54; Stop 78
ggagtttcattatgaagaaaaagaa

SEQ ID NO: 177263 - DNA, 25 bp, Artificial
  probe
  misc_feature (1)..(25): SEQ ID NO: 5863; WAN024DZC_at; Start 6; Stop 30
tgctggagggaaatttggtataata

SEQ ID NO: 177264 - DNA, 25 bp, Artificial
  probe
  misc_feature (1)..(25): SEQ ID NO: 5863; WAN024DZC_at; Start 48; Stop 72
agaaaaggagtttcattatgaagaa

SEQ ID NO: 177265 - DNA, 25 bp, Artificial
  probe
  misc_feature (1)..(25): SEQ ID NO: 5863; WAN024DZC_at; Start 17; Stop 41
aatttggtataatagcaaagtattg

SEQ ID NO: 177266 - DNA, 25 bp, Artificial
  probe
  misc_feature (1)..(25): SEQ ID NO: 5863; WAN024DZC_at; Start 18; Stop 42
atttggtataatagcaaagtattgt

SEQ ID NO: 177267 - DNA, 25 bp, Artificial
  probe
  misc_feature (1)..(25): SEQ ID NO: 5863; WAN024DZC_at; Start 14; Stop 38
ggaaatttggtataatagcaaagta

SEQ ID NO: 177268 - DNA, 25 bp, Artificial
  probe
  misc_feature (1)..(25): SEQ ID NO: 5863; WAN024DZC_at; Start 8; Stop 32
ctggagggaaatttggtataatagc

SEQ ID NO: 177269 - DNA, 25 bp, Artificial
  probe
  misc_feature (1)..(25): SEQ ID NO: 5863; WAN024DZC_at; Start 24; Stop 48
tataatagcaaagtattgtaaaaaa

SEQ ID NO: 177270 - DNA, 25 bp, Artificial
  probe
  misc_feature (1)..(25): SEQ ID NO: 4273; WAN024DZD_at; Start 58; Stop 82
tacgcacaaaaaattgcaaaaaagc

SEQ ID NO: 177271 - DNA, 25 bp, Artificial
  probe
  misc_feature (1)..(25): SEQ ID NO: 4273; WAN024DZD_at; Start 54; Stop 78
ctgctacgcacaaaaaattgcaaaa

SEQ ID NO: 177272 - DNA, 25 bp, Artificial
  probe
  misc_feature (1)..(25): SEQ ID NO: 4273; WAN024DZD_at; Start 42; Stop 66
gattgcaaaaatctgctacgcacaa

SEQ ID NO: 177273 - DNA, 25 bp, Artificial
  probe
  misc_feature (1)..(25): SEQ ID NO: 4273; WAN024DZD_at; Start 33; Stop 57
ttttgatttgattgcaaaaatctgc

SEQ ID NO: 177274 - DNA, 25 bp, Artificial
  probe
  misc_feature (1)..(25): SEQ ID NO: 4273; WAN024DZD_at; Start 35; Stop 59
ttgatttgattgcaaaaatctgcta

SEQ ID NO: 177275 - DNA, 25 bp, Artificial
  probe
  misc_feature (1)..(25): SEQ ID NO: 4273; WAN024DZD_at; Start 55; Stop 79
tgctacgcacaaaaaattgcaaaaa

SEQ ID NO: 177276 - DNA, 25 bp, Artificial
  probe
  misc_feature (1)..(25): SEQ ID NO: 4273; WAN024DZD_at; Start 39; Stop 63
tttgattgcaaaaatctgctacgca

SEQ ID NO: 177277 - DNA, 25 bp, Artificial
  probe
  misc_feature (1)..(25): SEQ ID NO: 4273; WAN024DZD_at; Start 60; Stop 84
cgcacaaaaaattgcaaaaaagctt

SEQ ID NO: 177278 - DNA, 25 bp, Artificial
  probe
  misc_feature (1)..(25): SEQ ID NO: 4273; WAN024DZD_at; Start 44; Stop 68
ttgcaaaaatctgctacgcacaaaa

SEQ ID NO: 177279 - DNA, 25 bp, Artificial
  probe
  misc_feature (1)..(25): SEQ ID NO: 4273; WAN024DZD_at; Start 61; Stop 85
gcacaaaaaattgcaaaaaagcttg

SEQ ID NO: 177280 - DNA, 25 bp, Artificial
  probe
  misc_feature (1)..(25): SEQ ID NO: 4273; WAN024DZD_at; Start 41; Stop 65
tgattgcaaaaatctgctacgcaca

SEQ ID NO: 177281 - DNA, 25 bp, Artificial
  probe
  misc_feature (1)..(25): SEQ ID NO: 4273; WAN024DZD_at; Start 43; Stop 67
attgcaaaaatctgctacgcacaaa

SEQ ID NO: 177282 - DNA, 25 bp, Artificial
  probe
  misc_feature (1)..(25): SEQ ID NO: 4273; WAN024DZD_at; Start 49; Stop 73
aaaatctgctacgcacaaaaaattg

SEQ ID NO: 177283 - DNA, 25 bp, Artificial
  probe
  misc_feature (1)..(25): SEQ ID NO: 4273; WAN024DZD_at; Start 38; Stop 62
atttgattgcaaaaatctgctacgc

SEQ ID NO: 177284 - DNA, 25 bp, Artificial
  probe
  misc_feature (1)..(25): SEQ ID NO: 4273; WAN024DZD_at; Start 45; Stop 69
tgcaaaaatctgctacgcacaaaaa

SEQ ID NO: 177285 - DNA, 25 bp, Artificial
  probe
  misc_feature (1)..(25): SEQ ID NO: 4273; WAN024DZD_at; Start 57; Stop 81
ctacgcacaaaaaattgcaaaaaag

SEQ ID NO: 177286 - DNA, 25 bp, Artificial
  probe
  misc_feature (1)..(25): SEQ ID NO: 4273; WAN024DZD_at; Start 51; Stop 75
aatctgctacgcacaaaaaattgca

SEQ ID NO: 177287 - DNA, 25 bp, Artificial
  probe
  misc_feature (1)..(25): SEQ ID NO: 4273; WAN024DZD_at; Start 50; Stop 74
aaatctgctacgcacaaaaaattgc

SEQ ID NO: 177288 - DNA, 25 bp, Artificial
  probe
  misc_feature (1)..(25): SEQ ID NO: 4273; WAN024DZD_at; Start 53; Stop 77
tctgctacgcacaaaaaattgcaaa

SEQ ID NO: 177289 - DNA, 25 bp, Artificial
  probe
  misc_feature (1)..(25): SEQ ID NO: 4273; WAN024DZD_at; Start 62; Stop 86
cacaaaaaattgcaaaaaagcttgc

SEQ ID NO: 177290 - DNA, 25 bp, Artificial
  probe
  misc_feature (1)..(25): SEQ ID NO: 4273; WAN024DZD_at; Start 48; Stop 72
aaaaatctgctacgcacaaaaaatt

SEQ ID NO: 177291 - DNA, 25 bp, Artificial
  probe
  misc_feature (1)..(25): SEQ ID NO: 4273; WAN024DZD_at; Start 46; Stop 70
gcaaaaatctgctacgcacaaaaaa

SEQ ID NO: 177292 - DNA, 25 bp, Artificial
  probe
  misc_feature (1)..(25): SEQ ID NO: 4273; WAN024DZD_at; Start 27; Stop 51
ttctttttttgatttgattgcaaaa

SEQ ID NO: 177293 - DNA, 25 bp, Artificial
  probe
  misc_feature (1)..(25): SEQ ID NO: 4273; WAN024DZD_at; Start 56; Stop 80
gctacgcacaaaaaattgcaaaaaa

SEQ ID NO: 177294 - DNA, 25 bp, Artificial
  probe
  misc_feature (1)..(25): SEQ ID NO: 4273; WAN024DZD_at; Start 59; Stop 83
acgcacaaaaaattgcaaaaaagct

SEQ ID NO: 177295 - DNA, 25 bp, Artificial
  probe
  misc_feature (1)..(25): SEQ ID NO: 4273; WAN024DZD_at; Start 52; Stop 76
atctgctacgcacaaaaaattgcaa

SEQ ID NO: 177296 - DNA, 25 bp, Artificial
  probe
  misc_feature (1)..(25): SEQ ID NO: 4273; WAN024DZD_at; Start 47; Stop 71
caaaaatctgctacgcacaaaaaat

SEQ ID NO: 177297 - DNA, 25 bp, Artificial
  probe
  misc_feature (1)..(25): SEQ ID NO: 4273; WAN024DZD_at; Start 37; Stop 61
gatttgattgcaaaaatctgctacg

SEQ ID NO: 177298 - DNA, 25 bp, Artificial
  probe
  misc_feature (1)..(25): SEQ ID NO: 4273; WAN024DZD_at; Start 36; Stop 60
tgatttgattgcaaaaatctgctac

SEQ ID NO: 177299 - DNA, 25 bp, Artificial
  probe
  misc_feature (1)..(25): SEQ ID NO: 4273; WAN024DZD_at; Start 34; Stop 58
tttgatttgattgcaaaaatctgct

SEQ ID NO: 177300 - DNA, 25 bp, Artificial
  probe
  misc_feature (1)..(25): SEQ ID NO: 4273; WAN024DZD_at; Start 40; Stop 64
ttgattgcaaaaatctgctacgcac

SEQ ID NO: 177301 - DNA, 25 bp, Artificial
  probe
  misc_feature (1)..(25): SEQ ID NO: 4273; WAN024DZD_at; Start 64; Stop 88
caaaaaattgcaaaaaagcttgcca

SEQ ID NO: 177302 - DNA, 25 bp, Artificial
  probe
  misc_feature (1)..(25): SEQ ID NO: 366; WAN024DZE_at; Start 37; Stop 61
aaccttcagtgtgggttcaattcct

SEQ ID NO: 177303 - DNA, 25 bp, Artificial
  probe
  misc_feature (1)..(25): SEQ ID NO: 366; WAN024DZE_at; Start 23; Stop 47
actaaggtctccaaaaccttcagtg

SEQ ID NO: 177304 - DNA, 25 bp, Artificial
  probe
  misc_feature (1)..(25): SEQ ID NO: 366; WAN024DZE_at; Start 27; Stop 51
aggtctccaaaaccttcagtgtggg

SEQ ID NO: 177305 - DNA, 25 bp, Artificial
  probe
  misc_feature (1)..(25): SEQ ID NO: 366; WAN024DZE_at; Start 41; Stop 65
ttcagtgtgggttcaattcctactg

SEQ ID NO: 177306 - DNA, 25 bp, Artificial
  probe
  misc_feature (1)..(25): SEQ ID NO: 366; WAN024DZE_at; Start 25; Stop 49
taaggtctccaaaaccttcagtgtg

SEQ ID NO: 177307 - DNA, 25 bp, Artificial
  probe
  misc_feature (1)..(25): SEQ ID NO: 366; WAN024DZE_at; Start 42; Stop 66
tcagtgtgggttcaattcctactgc

SEQ ID NO: 177308 - DNA, 25 bp, Artificial
  probe
  misc_feature (1)..(25): SEQ ID NO: 366; WAN024DZE_at; Start 44; Stop 68
agtgtgggttcaattcctactgccc

SEQ ID NO: 177309 - DNA, 25 bp, Artificial
  probe
  misc_feature (1)..(25): SEQ ID NO: 366; WAN024DZE_at; Start 46; Stop 70
tgtgggttcaattcctactgcccgt

SEQ ID NO: 177310 - DNA, 25 bp, Artificial
  probe
  misc_feature (1)..(25): SEQ ID NO: 366; WAN024DZE_at; Start 45; Stop 69
gtgtgggttcaattcctactgcccg

SEQ ID NO: 177311 - DNA, 25 bp, Artificial
  probe
  misc_feature (1)..(25): SEQ ID NO: 366; WAN024DZE_at; Start 26; Stop 50
aaggtctccaaaaccttcagtgtgg

SEQ ID NO: 177312 - DNA, 25 bp, Artificial
  probe
  misc_feature (1)..(25): SEQ ID NO: 366; WAN024DZE_at; Start 32; Stop 56
tccaaaaccttcagtgtgggttcaa

SEQ ID NO: 177313 - DNA, 25 bp, Artificial
  probe
  misc_feature (1)..(25): SEQ ID NO: 366; WAN024DZE_at; Start 34; Stop 58
caaaaccttcagtgtgggttcaatt

SEQ ID NO: 177314 - DNA, 25 bp, Artificial
  probe
  misc_feature (1)..(25): SEQ ID NO: 366; WAN024DZE_at; Start 33; Stop 57
ccaaaaccttcagtgtgggttcaat

SEQ ID NO: 177315 - DNA, 25 bp, Artificial
  probe
  misc_feature (1)..(25): SEQ ID NO: 366; WAN024DZE_at; Start 47; Stop 71
gtgggttcaattcctactgcccgtg

SEQ ID NO: 177316 - DNA, 25 bp, Artificial
  probe
  misc_feature (1)..(25): SEQ ID NO: 366; WAN024DZE_at; Start 30; Stop 54
tctccaaaaccttcagtgtgggttc

SEQ ID NO: 177317 - DNA, 25 bp, Artificial
  probe
  misc_feature (1)..(25): SEQ ID NO: 366; WAN024DZE_at; Start 38; Stop 62
accttcagtgtgggttcaattccta

SEQ ID NO: 177318 - DNA, 25 bp, Artificial
  probe
  misc_feature (1)..(25): SEQ ID NO: 366; WAN024DZE_at; Start 40; Stop 64
cttcagtgtgggttcaattcctact

SEQ ID NO: 177319 - DNA, 25 bp, Artificial
  probe
  misc_feature (1)..(25): SEQ ID NO: 366; WAN024DZE_at; Start 39; Stop 63
ccttcagtgtgggttcaattcctac

SEQ ID NO: 177320 - DNA, 25 bp, Artificial
  probe
  misc_feature (1)..(25): SEQ ID NO: 366; WAN024DZE_at; Start 43; Stop 67
cagtgtgggttcaattcctactgcc

SEQ ID NO: 177321 - DNA, 25 bp, Artificial
  probe
  misc_feature (1)..(25): SEQ ID NO: 366; WAN024DZE_at; Start 24; Stop 48
ctaaggtctccaaaaccttcagtgt

SEQ ID NO: 177322 - DNA, 25 bp, Artificial
  probe
  misc_feature (1)..(25): SEQ ID NO: 366; WAN024DZE_at; Start 31; Stop 55
ctccaaaaccttcagtgtgggttca

SEQ ID NO: 177323 - DNA, 25 bp, Artificial
  probe
  misc_feature (1)..(25): SEQ ID NO: 4017; WAN024DZF_at; Start 27; Stop 51
cagagccacaatctggtgtgttaac

SEQ ID NO: 177324 - DNA, 25 bp, Artificial
  probe
  misc_feature (1)..(25): SEQ ID NO: 4017; WAN024DZF_at; Start 186; Stop 210
cccgaaggagcggatttacagtccg

SEQ ID NO: 177325 - DNA, 25 bp, Artificial
  probe
  misc_feature (1)..(25): SEQ ID NO: 4017; WAN024DZF_at; Start 196; Stop 220
cggatttacagtccgccgcgtttag

SEQ ID NO: 177326 - DNA, 25 bp, Artificial
  probe
  misc_feature (1)..(25): SEQ ID NO: 4017; WAN024DZF_at; Start 103; Stop 127
cccacactgaaggttttggagacct

SEQ ID NO: 177327 - DNA, 25 bp, Artificial
  probe
  misc_feature (1)..(25): SEQ ID NO: 4017; WAN024DZF_at; Start 40; Stop 64
tggtgtgttaaccacttcaccacac

SEQ ID NO: 177328 - DNA, 25 bp, Artificial
  probe
  misc_feature (1)..(25): SEQ ID NO: 4017; WAN024DZF_at; Start 223; Stop 247
tcttcgctacccttccaaaatatat

SEQ ID NO: 177329 - DNA, 25 bp, Artificial
  probe
  misc_feature (1)..(25): SEQ ID NO: 4017; WAN024DZF_at; Start 58; Stop 82
accacacccgccataattctattaa

SEQ ID NO: 177330 - DNA, 25 bp, Artificial
  probe
  misc_feature (1)..(25): SEQ ID NO: 4017; WAN024DZF_at; Start 100; Stop 124
gaacccacactgaaggttttggaga

SEQ ID NO: 177331 - DNA, 25 bp, Artificial
  probe
  misc_feature (1)..(25): SEQ ID NO: 4017; WAN024DZF_at; Start 182; Stop 206
cgaacccgaaggagcggatttacag

SEQ ID NO: 177332 - DNA, 25 bp, Artificial
  probe
  misc_feature (1)..(25): SEQ ID NO: 4017; WAN024DZF_at; Start 69; Stop 93
cataattctattaacacgggcagta

SEQ ID NO: 177333 - DNA, 25 bp, Artificial
  probe
  misc_feature (1)..(25): SEQ ID NO: 4017; WAN024DZF_at; Start 67; Stop 91
gccataattctattaacacgggcag

SEQ ID NO: 177334 - DNA, 25 bp, Artificial
  probe
  misc_feature (1)..(25): SEQ ID NO: 4017; WAN024DZF_at; Start 105; Stop 129
cacactgaaggttttggagacctta

SEQ ID NO: 177335 - DNA, 25 bp, Artificial
  probe
  misc_feature (1)..(25): SEQ ID NO: 4017; WAN024DZF_at; Start 225; Stop 249
ttcgctacccttccaaaatatataa

SEQ ID NO: 177336 - DNA, 25 bp, Artificial
  probe
  misc_feature (1)..(25): SEQ ID NO: 4017; WAN024DZF_at; Start 22; Stop 46
catgccagagccacaatctggtgtg

SEQ ID NO: 177337 - DNA, 25 bp, Artificial
  probe
  misc_feature (1)..(25): SEQ ID NO: 4017; WAN024DZF_at; Start 24; Stop 48
tgccagagccacaatctggtgtgtt

SEQ ID NO: 177338 - DNA, 25 bp, Artificial
  probe
  misc_feature (1)..(25): SEQ ID NO: 4017; WAN024DZF_at; Start 205; Stop 229
agtccgccgcgtttagcctcttcgc

SEQ ID NO: 177339 - DNA, 25 bp, Artificial
  probe
  misc_feature (1)..(25): SEQ ID NO: 4017; WAN024DZF_at; Start 91; Stop 115
gtaggaattgaacccacactgaagg

SEQ ID NO: 177340 - DNA, 25 bp, Artificial
  probe
  misc_feature (1)..(25): SEQ ID NO: 4017; WAN024DZF_at; Start 72; Stop 96
aattctattaacacgggcagtagga

SEQ ID NO: 177341 - DNA, 25 bp, Artificial
  probe
  misc_feature (1)..(25): SEQ ID NO: 4017; WAN024DZF_at; Start 18; Stop 42
cacgcatgccagagccacaatctgg

SEQ ID NO: 177342 - DNA, 25 bp, Artificial
  probe
  misc_feature (1)..(25): SEQ ID NO: 4017; WAN024DZF_at; Start 189; Stop 213
gaaggagcggatttacagtccgccg

SEQ ID NO: 177343 - DNA, 25 bp, Artificial
  probe
  misc_feature (1)..(25): SEQ ID NO: 4017; WAN024DZF_at; Start 71; Stop 95
taattctattaacacgggcagtagg

SEQ ID NO: 177344 - DNA, 25 bp, Artificial
  probe
  misc_feature (1)..(25): SEQ ID NO: 4017; WAN024DZF_at; Start 88; Stop 112
gcagtaggaattgaacccacactga

SEQ ID NO: 177345 - DNA, 25 bp, Artificial
  probe
  misc_feature (1)..(25): SEQ ID NO: 4017; WAN024DZF_at; Start 35; Stop 59
caatctggtgtgttaaccacttcac

SEQ ID NO: 177346 - DNA, 25 bp, Artificial
  probe
  misc_feature (1)..(25): SEQ ID NO: 4017; WAN024DZF_at; Start 80; Stop 104
taacacgggcagtaggaattgaacc

SEQ ID NO: 177347 - DNA, 25 bp, Artificial
  probe
  misc_feature (1)..(25): SEQ ID NO: 4017; WAN024DZF_at; Start 144; Stop 168
ctatgcccgtaaaatggaaggggag

SEQ ID NO: 177348 - DNA, 25 bp, Artificial
  probe
  misc_feature (1)..(25): SEQ ID NO: 4017; WAN024DZF_at; Start 98; Stop 122
ttgaacccacactgaaggttttgga

SEQ ID NO: 177349 - DNA, 25 bp, Artificial
  probe
  misc_feature (1)..(25): SEQ ID NO: 4017; WAN024DZF_at; Start 86; Stop 110
gggcagtaggaattgaacccacact

SEQ ID NO: 177350 - DNA, 25 bp, Artificial
  probe
  misc_feature (1)..(25): SEQ ID NO: 4017; WAN024DZF_at; Start 31; Stop 55
gccacaatctggtgtgttaaccact

SEQ ID NO: 177351 - DNA, 25 bp, Artificial
  probe
  misc_feature (1)..(25): SEQ ID NO: 4017; WAN024DZF_at; Start 193; Stop 217
gagcggatttacagtccgccgcgtt

SEQ ID NO: 177352 - DNA, 25 bp, Artificial
  probe
  misc_feature (1)..(25): SEQ ID NO: 4017; WAN024DZF_at; Start 107; Stop 131
cactgaaggttttggagaccttagt

SEQ ID NO: 177353 - DNA, 25 bp, Artificial
  probe
  misc_feature (1)..(25): SEQ ID NO: 4017; WAN024DZF_at; Start 29; Stop 53
gagccacaatctggtgtgttaacca

SEQ ID NO: 177354 - DNA, 25 bp, Artificial
  probe
  misc_feature (1)..(25): SEQ ID NO: 4017; WAN024DZF_at; Start 7; Stop 31
gggatcgaacccacgcatgccagag

SEQ ID NO: 177355 - DNA, 25 bp, Artificial
  probe
  misc_feature (1)..(25): SEQ ID NO: 4017; WAN024DZF_at; Start 93; Stop 117
aggaattgaacccacactgaaggtt

SEQ ID NO: 177356 - DNA, 25 bp, Artificial
  probe
  misc_feature (1)..(25): SEQ ID NO: 4017; WAN024DZF_at; Start 83; Stop 107
cacgggcagtaggaattgaacccac

SEQ ID NO: 177357 - DNA, 25 bp, Artificial
  probe
  misc_feature (1)..(25): SEQ ID NO: 3694; WAN024DZG_at; Start 22; Stop 46
acacaccagattgtggctctggcat

SEQ ID NO: 177358 - DNA, 25 bp, Artificial
  probe
  misc_feature (1)..(25): SEQ ID NO: 3694; WAN024DZG_at; Start 21; Stop 45
aacacaccagattgtggctctggca

SEQ ID NO: 177359 - DNA, 25 bp, Artificial
  probe
  misc_feature (1)..(25): SEQ ID NO: 3694; WAN024DZG_at; Start 26; Stop 50
accagattgtggctctggcatgcgt

SEQ ID NO: 177360 - DNA, 25 bp, Artificial
  probe
  misc_feature (1)..(25): SEQ ID NO: 3694; WAN024DZG_at; Start 11; Stop 35
tgaagtggttaacacaccagattgt

SEQ ID NO: 177361 - DNA, 25 bp, Artificial
  probe
  misc_feature (1)..(25): SEQ ID NO: 3694; WAN024DZG_at; Start 38; Stop 62
ctctggcatgcgtgggttcgatccc

SEQ ID NO: 177362 - DNA, 25 bp, Artificial
  probe
  misc_feature (1)..(25): SEQ ID NO: 3694; WAN024DZG_at; Start 18; Stop 42
gttaacacaccagattgtggctctg

SEQ ID NO: 177363 - DNA, 25 bp, Artificial
  probe
  misc_feature (1)..(25): SEQ ID NO: 3694; WAN024DZG_at; Start 19; Stop 43
ttaacacaccagattgtggctctgg

SEQ ID NO: 177364 - DNA, 25 bp, Artificial
  probe
  misc_feature (1)..(25): SEQ ID NO: 3694; WAN024DZG_at; Start 43; Stop 67
gcatgcgtgggttcgatccccatca

SEQ ID NO: 177365 - DNA, 25 bp, Artificial
  probe
  misc_feature (1)..(25): SEQ ID NO: 3694; WAN024DZG_at; Start 17; Stop 41
ggttaacacaccagattgtggctct

SEQ ID NO: 177366 - DNA, 25 bp, Artificial
  probe
  misc_feature (1)..(25): SEQ ID NO: 3694; WAN024DZG_at; Start 4; Stop 28
ggtgtggtgaagtggttaacacacc

SEQ ID NO: 177367 - DNA, 25 bp, Artificial
  probe
  misc_feature (1)..(25): SEQ ID NO: 3694; WAN024DZG_at; Start 9; Stop 33
ggtgaagtggttaacacaccagatt

SEQ ID NO: 177368 - DNA, 25 bp, Artificial
  probe
  misc_feature (1)..(25): SEQ ID NO: 3694; WAN024DZG_at; Start 23; Stop 47
cacaccagattgtggctctggcatg

SEQ ID NO: 177369 - DNA, 25 bp, Artificial
  probe
  misc_feature (1)..(25): SEQ ID NO: 3694; WAN024DZG_at; Start 8; Stop 32
tggtgaagtggttaacacaccagat

SEQ ID NO: 177370 - DNA, 25 bp, Artificial
  probe
  misc_feature (1)..(25): SEQ ID NO: 3694; WAN024DZG_at; Start 48; Stop 72
cgtgggttcgatccccatcactcgc

SEQ ID NO: 177371 - DNA, 25 bp, Artificial
  probe
  misc_feature (1)..(25): SEQ ID NO: 3694; WAN024DZG_at; Start 14; Stop 38
agtggttaacacaccagattgtggc

SEQ ID NO: 177372 - DNA, 25 bp, Artificial
  probe
  misc_feature (1)..(25): SEQ ID NO: 3694; WAN024DZG_at; Start 24; Stop 48
acaccagattgtggctctggcatgc

SEQ ID NO: 177373 - DNA, 25 bp, Artificial
  probe
  misc_feature (1)..(25): SEQ ID NO: 3694; WAN024DZG_at; Start 12; Stop 36
gaagtggttaacacaccagattgtg

SEQ ID NO: 177374 - DNA, 25 bp, Artificial
  probe
  misc_feature (1)..(25): SEQ ID NO: 3694; WAN024DZG_at; Start 10; Stop 34
gtgaagtggttaacacaccagattg

SEQ ID NO: 177375 - DNA, 25 bp, Artificial
  probe
  misc_feature (1)..(25): SEQ ID NO: 3694; WAN024DZG_at; Start 42; Stop 66
ggcatgcgtgggttcgatccccatc

SEQ ID NO: 177376 - DNA, 25 bp, Artificial
  probe
  misc_feature (1)..(25): SEQ ID NO: 3694; WAN024DZG_at; Start 41; Stop 65
tggcatgcgtgggttcgatccccat

SEQ ID NO: 177377 - DNA, 25 bp, Artificial
  probe
  misc_feature (1)..(25): SEQ ID NO: 3694; WAN024DZG_at; Start 47; Stop 71
gcgtgggttcgatccccatcactcg

SEQ ID NO: 177378 - DNA, 25 bp, Artificial
  probe
  misc_feature (1)..(25): SEQ ID NO: 3694; WAN024DZG_at; Start 5; Stop 29
gtgtggtgaagtggttaacacacca

SEQ ID NO: 177379 - DNA, 25 bp, Artificial
  probe
  misc_feature (1)..(25): SEQ ID NO: 3694; WAN024DZG_at; Start 45; Stop 69
atgcgtgggttcgatccccatcact

SEQ ID NO: 177380 - DNA, 25 bp, Artificial
  probe
  misc_feature (1)..(25): SEQ ID NO: 3694; WAN024DZG_at; Start 20; Stop 44
taacacaccagattgtggctctggc

SEQ ID NO: 177381 - DNA, 25 bp, Artificial
  probe
  misc_feature (1)..(25): SEQ ID NO: 3694; WAN024DZG_at; Start 46; Stop 70
tgcgtgggttcgatccccatcactc

SEQ ID NO: 177382 - DNA, 25 bp, Artificial
  probe
  misc_feature (1)..(25): SEQ ID NO: 3694; WAN024DZG_at; Start 13; Stop 37
aagtggttaacacaccagattgtgg

SEQ ID NO: 177383 - DNA, 25 bp, Artificial
  probe
  misc_feature (1)..(25): SEQ ID NO: 3694; WAN024DZG_at; Start 27; Stop 51
ccagattgtggctctggcatgcgtg

SEQ ID NO: 177384 - DNA, 25 bp, Artificial
  probe
  misc_feature (1)..(25): SEQ ID NO: 3694; WAN024DZG_at; Start 6; Stop 30
tgtggtgaagtggttaacacaccag

SEQ ID NO: 177385 - DNA, 25 bp, Artificial
  probe
  misc_feature (1)..(25): SEQ ID NO: 3694; WAN024DZG_at; Start 15; Stop 39
gtggttaacacaccagattgtggct

SEQ ID NO: 177386 - DNA, 25 bp, Artificial
  probe
  misc_feature (1)..(25): SEQ ID NO: 3694; WAN024DZG_at; Start 37; Stop 61
gctctggcatgcgtgggttcgatcc

SEQ ID NO: 177387 - DNA, 25 bp, Artificial
  probe
  misc_feature (1)..(25): SEQ ID NO: 3694; WAN024DZG_at; Start 7; Stop 31
gtggtgaagtggttaacacaccaga

SEQ ID NO: 177388 - DNA, 25 bp, Artificial
  probe
  misc_feature (1)..(25): SEQ ID NO: 3694; WAN024DZG_at; Start 44; Stop 68
catgcgtgggttcgatccccatcac

SEQ ID NO: 177389 - DNA, 25 bp, Artificial
  probe
  misc_feature (1)..(25): SEQ ID NO: 3694; WAN024DZG_at; Start 39; Stop 63
tctggcatgcgtgggttcgatcccc

SEQ ID NO: 177390 - DNA, 25 bp, Artificial
  probe
  misc_feature (1)..(25): SEQ ID NO: 3694; WAN024DZG_at; Start 16; Stop 40
tggttaacacaccagattgtggctc

SEQ ID NO: 177391 - DNA, 25 bp, Artificial
  probe
  misc_feature (1)..(25): SEQ ID NO: 3735; WAN024DZH_at; Start 23; Stop 47
acgcggcggactgtaaatccgctcc

SEQ ID NO: 177392 - DNA, 25 bp, Artificial
  probe
  misc_feature (1)..(25): SEQ ID NO: 3735; WAN024DZH_at; Start 12; Stop 36
gaagaggctaaacgcggcggactgt

SEQ ID NO: 177393 - DNA, 25 bp, Artificial
  probe
  misc_feature (1)..(25): SEQ ID NO: 3735; WAN024DZH_at; Start 11; Stop 35
cgaagaggctaaacgcggcggactg

SEQ ID NO: 177394 - DNA, 25 bp, Artificial
  probe
  misc_feature (1)..(25): SEQ ID NO: 3735; WAN024DZH_at; Start 18; Stop 42
gctaaacgcggcggactgtaaatcc

SEQ ID NO: 177395 - DNA, 25 bp, Artificial
  probe
  misc_feature (1)..(25): SEQ ID NO: 3735; WAN024DZH_at; Start 22; Stop 46
aacgcggcggactgtaaatccgctc

SEQ ID NO: 177396 - DNA, 25 bp, Artificial
  probe
  misc_feature (1)..(25): SEQ ID NO: 3735; WAN024DZH_at; Start 21; Stop 45
aaacgcggcggactgtaaatccgct

SEQ ID NO: 177397 - DNA, 25 bp, Artificial
  probe
  misc_feature (1)..(25): SEQ ID NO: 3735; WAN024DZH_at; Start 14; Stop 38
agaggctaaacgcggcggactgtaa

SEQ ID NO: 177398 - DNA, 25 bp, Artificial
  probe
  misc_feature (1)..(25): SEQ ID NO: 3735; WAN024DZH_at; Start 29; Stop 53
cggactgtaaatccgctccttcggg

SEQ ID NO: 177399 - DNA, 25 bp, Artificial
  probe
  misc_feature (1)..(25): SEQ ID NO: 3735; WAN024DZH_at; Start 28; Stop 52
gcggactgtaaatccgctccttcgg

SEQ ID NO: 177400 - DNA, 25 bp, Artificial
  probe
  misc_feature (1)..(25): SEQ ID NO: 3735; WAN024DZH_at; Start 20; Stop 44
taaacgcggcggactgtaaatccgc

SEQ ID NO: 177401 - DNA, 25 bp, Artificial
  probe
  misc_feature (1)..(25): SEQ ID NO: 3735; WAN024DZH_at; Start 16; Stop 40
aggctaaacgcggcggactgtaaat

SEQ ID NO: 177402 - DNA, 25 bp, Artificial
  probe
  misc_feature (1)..(25): SEQ ID NO: 3735; WAN024DZH_at; Start 33; Stop 57
ctgtaaatccgctccttcgggttcg

SEQ ID NO: 177403 - DNA, 25 bp, Artificial
  probe
  misc_feature (1)..(25): SEQ ID NO: 3735; WAN024DZH_at; Start 27; Stop 51
ggcggactgtaaatccgctccttcg

SEQ ID NO: 177404 - DNA, 25 bp, Artificial
  probe
  misc_feature (1)..(25): SEQ ID NO: 3735; WAN024DZH_at; Start 13; Stop 37
aagaggctaaacgcggcggactgta

SEQ ID NO: 177405 - DNA, 25 bp, Artificial
  probe
  misc_feature (1)..(25): SEQ ID NO: 3735; WAN024DZH_at; Start 19; Stop 43
ctaaacgcggcggactgtaaatccg

SEQ ID NO: 177406 - DNA, 25 bp, Artificial
  probe
  misc_feature (1)..(25): SEQ ID NO: 3735; WAN024DZH_at; Start 10; Stop 34
gcgaagaggctaaacgcggcggact

SEQ ID NO: 177407 - DNA, 25 bp, Artificial
  probe
  misc_feature (1)..(25): SEQ ID NO: 3735; WAN024DZH_at; Start 17; Stop 41
ggctaaacgcggcggactgtaaatc

SEQ ID NO: 177408 - DNA, 25 bp, Artificial
  probe
  misc_feature (1)..(25): SEQ ID NO: 3735; WAN024DZH_at; Start 9; Stop 33
agcgaagaggctaaacgcggcggac

SEQ ID NO: 177409 - DNA, 25 bp, Artificial
  probe
  misc_feature (1)..(25): SEQ ID NO: 3735; WAN024DZH_at; Start 15; Stop 39
gaggctaaacgcggcggactgtaaa

SEQ ID NO: 177410 - DNA, 25 bp, Artificial
  probe
  misc_feature (1)..(25): SEQ ID NO: 3735; WAN024DZH_at; Start 24; Stop 48
cgcggcggactgtaaatccgctcct

SEQ ID NO: 177411 - DNA, 25 bp, Artificial
  probe
  misc_feature (1)..(25): SEQ ID NO: 3735; WAN024DZH_at; Start 25; Stop 49
gcggcggactgtaaatccgctcctt

SEQ ID NO: 177412 - DNA, 25 bp, Artificial
  probe
  misc_feature (1)..(25): SEQ ID NO: 3735; WAN024DZH_at; Start 8; Stop 32
tagcgaagaggctaaacgcggcgga

SEQ ID NO: 177413 - DNA, 25 bp, Artificial
  probe
  misc_feature (1)..(25): SEQ ID NO: 3735; WAN024DZH_at; Start 26; Stop 50
cggcggactgtaaatccgctccttc

SEQ ID NO: 177414 - DNA, 25 bp, Artificial
  probe
  misc_feature (1)..(25): SEQ ID NO: 5843; WAN024DZI_at; Start 181; Stop 205
tacatctccagccctcatcataagt

SEQ ID NO: 177415 - DNA, 25 bp, Artificial
  probe
  misc_feature (1)..(25): SEQ ID NO: 5843; WAN024DZI_at; Start 108; Stop 132
gggtcaagacttctccgattgcatt

SEQ ID NO: 177416 - DNA, 25 bp, Artificial
  probe
  misc_feature (1)..(25): SEQ ID NO: 5843; WAN024DZI_at; Start 79; Stop 103
gacgccaaaggcaggcatatagtta

SEQ ID NO: 177417 - DNA, 25 bp, Artificial
  probe
  misc_feature (1)..(25): SEQ ID NO: 5843; WAN024DZI_at; Start 136; Stop 160
agcaactgcctccgtcccaaaagaa

SEQ ID NO: 177418 - DNA, 25 bp, Artificial
  probe
  misc_feature (1)..(25): SEQ ID NO: 5843; WAN024DZI_at; Start 167; Stop 191
aaggcaatgatcactacatctccag

SEQ ID NO: 177419 - DNA, 25 bp, Artificial
  probe
  misc_feature (1)..(25): SEQ ID NO: 5843; WAN024DZI_at; Start 169; Stop 193
ggcaatgatcactacatctccagcc

SEQ ID NO: 177420 - DNA, 25 bp, Artificial
  probe
  misc_feature (1)..(25): SEQ ID NO: 5843; WAN024DZI_at; Start 52; Stop 76
ggccaacagcatgaccgttgccgta

SEQ ID NO: 177421 - DNA, 25 bp, Artificial
  probe
  misc_feature (1)..(25): SEQ ID NO: 5843; WAN024DZI_at; Start 98; Stop 122
tagttaaactgggtcaagacttctc

SEQ ID NO: 177422 - DNA, 25 bp, Artificial
  probe
  misc_feature (1)..(25): SEQ ID NO: 5843; WAN024DZI_at; Start 198; Stop 222
tcataagtcgctctccagctgctgg

SEQ ID NO: 177423 - DNA, 25 bp, Artificial
  probe
  misc_feature (1)..(25): SEQ ID NO: 5843; WAN024DZI_at; Start 83; Stop 107
ccaaaggcaggcatatagttaaact

SEQ ID NO: 177424 - DNA, 25 bp, Artificial
  probe
  misc_feature (1)..(25): SEQ ID NO: 5843; WAN024DZI_at; Start 68; Stop 92
gttgccgtagcgacgccaaaggcag

SEQ ID NO: 177425 - DNA, 25 bp, Artificial
  probe
  misc_feature (1)..(25): SEQ ID NO: 5843; WAN024DZI_at; Start 201; Stop 225
taagtcgctctccagctgctggtaa

SEQ ID NO: 177426 - DNA, 25 bp, Artificial
  probe
  misc_feature (1)..(25): SEQ ID NO: 5843; WAN024DZI_at; Start 159; Stop 183
aaacgaccaaggcaatgatcactac

SEQ ID NO: 177427 - DNA, 25 bp, Artificial
  probe
  misc_feature (1)..(25): SEQ ID NO: 5843; WAN024DZI_at; Start 59; Stop 83
agcatgaccgttgccgtagcgacgc

SEQ ID NO: 177428 - DNA, 25 bp, Artificial
  probe
  misc_feature (1)..(25): SEQ ID NO: 5843; WAN024DZI_at; Start 115; Stop 139
gacttctccgattgcattcccagca

SEQ ID NO: 177429 - DNA, 25 bp, Artificial
  probe
  misc_feature (1)..(25): SEQ ID NO: 5843; WAN024DZI_at; Start 15; Stop 39
tagcaactcttttccaatcatcctc

SEQ ID NO: 177430 - DNA, 25 bp, Artificial
  probe
  misc_feature (1)..(25): SEQ ID NO: 5843; WAN024DZI_at; Start 56; Stop 80
aacagcatgaccgttgccgtagcga

SEQ ID NO: 177431 - DNA, 25 bp, Artificial
  probe
  misc_feature (1)..(25): SEQ ID NO: 5843; WAN024DZI_at; Start 62; Stop 86
atgaccgttgccgtagcgacgccaa

SEQ ID NO: 177432 - DNA, 25 bp, Artificial
  probe
  misc_feature (1)..(25): SEQ ID NO: 5843; WAN024DZI_at; Start 96; Stop 120
tatagttaaactgggtcaagacttc

SEQ ID NO: 177433 - DNA, 25 bp, Artificial
  probe
  misc_feature (1)..(25): SEQ ID NO: 5843; WAN024DZI_at; Start 2; Stop 26
tgtttactcaaactagcaactcttt

SEQ ID NO: 177434 - DNA, 25 bp, Artificial
  probe
  misc_feature (1)..(25): SEQ ID NO: 5843; WAN024DZI_at; Start 75; Stop 99
tagcgacgccaaaggcaggcatata

SEQ ID NO: 177435 - DNA, 25 bp, Artificial
  probe
  misc_feature (1)..(25): SEQ ID NO: 5843; WAN024DZI_at; Start 119; Stop 143
tctccgattgcattcccagcaactg

SEQ ID NO: 177436 - DNA, 25 bp, Artificial
  probe
  misc_feature (1)..(25): SEQ ID NO: 5843; WAN024DZI_at; Start 194; Stop 218
ctcatcataagtcgctctccagctg

SEQ ID NO: 177437 - DNA, 25 bp, Artificial
  probe
  misc_feature (1)..(25): SEQ ID NO: 5843; WAN024DZI_at; Start 163; Stop 187
gaccaaggcaatgatcactacatct

SEQ ID NO: 177438 - DNA, 25 bp, Artificial
  probe
  misc_feature (1)..(25): SEQ ID NO: 5843; WAN024DZI_at; Start 10; Stop 34
caaactagcaactcttttccaatca

SEQ ID NO: 177439 - DNA, 25 bp, Artificial
  probe
  misc_feature (1)..(25): SEQ ID NO: 5843; WAN024DZI_at; Start 156; Stop 180
aagaaacgaccaaggcaatgatcac

SEQ ID NO: 177440 - DNA, 25 bp, Artificial
  probe
  misc_feature (1)..(25): SEQ ID NO: 5843; WAN024DZI_at; Start 113; Stop 137
aagacttctccgattgcattcccag

SEQ ID NO: 177441 - DNA, 25 bp, Artificial
  probe
  misc_feature (1)..(25): SEQ ID NO: 5843; WAN024DZI_at; Start 49; Stop 73
tcgggccaacagcatgaccgttgcc

SEQ ID NO: 177442 - DNA, 25 bp, Artificial
  probe
  misc_feature (1)..(25): SEQ ID NO: 5843; WAN024DZI_at; Start 102; Stop 126
taaactgggtcaagacttctccgat

SEQ ID NO: 177443 - DNA, 25 bp, Artificial
  probe
  misc_feature (1)..(25): SEQ ID NO: 5843; WAN024DZI_at; Start 30; Stop 54
aatcatcctctccaactgctcgggc

SEQ ID NO: 177444 - DNA, 25 bp, Artificial
  probe
  misc_feature (1)..(25): SEQ ID NO: 5843; WAN024DZI_at; Start 46; Stop 70
tgctcgggccaacagcatgaccgtt

SEQ ID NO: 177445 - DNA, 25 bp, Artificial
  probe
  misc_feature (1)..(25): SEQ ID NO: 5843; WAN024DZI_at; Start 73; Stop 97
cgtagcgacgccaaaggcaggcata

SEQ ID NO: 177446 - DNA, 25 bp, Artificial
  probe
  misc_feature (1)..(25): SEQ ID NO: 5843; WAN024DZI_at; Start 90; Stop 114
caggcatatagttaaactgggtcaa

SEQ ID NO: 177447 - DNA, 25 bp, Artificial
  probe
  misc_feature (1)..(25): SEQ ID NO: 5843; WAN024DZI_at; Start 151; Stop 175
cccaaaagaaacgaccaaggcaatg

SEQ ID NO: 177448 - DNA, 25 bp, Artificial
  probe
  misc_feature (1)..(25): SEQ ID NO: 916; WAN024DZJ_at; Start 960; Stop 984
tgtatcaaaatataagcaagagttg

SEQ ID NO: 177449 - DNA, 25 bp, Artificial
  probe
  misc_feature (1)..(25): SEQ ID NO: 916; WAN024DZJ_at; Start 790; Stop 814
gaagcaatggcaaatggtctctata

SEQ ID NO: 177450 - DNA, 25 bp, Artificial
  probe
  misc_feature (1)..(25): SEQ ID NO: 916; WAN024DZJ_at; Start 996; Stop 1020
tatacaagcatcaatttatcagcaa

SEQ ID NO: 177451 - DNA, 25 bp, Artificial
  probe
  misc_feature (1)..(25): SEQ ID NO: 916; WAN024DZJ_at; Start 303; Stop 327
gagacaacatccgactctaatgata

SEQ ID NO: 177452 - DNA, 25 bp, Artificial
  probe
  misc_feature (1)..(25): SEQ ID NO: 916; WAN024DZJ_at; Start 777; Stop 801
tatcagtatgttagaagcaatggca

SEQ ID NO: 177453 - DNA, 25 bp, Artificial
  probe
  misc_feature (1)..(25): SEQ ID NO: 916; WAN024DZJ_at; Start 925; Stop 949
cagacttcaaataaacttaatgagt

SEQ ID NO: 177454 - DNA, 25 bp, Artificial
  probe
  misc_feature (1)..(25): SEQ ID NO: 916; WAN024DZJ_at; Start 172; Stop 196
gatgtttattattttactccagctg

SEQ ID NO: 177455 - DNA, 25 bp, Artificial
  probe
  misc_feature (1)..(25): SEQ ID NO: 916; WAN024DZJ_at; Start 263; Stop 287
tagtgacccattttcataatagtgc

SEQ ID NO: 177456 - DNA, 25 bp, Artificial
  probe
  misc_feature (1)..(25): SEQ ID NO: 916; WAN024DZJ_at; Start 859; Stop 883
gaaactgctagtcttattgaaatga

SEQ ID NO: 177457 - DNA, 25 bp, Artificial
  probe
  misc_feature (1)..(25): SEQ ID NO: 916; WAN024DZJ_at; Start 33; Stop 57
taagagaacaggtcttggaaaggcg

SEQ ID NO: 177458 - DNA, 25 bp, Artificial
  probe
  misc_feature (1)..(25): SEQ ID NO: 916; WAN024DZJ_at; Start 528; Stop 552
tatgattagagaaaaaggttacgaa

SEQ ID NO: 177459 - DNA, 25 bp, Artificial
  probe
  misc_feature (1)..(25): SEQ ID NO: 916; WAN024DZJ_at; Start 383; Stop 407
cgaaaataatgtttcaacaactaag

SEQ ID NO: 177460 - DNA, 25 bp, Artificial
  probe
  misc_feature (1)..(25): SEQ ID NO: 916; WAN024DZJ_at; Start 882; Stop 906
gataaacgaagaaacagcagacagt

SEQ ID NO: 177461 - DNA, 25 bp, Artificial
  probe
  misc_feature (1)..(25): SEQ ID NO: 916; WAN024DZJ_at; Start 95; Stop 119
caagagtaacggaaatagatataac

SEQ ID NO: 177462 - DNA, 25 bp, Artificial
  probe
  misc_feature (1)..(25): SEQ ID NO: 916; WAN024DZJ_at; Start 896; Stop 920
cagcagacagtatcatagaaattat

SEQ ID NO: 177463 - DNA, 25 bp, Artificial
  probe
  misc_feature (1)..(25): SEQ ID NO: 916; WAN024DZJ_at; Start 842; Stop 866
cagaggtgattaataaagaaactgc

SEQ ID NO: 177464 - DNA, 25 bp, Artificial
  probe
  misc_feature (1)..(25): SEQ ID NO: 916; WAN024DZJ_at; Start 277; Stop 301
cataatagtgcttttggaaatgtga

SEQ ID NO: 177465 - DNA, 25 bp, Artificial
  probe
  misc_feature (1)..(25): SEQ ID NO: 916; WAN024DZJ_at; Start 700; Stop 724
ggtagtgataagaaaaagttattgc

SEQ ID NO: 177466 - DNA, 25 bp, Artificial
  probe
  misc_feature (1)..(25): SEQ ID NO: 916; WAN024DZJ_at; Start 621; Stop 645
tcaggataataatttaaagactagg

SEQ ID NO: 177467 - DNA, 25 bp, Artificial
  probe
  misc_feature (1)..(25): SEQ ID NO: 916; WAN024DZJ_at; Start 809; Stop 833
tctatattattgtaagcgatgtggg

SEQ ID NO: 177468 - DNA, 25 bp, Artificial
  probe
  misc_feature (1)..(25): SEQ ID NO: 916; WAN024DZJ_at; Start 205; Stop 229
gctggtaatattagggattcactgt

SEQ ID NO: 177469 - DNA, 25 bp, Artificial
  probe
  misc_feature (1)..(25): SEQ ID NO: 916; WAN024DZJ_at; Start 68; Stop 92
ttagggattattgttgcaatcgtgc

SEQ ID NO: 177470 - DNA, 25 bp, Artificial
  probe
  misc_feature (1)..(25): SEQ ID NO: 916; WAN024DZJ_at; Start 976; Stop 1000
caagagttgttaaatgaaaatatac

SEQ ID NO: 177471 - DNA, 25 bp, Artificial
  probe
  misc_feature (1)..(25): SEQ ID NO: 916; WAN024DZJ_at; Start 431; Stop 455
taattaggaatggtgtggatggata

SEQ ID NO: 177472 - DNA, 25 bp, Artificial
  probe
  misc_feature (1)..(25): SEQ ID NO: 916; WAN024DZJ_at; Start 186; Stop 210
tactccagctggttcagtagctggt

SEQ ID NO: 177473 - DNA, 25 bp, Artificial
  probe
  misc_feature (1)..(25): SEQ ID NO: 916; WAN024DZJ_at; Start 2; Stop 26
tgaaagtaactattattggacaaat

SEQ ID NO: 177474 - DNA, 25 bp, Artificial
  probe
  misc_feature (1)..(25): SEQ ID NO: 916; WAN024DZJ_at; Start 763; Stop 787
gatgaaactttacctatcagtatgt

SEQ ID NO: 177475 - DNA, 25 bp, Artificial
  probe
  misc_feature (1)..(25): SEQ ID NO: 916; WAN024DZJ_at; Start 50; Stop 74
gaaaggcgattaatgattttaggga

SEQ ID NO: 177476 - DNA, 25 bp, Artificial
  probe
  misc_feature (1)..(25): SEQ ID NO: 916; WAN024DZJ_at; Start 746; Stop 770
taccatcgtattataaagatgaaac

SEQ ID NO: 177477 - DNA, 25 bp, Artificial
  probe
  misc_feature (1)..(25): SEQ ID NO: 916; WAN024DZJ_at; Start 1014; Stop 1038
tcagcaattagagaggatagcaaat

SEQ ID NO: 177478 - DNA, 25 bp, Artificial
  probe
  misc_feature (1)..(25): SEQ ID NO: 916; WAN024DZJ_at; Start 82; Stop 106
tgcaatcgtgctacaagagtaacgg

SEQ ID NO: 177479 - DNA, 25 bp, Artificial
  probe
  misc_feature (1)..(25): SEQ ID NO: 916; WAN024DZJ_at; Start 363; Stop 387
tatattattgggagagaaatcgaaa

SEQ ID NO: 177480 - DNA, 25 bp, Artificial
  probe
  misc_feature (1)..(25): SEQ ID NO: 916; WAN024DZJ_at; Start 293; Stop 317
gaaatgtgatgagacaacatccgac

SEQ ID NO: 177481 - DNA, 25 bp, Artificial
  probe
  misc_feature (1)..(25): SEQ ID NO: 916; WAN024DZJ_at; Start 729; Stop 753
aatgcattactttgttttaccatcg

SEQ ID NO: 177482 - DNA, 25 bp, Artificial
  probe
  misc_feature (1)..(25): SEQ ID NO: 5841; WAN024DZK_at; Start 812; Stop 836
ttggcgtcgctacggcaacggtcat

SEQ ID NO: 177483 - DNA, 25 bp, Artificial
  probe
  misc_feature (1)..(25): SEQ ID NO: 5841; WAN024DZK_at; Start 433; Stop 457
ggagccttgattcgtgcaacgcata

SEQ ID NO: 177484 - DNA, 25 bp, Artificial
  probe
  misc_feature (1)..(25): SEQ ID NO: 5841; WAN024DZK_at; Start 33; Stop 57
tgcattgccagctatgggtgaaaac

SEQ ID NO: 177485 - DNA, 25 bp, Artificial
  probe
  misc_feature (1)..(25): SEQ ID NO: 5841; WAN024DZK_at; Start 828; Stop 852
aacggtcatgctgttggcccgagca

SEQ ID NO: 177486 - DNA, 25 bp, Artificial
  probe
  misc_feature (1)..(25): SEQ ID NO: 5841; WAN024DZK_at; Start 976; Stop 1000
tatacgactgattctctagcggtgg

SEQ ID NO: 177487 - DNA, 25 bp, Artificial
  probe
  misc_feature (1)..(25): SEQ ID NO: 5841; WAN024DZK_at; Start 168; Stop 192
gattttcatcgctctgggagctgct

SEQ ID NO: 177488 - DNA, 25 bp, Artificial
  probe
  misc_feature (1)..(25): SEQ ID NO: 5841; WAN024DZK_at; Start 647; Stop 671
tagataaggaactgttgaccttggc

SEQ ID NO: 177489 - DNA, 25 bp, Artificial
  probe
  misc_feature (1)..(25): SEQ ID NO: 5841; WAN024DZK_at; Start 392; Stop 416
taggcggatcgattgttctcttagg

SEQ ID NO: 177490 - DNA, 25 bp, Artificial
  probe
  misc_feature (1)..(25): SEQ ID NO: 5841; WAN024DZK_at; Start 144; Stop 168
taatattatcaccatttatcaggcg

SEQ ID NO: 177491 - DNA, 25 bp, Artificial
  probe
  misc_feature (1)..(25): SEQ ID NO: 5841; WAN024DZK_at; Start 1235; Stop 1259
tatttctacgctatcgttaccagcg

SEQ ID NO: 177492 - DNA, 25 bp, Artificial
  probe
  misc_feature (1)..(25): SEQ ID NO: 5841; WAN024DZK_at; Start 796; Stop 820
aactatatgcctgcctttggcgtcg

SEQ ID NO: 177493 - DNA, 25 bp, Artificial
  probe
  misc_feature (1)..(25): SEQ ID NO: 5841; WAN024DZK_at; Start 662; Stop 686
tgaccttggctttaccagcagctgg

SEQ ID NO: 177494 - DNA, 25 bp, Artificial
  probe
  misc_feature (1)..(25): SEQ ID NO: 5841; WAN024DZK_at; Start 712; Stop 736
gatgtagtgatcattgccttggtcg

SEQ ID NO: 177495 - DNA, 25 bp, Artificial
  probe
  misc_feature (1)..(25): SEQ ID NO: 5841; WAN024DZK_at; Start 374; Stop 398
gactgtatctatctttggtaggcgg

SEQ ID NO: 177496 - DNA, 25 bp, Artificial
  probe
  misc_feature (1)..(25): SEQ ID NO: 5841; WAN024DZK_at; Start 298; Stop 322
ggatttttgtccatcttcgctggga

SEQ ID NO: 177497 - DNA, 25 bp, Artificial
  probe
  misc_feature (1)..(25): SEQ ID NO: 5841; WAN024DZK_at; Start 766; Stop 790
aatgcaatcggagaagtcttgaccc

SEQ ID NO: 177498 - DNA, 25 bp, Artificial
  probe
  misc_feature (1)..(25): SEQ ID NO: 5841; WAN024DZK_at; Start 237; Stop 261
gaagttggcctatcatgtgactgag

SEQ ID NO: 177499 - DNA, 25 bp, Artificial
  probe
  misc_feature (1)..(25): SEQ ID NO: 5841; WAN024DZK_at; Start 1096; Stop 1120
gcacgcctccctttttatgcgacaa

SEQ ID NO: 177500 - DNA, 25 bp, Artificial
  probe
  misc_feature (1)..(25): SEQ ID NO: 5841; WAN024DZK_at; Start 1081; Stop 1105
cagggattaggaaatgcacgcctcc

SEQ ID NO: 177501 - DNA, 25 bp, Artificial
  probe
  misc_feature (1)..(25): SEQ ID NO: 5841; WAN024DZK_at; Start 614; Stop 638
taaaactgccttatgggaagccaac

SEQ ID NO: 177502 - DNA, 25 bp, Artificial
  probe
  misc_feature (1)..(25): SEQ ID NO: 5841; WAN024DZK_at; Start 1139; Stop 1163
tccgcattgggacaggatatctgat

SEQ ID NO: 177503 - DNA, 25 bp, Artificial
  probe
  misc_feature (1)..(25): SEQ ID NO: 5841; WAN024DZK_at; Start 1194; Stop 1218
tatttgggcagggtctctcttggat

SEQ ID NO: 177504 - DNA, 25 bp, Artificial
  probe
  misc_feature (1)..(25): SEQ ID NO: 5841; WAN024DZK_at; Start 1032; Stop 1056
acttgggacccctatgacgacagga

SEQ ID NO: 177505 - DNA, 25 bp, Artificial
  probe
  misc_feature (1)..(25): SEQ ID NO: 5841; WAN024DZK_at; Start 208; Stop 232
tcaaaaagcatagggcagaaagacc

SEQ ID NO: 177506 - DNA, 25 bp, Artificial
  probe
  misc_feature (1)..(25): SEQ ID NO: 5841; WAN024DZK_at; Start 1017; Stop 1041
gacactgttttcactacttgggacc

SEQ ID NO: 177507 - DNA, 25 bp, Artificial
  probe
  misc_feature (1)..(25): SEQ ID NO: 5841; WAN024DZK_at; Start 313; Stop 337
ttcgctgggaaagagatgataggac

SEQ ID NO: 177508 - DNA, 25 bp, Artificial
  probe
  misc_feature (1)..(25): SEQ ID NO: 5841; WAN024DZK_at; Start 252; Stop 276
tgtgactgaggcgttgaagattacc

SEQ ID NO: 177509 - DNA, 25 bp, Artificial
  probe
  misc_feature (1)..(25): SEQ ID NO: 5841; WAN024DZK_at; Start 921; Stop 945
catgttgcccctgtcctttagtata

SEQ ID NO: 177510 - DNA, 25 bp, Artificial
  probe
  misc_feature (1)..(25): SEQ ID NO: 5841; WAN024DZK_at; Start 676; Stop 700
ccagcagctggagagcgacttatga

SEQ ID NO: 177511 - DNA, 25 bp, Artificial
  probe
  misc_feature (1)..(25): SEQ ID NO: 5841; WAN024DZK_at; Start 600; Stop 624
tttgtggtcacaattaaaactgcct

SEQ ID NO: 177512 - DNA, 25 bp, Artificial
  probe
  misc_feature (1)..(25): SEQ ID NO: 5841; WAN024DZK_at; Start 1047; Stop 1071
gacgacaggaacagtcatctatacg

SEQ ID NO: 177513 - DNA, 25 bp, Artificial
  probe
  misc_feature (1)..(25): SEQ ID NO: 5841; WAN024DZK_at; Start 1062; Stop 1086
catctatacggcagtctggcaggga

SEQ ID NO: 177514 - DNA, 25 bp, Artificial
  probe
  misc_feature (1)..(25): SEQ ID NO: 5841; WAN024DZK_at; Start 953; Stop 977
tgggtgtaccattaactcatctcta

SEQ ID NO: 177515 - DNA, 25 bp, Artificial
  probe
  misc_feature (1)..(25): SEQ ID NO: 5841; WAN024DZK_at; Start 223; Stop 247
cagaaagaccagtcgaagttggcct

SEQ ID NO: 177516 - DNA, 25 bp, Artificial
  probe
  misc_feature (1)..(25): SEQ ID NO: 1064; WAN024DZL_at; Start 548; Stop 572
aaacggccgaaacaagcagtgcagt

SEQ ID NO: 177517 - DNA, 25 bp, Artificial
  probe
  misc_feature (1)..(25): SEQ ID NO: 1064; WAN024DZL_at; Start 563; Stop 587
gcagtgcagttgcagaagaagctcc

SEQ ID NO: 177518 - DNA, 25 bp, Artificial
  probe
  misc_feature (1)..(25): SEQ ID NO: 1064; WAN024DZL_at; Start 551; Stop 575
cggccgaaacaagcagtgcagttgc

SEQ ID NO: 177519 - DNA, 25 bp, Artificial
  probe
  misc_feature (1)..(25): SEQ ID NO: 1064; WAN024DZL_at; Start 573; Stop 597
tgcagaagaagctcctcaggaaacg

SEQ ID NO: 177520 - DNA, 25 bp, Artificial
  probe
  misc_feature (1)..(25): SEQ ID NO: 1064; WAN024DZL_at; Start 560; Stop 584
caagcagtgcagttgcagaagaagc

SEQ ID NO: 177521 - DNA, 25 bp, Artificial
  probe
  misc_feature (1)..(25): SEQ ID NO: 1064; WAN024DZL_at; Start 549; Stop 573
aacggccgaaacaagcagtgcagtt

SEQ ID NO: 177522 - DNA, 25 bp, Artificial
  probe
  misc_feature (1)..(25): SEQ ID NO: 1064; WAN024DZL_at; Start 568; Stop 592
gcagttgcagaagaagctcctcagg

SEQ ID NO: 177523 - DNA, 25 bp, Artificial
  probe
  misc_feature (1)..(25): SEQ ID NO: 1064; WAN024DZL_at; Start 572; Stop 596
ttgcagaagaagctcctcaggaaac

SEQ ID NO: 177524 - DNA, 25 bp, Artificial
  probe
  misc_feature (1)..(25): SEQ ID NO: 1064; WAN024DZL_at; Start 566; Stop 590
gtgcagttgcagaagaagctcctca

SEQ ID NO: 177525 - DNA, 25 bp, Artificial
  probe
  misc_feature (1)..(25): SEQ ID NO: 1064; WAN024DZL_at; Start 546; Stop 570
gcaaacggccgaaacaagcagtgca

SEQ ID NO: 177526 - DNA, 25 bp, Artificial
  probe
  misc_feature (1)..(25): SEQ ID NO: 1064; WAN024DZL_at; Start 564; Stop 588
cagtgcagttgcagaagaagctcct

SEQ ID NO: 177527 - DNA, 25 bp, Artificial
  probe
  misc_feature (1)..(25): SEQ ID NO: 1064; WAN024DZL_at; Start 553; Stop 577
gccgaaacaagcagtgcagttgcag

SEQ ID NO: 177528 - DNA, 25 bp, Artificial
  probe
  misc_feature (1)..(25): SEQ ID NO: 1064; WAN024DZL_at; Start 462; Stop 486
agtagcatcaagttcagaagttaca

SEQ ID NO: 177529 - DNA, 25 bp, Artificial
  probe
  misc_feature (1)..(25): SEQ ID NO: 1064; WAN024DZL_at; Start 571; Stop 595
gttgcagaagaagctcctcaggaaa

SEQ ID NO: 177530 - DNA, 25 bp, Artificial
  probe
  misc_feature (1)..(25): SEQ ID NO: 1064; WAN024DZL_at; Start 464; Stop 488
tagcatcaagttcagaagttacaaa

SEQ ID NO: 177531 - DNA, 25 bp, Artificial
  probe
  misc_feature (1)..(25): SEQ ID NO: 1064; WAN024DZL_at; Start 457; Stop 481
aaagaagtagcatcaagttcagaag

SEQ ID NO: 177532 - DNA, 25 bp, Artificial
  probe
  misc_feature (1)..(25): SEQ ID NO: 1064; WAN024DZL_at; Start 458; Stop 482
aagaagtagcatcaagttcagaagt

SEQ ID NO: 177533 - DNA, 25 bp, Artificial
  probe
  misc_feature (1)..(25): SEQ ID NO: 1064; WAN024DZL_at; Start 544; Stop 568
gagcaaacggccgaaacaagcagtg

SEQ ID NO: 177534 - DNA, 25 bp, Artificial
  probe
  misc_feature (1)..(25): SEQ ID NO: 1064; WAN024DZL_at; Start 574; Stop 598
gcagaagaagctcctcaggaaacga

SEQ ID NO: 177535 - DNA, 25 bp, Artificial
  probe
  misc_feature (1)..(25): SEQ ID NO: 1064; WAN024DZL_at; Start 570; Stop 594
agttgcagaagaagctcctcaggaa

SEQ ID NO: 177536 - DNA, 25 bp, Artificial
  probe
  misc_feature (1)..(25): SEQ ID NO: 1064; WAN024DZL_at; Start 555; Stop 579
cgaaacaagcagtgcagttgcagaa

SEQ ID NO: 177537 - DNA, 25 bp, Artificial
  probe
  misc_feature (1)..(25): SEQ ID NO: 1064; WAN024DZL_at; Start 550; Stop 574
acggccgaaacaagcagtgcagttg

SEQ ID NO: 177538 - DNA, 25 bp, Artificial
  probe
  misc_feature (1)..(25): SEQ ID NO: 1064; WAN024DZL_at; Start 545; Stop 569
agcaaacggccgaaacaagcagtgc

SEQ ID NO: 177539 - DNA, 25 bp, Artificial
  probe
  misc_feature (1)..(25): SEQ ID NO: 1064; WAN024DZL_at; Start 569; Stop 593
cagttgcagaagaagctcctcagga

SEQ ID NO: 177540 - DNA, 25 bp, Artificial
  probe
  misc_feature (1)..(25): SEQ ID NO: 1064; WAN024DZL_at; Start 547; Stop 571
caaacggccgaaacaagcagtgcag

SEQ ID NO: 177541 - DNA, 25 bp, Artificial
  probe
  misc_feature (1)..(25): SEQ ID NO: 1064; WAN024DZL_at; Start 567; Stop 591
tgcagttgcagaagaagctcctcag

SEQ ID NO: 177542 - DNA, 25 bp, Artificial
  probe
  misc_feature (1)..(25): SEQ ID NO: 1064; WAN024DZL_at; Start 552; Stop 576
ggccgaaacaagcagtgcagttgca

SEQ ID NO: 177543 - DNA, 25 bp, Artificial
  probe
  misc_feature (1)..(25): SEQ ID NO: 1064; WAN024DZL_at; Start 556; Stop 580
gaaacaagcagtgcagttgcagaag

SEQ ID NO: 177544 - DNA, 25 bp, Artificial
  probe
  misc_feature (1)..(25): SEQ ID NO: 1064; WAN024DZL_at; Start 466; Stop 490
gcatcaagttcagaagttacaaaga

SEQ ID NO: 177545 - DNA, 25 bp, Artificial
  probe
  misc_feature (1)..(25): SEQ ID NO: 1064; WAN024DZL_at; Start 554; Stop 578
ccgaaacaagcagtgcagttgcaga

SEQ ID NO: 177546 - DNA, 25 bp, Artificial
  probe
  misc_feature (1)..(25): SEQ ID NO: 1064; WAN024DZL_at; Start 460; Stop 484
gaagtagcatcaagttcagaagtta

SEQ ID NO: 177547 - DNA, 25 bp, Artificial
  probe
  misc_feature (1)..(25): SEQ ID NO: 1064; WAN024DZL_at; Start 558; Stop 582
aacaagcagtgcagttgcagaagaa

SEQ ID NO: 177548 - DNA, 25 bp, Artificial
  probe
  misc_feature (1)..(25): SEQ ID NO: 1064; WAN024DZL_at; Start 562; Stop 586
agcagtgcagttgcagaagaagctc

SEQ ID NO: 177549 - DNA, 25 bp, Artificial
  probe
  misc_feature (1)..(25): SEQ ID NO: 1064; WAN024DZL_at; Start 565; Stop 589
agtgcagttgcagaagaagctcctc

SEQ ID NO: 177550 - DNA, 25 bp, Artificial
  probe
  misc_feature (1)..(25): SEQ ID NO: 5129; WAN024DZM_at; Start 89; Stop 113
tgctcctctgggacagaagtgcccg

SEQ ID NO: 177551 - DNA, 25 bp, Artificial
  probe
  misc_feature (1)..(25): SEQ ID NO: 5129; WAN024DZM_at; Start 62; Stop 86
tcaactgggcgagttgtttcggtcg

SEQ ID NO: 177552 - DNA, 25 bp, Artificial
  probe
  misc_feature (1)..(25): SEQ ID NO: 5129; WAN024DZM_at; Start 232; Stop 256
tgctgtcgcagttgtcacttcttca

SEQ ID NO: 177553 - DNA, 25 bp, Artificial
  probe
  misc_feature (1)..(25): SEQ ID NO: 5129; WAN024DZM_at; Start 30; Stop 54
cagctggagtcgtttcctgaggagt

SEQ ID NO: 177554 - DNA, 25 bp, Artificial
  probe
  misc_feature (1)..(25): SEQ ID NO: 5129; WAN024DZM_at; Start 77; Stop 101
gtttcggtcgtttgctcctctggga

SEQ ID NO: 177555 - DNA, 25 bp, Artificial
  probe
  misc_feature (1)..(25): SEQ ID NO: 5129; WAN024DZM_at; Start 173; Stop 197
gaaaggtctgcaacctgaacagttt

SEQ ID NO: 177556 - DNA, 25 bp, Artificial
  probe
  misc_feature (1)..(25): SEQ ID NO: 5129; WAN024DZM_at; Start 204; Stop 228
caacggtcacttgattagtggtcaa

SEQ ID NO: 177557 - DNA, 25 bp, Artificial
  probe
  misc_feature (1)..(25): SEQ ID NO: 5129; WAN024DZM_at; Start 286; Stop 310
aacttctgttacttcttctgcttca

SEQ ID NO: 177558 - DNA, 25 bp, Artificial
  probe
  misc_feature (1)..(25): SEQ ID NO: 5129; WAN024DZM_at; Start 315; Stop 339
cagtcgttgtcaaaacagtttctgg

SEQ ID NO: 177559 - DNA, 25 bp, Artificial
  probe
  misc_feature (1)..(25): SEQ ID NO: 5129; WAN024DZM_at; Start 415; Stop 439
ggtgctcaaagtatcaccatactgt

SEQ ID NO: 177560 - DNA, 25 bp, Artificial
  probe
  misc_feature (1)..(25): SEQ ID NO: 5129; WAN024DZM_at; Start 429; Stop 453
caccatactgtacggtataacttgt

SEQ ID NO: 177561 - DNA, 25 bp, Artificial
  probe
  misc_feature (1)..(25): SEQ ID NO: 5129; WAN024DZM_at; Start 247; Stop 271
cacttcttcactagagtctgcttga

SEQ ID NO: 177562 - DNA, 25 bp, Artificial
  probe
  misc_feature (1)..(25): SEQ ID NO: 5129; WAN024DZM_at; Start 257; Stop 281
ctagagtctgcttgaggtgtttgga

SEQ ID NO: 177563 - DNA, 25 bp, Artificial
  probe
  misc_feature (1)..(25): SEQ ID NO: 5129; WAN024DZM_at; Start 158; Stop 182
tctgcaattggttgagaaaggtctg

SEQ ID NO: 177564 - DNA, 25 bp, Artificial
  probe
  misc_feature (1)..(25): SEQ ID NO: 5129; WAN024DZM_at; Start 218; Stop 242
ttagtggtcaaatctgctgtcgcag

SEQ ID NO: 177565 - DNA, 25 bp, Artificial
  probe
  misc_feature (1)..(25): SEQ ID NO: 5129; WAN024DZM_at; Start 2; Stop 26
tgagggcttgcttgtgtttcctgct

SEQ ID NO: 177566 - DNA, 25 bp, Artificial
  probe
  misc_feature (1)..(25): SEQ ID NO: 5129; WAN024DZM_at; Start 114; Stop 138
tagatggtgccacttcttcagaagc

SEQ ID NO: 177567 - DNA, 25 bp, Artificial
  probe
  misc_feature (1)..(25): SEQ ID NO: 5129; WAN024DZM_at; Start 385; Stop 409
tgtgacatctacacccaaggcttct

SEQ ID NO: 177568 - DNA, 25 bp, Artificial
  probe
  misc_feature (1)..(25): SEQ ID NO: 5129; WAN024DZM_at; Start 369; Stop 393
tcagattcgcaagcactgtgacatc

SEQ ID NO: 177569 - DNA, 25 bp, Artificial
  probe
  misc_feature (1)..(25): SEQ ID NO: 5129; WAN024DZM_at; Start 483; Stop 507
ggatttgctcaacactacgtgcagt

SEQ ID NO: 177570 - DNA, 25 bp, Artificial
  probe
  misc_feature (1)..(25): SEQ ID NO: 5129; WAN024DZM_at; Start 14; Stop 38
tgtgtttcctgcttctcagctggag

SEQ ID NO: 177571 - DNA, 25 bp, Artificial
  probe
  misc_feature (1)..(25): SEQ ID NO: 5129; WAN024DZM_at; Start 139; Stop 163
aatcactgtctttgtaacttctgca

SEQ ID NO: 177572 - DNA, 25 bp, Artificial
  probe
  misc_feature (1)..(25): SEQ ID NO: 5129; WAN024DZM_at; Start 270; Stop 294
gaggtgtttggatttcaacttctgt

SEQ ID NO: 177573 - DNA, 25 bp, Artificial
  probe
  misc_feature (1)..(25): SEQ ID NO: 5129; WAN024DZM_at; Start 128; Stop 152
tcttcagaagcaatcactgtctttg

SEQ ID NO: 177574 - DNA, 25 bp, Artificial
  probe
  misc_feature (1)..(25): SEQ ID NO: 5129; WAN024DZM_at; Start 47; Stop 71
tgaggagttgcttcttcaactgggc

SEQ ID NO: 177575 - DNA, 25 bp, Artificial
  probe
  misc_feature (1)..(25): SEQ ID NO: 5129; WAN024DZM_at; Start 330; Stop 354
cagtttctgggaaaatcaagtccat

SEQ ID NO: 177576 - DNA, 25 bp, Artificial
  probe
  misc_feature (1)..(25): SEQ ID NO: 5129; WAN024DZM_at; Start 301; Stop 325
ttctgcttcattgacagtcgttgtc

SEQ ID NO: 177577 - DNA, 25 bp, Artificial
  probe
  misc_feature (1)..(25): SEQ ID NO: 5129; WAN024DZM_at; Start 520; Stop 544
ttctgcttgagttgccaatactggg

SEQ ID NO: 177578 - DNA, 25 bp, Artificial
  probe
  misc_feature (1)..(25): SEQ ID NO: 5129; WAN024DZM_at; Start 338; Stop 362
gggaaaatcaagtccatattagtga

SEQ ID NO: 177579 - DNA, 25 bp, Artificial
  probe
  misc_feature (1)..(25): SEQ ID NO: 5129; WAN024DZM_at; Start 189; Stop 213
gaacagtttgatcatcaacggtcac

SEQ ID NO: 177580 - DNA, 25 bp, Artificial
  probe
  misc_feature (1)..(25): SEQ ID NO: 5129; WAN024DZM_at; Start 101; Stop 125
acagaagtgcccgtagatggtgcca

SEQ ID NO: 177581 - DNA, 25 bp, Artificial
  probe
  misc_feature (1)..(25): SEQ ID NO: 5129; WAN024DZM_at; Start 357; Stop 381
tagtgattttgttcagattcgcaag

SEQ ID NO: 177582 - DNA, 25 bp, Artificial
  probe
  misc_feature (1)..(25): SEQ ID NO: 5129; WAN024DZM_at; Start 400; Stop 424
caaggcttctgcaatggtgctcaaa

SEQ ID NO: 177583 - DNA, 25 bp, Artificial
  probe
  misc_feature (1)..(25): SEQ ID NO: 5129; WAN024DZM_at; Start 498; Stop 522
tacgtgcagtccaaagaacttcttc

SEQ ID NO: 177584 - DNA, 25 bp, Artificial
  probe
  misc_feature (1)..(25): SEQ ID NO: 1065; WAN024DZN_at; Start 502; Stop 526
caaacgaccgaaacaactcgcccag

SEQ ID NO: 177585 - DNA, 25 bp, Artificial
  probe
  misc_feature (1)..(25): SEQ ID NO: 1065; WAN024DZN_at; Start 498; Stop 522
ggagcaaacgaccgaaacaactcgc

SEQ ID NO: 177586 - DNA, 25 bp, Artificial
  probe
  misc_feature (1)..(25): SEQ ID NO: 1065; WAN024DZN_at; Start 501; Stop 525
gcaaacgaccgaaacaactcgccca

SEQ ID NO: 177587 - DNA, 25 bp, Artificial
  probe
  misc_feature (1)..(25): SEQ ID NO: 1065; WAN024DZN_at; Start 499; Stop 523
gagcaaacgaccgaaacaactcgcc

SEQ ID NO: 177588 - DNA, 25 bp, Artificial
  probe
  misc_feature (1)..(25): SEQ ID NO: 1065; WAN024DZN_at; Start 505; Stop 529
acgaccgaaacaactcgcccagttg

SEQ ID NO: 177589 - DNA, 25 bp, Artificial
  probe
  misc_feature (1)..(25): SEQ ID NO: 1065; WAN024DZN_at; Start 497; Stop 521
aggagcaaacgaccgaaacaactcg

SEQ ID NO: 177590 - DNA, 25 bp, Artificial
  probe
  misc_feature (1)..(25): SEQ ID NO: 2741; WAN024DZO_at; Start 219; Stop 243
ggtggagcgtcatcgtaatcctgaa

SEQ ID NO: 177591 - DNA, 25 bp, Artificial
  probe
  misc_feature (1)..(25): SEQ ID NO: 2741; WAN024DZO_at; Start 5; Stop 29
tagagattcaagatttactgtatca

SEQ ID NO: 177592 - DNA, 25 bp, Artificial
  probe
  misc_feature (1)..(25): SEQ ID NO: 2741; WAN024DZO_at; Start 229; Stop 253
catcgtaatcctgaaaatcagcggg

SEQ ID NO: 177593 - DNA, 25 bp, Artificial
  probe
  misc_feature (1)..(25): SEQ ID NO: 2741; WAN024DZO_at; Start 263; Stop 287
tagaggctgcgaagtatgccaagga

SEQ ID NO: 177594 - DNA, 25 bp, Artificial
  probe
  misc_feature (1)..(25): SEQ ID NO: 2741; WAN024DZO_at; Start 101; Stop 125
agattttactgtttttgctggagca

SEQ ID NO: 177595 - DNA, 25 bp, Artificial
  probe
  misc_feature (1)..(25): SEQ ID NO: 2741; WAN024DZO_at; Start 347; Stop 371
tcttaacagagtttgagagaacaga

SEQ ID NO: 177596 - DNA, 25 bp, Artificial
  probe
  misc_feature (1)..(25): SEQ ID NO: 2741; WAN024DZO_at; Start 16; Stop 40
gatttactgtatcaactccgcttgt

SEQ ID NO: 177597 - DNA, 25 bp, Artificial
  probe
  misc_feature (1)..(25): SEQ ID NO: 2741; WAN024DZO_at; Start 150; Stop 174
tcaggagcgtttgaaaattgatcag

SEQ ID NO: 177598 - DNA, 25 bp, Artificial
  probe
  misc_feature (1)..(25): SEQ ID NO: 2741; WAN024DZO_at; Start 168; Stop 192
tgatcaggctgctttgacacggcat

SEQ ID NO: 177599 - DNA, 25 bp, Artificial
  probe
  misc_feature (1)..(25): SEQ ID NO: 2741; WAN024DZO_at; Start 395; Stop 419
tggttttgggtattgaaaatataga

SEQ ID NO: 177600 - DNA, 25 bp, Artificial
  probe
  misc_feature (1)..(25): SEQ ID NO: 2741; WAN024DZO_at; Start 124; Stop 148
cattctccttgtaaccaaatggcgg

SEQ ID NO: 177601 - DNA, 25 bp, Artificial
  probe
  misc_feature (1)..(25): SEQ ID NO: 2741; WAN024DZO_at; Start 296; Stop 320
tggtgaatccccctctgcaacatat

SEQ ID NO: 177602 - DNA, 25 bp, Artificial
  probe
  misc_feature (1)..(25): SEQ ID NO: 2741; WAN024DZO_at; Start 87; Stop 111
tttgacacggtatcagattttactg

SEQ ID NO: 177603 - DNA, 25 bp, Artificial
  probe
  misc_feature (1)..(25): SEQ ID NO: 2741; WAN024DZO_at; Start 283; Stop 307
aaggagcagttagtggtgaatcccc

SEQ ID NO: 177604 - DNA, 25 bp, Artificial
  probe
  misc_feature (1)..(25): SEQ ID NO: 2741; WAN024DZO_at; Start 137; Stop 161
accaaatggcggttcaggagcgttt

SEQ ID NO: 177605 - DNA, 25 bp, Artificial
  probe
  misc_feature (1)..(25): SEQ ID NO: 2741; WAN024DZO_at; Start 237; Stop 261
tcctgaaaatcagcgggaagtgttg

SEQ ID NO: 177606 - DNA, 25 bp, Artificial
  probe
  misc_feature (1)..(25): SEQ ID NO: 2741; WAN024DZO_at; Start 48; Stop 72
agcgagtacgcaattgtttgaaaaa

SEQ ID NO: 177607 - DNA, 25 bp, Artificial
  probe
  misc_feature (1)..(25): SEQ ID NO: 2741; WAN024DZO_at; Start 107; Stop 131
tactgtttttgctggagcattctcc

SEQ ID NO: 177608 - DNA, 25 bp, Artificial
  probe
  misc_feature (1)..(25): SEQ ID NO: 2741; WAN024DZO_at; Start 156; Stop 180
gcgtttgaaaattgatcaggctgct

SEQ ID NO: 177609 - DNA, 25 bp, Artificial
  probe
  misc_feature (1)..(25): SEQ ID NO: 2741; WAN024DZO_at; Start 25; Stop 49
tatcaactccgcttgtctgagcaag

SEQ ID NO: 177610 - DNA, 25 bp, Artificial
  probe
  misc_feature (1)..(25): SEQ ID NO: 2741; WAN024DZO_at; Start 363; Stop 387
gagaacagaactcagccgtttatta

SEQ ID NO: 177611 - DNA, 25 bp, Artificial
  probe
  misc_feature (1)..(25): SEQ ID NO: 2741; WAN024DZO_at; Start 71; Stop 95
aaaggcttgggattagtttgacacg

SEQ ID NO: 177612 - DNA, 25 bp, Artificial
  probe
  misc_feature (1)..(25): SEQ ID NO: 2741; WAN024DZO_at; Start 212; Stop 236
aaggtttggtggagcgtcatcgtaa

SEQ ID NO: 177613 - DNA, 25 bp, Artificial
  probe
  misc_feature (1)..(25): SEQ ID NO: 2741; WAN024DZO_at; Start 119; Stop 143
tggagcattctccttgtaaccaaat

SEQ ID NO: 177614 - DNA, 25 bp, Artificial
  probe
  misc_feature (1)..(25): SEQ ID NO: 2741; WAN024DZO_at; Start 40; Stop 64
tctgagcaagcgagtacgcaattgt

SEQ ID NO: 177615 - DNA, 25 bp, Artificial
  probe
  misc_feature (1)..(25): SEQ ID NO: 2741; WAN024DZO_at; Start 35; Stop 59
gcttgtctgagcaagcgagtacgca

SEQ ID NO: 177616 - DNA, 25 bp, Artificial
  probe
  misc_feature (1)..(25): SEQ ID NO: 2741; WAN024DZO_at; Start 79; Stop 103
gggattagtttgacacggtatcaga

SEQ ID NO: 177617 - DNA, 25 bp, Artificial
  probe
  misc_feature (1)..(25): SEQ ID NO: 2741; WAN024DZO_at; Start 129; Stop 153
tccttgtaaccaaatggcggttcag

SEQ ID NO: 177618 - DNA, 25 bp, Artificial
  probe
  misc_feature (1)..(25): SEQ ID NO: 2741; WAN024DZO_at; Start 368; Stop 392
cagaactcagccgtttattaaataa

SEQ ID NO: 177619 - DNA, 25 bp, Artificial
  probe
  misc_feature (1)..(25): SEQ ID NO: 2741; WAN024DZO_at; Start 242; Stop 266
aaaatcagcgggaagtgttggtaga

SEQ ID NO: 177620 - DNA, 25 bp, Artificial
  probe
  misc_feature (1)..(25): SEQ ID NO: 2741; WAN024DZO_at; Start 357; Stop 381
gtttgagagaacagaactcagccgt

SEQ ID NO: 177621 - DNA, 25 bp, Artificial
  probe
  misc_feature (1)..(25): SEQ ID NO: 2741; WAN024DZO_at; Start 281; Stop 305
ccaaggagcagttagtggtgaatcc

SEQ ID NO: 177622 - DNA, 25 bp, Artificial
  probe
  misc_feature (1)..(25): SEQ ID NO: 2741; WAN024DZO_at; Start 259; Stop 283
ttggtagaggctgcgaagtatgcca

SEQ ID NO: 177623 - DNA, 25 bp, Artificial
  probe
  misc_feature (1)..(25): SEQ ID NO: 2741; WAN024DZO_at; Start 173; Stop 197
aggctgctttgacacggcatttcaa

SEQ ID NO: 177624 - DNA, 25 bp, Artificial
  probe
  misc_feature (1)..(25): SEQ ID NO: 5727; WAN024DZP_at; Start 75; Stop 99
catcagccttgagcaggtgacgaag

SEQ ID NO: 177625 - DNA, 25 bp, Artificial
  probe
  misc_feature (1)..(25): SEQ ID NO: 5727; WAN024DZP_at; Start 147; Stop 171
ccagtggcgtaaagtcctcagcaaa

SEQ ID NO: 177626 - DNA, 25 bp, Artificial
  probe
  misc_feature (1)..(25): SEQ ID NO: 5727; WAN024DZP_at; Start 72; Stop 96
tttcatcagccttgagcaggtgacg

SEQ ID NO: 177627 - DNA, 25 bp, Artificial
  probe
  misc_feature (1)..(25): SEQ ID NO: 5727; WAN024DZP_at; Start 152; Stop 176
ggcgtaaagtcctcagcaaactggg

SEQ ID NO: 177628 - DNA, 25 bp, Artificial
  probe
  misc_feature (1)..(25): SEQ ID NO: 5727; WAN024DZP_at; Start 182; Stop 206
ttcacaaccaaacgtccttgactgg

SEQ ID NO: 177629 - DNA, 25 bp, Artificial
  probe
  misc_feature (1)..(25): SEQ ID NO: 5727; WAN024DZP_at; Start 107; Stop 131
cgtgtatagttattacatgtgtagc

SEQ ID NO: 177630 - DNA, 25 bp, Artificial
  probe
  misc_feature (1)..(25): SEQ ID NO: 5727; WAN024DZP_at; Start 49; Stop 73
gctagtcaagcggataccaaaggtt

SEQ ID NO: 177631 - DNA, 25 bp, Artificial
  probe
  misc_feature (1)..(25): SEQ ID NO: 5727; WAN024DZP_at; Start 15; Stop 39
tcatcaggttaagcaagaagtaaag

SEQ ID NO: 177632 - DNA, 25 bp, Artificial
  probe
  misc_feature (1)..(25): SEQ ID NO: 5727; WAN024DZP_at; Start 173; Stop 197
tgggcatttttcacaaccaaacgtc

SEQ ID NO: 177633 - DNA, 25 bp, Artificial
  probe
  misc_feature (1)..(25): SEQ ID NO: 5727; WAN024DZP_at; Start 219; Stop 243
cgttacgagcaattcgagtcggtaa

SEQ ID NO: 177634 - DNA, 25 bp, Artificial
  probe
  misc_feature (1)..(25): SEQ ID NO: 5727; WAN024DZP_at; Start 126; Stop 150
tgtagcaatcacactcaggatccag

SEQ ID NO: 177635 - DNA, 25 bp, Artificial
  probe
  misc_feature (1)..(25): SEQ ID NO: 5727; WAN024DZP_at; Start 156; Stop 180
taaagtcctcagcaaactgggcatt

SEQ ID NO: 177636 - DNA, 25 bp, Artificial
  probe
  misc_feature (1)..(25): SEQ ID NO: 5727; WAN024DZP_at; Start 135; Stop 159
cacactcaggatccagtggcgtaaa

SEQ ID NO: 177637 - DNA, 25 bp, Artificial
  probe
  misc_feature (1)..(25): SEQ ID NO: 5727; WAN024DZP_at; Start 210; Stop 234
tacaagtcccgttacgagcaattcg

SEQ ID NO: 177638 - DNA, 25 bp, Artificial
  probe
  misc_feature (1)..(25): SEQ ID NO: 5727; WAN024DZP_at; Start 215; Stop 239
gtcccgttacgagcaattcgagtcg

SEQ ID NO: 177639 - DNA, 25 bp, Artificial
  probe
  misc_feature (1)..(25): SEQ ID NO: 5727; WAN024DZP_at; Start 144; Stop 168
gatccagtggcgtaaagtcctcagc

SEQ ID NO: 177640 - DNA, 25 bp, Artificial
  probe
  misc_feature (1)..(25): SEQ ID NO: 5727; WAN024DZP_at; Start 28; Stop 52
caagaagtaaagattgtggtagcta

SEQ ID NO: 177641 - DNA, 25 bp, Artificial
  probe
  misc_feature (1)..(25): SEQ ID NO: 5727; WAN024DZP_at; Start 204; Stop 228
tggtcatacaagtcccgttacgagc

SEQ ID NO: 177642 - DNA, 25 bp, Artificial
  probe
  misc_feature (1)..(25): SEQ ID NO: 5727; WAN024DZP_at; Start 196; Stop 220
tccttgactggtcatacaagtcccg

SEQ ID NO: 177643 - DNA, 25 bp, Artificial
  probe
  misc_feature (1)..(25): SEQ ID NO: 5727; WAN024DZP_at; Start 61; Stop 85
gataccaaaggtttcatcagccttg

SEQ ID NO: 177644 - DNA, 25 bp, Artificial
  probe
  misc_feature (1)..(25): SEQ ID NO: 5727; WAN024DZP_at; Start 120; Stop 144
tacatgtgtagcaatcacactcagg

SEQ ID NO: 177645 - DNA, 25 bp, Artificial
  probe
  misc_feature (1)..(25): SEQ ID NO: 5727; WAN024DZP_at; Start 81; Stop 105
ccttgagcaggtgacgaaggtaagc

SEQ ID NO: 177646 - DNA, 25 bp, Artificial
  probe
  misc_feature (1)..(25): SEQ ID NO: 5727; WAN024DZP_at; Start 190; Stop 214
caaacgtccttgactggtcatacaa

SEQ ID NO: 177647 - DNA, 25 bp, Artificial
  probe
  misc_feature (1)..(25): SEQ ID NO: 5727; WAN024DZP_at; Start 99; Stop 123
ggtaagcgcgtgtatagttattaca

SEQ ID NO: 177648 - DNA, 25 bp, Artificial
  probe
  misc_feature (1)..(25): SEQ ID NO: 5727; WAN024DZP_at; Start 167; Stop 191
gcaaactgggcatttttcacaacca

SEQ ID NO: 177649 - DNA, 25 bp, Artificial
  probe
  misc_feature (1)..(25): SEQ ID NO: 5727; WAN024DZP_at; Start 2; Stop 26
tgtcgcacttgcttcatcaggttaa

SEQ ID NO: 177650 - DNA, 25 bp, Artificial
  probe
  misc_feature (1)..(25): SEQ ID NO: 5727; WAN024DZP_at; Start 35; Stop 59
taaagattgtggtagctagtcaagc

SEQ ID NO: 177651 - DNA, 25 bp, Artificial
  probe
  misc_feature (1)..(25): SEQ ID NO: 5727; WAN024DZP_at; Start 131; Stop 155
caatcacactcaggatccagtggcg

SEQ ID NO: 177652 - DNA, 25 bp, Artificial
  probe
  misc_feature (1)..(25): SEQ ID NO: 5727; WAN024DZP_at; Start 92; Stop 116
tgacgaaggtaagcgcgtgtatagt

SEQ ID NO: 177653 - DNA, 25 bp, Artificial
  probe
  misc_feature (1)..(25): SEQ ID NO: 5727; WAN024DZP_at; Start 67; Stop 91
aaaggtttcatcagccttgagcagg

SEQ ID NO: 177654 - DNA, 25 bp, Artificial
  probe
  misc_feature (1)..(25): SEQ ID NO: 5727; WAN024DZP_at; Start 42; Stop 66
tgtggtagctagtcaagcggatacc

SEQ ID NO: 177655 - DNA, 25 bp, Artificial
  probe
  misc_feature (1)..(25): SEQ ID NO: 5727; WAN024DZP_at; Start 139; Stop 163
ctcaggatccagtggcgtaaagtcc

SEQ ID NO: 177656 - DNA, 25 bp, Artificial
  probe
  misc_feature (1)..(25): SEQ ID NO: 5727; WAN024DZP_at; Start 55; Stop 79
caagcggataccaaaggtttcatca

SEQ ID NO: 177657 - DNA, 25 bp, Artificial
  probe
  misc_feature (1)..(25): SEQ ID NO: 5727; WAN024DZP_at; Start 51; Stop 75
tagtcaagcggataccaaaggtttc

SEQ ID NO: 177658 - DNA, 25 bp, Artificial
  probe
  misc_feature (1)..(25): SEQ ID NO: 2867; WAN024DZQ_at; Start 584; Stop 608
caggatttgaagaccttcgccgcca

SEQ ID NO: 177659 - DNA, 25 bp, Artificial
  probe
  misc_feature (1)..(25): SEQ ID NO: 2867; WAN024DZQ_at; Start 241; Stop 265
ggtggtctccacaagttcatgaatt

SEQ ID NO: 177660 - DNA, 25 bp, Artificial
  probe
  misc_feature (1)..(25): SEQ ID NO: 2867; WAN024DZQ_at; Start 438; Stop 462
gatgtcctttgatgaatgtcctcag

SEQ ID NO: 177661 - DNA, 25 bp, Artificial
  probe
  misc_feature (1)..(25): SEQ ID NO: 2867; WAN024DZQ_at; Start 525; Stop 549
tggtttgaaggctcaccgtcgtcca

SEQ ID NO: 177662 - DNA, 25 bp, Artificial
  probe
  misc_feature (1)..(25): SEQ ID NO: 2867; WAN024DZQ_at; Start 64; Stop 88
ggagaaatcatcactccccacggta

SEQ ID NO: 177663 - DNA, 25 bp, Artificial
  probe
  misc_feature (1)..(25): SEQ ID NO: 2867; WAN024DZQ_at; Start 1069; Stop 1093
gatgacaatctcttggaattccgtg

SEQ ID NO: 177664 - DNA, 25 bp, Artificial
  probe
  misc_feature (1)..(25): SEQ ID NO: 2867; WAN024DZQ_at; Start 753; Stop 777
tgtgggagcgccagatagcttgatc

SEQ ID NO: 177665 - DNA, 25 bp, Artificial
  probe
  misc_feature (1)..(25): SEQ ID NO: 2867; WAN024DZQ_at; Start 730; Stop 754
aataaacctcgttatctgatgggtg

SEQ ID NO: 177666 - DNA, 25 bp, Artificial
  probe
  misc_feature (1)..(25): SEQ ID NO: 2867; WAN024DZQ_at; Start 863; Stop 887
gacgtttggttgtgaaaaatgccca

SEQ ID NO: 177667 - DNA, 25 bp, Artificial
  probe
  misc_feature (1)..(25): SEQ ID NO: 2867; WAN024DZQ_at; Start 876; Stop 900
gaaaaatgcccagtttgctgaggac

SEQ ID NO: 177668 - DNA, 25 bp, Artificial
  probe
  misc_feature (1)..(25): SEQ ID NO: 2867; WAN024DZQ_at; Start 937; Stop 961
tgtaataactatacacgcgcttacc

SEQ ID NO: 177669 - DNA, 25 bp, Artificial
  probe
  misc_feature (1)..(25): SEQ ID NO: 2867; WAN024DZQ_at; Start 220; Stop 244
gatgaactcattgcacgcgctggtg

SEQ ID NO: 177670 - DNA, 25 bp, Artificial
  probe
  misc_feature (1)..(25): SEQ ID NO: 2867; WAN024DZQ_at; Start 96; Stop 120
gacacctatgtttatgccagttggg

SEQ ID NO: 177671 - DNA, 25 bp, Artificial
  probe
  misc_feature (1)..(25): SEQ ID NO: 2867; WAN024DZQ_at; Start 1048; Stop 1072
caagtgcgacaagccatcatggatg

SEQ ID NO: 177672 - DNA, 25 bp, Artificial
  probe
  misc_feature (1)..(25): SEQ ID NO: 2867; WAN024DZQ_at; Start 803; Stop 827
tgtttgactgtgtcttaccgactcg

SEQ ID NO: 177673 - DNA, 25 bp, Artificial
  probe
  misc_feature (1)..(25): SEQ ID NO: 2867; WAN024DZQ_at; Start 966; Stop 990
tcacctgctcaaggctgatgaaacc

SEQ ID NO: 177674 - DNA, 25 bp, Artificial
  probe
  misc_feature (1)..(25): SEQ ID NO: 2867; WAN024DZQ_at; Start 541; Stop 565
cgtcgtccacatgaccaaggtttgt

SEQ ID NO: 177675 - DNA, 25 bp, Artificial
  probe
  misc_feature (1)..(25): SEQ ID NO: 2867; WAN024DZQ_at; Start 832; Stop 856
gctcgtaacgggacttgtatgacca

SEQ ID NO: 177676 - DNA, 25 bp, Artificial
  probe
  misc_feature (1)..(25): SEQ ID NO: 2867; WAN024DZQ_at; Start 818; Stop 842
taccgactcgaattgctcgtaacgg

SEQ ID NO: 177677 - DNA, 25 bp, Artificial
  probe
  misc_feature (1)..(25): SEQ ID NO: 2867; WAN024DZQ_at; Start 370; Stop 394
ggttctaagatgttcctatccccag

SEQ ID NO: 177678 - DNA, 25 bp, Artificial
  probe
  misc_feature (1)..(25): SEQ ID NO: 2867; WAN024DZQ_at; Start 892; Stop 916
gctgaggactttacgccactggatc

SEQ ID NO: 177679 - DNA, 25 bp, Artificial
  probe
  misc_feature (1)..(25): SEQ ID NO: 2867; WAN024DZQ_at; Start 847; Stop 871
tgtatgaccagtcaaggacgtttgg

SEQ ID NO: 177680 - DNA, 25 bp, Artificial
  probe
  misc_feature (1)..(25): SEQ ID NO: 2867; WAN024DZQ_at; Start 316; Stop 340
gcagatagccgtaatatcacagaag

SEQ ID NO: 177681 - DNA, 25 bp, Artificial
  probe
  misc_feature (1)..(25): SEQ ID NO: 2867; WAN024DZQ_at; Start 641; Stop 665
caggctactctatcggtggtttggc

SEQ ID NO: 177682 - DNA, 25 bp, Artificial
  probe
  misc_feature (1)..(25): SEQ ID NO: 2867; WAN024DZQ_at; Start 690; Stop 714
gaatgcggtcttggactttacaact

SEQ ID NO: 177683 - DNA, 25 bp, Artificial
  probe
  misc_feature (1)..(25): SEQ ID NO: 2867; WAN024DZQ_at; Start 621; Stop 645
tcttgtcagcatggatttctcaggc

SEQ ID NO: 177684 - DNA, 25 bp, Artificial
  probe
  misc_feature (1)..(25): SEQ ID NO: 2867; WAN024DZQ_at; Start 203; Stop 227
tctggcttcgccctggagatgaact

SEQ ID NO: 177685 - DNA, 25 bp, Artificial
  probe
  misc_feature (1)..(25): SEQ ID NO: 2867; WAN024DZQ_at; Start 673; Stop 697
gaaacccatgaagagatgaatgcgg

SEQ ID NO: 177686 - DNA, 25 bp, Artificial
  probe
  misc_feature (1)..(25): SEQ ID NO: 2867; WAN024DZQ_at; Start 261; Stop 285
gaattgggaccagcctatcttgaca

SEQ ID NO: 177687 - DNA, 25 bp, Artificial
  probe
  misc_feature (1)..(25): SEQ ID NO: 2867; WAN024DZQ_at; Start 1033; Stop 1057
cttaacctgatgaagcaagtgcgac

SEQ ID NO: 177688 - DNA, 25 bp, Artificial
  probe
  misc_feature (1)..(25): SEQ ID NO: 2867; WAN024DZQ_at; Start 36; Stop 60
gaaagaaaaacacacaggagctcgt

SEQ ID NO: 177689 - DNA, 25 bp, Artificial
  probe
  misc_feature (1)..(25): SEQ ID NO: 2867; WAN024DZQ_at; Start 141; Stop 165
tcagtcacctgaagaattgaaggag

SEQ ID NO: 177690 - DNA, 25 bp, Artificial
  probe
  misc_feature (1)..(25): SEQ ID NO: 2867; WAN024DZQ_at; Start 607; Stop 631
caatcagctcatgatcttgtcagca

SEQ ID NO: 177691 - DNA, 25 bp, Artificial
  probe
  misc_feature (1)..(25): SEQ ID NO: 2867; WAN024DZQ_at; Start 110; Stop 134
tgccagttgggacacaagccactgt

SEQ ID NO: 177692 - DNA, 25 bp, Artificial
  probe
  misc_feature (1)..(25): SEQ ID NO: 5117; WAN024DZR_at; Start 9; Stop 33
tctgcaaagctgtggcaatcgtatc

SEQ ID NO: 177693 - DNA, 25 bp, Artificial
  probe
  misc_feature (1)..(25): SEQ ID NO: 5117; WAN024DZR_at; Start 273; Stop 297
gaagatttttcacgatactgtccca

SEQ ID NO: 177694 - DNA, 25 bp, Artificial
  probe
  misc_feature (1)..(25): SEQ ID NO: 5117; WAN024DZR_at; Start 41; Stop 65
aattttgctcctgcttcgatagtgc

SEQ ID NO: 177695 - DNA, 25 bp, Artificial
  probe
  misc_feature (1)..(25): SEQ ID NO: 5117; WAN024DZR_at; Start 89; Stop 113
tggtctgttccagcccaaatttctg

SEQ ID NO: 177696 - DNA, 25 bp, Artificial
  probe
  misc_feature (1)..(25): SEQ ID NO: 5117; WAN024DZR_at; Start 158; Stop 182
ggtgtcttctctgccaattctctca

SEQ ID NO: 177697 - DNA, 25 bp, Artificial
  probe
  misc_feature (1)..(25): SEQ ID NO: 5117; WAN024DZR_at; Start 142; Stop 166
tgctatcgtaatgtaaggtgtcttc

SEQ ID NO: 177698 - DNA, 25 bp, Artificial
  probe
  misc_feature (1)..(25): SEQ ID NO: 5117; WAN024DZR_at; Start 202; Stop 226
aacgatggcataggtctcttttgtc

SEQ ID NO: 177699 - DNA, 25 bp, Artificial
  probe
  misc_feature (1)..(25): SEQ ID NO: 5117; WAN024DZR_at; Start 191; Stop 215
gcagccttctcaacgatggcatagg

SEQ ID NO: 177700 - DNA, 25 bp, Artificial
  probe
  misc_feature (1)..(25): SEQ ID NO: 5117; WAN024DZR_at; Start 314; Stop 338
tcaggattatttaccccagtcgcaa

SEQ ID NO: 177701 - DNA, 25 bp, Artificial
  probe
  misc_feature (1)..(25): SEQ ID NO: 5117; WAN024DZR_at; Start 286; Stop 310
gatactgtcccagtcatccttgtaa

SEQ ID NO: 177702 - DNA, 25 bp, Artificial
  probe
  misc_feature (1)..(25): SEQ ID NO: 5117; WAN024DZR_at; Start 72; Stop 96
cactcccgaaatgaacctggtctgt

SEQ ID NO: 177703 - DNA, 25 bp, Artificial
  probe
  misc_feature (1)..(25): SEQ ID NO: 5117; WAN024DZR_at; Start 47; Stop 71
gctcctgcttcgatagtgctactct

SEQ ID NO: 177704 - DNA, 25 bp, Artificial
  probe
  misc_feature (1)..(25): SEQ ID NO: 5117; WAN024DZR_at; Start 214; Stop 238
ggtctcttttgtcttatctccctca

SEQ ID NO: 177705 - DNA, 25 bp, Artificial
  probe
  misc_feature (1)..(25): SEQ ID NO: 5117; WAN024DZR_at; Start 263; Stop 287
tgtcccttaggaagatttttcacga

SEQ ID NO: 177706 - DNA, 25 bp, Artificial
  probe
  misc_feature (1)..(25): SEQ ID NO: 5117; WAN024DZR_at; Start 103; Stop 127
ccaaatttctggatgctctttcgca

SEQ ID NO: 177707 - DNA, 25 bp, Artificial
  probe
  misc_feature (1)..(25): SEQ ID NO: 5117; WAN024DZR_at; Start 250; Stop 274
caaaatcatatggtgtcccttagga

SEQ ID NO: 177708 - DNA, 25 bp, Artificial
  probe
  misc_feature (1)..(25): SEQ ID NO: 5117; WAN024DZR_at; Start 185; Stop 209
taggcagcagccttctcaacgatgg

SEQ ID NO: 177709 - DNA, 25 bp, Artificial
  probe
  misc_feature (1)..(25): SEQ ID NO: 5117; WAN024DZR_at; Start 1; Stop 25
ttgagctgtctgcaaagctgtggca

SEQ ID NO: 177710 - DNA, 25 bp, Artificial
  probe
  misc_feature (1)..(25): SEQ ID NO: 5117; WAN024DZR_at; Start 83; Stop 107
tgaacctggtctgttccagcccaaa

SEQ ID NO: 177711 - DNA, 25 bp, Artificial
  probe
  misc_feature (1)..(25): SEQ ID NO: 5117; WAN024DZR_at; Start 239; Stop 263
taaggagtcaccaaaatcatatggt

SEQ ID NO: 177712 - DNA, 25 bp, Artificial
  probe
  misc_feature (1)..(25): SEQ ID NO: 5117; WAN024DZR_at; Start 150; Stop 174
taatgtaaggtgtcttctctgccaa

SEQ ID NO: 177713 - DNA, 25 bp, Artificial
  probe
  misc_feature (1)..(25): SEQ ID NO: 5117; WAN024DZR_at; Start 276; Stop 300
gatttttcacgatactgtcccagtc

SEQ ID NO: 177714 - DNA, 25 bp, Artificial
  probe
  misc_feature (1)..(25): SEQ ID NO: 5117; WAN024DZR_at; Start 196; Stop 220
cttctcaacgatggcataggtctct

SEQ ID NO: 177715 - DNA, 25 bp, Artificial
  probe
  misc_feature (1)..(25): SEQ ID NO: 5117; WAN024DZR_at; Start 172; Stop 196
caattctctcatataggcagcagcc

SEQ ID NO: 177716 - DNA, 25 bp, Artificial
  probe
  misc_feature (1)..(25): SEQ ID NO: 5117; WAN024DZR_at; Start 135; Stop 159
tccaatctgctatcgtaatgtaagg

SEQ ID NO: 177717 - DNA, 25 bp, Artificial
  probe
  misc_feature (1)..(25): SEQ ID NO: 5117; WAN024DZR_at; Start 308; Stop 332
taattctcaggattatttaccccag

SEQ ID NO: 177718 - DNA, 25 bp, Artificial
  probe
  misc_feature (1)..(25): SEQ ID NO: 5117; WAN024DZR_at; Start 17; Stop 41
gctgtggcaatcgtatctgcataca

SEQ ID NO: 177719 - DNA, 25 bp, Artificial
  probe
  misc_feature (1)..(25): SEQ ID NO: 5117; WAN024DZR_at; Start 30; Stop 54
tatctgcatacaattttgctcctgc

SEQ ID NO: 177720 - DNA, 25 bp, Artificial
  probe
  misc_feature (1)..(25): SEQ ID NO: 5117; WAN024DZR_at; Start 114; Stop 138
gatgctctttcgcaacttgattcca

SEQ ID NO: 177721 - DNA, 25 bp, Artificial
  probe
  misc_feature (1)..(25): SEQ ID NO: 5117; WAN024DZR_at; Start 228; Stop 252
tatctccctcataaggagtcaccaa

SEQ ID NO: 177722 - DNA, 25 bp, Artificial
  probe
  misc_feature (1)..(25): SEQ ID NO: 5117; WAN024DZR_at; Start 293; Stop 317
tcccagtcatccttgtaattctcag

SEQ ID NO: 177723 - DNA, 25 bp, Artificial
  probe
  misc_feature (1)..(25): SEQ ID NO: 5117; WAN024DZR_at; Start 125; Stop 149
gcaacttgattccaatctgctatcg

SEQ ID NO: 177724 - DNA, 25 bp, Artificial
  probe
  misc_feature (1)..(25): SEQ ID NO: 5117; WAN024DZR_at; Start 321; Stop 345
tatttaccccagtcgcaatgaccac

SEQ ID NO: 177725 - DNA, 25 bp, Artificial
  probe
  misc_feature (1)..(25): SEQ ID NO: 5117; WAN024DZR_at; Start 58; Stop 82
gatagtgctactctcactcccgaaa

SEQ ID NO: 177726 - DNA, 25 bp, Artificial
  probe
  misc_feature (1)..(25): SEQ ID NO: 1397; WAN024DZS_at; Start 183; Stop 207
actgtttgcatctgcccgttctgcc

SEQ ID NO: 177727 - DNA, 25 bp, Artificial
  probe
  misc_feature (1)..(25): SEQ ID NO: 1397; WAN024DZS_at; Start 164; Stop 188
tgccatcagcaattcccaaactgtt

SEQ ID NO: 177728 - DNA, 25 bp, Artificial
  probe
  misc_feature (1)..(25): SEQ ID NO: 1397; WAN024DZS_at; Start 204; Stop 228
tgccatcaccttggtctggccaata

SEQ ID NO: 177729 - DNA, 25 bp, Artificial
  probe
  misc_feature (1)..(25): SEQ ID NO: 1397; WAN024DZS_at; Start 235; Stop 259
gcagcttgcttcaagccattgacag

SEQ ID NO: 177730 - DNA, 25 bp, Artificial
  probe
  misc_feature (1)..(25): SEQ ID NO: 1397; WAN024DZS_at; Start 52; Stop 76
tcatttgcggtcttggttgttacgc

SEQ ID NO: 177731 - DNA, 25 bp, Artificial
  probe
  misc_feature (1)..(25): SEQ ID NO: 1397; WAN024DZS_at; Start 242; Stop 266
gcttcaagccattgacagtcaagtc

SEQ ID NO: 177732 - DNA, 25 bp, Artificial
  probe
  misc_feature (1)..(25): SEQ ID NO: 1397; WAN024DZS_at; Start 291; Stop 315
tgccaacaaggtcaccgtgcagaca

SEQ ID NO: 177733 - DNA, 25 bp, Artificial
  probe
  misc_feature (1)..(25): SEQ ID NO: 1397; WAN024DZS_at; Start 129; Stop 153
tgcccttaaagccactgagtcacca

SEQ ID NO: 177734 - DNA, 25 bp, Artificial
  probe
  misc_feature (1)..(25): SEQ ID NO: 1397; WAN024DZS_at; Start 92; Stop 116
tctgtgctccaggaagagctgtctg

SEQ ID NO: 177735 - DNA, 25 bp, Artificial
  probe
  misc_feature (1)..(25): SEQ ID NO: 1397; WAN024DZS_at; Start 215; Stop 239
tggtctggccaatatttgttgcagc

SEQ ID NO: 177736 - DNA, 25 bp, Artificial
  probe
  misc_feature (1)..(25): SEQ ID NO: 1397; WAN024DZS_at; Start 272; Stop 296
caaacgctcccacttgtggtgccaa

SEQ ID NO: 177737 - DNA, 25 bp, Artificial
  probe
  misc_feature (1)..(25): SEQ ID NO: 1397; WAN024DZS_at; Start 257; Stop 281
cagtcaagtctgtctcaaacgctcc

SEQ ID NO: 177738 - DNA, 25 bp, Artificial
  probe
  misc_feature (1)..(25): SEQ ID NO: 1397; WAN024DZS_at; Start 43; Stop 67
agcatgatttcatttgcggtcttgg

SEQ ID NO: 177739 - DNA, 25 bp, Artificial
  probe
  misc_feature (1)..(25): SEQ ID NO: 1397; WAN024DZS_at; Start 285; Stop 309
ttgtggtgccaacaaggtcaccgtg

SEQ ID NO: 177740 - DNA, 25 bp, Artificial
  probe
  misc_feature (1)..(25): SEQ ID NO: 1397; WAN024DZS_at; Start 314; Stop 338
caatgatggtcaagattcctgtacc

SEQ ID NO: 177741 - DNA, 25 bp, Artificial
  probe
  misc_feature (1)..(25): SEQ ID NO: 1397; WAN024DZS_at; Start 324; Stop 348
caagattcctgtacctgctgcaaga

SEQ ID NO: 177742 - DNA, 25 bp, Artificial
  probe
  misc_feature (1)..(25): SEQ ID NO: 1397; WAN024DZS_at; Start 99; Stop 123
tccaggaagagctgtctgtagtgct

SEQ ID NO: 177743 - DNA, 25 bp, Artificial
  probe
  misc_feature (1)..(25): SEQ ID NO: 1397; WAN024DZS_at; Start 123; Stop 147
tgtatttgcccttaaagccactgag

SEQ ID NO: 177744 - DNA, 25 bp, Artificial
  probe
  misc_feature (1)..(25): SEQ ID NO: 1397; WAN024DZS_at; Start 267; Stop 291
tgtctcaaacgctcccacttgtggt

SEQ ID NO: 177745 - DNA, 25 bp, Artificial
  probe
  misc_feature (1)..(25): SEQ ID NO: 1397; WAN024DZS_at; Start 30; Stop 54
ctggctattatttagcatgatttca

SEQ ID NO: 177746 - DNA, 25 bp, Artificial
  probe
  misc_feature (1)..(25): SEQ ID NO: 1397; WAN024DZS_at; Start 177; Stop 201
tcccaaactgtttgcatctgcccgt

SEQ ID NO: 177747 - DNA, 25 bp, Artificial
  probe
  misc_feature (1)..(25): SEQ ID NO: 1397; WAN024DZS_at; Start 159; Stop 183
catagtgccatcagcaattcccaaa

SEQ ID NO: 177748 - DNA, 25 bp, Artificial
  probe
  misc_feature (1)..(25): SEQ ID NO: 1397; WAN024DZS_at; Start 82; Stop 106
tgcgcgttaatctgtgctccaggaa

SEQ ID NO: 177749 - DNA, 25 bp, Artificial
  probe
  misc_feature (1)..(25): SEQ ID NO: 1397; WAN024DZS_at; Start 150; Stop 174
accaattaacatagtgccatcagca

SEQ ID NO: 177750 - DNA, 25 bp, Artificial
  probe
  misc_feature (1)..(25): SEQ ID NO: 1397; WAN024DZS_at; Start 297; Stop 321
caaggtcaccgtgcagacaatgatg

SEQ ID NO: 177751 - DNA, 25 bp, Artificial
  probe
  misc_feature (1)..(25): SEQ ID NO: 1397; WAN024DZS_at; Start 75; Stop 99
gctgacctgcgcgttaatctgtgct

SEQ ID NO: 177752 - DNA, 25 bp, Artificial
  probe
  misc_feature (1)..(25): SEQ ID NO: 1397; WAN024DZS_at; Start 227; Stop 251
tatttgttgcagcttgcttcaagcc

SEQ ID NO: 177753 - DNA, 25 bp, Artificial
  probe
  misc_feature (1)..(25): SEQ ID NO: 1397; WAN024DZS_at; Start 302; Stop 326
tcaccgtgcagacaatgatggtcaa

SEQ ID NO: 177754 - DNA, 25 bp, Artificial
  probe
  misc_feature (1)..(25): SEQ ID NO: 1397; WAN024DZS_at; Start 198; Stop 222
ccgttctgccatcaccttggtctgg

SEQ ID NO: 177755 - DNA, 25 bp, Artificial
  probe
  misc_feature (1)..(25): SEQ ID NO: 1397; WAN024DZS_at; Start 333; Stop 357
tgtacctgctgcaagaattgcgtga

SEQ ID NO: 177756 - DNA, 25 bp, Artificial
  probe
  misc_feature (1)..(25): SEQ ID NO: 1397; WAN024DZS_at; Start 139; Stop 163
gccactgagtcaccaattaacatag

SEQ ID NO: 177757 - DNA, 25 bp, Artificial
  probe
  misc_feature (1)..(25): SEQ ID NO: 1397; WAN024DZS_at; Start 109; Stop 133
gctgtctgtagtgctgtatttgccc

SEQ ID NO: 177758 - DNA, 25 bp, Artificial
  probe
  misc_feature (1)..(25): SEQ ID NO: 1397; WAN024DZS_at; Start 309; Stop 333
gcagacaatgatggtcaagattcct

SEQ ID NO: 177759 - DNA, 25 bp, Artificial
  probe
  misc_feature (1)..(25): SEQ ID NO: 1397; WAN024DZS_at; Start 62; Stop 86
tcttggttgttacgctgacctgcgc

SEQ ID NO: 177760 - DNA, 25 bp, Artificial
  probe
  misc_feature (1)..(25): SEQ ID NO: 2035; WAN024DZT_at; Start 230; Stop 254
ttttgatggtcttggtgaccatgcc

SEQ ID NO: 177761 - DNA, 25 bp, Artificial
  probe
  misc_feature (1)..(25): SEQ ID NO: 2035; WAN024DZT_at; Start 1092; Stop 1116
gccttatattcacgcaattcttgca

SEQ ID NO: 177762 - DNA, 25 bp, Artificial
  probe
  misc_feature (1)..(25): SEQ ID NO: 2035; WAN024DZT_at; Start 1786; Stop 1810
acagctcaagacaagccggttaaat

SEQ ID NO: 177763 - DNA, 25 bp, Artificial
  probe
  misc_feature (1)..(25): SEQ ID NO: 2035; WAN024DZT_at; Start 1738; Stop 1762
gaagcaggagcaaaattgtatgcag

SEQ ID NO: 177764 - DNA, 25 bp, Artificial
  probe
  misc_feature (1)..(25): SEQ ID NO: 2035; WAN024DZT_at; Start 1085; Stop 1109
gtcccctgccttatattcacgcaat

SEQ ID NO: 177765 - DNA, 25 bp, Artificial
  probe
  misc_feature (1)..(25): SEQ ID NO: 2035; WAN024DZT_at; Start 930; Stop 954
ccattggcctttctatatcattttc

SEQ ID NO: 177766 - DNA, 25 bp, Artificial
  probe
  misc_feature (1)..(25): SEQ ID NO: 2035; WAN024DZT_at; Start 1616; Stop 1640
gagaattggcagagaagacacctta

SEQ ID NO: 177767 - DNA, 25 bp, Artificial
  probe
  misc_feature (1)..(25): SEQ ID NO: 2035; WAN024DZT_at; Start 1573; Stop 1597
aaagagacctatgccatcgttgaga

SEQ ID NO: 177768 - DNA, 25 bp, Artificial
  probe
  misc_feature (1)..(25): SEQ ID NO: 2035; WAN024DZT_at; Start 1162; Stop 1186
ttggcaccacaagtgggagcgtttg

SEQ ID NO: 177769 - DNA, 25 bp, Artificial
  probe
  misc_feature (1)..(25): SEQ ID NO: 2035; WAN024DZT_at; Start 987; Stop 1011
actgactctgatttgttcttatggc

SEQ ID NO: 177770 - DNA, 25 bp, Artificial
  probe
  misc_feature (1)..(25): SEQ ID NO: 2035; WAN024DZT_at; Start 1600; Stop 1624
gctgctgcctatatgagagaattgg

SEQ ID NO: 177771 - DNA, 25 bp, Artificial
  probe
  misc_feature (1)..(25): SEQ ID NO: 2035; WAN024DZT_at; Start 1199; Stop 1223
ctgtcaatggcttgaagcaagctgc

SEQ ID NO: 177772 - DNA, 25 bp, Artificial
  probe
  misc_feature (1)..(25): SEQ ID NO: 2035; WAN024DZT_at; Start 995; Stop 1019
tgatttgttcttatggctttgccag

SEQ ID NO: 177773 - DNA, 25 bp, Artificial
  probe
  misc_feature (1)..(25): SEQ ID NO: 2035; WAN024DZT_at; Start 1792; Stop 1816
caagacaagccggttaaatcaaaat

SEQ ID NO: 177774 - DNA, 25 bp, Artificial
  probe
  misc_feature (1)..(25): SEQ ID NO: 2035; WAN024DZT_at; Start 108; Stop 132
ctttttcacattttcaggtttcctg

SEQ ID NO: 177775 - DNA, 25 bp, Artificial
  probe
  misc_feature (1)..(25): SEQ ID NO: 2035; WAN024DZT_at; Start 317; Stop 341
taggctttatgaccaacttctatga

SEQ ID NO: 177776 - DNA, 25 bp, Artificial
  probe
  misc_feature (1)..(25): SEQ ID NO: 2035; WAN024DZT_at; Start 945; Stop 969
tatcattttctcacagttgacatca

SEQ ID NO: 177777 - DNA, 25 bp, Artificial
  probe
  misc_feature (1)..(25): SEQ ID NO: 2035; WAN024DZT_at; Start 1670; Stop 1694
cgaaagagcatccagaaatttgggc

SEQ ID NO: 177778 - DNA, 25 bp, Artificial
  probe
  misc_feature (1)..(25): SEQ ID NO: 2035; WAN024DZT_at; Start 220; Stop 244
ccacctgtggttttgatggtcttgg

SEQ ID NO: 177779 - DNA, 25 bp, Artificial
  probe
  misc_feature (1)..(25): SEQ ID NO: 2035; WAN024DZT_at; Start 207; Stop 231
ttatcggattgtgccacctgtggtt

SEQ ID NO: 177780 - DNA, 25 bp, Artificial
  probe
  misc_feature (1)..(25): SEQ ID NO: 2035; WAN024DZT_at; Start 199; Stop 223
agacgcttttatcggattgtgccac

SEQ ID NO: 177781 - DNA, 25 bp, Artificial
  probe
  misc_feature (1)..(25): SEQ ID NO: 2035; WAN024DZT_at; Start 1586; Stop 1610
ccatcgttgagaaggctgctgccta

SEQ ID NO: 177782 - DNA, 25 bp, Artificial
  probe
  misc_feature (1)..(25): SEQ ID NO: 2035; WAN024DZT_at; Start 1564; Stop 1588
gataagacaaaagagacctatgcca

SEQ ID NO: 177783 - DNA, 25 bp, Artificial
  probe
  misc_feature (1)..(25): SEQ ID NO: 2035; WAN024DZT_at; Start 958; Stop 982
cagttgacatcaaatcttcttgctg

SEQ ID NO: 177784 - DNA, 25 bp, Artificial
  probe
  misc_feature (1)..(25): SEQ ID NO: 2035; WAN024DZT_at; Start 1659; Stop 1683
gaatcaagttgcgaaagagcatcca

SEQ ID NO: 177785 - DNA, 25 bp, Artificial
  probe
  misc_feature (1)..(25): SEQ ID NO: 2035; WAN024DZT_at; Start 1313; Stop 1337
cagtggctttaagggcaaatacagc

SEQ ID NO: 177786 - DNA, 25 bp, Artificial
  probe
  misc_feature (1)..(25): SEQ ID NO: 2035; WAN024DZT_at; Start 972; Stop 996
tcttcttgctgtattactgactctg

SEQ ID NO: 177787 - DNA, 25 bp, Artificial
  probe
  misc_feature (1)..(25): SEQ ID NO: 2035; WAN024DZT_at; Start 440; Stop 464
gattggcagtttggttcttatccaa

SEQ ID NO: 177788 - DNA, 25 bp, Artificial
  probe
  misc_feature (1)..(25): SEQ ID NO: 2035; WAN024DZT_at; Start 840; Stop 864
ggcgcgtgtcttacatgaaaagaca

SEQ ID NO: 177789 - DNA, 25 bp, Artificial
  probe
  misc_feature (1)..(25): SEQ ID NO: 2035; WAN024DZT_at; Start 834; Stop 858
tctggcggcgcgtgtcttacatgaa

SEQ ID NO: 177790 - DNA, 25 bp, Artificial
  probe
  misc_feature (1)..(25): SEQ ID NO: 2035; WAN024DZT_at; Start 1171; Stop 1195
caagtgggagcgtttgagacagact

SEQ ID NO: 177791 - DNA, 25 bp, Artificial
  probe
  misc_feature (1)..(25): SEQ ID NO: 2035; WAN024DZT_at; Start 645; Stop 669
tgtaggcgttcgtcagacgacttcc

SEQ ID NO: 177792 - DNA, 25 bp, Artificial
  probe
  misc_feature (1)..(25): SEQ ID NO: 2035; WAN024DZT_at; Start 592; Stop 616
tccagtttaactcatgtctatccat

SEQ ID NO: 177793 - DNA, 25 bp, Artificial
  probe
  misc_feature (1)..(25): SEQ ID NO: 2035; WAN024DZT_at; Start 1518; Stop 1542
tcttcctaagggacaccatatgatt

SEQ ID NO: 177794 - DNA, 25 bp, Artificial
  probe
  misc_feature (1)..(25): SEQ ID NO: 2882; WAN024DZU_at; Start 62; Stop 86
tcacgttctggtgcaagggcaattt

SEQ ID NO: 177795 - DNA, 25 bp, Artificial
  probe
  misc_feature (1)..(25): SEQ ID NO: 2882; WAN024DZU_at; Start 2; Stop 26
tgtccaagagcaaccgtcacacctt

SEQ ID NO: 177796 - DNA, 25 bp, Artificial
  probe
  misc_feature (1)..(25): SEQ ID NO: 2882; WAN024DZU_at; Start 104; Stop 128
gccgctttttgccaagaatgaaact

SEQ ID NO: 177797 - DNA, 25 bp, Artificial
  probe
  misc_feature (1)..(25): SEQ ID NO: 2882; WAN024DZU_at; Start 258; Stop 282
tttcagtgactgcaagcaattgctc

SEQ ID NO: 177798 - DNA, 25 bp, Artificial
  probe
  misc_feature (1)..(25): SEQ ID NO: 2882; WAN024DZU_at; Start 223; Stop 247
agcacctgttgcttctttataatgg

SEQ ID NO: 177799 - DNA, 25 bp, Artificial
  probe
  misc_feature (1)..(25): SEQ ID NO: 2882; WAN024DZU_at; Start 247; Stop 271
gtttccaagattttcagtgactgca

SEQ ID NO: 177800 - DNA, 25 bp, Artificial
  probe
  misc_feature (1)..(25): SEQ ID NO: 2882; WAN024DZU_at; Start 269; Stop 293
gcaagcaattgctcataagtggctg

SEQ ID NO: 177801 - DNA, 25 bp, Artificial
  probe
  misc_feature (1)..(25): SEQ ID NO: 2882; WAN024DZU_at; Start 137; Stop 161
cccgggtctctcatataagttggat

SEQ ID NO: 177802 - DNA, 25 bp, Artificial
  probe
  misc_feature (1)..(25): SEQ ID NO: 2882; WAN024DZU_at; Start 74; Stop 98
gcaagggcaattttattaagcaagc

SEQ ID NO: 177803 - DNA, 25 bp, Artificial
  probe
  misc_feature (1)..(25): SEQ ID NO: 2882; WAN024DZU_at; Start 97; Stop 121
gccatttgccgctttttgccaagaa

SEQ ID NO: 177804 - DNA, 25 bp, Artificial
  probe
  misc_feature (1)..(25): SEQ ID NO: 2882; WAN024DZU_at; Start 147; Stop 171
tcatataagttggattttgtgcccc

SEQ ID NO: 177805 - DNA, 25 bp, Artificial
  probe
  misc_feature (1)..(25): SEQ ID NO: 2882; WAN024DZU_at; Start 206; Stop 230
taaatcccacgaatcttagcacctg

SEQ ID NO: 177806 - DNA, 25 bp, Artificial
  probe
  misc_feature (1)..(25): SEQ ID NO: 2882; WAN024DZU_at; Start 55; Stop 79
caccccatcacgttctggtgcaagg

SEQ ID NO: 177807 - DNA, 25 bp, Artificial
  probe
  misc_feature (1)..(25): SEQ ID NO: 2882; WAN024DZU_at; Start 109; Stop 133
tttttgccaagaatgaaactcctca

SEQ ID NO: 177808 - DNA, 25 bp, Artificial
  probe
  misc_feature (1)..(25): SEQ ID NO: 2882; WAN024DZU_at; Start 90; Stop 114
taagcaagccatttgccgctttttg

SEQ ID NO: 177809 - DNA, 25 bp, Artificial
  probe
  misc_feature (1)..(25): SEQ ID NO: 2882; WAN024DZU_at; Start 121; Stop 145
atgaaactcctcaacacccgggtct

SEQ ID NO: 177810 - DNA, 25 bp, Artificial
  probe
  misc_feature (1)..(25): SEQ ID NO: 2882; WAN024DZU_at; Start 174; Stop 198
taaaagtttctgtgaaatatggacc

SEQ ID NO: 177811 - DNA, 25 bp, Artificial
  probe
  misc_feature (1)..(25): SEQ ID NO: 2882; WAN024DZU_at; Start 251; Stop 275
ccaagattttcagtgactgcaagca

SEQ ID NO: 177812 - DNA, 25 bp, Artificial
  probe
  misc_feature (1)..(25): SEQ ID NO: 2882; WAN024DZU_at; Start 273; Stop 297
gcaattgctcataagtggctgttaa

SEQ ID NO: 177813 - DNA, 25 bp, Artificial
  probe
  misc_feature (1)..(25): SEQ ID NO: 2882; WAN024DZU_at; Start 164; Stop 188
tgtgcccccttaaaagtttctgtga

SEQ ID NO: 177814 - DNA, 25 bp, Artificial
  probe
  misc_feature (1)..(25): SEQ ID NO: 2882; WAN024DZU_at; Start 261; Stop 285
cagtgactgcaagcaattgctcata

SEQ ID NO: 177815 - DNA, 25 bp, Artificial
  probe
  misc_feature (1)..(25): SEQ ID NO: 2882; WAN024DZU_at; Start 15; Stop 39
ccgtcacaccttcgcccgtaactgt

SEQ ID NO: 177816 - DNA, 25 bp, Artificial
  probe
  misc_feature (1)..(25): SEQ ID NO: 2882; WAN024DZU_at; Start 65; Stop 89
cgttctggtgcaagggcaattttat

SEQ ID NO: 177817 - DNA, 25 bp, Artificial
  probe
  misc_feature (1)..(25): SEQ ID NO: 2882; WAN024DZU_at; Start 39; Stop 63
tacgaacaaagtcttccaccccatc

SEQ ID NO: 177818 - DNA, 25 bp, Artificial
  probe
  misc_feature (1)..(25): SEQ ID NO: 2882; WAN024DZU_at; Start 32; Stop 56
gtaactgtacgaacaaagtcttcca

SEQ ID NO: 177819 - DNA, 25 bp, Artificial
  probe
  misc_feature (1)..(25): SEQ ID NO: 2882; WAN024DZU_at; Start 232; Stop 256
tgcttctttataatggtttccaaga

SEQ ID NO: 177820 - DNA, 25 bp, Artificial
  probe
  misc_feature (1)..(25): SEQ ID NO: 2882; WAN024DZU_at; Start 213; Stop 237
cacgaatcttagcacctgttgcttc

SEQ ID NO: 177821 - DNA, 25 bp, Artificial
  probe
  misc_feature (1)..(25): SEQ ID NO: 2882; WAN024DZU_at; Start 118; Stop 142
agaatgaaactcctcaacacccggg

SEQ ID NO: 177822 - DNA, 25 bp, Artificial
  probe
  misc_feature (1)..(25): SEQ ID NO: 2882; WAN024DZU_at; Start 84; Stop 108
ttttattaagcaagccatttgccgc

SEQ ID NO: 177823 - DNA, 25 bp, Artificial
  probe
  misc_feature (1)..(25): SEQ ID NO: 2882; WAN024DZU_at; Start 194; Stop 218
ggaccttcataataaatcccacgaa

SEQ ID NO: 177824 - DNA, 25 bp, Artificial
  probe
  misc_feature (1)..(25): SEQ ID NO: 2882; WAN024DZU_at; Start 179; Stop 203
gtttctgtgaaatatggaccttcat

SEQ ID NO: 177825 - DNA, 25 bp, Artificial
  probe
  misc_feature (1)..(25): SEQ ID NO: 2882; WAN024DZU_at; Start 132; Stop 156
caacacccgggtctctcatataagt

SEQ ID NO: 177826 - DNA, 25 bp, Artificial
  probe
  misc_feature (1)..(25): SEQ ID NO: 2882; WAN024DZU_at; Start 59; Stop 83
ccatcacgttctggtgcaagggcaa

SEQ ID NO: 177827 - DNA, 25 bp, Artificial
  probe
  misc_feature (1)..(25): SEQ ID NO: 2882; WAN024DZU_at; Start 210; Stop 234
tcccacgaatcttagcacctgttgc

SEQ ID NO: 177828 - DNA, 25 bp, Artificial
  probe
  misc_feature (1)..(25): SEQ ID NO: 1929; WAN024DZV_at; Start 159; Stop 183
caagttccaagtaaccacctcgacg

SEQ ID NO: 177829 - DNA, 25 bp, Artificial
  probe
  misc_feature (1)..(25): SEQ ID NO: 1929; WAN024DZV_at; Start 63; Stop 87
tatccacaagacctggggcaatgct

SEQ ID NO: 177830 - DNA, 25 bp, Artificial
  probe
  misc_feature (1)..(25): SEQ ID NO: 1929; WAN024DZV_at; Start 95; Stop 119
gtatagtcaatcacctcagcccctt

SEQ ID NO: 177831 - DNA, 25 bp, Artificial
  probe
  misc_feature (1)..(25): SEQ ID NO: 1929; WAN024DZV_at; Start 191; Stop 215
tgtgggtagaaaaactgatccgctt

SEQ ID NO: 177832 - DNA, 25 bp, Artificial
  probe
  misc_feature (1)..(25): SEQ ID NO: 1929; WAN024DZV_at; Start 251; Stop 275
gattgattctacaatttattatgtc

SEQ ID NO: 177833 - DNA, 25 bp, Artificial
  probe
  misc_feature (1)..(25): SEQ ID NO: 1929; WAN024DZV_at; Start 189; Stop 213
cgtgtgggtagaaaaactgatccgc

SEQ ID NO: 177834 - DNA, 25 bp, Artificial
  probe
  misc_feature (1)..(25): SEQ ID NO: 1929; WAN024DZV_at; Start 31; Stop 55
cacatctacacctgcatatccatga

SEQ ID NO: 177835 - DNA, 25 bp, Artificial
  probe
  misc_feature (1)..(25): SEQ ID NO: 1929; WAN024DZV_at; Start 170; Stop 194
taaccacctcgacgaactccgtgtg

SEQ ID NO: 177836 - DNA, 25 bp, Artificial
  probe
  misc_feature (1)..(25): SEQ ID NO: 1929; WAN024DZV_at; Start 78; Stop 102
gggcaatgctataacctgtatagtc

SEQ ID NO: 177837 - DNA, 25 bp, Artificial
  probe
  misc_feature (1)..(25): SEQ ID NO: 1929; WAN024DZV_at; Start 87; Stop 111
tataacctgtatagtcaatcacctc

SEQ ID NO: 177838 - DNA, 25 bp, Artificial
  probe
  misc_feature (1)..(25): SEQ ID NO: 1929; WAN024DZV_at; Start 21; Stop 45
tgttgtccatcacatctacacctgc

SEQ ID NO: 177839 - DNA, 25 bp, Artificial
  probe
  misc_feature (1)..(25): SEQ ID NO: 1929; WAN024DZV_at; Start 239; Stop 263
acctccttaaaagattgattctaca

SEQ ID NO: 177840 - DNA, 25 bp, Artificial
  probe
  misc_feature (1)..(25): SEQ ID NO: 1929; WAN024DZV_at; Start 24; Stop 48
tgtccatcacatctacacctgcata

SEQ ID NO: 177841 - DNA, 25 bp, Artificial
  probe
  misc_feature (1)..(25): SEQ ID NO: 1929; WAN024DZV_at; Start 116; Stop 140
ccttcaggaatctgctctacatgtt

SEQ ID NO: 177842 - DNA, 25 bp, Artificial
  probe
  misc_feature (1)..(25): SEQ ID NO: 1929; WAN024DZV_at; Start 221; Stop 245
tagttaggcataatgttaacctcct

SEQ ID NO: 177843 - DNA, 25 bp, Artificial
  probe
  misc_feature (1)..(25): SEQ ID NO: 1929; WAN024DZV_at; Start 4; Stop 28
caatgtaccttcaatgttgttgtcc

SEQ ID NO: 177844 - DNA, 25 bp, Artificial
  probe
  misc_feature (1)..(25): SEQ ID NO: 1929; WAN024DZV_at; Start 53; Stop 77
tgaatatgagtatccacaagacctg

SEQ ID NO: 177845 - DNA, 25 bp, Artificial
  probe
  misc_feature (1)..(25): SEQ ID NO: 1929; WAN024DZV_at; Start 174; Stop 198
cacctcgacgaactccgtgtgggta

SEQ ID NO: 177846 - DNA, 25 bp, Artificial
  probe
  misc_feature (1)..(25): SEQ ID NO: 1929; WAN024DZV_at; Start 15; Stop 39
caatgttgttgtccatcacatctac

SEQ ID NO: 177847 - DNA, 25 bp, Artificial
  probe
  misc_feature (1)..(25): SEQ ID NO: 1929; WAN024DZV_at; Start 193; Stop 217
tgggtagaaaaactgatccgcttta

SEQ ID NO: 177848 - DNA, 25 bp, Artificial
  probe
  misc_feature (1)..(25): SEQ ID NO: 1929; WAN024DZV_at; Start 9; Stop 33
taccttcaatgttgttgtccatcac

SEQ ID NO: 177849 - DNA, 25 bp, Artificial
  probe
  misc_feature (1)..(25): SEQ ID NO: 1929; WAN024DZV_at; Start 112; Stop 136
agccccttcaggaatctgctctaca

SEQ ID NO: 177850 - DNA, 25 bp, Artificial
  probe
  misc_feature (1)..(25): SEQ ID NO: 1929; WAN024DZV_at; Start 55; Stop 79
aatatgagtatccacaagacctggg

SEQ ID NO: 177851 - DNA, 25 bp, Artificial
  probe
  misc_feature (1)..(25): SEQ ID NO: 1929; WAN024DZV_at; Start 38; Stop 62
acacctgcatatccatgaatatgag

SEQ ID NO: 177852 - DNA, 25 bp, Artificial
  probe
  misc_feature (1)..(25): SEQ ID NO: 1929; WAN024DZV_at; Start 205; Stop 229
ctgatccgctttaatatagttaggc

SEQ ID NO: 177853 - DNA, 25 bp, Artificial
  probe
  misc_feature (1)..(25): SEQ ID NO: 1929; WAN024DZV_at; Start 133; Stop 157
tacatgtttcccaaacttgccgtcc

SEQ ID NO: 177854 - DNA, 25 bp, Artificial
  probe
  misc_feature (1)..(25): SEQ ID NO: 1929; WAN024DZV_at; Start 228; Stop 252
gcataatgttaacctccttaaaaga

SEQ ID NO: 177855 - DNA, 25 bp, Artificial
  probe
  misc_feature (1)..(25): SEQ ID NO: 1929; WAN024DZV_at; Start 178; Stop 202
tcgacgaactccgtgtgggtagaaa

SEQ ID NO: 177856 - DNA, 25 bp, Artificial
  probe
  misc_feature (1)..(25): SEQ ID NO: 1929; WAN024DZV_at; Start 209; Stop 233
tccgctttaatatagttaggcataa

SEQ ID NO: 177857 - DNA, 25 bp, Artificial
  probe
  misc_feature (1)..(25): SEQ ID NO: 1929; WAN024DZV_at; Start 94; Stop 118
tgtatagtcaatcacctcagcccct

SEQ ID NO: 177858 - DNA, 25 bp, Artificial
  probe
  misc_feature (1)..(25): SEQ ID NO: 1929; WAN024DZV_at; Start 123; Stop 147
gaatctgctctacatgtttcccaaa

SEQ ID NO: 177859 - DNA, 25 bp, Artificial
  probe
  misc_feature (1)..(25): SEQ ID NO: 1929; WAN024DZV_at; Start 137; Stop 161
tgtttcccaaacttgccgtccacaa

SEQ ID NO: 177860 - DNA, 25 bp, Artificial
  probe
  misc_feature (1)..(25): SEQ ID NO: 1929; WAN024DZV_at; Start 149; Stop 173
ttgccgtccacaagttccaagtaac

SEQ ID NO: 177861 - DNA, 25 bp, Artificial
  probe
  misc_feature (1)..(25): SEQ ID NO: 1929; WAN024DZV_at; Start 186; Stop 210
ctccgtgtgggtagaaaaactgatc

SEQ ID NO: 177862 - DNA, 25 bp, Artificial
  probe
  misc_feature (1)..(25): SEQ ID NO: 5520; WAN024DZW_at; Start 1; Stop 25
ttggccacagacgtcatcgatgtga

SEQ ID NO: 177863 - DNA, 25 bp, Artificial
  probe
  misc_feature (1)..(25): SEQ ID NO: 5520; WAN024DZW_at; Start 450; Stop 474
tggcttcatcaaaagtcgcgtttga

SEQ ID NO: 177864 - DNA, 25 bp, Artificial
  probe
  misc_feature (1)..(25): SEQ ID NO: 5520; WAN024DZW_at; Start 196; Stop 220
caacatataatctccgtcttccaat

SEQ ID NO: 177865 - DNA, 25 bp, Artificial
  probe
  misc_feature (1)..(25): SEQ ID NO: 5520; WAN024DZW_at; Start 172; Stop 196
tgcaacgacaactgggaattctccc

SEQ ID NO: 177866 - DNA, 25 bp, Artificial
  probe
  misc_feature (1)..(25): SEQ ID NO: 5520; WAN024DZW_at; Start 445; Stop 469
ttttttggcttcatcaaaagtcgcg

SEQ ID NO: 177867 - DNA, 25 bp, Artificial
  probe
  misc_feature (1)..(25): SEQ ID NO: 5520; WAN024DZW_at; Start 29; Stop 53
gatttagctgggttgaagctggcca

SEQ ID NO: 177868 - DNA, 25 bp, Artificial
  probe
  misc_feature (1)..(25): SEQ ID NO: 5520; WAN024DZW_at; Start 276; Stop 300
tgataagaatttcgcaagcctttgg

SEQ ID NO: 177869 - DNA, 25 bp, Artificial
  probe
  misc_feature (1)..(25): SEQ ID NO: 5520; WAN024DZW_at; Start 68; Stop 92
tgcggattcgcaattccccattcga

SEQ ID NO: 177870 - DNA, 25 bp, Artificial
  probe
  misc_feature (1)..(25): SEQ ID NO: 5520; WAN024DZW_at; Start 324; Stop 348
tcaactctgcataggtatgtggcaa

SEQ ID NO: 177871 - DNA, 25 bp, Artificial
  probe
  misc_feature (1)..(25): SEQ ID NO: 5520; WAN024DZW_at; Start 346; Stop 370
caattggtacatggctccaaccatc

SEQ ID NO: 177872 - DNA, 25 bp, Artificial
  probe
  misc_feature (1)..(25): SEQ ID NO: 5520; WAN024DZW_at; Start 107; Stop 131
ccatctttgagtttgaggatagaac

SEQ ID NO: 177873 - DNA, 25 bp, Artificial
  probe
  misc_feature (1)..(25): SEQ ID NO: 5520; WAN024DZW_at; Start 404; Stop 428
ttgtaggcatgcacccaaacactcg

SEQ ID NO: 177874 - DNA, 25 bp, Artificial
  probe
  misc_feature (1)..(25): SEQ ID NO: 5520; WAN024DZW_at; Start 386; Stop 410
gtcaacccacgcattccattgtagg

SEQ ID NO: 177875 - DNA, 25 bp, Artificial
  probe
  misc_feature (1)..(25): SEQ ID NO: 5520; WAN024DZW_at; Start 363; Stop 387
caaccatccccaattcacggtgagt

SEQ ID NO: 177876 - DNA, 25 bp, Artificial
  probe
  misc_feature (1)..(25): SEQ ID NO: 5520; WAN024DZW_at; Start 260; Stop 284
tctgttcctttttgtttgataagaa

SEQ ID NO: 177877 - DNA, 25 bp, Artificial
  probe
  misc_feature (1)..(25): SEQ ID NO: 5520; WAN024DZW_at; Start 91; Stop 115
gaccacattcttcaaaccatctttg

SEQ ID NO: 177878 - DNA, 25 bp, Artificial
  probe
  misc_feature (1)..(25): SEQ ID NO: 5520; WAN024DZW_at; Start 163; Stop 187
agttccatttgcaacgacaactggg

SEQ ID NO: 177879 - DNA, 25 bp, Artificial
  probe
  misc_feature (1)..(25): SEQ ID NO: 5520; WAN024DZW_at; Start 231; Stop 255
tcatacagtctgtgataagagcgat

SEQ ID NO: 177880 - DNA, 25 bp, Artificial
  probe
  misc_feature (1)..(25): SEQ ID NO: 5520; WAN024DZW_at; Start 291; Stop 315
aagcctttggatctacgtggtgacc

SEQ ID NO: 177881 - DNA, 25 bp, Artificial
  probe
  misc_feature (1)..(25): SEQ ID NO: 5520; WAN024DZW_at; Start 141; Stop 165
tacctgtcgatttgaggcgtgcagt

SEQ ID NO: 177882 - DNA, 25 bp, Artificial
  probe
  misc_feature (1)..(25): SEQ ID NO: 5520; WAN024DZW_at; Start 126; Stop 150
tagaacctgccaagttacctgtcga

SEQ ID NO: 177883 - DNA, 25 bp, Artificial
  probe
  misc_feature (1)..(25): SEQ ID NO: 5520; WAN024DZW_at; Start 299; Stop 323
ggatctacgtggtgaccatcacaga

SEQ ID NO: 177884 - DNA, 25 bp, Artificial
  probe
  misc_feature (1)..(25): SEQ ID NO: 5520; WAN024DZW_at; Start 308; Stop 332
tggtgaccatcacagatcaactctg

SEQ ID NO: 177885 - DNA, 25 bp, Artificial
  probe
  misc_feature (1)..(25): SEQ ID NO: 5520; WAN024DZW_at; Start 339; Stop 363
tatgtggcaattggtacatggctcc

SEQ ID NO: 177886 - DNA, 25 bp, Artificial
  probe
  misc_feature (1)..(25): SEQ ID NO: 5520; WAN024DZW_at; Start 222; Stop 246
ccccagctgtcatacagtctgtgat

SEQ ID NO: 177887 - DNA, 25 bp, Artificial
  probe
  misc_feature (1)..(25): SEQ ID NO: 5520; WAN024DZW_at; Start 55; Stop 79
catgactgcttcatgcggattcgca

SEQ ID NO: 177888 - DNA, 25 bp, Artificial
  probe
  misc_feature (1)..(25): SEQ ID NO: 5520; WAN024DZW_at; Start 397; Stop 421
cattccattgtaggcatgcacccaa

SEQ ID NO: 177889 - DNA, 25 bp, Artificial
  probe
  misc_feature (1)..(25): SEQ ID NO: 5520; WAN024DZW_at; Start 244; Stop 268
gataagagcgatgttttctgttcct

SEQ ID NO: 177890 - DNA, 25 bp, Artificial
  probe
  misc_feature (1)..(25): SEQ ID NO: 5520; WAN024DZW_at; Start 14; Stop 38
tcatcgatgtgaacggatttagctg

SEQ ID NO: 177891 - DNA, 25 bp, Artificial
  probe
  misc_feature (1)..(25): SEQ ID NO: 5520; WAN024DZW_at; Start 154; Stop 178
gaggcgtgcagttccatttgcaacg

SEQ ID NO: 177892 - DNA, 25 bp, Artificial
  probe
  misc_feature (1)..(25): SEQ ID NO: 5520; WAN024DZW_at; Start 187; Stop 211
gaattctcccaacatataatctccg

SEQ ID NO: 177893 - DNA, 25 bp, Artificial
  probe
  misc_feature (1)..(25): SEQ ID NO: 5520; WAN024DZW_at; Start 40; Stop 64
gttgaagctggccatcatgactgct

SEQ ID NO: 177894 - DNA, 25 bp, Artificial
  probe
  misc_feature (1)..(25): SEQ ID NO: 5520; WAN024DZW_at; Start 115; Stop 139
gagtttgaggatagaacctgccaag

SEQ ID NO: 177895 - DNA, 25 bp, Artificial
  probe
  misc_feature (1)..(25): SEQ ID NO: 5520; WAN024DZW_at; Start 374; Stop 398
aattcacggtgagtcaacccacgca

SEQ ID NO: 177896 - DNA, 25 bp, Artificial
  probe
  misc_feature (1)..(25): SEQ ID NO: 2009; WAN024DZX_at; Start 564; Stop 588
gacggttgctcttggacattcaaac

SEQ ID NO: 177897 - DNA, 25 bp, Artificial
  probe
  misc_feature (1)..(25): SEQ ID NO: 2009; WAN024DZX_at; Start 286; Stop 310
ttaacagccacttatgagcaattgc

SEQ ID NO: 177898 - DNA, 25 bp, Artificial
  probe
  misc_feature (1)..(25): SEQ ID NO: 2009; WAN024DZX_at; Start 690; Stop 714
ggttggagccatgtaccaattgcca

SEQ ID NO: 177899 - DNA, 25 bp, Artificial
  probe
  misc_feature (1)..(25): SEQ ID NO: 2009; WAN024DZX_at; Start 1039; Stop 1063
gatgacgtctgtggccaaatccgtg

SEQ ID NO: 177900 - DNA, 25 bp, Artificial
  probe
  misc_feature (1)..(25): SEQ ID NO: 2009; WAN024DZX_at; Start 424; Stop 448
ccaacttatatgagagacccgggtg

SEQ ID NO: 177901 - DNA, 25 bp, Artificial
  probe
  misc_feature (1)..(25): SEQ ID NO: 2009; WAN024DZX_at; Start 725; Stop 749
cagagttgatctgtgatggtcacca

SEQ ID NO: 177902 - DNA, 25 bp, Artificial
  probe
  misc_feature (1)..(25): SEQ ID NO: 2009; WAN024DZX_at; Start 997; Stop 1021
gtcatgatggccagcttcaacccag

SEQ ID NO: 177903 - DNA, 25 bp, Artificial
  probe
  misc_feature (1)..(25): SEQ ID NO: 2009; WAN024DZX_at; Start 885; Stop 909
aaatggaactgcacgcctcaaatcg

SEQ ID NO: 177904 - DNA, 25 bp, Artificial
  probe
  misc_feature (1)..(25): SEQ ID NO: 2009; WAN024DZX_at; Start 584; Stop 608
caaacgcgacttttgatgaagccaa

SEQ ID NO: 177905 - DNA, 25 bp, Artificial
  probe
  misc_feature (1)..(25): SEQ ID NO: 2009; WAN024DZX_at; Start 628; Stop 652
gcgagtgtttgggtgcatgcctaca

SEQ ID NO: 177906 - DNA, 25 bp, Artificial
  probe
  misc_feature (1)..(25): SEQ ID NO: 2009; WAN024DZX_at; Start 1054; Stop 1078
caaatccgtgaaggctacgacgctg

SEQ ID NO: 177907 - DNA, 25 bp, Artificial
  probe
  misc_feature (1)..(25): SEQ ID NO: 2009; WAN024DZX_at; Start 925; Stop 949
ggttctatcctcaaactcaaagatg

SEQ ID NO: 177908 - DNA, 25 bp, Artificial
  probe
  misc_feature (1)..(25): SEQ ID NO: 2009; WAN024DZX_at; Start 810; Stop 834
tatcacagactgtatgacagctggg

SEQ ID NO: 177909 - DNA, 25 bp, Artificial
  probe
  misc_feature (1)..(25): SEQ ID NO: 2009; WAN024DZX_at; Start 862; Stop 886
ggagaattcccagttgtcgttgcaa

SEQ ID NO: 177910 - DNA, 25 bp, Artificial
  probe
  misc_feature (1)..(25): SEQ ID NO: 2009; WAN024DZX_at; Start 301; Stop 325
gagcaattgcttgcagtcactgaaa

SEQ ID NO: 177911 - DNA, 25 bp, Artificial
  probe
  misc_feature (1)..(25): SEQ ID NO: 2009; WAN024DZX_at; Start 3; Stop 27
gcctaactatattaaagcggatcag

SEQ ID NO: 177912 - DNA, 25 bp, Artificial
  probe
  misc_feature (1)..(25): SEQ ID NO: 2009; WAN024DZX_at; Start 497; Stop 521
aaattgcccttgcaccagaacgtga

SEQ ID NO: 177913 - DNA, 25 bp, Artificial
  probe
  misc_feature (1)..(25): SEQ ID NO: 2009; WAN024DZX_at; Start 90; Stop 114
gaaacatgtagagcagattcctgaa

SEQ ID NO: 177914 - DNA, 25 bp, Artificial
  probe
  misc_feature (1)..(25): SEQ ID NO: 2009; WAN024DZX_at; Start 1023; Stop 1047
taaatccgttcacatcgatgacgtc

SEQ ID NO: 177915 - DNA, 25 bp, Artificial
  probe
  misc_feature (1)..(25): SEQ ID NO: 2009; WAN024DZX_at; Start 151; Stop 175
gccccaggtcttgtggatactcata

SEQ ID NO: 177916 - DNA, 25 bp, Artificial
  probe
  misc_feature (1)..(25): SEQ ID NO: 2009; WAN024DZX_at; Start 463; Stop 487
tcttggcaaaaagcggcaaatggct

SEQ ID NO: 177917 - DNA, 25 bp, Artificial
  probe
  misc_feature (1)..(25): SEQ ID NO: 2009; WAN024DZX_at; Start 742; Stop 766
ggtcaccacgtagatccaaaggctt

SEQ ID NO: 177918 - DNA, 25 bp, Artificial
  probe
  misc_feature (1)..(25): SEQ ID NO: 2009; WAN024DZX_at; Start 59; Stop 83
gttacttggaacttgtggacggcaa

SEQ ID NO: 177919 - DNA, 25 bp, Artificial
  probe
  misc_feature (1)..(25): SEQ ID NO: 2009; WAN024DZX_at; Start 238; Stop 262
agtgaaggacttcttagtaccggtg

SEQ ID NO: 177920 - DNA, 25 bp, Artificial
  probe
  misc_feature (1)..(25): SEQ ID NO: 2009; WAN024DZX_at; Start 133; Stop 157
tatacaggttatagcattgccccag

SEQ ID NO: 177921 - DNA, 25 bp, Artificial
  probe
  misc_feature (1)..(25): SEQ ID NO: 2009; WAN024DZX_at; Start 643; Stop 667
catgcctacaatggaatgcgtgggt

SEQ ID NO: 177922 - DNA, 25 bp, Artificial
  probe
  misc_feature (1)..(25): SEQ ID NO: 2009; WAN024DZX_at; Start 1095; Stop 1119
taaagatttggaattggtagcaacc

SEQ ID NO: 177923 - DNA, 25 bp, Artificial
  probe
  misc_feature (1)..(25): SEQ ID NO: 2009; WAN024DZX_at; Start 350; Stop 374
caacaggtgctaagattcgtgggat

SEQ ID NO: 177924 - DNA, 25 bp, Artificial
  probe
  misc_feature (1)..(25): SEQ ID NO: 2009; WAN024DZX_at; Start 441; Stop 465
cccgggtgttgaggagtttcattct

SEQ ID NO: 177925 - DNA, 25 bp, Artificial
  probe
  misc_feature (1)..(25): SEQ ID NO: 2009; WAN024DZX_at; Start 902; Stop 926
tcaaatcgacaggtaacttggcagg

SEQ ID NO: 177926 - DNA, 25 bp, Artificial
  probe
  misc_feature (1)..(25): SEQ ID NO: 2009; WAN024DZX_at; Start 38; Stop 62
cacacggagttcgtcgaggtggtta

SEQ ID NO: 177927 - DNA, 25 bp, Artificial
  probe
  misc_feature (1)..(25): SEQ ID NO: 2009; WAN024DZX_at; Start 22; Stop 46
gatcagtttttctacccacacggag

SEQ ID NO: 177928 - DNA, 25 bp, Artificial
  probe
  misc_feature (1)..(25): SEQ ID NO: 2009; WAN024DZX_at; Start 977; Stop 1001
ttgcgaatccgcatgaagcagtcat

SEQ ID NO: 177929 - DNA, 25 bp, Artificial
  probe
  misc_feature (1)..(25): SEQ ID NO: 2009; WAN024DZX_at; Start 657; Stop 681
aatgcgtgggttgactcaccgtgaa

SEQ ID NO: 177930 - DNA, 25 bp, Artificial
  probe
  misc_feature (1)..(25): SEQ ID NO: 1956; WAN024DZY_at; Start 40; Stop 64
tcacaaaaaaagcttgaagaaacaa

SEQ ID NO: 177931 - DNA, 25 bp, Artificial
  probe
  misc_feature (1)..(25): SEQ ID NO: 1956; WAN024DZY_at; Start 39; Stop 63
atcacaaaaaaagcttgaagaaaca

SEQ ID NO: 177932 - DNA, 25 bp, Artificial
  probe
  misc_feature (1)..(25): SEQ ID NO: 1956; WAN024DZY_at; Start 1; Stop 25
atgcagggtactttactggtaaata

SEQ ID NO: 177933 - DNA, 25 bp, Artificial
  probe
  misc_feature (1)..(25): SEQ ID NO: 1956; WAN024DZY_at; Start 2; Stop 26
tgcagggtactttactggtaaataa

SEQ ID NO: 177934 - DNA, 25 bp, Artificial
  probe
  misc_feature (1)..(25): SEQ ID NO: 3932; WAN024DZZ_at; Start 94; Stop 118
caagaccttgtcaccttttttgaag

SEQ ID NO: 177935 - DNA, 25 bp, Artificial
  probe
  misc_feature (1)..(25): SEQ ID NO: 3932; WAN024DZZ_at; Start 324; Stop 348
cataagtataggctttcataaagca

SEQ ID NO: 177936 - DNA, 25 bp, Artificial
  probe
  misc_feature (1)..(25): SEQ ID NO: 3932; WAN024DZZ_at; Start 186; Stop 210
ggcaagtaggaacatcccctttgat

SEQ ID NO: 177937 - DNA, 25 bp, Artificial
  probe
  misc_feature (1)..(25): SEQ ID NO: 3932; WAN024DZZ_at; Start 288; Stop 312
tgtctacatcaacaaaagaagcaag

SEQ ID NO: 177938 - DNA, 25 bp, Artificial
  probe
  misc_feature (1)..(25): SEQ ID NO: 3932; WAN024DZZ_at; Start 230; Stop 254
caaatagtggtttttacaatacgca

SEQ ID NO: 177939 - DNA, 25 bp, Artificial
  probe
  misc_feature (1)..(25): SEQ ID NO: 3932; WAN024DZZ_at; Start 59; Stop 83
tagtagcatttaccacaggcacaga

SEQ ID NO: 177940 - DNA, 25 bp, Artificial
  probe
  misc_feature (1)..(25): SEQ ID NO: 3932; WAN024DZZ_at; Start 238; Stop 262
ggtttttacaatacgcacaatagcg

SEQ ID NO: 177941 - DNA, 25 bp, Artificial
  probe
  misc_feature (1)..(25): SEQ ID NO: 3932; WAN024DZZ_at; Start 54; Stop 78
tacagtagtagcatttaccacaggc

SEQ ID NO: 177942 - DNA, 25 bp, Artificial
  probe
  misc_feature (1)..(25): SEQ ID NO: 3932; WAN024DZZ_at; Start 267; Stop 291
ttggcttgcgaataactggtttgtc

SEQ ID NO: 177943 - DNA, 25 bp, Artificial
  probe
  misc_feature (1)..(25): SEQ ID NO: 3932; WAN024DZZ_at; Start 85; Stop 109
gcaagaaatcaagaccttgtcacct

SEQ ID NO: 177944 - DNA, 25 bp, Artificial
  probe
  misc_feature (1)..(25): SEQ ID NO: 3932; WAN024DZZ_at; Start 376; Stop 400
tatagttcaattgtaagcctttttc

SEQ ID NO: 177945 - DNA, 25 bp, Artificial
  probe
  misc_feature (1)..(25): SEQ ID NO: 3932; WAN024DZZ_at; Start 294; Stop 318
catcaacaaaagaagcaagtcctgg

SEQ ID NO: 177946 - DNA, 25 bp, Artificial
  probe
  misc_feature (1)..(25): SEQ ID NO: 3932; WAN024DZZ_at; Start 276; Stop 300
gaataactggtttgtctacatcaac

SEQ ID NO: 177947 - DNA, 25 bp, Artificial
  probe
  misc_feature (1)..(25): SEQ ID NO: 3932; WAN024DZZ_at; Start 26; Stop 50
tcttcacagtgagcataaattcctt

SEQ ID NO: 177948 - DNA, 25 bp, Artificial
  probe
  misc_feature (1)..(25): SEQ ID NO: 3932; WAN024DZZ_at; Start 261; Stop 285
cgtctgttggcttgcgaataactgg

SEQ ID NO: 177949 - DNA, 25 bp, Artificial
  probe
  misc_feature (1)..(25): SEQ ID NO: 3932; WAN024DZZ_at; Start 64; Stop 88
gcatttaccacaggcacagacgcaa

SEQ ID NO: 177950 - DNA, 25 bp, Artificial
  probe
  misc_feature (1)..(25): SEQ ID NO: 3932; WAN024DZZ_at; Start 36; Stop 60
gagcataaattccttttttacagta

SEQ ID NO: 177951 - DNA, 25 bp, Artificial
  probe
  misc_feature (1)..(25): SEQ ID NO: 3932; WAN024DZZ_at; Start 77; Stop 101
gcacagacgcaagaaatcaagacct

SEQ ID NO: 177952 - DNA, 25 bp, Artificial
  probe
  misc_feature (1)..(25): SEQ ID NO: 3932; WAN024DZZ_at; Start 69; Stop 93
taccacaggcacagacgcaagaaat

SEQ ID NO: 177953 - DNA, 25 bp, Artificial
  probe
  misc_feature (1)..(25): SEQ ID NO: 3932; WAN024DZZ_at; Start 208; Stop 232
gataatatggaggtctgttccacaa

SEQ ID NO: 177954 - DNA, 25 bp, Artificial
  probe
  misc_feature (1)..(25): SEQ ID NO: 3932; WAN024DZZ_at; Start 180; Stop 204
cactttggcaagtaggaacatcccc

SEQ ID NO: 177955 - DNA, 25 bp, Artificial
  probe
  misc_feature (1)..(25): SEQ ID NO: 3932; WAN024DZZ_at; Start 247; Stop 271
aatacgcacaatagcgtctgttggc

SEQ ID NO: 177956 - DNA, 25 bp, Artificial
  probe
  misc_feature (1)..(25): SEQ ID NO: 3932; WAN024DZZ_at; Start 313; Stop 337
tcctggtttaacataagtataggct

SEQ ID NO: 177957 - DNA, 25 bp, Artificial
  probe
  misc_feature (1)..(25): SEQ ID NO: 3932; WAN024DZZ_at; Start 148; Stop 172
aatcccaatcccttcgtggccaaga

SEQ ID NO: 177958 - DNA, 25 bp, Artificial
  probe
  misc_feature (1)..(25): SEQ ID NO: 3932; WAN024DZZ_at; Start 153; Stop 177
caatcccttcgtggccaagaatggt

SEQ ID NO: 177959 - DNA, 25 bp, Artificial
  probe
  misc_feature (1)..(25): SEQ ID NO: 3932; WAN024DZZ_at; Start 253; Stop 277
cacaatagcgtctgttggcttgcga

SEQ ID NO: 177960 - DNA, 25 bp, Artificial
  probe
  misc_feature (1)..(25): SEQ ID NO: 3932; WAN024DZZ_at; Start 194; Stop 218
ggaacatcccctttgataatatgga

SEQ ID NO: 177961 - DNA, 25 bp, Artificial
  probe
  misc_feature (1)..(25): SEQ ID NO: 3932; WAN024DZZ_at; Start 305; Stop 329
gaagcaagtcctggtttaacataag

SEQ ID NO: 177962 - DNA, 25 bp, Artificial
  probe
  misc_feature (1)..(25): SEQ ID NO: 3932; WAN024DZZ_at; Start 19; Stop 43
cccttcgtcttcacagtgagcataa

SEQ ID NO: 177963 - DNA, 25 bp, Artificial
  probe
  misc_feature (1)..(25): SEQ ID NO: 3932; WAN024DZZ_at; Start 171; Stop 195
gaatggtaccactttggcaagtagg

SEQ ID NO: 177964 - DNA, 25 bp, Artificial
  probe
  misc_feature (1)..(25): SEQ ID NO: 3932; WAN024DZZ_at; Start 334; Stop 358
ggctttcataaagcactcctccgtt

SEQ ID NO: 177965 - DNA, 25 bp, Artificial
  probe
  misc_feature (1)..(25): SEQ ID NO: 3932; WAN024DZZ_at; Start 200; Stop 224
tcccctttgataatatggaggtctg

SEQ ID NO: 177966 - DNA, 25 bp, Artificial
  probe
  misc_feature (1)..(25): SEQ ID NO: 3932; WAN024DZZ_at; Start 216; Stop 240
ggaggtctgttccacaaatagtggt

SEQ ID NO: 177967 - DNA, 25 bp, Artificial
  probe
  misc_feature (1)..(25): SEQ ID NO: 3932; WAN024DZZ_at; Start 157; Stop 181
cccttcgtggccaagaatggtacca

SEQ ID NO: 177968 - DNA, 25 bp, Artificial
  probe
  misc_feature (1)..(25): SEQ ID NO: 897; WAN024E22_at; Start 988; Stop 1012
gaagtcttcagtaaggcagcagacc

SEQ ID NO: 177969 - DNA, 25 bp, Artificial
  probe
  misc_feature (1)..(25): SEQ ID NO: 897; WAN024E22_at; Start 1003; Stop 1027
gcagcagaccaccatgccattaagg

SEQ ID NO: 177970 - DNA, 25 bp, Artificial
  probe
  misc_feature (1)..(25): SEQ ID NO: 897; WAN024E22_at; Start 1034; Stop 1058
tcgaaaacgatatctcagaagccta

SEQ ID NO: 177971 - DNA, 25 bp, Artificial
  probe
  misc_feature (1)..(25): SEQ ID NO: 897; WAN024E22_at; Start 794; Stop 818
ccaactgtggtgtgcatggtaaacc

SEQ ID NO: 177972 - DNA, 25 bp, Artificial
  probe
  misc_feature (1)..(25): SEQ ID NO: 897; WAN024E22_at; Start 339; Stop 363
tcacttgattgatggtatgcaggct

SEQ ID NO: 177973 - DNA, 25 bp, Artificial
  probe
  misc_feature (1)..(25): SEQ ID NO: 897; WAN024E22_at; Start 68; Stop 92
gcaagccaacagacgctattgtgcg

SEQ ID NO: 177974 - DNA, 25 bp, Artificial
  probe
  misc_feature (1)..(25): SEQ ID NO: 897; WAN024E22_at; Start 356; Stop 380
tgcaggctgaatatctacgtgtccc

SEQ ID NO: 177975 - DNA, 25 bp, Artificial
  probe
  misc_feature (1)..(25): SEQ ID NO: 897; WAN024E22_at; Start 258; Stop 282
cgtctgtgcctgtggtaaatgctac

SEQ ID NO: 177976 - DNA, 25 bp, Artificial
  probe
  misc_feature (1)..(25): SEQ ID NO: 897; WAN024E22_at; Start 427; Stop 451
gaagctttggttatgctgtcagaca

SEQ ID NO: 177977 - DNA, 25 bp, Artificial
  probe
  misc_feature (1)..(25): SEQ ID NO: 897; WAN024E22_at; Start 52; Stop 76
gacaaaccagttattcgcaagccaa

SEQ ID NO: 177978 - DNA, 25 bp, Artificial
  probe
  misc_feature (1)..(25): SEQ ID NO: 897; WAN024E22_at; Start 162; Stop 186
tggtaccattcttggccacgaaggg

SEQ ID NO: 177979 - DNA, 25 bp, Artificial
  probe
  misc_feature (1)..(25): SEQ ID NO: 897; WAN024E22_at; Start 243; Stop 267
ggtcttgatttcttgcgtctgtgcc

SEQ ID NO: 177980 - DNA, 25 bp, Artificial
  probe
  misc_feature (1)..(25): SEQ ID NO: 897; WAN024E22_at; Start 705; Stop 729
tcgtggtgtggatgtcgctatcgaa

SEQ ID NO: 177981 - DNA, 25 bp, Artificial
  probe
  misc_feature (1)..(25): SEQ ID NO: 897; WAN024E22_at; Start 441; Stop 465
gctgtcagacattctgcctactgga

SEQ ID NO: 177982 - DNA, 25 bp, Artificial
  probe
  misc_feature (1)..(25): SEQ ID NO: 897; WAN024E22_at; Start 324; Stop 348
gggctggattttcggtcacttgatt

SEQ ID NO: 177983 - DNA, 25 bp, Artificial
  probe
  misc_feature (1)..(25): SEQ ID NO: 897; WAN024E22_at; Start 588; Stop 612
tatggtagacctagacgataaccgc

SEQ ID NO: 177984 - DNA, 25 bp, Artificial
  probe
  misc_feature (1)..(25): SEQ ID NO: 897; WAN024E22_at; Start 511; Stop 535
gtagccattattggttcaggtccag

SEQ ID NO: 177985 - DNA, 25 bp, Artificial
  probe
  misc_feature (1)..(25): SEQ ID NO: 897; WAN024E22_at; Start 603; Stop 627
cgataaccgcttggaaactgcccta

SEQ ID NO: 177986 - DNA, 25 bp, Artificial
  probe
  misc_feature (1)..(25): SEQ ID NO: 897; WAN024E22_at; Start 960; Stop 984
caaactcagtgaaattgaaaaagcc

SEQ ID NO: 177987 - DNA, 25 bp, Artificial
  probe
  misc_feature (1)..(25): SEQ ID NO: 897; WAN024E22_at; Start 616; Stop 640
gaaactgccctatcattcggtgcga

SEQ ID NO: 177988 - DNA, 25 bp, Artificial
  probe
  misc_feature (1)..(25): SEQ ID NO: 897; WAN024E22_at; Start 723; Stop 747
tatcgaagctgttggtattcctgca

SEQ ID NO: 177989 - DNA, 25 bp, Artificial
  probe
  misc_feature (1)..(25): SEQ ID NO: 897; WAN024E22_at; Start 1018; Stop 1042
gccattaaggtcattatcgaaaacg

SEQ ID NO: 177990 - DNA, 25 bp, Artificial
  probe
  misc_feature (1)..(25): SEQ ID NO: 897; WAN024E22_at; Start 835; Stop 859
gataaactttggattcgcaacatca

SEQ ID NO: 177991 - DNA, 25 bp, Artificial
  probe
  misc_feature (1)..(25): SEQ ID NO: 897; WAN024E22_at; Start 140; Stop 164
gggatgttcctacttgccaaagtgg

SEQ ID NO: 177992 - DNA, 25 bp, Artificial
  probe
  misc_feature (1)..(25): SEQ ID NO: 897; WAN024E22_at; Start 773; Stop 797
tcggtgtagacggaacggttgccaa

SEQ ID NO: 177993 - DNA, 25 bp, Artificial
  probe
  misc_feature (1)..(25): SEQ ID NO: 897; WAN024E22_at; Start 400; Stop 424
taccatactccagaagacttgtcag

SEQ ID NO: 177994 - DNA, 25 bp, Artificial
  probe
  misc_feature (1)..(25): SEQ ID NO: 897; WAN024E22_at; Start 494; Stop 518
tagaacctggttgcagcgtagccat

SEQ ID NO: 177995 - DNA, 25 bp, Artificial
  probe
  misc_feature (1)..(25): SEQ ID NO: 897; WAN024E22_at; Start 629; Stop 653
cattcggtgcgactcataaggttaa

SEQ ID NO: 177996 - DNA, 25 bp, Artificial
  probe
  misc_feature (1)..(25): SEQ ID NO: 897; WAN024E22_at; Start 371; Stop 395
tacgtgtccctcatgcagataatac

SEQ ID NO: 177997 - DNA, 25 bp, Artificial
  probe
  misc_feature (1)..(25): SEQ ID NO: 897; WAN024E22_at; Start 457; Stop 481
cctactggatatgaaattggtgtct

SEQ ID NO: 177998 - DNA, 25 bp, Artificial
  probe
  misc_feature (1)..(25): SEQ ID NO: 897; WAN024E22_at; Start 104; Stop 128
ccactatttgtggaacagacctcca

SEQ ID NO: 177999 - DNA, 25 bp, Artificial
  probe
  misc_feature (1)..(25): SEQ ID NO: 897; WAN024E22_at; Start 658; Stop 682
tcagaccctgaaaaagccattaaag

SEQ ID NO: 178000 - DNA, 25 bp, Artificial
  probe
  misc_feature (1)..(25): SEQ ID NO: 897; WAN024E22_at; Start 526; Stop 550
tcaggtccagttggattggctgctc

SEQ ID NO: 178001 - DNA, 25 bp, Artificial
  probe
  misc_feature (1)..(25): SEQ ID NO: 897; WAN024E22_at; Start 12; Stop 36
tacttatgttaaaccaggacttgct

SEQ ID NO: 178002 - DNA, 25 bp, Artificial
  probe
  misc_feature (1)..(25): SEQ ID NO: 7679; WAN024E23_at; Start 30; Stop 54
tgaaaattcaattcttgacatcgtt

SEQ ID NO: 178003 - DNA, 25 bp, Artificial
  probe
  misc_feature (1)..(25): SEQ ID NO: 7679; WAN024E23_at; Start 20; Stop 44
tcaaagatggtgaaaattcaattct

SEQ ID NO: 178004 - DNA, 25 bp, Artificial
  probe
  misc_feature (1)..(25): SEQ ID NO: 7679; WAN024E23_at; Start 32; Stop 56
aaaattcaattcttgacatcgttac

SEQ ID NO: 178005 - DNA, 25 bp, Artificial
  probe
  misc_feature (1)..(25): SEQ ID NO: 7679; WAN024E23_at; Start 3; Stop 27
gtccaaatccatggtcatcaaagat

SEQ ID NO: 178006 - DNA, 25 bp, Artificial
  probe
  misc_feature (1)..(25): SEQ ID NO: 7679; WAN024E23_at; Start 4; Stop 28
tccaaatccatggtcatcaaagatg

SEQ ID NO: 178007 - DNA, 25 bp, Artificial
  probe
  misc_feature (1)..(25): SEQ ID NO: 7679; WAN024E23_at; Start 2; Stop 26
tgtccaaatccatggtcatcaaaga

SEQ ID NO: 178008 - DNA, 25 bp, Artificial
  probe
  misc_feature (1)..(25): SEQ ID NO: 7679; WAN024E23_at; Start 19; Stop 43
atcaaagatggtgaaaattcaattc

SEQ ID NO: 178009 - DNA, 25 bp, Artificial
  probe
  misc_feature (1)..(25): SEQ ID NO: 7679; WAN024E23_at; Start 8; Stop 32
aatccatggtcatcaaagatggtga

SEQ ID NO: 178010 - DNA, 25 bp, Artificial
  probe
  misc_feature (1)..(25): SEQ ID NO: 7679; WAN024E23_at; Start 37; Stop 61
tcaattcttgacatcgttaccctct

SEQ ID NO: 178011 - DNA, 25 bp, Artificial
  probe
  misc_feature (1)..(25): SEQ ID NO: 7679; WAN024E23_at; Start 31; Stop 55
gaaaattcaattcttgacatcgtta

SEQ ID NO: 178012 - DNA, 25 bp, Artificial
  probe
  misc_feature (1)..(25): SEQ ID NO: 7679; WAN024E23_at; Start 38; Stop 62
caattcttgacatcgttaccctctt

SEQ ID NO: 178013 - DNA, 25 bp, Artificial
  probe
  misc_feature (1)..(25): SEQ ID NO: 7679; WAN024E23_at; Start 27; Stop 51
tggtgaaaattcaattcttgacatc

SEQ ID NO: 178014 - DNA, 25 bp, Artificial
  probe
  misc_feature (1)..(25): SEQ ID NO: 7679; WAN024E23_at; Start 33; Stop 57
aaattcaattcttgacatcgttacc

SEQ ID NO: 178015 - DNA, 25 bp, Artificial
  probe
  misc_feature (1)..(25): SEQ ID NO: 7679; WAN024E23_at; Start 44; Stop 68
ttgacatcgttaccctcttacaaaa

SEQ ID NO: 178016 - DNA, 25 bp, Artificial
  probe
  misc_feature (1)..(25): SEQ ID NO: 7679; WAN024E23_at; Start 28; Stop 52
ggtgaaaattcaattcttgacatcg

SEQ ID NO: 178017 - DNA, 25 bp, Artificial
  probe
  misc_feature (1)..(25): SEQ ID NO: 7679; WAN024E23_at; Start 54; Stop 78
taccctcttacaaaatttcaatatc

SEQ ID NO: 178018 - DNA, 25 bp, Artificial
  probe
  misc_feature (1)..(25): SEQ ID NO: 7679; WAN024E23_at; Start 21; Stop 45
caaagatggtgaaaattcaattctt

SEQ ID NO: 178019 - DNA, 25 bp, Artificial
  probe
  misc_feature (1)..(25): SEQ ID NO: 7679; WAN024E23_at; Start 35; Stop 59
attcaattcttgacatcgttaccct

SEQ ID NO: 178020 - DNA, 25 bp, Artificial
  probe
  misc_feature (1)..(25): SEQ ID NO: 7679; WAN024E23_at; Start 22; Stop 46
aaagatggtgaaaattcaattcttg

SEQ ID NO: 178021 - DNA, 25 bp, Artificial
  probe
  misc_feature (1)..(25): SEQ ID NO: 7679; WAN024E23_at; Start 34; Stop 58
aattcaattcttgacatcgttaccc

SEQ ID NO: 178022 - DNA, 25 bp, Artificial
  probe
  misc_feature (1)..(25): SEQ ID NO: 7679; WAN024E23_at; Start 40; Stop 64
attcttgacatcgttaccctcttac

SEQ ID NO: 178023 - DNA, 25 bp, Artificial
  probe
  misc_feature (1)..(25): SEQ ID NO: 7679; WAN024E23_at; Start 7; Stop 31
aaatccatggtcatcaaagatggtg

SEQ ID NO: 178024 - DNA, 25 bp, Artificial
  probe
  misc_feature (1)..(25): SEQ ID NO: 7679; WAN024E23_at; Start 24; Stop 48
agatggtgaaaattcaattcttgac

SEQ ID NO: 178025 - DNA, 25 bp, Artificial
  probe
  misc_feature (1)..(25): SEQ ID NO: 7679; WAN024E23_at; Start 43; Stop 67
cttgacatcgttaccctcttacaaa

SEQ ID NO: 178026 - DNA, 25 bp, Artificial
  probe
  misc_feature (1)..(25): SEQ ID NO: 7679; WAN024E23_at; Start 36; Stop 60
ttcaattcttgacatcgttaccctc

SEQ ID NO: 178027 - DNA, 25 bp, Artificial
  probe
  misc_feature (1)..(25): SEQ ID NO: 7679; WAN024E23_at; Start 1; Stop 25
ttgtccaaatccatggtcatcaaag

SEQ ID NO: 178028 - DNA, 25 bp, Artificial
  probe
  misc_feature (1)..(25): SEQ ID NO: 7679; WAN024E23_at; Start 25; Stop 49
gatggtgaaaattcaattcttgaca

SEQ ID NO: 178029 - DNA, 25 bp, Artificial
  probe
  misc_feature (1)..(25): SEQ ID NO: 7679; WAN024E23_at; Start 41; Stop 65
ttcttgacatcgttaccctcttaca

SEQ ID NO: 178030 - DNA, 25 bp, Artificial
  probe
  misc_feature (1)..(25): SEQ ID NO: 7679; WAN024E23_at; Start 39; Stop 63
aattcttgacatcgttaccctctta

SEQ ID NO: 178031 - DNA, 25 bp, Artificial
  probe
  misc_feature (1)..(25): SEQ ID NO: 7679; WAN024E23_at; Start 45; Stop 69
tgacatcgttaccctcttacaaaat

SEQ ID NO: 178032 - DNA, 25 bp, Artificial
  probe
  misc_feature (1)..(25): SEQ ID NO: 7679; WAN024E23_at; Start 6; Stop 30
caaatccatggtcatcaaagatggt

SEQ ID NO: 178033 - DNA, 25 bp, Artificial
  probe
  misc_feature (1)..(25): SEQ ID NO: 7679; WAN024E23_at; Start 5; Stop 29
ccaaatccatggtcatcaaagatgg

SEQ ID NO: 178034 - DNA, 25 bp, Artificial
  probe
  misc_feature (1)..(25): SEQ ID NO: 7679; WAN024E23_at; Start 42; Stop 66
tcttgacatcgttaccctcttacaa

SEQ ID NO: 178035 - DNA, 25 bp, Artificial
  probe
  misc_feature (1)..(25): SEQ ID NO: 7679; WAN024E23_at; Start 29; Stop 53
gtgaaaattcaattcttgacatcgt

SEQ ID NO: 178036 - DNA, 25 bp, Artificial
  probe
  misc_feature (1)..(25): SEQ ID NO: 2832; WAN024E24_at; Start 522; Stop 546
gatggatggttcttcgagtcgtaag

SEQ ID NO: 178037 - DNA, 25 bp, Artificial
  probe
  misc_feature (1)..(25): SEQ ID NO: 2832; WAN024E24_at; Start 579; Stop 603
tatttatgttataggtcgcagtgga

SEQ ID NO: 178038 - DNA, 25 bp, Artificial
  probe
  misc_feature (1)..(25): SEQ ID NO: 2832; WAN024E24_at; Start 201; Stop 225
gatggtcacagacccaaccttttgg

SEQ ID NO: 178039 - DNA, 25 bp, Artificial
  probe
  misc_feature (1)..(25): SEQ ID NO: 2832; WAN024E24_at; Start 130; Stop 154
aatattaccttgtctccttggttca

SEQ ID NO: 178040 - DNA, 25 bp, Artificial
  probe
  misc_feature (1)..(25): SEQ ID NO: 2832; WAN024E24_at; Start 616; Stop 640
gatgacgatattgccaaagcctggg

SEQ ID NO: 178041 - DNA, 25 bp, Artificial
  probe
  misc_feature (1)..(25): SEQ ID NO: 2832; WAN024E24_at; Start 188; Stop 212
tatcagttcatctgatggtcacaga

SEQ ID NO: 178042 - DNA, 25 bp, Artificial
  probe
  misc_feature (1)..(25): SEQ ID NO: 2832; WAN024E24_at; Start 173; Stop 197
ttagtgacacacctttatcagttca

SEQ ID NO: 178043 - DNA, 25 bp, Artificial
  probe
  misc_feature (1)..(25): SEQ ID NO: 2832; WAN024E24_at; Start 145; Stop 169
ccttggttcattcaagaagttcaaa

SEQ ID NO: 178044 - DNA, 25 bp, Artificial
  probe
  misc_feature (1)..(25): SEQ ID NO: 2832; WAN024E24_at; Start 218; Stop 242
ccttttgggtagatcaagttctcga

SEQ ID NO: 178045 - DNA, 25 bp, Artificial
  probe
  misc_feature (1)..(25): SEQ ID NO: 2832; WAN024E24_at; Start 649; Stop 673
tctagagattacgaagaaatgaccg

SEQ ID NO: 178046 - DNA, 25 bp, Artificial
  probe
  misc_feature (1)..(25): SEQ ID NO: 2832; WAN024E24_at; Start 45; Stop 69
ggacaaattcaaagagcagattact

SEQ ID NO: 178047 - DNA, 25 bp, Artificial
  probe
  misc_feature (1)..(25): SEQ ID NO: 2832; WAN024E24_at; Start 232; Stop 256
caagttctcgatttacaatgtgagt

SEQ ID NO: 178048 - DNA, 25 bp, Artificial
  probe
  misc_feature (1)..(25): SEQ ID NO: 2832; WAN024E24_at; Start 329; Stop 353
taaaggctggtgttgtccttaatcc

SEQ ID NO: 178049 - DNA, 25 bp, Artificial
  probe
  misc_feature (1)..(25): SEQ ID NO: 2832; WAN024E24_at; Start 630; Stop 654
caaagcctgggatatctgttctaga

SEQ ID NO: 178050 - DNA, 25 bp, Artificial
  probe
  misc_feature (1)..(25): SEQ ID NO: 2832; WAN024E24_at; Start 552; Stop 576
caaacaaattgatgtggcaggacca

SEQ ID NO: 178051 - DNA, 25 bp, Artificial
  probe
  misc_feature (1)..(25): SEQ ID NO: 2832; WAN024E24_at; Start 16; Stop 40
ttttcaccatctttgatgaccatgg

SEQ ID NO: 178052 - DNA, 25 bp, Artificial
  probe
  misc_feature (1)..(25): SEQ ID NO: 2832; WAN024E24_at; Start 567; Stop 591
ggcaggaccagatatttatgttata

SEQ ID NO: 178053 - DNA, 25 bp, Artificial
  probe
  misc_feature (1)..(25): SEQ ID NO: 2832; WAN024E24_at; Start 253; Stop 277
gagtatatttgtattcatgctgaag

SEQ ID NO: 178054 - DNA, 25 bp, Artificial
  probe
  misc_feature (1)..(25): SEQ ID NO: 2832; WAN024E24_at; Start 597; Stop 621
cagtggattatttggtttggatgac

SEQ ID NO: 178055 - DNA, 25 bp, Artificial
  probe
  misc_feature (1)..(25): SEQ ID NO: 2832; WAN024E24_at; Start 405; Stop 429
aactattatgactgtagatccaggt

SEQ ID NO: 178056 - DNA, 25 bp, Artificial
  probe
  misc_feature (1)..(25): SEQ ID NO: 2832; WAN024E24_at; Start 108; Stop 132
tatggatggccattttgttcccaat

SEQ ID NO: 178057 - DNA, 25 bp, Artificial
  probe
  misc_feature (1)..(25): SEQ ID NO: 2832; WAN024E24_at; Start 315; Stop 339
tcatgatgcaggtctaaaggctggt

SEQ ID NO: 178058 - DNA, 25 bp, Artificial
  probe
  misc_feature (1)..(25): SEQ ID NO: 2832; WAN024E24_at; Start 434; Stop 458
caggacaacgctttttggagtctac

SEQ ID NO: 178059 - DNA, 25 bp, Artificial
  probe
  misc_feature (1)..(25): SEQ ID NO: 2832; WAN024E24_at; Start 30; Stop 54
gatgaccatggatttggacaaattc

SEQ ID NO: 178060 - DNA, 25 bp, Artificial
  probe
  misc_feature (1)..(25): SEQ ID NO: 2832; WAN024E24_at; Start 379; Stop 403
ccctacattgatttacttgacaaag

SEQ ID NO: 178061 - DNA, 25 bp, Artificial
  probe
  misc_feature (1)..(25): SEQ ID NO: 2832; WAN024E24_at; Start 484; Stop 508
cagcttagagttcagaatggttatc

SEQ ID NO: 178062 - DNA, 25 bp, Artificial
  probe
  misc_feature (1)..(25): SEQ ID NO: 2832; WAN024E24_at; Start 268; Stop 292
catgctgaagttctgaatggtcttg

SEQ ID NO: 178063 - DNA, 25 bp, Artificial
  probe
  misc_feature (1)..(25): SEQ ID NO: 2832; WAN024E24_at; Start 94; Stop 118
tatcatatcgatattatggatggcc

SEQ ID NO: 178064 - DNA, 25 bp, Artificial
  probe
  misc_feature (1)..(25): SEQ ID NO: 2832; WAN024E24_at; Start 664; Stop 688
gaaatgaccggaaaaacaatgccaa

SEQ ID NO: 178065 - DNA, 25 bp, Artificial
  probe
  misc_feature (1)..(25): SEQ ID NO: 2832; WAN024E24_at; Start 451; Stop 475
gagtctaccttgtataaaatccaag

SEQ ID NO: 178066 - DNA, 25 bp, Artificial
  probe
  misc_feature (1)..(25): SEQ ID NO: 2832; WAN024E24_at; Start 342; Stop 366
tgtccttaatcctgaaacacctgtt

SEQ ID NO: 178067 - DNA, 25 bp, Artificial
  probe
  misc_feature (1)..(25): SEQ ID NO: 2832; WAN024E24_at; Start 535; Stop 559
tcgagtcgtaagactttcaaacaaa

SEQ ID NO: 178068 - DNA, 25 bp, Artificial
  probe
  misc_feature (1)..(25): SEQ ID NO: 2832; WAN024E24_at; Start 419; Stop 443
tagatccaggttttgcaggacaacg

SEQ ID NO: 178069 - DNA, 25 bp, Artificial
  probe
  misc_feature (1)..(25): SEQ ID NO: 2832; WAN024E24_at; Start 502; Stop 526
ggttatcactacatcattgagatgg

SEQ ID NO: 178070 - DNA, 25 bp, Artificial
  probe
  misc_feature (1)..(25): SEQ ID NO: 5888; WAN024E25_at; Start 887; Stop 911
tactttatgcggcaatgctcatgcc

SEQ ID NO: 178071 - DNA, 25 bp, Artificial
  probe
  misc_feature (1)..(25): SEQ ID NO: 5888; WAN024E25_at; Start 5; Stop 29
acaatctcttttctagcggttttca

SEQ ID NO: 178072 - DNA, 25 bp, Artificial
  probe
  misc_feature (1)..(25): SEQ ID NO: 5888; WAN024E25_at; Start 837; Stop 861
gaatttggtgcagccactggttttt

SEQ ID NO: 178073 - DNA, 25 bp, Artificial
  probe
  misc_feature (1)..(25): SEQ ID NO: 5888; WAN024E25_at; Start 820; Stop 844
cgagtcaaccgcaccatgaatttgg

SEQ ID NO: 178074 - DNA, 25 bp, Artificial
  probe
  misc_feature (1)..(25): SEQ ID NO: 5888; WAN024E25_at; Start 24; Stop 48
ttttcatctggtggagactatctcc

SEQ ID NO: 178075 - DNA, 25 bp, Artificial
  probe
  misc_feature (1)..(25): SEQ ID NO: 5888; WAN024E25_at; Start 756; Stop 780
taagtccaagctgggtagtgagttg

SEQ ID NO: 178076 - DNA, 25 bp, Artificial
  probe
  misc_feature (1)..(25): SEQ ID NO: 5888; WAN024E25_at; Start 813; Stop 837
ttttacccgagtcaaccgcaccatg

SEQ ID NO: 178077 - DNA, 25 bp, Artificial
  probe
  misc_feature (1)..(25): SEQ ID NO: 5888; WAN024E25_at; Start 751; Stop 775
gaagttaagtccaagctgggtagtg

SEQ ID NO: 178078 - DNA, 25 bp, Artificial
  probe
  misc_feature (1)..(25): SEQ ID NO: 5888; WAN024E25_at; Start 903; Stop 927
gctcatgcccatgtatcaaaatatg

SEQ ID NO: 178079 - DNA, 25 bp, Artificial
  probe
  misc_feature (1)..(25): SEQ ID NO: 5888; WAN024E25_at; Start 881; Stop 905
tcgttttactttatgcggcaatgct

SEQ ID NO: 178080 - DNA, 25 bp, Artificial
  probe
  misc_feature (1)..(25): SEQ ID NO: 5888; WAN024E25_at; Start 773; Stop 797
gtgagttggaaatctatgctgaaaa

SEQ ID NO: 178081 - DNA, 25 bp, Artificial
  probe
  misc_feature (1)..(25): SEQ ID NO: 5888; WAN024E25_at; Start 125; Stop 149
tctcagaaatgatggaaagtttggg

SEQ ID NO: 178082 - DNA, 25 bp, Artificial
  probe
  misc_feature (1)..(25): SEQ ID NO: 5888; WAN024E25_at; Start 721; Stop 745
aaggaattgagtctcatcatagagt

SEQ ID NO: 178083 - DNA, 25 bp, Artificial
  probe
  misc_feature (1)..(25): SEQ ID NO: 5888; WAN024E25_at; Start 876; Stop 900
gattatcgttttactttatgcggca

SEQ ID NO: 178084 - DNA, 25 bp, Artificial
  probe
  misc_feature (1)..(25): SEQ ID NO: 5888; WAN024E25_at; Start 787; Stop 811
tatgctgaaaaaacttgggaagcct

SEQ ID NO: 178085 - DNA, 25 bp, Artificial
  probe
  misc_feature (1)..(25): SEQ ID NO: 5888; WAN024E25_at; Start 833; Stop 857
ccatgaatttggtgcagccactggt

SEQ ID NO: 178086 - DNA, 25 bp, Artificial
  probe
  misc_feature (1)..(25): SEQ ID NO: 5888; WAN024E25_at; Start 762; Stop 786
caagctgggtagtgagttggaaatc

SEQ ID NO: 178087 - DNA, 25 bp, Artificial
  probe
  misc_feature (1)..(25): SEQ ID NO: 5888; WAN024E25_at; Start 853; Stop 877
ctggtttttatctttgtggcactga

SEQ ID NO: 178088 - DNA, 25 bp, Artificial
  probe
  misc_feature (1)..(25): SEQ ID NO: 5888; WAN024E25_at; Start 115; Stop 139
gggaaatcattctcagaaatgatgg

SEQ ID NO: 178089 - DNA, 25 bp, Artificial
  probe
  misc_feature (1)..(25): SEQ ID NO: 5888; WAN024E25_at; Start 291; Stop 315
gattttgctgggttttcttctctta

SEQ ID NO: 178090 - DNA, 25 bp, Artificial
  probe
  misc_feature (1)..(25): SEQ ID NO: 5888; WAN024E25_at; Start 37; Stop 61
gagactatctcctttttagatagga

SEQ ID NO: 178091 - DNA, 25 bp, Artificial
  probe
  misc_feature (1)..(25): SEQ ID NO: 5888; WAN024E25_at; Start 726; Stop 750
attgagtctcatcatagagtatggg

SEQ ID NO: 178092 - DNA, 25 bp, Artificial
  probe
  misc_feature (1)..(25): SEQ ID NO: 5888; WAN024E25_at; Start 206; Stop 230
acctgagtttgggaaagatagaaga

SEQ ID NO: 178093 - DNA, 25 bp, Artificial
  probe
  misc_feature (1)..(25): SEQ ID NO: 5888; WAN024E25_at; Start 302; Stop 326
gttttcttctcttaattatgctggg

SEQ ID NO: 178094 - DNA, 25 bp, Artificial
  probe
  misc_feature (1)..(25): SEQ ID NO: 5888; WAN024E25_at; Start 897; Stop 921
ggcaatgctcatgcccatgtatcaa

SEQ ID NO: 178095 - DNA, 25 bp, Artificial
  probe
  misc_feature (1)..(25): SEQ ID NO: 5888; WAN024E25_at; Start 486; Stop 510
ttctatcttagcacgccttcccttt

SEQ ID NO: 178096 - DNA, 25 bp, Artificial
  probe
  misc_feature (1)..(25): SEQ ID NO: 5888; WAN024E25_at; Start 892; Stop 916
tatgcggcaatgctcatgcccatgt

SEQ ID NO: 178097 - DNA, 25 bp, Artificial
  probe
  misc_feature (1)..(25): SEQ ID NO: 5888; WAN024E25_at; Start 481; Stop 505
gtcttttctatcttagcacgccttc

SEQ ID NO: 178098 - DNA, 25 bp, Artificial
  probe
  misc_feature (1)..(25): SEQ ID NO: 5888; WAN024E25_at; Start 845; Stop 869
tgcagccactggtttttatctttgt

SEQ ID NO: 178099 - DNA, 25 bp, Artificial
  probe
  misc_feature (1)..(25): SEQ ID NO: 5888; WAN024E25_at; Start 781; Stop 805
gaaatctatgctgaaaaaacttggg

SEQ ID NO: 178100 - DNA, 25 bp, Artificial
  probe
  misc_feature (1)..(25): SEQ ID NO: 5888; WAN024E25_at; Start 17; Stop 41
ctagcggttttcatctggtggagac

SEQ ID NO: 178101 - DNA, 25 bp, Artificial
  probe
  misc_feature (1)..(25): SEQ ID NO: 5888; WAN024E25_at; Start 347; Stop 371
cacaactggatagtagcaatattgc

SEQ ID NO: 178102 - DNA, 25 bp, Artificial
  probe
  misc_feature (1)..(25): SEQ ID NO: 5888; WAN024E25_at; Start 909; Stop 933
gcccatgtatcaaaatatggaggta

SEQ ID NO: 178103 - DNA, 25 bp, Artificial
  probe
  misc_feature (1)..(25): SEQ ID NO: 5888; WAN024E25_at; Start 863; Stop 887
tctttgtggcactgattatcgtttt

SEQ ID NO: 178104 - DNA, 25 bp, Artificial
  probe
  misc_feature (1)..(25): SEQ ID NO: 1103; WAN024E26_at; Start 215; Stop 239
tgtatgagatagaaaagagtgagag

SEQ ID NO: 178105 - DNA, 25 bp, Artificial
  probe
  misc_feature (1)..(25): SEQ ID NO: 1103; WAN024E26_at; Start 39; Stop 63
gacagacttaggttttgagcattgg

SEQ ID NO: 178106 - DNA, 25 bp, Artificial
  probe
  misc_feature (1)..(25): SEQ ID NO: 1103; WAN024E26_at; Start 171; Stop 195
cagcacttggaagtatcgtgatctc

SEQ ID NO: 178107 - DNA, 25 bp, Artificial
  probe
  misc_feature (1)..(25): SEQ ID NO: 1103; WAN024E26_at; Start 3; Stop 27
gaagattttaaatattgaactagca

SEQ ID NO: 178108 - DNA, 25 bp, Artificial
  probe
  misc_feature (1)..(25): SEQ ID NO: 1103; WAN024E26_at; Start 26; Stop 50
caaatgtagagcagacagacttagg

SEQ ID NO: 178109 - DNA, 25 bp, Artificial
  probe
  misc_feature (1)..(25): SEQ ID NO: 1103; WAN024E26_at; Start 194; Stop 218
tcgtgttgcattcggtaaggatgta

SEQ ID NO: 178110 - DNA, 25 bp, Artificial
  probe
  misc_feature (1)..(25): SEQ ID NO: 1103; WAN024E26_at; Start 100; Stop 124
gaatacacggtcaagctattattac

SEQ ID NO: 178111 - DNA, 25 bp, Artificial
  probe
  misc_feature (1)..(25): SEQ ID NO: 1103; WAN024E26_at; Start 22; Stop 46
ctagcaaatgtagagcagacagact

SEQ ID NO: 178112 - DNA, 25 bp, Artificial
  probe
  misc_feature (1)..(25): SEQ ID NO: 1103; WAN024E26_at; Start 72; Stop 96
gacttatcaggttccgattttgaag

SEQ ID NO: 178113 - DNA, 25 bp, Artificial
  probe
  misc_feature (1)..(25): SEQ ID NO: 1103; WAN024E26_at; Start 44; Stop 68
acttaggttttgagcattgggtaga

SEQ ID NO: 178114 - DNA, 25 bp, Artificial
  probe
  misc_feature (1)..(25): SEQ ID NO: 1103; WAN024E26_at; Start 160; Stop 184
gagtatctggtcagcacttggaagt

SEQ ID NO: 178115 - DNA, 25 bp, Artificial
  probe
  misc_feature (1)..(25): SEQ ID NO: 1103; WAN024E26_at; Start 87; Stop 111
gattttgaagaatgaatacacggtc

SEQ ID NO: 178116 - DNA, 25 bp, Artificial
  probe
  misc_feature (1)..(25): SEQ ID NO: 1103; WAN024E26_at; Start 226; Stop 250
gaaaagagtgagagttttactatcc

SEQ ID NO: 178117 - DNA, 25 bp, Artificial
  probe
  misc_feature (1)..(25): SEQ ID NO: 1103; WAN024E26_at; Start 34; Stop 58
gagcagacagacttaggttttgagc

SEQ ID NO: 178118 - DNA, 25 bp, Artificial
  probe
  misc_feature (1)..(25): SEQ ID NO: 1103; WAN024E26_at; Start 144; Stop 168
ggaccaagaggttattgagtatctg

SEQ ID NO: 178119 - DNA, 25 bp, Artificial
  probe
  misc_feature (1)..(25): SEQ ID NO: 1103; WAN024E26_at; Start 202; Stop 226
cattcggtaaggatgtatgagatag

SEQ ID NO: 178120 - DNA, 25 bp, Artificial
  probe
  misc_feature (1)..(25): SEQ ID NO: 1103; WAN024E26_at; Start 151; Stop 175
gaggttattgagtatctggtcagca

SEQ ID NO: 178121 - DNA, 25 bp, Artificial
  probe
  misc_feature (1)..(25): SEQ ID NO: 1103; WAN024E26_at; Start 231; Stop 255
gagtgagagttttactatccttgat

SEQ ID NO: 178122 - DNA, 25 bp, Artificial
  probe
  misc_feature (1)..(25): SEQ ID NO: 1103; WAN024E26_at; Start 76; Stop 100
tatcaggttccgattttgaagaatg

SEQ ID NO: 178123 - DNA, 25 bp, Artificial
  probe
  misc_feature (1)..(25): SEQ ID NO: 1103; WAN024E26_at; Start 133; Stop 157
tgcaggatagaggaccaagaggtta

SEQ ID NO: 178124 - DNA, 25 bp, Artificial
  probe
  misc_feature (1)..(25): SEQ ID NO: 1103; WAN024E26_at; Start 124; Stop 148
cttatggaatgcaggatagaggacc

SEQ ID NO: 178125 - DNA, 25 bp, Artificial
  probe
  misc_feature (1)..(25): SEQ ID NO: 1103; WAN024E26_at; Start 156; Stop 180
tattgagtatctggtcagcacttgg

SEQ ID NO: 178126 - DNA, 25 bp, Artificial
  probe
  misc_feature (1)..(25): SEQ ID NO: 1103; WAN024E26_at; Start 65; Stop 89
tagatgtgacttatcaggttccgat

SEQ ID NO: 178127 - DNA, 25 bp, Artificial
  probe
  misc_feature (1)..(25): SEQ ID NO: 1103; WAN024E26_at; Start 165; Stop 189
tctggtcagcacttggaagtatcgt

SEQ ID NO: 178128 - DNA, 25 bp, Artificial
  probe
  misc_feature (1)..(25): SEQ ID NO: 1103; WAN024E26_at; Start 128; Stop 152
tggaatgcaggatagaggaccaaga

SEQ ID NO: 178129 - DNA, 25 bp, Artificial
  probe
  misc_feature (1)..(25): SEQ ID NO: 1103; WAN024E26_at; Start 84; Stop 108
tccgattttgaagaatgaatacacg

SEQ ID NO: 178130 - DNA, 25 bp, Artificial
  probe
  misc_feature (1)..(25): SEQ ID NO: 1103; WAN024E26_at; Start 15; Stop 39
tattgaactagcaaatgtagagcag

SEQ ID NO: 178131 - DNA, 25 bp, Artificial
  probe
  misc_feature (1)..(25): SEQ ID NO: 1103; WAN024E26_at; Start 184; Stop 208
tatcgtgatctcgtgttgcattcgg

SEQ ID NO: 178132 - DNA, 25 bp, Artificial
  probe
  misc_feature (1)..(25): SEQ ID NO: 1103; WAN024E26_at; Start 55; Stop 79
gagcattgggtagatgtgacttatc

SEQ ID NO: 178133 - DNA, 25 bp, Artificial
  probe
  misc_feature (1)..(25): SEQ ID NO: 1103; WAN024E26_at; Start 190; Stop 214
gatctcgtgttgcattcggtaagga

SEQ ID NO: 178134 - DNA, 25 bp, Artificial
  probe
  misc_feature (1)..(25): SEQ ID NO: 1103; WAN024E26_at; Start 114; Stop 138
gctattattacttatggaatgcagg

SEQ ID NO: 178135 - DNA, 25 bp, Artificial
  probe
  misc_feature (1)..(25): SEQ ID NO: 1103; WAN024E26_at; Start 93; Stop 117
gaagaatgaatacacggtcaagcta

SEQ ID NO: 178136 - DNA, 25 bp, Artificial
  probe
  misc_feature (1)..(25): SEQ ID NO: 1103; WAN024E26_at; Start 138; Stop 162
gatagaggaccaagaggttattgag

SEQ ID NO: 178137 - DNA, 25 bp, Artificial
  probe
  misc_feature (1)..(25): SEQ ID NO: 1103; WAN024E26_at; Start 179; Stop 203
ggaagtatcgtgatctcgtgttgca

SEQ ID NO: 178138 - DNA, 25 bp, Artificial
  probe
  misc_feature (1)..(25): SEQ ID NO: 624; WAN024E27_at; Start 142; Stop 166
gacaaaggaaaagcagctgttgtta

SEQ ID NO: 178139 - DNA, 25 bp, Artificial
  probe
  misc_feature (1)..(25): SEQ ID NO: 624; WAN024E27_at; Start 104; Stop 128
ttgtacctaatctgaccaagcaaaa

SEQ ID NO: 178140 - DNA, 25 bp, Artificial
  probe
  misc_feature (1)..(25): SEQ ID NO: 624; WAN024E27_at; Start 150; Stop 174
aaaagcagctgttgttaaggtggtg

SEQ ID NO: 178141 - DNA, 25 bp, Artificial
  probe
  misc_feature (1)..(25): SEQ ID NO: 624; WAN024E27_at; Start 84; Stop 108
cagcgtgcttttcttgctctttgta

SEQ ID NO: 178142 - DNA, 25 bp, Artificial
  probe
  misc_feature (1)..(25): SEQ ID NO: 624; WAN024E27_at; Start 74; Stop 98
tgctgattatcagcgtgcttttctt

SEQ ID NO: 178143 - DNA, 25 bp, Artificial
  probe
  misc_feature (1)..(25): SEQ ID NO: 624; WAN024E27_at; Start 141; Stop 165
tgacaaaggaaaagcagctgttgtt

SEQ ID NO: 178144 - DNA, 25 bp, Artificial
  probe
  misc_feature (1)..(25): SEQ ID NO: 624; WAN024E27_at; Start 81; Stop 105
tatcagcgtgcttttcttgctcttt

SEQ ID NO: 178145 - DNA, 25 bp, Artificial
  probe
  misc_feature (1)..(25): SEQ ID NO: 624; WAN024E27_at; Start 149; Stop 173
gaaaagcagctgttgttaaggtggt

SEQ ID NO: 178146 - DNA, 25 bp, Artificial
  probe
  misc_feature (1)..(25): SEQ ID NO: 624; WAN024E27_at; Start 95; Stop 119
tcttgctctttgtacctaatctgac

SEQ ID NO: 178147 - DNA, 25 bp, Artificial
  probe
  misc_feature (1)..(25): SEQ ID NO: 624; WAN024E27_at; Start 136; Stop 160
gtcaatgacaaaggaaaagcagctg

SEQ ID NO: 178148 - DNA, 25 bp, Artificial
  probe
  misc_feature (1)..(25): SEQ ID NO: 624; WAN024E27_at; Start 144; Stop 168
caaaggaaaagcagctgttgttaag

SEQ ID NO: 178149 - DNA, 25 bp, Artificial
  probe
  misc_feature (1)..(25): SEQ ID NO: 624; WAN024E27_at; Start 70; Stop 94
gtcttgctgattatcagcgtgcttt

SEQ ID NO: 178150 - DNA, 25 bp, Artificial
  probe
  misc_feature (1)..(25): SEQ ID NO: 624; WAN024E27_at; Start 173; Stop 197
tggaaagccaggcagaactttatag

SEQ ID NO: 178151 - DNA, 25 bp, Artificial
  probe
  misc_feature (1)..(25): SEQ ID NO: 624; WAN024E27_at; Start 158; Stop 182
ctgttgttaaggtggtggaaagcca

SEQ ID NO: 178152 - DNA, 25 bp, Artificial
  probe
  misc_feature (1)..(25): SEQ ID NO: 624; WAN024E27_at; Start 86; Stop 110
gcgtgcttttcttgctctttgtacc

SEQ ID NO: 178153 - DNA, 25 bp, Artificial
  probe
  misc_feature (1)..(25): SEQ ID NO: 624; WAN024E27_at; Start 171; Stop 195
ggtggaaagccaggcagaactttat

SEQ ID NO: 178154 - DNA, 25 bp, Artificial
  probe
  misc_feature (1)..(25): SEQ ID NO: 624; WAN024E27_at; Start 102; Stop 126
ctttgtacctaatctgaccaagcaa

SEQ ID NO: 178155 - DNA, 25 bp, Artificial
  probe
  misc_feature (1)..(25): SEQ ID NO: 624; WAN024E27_at; Start 137; Stop 161
tcaatgacaaaggaaaagcagctgt

SEQ ID NO: 178156 - DNA, 25 bp, Artificial
  probe
  misc_feature (1)..(25): SEQ ID NO: 624; WAN024E27_at; Start 14; Stop 38
tgacattcttgaaaaaagctaaggt

SEQ ID NO: 178157 - DNA, 25 bp, Artificial
  probe
  misc_feature (1)..(25): SEQ ID NO: 624; WAN024E27_at; Start 134; Stop 158
cagtcaatgacaaaggaaaagcagc

SEQ ID NO: 178158 - DNA, 25 bp, Artificial
  probe
  misc_feature (1)..(25): SEQ ID NO: 624; WAN024E27_at; Start 107; Stop 131
tacctaatctgaccaagcaaaaaga

SEQ ID NO: 178159 - DNA, 25 bp, Artificial
  probe
  misc_feature (1)..(25): SEQ ID NO: 624; WAN024E27_at; Start 170; Stop 194
tggtggaaagccaggcagaacttta

SEQ ID NO: 178160 - DNA, 25 bp, Artificial
  probe
  misc_feature (1)..(25): SEQ ID NO: 624; WAN024E27_at; Start 101; Stop 125
tctttgtacctaatctgaccaagca

SEQ ID NO: 178161 - DNA, 25 bp, Artificial
  probe
  misc_feature (1)..(25): SEQ ID NO: 624; WAN024E27_at; Start 176; Stop 200
aaagccaggcagaactttatagctt

SEQ ID NO: 178162 - DNA, 25 bp, Artificial
  probe
  misc_feature (1)..(25): SEQ ID NO: 624; WAN024E27_at; Start 89; Stop 113
tgcttttcttgctctttgtacctaa

SEQ ID NO: 178163 - DNA, 25 bp, Artificial
  probe
  misc_feature (1)..(25): SEQ ID NO: 624; WAN024E27_at; Start 99; Stop 123
gctctttgtacctaatctgaccaag

SEQ ID NO: 178164 - DNA, 25 bp, Artificial
  probe
  misc_feature (1)..(25): SEQ ID NO: 624; WAN024E27_at; Start 175; Stop 199
gaaagccaggcagaactttatagct

SEQ ID NO: 178165 - DNA, 25 bp, Artificial
  probe
  misc_feature (1)..(25): SEQ ID NO: 624; WAN024E27_at; Start 138; Stop 162
caatgacaaaggaaaagcagctgtt

SEQ ID NO: 178166 - DNA, 25 bp, Artificial
  probe
  misc_feature (1)..(25): SEQ ID NO: 624; WAN024E27_at; Start 133; Stop 157
gcagtcaatgacaaaggaaaagcag

SEQ ID NO: 178167 - DNA, 25 bp, Artificial
  probe
  misc_feature (1)..(25): SEQ ID NO: 624; WAN024E27_at; Start 174; Stop 198
ggaaagccaggcagaactttatagc

SEQ ID NO: 178168 - DNA, 25 bp, Artificial
  probe
  misc_feature (1)..(25): SEQ ID NO: 624; WAN024E27_at; Start 139; Stop 163
aatgacaaaggaaaagcagctgttg

SEQ ID NO: 178169 - DNA, 25 bp, Artificial
  probe
  misc_feature (1)..(25): SEQ ID NO: 624; WAN024E27_at; Start 78; Stop 102
gattatcagcgtgcttttcttgctc

SEQ ID NO: 178170 - DNA, 25 bp, Artificial
  probe
  misc_feature (1)..(25): SEQ ID NO: 624; WAN024E27_at; Start 97; Stop 121
ttgctctttgtacctaatctgacca

SEQ ID NO: 178171 - DNA, 25 bp, Artificial
  probe
  misc_feature (1)..(25): SEQ ID NO: 624; WAN024E27_at; Start 106; Stop 130
gtacctaatctgaccaagcaaaaag

SEQ ID NO: 178172 - DNA, 25 bp, Artificial
  probe
  misc_feature (1)..(25): SEQ ID NO: 2736; WAN024E28_at; Start 326; Stop 350
cgtccctggctaaggttgaatttca

SEQ ID NO: 178173 - DNA, 25 bp, Artificial
  probe
  misc_feature (1)..(25): SEQ ID NO: 2736; WAN024E28_at; Start 376; Stop 400
caattatatctaggaaatggaaaaa

SEQ ID NO: 178174 - DNA, 25 bp, Artificial
  probe
  misc_feature (1)..(25): SEQ ID NO: 2736; WAN024E28_at; Start 37; Stop 61
tttaccatgctggaaagtctcttgg

SEQ ID NO: 178175 - DNA, 25 bp, Artificial
  probe
  misc_feature (1)..(25): SEQ ID NO: 2736; WAN024E28_at; Start 343; Stop 367
gaatttcagaccagtaaaggagcga

SEQ ID NO: 178176 - DNA, 25 bp, Artificial
  probe
  misc_feature (1)..(25): SEQ ID NO: 2736; WAN024E28_at; Start 70; Stop 94
cttgtgagtatccttgccttgggct

SEQ ID NO: 178177 - DNA, 25 bp, Artificial
  probe
  misc_feature (1)..(25): SEQ ID NO: 2736; WAN024E28_at; Start 319; Stop 343
ggcaattcgtccctggctaaggttg

SEQ ID NO: 178178 - DNA, 25 bp, Artificial
  probe
  misc_feature (1)..(25): SEQ ID NO: 2736; WAN024E28_at; Start 29; Stop 53
ttaaggcctttaccatgctggaaag

SEQ ID NO: 178179 - DNA, 25 bp, Artificial
  probe
  misc_feature (1)..(25): SEQ ID NO: 2736; WAN024E28_at; Start 287; Stop 311
caggccaaagtattacatttgaccg

SEQ ID NO: 178180 - DNA, 25 bp, Artificial
  probe
  misc_feature (1)..(25): SEQ ID NO: 2736; WAN024E28_at; Start 19; Stop 43
aagtcaatgattaaggcctttacca

SEQ ID NO: 178181 - DNA, 25 bp, Artificial
  probe
  misc_feature (1)..(25): SEQ ID NO: 2736; WAN024E28_at; Start 346; Stop 370
tttcagaccagtaaaggagcgattc

SEQ ID NO: 178182 - DNA, 25 bp, Artificial
  probe
  misc_feature (1)..(25): SEQ ID NO: 2736; WAN024E28_at; Start 27; Stop 51
gattaaggcctttaccatgctggaa

SEQ ID NO: 178183 - DNA, 25 bp, Artificial
  probe
  misc_feature (1)..(25): SEQ ID NO: 2736; WAN024E28_at; Start 150; Stop 174
ggagtttgaagaactctatcgggaa

SEQ ID NO: 178184 - DNA, 25 bp, Artificial
  probe
  misc_feature (1)..(25): SEQ ID NO: 2736; WAN024E28_at; Start 342; Stop 366
tgaatttcagaccagtaaaggagcg

SEQ ID NO: 178185 - DNA, 25 bp, Artificial
  probe
  misc_feature (1)..(25): SEQ ID NO: 2736; WAN024E28_at; Start 71; Stop 95
ttgtgagtatccttgccttgggctt

SEQ ID NO: 178186 - DNA, 25 bp, Artificial
  probe
  misc_feature (1)..(25): SEQ ID NO: 2736; WAN024E28_at; Start 329; Stop 353
ccctggctaaggttgaatttcagac

SEQ ID NO: 178187 - DNA, 25 bp, Artificial
  probe
  misc_feature (1)..(25): SEQ ID NO: 2736; WAN024E28_at; Start 24; Stop 48
aatgattaaggcctttaccatgctg

SEQ ID NO: 178188 - DNA, 25 bp, Artificial
  probe
  misc_feature (1)..(25): SEQ ID NO: 2736; WAN024E28_at; Start 283; Stop 307
ccatcaggccaaagtattacatttg

SEQ ID NO: 178189 - DNA, 25 bp, Artificial
  probe
  misc_feature (1)..(25): SEQ ID NO: 2736; WAN024E28_at; Start 348; Stop 372
tcagaccagtaaaggagcgattcgc

SEQ ID NO: 178190 - DNA, 25 bp, Artificial
  probe
  misc_feature (1)..(25): SEQ ID NO: 2736; WAN024E28_at; Start 34; Stop 58
gcctttaccatgctggaaagtctct

SEQ ID NO: 178191 - DNA, 25 bp, Artificial
  probe
  misc_feature (1)..(25): SEQ ID NO: 2736; WAN024E28_at; Start 321; Stop 345
caattcgtccctggctaaggttgaa

SEQ ID NO: 178192 - DNA, 25 bp, Artificial
  probe
  misc_feature (1)..(25): SEQ ID NO: 2736; WAN024E28_at; Start 365; Stop 389
cgattcgctatcaattatatctagg

SEQ ID NO: 178193 - DNA, 25 bp, Artificial
  probe
  misc_feature (1)..(25): SEQ ID NO: 2736; WAN024E28_at; Start 371; Stop 395
gctatcaattatatctaggaaatgg

SEQ ID NO: 178194 - DNA, 25 bp, Artificial
  probe
  misc_feature (1)..(25): SEQ ID NO: 2736; WAN024E28_at; Start 156; Stop 180
tgaagaactctatcgggaaacccaa

SEQ ID NO: 178195 - DNA, 25 bp, Artificial
  probe
  misc_feature (1)..(25): SEQ ID NO: 2736; WAN024E28_at; Start 334; Stop 358
gctaaggttgaatttcagaccagta

SEQ ID NO: 178196 - DNA, 25 bp, Artificial
  probe
  misc_feature (1)..(25): SEQ ID NO: 2736; WAN024E28_at; Start 361; Stop 385
ggagcgattcgctatcaattatatc

SEQ ID NO: 178197 - DNA, 25 bp, Artificial
  probe
  misc_feature (1)..(25): SEQ ID NO: 2736; WAN024E28_at; Start 155; Stop 179
ttgaagaactctatcgggaaaccca

SEQ ID NO: 178198 - DNA, 25 bp, Artificial
  probe
  misc_feature (1)..(25): SEQ ID NO: 2736; WAN024E28_at; Start 136; Stop 160
cagattttctttatggagtttgaag

SEQ ID NO: 178199 - DNA, 25 bp, Artificial
  probe
  misc_feature (1)..(25): SEQ ID NO: 2736; WAN024E28_at; Start 349; Stop 373
cagaccagtaaaggagcgattcgct

SEQ ID NO: 178200 - DNA, 25 bp, Artificial
  probe
  misc_feature (1)..(25): SEQ ID NO: 2736; WAN024E28_at; Start 31; Stop 55
aaggcctttaccatgctggaaagtc

SEQ ID NO: 178201 - DNA, 25 bp, Artificial
  probe
  misc_feature (1)..(25): SEQ ID NO: 2736; WAN024E28_at; Start 332; Stop 356
tggctaaggttgaatttcagaccag

SEQ ID NO: 178202 - DNA, 25 bp, Artificial
  probe
  misc_feature (1)..(25): SEQ ID NO: 2736; WAN024E28_at; Start 351; Stop 375
gaccagtaaaggagcgattcgctat

SEQ ID NO: 178203 - DNA, 25 bp, Artificial
  probe
  misc_feature (1)..(25): SEQ ID NO: 2736; WAN024E28_at; Start 147; Stop 171
tatggagtttgaagaactctatcgg

SEQ ID NO: 178204 - DNA, 25 bp, Artificial
  probe
  misc_feature (1)..(25): SEQ ID NO: 2736; WAN024E28_at; Start 354; Stop 378
cagtaaaggagcgattcgctatcaa

SEQ ID NO: 178205 - DNA, 25 bp, Artificial
  probe
  misc_feature (1)..(25): SEQ ID NO: 2736; WAN024E28_at; Start 339; Stop 363
ggttgaatttcagaccagtaaagga

SEQ ID NO: 178206 - DNA, 25 bp, Artificial
  probe
  misc_feature (1)..(25): SEQ ID NO: 4035; WAN024E29_at; Start 28; Stop 52
ctagctatctttgccagcattgcga

SEQ ID NO: 178207 - DNA, 25 bp, Artificial
  probe
  misc_feature (1)..(25): SEQ ID NO: 4035; WAN024E29_at; Start 181; Stop 205
gagattcaggtattttctagtgaaa

SEQ ID NO: 178208 - DNA, 25 bp, Artificial
  probe
  misc_feature (1)..(25): SEQ ID NO: 4035; WAN024E29_at; Start 170; Stop 194
tcaacggagttgagattcaggtatt

SEQ ID NO: 178209 - DNA, 25 bp, Artificial
  probe
  misc_feature (1)..(25): SEQ ID NO: 4035; WAN024E29_at; Start 45; Stop 69
cattgcgaccctccttttgggacaa

SEQ ID NO: 178210 - DNA, 25 bp, Artificial
  probe
  misc_feature (1)..(25): SEQ ID NO: 4035; WAN024E29_at; Start 174; Stop 198
cggagttgagattcaggtattttct

SEQ ID NO: 178211 - DNA, 25 bp, Artificial
  probe
  misc_feature (1)..(25): SEQ ID NO: 4035; WAN024E29_at; Start 91; Stop 115
gaagcaaaaatcttgcaaaaggaag

SEQ ID NO: 178212 - DNA, 25 bp, Artificial
  probe
  misc_feature (1)..(25): SEQ ID NO: 4035; WAN024E29_at; Start 155; Stop 179
aaaatcaggtaagcatcaacggagt

SEQ ID NO: 178213 - DNA, 25 bp, Artificial
  probe
  misc_feature (1)..(25): SEQ ID NO: 4035; WAN024E29_at; Start 153; Stop 177
gcaaaatcaggtaagcatcaacgga

SEQ ID NO: 178214 - DNA, 25 bp, Artificial
  probe
  misc_feature (1)..(25): SEQ ID NO: 4035; WAN024E29_at; Start 40; Stop 64
gccagcattgcgaccctccttttgg

SEQ ID NO: 178215 - DNA, 25 bp, Artificial
  probe
  misc_feature (1)..(25): SEQ ID NO: 4035; WAN024E29_at; Start 159; Stop 183
tcaggtaagcatcaacggagttgag

SEQ ID NO: 178216 - DNA, 25 bp, Artificial
  probe
  misc_feature (1)..(25): SEQ ID NO: 4035; WAN024E29_at; Start 78; Stop 102
aaataggcaagaggaagcaaaaatc

SEQ ID NO: 178217 - DNA, 25 bp, Artificial
  probe
  misc_feature (1)..(25): SEQ ID NO: 4035; WAN024E29_at; Start 8; Stop 32
tactggaagcagtagtcgctctagc

SEQ ID NO: 178218 - DNA, 25 bp, Artificial
  probe
  misc_feature (1)..(25): SEQ ID NO: 4035; WAN024E29_at; Start 112; Stop 136
gaagaagtcttgagggtagctaaga

SEQ ID NO: 178219 - DNA, 25 bp, Artificial
  probe
  misc_feature (1)..(25): SEQ ID NO: 4035; WAN024E29_at; Start 62; Stop 86
tgggacaaattcaaaaaaataggca

SEQ ID NO: 178220 - DNA, 25 bp, Artificial
  probe
  misc_feature (1)..(25): SEQ ID NO: 4035; WAN024E29_at; Start 43; Stop 67
agcattgcgaccctccttttgggac

SEQ ID NO: 178221 - DNA, 25 bp, Artificial
  probe
  misc_feature (1)..(25): SEQ ID NO: 4035; WAN024E29_at; Start 183; Stop 207
gattcaggtattttctagtgaaaaa

SEQ ID NO: 178222 - DNA, 25 bp, Artificial
  probe
  misc_feature (1)..(25): SEQ ID NO: 4035; WAN024E29_at; Start 81; Stop 105
taggcaagaggaagcaaaaatcttg

SEQ ID NO: 178223 - DNA, 25 bp, Artificial
  probe
  misc_feature (1)..(25): SEQ ID NO: 4035; WAN024E29_at; Start 20; Stop 44
tagtcgctctagctatctttgccag

SEQ ID NO: 178224 - DNA, 25 bp, Artificial
  probe
  misc_feature (1)..(25): SEQ ID NO: 4035; WAN024E29_at; Start 88; Stop 112
gaggaagcaaaaatcttgcaaaagg

SEQ ID NO: 178225 - DNA, 25 bp, Artificial
  probe
  misc_feature (1)..(25): SEQ ID NO: 4035; WAN024E29_at; Start 105; Stop 129
gcaaaaggaagaagtcttgagggta

SEQ ID NO: 178226 - DNA, 25 bp, Artificial
  probe
  misc_feature (1)..(25): SEQ ID NO: 4035; WAN024E29_at; Start 151; Stop 175
gggcaaaatcaggtaagcatcaacg

SEQ ID NO: 178227 - DNA, 25 bp, Artificial
  probe
  misc_feature (1)..(25): SEQ ID NO: 4035; WAN024E29_at; Start 16; Stop 40
gcagtagtcgctctagctatctttg

SEQ ID NO: 178228 - DNA, 25 bp, Artificial
  probe
  misc_feature (1)..(25): SEQ ID NO: 4035; WAN024E29_at; Start 101; Stop 125
tcttgcaaaaggaagaagtcttgag

SEQ ID NO: 178229 - DNA, 25 bp, Artificial
  probe
  misc_feature (1)..(25): SEQ ID NO: 4035; WAN024E29_at; Start 25; Stop 49
gctctagctatctttgccagcattg

SEQ ID NO: 178230 - DNA, 25 bp, Artificial
  probe
  misc_feature (1)..(25): SEQ ID NO: 4035; WAN024E29_at; Start 5; Stop 29
ttttactggaagcagtagtcgctct

SEQ ID NO: 178231 - DNA, 25 bp, Artificial
  probe
  misc_feature (1)..(25): SEQ ID NO: 4035; WAN024E29_at; Start 94; Stop 118
gcaaaaatcttgcaaaaggaagaag

SEQ ID NO: 178232 - DNA, 25 bp, Artificial
  probe
  misc_feature (1)..(25): SEQ ID NO: 4035; WAN024E29_at; Start 157; Stop 181
aatcaggtaagcatcaacggagttg

SEQ ID NO: 178233 - DNA, 25 bp, Artificial
  probe
  misc_feature (1)..(25): SEQ ID NO: 4035; WAN024E29_at; Start 12; Stop 36
ggaagcagtagtcgctctagctatc

SEQ ID NO: 178234 - DNA, 25 bp, Artificial
  probe
  misc_feature (1)..(25): SEQ ID NO: 4035; WAN024E29_at; Start 2; Stop 26
tgattttactggaagcagtagtcgc

SEQ ID NO: 178235 - DNA, 25 bp, Artificial
  probe
  misc_feature (1)..(25): SEQ ID NO: 4035; WAN024E29_at; Start 164; Stop 188
taagcatcaacggagttgagattca

SEQ ID NO: 178236 - DNA, 25 bp, Artificial
  probe
  misc_feature (1)..(25): SEQ ID NO: 4035; WAN024E29_at; Start 22; Stop 46
gtcgctctagctatctttgccagca

SEQ ID NO: 178237 - DNA, 25 bp, Artificial
  probe
  misc_feature (1)..(25): SEQ ID NO: 4035; WAN024E29_at; Start 117; Stop 141
agtcttgagggtagctaagatggcc

SEQ ID NO: 178238 - DNA, 25 bp, Artificial
  probe
  misc_feature (1)..(25): SEQ ID NO: 4035; WAN024E29_at; Start 167; Stop 191
gcatcaacggagttgagattcaggt

SEQ ID NO: 178239 - DNA, 25 bp, Artificial
  probe
  misc_feature (1)..(25): SEQ ID NO: 4035; WAN024E29_at; Start 10; Stop 34
ctggaagcagtagtcgctctagcta

SEQ ID NO: 178240 - DNA, 25 bp, Artificial
  probe
  misc_feature (1)..(25): SEQ ID NO: 5893; WAN024E2A_at; Start 153; Stop 177
agaattagaccgttcgcagttcgaa

SEQ ID NO: 178241 - DNA, 25 bp, Artificial
  probe
  misc_feature (1)..(25): SEQ ID NO: 5893; WAN024E2A_at; Start 213; Stop 237
tggcaaggacatcgccatcggtaag

SEQ ID NO: 178242 - DNA, 25 bp, Artificial
  probe
  misc_feature (1)..(25): SEQ ID NO: 5893; WAN024E2A_at; Start 378; Stop 402
ggagttcatctatcgtgtggaaaaa

SEQ ID NO: 178243 - DNA, 25 bp, Artificial
  probe
  misc_feature (1)..(25): SEQ ID NO: 5893; WAN024E2A_at; Start 90; Stop 114
agttcgctaccagcaacaaagcgag

SEQ ID NO: 178244 - DNA, 25 bp, Artificial
  probe
  misc_feature (1)..(25): SEQ ID NO: 5893; WAN024E2A_at; Start 71; Stop 95
gtcagctcctcatttcagaagttcg

SEQ ID NO: 178245 - DNA, 25 bp, Artificial
  probe
  misc_feature (1)..(25): SEQ ID NO: 5893; WAN024E2A_at; Start 216; Stop 240
caaggacatcgccatcggtaagtca

SEQ ID NO: 178246 - DNA, 25 bp, Artificial
  probe
  misc_feature (1)..(25): SEQ ID NO: 5893; WAN024E2A_at; Start 195; Stop 219
cctatacatgaagcaagatggcaag

SEQ ID NO: 178247 - DNA, 25 bp, Artificial
  probe
  misc_feature (1)..(25): SEQ ID NO: 5893; WAN024E2A_at; Start 3; Stop 27
taccttgttagaatccctgcttgcc

SEQ ID NO: 178248 - DNA, 25 bp, Artificial
  probe
  misc_feature (1)..(25): SEQ ID NO: 5893; WAN024E2A_at; Start 173; Stop 197
tcgaaaaagtagaaggcaatcgcct

SEQ ID NO: 178249 - DNA, 25 bp, Artificial
  probe
  misc_feature (1)..(25): SEQ ID NO: 5893; WAN024E2A_at; Start 224; Stop 248
tcgccatcggtaagtcaaagtcaga

SEQ ID NO: 178250 - DNA, 25 bp, Artificial
  probe
  misc_feature (1)..(25): SEQ ID NO: 5893; WAN024E2A_at; Start 184; Stop 208
gaaggcaatcgcctatacatgaagc

SEQ ID NO: 178251 - DNA, 25 bp, Artificial
  probe
  misc_feature (1)..(25): SEQ ID NO: 5893; WAN024E2A_at; Start 38; Stop 62
tcagtgggggattactcctttttca

SEQ ID NO: 178252 - DNA, 25 bp, Artificial
  probe
  misc_feature (1)..(25): SEQ ID NO: 5893; WAN024E2A_at; Start 11; Stop 35
tagaatccctgcttgccctcattgt

SEQ ID NO: 178253 - DNA, 25 bp, Artificial
  probe
  misc_feature (1)..(25): SEQ ID NO: 5893; WAN024E2A_at; Start 199; Stop 223
tacatgaagcaagatggcaaggaca

SEQ ID NO: 178254 - DNA, 25 bp, Artificial
  probe
  misc_feature (1)..(25): SEQ ID NO: 5893; WAN024E2A_at; Start 121; Stop 145
gagtggctcttgtttgtggaccaac

SEQ ID NO: 178255 - DNA, 25 bp, Artificial
  probe
  misc_feature (1)..(25): SEQ ID NO: 5893; WAN024E2A_at; Start 20; Stop 44
tgcttgccctcattgtcatcagtgg

SEQ ID NO: 178256 - DNA, 25 bp, Artificial
  probe
  misc_feature (1)..(25): SEQ ID NO: 5893; WAN024E2A_at; Start 373; Stop 397
gaaagggagttcatctatcgtgtgg

SEQ ID NO: 178257 - DNA, 25 bp, Artificial
  probe
  misc_feature (1)..(25): SEQ ID NO: 5893; WAN024E2A_at; Start 86; Stop 110
cagaagttcgctaccagcaacaaag

SEQ ID NO: 178258 - DNA, 25 bp, Artificial
  probe
  misc_feature (1)..(25): SEQ ID NO: 5893; WAN024E2A_at; Start 188; Stop 212
gcaatcgcctatacatgaagcaaga

SEQ ID NO: 178259 - DNA, 25 bp, Artificial
  probe
  misc_feature (1)..(25): SEQ ID NO: 5893; WAN024E2A_at; Start 106; Stop 130
caaagcgagcaaaaggagtggctct

SEQ ID NO: 178260 - DNA, 25 bp, Artificial
  probe
  misc_feature (1)..(25): SEQ ID NO: 5893; WAN024E2A_at; Start 318; Stop 342
gattacagaggacaatcaactggtt

SEQ ID NO: 178261 - DNA, 25 bp, Artificial
  probe
  misc_feature (1)..(25): SEQ ID NO: 5893; WAN024E2A_at; Start 219; Stop 243
ggacatcgccatcggtaagtcaaag

SEQ ID NO: 178262 - DNA, 25 bp, Artificial
  probe
  misc_feature (1)..(25): SEQ ID NO: 5893; WAN024E2A_at; Start 204; Stop 228
gaagcaagatggcaaggacatcgcc

SEQ ID NO: 178263 - DNA, 25 bp, Artificial
  probe
  misc_feature (1)..(25): SEQ ID NO: 5893; WAN024E2A_at; Start 75; Stop 99
gctcctcatttcagaagttcgctac

SEQ ID NO: 178264 - DNA, 25 bp, Artificial
  probe
  misc_feature (1)..(25): SEQ ID NO: 5893; WAN024E2A_at; Start 81; Stop 105
catttcagaagttcgctaccagcaa

SEQ ID NO: 178265 - DNA, 25 bp, Artificial
  probe
  misc_feature (1)..(25): SEQ ID NO: 5893; WAN024E2A_at; Start 364; Stop 388
aaaggcttagaaagggagttcatct

SEQ ID NO: 178266 - DNA, 25 bp, Artificial
  probe
  misc_feature (1)..(25): SEQ ID NO: 5893; WAN024E2A_at; Start 103; Stop 127
caacaaagcgagcaaaaggagtggc

SEQ ID NO: 178267 - DNA, 25 bp, Artificial
  probe
  misc_feature (1)..(25): SEQ ID NO: 5893; WAN024E2A_at; Start 381; Stop 405
gttcatctatcgtgtggaaaaagaa

SEQ ID NO: 178268 - DNA, 25 bp, Artificial
  probe
  misc_feature (1)..(25): SEQ ID NO: 5893; WAN024E2A_at; Start 97; Stop 121
taccagcaacaaagcgagcaaaagg

SEQ ID NO: 178269 - DNA, 25 bp, Artificial
  probe
  misc_feature (1)..(25): SEQ ID NO: 5893; WAN024E2A_at; Start 165; Stop 189
ttcgcagttcgaaaaagtagaaggc

SEQ ID NO: 178270 - DNA, 25 bp, Artificial
  probe
  misc_feature (1)..(25): SEQ ID NO: 5893; WAN024E2A_at; Start 118; Stop 142
aaggagtggctcttgtttgtggacc

SEQ ID NO: 178271 - DNA, 25 bp, Artificial
  probe
  misc_feature (1)..(25): SEQ ID NO: 5893; WAN024E2A_at; Start 7; Stop 31
ttgttagaatccctgcttgccctca

SEQ ID NO: 178272 - DNA, 25 bp, Artificial
  probe
  misc_feature (1)..(25): SEQ ID NO: 5893; WAN024E2A_at; Start 66; Stop 90
tatgagtcagctcctcatttcagaa

SEQ ID NO: 178273 - DNA, 25 bp, Artificial
  probe
  misc_feature (1)..(25): SEQ ID NO: 5893; WAN024E2A_at; Start 127; Stop 151
ctcttgtttgtggaccaacttgagg

SEQ ID NO: 178274 - DNA, 25 bp, Artificial
  probe
  misc_feature (1)..(25): SEQ ID NO: 4275; WAN024E2B_at; Start 43; Stop 67
gcagtcaccatagcagccatcttta

SEQ ID NO: 178275 - DNA, 25 bp, Artificial
  probe
  misc_feature (1)..(25): SEQ ID NO: 4275; WAN024E2B_at; Start 21; Stop 45
taaggcaggtgttctcctctacgca

SEQ ID NO: 178276 - DNA, 25 bp, Artificial
  probe
  misc_feature (1)..(25): SEQ ID NO: 4275; WAN024E2B_at; Start 26; Stop 50
caggtgttctcctctacgcagtcac

SEQ ID NO: 178277 - DNA, 25 bp, Artificial
  probe
  misc_feature (1)..(25): SEQ ID NO: 4275; WAN024E2B_at; Start 25; Stop 49
gcaggtgttctcctctacgcagtca

SEQ ID NO: 178278 - DNA, 25 bp, Artificial
  probe
  misc_feature (1)..(25): SEQ ID NO: 4275; WAN024E2B_at; Start 38; Stop 62
tctacgcagtcaccatagcagccat

SEQ ID NO: 178279 - DNA, 25 bp, Artificial
  probe
  misc_feature (1)..(25): SEQ ID NO: 4275; WAN024E2B_at; Start 30; Stop 54
tgttctcctctacgcagtcaccata

SEQ ID NO: 178280 - DNA, 25 bp, Artificial
  probe
  misc_feature (1)..(25): SEQ ID NO: 4275; WAN024E2B_at; Start 372; Stop 396
gaaaaaatcagaagagaagcctgaa

SEQ ID NO: 178281 - DNA, 25 bp, Artificial
  probe
  misc_feature (1)..(25): SEQ ID NO: 4275; WAN024E2B_at; Start 217; Stop 241
caggtaagctatcaaaacaagaaaa

SEQ ID NO: 178282 - DNA, 25 bp, Artificial
  probe
  misc_feature (1)..(25): SEQ ID NO: 4275; WAN024E2B_at; Start 283; Stop 307
gagtttctgtttccttcagtcaaaa

SEQ ID NO: 178283 - DNA, 25 bp, Artificial
  probe
  misc_feature (1)..(25): SEQ ID NO: 4275; WAN024E2B_at; Start 59; Stop 83
ccatctttagtcttttgttgcaatt

SEQ ID NO: 178284 - DNA, 25 bp, Artificial
  probe
  misc_feature (1)..(25): SEQ ID NO: 4275; WAN024E2B_at; Start 277; Stop 301
caatatgagtttctgtttccttcag

SEQ ID NO: 178285 - DNA, 25 bp, Artificial
  probe
  misc_feature (1)..(25): SEQ ID NO: 4275; WAN024E2B_at; Start 294; Stop 318
tccttcagtcaaaatcaaagaagag

SEQ ID NO: 178286 - DNA, 25 bp, Artificial
  probe
  misc_feature (1)..(25): SEQ ID NO: 4275; WAN024E2B_at; Start 16; Stop 40
aaagttaaggcaggtgttctcctct

SEQ ID NO: 178287 - DNA, 25 bp, Artificial
  probe
  misc_feature (1)..(25): SEQ ID NO: 4275; WAN024E2B_at; Start 210; Stop 234
tctaggtcaggtaagctatcaaaac

SEQ ID NO: 178288 - DNA, 25 bp, Artificial
  probe
  misc_feature (1)..(25): SEQ ID NO: 4275; WAN024E2B_at; Start 382; Stop 406
gaagagaagcctgaaaagaaagaga

SEQ ID NO: 178289 - DNA, 25 bp, Artificial
  probe
  misc_feature (1)..(25): SEQ ID NO: 4275; WAN024E2B_at; Start 51; Stop 75
catagcagccatctttagtcttttg

SEQ ID NO: 178290 - DNA, 25 bp, Artificial
  probe
  misc_feature (1)..(25): SEQ ID NO: 4275; WAN024E2B_at; Start 386; Stop 410
agaagcctgaaaagaaagagaattc

SEQ ID NO: 178291 - DNA, 25 bp, Artificial
  probe
  misc_feature (1)..(25): SEQ ID NO: 4275; WAN024E2B_at; Start 75; Stop 99
gttgcaattttatttgaaccgacaa

SEQ ID NO: 178292 - DNA, 25 bp, Artificial
  probe
  misc_feature (1)..(25): SEQ ID NO: 4275; WAN024E2B_at; Start 303; Stop 327
caaaatcaaagaagagaaaagagat

SEQ ID NO: 178293 - DNA, 25 bp, Artificial
  probe
  misc_feature (1)..(25): SEQ ID NO: 4275; WAN024E2B_at; Start 323; Stop 347
gagataaaaaggaagaggtagcgac

SEQ ID NO: 178294 - DNA, 25 bp, Artificial
  probe
  misc_feature (1)..(25): SEQ ID NO: 4275; WAN024E2B_at; Start 101; Stop 125
tcgcccactatcaagactatgcttt

SEQ ID NO: 178295 - DNA, 25 bp, Artificial
  probe
  misc_feature (1)..(25): SEQ ID NO: 4275; WAN024E2B_at; Start 214; Stop 238
ggtcaggtaagctatcaaaacaaga

SEQ ID NO: 178296 - DNA, 25 bp, Artificial
  probe
  misc_feature (1)..(25): SEQ ID NO: 4275; WAN024E2B_at; Start 299; Stop 323
cagtcaaaatcaaagaagagaaaag

SEQ ID NO: 178297 - DNA, 25 bp, Artificial
  probe
  misc_feature (1)..(25): SEQ ID NO: 4275; WAN024E2B_at; Start 334; Stop 358
gaagaggtagcgaccgattcaagcg

SEQ ID NO: 178298 - DNA, 25 bp, Artificial
  probe
  misc_feature (1)..(25): SEQ ID NO: 4275; WAN024E2B_at; Start 290; Stop 314
tgtttccttcagtcaaaatcaaaga

SEQ ID NO: 178299 - DNA, 25 bp, Artificial
  probe
  misc_feature (1)..(25): SEQ ID NO: 4275; WAN024E2B_at; Start 421; Stop 445
caactataatgcgttgaatccagaa

SEQ ID NO: 178300 - DNA, 25 bp, Artificial
  probe
  misc_feature (1)..(25): SEQ ID NO: 4275; WAN024E2B_at; Start 330; Stop 354
aaaggaagaggtagcgaccgattca

SEQ ID NO: 178301 - DNA, 25 bp, Artificial
  probe
  misc_feature (1)..(25): SEQ ID NO: 4275; WAN024E2B_at; Start 56; Stop 80
cagccatctttagtcttttgttgca

SEQ ID NO: 178302 - DNA, 25 bp, Artificial
  probe
  misc_feature (1)..(25): SEQ ID NO: 4275; WAN024E2B_at; Start 207; Stop 231
taatctaggtcaggtaagctatcaa

SEQ ID NO: 178303 - DNA, 25 bp, Artificial
  probe
  misc_feature (1)..(25): SEQ ID NO: 4275; WAN024E2B_at; Start 46; Stop 70
gtcaccatagcagccatctttagtc

SEQ ID NO: 178304 - DNA, 25 bp, Artificial
  probe
  misc_feature (1)..(25): SEQ ID NO: 4275; WAN024E2B_at; Start 22; Stop 46
aaggcaggtgttctcctctacgcag

SEQ ID NO: 178305 - DNA, 25 bp, Artificial
  probe
  misc_feature (1)..(25): SEQ ID NO: 4275; WAN024E2B_at; Start 203; Stop 227
tttttaatctaggtcaggtaagcta

SEQ ID NO: 178306 - DNA, 25 bp, Artificial
  probe
  misc_feature (1)..(25): SEQ ID NO: 4275; WAN024E2B_at; Start 337; Stop 361
gaggtagcgaccgattcaagcgaaa

SEQ ID NO: 178307 - DNA, 25 bp, Artificial
  probe
  misc_feature (1)..(25): SEQ ID NO: 4275; WAN024E2B_at; Start 340; Stop 364
gtagcgaccgattcaagcgaaaaag

SEQ ID NO: 178308 - DNA, 25 bp, Artificial
  probe
  misc_feature (1)..(25): SEQ ID NO: 2768; WAN024E2C_at; Start 16; Stop 40
tcttgtttagcaggattgaatagag

SEQ ID NO: 178309 - DNA, 25 bp, Artificial
  probe
  misc_feature (1)..(25): SEQ ID NO: 2768; WAN024E2C_at; Start 111; Stop 135
tacgagcatcaaggtagcagatgca

SEQ ID NO: 178310 - DNA, 25 bp, Artificial
  probe
  misc_feature (1)..(25): SEQ ID NO: 2768; WAN024E2C_at; Start 193; Stop 217
tcttctttcttaccaaagcgtcctg

SEQ ID NO: 178311 - DNA, 25 bp, Artificial
  probe
  misc_feature (1)..(25): SEQ ID NO: 2768; WAN024E2C_at; Start 156; Stop 180
tgagaggaacttaggtaatttaaga

SEQ ID NO: 178312 - DNA, 25 bp, Artificial
  probe
  misc_feature (1)..(25): SEQ ID NO: 2768; WAN024E2C_at; Start 123; Stop 147
ggtagcagatgcaacaactgtatcg

SEQ ID NO: 178313 - DNA, 25 bp, Artificial
  probe
  misc_feature (1)..(25): SEQ ID NO: 2768; WAN024E2C_at; Start 150; Stop 174
gaagattgagaggaacttaggtaat

SEQ ID NO: 178314 - DNA, 25 bp, Artificial
  probe
  misc_feature (1)..(25): SEQ ID NO: 2768; WAN024E2C_at; Start 226; Stop 250
tctacaaaccagattgcaaattgct

SEQ ID NO: 178315 - DNA, 25 bp, Artificial
  probe
  misc_feature (1)..(25): SEQ ID NO: 2768; WAN024E2C_at; Start 206; Stop 230
caaagcgtcctgctactttatctac

SEQ ID NO: 178316 - DNA, 25 bp, Artificial
  probe
  misc_feature (1)..(25): SEQ ID NO: 2768; WAN024E2C_at; Start 36; Stop 60
tagagttcctgaagtgatgacttct

SEQ ID NO: 178317 - DNA, 25 bp, Artificial
  probe
  misc_feature (1)..(25): SEQ ID NO: 2768; WAN024E2C_at; Start 108; Stop 132
gaatacgagcatcaaggtagcagat

SEQ ID NO: 178318 - DNA, 25 bp, Artificial
  probe
  misc_feature (1)..(25): SEQ ID NO: 2768; WAN024E2C_at; Start 143; Stop 167
tatcgtggaagattgagaggaactt

SEQ ID NO: 178319 - DNA, 25 bp, Artificial
  probe
  misc_feature (1)..(25): SEQ ID NO: 2768; WAN024E2C_at; Start 134; Stop 158
caacaactgtatcgtggaagattga

SEQ ID NO: 178320 - DNA, 25 bp, Artificial
  probe
  misc_feature (1)..(25): SEQ ID NO: 2768; WAN024E2C_at; Start 32; Stop 56
tgaatagagttcctgaagtgatgac

SEQ ID NO: 178321 - DNA, 25 bp, Artificial
  probe
  misc_feature (1)..(25): SEQ ID NO: 2768; WAN024E2C_at; Start 105; Stop 129
gaagaatacgagcatcaaggtagca

SEQ ID NO: 178322 - DNA, 25 bp, Artificial
  probe
  misc_feature (1)..(25): SEQ ID NO: 2768; WAN024E2C_at; Start 217; Stop 241
gctactttatctacaaaccagattg

SEQ ID NO: 178323 - DNA, 25 bp, Artificial
  probe
  misc_feature (1)..(25): SEQ ID NO: 2768; WAN024E2C_at; Start 125; Stop 149
tagcagatgcaacaactgtatcgtg

SEQ ID NO: 178324 - DNA, 25 bp, Artificial
  probe
  misc_feature (1)..(25): SEQ ID NO: 2768; WAN024E2C_at; Start 209; Stop 233
agcgtcctgctactttatctacaaa

SEQ ID NO: 178325 - DNA, 25 bp, Artificial
  probe
  misc_feature (1)..(25): SEQ ID NO: 2768; WAN024E2C_at; Start 46; Stop 70
gaagtgatgacttctttattagaca

SEQ ID NO: 178326 - DNA, 25 bp, Artificial
  probe
  misc_feature (1)..(25): SEQ ID NO: 2768; WAN024E2C_at; Start 6; Stop 30
cataaagaaatcttgtttagcagga

SEQ ID NO: 178327 - DNA, 25 bp, Artificial
  probe
  misc_feature (1)..(25): SEQ ID NO: 2768; WAN024E2C_at; Start 130; Stop 154
gatgcaacaactgtatcgtggaaga

SEQ ID NO: 178328 - DNA, 25 bp, Artificial
  probe
  misc_feature (1)..(25): SEQ ID NO: 2768; WAN024E2C_at; Start 103; Stop 127
ccgaagaatacgagcatcaaggtag

SEQ ID NO: 178329 - DNA, 25 bp, Artificial
  probe
  misc_feature (1)..(25): SEQ ID NO: 2768; WAN024E2C_at; Start 69; Stop 93
cataatgtctggacccaagattaaa

SEQ ID NO: 178330 - DNA, 25 bp, Artificial
  probe
  misc_feature (1)..(25): SEQ ID NO: 2768; WAN024E2C_at; Start 196; Stop 220
tctttcttaccaaagcgtcctgcta

SEQ ID NO: 178331 - DNA, 25 bp, Artificial
  probe
  misc_feature (1)..(25): SEQ ID NO: 2768; WAN024E2C_at; Start 73; Stop 97
atgtctggacccaagattaaaagaa

SEQ ID NO: 178332 - DNA, 25 bp, Artificial
  probe
  misc_feature (1)..(25): SEQ ID NO: 2768; WAN024E2C_at; Start 234; Stop 258
ccagattgcaaattgctgttggtga

SEQ ID NO: 178333 - DNA, 25 bp, Artificial
  probe
  misc_feature (1)..(25): SEQ ID NO: 2768; WAN024E2C_at; Start 127; Stop 151
gcagatgcaacaactgtatcgtgga

SEQ ID NO: 178334 - DNA, 25 bp, Artificial
  probe
  misc_feature (1)..(25): SEQ ID NO: 2768; WAN024E2C_at; Start 119; Stop 143
tcaaggtagcagatgcaacaactgt

SEQ ID NO: 178335 - DNA, 25 bp, Artificial
  probe
  misc_feature (1)..(25): SEQ ID NO: 2768; WAN024E2C_at; Start 51; Stop 75
gatgacttctttattagacataatg

SEQ ID NO: 178336 - DNA, 25 bp, Artificial
  probe
  misc_feature (1)..(25): SEQ ID NO: 2768; WAN024E2C_at; Start 230; Stop 254
caaaccagattgcaaattgctgttg

SEQ ID NO: 178337 - DNA, 25 bp, Artificial
  probe
  misc_feature (1)..(25): SEQ ID NO: 2768; WAN024E2C_at; Start 114; Stop 138
gagcatcaaggtagcagatgcaaca

SEQ ID NO: 178338 - DNA, 25 bp, Artificial
  probe
  misc_feature (1)..(25): SEQ ID NO: 2768; WAN024E2C_at; Start 200; Stop 224
tcttaccaaagcgtcctgctacttt

SEQ ID NO: 178339 - DNA, 25 bp, Artificial
  probe
  misc_feature (1)..(25): SEQ ID NO: 2768; WAN024E2C_at; Start 137; Stop 161
caactgtatcgtggaagattgagag

SEQ ID NO: 178340 - DNA, 25 bp, Artificial
  probe
  misc_feature (1)..(25): SEQ ID NO: 2768; WAN024E2C_at; Start 20; Stop 44
gtttagcaggattgaatagagttcc

SEQ ID NO: 178341 - DNA, 25 bp, Artificial
  probe
  misc_feature (1)..(25): SEQ ID NO: 2768; WAN024E2C_at; Start 65; Stop 89
tagacataatgtctggacccaagat

SEQ ID NO: 178342 - DNA, 25 bp, Artificial
  probe
  misc_feature (1)..(25): SEQ ID NO: 5626; WAN024E2D_at; Start 1342; Stop 1366
ggtggctaccatggaaatatcgact

SEQ ID NO: 178343 - DNA, 25 bp, Artificial
  probe
  misc_feature (1)..(25): SEQ ID NO: 5626; WAN024E2D_at; Start 116; Stop 140
tgcagaatcccgcatttttcgtagg

SEQ ID NO: 178344 - DNA, 25 bp, Artificial
  probe
  misc_feature (1)..(25): SEQ ID NO: 5626; WAN024E2D_at; Start 1327; Stop 1351
gatttggcatcttatggtggctacc

SEQ ID NO: 178345 - DNA, 25 bp, Artificial
  probe
  misc_feature (1)..(25): SEQ ID NO: 5626; WAN024E2D_at; Start 1500; Stop 1524
caacggtgaagttcaagaagaagct

SEQ ID NO: 178346 - DNA, 25 bp, Artificial
  probe
  misc_feature (1)..(25): SEQ ID NO: 5626; WAN024E2D_at; Start 576; Stop 600
tatcatctgtggactttactgggca

SEQ ID NO: 178347 - DNA, 25 bp, Artificial
  probe
  misc_feature (1)..(25): SEQ ID NO: 5626; WAN024E2D_at; Start 527; Stop 551
tattcttagtaccacaattgcgcaa

SEQ ID NO: 178348 - DNA, 25 bp, Artificial
  probe
  misc_feature (1)..(25): SEQ ID NO: 5626; WAN024E2D_at; Start 966; Stop 990
gatgcaaggtgtccgaatgttcgta

SEQ ID NO: 178349 - DNA, 25 bp, Artificial
  probe
  misc_feature (1)..(25): SEQ ID NO: 5626; WAN024E2D_at; Start 166; Stop 190
cttttgaaaaaacctgcccatgacg

SEQ ID NO: 178350 - DNA, 25 bp, Artificial
  probe
  misc_feature (1)..(25): SEQ ID NO: 5626; WAN024E2D_at; Start 542; Stop 566
aattgcgcaatgcttacggtacagc

SEQ ID NO: 178351 - DNA, 25 bp, Artificial
  probe
  misc_feature (1)..(25): SEQ ID NO: 5626; WAN024E2D_at; Start 1081; Stop 1105
ggttctccaaatgctgtcttgtcag

SEQ ID NO: 178352 - DNA, 25 bp, Artificial
  probe
  misc_feature (1)..(25): SEQ ID NO: 5626; WAN024E2D_at; Start 825; Stop 849
cattcttttaatcttgggtccagac

SEQ ID NO: 178353 - DNA, 25 bp, Artificial
  probe
  misc_feature (1)..(25): SEQ ID NO: 5626; WAN024E2D_at; Start 381; Stop 405
tgttggaactgcaactacagctcta

SEQ ID NO: 178354 - DNA, 25 bp, Artificial
  probe
  misc_feature (1)..(25): SEQ ID NO: 5626; WAN024E2D_at; Start 1027; Stop 1051
aaattgttgccaggttcattcccag

SEQ ID NO: 178355 - DNA, 25 bp, Artificial
  probe
  misc_feature (1)..(25): SEQ ID NO: 5626; WAN024E2D_at; Start 691; Stop 715
tttgtagataaagtagcaggacgct

SEQ ID NO: 178356 - DNA, 25 bp, Artificial
  probe
  misc_feature (1)..(25): SEQ ID NO: 5626; WAN024E2D_at; Start 1193; Stop 1217
taccagtgttctttgacaatgcagc

SEQ ID NO: 178357 - DNA, 25 bp, Artificial
  probe
  misc_feature (1)..(25): SEQ ID NO: 5626; WAN024E2D_at; Start 418; Stop 442
ggaataaatatcttgctcgtagctc

SEQ ID NO: 178358 - DNA, 25 bp, Artificial
  probe
  misc_feature (1)..(25): SEQ ID NO: 5626; WAN024E2D_at; Start 260; Stop 284
caacctttcgtccaatcttagcagc

SEQ ID NO: 178359 - DNA, 25 bp, Artificial
  probe
  misc_feature (1)..(25): SEQ ID NO: 5626; WAN024E2D_at; Start 556; Stop 580
tacggtacagcagcgattggtatca

SEQ ID NO: 178360 - DNA, 25 bp, Artificial
  probe
  misc_feature (1)..(25): SEQ ID NO: 5626; WAN024E2D_at; Start 1042; Stop 1066
tcattcccagcggttgacgttgcag

SEQ ID NO: 178361 - DNA, 25 bp, Artificial
  probe
  misc_feature (1)..(25): SEQ ID NO: 5626; WAN024E2D_at; Start 1312; Stop 1336
tgtgtggcccttctcgatttggcat

SEQ ID NO: 178362 - DNA, 25 bp, Artificial
  probe
  misc_feature (1)..(25): SEQ ID NO: 5626; WAN024E2D_at; Start 1361; Stop 1385
tcgactttgaattcccatggcttgg

SEQ ID NO: 178363 - DNA, 25 bp, Artificial
  probe
  misc_feature (1)..(25): SEQ ID NO: 5626; WAN024E2D_at; Start 300; Stop 324
ccaaattggtgcagcggttatcgac

SEQ ID NO: 178364 - DNA, 25 bp, Artificial
  probe
  misc_feature (1)..(25): SEQ ID NO: 5626; WAN024E2D_at; Start 627; Stop 651
aactcaacgcttgactggtggtggc

SEQ ID NO: 178365 - DNA, 25 bp, Artificial
  probe
  misc_feature (1)..(25): SEQ ID NO: 5626; WAN024E2D_at; Start 768; Stop 792
aatcttccacgatacagttgttgca

SEQ ID NO: 178366 - DNA, 25 bp, Artificial
  probe
  misc_feature (1)..(25): SEQ ID NO: 5626; WAN024E2D_at; Start 322; Stop 346
gacccttactttggacttgctgcag

SEQ ID NO: 178367 - DNA, 25 bp, Artificial
  probe
  misc_feature (1)..(25): SEQ ID NO: 5626; WAN024E2D_at; Start 481; Stop 505
ggtcacatcatggtacaacaagctg

SEQ ID NO: 178368 - DNA, 25 bp, Artificial
  probe
  misc_feature (1)..(25): SEQ ID NO: 5626; WAN024E2D_at; Start 607; Stop 631
tcaaatatgactgttgaggcaactc

SEQ ID NO: 178369 - DNA, 25 bp, Artificial
  probe
  misc_feature (1)..(25): SEQ ID NO: 5626; WAN024E2D_at; Start 1057; Stop 1081
gacgttgcagcttcttatggatttg

SEQ ID NO: 178370 - DNA, 25 bp, Artificial
  probe
  misc_feature (1)..(25): SEQ ID NO: 5626; WAN024E2D_at; Start 1226; Stop 1250
tctacgctgataaacgcggcggatg

SEQ ID NO: 178371 - DNA, 25 bp, Artificial
  probe
  misc_feature (1)..(25): SEQ ID NO: 5626; WAN024E2D_at; Start 650; Stop 674
gcggatttgcgattggtcaccaaca

SEQ ID NO: 178372 - DNA, 25 bp, Artificial
  probe
  misc_feature (1)..(25): SEQ ID NO: 5626; WAN024E2D_at; Start 1209; Stop 1233
caatgcagccattgcggtctacgct

SEQ ID NO: 178373 - DNA, 25 bp, Artificial
  probe
  misc_feature (1)..(25): SEQ ID NO: 5626; WAN024E2D_at; Start 223; Stop 247
tatatgttgcttaacgtgggtgctg

SEQ ID NO: 178374 - DNA, 25 bp, Artificial
  probe
  misc_feature (1)..(25): SEQ ID NO: 5626; WAN024E2D_at; Start 1275; Stop 1299
tatatcaggtgtccttcaagttgct

SEQ ID NO: 178375 - DNA, 25 bp, Artificial
  probe
  misc_feature (1)..(25): SEQ ID NO: 5626; WAN024E2D_at; Start 1297; Stop 1321
gctctaggagctctttgtgtggccc

SEQ ID NO: 178376 - DNA, 25 bp, Artificial
  probe
  misc_feature (1)..(25): SEQ ID NO: 1857; WAN024E2E_at; Start 209; Stop 233
caccccaagtttcaccagcaagaag

SEQ ID NO: 178377 - DNA, 25 bp, Artificial
  probe
  misc_feature (1)..(25): SEQ ID NO: 1857; WAN024E2E_at; Start 146; Stop 170
cacctgttacagatacacggaagcc

SEQ ID NO: 178378 - DNA, 25 bp, Artificial
  probe
  misc_feature (1)..(25): SEQ ID NO: 1857; WAN024E2E_at; Start 30; Stop 54
atccttgaaggcacgcgctgctcct

SEQ ID NO: 178379 - DNA, 25 bp, Artificial
  probe
  misc_feature (1)..(25): SEQ ID NO: 1857; WAN024E2E_at; Start 19; Stop 43
cgtttgatttcatccttgaaggcac

SEQ ID NO: 178380 - DNA, 25 bp, Artificial
  probe
  misc_feature (1)..(25): SEQ ID NO: 1857; WAN024E2E_at; Start 161; Stop 185
cacggaagcccatgtcaatgagttt

SEQ ID NO: 178381 - DNA, 25 bp, Artificial
  probe
  misc_feature (1)..(25): SEQ ID NO: 1857; WAN024E2E_at; Start 74; Stop 98
taattccacgacctgcgataaaggt

SEQ ID NO: 178382 - DNA, 25 bp, Artificial
  probe
  misc_feature (1)..(25): SEQ ID NO: 1857; WAN024E2E_at; Start 220; Stop 244
tcaccagcaagaagagcatcacgag

SEQ ID NO: 178383 - DNA, 25 bp, Artificial
  probe
  misc_feature (1)..(25): SEQ ID NO: 1857; WAN024E2E_at; Start 85; Stop 109
cctgcgataaaggtaaagacatcaa

SEQ ID NO: 178384 - DNA, 25 bp, Artificial
  probe
  misc_feature (1)..(25): SEQ ID NO: 1857; WAN024E2E_at; Start 226; Stop 250
gcaagaagagcatcacgagattggt

SEQ ID NO: 178385 - DNA, 25 bp, Artificial
  probe
  misc_feature (1)..(25): SEQ ID NO: 1857; WAN024E2E_at; Start 24; Stop 48
gatttcatccttgaaggcacgcgct

SEQ ID NO: 178386 - DNA, 25 bp, Artificial
  probe
  misc_feature (1)..(25): SEQ ID NO: 1857; WAN024E2E_at; Start 80; Stop 104
cacgacctgcgataaaggtaaagac

SEQ ID NO: 178387 - DNA, 25 bp, Artificial
  probe
  misc_feature (1)..(25): SEQ ID NO: 1857; WAN024E2E_at; Start 155; Stop 179
cagatacacggaagcccatgtcaat

SEQ ID NO: 178388 - DNA, 25 bp, Artificial
  probe
  misc_feature (1)..(25): SEQ ID NO: 1857; WAN024E2E_at; Start 38; Stop 62
aggcacgcgctgctcctgctggatc

SEQ ID NO: 178389 - DNA, 25 bp, Artificial
  probe
  misc_feature (1)..(25): SEQ ID NO: 1857; WAN024E2E_at; Start 133; Stop 157
tctacatctagaccacctgttacag

SEQ ID NO: 178390 - DNA, 25 bp, Artificial
  probe
  misc_feature (1)..(25): SEQ ID NO: 1857; WAN024E2E_at; Start 228; Stop 252
aagaagagcatcacgagattggtga

SEQ ID NO: 178391 - DNA, 25 bp, Artificial
  probe
  misc_feature (1)..(25): SEQ ID NO: 1857; WAN024E2E_at; Start 159; Stop 183
tacacggaagcccatgtcaatgagt

SEQ ID NO: 178392 - DNA, 25 bp, Artificial
  probe
  misc_feature (1)..(25): SEQ ID NO: 1857; WAN024E2E_at; Start 10; Stop 34
ccccaaattcgtttgatttcatcct

SEQ ID NO: 178393 - DNA, 25 bp, Artificial
  probe
  misc_feature (1)..(25): SEQ ID NO: 1857; WAN024E2E_at; Start 213; Stop 237
ccaagtttcaccagcaagaagagca

SEQ ID NO: 178394 - DNA, 25 bp, Artificial
  probe
  misc_feature (1)..(25): SEQ ID NO: 1857; WAN024E2E_at; Start 204; Stop 228
tttttcaccccaagtttcaccagca

SEQ ID NO: 178395 - DNA, 25 bp, Artificial
  probe
  misc_feature (1)..(25): SEQ ID NO: 1857; WAN024E2E_at; Start 150; Stop 174
tgttacagatacacggaagcccatg

SEQ ID NO: 178396 - DNA, 25 bp, Artificial
  probe
  misc_feature (1)..(25): SEQ ID NO: 1857; WAN024E2E_at; Start 143; Stop 167
gaccacctgttacagatacacggaa

SEQ ID NO: 178397 - DNA, 25 bp, Artificial
  probe
  misc_feature (1)..(25): SEQ ID NO: 1857; WAN024E2E_at; Start 66; Stop 90
agcctctgtaattccacgacctgcg

SEQ ID NO: 178398 - DNA, 25 bp, Artificial
  probe
  misc_feature (1)..(25): SEQ ID NO: 1857; WAN024E2E_at; Start 116; Stop 140
caaagagtttgagagtatctacatc

SEQ ID NO: 178399 - DNA, 25 bp, Artificial
  probe
  misc_feature (1)..(25): SEQ ID NO: 1857; WAN024E2E_at; Start 78; Stop 102
tccacgacctgcgataaaggtaaag

SEQ ID NO: 178400 - DNA, 25 bp, Artificial
  probe
  misc_feature (1)..(25): SEQ ID NO: 1857; WAN024E2E_at; Start 141; Stop 165
tagaccacctgttacagatacacgg

SEQ ID NO: 178401 - DNA, 25 bp, Artificial
  probe
  misc_feature (1)..(25): SEQ ID NO: 1857; WAN024E2E_at; Start 218; Stop 242
tttcaccagcaagaagagcatcacg

SEQ ID NO: 178402 - DNA, 25 bp, Artificial
  probe
  misc_feature (1)..(25): SEQ ID NO: 1857; WAN024E2E_at; Start 112; Stop 136
ccttcaaagagtttgagagtatcta

SEQ ID NO: 178403 - DNA, 25 bp, Artificial
  probe
  misc_feature (1)..(25): SEQ ID NO: 1857; WAN024E2E_at; Start 223; Stop 247
ccagcaagaagagcatcacgagatt

SEQ ID NO: 178404 - DNA, 25 bp, Artificial
  probe
  misc_feature (1)..(25): SEQ ID NO: 1857; WAN024E2E_at; Start 70; Stop 94
tctgtaattccacgacctgcgataa

SEQ ID NO: 178405 - DNA, 25 bp, Artificial
  probe
  misc_feature (1)..(25): SEQ ID NO: 1857; WAN024E2E_at; Start 128; Stop 152
gagtatctacatctagaccacctgt

SEQ ID NO: 178406 - DNA, 25 bp, Artificial
  probe
  misc_feature (1)..(25): SEQ ID NO: 1857; WAN024E2E_at; Start 165; Stop 189
gaagcccatgtcaatgagtttttta

SEQ ID NO: 178407 - DNA, 25 bp, Artificial
  probe
  misc_feature (1)..(25): SEQ ID NO: 1857; WAN024E2E_at; Start 125; Stop 149
tgagagtatctacatctagaccacc

SEQ ID NO: 178408 - DNA, 25 bp, Artificial
  probe
  misc_feature (1)..(25): SEQ ID NO: 1857; WAN024E2E_at; Start 27; Stop 51
ttcatccttgaaggcacgcgctgct

SEQ ID NO: 178409 - DNA, 25 bp, Artificial
  probe
  misc_feature (1)..(25): SEQ ID NO: 1857; WAN024E2E_at; Start 153; Stop 177
tacagatacacggaagcccatgtca

SEQ ID NO: 178410 - DNA, 25 bp, Artificial
  probe
  misc_feature (1)..(25): SEQ ID NO: 1294; WAN024E2F_at; Start 429; Stop 453
tcgtgatgctcttcttgctggtgaa

SEQ ID NO: 178411 - DNA, 25 bp, Artificial
  probe
  misc_feature (1)..(25): SEQ ID NO: 1294; WAN024E2F_at; Start 190; Stop 214
gacacaaaatgtgctgatgctggtg

SEQ ID NO: 178412 - DNA, 25 bp, Artificial
  probe
  misc_feature (1)..(25): SEQ ID NO: 1294; WAN024E2F_at; Start 84; Stop 108
tcaggaagtagatattatcgaagct

SEQ ID NO: 178413 - DNA, 25 bp, Artificial
  probe
  misc_feature (1)..(25): SEQ ID NO: 1294; WAN024E2F_at; Start 50; Stop 74
tgcaaggagcgattaaagcagctgt

SEQ ID NO: 178414 - DNA, 25 bp, Artificial
  probe
  misc_feature (1)..(25): SEQ ID NO: 1294; WAN024E2F_at; Start 332; Stop 356
gaggcgaaatccagatcgagcttta

SEQ ID NO: 178415 - DNA, 25 bp, Artificial
  probe
  misc_feature (1)..(25): SEQ ID NO: 1294; WAN024E2F_at; Start 35; Stop 59
tagaccattcagacttgcaaggagc

SEQ ID NO: 178416 - DNA, 25 bp, Artificial
  probe
  misc_feature (1)..(25): SEQ ID NO: 1294; WAN024E2F_at; Start 361; Stop 385
gattggacttttgaacaagctcagc

SEQ ID NO: 178417 - DNA, 25 bp, Artificial
  probe
  misc_feature (1)..(25): SEQ ID NO: 1294; WAN024E2F_at; Start 485; Stop 509
aaaaactcattgacatgggcttccg

SEQ ID NO: 178418 - DNA, 25 bp, Artificial
  probe
  misc_feature (1)..(25): SEQ ID NO: 1294; WAN024E2F_at; Start 302; Stop 326
taaaggctatcaagactgaacgagg

SEQ ID NO: 178419 - DNA, 25 bp, Artificial
  probe
  misc_feature (1)..(25): SEQ ID NO: 1294; WAN024E2F_at; Start 407; Stop 431
cacaagctatttatcaccaatctcg

SEQ ID NO: 178420 - DNA, 25 bp, Artificial
  probe
  misc_feature (1)..(25): SEQ ID NO: 1294; WAN024E2F_at; Start 500; Stop 524
tgggcttccgtgtatctgtaacagg

SEQ ID NO: 178421 - DNA, 25 bp, Artificial
  probe
  misc_feature (1)..(25): SEQ ID NO: 1294; WAN024E2F_at; Start 255; Stop 279
gatgacttgtatctgttgtgcaacc

SEQ ID NO: 178422 - DNA, 25 bp, Artificial
  probe
  misc_feature (1)..(25): SEQ ID NO: 1294; WAN024E2F_at; Start 376; Stop 400
caagctcagctttggctagatgcag

SEQ ID NO: 178423 - DNA, 25 bp, Artificial
  probe
  misc_feature (1)..(25): SEQ ID NO: 1294; WAN024E2F_at; Start 532; Stop 556
gatgtagatactctcaaactctttg

SEQ ID NO: 178424 - DNA, 25 bp, Artificial
  probe
  misc_feature (1)..(25): SEQ ID NO: 1294; WAN024E2F_at; Start 625; Stop 649
gcgcgtgccttcaaggatgaaatca

SEQ ID NO: 178425 - DNA, 25 bp, Artificial
  probe
  misc_feature (1)..(25): SEQ ID NO: 1294; WAN024E2F_at; Start 218; Stop 242
cagttgctaaaaataatgcggttcg

SEQ ID NO: 178426 - DNA, 25 bp, Artificial
  probe
  misc_feature (1)..(25): SEQ ID NO: 1294; WAN024E2F_at; Start 243; Stop 267
tggagcagactggatgacttgtatc

SEQ ID NO: 178427 - DNA, 25 bp, Artificial
  probe
  misc_feature (1)..(25): SEQ ID NO: 1294; WAN024E2F_at; Start 611; Stop 635
atccagcaggagcagcgcgtgcctt

SEQ ID NO: 178428 - DNA, 25 bp, Artificial
  probe
  misc_feature (1)..(25): SEQ ID NO: 1294; WAN024E2F_at; Start 582; Stop 606
cgcaggtcgtggaattacagaggct

SEQ ID NO: 178429 - DNA, 25 bp, Artificial
  probe
  misc_feature (1)..(25): SEQ ID NO: 1294; WAN024E2F_at; Start 569; Stop 593
tctttacctttatcgcaggtcgtgg

SEQ ID NO: 178430 - DNA, 25 bp, Artificial
  probe
  misc_feature (1)..(25): SEQ ID NO: 1294; WAN024E2F_at; Start 345; Stop 369
gatcgagctttatggcgattggact

SEQ ID NO: 178431 - DNA, 25 bp, Artificial
  probe
  misc_feature (1)..(25): SEQ ID NO: 1294; WAN024E2F_at; Start 228; Stop 252
aaataatgcggttcgtggagcagac

SEQ ID NO: 178432 - DNA, 25 bp, Artificial
  probe
  misc_feature (1)..(25): SEQ ID NO: 1294; WAN024E2F_at; Start 317; Stop 341
ctgaacgaggagaacgaggcgaaat

SEQ ID NO: 178433 - DNA, 25 bp, Artificial
  probe
  misc_feature (1)..(25): SEQ ID NO: 1294; WAN024E2F_at; Start 155; Stop 179
tgcgtagccttttcccagataagat

SEQ ID NO: 178434 - DNA, 25 bp, Artificial
  probe
  misc_feature (1)..(25): SEQ ID NO: 1294; WAN024E2F_at; Start 122; Stop 146
tgcttcaagttggaagtgaactggc

SEQ ID NO: 178435 - DNA, 25 bp, Artificial
  probe
  misc_feature (1)..(25): SEQ ID NO: 1294; WAN024E2F_at; Start 65; Stop 89
aagcagctgtttctgttggtcagga

SEQ ID NO: 178436 - DNA, 25 bp, Artificial
  probe
  misc_feature (1)..(25): SEQ ID NO: 1294; WAN024E2F_at; Start 203; Stop 227
ctgatgctggtggaacagttgctaa

SEQ ID NO: 178437 - DNA, 25 bp, Artificial
  probe
  misc_feature (1)..(25): SEQ ID NO: 1294; WAN024E2F_at; Start 170; Stop 194
cagataagattattgtggcagacac

SEQ ID NO: 178438 - DNA, 25 bp, Artificial
  probe
  misc_feature (1)..(25): SEQ ID NO: 1294; WAN024E2F_at; Start 269; Stop 293
gttgtgcaaccatccctactatgga

SEQ ID NO: 178439 - DNA, 25 bp, Artificial
  probe
  misc_feature (1)..(25): SEQ ID NO: 1294; WAN024E2F_at; Start 138; Stop 162
tgaactggctgaagtcttgcgtagc

SEQ ID NO: 178440 - DNA, 25 bp, Artificial
  probe
  misc_feature (1)..(25): SEQ ID NO: 1294; WAN024E2F_at; Start 106; Stop 130
gctggaactgtttgcttgcttcaag

SEQ ID NO: 178441 - DNA, 25 bp, Artificial
  probe
  misc_feature (1)..(25): SEQ ID NO: 1294; WAN024E2F_at; Start 285; Stop 309
tactatggaagcagctctaaaggct

SEQ ID NO: 178442 - DNA, 25 bp, Artificial
  probe
  misc_feature (1)..(25): SEQ ID NO: 1294; WAN024E2F_at; Start 515; Stop 539
ctgtaacaggtggtctagatgtaga

SEQ ID NO: 178443 - DNA, 25 bp, Artificial
  probe
  misc_feature (1)..(25): SEQ ID NO: 1294; WAN024E2F_at; Start 22; Stop 46
ttacaagttgcattagaccattcag

SEQ ID NO: 178444 - DNA, 25 bp, Artificial
  probe
  misc_feature (1)..(25): SEQ ID NO: 2277; WAN024E2G_at; Start 188; Stop 212
tgagcttcttcagcccagtcacagg

SEQ ID NO: 178445 - DNA, 25 bp, Artificial
  probe
  misc_feature (1)..(25): SEQ ID NO: 2277; WAN024E2G_at; Start 61; Stop 85
tgcagacacattaccaatatctgga

SEQ ID NO: 178446 - DNA, 25 bp, Artificial
  probe
  misc_feature (1)..(25): SEQ ID NO: 2277; WAN024E2G_at; Start 191; Stop 215
gcttcttcagcccagtcacaggctt

SEQ ID NO: 178447 - DNA, 25 bp, Artificial
  probe
  misc_feature (1)..(25): SEQ ID NO: 2277; WAN024E2G_at; Start 4; Stop 28
gagagctgcgatggcatgatgacca

SEQ ID NO: 178448 - DNA, 25 bp, Artificial
  probe
  misc_feature (1)..(25): SEQ ID NO: 2277; WAN024E2G_at; Start 227; Stop 251
ttgataaaacgttggcgtgtctggg

SEQ ID NO: 178449 - DNA, 25 bp, Artificial
  probe
  misc_feature (1)..(25): SEQ ID NO: 2277; WAN024E2G_at; Start 148; Stop 172
gatgaaaggatcatccataatttca

SEQ ID NO: 178450 - DNA, 25 bp, Artificial
  probe
  misc_feature (1)..(25): SEQ ID NO: 2277; WAN024E2G_at; Start 168; Stop 192
tttcaatagcaagtaccacctgagc

SEQ ID NO: 178451 - DNA, 25 bp, Artificial
  probe
  misc_feature (1)..(25): SEQ ID NO: 2277; WAN024E2G_at; Start 78; Stop 102
tatctggatatacaaagaggaaggg

SEQ ID NO: 178452 - DNA, 25 bp, Artificial
  probe
  misc_feature (1)..(25): SEQ ID NO: 2277; WAN024E2G_at; Start 39; Stop 63
cactatagatatcattatgccatgc

SEQ ID NO: 178453 - DNA, 25 bp, Artificial
  probe
  misc_feature (1)..(25): SEQ ID NO: 2277; WAN024E2G_at; Start 96; Stop 120
ggaagggagagtcaatctctttttc

SEQ ID NO: 178454 - DNA, 25 bp, Artificial
  probe
  misc_feature (1)..(25): SEQ ID NO: 2277; WAN024E2G_at; Start 90; Stop 114
caaagaggaagggagagtcaatctc

SEQ ID NO: 178455 - DNA, 25 bp, Artificial
  probe
  misc_feature (1)..(25): SEQ ID NO: 2277; WAN024E2G_at; Start 75; Stop 99
caatatctggatatacaaagaggaa

SEQ ID NO: 178456 - DNA, 25 bp, Artificial
  probe
  misc_feature (1)..(25): SEQ ID NO: 2277; WAN024E2G_at; Start 44; Stop 68
tagatatcattatgccatgcagaca

SEQ ID NO: 178457 - DNA, 25 bp, Artificial
  probe
  misc_feature (1)..(25): SEQ ID NO: 2277; WAN024E2G_at; Start 48; Stop 72
tatcattatgccatgcagacacatt

SEQ ID NO: 178458 - DNA, 25 bp, Artificial
  probe
  misc_feature (1)..(25): SEQ ID NO: 2277; WAN024E2G_at; Start 207; Stop 231
cacaggcttttctcaaatttttgat

SEQ ID NO: 178459 - DNA, 25 bp, Artificial
  probe
  misc_feature (1)..(25): SEQ ID NO: 2277; WAN024E2G_at; Start 194; Stop 218
tcttcagcccagtcacaggcttttc

SEQ ID NO: 178460 - DNA, 25 bp, Artificial
  probe
  misc_feature (1)..(25): SEQ ID NO: 2277; WAN024E2G_at; Start 165; Stop 189
taatttcaatagcaagtaccacctg

SEQ ID NO: 178461 - DNA, 25 bp, Artificial
  probe
  misc_feature (1)..(25): SEQ ID NO: 2277; WAN024E2G_at; Start 84; Stop 108
gatatacaaagaggaagggagagtc

SEQ ID NO: 178462 - DNA, 25 bp, Artificial
  probe
  misc_feature (1)..(25): SEQ ID NO: 2277; WAN024E2G_at; Start 8; Stop 32
gctgcgatggcatgatgaccaagat

SEQ ID NO: 178463 - DNA, 25 bp, Artificial
  probe
  misc_feature (1)..(25): SEQ ID NO: 2277; WAN024E2G_at; Start 171; Stop 195
caatagcaagtaccacctgagcttc

SEQ ID NO: 178464 - DNA, 25 bp, Artificial
  probe
  misc_feature (1)..(25): SEQ ID NO: 2277; WAN024E2G_at; Start 174; Stop 198
tagcaagtaccacctgagcttcttc

SEQ ID NO: 178465 - DNA, 25 bp, Artificial
  probe
  misc_feature (1)..(25): SEQ ID NO: 2277; WAN024E2G_at; Start 16; Stop 40
ggcatgatgaccaagataaaactca

SEQ ID NO: 178466 - DNA, 25 bp, Artificial
  probe
  misc_feature (1)..(25): SEQ ID NO: 2277; WAN024E2G_at; Start 178; Stop 202
aagtaccacctgagcttcttcagcc

SEQ ID NO: 178467 - DNA, 25 bp, Artificial
  probe
  misc_feature (1)..(25): SEQ ID NO: 2277; WAN024E2G_at; Start 201; Stop 225
cccagtcacaggcttttctcaaatt

SEQ ID NO: 178468 - DNA, 25 bp, Artificial
  probe
  misc_feature (1)..(25): SEQ ID NO: 2277; WAN024E2G_at; Start 225; Stop 249
ttttgataaaacgttggcgtgtctg

SEQ ID NO: 178469 - DNA, 25 bp, Artificial
  probe
  misc_feature (1)..(25): SEQ ID NO: 2277; WAN024E2G_at; Start 88; Stop 112
tacaaagaggaagggagagtcaatc

SEQ ID NO: 178470 - DNA, 25 bp, Artificial
  probe
  misc_feature (1)..(25): SEQ ID NO: 2277; WAN024E2G_at; Start 104; Stop 128
gagtcaatctctttttctatagcca

SEQ ID NO: 178471 - DNA, 25 bp, Artificial
  probe
  misc_feature (1)..(25): SEQ ID NO: 2277; WAN024E2G_at; Start 156; Stop 180
gatcatccataatttcaatagcaag

SEQ ID NO: 178472 - DNA, 25 bp, Artificial
  probe
  misc_feature (1)..(25): SEQ ID NO: 2277; WAN024E2G_at; Start 54; Stop 78
tatgccatgcagacacattaccaat

SEQ ID NO: 178473 - DNA, 25 bp, Artificial
  probe
  misc_feature (1)..(25): SEQ ID NO: 2277; WAN024E2G_at; Start 65; Stop 89
gacacattaccaatatctggatata

SEQ ID NO: 178474 - DNA, 25 bp, Artificial
  probe
  misc_feature (1)..(25): SEQ ID NO: 2277; WAN024E2G_at; Start 24; Stop 48
gaccaagataaaactcactatagat

SEQ ID NO: 178475 - DNA, 25 bp, Artificial
  probe
  misc_feature (1)..(25): SEQ ID NO: 2277; WAN024E2G_at; Start 20; Stop 44
tgatgaccaagataaaactcactat

SEQ ID NO: 178476 - DNA, 25 bp, Artificial
  probe
  misc_feature (1)..(25): SEQ ID NO: 2277; WAN024E2G_at; Start 11; Stop 35
gcgatggcatgatgaccaagataaa

SEQ ID NO: 178477 - DNA, 25 bp, Artificial
  probe
  misc_feature (1)..(25): SEQ ID NO: 2277; WAN024E2G_at; Start 119; Stop 143
tctatagccaaatatttttcgatgc

SEQ ID NO: 178478 - DNA, 25 bp, Artificial
  probe
  misc_feature (1)..(25): SEQ ID NO: 2633; WAN024E2H_at; Start 694; Stop 718
tgtgtcaaatgggaagaagctttcg

SEQ ID NO: 178479 - DNA, 25 bp, Artificial
  probe
  misc_feature (1)..(25): SEQ ID NO: 2633; WAN024E2H_at; Start 814; Stop 838
gaggcgcaagcttttctctatccac

SEQ ID NO: 178480 - DNA, 25 bp, Artificial
  probe
  misc_feature (1)..(25): SEQ ID NO: 2633; WAN024E2H_at; Start 495; Stop 519
tttggctatagaaaaagagattgac

SEQ ID NO: 178481 - DNA, 25 bp, Artificial
  probe
  misc_feature (1)..(25): SEQ ID NO: 2633; WAN024E2H_at; Start 753; Stop 777
cctaatcgaaatgtggtctgaaaat

SEQ ID NO: 178482 - DNA, 25 bp, Artificial
  probe
  misc_feature (1)..(25): SEQ ID NO: 2633; WAN024E2H_at; Start 611; Stop 635
tcgcagctctccatctcaaggatac

SEQ ID NO: 178483 - DNA, 25 bp, Artificial
  probe
  misc_feature (1)..(25): SEQ ID NO: 2633; WAN024E2H_at; Start 433; Stop 457
gctcaggtggtacttgctattgaaa

SEQ ID NO: 178484 - DNA, 25 bp, Artificial
  probe
  misc_feature (1)..(25): SEQ ID NO: 2633; WAN024E2H_at; Start 782; Stop 806
aaacagtagaagaaacacgcgcagc

SEQ ID NO: 178485 - DNA, 25 bp, Artificial
  probe
  misc_feature (1)..(25): SEQ ID NO: 2633; WAN024E2H_at; Start 414; Stop 438
ctgtgactgggctgaagaagctcag

SEQ ID NO: 178486 - DNA, 25 bp, Artificial
  probe
  misc_feature (1)..(25): SEQ ID NO: 2633; WAN024E2H_at; Start 310; Stop 334
caagacttgggagttcgtacgattc

SEQ ID NO: 178487 - DNA, 25 bp, Artificial
  probe
  misc_feature (1)..(25): SEQ ID NO: 2633; WAN024E2H_at; Start 139; Stop 163
cttgactggagtaaggaagaacgct

SEQ ID NO: 178488 - DNA, 25 bp, Artificial
  probe
  misc_feature (1)..(25): SEQ ID NO: 2633; WAN024E2H_at; Start 340; Stop 364
gctggttacgatgtttactatgagg

SEQ ID NO: 178489 - DNA, 25 bp, Artificial
  probe
  misc_feature (1)..(25): SEQ ID NO: 2633; WAN024E2H_at; Start 641; Stop 665
cagtgacagaaagttcaaagggcca

SEQ ID NO: 178490 - DNA, 25 bp, Artificial
  probe
  misc_feature (1)..(25): SEQ ID NO: 2633; WAN024E2H_at; Start 400; Stop 424
aatttgagaaaagcctgtgactggg

SEQ ID NO: 178491 - DNA, 25 bp, Artificial
  probe
  misc_feature (1)..(25): SEQ ID NO: 2633; WAN024E2H_at; Start 544; Stop 568
gatattggtaatgtgtctgcatggc

SEQ ID NO: 178492 - DNA, 25 bp, Artificial
  probe
  misc_feature (1)..(25): SEQ ID NO: 2633; WAN024E2H_at; Start 22; Stop 46
tatgaaaaggcaaccccaacacact

SEQ ID NO: 178493 - DNA, 25 bp, Artificial
  probe
  misc_feature (1)..(25): SEQ ID NO: 2633; WAN024E2H_at; Start 626; Stop 650
tcaaggatacttatgcagtgacaga

SEQ ID NO: 178494 - DNA, 25 bp, Artificial
  probe
  misc_feature (1)..(25): SEQ ID NO: 2633; WAN024E2H_at; Start 376; Stop 400
cagacacgccaacgttttatcaaaa

SEQ ID NO: 178495 - DNA, 25 bp, Artificial
  probe
  misc_feature (1)..(25): SEQ ID NO: 2633; WAN024E2H_at; Start 355; Stop 379
tactatgaggaaaagtcaccccaga

SEQ ID NO: 178496 - DNA, 25 bp, Artificial
  probe
  misc_feature (1)..(25): SEQ ID NO: 2633; WAN024E2H_at; Start 187; Stop 211
gaaactggtgttcgtattccttcta

SEQ ID NO: 178497 - DNA, 25 bp, Artificial
  probe
  misc_feature (1)..(25): SEQ ID NO: 2633; WAN024E2H_at; Start 67; Stop 91
aattttgccaaggagttaggctttg

SEQ ID NO: 178498 - DNA, 25 bp, Artificial
  probe
  misc_feature (1)..(25): SEQ ID NO: 2633; WAN024E2H_at; Start 214; Stop 238
tgtttttcaggccatcgtcgctacc

SEQ ID NO: 178499 - DNA, 25 bp, Artificial
  probe
  misc_feature (1)..(25): SEQ ID NO: 2633; WAN024E2H_at; Start 265; Stop 289
gaggaaaaatctctagaactcatga

SEQ ID NO: 178500 - DNA, 25 bp, Artificial
  probe
  misc_feature (1)..(25): SEQ ID NO: 2633; WAN024E2H_at; Start 154; Stop 178
gaagaacgcttggaagttgtcaaag

SEQ ID NO: 178501 - DNA, 25 bp, Artificial
  probe
  misc_feature (1)..(25): SEQ ID NO: 2633; WAN024E2H_at; Start 834; Stop 858
tccactcattaagaaagcaggtttg

SEQ ID NO: 178502 - DNA, 25 bp, Artificial
  probe
  misc_feature (1)..(25): SEQ ID NO: 2633; WAN024E2H_at; Start 121; Stop 145
gacgagcgtttagcaagacttgact

SEQ ID NO: 178503 - DNA, 25 bp, Artificial
  probe
  misc_feature (1)..(25): SEQ ID NO: 2633; WAN024E2H_at; Start 104; Stop 128
tgtctattgacgaacgtgacgagcg

SEQ ID NO: 178504 - DNA, 25 bp, Artificial
  probe
  misc_feature (1)..(25): SEQ ID NO: 2633; WAN024E2H_at; Start 295; Stop 319
tgtatcgaattagctcaagacttgg

SEQ ID NO: 178505 - DNA, 25 bp, Artificial
  probe
  misc_feature (1)..(25): SEQ ID NO: 2633; WAN024E2H_at; Start 741; Stop 765
taatggacctttcctaatcgaaatg

SEQ ID NO: 178506 - DNA, 25 bp, Artificial
  probe
  misc_feature (1)..(25): SEQ ID NO: 2633; WAN024E2H_at; Start 9; Stop 33
tccaattggaatttatgaaaaggca

SEQ ID NO: 178507 - DNA, 25 bp, Artificial
  probe
  misc_feature (1)..(25): SEQ ID NO: 2633; WAN024E2H_at; Start 592; Stop 616
tatcttggtcatcatgccatcgcag

SEQ ID NO: 178508 - DNA, 25 bp, Artificial
  probe
  misc_feature (1)..(25): SEQ ID NO: 2633; WAN024E2H_at; Start 448; Stop 472
gctattgaaattatggatgatcctt

SEQ ID NO: 178509 - DNA, 25 bp, Artificial
  probe
  misc_feature (1)..(25): SEQ ID NO: 2633; WAN024E2H_at; Start 656; Stop 680
caaagggccagttccgagatgtacc

SEQ ID NO: 178510 - DNA, 25 bp, Artificial
  probe
  misc_feature (1)..(25): SEQ ID NO: 2633; WAN024E2H_at; Start 513; Stop 537
gattgactctcccttcctctttgta

SEQ ID NO: 178511 - DNA, 25 bp, Artificial
  probe
  misc_feature (1)..(25): SEQ ID NO: 2633; WAN024E2H_at; Start 327; Stop 351
tacgattcaattagctggttacgat

SEQ ID NO: 178512 - DNA, 25 bp, Artificial
  probe
  misc_feature (1)..(25): SEQ ID NO: 6816; WAN024E2I_at; Start 32; Stop 56
agaacgatgaaggaggagaaaaaga

SEQ ID NO: 178513 - DNA, 25 bp, Artificial
  probe
  misc_feature (1)..(25): SEQ ID NO: 6816; WAN024E2I_at; Start 23; Stop 47
tcaaaagtaagaacgatgaaggagg

SEQ ID NO: 178514 - DNA, 25 bp, Artificial
  probe
  misc_feature (1)..(25): SEQ ID NO: 6816; WAN024E2I_at; Start 24; Stop 48
caaaagtaagaacgatgaaggagga

SEQ ID NO: 178515 - DNA, 25 bp, Artificial
  probe
  misc_feature (1)..(25): SEQ ID NO: 6816; WAN024E2I_at; Start 48; Stop 72
agaaaaagataaatttagctcctct

SEQ ID NO: 178516 - DNA, 25 bp, Artificial
  probe
  misc_feature (1)..(25): SEQ ID NO: 6816; WAN024E2I_at; Start 22; Stop 46
gtcaaaagtaagaacgatgaaggag

SEQ ID NO: 178517 - DNA, 25 bp, Artificial
  probe
  misc_feature (1)..(25): SEQ ID NO: 6816; WAN024E2I_at; Start 55; Stop 79
gataaatttagctcctctttttaca

SEQ ID NO: 178518 - DNA, 25 bp, Artificial
  probe
  misc_feature (1)..(25): SEQ ID NO: 6816; WAN024E2I_at; Start 36; Stop 60
cgatgaaggaggagaaaaagataaa

SEQ ID NO: 178519 - DNA, 25 bp, Artificial
  probe
  misc_feature (1)..(25): SEQ ID NO: 6816; WAN024E2I_at; Start 18; Stop 42
tatggtcaaaagtaagaacgatgaa

SEQ ID NO: 178520 - DNA, 25 bp, Artificial
  probe
  misc_feature (1)..(25): SEQ ID NO: 6816; WAN024E2I_at; Start 27; Stop 51
aagtaagaacgatgaaggaggagaa

SEQ ID NO: 178521 - DNA, 25 bp, Artificial
  probe
  misc_feature (1)..(25): SEQ ID NO: 6816; WAN024E2I_at; Start 30; Stop 54
taagaacgatgaaggaggagaaaaa

SEQ ID NO: 178522 - DNA, 25 bp, Artificial
  probe
  misc_feature (1)..(25): SEQ ID NO: 6816; WAN024E2I_at; Start 29; Stop 53
gtaagaacgatgaaggaggagaaaa

SEQ ID NO: 178523 - DNA, 25 bp, Artificial
  probe
  misc_feature (1)..(25): SEQ ID NO: 6816; WAN024E2I_at; Start 37; Stop 61
gatgaaggaggagaaaaagataaat

SEQ ID NO: 178524 - DNA, 25 bp, Artificial
  probe
  misc_feature (1)..(25): SEQ ID NO: 6816; WAN024E2I_at; Start 26; Stop 50
aaagtaagaacgatgaaggaggaga

SEQ ID NO: 178525 - DNA, 25 bp, Artificial
  probe
  misc_feature (1)..(25): SEQ ID NO: 6816; WAN024E2I_at; Start 56; Stop 80
ataaatttagctcctctttttacat

SEQ ID NO: 178526 - DNA, 25 bp, Artificial
  probe
  misc_feature (1)..(25): SEQ ID NO: 6816; WAN024E2I_at; Start 25; Stop 49
aaaagtaagaacgatgaaggaggag

SEQ ID NO: 178527 - DNA, 25 bp, Artificial
  probe
  misc_feature (1)..(25): SEQ ID NO: 6816; WAN024E2I_at; Start 19; Stop 43
atggtcaaaagtaagaacgatgaag

SEQ ID NO: 178528 - DNA, 25 bp, Artificial
  probe
  misc_feature (1)..(25): SEQ ID NO: 6816; WAN024E2I_at; Start 21; Stop 45
ggtcaaaagtaagaacgatgaagga

SEQ ID NO: 178529 - DNA, 25 bp, Artificial
  probe
  misc_feature (1)..(25): SEQ ID NO: 6816; WAN024E2I_at; Start 20; Stop 44
tggtcaaaagtaagaacgatgaagg

SEQ ID NO: 178530 - DNA, 25 bp, Artificial
  probe
  misc_feature (1)..(25): SEQ ID NO: 6816; WAN024E2I_at; Start 28; Stop 52
agtaagaacgatgaaggaggagaaa

SEQ ID NO: 178531 - DNA, 25 bp, Artificial
  probe
  misc_feature (1)..(25): SEQ ID NO: 6816; WAN024E2I_at; Start 33; Stop 57
gaacgatgaaggaggagaaaaagat

SEQ ID NO: 178532 - DNA, 25 bp, Artificial
  probe
  misc_feature (1)..(25): SEQ ID NO: 6816; WAN024E2I_at; Start 31; Stop 55
aagaacgatgaaggaggagaaaaag

SEQ ID NO: 178533 - DNA, 25 bp, Artificial
  probe
  misc_feature (1)..(25): SEQ ID NO: 6816; WAN024E2I_at; Start 47; Stop 71
gagaaaaagataaatttagctcctc

SEQ ID NO: 178534 - DNA, 25 bp, Artificial
  probe
  misc_feature (1)..(25): SEQ ID NO: 6816; WAN024E2I_at; Start 34; Stop 58
aacgatgaaggaggagaaaaagata

SEQ ID NO: 178535 - DNA, 25 bp, Artificial
  probe
  misc_feature (1)..(25): SEQ ID NO: 6816; WAN024E2I_at; Start 35; Stop 59
acgatgaaggaggagaaaaagataa

SEQ ID NO: 178536 - DNA, 25 bp, Artificial
  probe
  misc_feature (1)..(25): SEQ ID NO: 4928; WAN024E2J_at; Start 184; Stop 208
taccatctagatcagtcactaccat

SEQ ID NO: 178537 - DNA, 25 bp, Artificial
  probe
  misc_feature (1)..(25): SEQ ID NO: 4928; WAN024E2J_at; Start 28; Stop 52
ttgttccgtagaaaggaatatcacg

SEQ ID NO: 178538 - DNA, 25 bp, Artificial
  probe
  misc_feature (1)..(25): SEQ ID NO: 4928; WAN024E2J_at; Start 39; Stop 63
aaaggaatatcacgacctgcctgag

SEQ ID NO: 178539 - DNA, 25 bp, Artificial
  probe
  misc_feature (1)..(25): SEQ ID NO: 4928; WAN024E2J_at; Start 216; Stop 240
ggtgtcaattcgtcataatccacgc

SEQ ID NO: 178540 - DNA, 25 bp, Artificial
  probe
  misc_feature (1)..(25): SEQ ID NO: 4928; WAN024E2J_at; Start 156; Stop 180
gatggtcttaaatccccttctagga

SEQ ID NO: 178541 - DNA, 25 bp, Artificial
  probe
  misc_feature (1)..(25): SEQ ID NO: 4928; WAN024E2J_at; Start 128; Stop 152
taattgcacatgagttgggaggtcg

SEQ ID NO: 178542 - DNA, 25 bp, Artificial
  probe
  misc_feature (1)..(25): SEQ ID NO: 4928; WAN024E2J_at; Start 20; Stop 44
tgcatgggttgttccgtagaaagga

SEQ ID NO: 178543 - DNA, 25 bp, Artificial
  probe
  misc_feature (1)..(25): SEQ ID NO: 4928; WAN024E2J_at; Start 206; Stop 230
catgttttcaggtgtcaattcgtca

SEQ ID NO: 178544 - DNA, 25 bp, Artificial
  probe
  misc_feature (1)..(25): SEQ ID NO: 4928; WAN024E2J_at; Start 18; Stop 42
tctgcatgggttgttccgtagaaag

SEQ ID NO: 178545 - DNA, 25 bp, Artificial
  probe
  misc_feature (1)..(25): SEQ ID NO: 4928; WAN024E2J_at; Start 122; Stop 146
cttatataattgcacatgagttggg

SEQ ID NO: 178546 - DNA, 25 bp, Artificial
  probe
  misc_feature (1)..(25): SEQ ID NO: 4928; WAN024E2J_at; Start 96; Stop 120
accacactaccaatttctgaccaag

SEQ ID NO: 178547 - DNA, 25 bp, Artificial
  probe
  misc_feature (1)..(25): SEQ ID NO: 4928; WAN024E2J_at; Start 75; Stop 99
gcttctgtcgaatgggtgtgaacca

SEQ ID NO: 178548 - DNA, 25 bp, Artificial
  probe
  misc_feature (1)..(25): SEQ ID NO: 4928; WAN024E2J_at; Start 66; Stop 90
caaccaacagcttctgtcgaatggg

SEQ ID NO: 178549 - DNA, 25 bp, Artificial
  probe
  misc_feature (1)..(25): SEQ ID NO: 4928; WAN024E2J_at; Start 213; Stop 237
tcaggtgtcaattcgtcataatcca

SEQ ID NO: 178550 - DNA, 25 bp, Artificial
  probe
  misc_feature (1)..(25): SEQ ID NO: 4928; WAN024E2J_at; Start 44; Stop 68
aatatcacgacctgcctgagcccaa

SEQ ID NO: 178551 - DNA, 25 bp, Artificial
  probe
  misc_feature (1)..(25): SEQ ID NO: 4928; WAN024E2J_at; Start 15; Stop 39
taatctgcatgggttgttccgtaga

SEQ ID NO: 178552 - DNA, 25 bp, Artificial
  probe
  misc_feature (1)..(25): SEQ ID NO: 4928; WAN024E2J_at; Start 11; Stop 35
gaaataatctgcatgggttgttccg

SEQ ID NO: 178553 - DNA, 25 bp, Artificial
  probe
  misc_feature (1)..(25): SEQ ID NO: 4928; WAN024E2J_at; Start 196; Stop 220
cagtcactaccatgttttcaggtgt

SEQ ID NO: 178554 - DNA, 25 bp, Artificial
  probe
  misc_feature (1)..(25): SEQ ID NO: 4928; WAN024E2J_at; Start 78; Stop 102
tctgtcgaatgggtgtgaaccacac

SEQ ID NO: 178555 - DNA, 25 bp, Artificial
  probe
  misc_feature (1)..(25): SEQ ID NO: 4928; WAN024E2J_at; Start 6; Stop 30
ccgtagaaataatctgcatgggttg

SEQ ID NO: 178556 - DNA, 25 bp, Artificial
  probe
  misc_feature (1)..(25): SEQ ID NO: 4928; WAN024E2J_at; Start 2; Stop 26
tgaaccgtagaaataatctgcatgg

SEQ ID NO: 178557 - DNA, 25 bp, Artificial
  probe
  misc_feature (1)..(25): SEQ ID NO: 4928; WAN024E2J_at; Start 70; Stop 94
caacagcttctgtcgaatgggtgtg

SEQ ID NO: 178558 - DNA, 25 bp, Artificial
  probe
  misc_feature (1)..(25): SEQ ID NO: 4928; WAN024E2J_at; Start 146; Stop 170
gaggtcggaagatggtcttaaatcc

SEQ ID NO: 178559 - DNA, 25 bp, Artificial
  probe
  misc_feature (1)..(25): SEQ ID NO: 4928; WAN024E2J_at; Start 60; Stop 84
tgagcccaaccaacagcttctgtcg

SEQ ID NO: 178560 - DNA, 25 bp, Artificial
  probe
  misc_feature (1)..(25): SEQ ID NO: 4928; WAN024E2J_at; Start 41; Stop 65
aggaatatcacgacctgcctgagcc

SEQ ID NO: 178561 - DNA, 25 bp, Artificial
  probe
  misc_feature (1)..(25): SEQ ID NO: 4928; WAN024E2J_at; Start 226; Stop 250
cgtcataatccacgcctgatggttt

SEQ ID NO: 178562 - DNA, 25 bp, Artificial
  probe
  misc_feature (1)..(25): SEQ ID NO: 4928; WAN024E2J_at; Start 84; Stop 108
gaatgggtgtgaaccacactaccaa

SEQ ID NO: 178563 - DNA, 25 bp, Artificial
  probe
  misc_feature (1)..(25): SEQ ID NO: 4928; WAN024E2J_at; Start 224; Stop 248
ttcgtcataatccacgcctgatggt

SEQ ID NO: 178564 - DNA, 25 bp, Artificial
  probe
  misc_feature (1)..(25): SEQ ID NO: 4928; WAN024E2J_at; Start 219; Stop 243
gtcaattcgtcataatccacgcctg

SEQ ID NO: 178565 - DNA, 25 bp, Artificial
  probe
  misc_feature (1)..(25): SEQ ID NO: 4928; WAN024E2J_at; Start 176; Stop 200
taggatcttaccatctagatcagtc

SEQ ID NO: 178566 - DNA, 25 bp, Artificial
  probe
  misc_feature (1)..(25): SEQ ID NO: 4928; WAN024E2J_at; Start 193; Stop 217
gatcagtcactaccatgttttcagg

SEQ ID NO: 178567 - DNA, 25 bp, Artificial
  probe
  misc_feature (1)..(25): SEQ ID NO: 4928; WAN024E2J_at; Start 90; Stop 114
gtgtgaaccacactaccaatttctg

SEQ ID NO: 178568 - DNA, 25 bp, Artificial
  probe
  misc_feature (1)..(25): SEQ ID NO: 4928; WAN024E2J_at; Start 164; Stop 188
taaatccccttctaggatcttacca

SEQ ID NO: 178569 - DNA, 25 bp, Artificial
  probe
  misc_feature (1)..(25): SEQ ID NO: 4928; WAN024E2J_at; Start 200; Stop 224
cactaccatgttttcaggtgtcaat

SEQ ID NO: 178570 - DNA, 25 bp, Artificial
  probe
  misc_feature (1)..(25): SEQ ID NO: 1227; WAN024E2K_at; Start 353; Stop 377
caacccatgcagattatttctacgg

SEQ ID NO: 178571 - DNA, 25 bp, Artificial
  probe
  misc_feature (1)..(25): SEQ ID NO: 1227; WAN024E2K_at; Start 285; Stop 309
ggttcacacccattcgacagaagct

SEQ ID NO: 178572 - DNA, 25 bp, Artificial
  probe
  misc_feature (1)..(25): SEQ ID NO: 1227; WAN024E2K_at; Start 2; Stop 26
tgaatcaagtaatcaatgctatgcg

SEQ ID NO: 178573 - DNA, 25 bp, Artificial
  probe
  misc_feature (1)..(25): SEQ ID NO: 1227; WAN024E2K_at; Start 409; Stop 433
gacgaagtagaagtggcctatgaaa

SEQ ID NO: 178574 - DNA, 25 bp, Artificial
  probe
  misc_feature (1)..(25): SEQ ID NO: 1227; WAN024E2K_at; Start 231; Stop 255
cgacctcccaactcatgtgcaatta

SEQ ID NO: 178575 - DNA, 25 bp, Artificial
  probe
  misc_feature (1)..(25): SEQ ID NO: 1227; WAN024E2K_at; Start 12; Stop 36
aatcaatgctatgcgtaaacgagtc

SEQ ID NO: 178576 - DNA, 25 bp, Artificial
  probe
  misc_feature (1)..(25): SEQ ID NO: 1227; WAN024E2K_at; Start 341; Stop 365
ctttctacggaacaacccatgcaga

SEQ ID NO: 178577 - DNA, 25 bp, Artificial
  probe
  misc_feature (1)..(25): SEQ ID NO: 1227; WAN024E2K_at; Start 661; Stop 685
taccaacgtaaacatggaccaaatg

SEQ ID NO: 178578 - DNA, 25 bp, Artificial
  probe
  misc_feature (1)..(25): SEQ ID NO: 1227; WAN024E2K_at; Start 402; Stop 426
gaccaaggacgaagtagaagtggcc

SEQ ID NO: 178579 - DNA, 25 bp, Artificial
  probe
  misc_feature (1)..(25): SEQ ID NO: 1227; WAN024E2K_at; Start 591; Stop 615
gatgaatcgctttacagaacaaatc

SEQ ID NO: 178580 - DNA, 25 bp, Artificial
  probe
  misc_feature (1)..(25): SEQ ID NO: 1227; WAN024E2K_at; Start 125; Stop 149
ttgttatcaaaccatcaggcgtgga

SEQ ID NO: 178581 - DNA, 25 bp, Artificial
  probe
  misc_feature (1)..(25): SEQ ID NO: 1227; WAN024E2K_at; Start 136; Stop 160
ccatcaggcgtggattatgacgaat

SEQ ID NO: 178582 - DNA, 25 bp, Artificial
  probe
  misc_feature (1)..(25): SEQ ID NO: 1227; WAN024E2K_at; Start 367; Stop 391
tatttctacggttcaatcccttgcg

SEQ ID NO: 178583 - DNA, 25 bp, Artificial
  probe
  misc_feature (1)..(25): SEQ ID NO: 1227; WAN024E2K_at; Start 151; Stop 175
tatgacgaattgacacctgaaaaca

SEQ ID NO: 178584 - DNA, 25 bp, Artificial
  probe
  misc_feature (1)..(25): SEQ ID NO: 1227; WAN024E2K_at; Start 64; Stop 88
catggacttgtcaaatttacctggg

SEQ ID NO: 178585 - DNA, 25 bp, Artificial
  probe
  misc_feature (1)..(25): SEQ ID NO: 1227; WAN024E2K_at; Start 577; Stop 601
gaggaagtatcaaagatgaatcgct

SEQ ID NO: 178586 - DNA, 25 bp, Artificial
  probe
  misc_feature (1)..(25): SEQ ID NO: 1227; WAN024E2K_at; Start 375; Stop 399
cggttcaatcccttgcgcccgtagt

SEQ ID NO: 178587 - DNA, 25 bp, Artificial
  probe
  misc_feature (1)..(25): SEQ ID NO: 1227; WAN024E2K_at; Start 166; Stop 190
cctgaaaacatggtagtgactgatc

SEQ ID NO: 178588 - DNA, 25 bp, Artificial
  probe
  misc_feature (1)..(25): SEQ ID NO: 1227; WAN024E2K_at; Start 469; Stop 493
catcgcggacttaacccggttgaag

SEQ ID NO: 178589 - DNA, 25 bp, Artificial
  probe
  misc_feature (1)..(25): SEQ ID NO: 1227; WAN024E2K_at; Start 436; Stop 460
gatactggcctggttatcgtagaag

SEQ ID NO: 178590 - DNA, 25 bp, Artificial
  probe
  misc_feature (1)..(25): SEQ ID NO: 1227; WAN024E2K_at; Start 52; Stop 76
tcattgccaaaacatggacttgtca

SEQ ID NO: 178591 - DNA, 25 bp, Artificial
  probe
  misc_feature (1)..(25): SEQ ID NO: 1227; WAN024E2K_at; Start 213; Stop 237
ggatttaagaccatcttccgacctc

SEQ ID NO: 178592 - DNA, 25 bp, Artificial
  probe
  misc_feature (1)..(25): SEQ ID NO: 1227; WAN024E2K_at; Start 269; Stop 293
cagaaattggtagtgtggttcacac

SEQ ID NO: 178593 - DNA, 25 bp, Artificial
  probe
  misc_feature (1)..(25): SEQ ID NO: 1227; WAN024E2K_at; Start 316; Stop 340
tgggctcaggcaggtcgtgatattc

SEQ ID NO: 178594 - DNA, 25 bp, Artificial
  probe
  misc_feature (1)..(25): SEQ ID NO: 1227; WAN024E2K_at; Start 109; Stop 133
cgcgaactcggtgtcattgttatca

SEQ ID NO: 178595 - DNA, 25 bp, Artificial
  probe
  misc_feature (1)..(25): SEQ ID NO: 1227; WAN024E2K_at; Start 387; Stop 411
ttgcgcccgtagtttgaccaaggac

SEQ ID NO: 178596 - DNA, 25 bp, Artificial
  probe
  misc_feature (1)..(25): SEQ ID NO: 1227; WAN024E2K_at; Start 183; Stop 207
gactgatctagatggtaagatccta

SEQ ID NO: 178597 - DNA, 25 bp, Artificial
  probe
  misc_feature (1)..(25): SEQ ID NO: 1227; WAN024E2K_at; Start 425; Stop 449
cctatgaaaaagatactggcctggt

SEQ ID NO: 178598 - DNA, 25 bp, Artificial
  probe
  misc_feature (1)..(25): SEQ ID NO: 1227; WAN024E2K_at; Start 25; Stop 49
cgtaaacgagtctgtgatgccaatc

SEQ ID NO: 178599 - DNA, 25 bp, Artificial
  probe
  misc_feature (1)..(25): SEQ ID NO: 1227; WAN024E2K_at; Start 484; Stop 508
ccggttgaagtaccaggaattgttg

SEQ ID NO: 178600 - DNA, 25 bp, Artificial
  probe
  misc_feature (1)..(25): SEQ ID NO: 1227; WAN024E2K_at; Start 37; Stop 61
tgtgatgccaatcaatcattgccaa

SEQ ID NO: 178601 - DNA, 25 bp, Artificial
  probe
  misc_feature (1)..(25): SEQ ID NO: 1227; WAN024E2K_at; Start 511; Stop 535
cgcaatcacggtccattcacctggg

SEQ ID NO: 178602 - DNA, 25 bp, Artificial
  probe
  misc_feature (1)..(25): SEQ ID NO: 1227; WAN024E2K_at; Start 499; Stop 523
ggaattgttgtacgcaatcacggtc

SEQ ID NO: 178603 - DNA, 25 bp, Artificial
  probe
  misc_feature (1)..(25): SEQ ID NO: 1227; WAN024E2K_at; Start 326; Stop 350
caggtcgtgatattcctttctacgg

SEQ ID NO: 178604 - DNA, 25 bp, Artificial
  probe
  misc_feature (1)..(25): SEQ ID NO: 3059; WAN024E2L_at; Start 204; Stop 228
caatataagacgaaataagactaga

SEQ ID NO: 178605 - DNA, 25 bp, Artificial
  probe
  misc_feature (1)..(25): SEQ ID NO: 3059; WAN024E2L_at; Start 154; Stop 178
tataagtgtttgaacctcttcttgg

SEQ ID NO: 178606 - DNA, 25 bp, Artificial
  probe
  misc_feature (1)..(25): SEQ ID NO: 3059; WAN024E2L_at; Start 8; Stop 32
ctcctttggatataattgttatctt

SEQ ID NO: 178607 - DNA, 25 bp, Artificial
  probe
  misc_feature (1)..(25): SEQ ID NO: 3059; WAN024E2L_at; Start 127; Stop 151
aaaagcttgaactactatttcttga

SEQ ID NO: 178608 - DNA, 25 bp, Artificial
  probe
  misc_feature (1)..(25): SEQ ID NO: 3059; WAN024E2L_at; Start 176; Stop 200
tggaacttactagccaacttgctgt

SEQ ID NO: 178609 - DNA, 25 bp, Artificial
  probe
  misc_feature (1)..(25): SEQ ID NO: 3059; WAN024E2L_at; Start 39; Stop 63
tagtataccacccttcaaaacacta

SEQ ID NO: 178610 - DNA, 25 bp, Artificial
  probe
  misc_feature (1)..(25): SEQ ID NO: 3059; WAN024E2L_at; Start 160; Stop 184
tgtttgaacctcttcttggaactta

SEQ ID NO: 178611 - DNA, 25 bp, Artificial
  probe
  misc_feature (1)..(25): SEQ ID NO: 3059; WAN024E2L_at; Start 178; Stop 202
gaacttactagccaacttgctgtct

SEQ ID NO: 178612 - DNA, 25 bp, Artificial
  probe
  misc_feature (1)..(25): SEQ ID NO: 3059; WAN024E2L_at; Start 90; Stop 114
gtgttcatcattggactgtccttca

SEQ ID NO: 178613 - DNA, 25 bp, Artificial
  probe
  misc_feature (1)..(25): SEQ ID NO: 3059; WAN024E2L_at; Start 30; Stop 54
ctttgagattagtataccacccttc

SEQ ID NO: 178614 - DNA, 25 bp, Artificial
  probe
  misc_feature (1)..(25): SEQ ID NO: 3059; WAN024E2L_at; Start 196; Stop 220
gctgtctacaatataagacgaaata

SEQ ID NO: 178615 - DNA, 25 bp, Artificial
  probe
  misc_feature (1)..(25): SEQ ID NO: 3059; WAN024E2L_at; Start 135; Stop 159
gaactactatttcttgatttataag

SEQ ID NO: 178616 - DNA, 25 bp, Artificial
  probe
  misc_feature (1)..(25): SEQ ID NO: 3059; WAN024E2L_at; Start 113; Stop 137
caaatatcttccaaaaaagcttgaa

SEQ ID NO: 178617 - DNA, 25 bp, Artificial
  probe
  misc_feature (1)..(25): SEQ ID NO: 3059; WAN024E2L_at; Start 34; Stop 58
gagattagtataccacccttcaaaa

SEQ ID NO: 178618 - DNA, 25 bp, Artificial
  probe
  misc_feature (1)..(25): SEQ ID NO: 3059; WAN024E2L_at; Start 165; Stop 189
gaacctcttcttggaacttactagc

SEQ ID NO: 178619 - DNA, 25 bp, Artificial
  probe
  misc_feature (1)..(25): SEQ ID NO: 3059; WAN024E2L_at; Start 119; Stop 143
tcttccaaaaaagcttgaactacta

SEQ ID NO: 178620 - DNA, 25 bp, Artificial
  probe
  misc_feature (1)..(25): SEQ ID NO: 3059; WAN024E2L_at; Start 98; Stop 122
cattggactgtccttcaaatatctt

SEQ ID NO: 178621 - DNA, 25 bp, Artificial
  probe
  misc_feature (1)..(25): SEQ ID NO: 3059; WAN024E2L_at; Start 36; Stop 60
gattagtataccacccttcaaaaca

SEQ ID NO: 178622 - DNA, 25 bp, Artificial
  probe
  misc_feature (1)..(25): SEQ ID NO: 3059; WAN024E2L_at; Start 103; Stop 127
gactgtccttcaaatatcttccaaa

SEQ ID NO: 178623 - DNA, 25 bp, Artificial
  probe
  misc_feature (1)..(25): SEQ ID NO: 3059; WAN024E2L_at; Start 156; Stop 180
taagtgtttgaacctcttcttggaa

SEQ ID NO: 178624 - DNA, 25 bp, Artificial
  probe
  misc_feature (1)..(25): SEQ ID NO: 3059; WAN024E2L_at; Start 81; Stop 105
cacaggtttgtgttcatcattggac

SEQ ID NO: 178625 - DNA, 25 bp, Artificial
  probe
  misc_feature (1)..(25): SEQ ID NO: 3059; WAN024E2L_at; Start 170; Stop 194
tcttcttggaacttactagccaact

SEQ ID NO: 178626 - DNA, 25 bp, Artificial
  probe
  misc_feature (1)..(25): SEQ ID NO: 3059; WAN024E2L_at; Start 191; Stop 215
aacttgctgtctacaatataagacg

SEQ ID NO: 178627 - DNA, 25 bp, Artificial
  probe
  misc_feature (1)..(25): SEQ ID NO: 3059; WAN024E2L_at; Start 68; Stop 92
agaccaagaaaaacacaggtttgtg

SEQ ID NO: 178628 - DNA, 25 bp, Artificial
  probe
  misc_feature (1)..(25): SEQ ID NO: 3059; WAN024E2L_at; Start 215; Stop 239
gaaataagactagaaagattttcac

SEQ ID NO: 178629 - DNA, 25 bp, Artificial
  probe
  misc_feature (1)..(25): SEQ ID NO: 3059; WAN024E2L_at; Start 229; Stop 253
aagattttcactgaaacttttgctc

SEQ ID NO: 178630 - DNA, 25 bp, Artificial
  probe
  misc_feature (1)..(25): SEQ ID NO: 3059; WAN024E2L_at; Start 261; Stop 285
gaaatatattgtgtttaagatagtc

SEQ ID NO: 178631 - DNA, 25 bp, Artificial
  probe
  misc_feature (1)..(25): SEQ ID NO: 3059; WAN024E2L_at; Start 183; Stop 207
tactagccaacttgctgtctacaat

SEQ ID NO: 178632 - DNA, 25 bp, Artificial
  probe
  misc_feature (1)..(25): SEQ ID NO: 3059; WAN024E2L_at; Start 27; Stop 51
tatctttgagattagtataccaccc

SEQ ID NO: 178633 - DNA, 25 bp, Artificial
  probe
  misc_feature (1)..(25): SEQ ID NO: 3059; WAN024E2L_at; Start 209; Stop 233
taagacgaaataagactagaaagat

SEQ ID NO: 178634 - DNA, 25 bp, Artificial
  probe
  misc_feature (1)..(25): SEQ ID NO: 3059; WAN024E2L_at; Start 188; Stop 212
gccaacttgctgtctacaatataag

SEQ ID NO: 178635 - DNA, 25 bp, Artificial
  probe
  misc_feature (1)..(25): SEQ ID NO: 3059; WAN024E2L_at; Start 86; Stop 110
gtttgtgttcatcattggactgtcc

SEQ ID NO: 178636 - DNA, 25 bp, Artificial
  probe
  misc_feature (1)..(25): SEQ ID NO: 3059; WAN024E2L_at; Start 147; Stop 171
cttgatttataagtgtttgaacctc

SEQ ID NO: 178637 - DNA, 25 bp, Artificial
  probe
  misc_feature (1)..(25): SEQ ID NO: 3059; WAN024E2L_at; Start 222; Stop 246
gactagaaagattttcactgaaact

SEQ ID NO: 178638 - DNA, 25 bp, Artificial
  probe
  misc_feature (1)..(25): SEQ ID NO: 2635; WAN024E2M_at; Start 400; Stop 424
ctaactttggaacaatatcaggtga

SEQ ID NO: 178639 - DNA, 25 bp, Artificial
  probe
  misc_feature (1)..(25): SEQ ID NO: 2635; WAN024E2M_at; Start 1333; Stop 1357
tttccaaatgagcaaattgacactg

SEQ ID NO: 178640 - DNA, 25 bp, Artificial
  probe
  misc_feature (1)..(25): SEQ ID NO: 2635; WAN024E2M_at; Start 349; Stop 373
gaggtatctaggaatactgttctca

SEQ ID NO: 178641 - DNA, 25 bp, Artificial
  probe
  misc_feature (1)..(25): SEQ ID NO: 2635; WAN024E2M_at; Start 674; Stop 698
taacttttatgttgcaggttctacc

SEQ ID NO: 178642 - DNA, 25 bp, Artificial
  probe
  misc_feature (1)..(25): SEQ ID NO: 2635; WAN024E2M_at; Start 1457; Stop 1481
gggttaatcctatccttgaagcaga

SEQ ID NO: 178643 - DNA, 25 bp, Artificial
  probe
  misc_feature (1)..(25): SEQ ID NO: 2635; WAN024E2M_at; Start 1597; Stop 1621
gctagtaagttccaagaagaggttc

SEQ ID NO: 178644 - DNA, 25 bp, Artificial
  probe
  misc_feature (1)..(25): SEQ ID NO: 2635; WAN024E2M_at; Start 189; Stop 213
tcacttaacggaagagcagagagat

SEQ ID NO: 178645 - DNA, 25 bp, Artificial
  probe
  misc_feature (1)..(25): SEQ ID NO: 2635; WAN024E2M_at; Start 1299; Stop 1323
ttcgagacttttgctgaaacaatgc

SEQ ID NO: 178646 - DNA, 25 bp, Artificial
  probe
  misc_feature (1)..(25): SEQ ID NO: 2635; WAN024E2M_at; Start 429; Stop 453
gcaagtgagcaagtcacagggatac

SEQ ID NO: 178647 - DNA, 25 bp, Artificial
  probe
  misc_feature (1)..(25): SEQ ID NO: 2635; WAN024E2M_at; Start 987; Stop 1011
ccgaatggagattgagaacaaggat

SEQ ID NO: 178648 - DNA, 25 bp, Artificial
  probe
  misc_feature (1)..(25): SEQ ID NO: 2635; WAN024E2M_at; Start 1198; Stop 1222
gcctatttgacgattcatattggag

SEQ ID NO: 178649 - DNA, 25 bp, Artificial
  probe
  misc_feature (1)..(25): SEQ ID NO: 2635; WAN024E2M_at; Start 174; Stop 198
tccacgaattggtattcacttaacg

SEQ ID NO: 178650 - DNA, 25 bp, Artificial
  probe
  misc_feature (1)..(25): SEQ ID NO: 2635; WAN024E2M_at; Start 972; Stop 996
ttttgaatcacaaatccgaatggag

SEQ ID NO: 178651 - DNA, 25 bp, Artificial
  probe
  misc_feature (1)..(25): SEQ ID NO: 2635; WAN024E2M_at; Start 204; Stop 228
gcagagagatgcttgttgtaaacta

SEQ ID NO: 178652 - DNA, 25 bp, Artificial
  probe
  misc_feature (1)..(25): SEQ ID NO: 2635; WAN024E2M_at; Start 1179; Stop 1203
gctaacagacgatgatattgcctat

SEQ ID NO: 178653 - DNA, 25 bp, Artificial
  probe
  misc_feature (1)..(25): SEQ ID NO: 2635; WAN024E2M_at; Start 1574; Stop 1598
cttatattgtagacagcaagttggc

SEQ ID NO: 178654 - DNA, 25 bp, Artificial
  probe
  misc_feature (1)..(25): SEQ ID NO: 2635; WAN024E2M_at; Start 1426; Stop 1450
gatgatttggatagcagatttccga

SEQ ID NO: 178655 - DNA, 25 bp, Artificial
  probe
  misc_feature (1)..(25): SEQ ID NO: 2635; WAN024E2M_at; Start 2; Stop 26
tggtactggataaggcaagttgtga

SEQ ID NO: 178656 - DNA, 25 bp, Artificial
  probe
  misc_feature (1)..(25): SEQ ID NO: 2635; WAN024E2M_at; Start 245; Stop 269
cgtacgattatatcatgagtgcgca

SEQ ID NO: 178657 - DNA, 25 bp, Artificial
  probe
  misc_feature (1)..(25): SEQ ID NO: 2635; WAN024E2M_at; Start 1364; Stop 1388
caacagaacaatttaagagtgtgga

SEQ ID NO: 178658 - DNA, 25 bp, Artificial
  probe
  misc_feature (1)..(25): SEQ ID NO: 2635; WAN024E2M_at; Start 838; Stop 862
gaaatttctttgtcaggacttgaag

SEQ ID NO: 178659 - DNA, 25 bp, Artificial
  probe
  misc_feature (1)..(25): SEQ ID NO: 2635; WAN024E2M_at; Start 859; Stop 883
gaagtttctcttgtagctgttctcc

SEQ ID NO: 178660 - DNA, 25 bp, Artificial
  probe
  misc_feature (1)..(25): SEQ ID NO: 2635; WAN024E2M_at; Start 1016; Stop 1040
tgttacgaaatttgatgatccactg

SEQ ID NO: 178661 - DNA, 25 bp, Artificial
  probe
  misc_feature (1)..(25): SEQ ID NO: 2635; WAN024E2M_at; Start 1147; Stop 1171
gcggaaattttagaaggagcatggt

SEQ ID NO: 178662 - DNA, 25 bp, Artificial
  probe
  misc_feature (1)..(25): SEQ ID NO: 2635; WAN024E2M_at; Start 1397; Stop 1421
cacaagttgatgtagtgattactac

SEQ ID NO: 178663 - DNA, 25 bp, Artificial
  probe
  misc_feature (1)..(25): SEQ ID NO: 2635; WAN024E2M_at; Start 226; Stop 250
ctattatcggaagtagattcgtacg

SEQ ID NO: 178664 - DNA, 25 bp, Artificial
  probe
  misc_feature (1)..(25): SEQ ID NO: 2635; WAN024E2M_at; Start 260; Stop 284
tgagtgcgcatgaacgtatgatgat

SEQ ID NO: 178665 - DNA, 25 bp, Artificial
  probe
  misc_feature (1)..(25): SEQ ID NO: 2635; WAN024E2M_at; Start 49; Stop 73
caagaaacgtccaaaacgattatgg

SEQ ID NO: 178666 - DNA, 25 bp, Artificial
  probe
  misc_feature (1)..(25): SEQ ID NO: 2635; WAN024E2M_at; Start 148; Stop 172
gacgaggcgcttcacatcattagta

SEQ ID NO: 178667 - DNA, 25 bp, Artificial
  probe
  misc_feature (1)..(25): SEQ ID NO: 2635; WAN024E2M_at; Start 1272; Stop 1296
tctcgtttgtgatgaaggtgttgcg

SEQ ID NO: 178668 - DNA, 25 bp, Artificial
  probe
  misc_feature (1)..(25): SEQ ID NO: 2635; WAN024E2M_at; Start 1165; Stop 1189
gcatggtttattcggctaacagacg

SEQ ID NO: 178669 - DNA, 25 bp, Artificial
  probe
  misc_feature (1)..(25): SEQ ID NO: 2635; WAN024E2M_at; Start 1127; Stop 1151
ttttagtcactagaaaatctgcgga

SEQ ID NO: 178670 - DNA, 25 bp, Artificial
  probe
  misc_feature (1)..(25): SEQ ID NO: 2635; WAN024E2M_at; Start 1094; Stop 1118
caaaacaaattcgatccaagtatgg

SEQ ID NO: 178671 - DNA, 25 bp, Artificial
  probe
  misc_feature (1)..(25): SEQ ID NO: 2635; WAN024E2M_at; Start 727; Stop 751
gaacagtatcaagaaagacatcagg

SEQ ID NO: 178672 - DNA, 25 bp, Artificial
  probe
  misc_feature (1)..(25): SEQ ID NO: 7164; WAN024E2N_at; Start 46; Stop 70
ggtcaaatgattctactgcatgaac

SEQ ID NO: 178673 - DNA, 25 bp, Artificial
  probe
  misc_feature (1)..(25): SEQ ID NO: 7164; WAN024E2N_at; Start 7; Stop 31
catcagcaccgttcactgggagagt

SEQ ID NO: 178674 - DNA, 25 bp, Artificial
  probe
  misc_feature (1)..(25): SEQ ID NO: 7164; WAN024E2N_at; Start 9; Stop 33
tcagcaccgttcactgggagagtta

SEQ ID NO: 178675 - DNA, 25 bp, Artificial
  probe
  misc_feature (1)..(25): SEQ ID NO: 7164; WAN024E2N_at; Start 39; Stop 63
caagtacggtcaaatgattctactg

SEQ ID NO: 178676 - DNA, 25 bp, Artificial
  probe
  misc_feature (1)..(25): SEQ ID NO: 7164; WAN024E2N_at; Start 27; Stop 51
agagttaccaagcaagtacggtcaa

SEQ ID NO: 178677 - DNA, 25 bp, Artificial
  probe
  misc_feature (1)..(25): SEQ ID NO: 7164; WAN024E2N_at; Start 17; Stop 41
gttcactgggagagttaccaagcaa

SEQ ID NO: 178678 - DNA, 25 bp, Artificial
  probe
  misc_feature (1)..(25): SEQ ID NO: 7164; WAN024E2N_at; Start 30; Stop 54
gttaccaagcaagtacggtcaaatg

SEQ ID NO: 178679 - DNA, 25 bp, Artificial
  probe
  misc_feature (1)..(25): SEQ ID NO: 7164; WAN024E2N_at; Start 12; Stop 36
gcaccgttcactgggagagttacca

SEQ ID NO: 178680 - DNA, 25 bp, Artificial
  probe
  misc_feature (1)..(25): SEQ ID NO: 7164; WAN024E2N_at; Start 14; Stop 38
accgttcactgggagagttaccaag

SEQ ID NO: 178681 - DNA, 25 bp, Artificial
  probe
  misc_feature (1)..(25): SEQ ID NO: 7164; WAN024E2N_at; Start 32; Stop 56
taccaagcaagtacggtcaaatgat

SEQ ID NO: 178682 - DNA, 25 bp, Artificial
  probe
  misc_feature (1)..(25): SEQ ID NO: 7164; WAN024E2N_at; Start 26; Stop 50
gagagttaccaagcaagtacggtca

SEQ ID NO: 178683 - DNA, 25 bp, Artificial
  probe
  misc_feature (1)..(25): SEQ ID NO: 7164; WAN024E2N_at; Start 2; Stop 26
tgtctcatcagcaccgttcactggg

SEQ ID NO: 178684 - DNA, 25 bp, Artificial
  probe
  misc_feature (1)..(25): SEQ ID NO: 7164; WAN024E2N_at; Start 47; Stop 71
gtcaaatgattctactgcatgaact

SEQ ID NO: 178685 - DNA, 25 bp, Artificial
  probe
  misc_feature (1)..(25): SEQ ID NO: 7164; WAN024E2N_at; Start 10; Stop 34
cagcaccgttcactgggagagttac

SEQ ID NO: 178686 - DNA, 25 bp, Artificial
  probe
  misc_feature (1)..(25): SEQ ID NO: 7164; WAN024E2N_at; Start 51; Stop 75
aatgattctactgcatgaactaact

SEQ ID NO: 178687 - DNA, 25 bp, Artificial
  probe
  misc_feature (1)..(25): SEQ ID NO: 7164; WAN024E2N_at; Start 11; Stop 35
agcaccgttcactgggagagttacc

SEQ ID NO: 178688 - DNA, 25 bp, Artificial
  probe
  misc_feature (1)..(25): SEQ ID NO: 7164; WAN024E2N_at; Start 6; Stop 30
tcatcagcaccgttcactgggagag

SEQ ID NO: 178689 - DNA, 25 bp, Artificial
  probe
  misc_feature (1)..(25): SEQ ID NO: 7164; WAN024E2N_at; Start 15; Stop 39
ccgttcactgggagagttaccaagc

SEQ ID NO: 178690 - DNA, 25 bp, Artificial
  probe
  misc_feature (1)..(25): SEQ ID NO: 7164; WAN024E2N_at; Start 43; Stop 67
tacggtcaaatgattctactgcatg

SEQ ID NO: 178691 - DNA, 25 bp, Artificial
  probe
  misc_feature (1)..(25): SEQ ID NO: 7164; WAN024E2N_at; Start 22; Stop 46
ctgggagagttaccaagcaagtacg

SEQ ID NO: 178692 - DNA, 25 bp, Artificial
  probe
  misc_feature (1)..(25): SEQ ID NO: 7164; WAN024E2N_at; Start 5; Stop 29
ctcatcagcaccgttcactgggaga

SEQ ID NO: 178693 - DNA, 25 bp, Artificial
  probe
  misc_feature (1)..(25): SEQ ID NO: 7164; WAN024E2N_at; Start 3; Stop 27
gtctcatcagcaccgttcactggga

SEQ ID NO: 178694 - DNA, 25 bp, Artificial
  probe
  misc_feature (1)..(25): SEQ ID NO: 7164; WAN024E2N_at; Start 25; Stop 49
ggagagttaccaagcaagtacggtc

SEQ ID NO: 178695 - DNA, 25 bp, Artificial
  probe
  misc_feature (1)..(25): SEQ ID NO: 7164; WAN024E2N_at; Start 35; Stop 59
caagcaagtacggtcaaatgattct

SEQ ID NO: 178696 - DNA, 25 bp, Artificial
  probe
  misc_feature (1)..(25): SEQ ID NO: 7164; WAN024E2N_at; Start 49; Stop 73
caaatgattctactgcatgaactaa

SEQ ID NO: 178697 - DNA, 25 bp, Artificial
  probe
  misc_feature (1)..(25): SEQ ID NO: 7164; WAN024E2N_at; Start 37; Stop 61
agcaagtacggtcaaatgattctac

SEQ ID NO: 178698 - DNA, 25 bp, Artificial
  probe
  misc_feature (1)..(25): SEQ ID NO: 7164; WAN024E2N_at; Start 20; Stop 44
cactgggagagttaccaagcaagta

SEQ ID NO: 178699 - DNA, 25 bp, Artificial
  probe
  misc_feature (1)..(25): SEQ ID NO: 7164; WAN024E2N_at; Start 54; Stop 78
gattctactgcatgaactaactaat

SEQ ID NO: 178700 - DNA, 25 bp, Artificial
  probe
  misc_feature (1)..(25): SEQ ID NO: 7164; WAN024E2N_at; Start 45; Stop 69
cggtcaaatgattctactgcatgaa

SEQ ID NO: 178701 - DNA, 25 bp, Artificial
  probe
  misc_feature (1)..(25): SEQ ID NO: 7164; WAN024E2N_at; Start 18; Stop 42
ttcactgggagagttaccaagcaag

SEQ ID NO: 178702 - DNA, 25 bp, Artificial
  probe
  misc_feature (1)..(25): SEQ ID NO: 7164; WAN024E2N_at; Start 28; Stop 52
gagttaccaagcaagtacggtcaaa

SEQ ID NO: 178703 - DNA, 25 bp, Artificial
  probe
  misc_feature (1)..(25): SEQ ID NO: 7164; WAN024E2N_at; Start 19; Stop 43
tcactgggagagttaccaagcaagt

SEQ ID NO: 178704 - DNA, 25 bp, Artificial
  probe
  misc_feature (1)..(25): SEQ ID NO: 7164; WAN024E2N_at; Start 16; Stop 40
cgttcactgggagagttaccaagca

SEQ ID NO: 178705 - DNA, 25 bp, Artificial
  probe
  misc_feature (1)..(25): SEQ ID NO: 7164; WAN024E2N_at; Start 41; Stop 65
agtacggtcaaatgattctactgca

SEQ ID NO: 178706 - DNA, 25 bp, Artificial
  probe
  misc_feature (1)..(25): SEQ ID NO: 5652; WAN024E2O_at; Start 62; Stop 86
taatccaagtaccacagttgcctag

SEQ ID NO: 178707 - DNA, 25 bp, Artificial
  probe
  misc_feature (1)..(25): SEQ ID NO: 5652; WAN024E2O_at; Start 129; Stop 153
gatttcttcgttcaaccatgttccc

SEQ ID NO: 178708 - DNA, 25 bp, Artificial
  probe
  misc_feature (1)..(25): SEQ ID NO: 5652; WAN024E2O_at; Start 33; Stop 57
catgacaacgttagcaccagctggt

SEQ ID NO: 178709 - DNA, 25 bp, Artificial
  probe
  misc_feature (1)..(25): SEQ ID NO: 5652; WAN024E2O_at; Start 55; Stop 79
ggtgtcttaatccaagtaccacagt

SEQ ID NO: 178710 - DNA, 25 bp, Artificial
  probe
  misc_feature (1)..(25): SEQ ID NO: 5652; WAN024E2O_at; Start 68; Stop 92
aagtaccacagttgcctagccacca

SEQ ID NO: 178711 - DNA, 25 bp, Artificial
  probe
  misc_feature (1)..(25): SEQ ID NO: 5652; WAN024E2O_at; Start 59; Stop 83
tcttaatccaagtaccacagttgcc

SEQ ID NO: 178712 - DNA, 25 bp, Artificial
  probe
  misc_feature (1)..(25): SEQ ID NO: 5652; WAN024E2O_at; Start 35; Stop 59
tgacaacgttagcaccagctggtgt

SEQ ID NO: 178713 - DNA, 25 bp, Artificial
  probe
  misc_feature (1)..(25): SEQ ID NO: 5652; WAN024E2O_at; Start 16; Stop 40
cggtttgaccaaaggtccatgacaa

SEQ ID NO: 178714 - DNA, 25 bp, Artificial
  probe
  misc_feature (1)..(25): SEQ ID NO: 5652; WAN024E2O_at; Start 22; Stop 46
gaccaaaggtccatgacaacgttag

SEQ ID NO: 178715 - DNA, 25 bp, Artificial
  probe
  misc_feature (1)..(25): SEQ ID NO: 5652; WAN024E2O_at; Start 168; Stop 192
ggctaaaatccatgactctcttgta

SEQ ID NO: 178716 - DNA, 25 bp, Artificial
  probe
  misc_feature (1)..(25): SEQ ID NO: 5652; WAN024E2O_at; Start 180; Stop 204
tgactctcttgtaatttctttgacg

SEQ ID NO: 178717 - DNA, 25 bp, Artificial
  probe
  misc_feature (1)..(25): SEQ ID NO: 5652; WAN024E2O_at; Start 159; Stop 183
tgggaaagtggctaaaatccatgac

SEQ ID NO: 178718 - DNA, 25 bp, Artificial
  probe
  misc_feature (1)..(25): SEQ ID NO: 5652; WAN024E2O_at; Start 25; Stop 49
caaaggtccatgacaacgttagcac

SEQ ID NO: 178719 - DNA, 25 bp, Artificial
  probe
  misc_feature (1)..(25): SEQ ID NO: 5652; WAN024E2O_at; Start 103; Stop 127
ttgccttcaggtacgacttcttctt

SEQ ID NO: 178720 - DNA, 25 bp, Artificial
  probe
  misc_feature (1)..(25): SEQ ID NO: 5652; WAN024E2O_at; Start 114; Stop 138
tacgacttcttcttcgatttcttcg

SEQ ID NO: 178721 - DNA, 25 bp, Artificial
  probe
  misc_feature (1)..(25): SEQ ID NO: 5652; WAN024E2O_at; Start 110; Stop 134
caggtacgacttcttcttcgatttc

SEQ ID NO: 178722 - DNA, 25 bp, Artificial
  probe
  misc_feature (1)..(25): SEQ ID NO: 5652; WAN024E2O_at; Start 203; Stop 227
cgtttggcatatgttgcctcctttg

SEQ ID NO: 178723 - DNA, 25 bp, Artificial
  probe
  misc_feature (1)..(25): SEQ ID NO: 5652; WAN024E2O_at; Start 29; Stop 53
ggtccatgacaacgttagcaccagc

SEQ ID NO: 178724 - DNA, 25 bp, Artificial
  probe
  misc_feature (1)..(25): SEQ ID NO: 5652; WAN024E2O_at; Start 196; Stop 220
tctttgacgtttggcatatgttgcc

SEQ ID NO: 178725 - DNA, 25 bp, Artificial
  probe
  misc_feature (1)..(25): SEQ ID NO: 5652; WAN024E2O_at; Start 186; Stop 210
tcttgtaatttctttgacgtttggc

SEQ ID NO: 178726 - DNA, 25 bp, Artificial
  probe
  misc_feature (1)..(25): SEQ ID NO: 5652; WAN024E2O_at; Start 77; Stop 101
agttgcctagccaccacatggcaaa

SEQ ID NO: 178727 - DNA, 25 bp, Artificial
  probe
  misc_feature (1)..(25): SEQ ID NO: 5652; WAN024E2O_at; Start 50; Stop 74
cagctggtgtcttaatccaagtacc

SEQ ID NO: 178728 - DNA, 25 bp, Artificial
  probe
  misc_feature (1)..(25): SEQ ID NO: 5652; WAN024E2O_at; Start 154; Stop 178
cactctgggaaagtggctaaaatcc

SEQ ID NO: 178729 - DNA, 25 bp, Artificial
  probe
  misc_feature (1)..(25): SEQ ID NO: 5652; WAN024E2O_at; Start 191; Stop 215
taatttctttgacgtttggcatatg

SEQ ID NO: 178730 - DNA, 25 bp, Artificial
  probe
  misc_feature (1)..(25): SEQ ID NO: 5652; WAN024E2O_at; Start 12; Stop 36
tccacggtttgaccaaaggtccatg

SEQ ID NO: 178731 - DNA, 25 bp, Artificial
  probe
  misc_feature (1)..(25): SEQ ID NO: 5652; WAN024E2O_at; Start 150; Stop 174
tccccactctgggaaagtggctaaa

SEQ ID NO: 178732 - DNA, 25 bp, Artificial
  probe
  misc_feature (1)..(25): SEQ ID NO: 5652; WAN024E2O_at; Start 200; Stop 224
tgacgtttggcatatgttgcctcct

SEQ ID NO: 178733 - DNA, 25 bp, Artificial
  probe
  misc_feature (1)..(25): SEQ ID NO: 5652; WAN024E2O_at; Start 2; Stop 26
tggttgattttccacggtttgacca

SEQ ID NO: 178734 - DNA, 25 bp, Artificial
  probe
  misc_feature (1)..(25): SEQ ID NO: 5652; WAN024E2O_at; Start 124; Stop 148
tcttcgatttcttcgttcaaccatg

SEQ ID NO: 178735 - DNA, 25 bp, Artificial
  probe
  misc_feature (1)..(25): SEQ ID NO: 5652; WAN024E2O_at; Start 65; Stop 89
tccaagtaccacagttgcctagcca

SEQ ID NO: 178736 - DNA, 25 bp, Artificial
  probe
  misc_feature (1)..(25): SEQ ID NO: 5652; WAN024E2O_at; Start 138; Stop 162
gttcaaccatgttccccactctggg

SEQ ID NO: 178737 - DNA, 25 bp, Artificial
  probe
  misc_feature (1)..(25): SEQ ID NO: 5652; WAN024E2O_at; Start 147; Stop 171
tgttccccactctgggaaagtggct

SEQ ID NO: 178738 - DNA, 25 bp, Artificial
  probe
  misc_feature (1)..(25): SEQ ID NO: 5652; WAN024E2O_at; Start 162; Stop 186
gaaagtggctaaaatccatgactct

SEQ ID NO: 178739 - DNA, 25 bp, Artificial
  probe
  misc_feature (1)..(25): SEQ ID NO: 5652; WAN024E2O_at; Start 46; Stop 70
gcaccagctggtgtcttaatccaag

SEQ ID NO: 178740 - DNA, 25 bp, Artificial
  probe
  misc_feature (1)..(25): SEQ ID NO: 1975; WAN024E2P_at; Start 365; Stop 389
atatcgacccatacacagctgcagc

SEQ ID NO: 178741 - DNA, 25 bp, Artificial
  probe
  misc_feature (1)..(25): SEQ ID NO: 1975; WAN024E2P_at; Start 973; Stop 997
gaagttggcggtaagtacacttatc

SEQ ID NO: 178742 - DNA, 25 bp, Artificial
  probe
  misc_feature (1)..(25): SEQ ID NO: 1975; WAN024E2P_at; Start 588; Stop 612
tgctgatgagacaggcggtgaactt

SEQ ID NO: 178743 - DNA, 25 bp, Artificial
  probe
  misc_feature (1)..(25): SEQ ID NO: 1975; WAN024E2P_at; Start 423; Stop 447
gtttatcggtccttaccactgtgga

SEQ ID NO: 178744 - DNA, 25 bp, Artificial
  probe
  misc_feature (1)..(25): SEQ ID NO: 1975; WAN024E2P_at; Start 637; Stop 661
gaaatggctcaaaaggctgttaact

SEQ ID NO: 178745 - DNA, 25 bp, Artificial
  probe
  misc_feature (1)..(25): SEQ ID NO: 1975; WAN024E2P_at; Start 569; Stop 593
taactctcccagtgaacggtgctga

SEQ ID NO: 178746 - DNA, 25 bp, Artificial
  probe
  misc_feature (1)..(25): SEQ ID NO: 1975; WAN024E2P_at; Start 121; Stop 145
tggtggctaggcaactgtggtactt

SEQ ID NO: 178747 - DNA, 25 bp, Artificial
  probe
  misc_feature (1)..(25): SEQ ID NO: 1975; WAN024E2P_at; Start 930; Stop 954
gcgaaaagatcgcttgcaatacgat

SEQ ID NO: 178748 - DNA, 25 bp, Artificial
  probe
  misc_feature (1)..(25): SEQ ID NO: 1975; WAN024E2P_at; Start 1013; Stop 1037
tagtagaataccatcatccacgtgg

SEQ ID NO: 178749 - DNA, 25 bp, Artificial
  probe
  misc_feature (1)..(25): SEQ ID NO: 1975; WAN024E2P_at; Start 143; Stop 167
cttggattaagacaccagctggtgc

SEQ ID NO: 178750 - DNA, 25 bp, Artificial
  probe
  misc_feature (1)..(25): SEQ ID NO: 1975; WAN024E2P_at; Start 158; Stop 182
cagctggtgctaacgttgtcatgga

SEQ ID NO: 178751 - DNA, 25 bp, Artificial
  probe
  misc_feature (1)..(25): SEQ ID NO: 1975; WAN024E2P_at; Start 535; Stop 559
catgcagtagaatcatttgaccgta

SEQ ID NO: 178752 - DNA, 25 bp, Artificial
  probe
  misc_feature (1)..(25): SEQ ID NO: 1975; WAN024E2P_at; Start 241; Stop 265
caaatggcaaatatggcaggtgttc

SEQ ID NO: 178753 - DNA, 25 bp, Artificial
  probe
  misc_feature (1)..(25): SEQ ID NO: 1975; WAN024E2P_at; Start 881; Stop 905
ggtctaacttcatggcttctactaa

SEQ ID NO: 178754 - DNA, 25 bp, Artificial
  probe
  misc_feature (1)..(25): SEQ ID NO: 1975; WAN024E2P_at; Start 553; Stop 577
gaccgtacttgcttggtaactctcc

SEQ ID NO: 178755 - DNA, 25 bp, Artificial
  probe
  misc_feature (1)..(25): SEQ ID NO: 1975; WAN024E2P_at; Start 764; Stop 788
tgaataactatggtgaaaatccggt

SEQ ID NO: 178756 - DNA, 25 bp, Artificial
  probe
  misc_feature (1)..(25): SEQ ID NO: 1975; WAN024E2P_at; Start 177; Stop 201
catggacctttggtcaaaccgtgga

SEQ ID NO: 178757 - DNA, 25 bp, Artificial
  probe
  misc_feature (1)..(25): SEQ ID NO: 1975; WAN024E2P_at; Start 483; Stop 507
tatcatcgttgttaaaccaggtgac

SEQ ID NO: 178758 - DNA, 25 bp, Artificial
  probe
  misc_feature (1)..(25): SEQ ID NO: 1975; WAN024E2P_at; Start 438; Stop 462
ccactgtggacgaatctgggaagga

SEQ ID NO: 178759 - DNA, 25 bp, Artificial
  probe
  misc_feature (1)..(25): SEQ ID NO: 1975; WAN024E2P_at; Start 85; Stop 109
gaagaagaagtcgtacctgaaggca

SEQ ID NO: 178760 - DNA, 25 bp, Artificial
  probe
  misc_feature (1)..(25): SEQ ID NO: 1975; WAN024E2P_at; Start 410; Stop 434
tagagcatgttaagtttatcggtcc

SEQ ID NO: 178761 - DNA, 25 bp, Artificial
  probe
  misc_feature (1)..(25): SEQ ID NO: 1975; WAN024E2P_at; Start 677; Stop 701
caggtggaaccatctatcatggtgc

SEQ ID NO: 178762 - DNA, 25 bp, Artificial
  probe
  misc_feature (1)..(25): SEQ ID NO: 1975; WAN024E2P_at; Start 958; Stop 982
catccatttatctgggaagttggcg

SEQ ID NO: 178763 - DNA, 25 bp, Artificial
  probe
  misc_feature (1)..(25): SEQ ID NO: 1975; WAN024E2P_at; Start 778; Stop 802
gaaaatccggtaggtatccaagaca

SEQ ID NO: 178764 - DNA, 25 bp, Artificial
  probe
  misc_feature (1)..(25): SEQ ID NO: 1975; WAN024E2P_at; Start 843; Stop 867
gcgtaccaaagtcattatcccagtt

SEQ ID NO: 178765 - DNA, 25 bp, Artificial
  probe
  misc_feature (1)..(25): SEQ ID NO: 1975; WAN024E2P_at; Start 466; Stop 490
ggtgttccaaaagaacgtatcatcg

SEQ ID NO: 178766 - DNA, 25 bp, Artificial
  probe
  misc_feature (1)..(25): SEQ ID NO: 1975; WAN024E2P_at; Start 219; Stop 243
gaaagatatggttcgtgggcaccaa

SEQ ID NO: 178767 - DNA, 25 bp, Artificial
  probe
  misc_feature (1)..(25): SEQ ID NO: 1975; WAN024E2P_at; Start 21; Stop 45
tacaagagagtcatggattttagcc

SEQ ID NO: 178768 - DNA, 25 bp, Artificial
  probe
  misc_feature (1)..(25): SEQ ID NO: 1975; WAN024E2P_at; Start 35; Stop 59
ggattttagccactttcccagagtg

SEQ ID NO: 178769 - DNA, 25 bp, Artificial
  probe
  misc_feature (1)..(25): SEQ ID NO: 1975; WAN024E2P_at; Start 278; Stop 302
caaacttgcgtgttcagccaatggt

SEQ ID NO: 178770 - DNA, 25 bp, Artificial
  probe
  misc_feature (1)..(25): SEQ ID NO: 1975; WAN024E2P_at; Start 499; Stop 523
ccaggtgacactatcgaattaaaag

SEQ ID NO: 178771 - DNA, 25 bp, Artificial
  probe
  misc_feature (1)..(25): SEQ ID NO: 1975; WAN024E2P_at; Start 622; Stop 646
gctgttacagatgaagaaatggctc

SEQ ID NO: 178772 - DNA, 25 bp, Artificial
  probe
  misc_feature (1)..(25): SEQ ID NO: 1975; WAN024E2P_at; Start 661; Stop 685
tatatctttgaaacaccaggtggaa

SEQ ID NO: 178773 - DNA, 25 bp, Artificial
  probe
  misc_feature (1)..(25): SEQ ID NO: 1975; WAN024E2P_at; Start 813; Stop 837
tatcgaccttcttcgtatggcagaa

SEQ ID NO: 178774 - DNA, 25 bp, Artificial
  probe
  misc_feature (1)..(25): SEQ ID NO: 1888; WAN024E2Q_at; Start 12; Stop 36
aaaagcaactcagttagttgatgaa

SEQ ID NO: 178775 - DNA, 25 bp, Artificial
  probe
  misc_feature (1)..(25): SEQ ID NO: 1888; WAN024E2Q_at; Start 80; Stop 104
ttggaattttagtcttggagggaca

SEQ ID NO: 178776 - DNA, 25 bp, Artificial
  probe
  misc_feature (1)..(25): SEQ ID NO: 1888; WAN024E2Q_at; Start 50; Stop 74
gtttaatccgatttgatgaatttgg

SEQ ID NO: 178777 - DNA, 25 bp, Artificial
  probe
  misc_feature (1)..(25): SEQ ID NO: 1888; WAN024E2Q_at; Start 43; Stop 67
caagtaggtttaatccgatttgatg

SEQ ID NO: 178778 - DNA, 25 bp, Artificial
  probe
  misc_feature (1)..(25): SEQ ID NO: 1888; WAN024E2Q_at; Start 27; Stop 51
agttgatgaaatggaacaagtaggt

SEQ ID NO: 178779 - DNA, 25 bp, Artificial
  probe
  misc_feature (1)..(25): SEQ ID NO: 1888; WAN024E2Q_at; Start 16; Stop 40
gcaactcagttagttgatgaaatgg

SEQ ID NO: 178780 - DNA, 25 bp, Artificial
  probe
  misc_feature (1)..(25): SEQ ID NO: 1888; WAN024E2Q_at; Start 24; Stop 48
gttagttgatgaaatggaacaagta

SEQ ID NO: 178781 - DNA, 25 bp, Artificial
  probe
  misc_feature (1)..(25): SEQ ID NO: 1888; WAN024E2Q_at; Start 81; Stop 105
tggaattttagtcttggagggacaa

SEQ ID NO: 178782 - DNA, 25 bp, Artificial
  probe
  misc_feature (1)..(25): SEQ ID NO: 1888; WAN024E2Q_at; Start 54; Stop 78
aatccgatttgatgaatttggaaat

SEQ ID NO: 178783 - DNA, 25 bp, Artificial
  probe
  misc_feature (1)..(25): SEQ ID NO: 1888; WAN024E2Q_at; Start 78; Stop 102
tgttggaattttagtcttggaggga

SEQ ID NO: 178784 - DNA, 25 bp, Artificial
  probe
  misc_feature (1)..(25): SEQ ID NO: 1888; WAN024E2Q_at; Start 21; Stop 45
tcagttagttgatgaaatggaacaa

SEQ ID NO: 178785 - DNA, 25 bp, Artificial
  probe
  misc_feature (1)..(25): SEQ ID NO: 1888; WAN024E2Q_at; Start 11; Stop 35
taaaagcaactcagttagttgatga

SEQ ID NO: 178786 - DNA, 25 bp, Artificial
  probe
  misc_feature (1)..(25): SEQ ID NO: 1888; WAN024E2Q_at; Start 51; Stop 75
tttaatccgatttgatgaatttgga

SEQ ID NO: 178787 - DNA, 25 bp, Artificial
  probe
  misc_feature (1)..(25): SEQ ID NO: 1888; WAN024E2Q_at; Start 17; Stop 41
caactcagttagttgatgaaatgga

SEQ ID NO: 178788 - DNA, 25 bp, Artificial
  probe
  misc_feature (1)..(25): SEQ ID NO: 1888; WAN024E2Q_at; Start 28; Stop 52
gttgatgaaatggaacaagtaggtt

SEQ ID NO: 178789 - DNA, 25 bp, Artificial
  probe
  misc_feature (1)..(25): SEQ ID NO: 1888; WAN024E2Q_at; Start 26; Stop 50
tagttgatgaaatggaacaagtagg

SEQ ID NO: 178790 - DNA, 25 bp, Artificial
  probe
  misc_feature (1)..(25): SEQ ID NO: 1888; WAN024E2Q_at; Start 20; Stop 44
ctcagttagttgatgaaatggaaca

SEQ ID NO: 178791 - DNA, 25 bp, Artificial
  probe
  misc_feature (1)..(25): SEQ ID NO: 1888; WAN024E2Q_at; Start 15; Stop 39
agcaactcagttagttgatgaaatg

SEQ ID NO: 178792 - DNA, 25 bp, Artificial
  probe
  misc_feature (1)..(25): SEQ ID NO: 1888; WAN024E2Q_at; Start 31; Stop 55
gatgaaatggaacaagtaggtttaa

SEQ ID NO: 178793 - DNA, 25 bp, Artificial
  probe
  misc_feature (1)..(25): SEQ ID NO: 1888; WAN024E2Q_at; Start 22; Stop 46
cagttagttgatgaaatggaacaag

SEQ ID NO: 178794 - DNA, 25 bp, Artificial
  probe
  misc_feature (1)..(25): SEQ ID NO: 1888; WAN024E2Q_at; Start 37; Stop 61
atggaacaagtaggtttaatccgat

SEQ ID NO: 178795 - DNA, 25 bp, Artificial
  probe
  misc_feature (1)..(25): SEQ ID NO: 1888; WAN024E2Q_at; Start 18; Stop 42
aactcagttagttgatgaaatggaa

SEQ ID NO: 178796 - DNA, 25 bp, Artificial
  probe
  misc_feature (1)..(25): SEQ ID NO: 1888; WAN024E2Q_at; Start 53; Stop 77
taatccgatttgatgaatttggaaa

SEQ ID NO: 178797 - DNA, 25 bp, Artificial
  probe
  misc_feature (1)..(25): SEQ ID NO: 1888; WAN024E2Q_at; Start 33; Stop 57
tgaaatggaacaagtaggtttaatc

SEQ ID NO: 178798 - DNA, 25 bp, Artificial
  probe
  misc_feature (1)..(25): SEQ ID NO: 1888; WAN024E2Q_at; Start 29; Stop 53
ttgatgaaatggaacaagtaggttt

SEQ ID NO: 178799 - DNA, 25 bp, Artificial
  probe
  misc_feature (1)..(25): SEQ ID NO: 1888; WAN024E2Q_at; Start 44; Stop 68
aagtaggtttaatccgatttgatga

SEQ ID NO: 178800 - DNA, 25 bp, Artificial
  probe
  misc_feature (1)..(25): SEQ ID NO: 1888; WAN024E2Q_at; Start 13; Stop 37
aaagcaactcagttagttgatgaaa

SEQ ID NO: 178801 - DNA, 25 bp, Artificial
  probe
  misc_feature (1)..(25): SEQ ID NO: 1888; WAN024E2Q_at; Start 74; Stop 98
gaaatgttggaattttagtcttgga

SEQ ID NO: 178802 - DNA, 25 bp, Artificial
  probe
  misc_feature (1)..(25): SEQ ID NO: 1888; WAN024E2Q_at; Start 76; Stop 100
aatgttggaattttagtcttggagg

SEQ ID NO: 178803 - DNA, 25 bp, Artificial
  probe
  misc_feature (1)..(25): SEQ ID NO: 1888; WAN024E2Q_at; Start 10; Stop 34
gtaaaagcaactcagttagttgatg

SEQ ID NO: 178804 - DNA, 25 bp, Artificial
  probe
  misc_feature (1)..(25): SEQ ID NO: 1888; WAN024E2Q_at; Start 63; Stop 87
tgatgaatttggaaatgttggaatt

SEQ ID NO: 178805 - DNA, 25 bp, Artificial
  probe
  misc_feature (1)..(25): SEQ ID NO: 1888; WAN024E2Q_at; Start 30; Stop 54
tgatgaaatggaacaagtaggttta

SEQ ID NO: 178806 - DNA, 25 bp, Artificial
  probe
  misc_feature (1)..(25): SEQ ID NO: 1888; WAN024E2Q_at; Start 19; Stop 43
actcagttagttgatgaaatggaac

SEQ ID NO: 178807 - DNA, 25 bp, Artificial
  probe
  misc_feature (1)..(25): SEQ ID NO: 1888; WAN024E2Q_at; Start 45; Stop 69
agtaggtttaatccgatttgatgaa

SEQ ID NO: 178808 - DNA, 25 bp, Artificial
  probe
  misc_feature (1)..(25): SEQ ID NO: 7637; WAN024E2R_at; Start 264; Stop 288
ttgctcctgtttcttctgctcctag

SEQ ID NO: 178809 - DNA, 25 bp, Artificial
  probe
  misc_feature (1)..(25): SEQ ID NO: 7637; WAN024E2R_at; Start 51; Stop 75
agtctttttcagtaatggttacagg

SEQ ID NO: 178810 - DNA, 25 bp, Artificial
  probe
  misc_feature (1)..(25): SEQ ID NO: 7637; WAN024E2R_at; Start 9; Stop 33
aattacgagttgcttgagagaagcc

SEQ ID NO: 178811 - DNA, 25 bp, Artificial
  probe
  misc_feature (1)..(25): SEQ ID NO: 7637; WAN024E2R_at; Start 15; Stop 39
gagttgcttgagagaagccattctc

SEQ ID NO: 178812 - DNA, 25 bp, Artificial
  probe
  misc_feature (1)..(25): SEQ ID NO: 7637; WAN024E2R_at; Start 244; Stop 268
ccatcccaaaaacttacgagttgct

SEQ ID NO: 178813 - DNA, 25 bp, Artificial
  probe
  misc_feature (1)..(25): SEQ ID NO: 7637; WAN024E2R_at; Start 102; Stop 126
tctcactagcaacttcgggataagc

SEQ ID NO: 178814 - DNA, 25 bp, Artificial
  probe
  misc_feature (1)..(25): SEQ ID NO: 7637; WAN024E2R_at; Start 132; Stop 156
tgtaatcagacaccaaactagccca

SEQ ID NO: 178815 - DNA, 25 bp, Artificial
  probe
  misc_feature (1)..(25): SEQ ID NO: 7637; WAN024E2R_at; Start 5; Stop 29
gacgaattacgagttgcttgagaga

SEQ ID NO: 178816 - DNA, 25 bp, Artificial
  probe
  misc_feature (1)..(25): SEQ ID NO: 7637; WAN024E2R_at; Start 1; Stop 25
ttgggacgaattacgagttgcttga

SEQ ID NO: 178817 - DNA, 25 bp, Artificial
  probe
  misc_feature (1)..(25): SEQ ID NO: 7637; WAN024E2R_at; Start 177; Stop 201
cacgatccgctacatttgtcttgaa

SEQ ID NO: 178818 - DNA, 25 bp, Artificial
  probe
  misc_feature (1)..(25): SEQ ID NO: 7637; WAN024E2R_at; Start 229; Stop 253
aaatggatcgtaatcccatcccaaa

SEQ ID NO: 178819 - DNA, 25 bp, Artificial
  probe
  misc_feature (1)..(25): SEQ ID NO: 7637; WAN024E2R_at; Start 137; Stop 161
tcagacaccaaactagcccaagcat

SEQ ID NO: 178820 - DNA, 25 bp, Artificial
  probe
  misc_feature (1)..(25): SEQ ID NO: 7637; WAN024E2R_at; Start 97; Stop 121
gtcaatctcactagcaacttcggga

SEQ ID NO: 178821 - DNA, 25 bp, Artificial
  probe
  misc_feature (1)..(25): SEQ ID NO: 7637; WAN024E2R_at; Start 116; Stop 140
tcgggataagcaaccttgtaatcag

SEQ ID NO: 178822 - DNA, 25 bp, Artificial
  probe
  misc_feature (1)..(25): SEQ ID NO: 7637; WAN024E2R_at; Start 211; Stop 235
tacttcctctggtacttcaaatgga

SEQ ID NO: 178823 - DNA, 25 bp, Artificial
  probe
  misc_feature (1)..(25): SEQ ID NO: 7637; WAN024E2R_at; Start 45; Stop 69
cagggaagtctttttcagtaatggt

SEQ ID NO: 178824 - DNA, 25 bp, Artificial
  probe
  misc_feature (1)..(25): SEQ ID NO: 7637; WAN024E2R_at; Start 90; Stop 114
caatagcgtcaatctcactagcaac

SEQ ID NO: 178825 - DNA, 25 bp, Artificial
  probe
  misc_feature (1)..(25): SEQ ID NO: 7637; WAN024E2R_at; Start 122; Stop 146
taagcaaccttgtaatcagacacca

SEQ ID NO: 178826 - DNA, 25 bp, Artificial
  probe
  misc_feature (1)..(25): SEQ ID NO: 7637; WAN024E2R_at; Start 111; Stop 135
caacttcgggataagcaaccttgta

SEQ ID NO: 178827 - DNA, 25 bp, Artificial
  probe
  misc_feature (1)..(25): SEQ ID NO: 7637; WAN024E2R_at; Start 108; Stop 132
tagcaacttcgggataagcaacctt

SEQ ID NO: 178828 - DNA, 25 bp, Artificial
  probe
  misc_feature (1)..(25): SEQ ID NO: 7637; WAN024E2R_at; Start 198; Stop 222
tgaaatcagaatatacttcctctgg

SEQ ID NO: 178829 - DNA, 25 bp, Artificial
  probe
  misc_feature (1)..(25): SEQ ID NO: 7637; WAN024E2R_at; Start 28; Stop 52
gaagccattctcatagacagggaag

SEQ ID NO: 178830 - DNA, 25 bp, Artificial
  probe
  misc_feature (1)..(25): SEQ ID NO: 7637; WAN024E2R_at; Start 86; Stop 110
gctacaatagcgtcaatctcactag

SEQ ID NO: 178831 - DNA, 25 bp, Artificial
  probe
  misc_feature (1)..(25): SEQ ID NO: 7637; WAN024E2R_at; Start 183; Stop 207
ccgctacatttgtcttgaaatcaga

SEQ ID NO: 178832 - DNA, 25 bp, Artificial
  probe
  misc_feature (1)..(25): SEQ ID NO: 7637; WAN024E2R_at; Start 221; Stop 245
ggtacttcaaatggatcgtaatccc

SEQ ID NO: 178833 - DNA, 25 bp, Artificial
  probe
  misc_feature (1)..(25): SEQ ID NO: 7637; WAN024E2R_at; Start 33; Stop 57
cattctcatagacagggaagtcttt

SEQ ID NO: 178834 - DNA, 25 bp, Artificial
  probe
  misc_feature (1)..(25): SEQ ID NO: 7637; WAN024E2R_at; Start 170; Stop 194
tcctgaccacgatccgctacatttg

SEQ ID NO: 178835 - DNA, 25 bp, Artificial
  probe
  misc_feature (1)..(25): SEQ ID NO: 7637; WAN024E2R_at; Start 150; Stop 174
tagcccaagcatcgtatgcctcctg

SEQ ID NO: 178836 - DNA, 25 bp, Artificial
  probe
  misc_feature (1)..(25): SEQ ID NO: 7637; WAN024E2R_at; Start 216; Stop 240
cctctggtacttcaaatggatcgta

SEQ ID NO: 178837 - DNA, 25 bp, Artificial
  probe
  misc_feature (1)..(25): SEQ ID NO: 7637; WAN024E2R_at; Start 157; Stop 181
agcatcgtatgcctcctgaccacga

SEQ ID NO: 178838 - DNA, 25 bp, Artificial
  probe
  misc_feature (1)..(25): SEQ ID NO: 7637; WAN024E2R_at; Start 258; Stop 282
tacgagttgctcctgtttcttctgc

SEQ ID NO: 178839 - DNA, 25 bp, Artificial
  probe
  misc_feature (1)..(25): SEQ ID NO: 7637; WAN024E2R_at; Start 145; Stop 169
caaactagcccaagcatcgtatgcc

SEQ ID NO: 178840 - DNA, 25 bp, Artificial
  probe
  misc_feature (1)..(25): SEQ ID NO: 7637; WAN024E2R_at; Start 250; Stop 274
caaaaacttacgagttgctcctgtt

SEQ ID NO: 178841 - DNA, 25 bp, Artificial
  probe
  misc_feature (1)..(25): SEQ ID NO: 7637; WAN024E2R_at; Start 75; Stop 99
gggattttccagctacaatagcgtc

SEQ ID NO: 178842 - DNA, 25 bp, Artificial
  probe
  misc_feature (1)..(25): SEQ ID NO: 2855; WAN024E2S_at; Start 467; Stop 491
acttcatggaaggagtgtctgcgga

SEQ ID NO: 178843 - DNA, 25 bp, Artificial
  probe
  misc_feature (1)..(25): SEQ ID NO: 2855; WAN024E2S_at; Start 1054; Stop 1078
gcaactcgtaattcgtcccaagatg

SEQ ID NO: 178844 - DNA, 25 bp, Artificial
  probe
  misc_feature (1)..(25): SEQ ID NO: 2855; WAN024E2S_at; Start 881; Stop 905
caaatgtagcggatcgtggtcagga

SEQ ID NO: 178845 - DNA, 25 bp, Artificial
  probe
  misc_feature (1)..(25): SEQ ID NO: 2855; WAN024E2S_at; Start 369; Stop 393
tggtttcgcccaagcagagcgtttt

SEQ ID NO: 178846 - DNA, 25 bp, Artificial
  probe
  misc_feature (1)..(25): SEQ ID NO: 2855; WAN024E2S_at; Start 310; Stop 334
catacgtctggtgtggatgcgacat

SEQ ID NO: 178847 - DNA, 25 bp, Artificial
  probe
  misc_feature (1)..(25): SEQ ID NO: 2855; WAN024E2S_at; Start 1872; Stop 1896
tattgacatcttcggtgcgtctgcc

SEQ ID NO: 178848 - DNA, 25 bp, Artificial
  probe
  misc_feature (1)..(25): SEQ ID NO: 2855; WAN024E2S_at; Start 126; Stop 150
ccttagaattacacctgagcagcca

SEQ ID NO: 178849 - DNA, 25 bp, Artificial
  probe
  misc_feature (1)..(25): SEQ ID NO: 2855; WAN024E2S_at; Start 978; Stop 1002
cgctattgtagctggaaaatcccct

SEQ ID NO: 178850 - DNA, 25 bp, Artificial
  probe
  misc_feature (1)..(25): SEQ ID NO: 2855; WAN024E2S_at; Start 395; Stop 419
tagctgctaagtacaacaaagatgg

SEQ ID NO: 178851 - DNA, 25 bp, Artificial
  probe
  misc_feature (1)..(25): SEQ ID NO: 2855; WAN024E2S_at; Start 1603; Stop 1627
tacgtcgtgtatgataccccgggat

SEQ ID NO: 178852 - DNA, 25 bp, Artificial
  probe
  misc_feature (1)..(25): SEQ ID NO: 2855; WAN024E2S_at; Start 793; Stop 817
gcagaagaaacaggagcaactcgta

SEQ ID NO: 178853 - DNA, 25 bp, Artificial
  probe
  misc_feature (1)..(25): SEQ ID NO: 2855; WAN024E2S_at; Start 1791; Stop 1815
gactcgtcgtcgtgtggccattgaa

SEQ ID NO: 178854 - DNA, 25 bp, Artificial
  probe
  misc_feature (1)..(25): SEQ ID NO: 2855; WAN024E2S_at; Start 835; Stop 859
tacgatccatttgaagtaccagagg

SEQ ID NO: 178855 - DNA, 25 bp, Artificial
  probe
  misc_feature (1)..(25): SEQ ID NO: 2855; WAN024E2S_at; Start 1104; Stop 1128
aaccttcttaggtggatcggcagac

SEQ ID NO: 178856 - DNA, 25 bp, Artificial
  probe
  misc_feature (1)..(25): SEQ ID NO: 2855; WAN024E2S_at; Start 1376; Stop 1400
caattgccgttggtgaagatggtcc

SEQ ID NO: 178857 - DNA, 25 bp, Artificial
  probe
  misc_feature (1)..(25): SEQ ID NO: 2855; WAN024E2S_at; Start 450; Stop 474
tatcgctggagacggtgacttcatg

SEQ ID NO: 178858 - DNA, 25 bp, Artificial
  probe
  misc_feature (1)..(25): SEQ ID NO: 2855; WAN024E2S_at; Start 1584; Stop 1608
taaggtcgctaaaggagcctacgtc

SEQ ID NO: 178859 - DNA, 25 bp, Artificial
  probe
  misc_feature (1)..(25): SEQ ID NO: 2855; WAN024E2S_at; Start 1326; Stop 1350
gctatcagccattcaggagttgcct

SEQ ID NO: 178860 - DNA, 25 bp, Artificial
  probe
  misc_feature (1)..(25): SEQ ID NO: 2855; WAN024E2S_at; Start 1638; Stop 1662
tatcattgctacaggatctgaggtc

SEQ ID NO: 178861 - DNA, 25 bp, Artificial
  probe
  misc_feature (1)..(25): SEQ ID NO: 2855; WAN024E2S_at; Start 1747; Stop 1771
gatgctcaagatgctacctacaagg

SEQ ID NO: 178862 - DNA, 25 bp, Artificial
  probe
  misc_feature (1)..(25): SEQ ID NO: 2855; WAN024E2S_at; Start 774; Stop 798
tcatggtgcaccactaggagcagaa

SEQ ID NO: 178863 - DNA, 25 bp, Artificial
  probe
  misc_feature (1)..(25): SEQ ID NO: 2855; WAN024E2S_at; Start 142; Stop 166
gagcagccaaactggattaaccgag

SEQ ID NO: 178864 - DNA, 25 bp, Artificial
  probe
  misc_feature (1)..(25): SEQ ID NO: 2855; WAN024E2S_at; Start 490; Stop 514
gaggcggcttcttatgcaggtcatc

SEQ ID NO: 178865 - DNA, 25 bp, Artificial
  probe
  misc_feature (1)..(25): SEQ ID NO: 2855; WAN024E2S_at; Start 1448; Stop 1472
acttgactgttatccgtccagcgga

SEQ ID NO: 178866 - DNA, 25 bp, Artificial
  probe
  misc_feature (1)..(25): SEQ ID NO: 2855; WAN024E2S_at; Start 181; Stop 205
tctgcgggtcatggatcaatgctac

SEQ ID NO: 178867 - DNA, 25 bp, Artificial
  probe
  misc_feature (1)..(25): SEQ ID NO: 2855; WAN024E2S_at; Start 54; Stop 78
caaatctaattctggtcacccggga

SEQ ID NO: 178868 - DNA, 25 bp, Artificial
  probe
  misc_feature (1)..(25): SEQ ID NO: 2855; WAN024E2S_at; Start 739; Stop 763
tacggctcacccaataaaagtggta

SEQ ID NO: 178869 - DNA, 25 bp, Artificial
  probe
  misc_feature (1)..(25): SEQ ID NO: 2855; WAN024E2S_at; Start 1417; Stop 1441
gaacatttggcaggtttacgctcaa

SEQ ID NO: 178870 - DNA, 25 bp, Artificial
  probe
  misc_feature (1)..(25): SEQ ID NO: 2855; WAN024E2S_at; Start 282; Stop 306
taagacacctggtcatcctgaagtg

SEQ ID NO: 178871 - DNA, 25 bp, Artificial
  probe
  misc_feature (1)..(25): SEQ ID NO: 2855; WAN024E2S_at; Start 1707; Stop 1731
taaagtacgtgtggtatctatgccc

SEQ ID NO: 178872 - DNA, 25 bp, Artificial
  probe
  misc_feature (1)..(25): SEQ ID NO: 2855; WAN024E2S_at; Start 1812; Stop 1836
tgaaatggcagcgacccaaagttgg

SEQ ID NO: 178873 - DNA, 25 bp, Artificial
  probe
  misc_feature (1)..(25): SEQ ID NO: 2855; WAN024E2S_at; Start 666; Stop 690
aatttctacagcaattgagacggcc

SEQ ID NO: 178874 - DNA, 25 bp, Artificial
  probe
  misc_feature (1)..(25): SEQ ID NO: 2855; WAN024E2S_at; Start 937; Stop 961
gattacaaggttgcttatcccgaag

SEQ ID NO: 178875 - DNA, 25 bp, Artificial
  probe
  misc_feature (1)..(25): SEQ ID NO: 2855; WAN024E2S_at; Start 1473; Stop 1497
tgcccgtgaaactcaagcggcttgg

SEQ ID NO: 178876 - DNA, 25 bp, Artificial
  probe
  misc_feature (1)..(25): SEQ ID NO: 2828; WAN024E2T_at; Start 616; Stop 640
gcctacggttggcatactgccttgg

SEQ ID NO: 178877 - DNA, 25 bp, Artificial
  probe
  misc_feature (1)..(25): SEQ ID NO: 2828; WAN024E2T_at; Start 1331; Stop 1355
tgtcagccttacaaggacttcctgt

SEQ ID NO: 178878 - DNA, 25 bp, Artificial
  probe
  misc_feature (1)..(25): SEQ ID NO: 2828; WAN024E2T_at; Start 892; Stop 916
gaccgtggcgcatcagcttatcaag

SEQ ID NO: 178879 - DNA, 25 bp, Artificial
  probe
  misc_feature (1)..(25): SEQ ID NO: 2828; WAN024E2T_at; Start 1814; Stop 1838
cagtcgaaatgggtgcaagtcaaaa

SEQ ID NO: 178880 - DNA, 25 bp, Artificial
  probe
  misc_feature (1)..(25): SEQ ID NO: 2828; WAN024E2T_at; Start 660; Stop 684
ggaagccatccatgctgctatcgaa

SEQ ID NO: 178881 - DNA, 25 bp, Artificial
  probe
  misc_feature (1)..(25): SEQ ID NO: 2828; WAN024E2T_at; Start 1897; Stop 1921
tctgccccagcaccaaaagtattgg

SEQ ID NO: 178882 - DNA, 25 bp, Artificial
  probe
  misc_feature (1)..(25): SEQ ID NO: 2828; WAN024E2T_at; Start 1019; Stop 1043
cagacttcccagctttagaaaatgg

SEQ ID NO: 178883 - DNA, 25 bp, Artificial
  probe
  misc_feature (1)..(25): SEQ ID NO: 2828; WAN024E2T_at; Start 956; Stop 980
cagaactggctgcagaagtagaagc

SEQ ID NO: 178884 - DNA, 25 bp, Artificial
  probe
  misc_feature (1)..(25): SEQ ID NO: 2828; WAN024E2T_at; Start 1455; Stop 1479
aaatgttttccgtccagcagatgcg

SEQ ID NO: 178885 - DNA, 25 bp, Artificial
  probe
  misc_feature (1)..(25): SEQ ID NO: 2828; WAN024E2T_at; Start 824; Stop 848
tcggttgggactacgaaccatttga

SEQ ID NO: 178886 - DNA, 25 bp, Artificial
  probe
  misc_feature (1)..(25): SEQ ID NO: 2828; WAN024E2T_at; Start 37; Stop 61
ggtattgacgccattaataaagcca

SEQ ID NO: 178887 - DNA, 25 bp, Artificial
  probe
  misc_feature (1)..(25): SEQ ID NO: 2828; WAN024E2T_at; Start 678; Stop 702
tatcgaaacagcaaaagcttcaggc

SEQ ID NO: 178888 - DNA, 25 bp, Artificial
  probe
  misc_feature (1)..(25): SEQ ID NO: 2828; WAN024E2T_at; Start 84; Stop 108
tatgggagcggctccgatggcttac

SEQ ID NO: 178889 - DNA, 25 bp, Artificial
  probe
  misc_feature (1)..(25): SEQ ID NO: 2828; WAN024E2T_at; Start 1878; Stop 1902
tattgataccttcggagcctctgcc

SEQ ID NO: 178890 - DNA, 25 bp, Artificial
  probe
  misc_feature (1)..(25): SEQ ID NO: 2828; WAN024E2T_at; Start 1690; Stop 1714
aaagaattggctagtcaaggcgaaa

SEQ ID NO: 178891 - DNA, 25 bp, Artificial
  probe
  misc_feature (1)..(25): SEQ ID NO: 2828; WAN024E2T_at; Start 1272; Stop 1296
tcgtgtatacggtggaactttcttc

SEQ ID NO: 178892 - DNA, 25 bp, Artificial
  probe
  misc_feature (1)..(25): SEQ ID NO: 2828; WAN024E2T_at; Start 974; Stop 998
tagaagccatcatcgacggacgtga

SEQ ID NO: 178893 - DNA, 25 bp, Artificial
  probe
  misc_feature (1)..(25): SEQ ID NO: 2828; WAN024E2T_at; Start 1115; Stop 1139
taggtggatcagctgaccttgctca

SEQ ID NO: 178894 - DNA, 25 bp, Artificial
  probe
  misc_feature (1)..(25): SEQ ID NO: 2828; WAN024E2T_at; Start 997; Stop 1021
gatccagtcgaagtgactccagcag

SEQ ID NO: 178895 - DNA, 25 bp, Artificial
  probe
  misc_feature (1)..(25): SEQ ID NO: 2828; WAN024E2T_at; Start 1235; Stop 1259
gaacaatcttgaacgggatggccct

SEQ ID NO: 178896 - DNA, 25 bp, Artificial
  probe
  misc_feature (1)..(25): SEQ ID NO: 2828; WAN024E2T_at; Start 1254; Stop 1278
ggcccttcatggtggacttcgtgta

SEQ ID NO: 178897 - DNA, 25 bp, Artificial
  probe
  misc_feature (1)..(25): SEQ ID NO: 2828; WAN024E2T_at; Start 1303; Stop 1327
tctgactatgtgaaggcagctgtcc

SEQ ID NO: 178898 - DNA, 25 bp, Artificial
  probe
  misc_feature (1)..(25): SEQ ID NO: 2828; WAN024E2T_at; Start 760; Stop 784
ggaactaatgctgtacacggcgccc

SEQ ID NO: 178899 - DNA, 25 bp, Artificial
  probe
  misc_feature (1)..(25): SEQ ID NO: 2828; WAN024E2T_at; Start 1724; Stop 1748
tagtcagcatgccatctacagatgt

SEQ ID NO: 178900 - DNA, 25 bp, Artificial
  probe
  misc_feature (1)..(25): SEQ ID NO: 2828; WAN024E2T_at; Start 1784; Stop 1808
ttcttccaaatgcagtccgccgtcg

SEQ ID NO: 178901 - DNA, 25 bp, Artificial
  probe
  misc_feature (1)..(25): SEQ ID NO: 2828; WAN024E2T_at; Start 778; Stop 802
ggcgcccctcttggagcagatgaaa

SEQ ID NO: 178902 - DNA, 25 bp, Artificial
  probe
  misc_feature (1)..(25): SEQ ID NO: 2828; WAN024E2T_at; Start 876; Stop 900
caaagaacatgttgcagaccgtggc

SEQ ID NO: 178903 - DNA, 25 bp, Artificial
  probe
  misc_feature (1)..(25): SEQ ID NO: 2828; WAN024E2T_at; Start 54; Stop 78
taaagccaactcaggtcatccaggt

SEQ ID NO: 178904 - DNA, 25 bp, Artificial
  probe
  misc_feature (1)..(25): SEQ ID NO: 2828; WAN024E2T_at; Start 1799; Stop 1823
tccgccgtcgtgttgcagtcgaaat

SEQ ID NO: 178905 - DNA, 25 bp, Artificial
  probe
  misc_feature (1)..(25): SEQ ID NO: 2828; WAN024E2T_at; Start 1037; Stop 1061
aaaatggtttttctcaagcaactcg

SEQ ID NO: 178906 - DNA, 25 bp, Artificial
  probe
  misc_feature (1)..(25): SEQ ID NO: 2828; WAN024E2T_at; Start 102; Stop 126
ggcttacagcctctttacaaaacaa

SEQ ID NO: 178907 - DNA, 25 bp, Artificial
  probe
  misc_feature (1)..(25): SEQ ID NO: 2828; WAN024E2T_at; Start 1845; Stop 1869
caaatatgttggtctcgatggtgcc

SEQ ID NO: 178908 - DNA, 25 bp, Artificial
  probe
  misc_feature (1)..(25): SEQ ID NO: 2828; WAN024E2T_at; Start 642; Stop 666
tgaaaatggaacagacttggaagcc

SEQ ID NO: 178909 - DNA, 25 bp, Artificial
  probe
  misc_feature (1)..(25): SEQ ID NO: 2828; WAN024E2T_at; Start 1753; Stop 1777
gataaacaagatgcagcttacaagg

SEQ ID NO: 178910 - DNA, 25 bp, Artificial
  probe
  misc_feature (1)..(25): SEQ ID NO: 5258; WAN024E2U_s_at; Start 14; Stop 38
gtgttaaattatttcactgtcaaag

SEQ ID NO: 178911 - DNA, 25 bp, Artificial
  probe
  misc_feature (1)..(25): SEQ ID NO: 5258; WAN024E2U_s_at; Start 66; Stop 90
gaaaaaatcgactgaaagtgtctca

SEQ ID NO: 178912 - DNA, 25 bp, Artificial
  probe
  misc_feature (1)..(25): SEQ ID NO: 5258; WAN024E2U_s_at; Start 79; Stop 103
gaaagtgtctcagccgataagaaag

SEQ ID NO: 178913 - DNA, 25 bp, Artificial
  probe
  misc_feature (1)..(25): SEQ ID NO: 5258; WAN024E2U_s_at; Start 86; Stop 110
tctcagccgataagaaaggctcgct

SEQ ID NO: 178914 - DNA, 25 bp, Artificial
  probe
  misc_feature (1)..(25): SEQ ID NO: 5258; WAN024E2U_s_at; Start 23; Stop 47
tatttcactgtcaaagtatatcttt

SEQ ID NO: 178915 - DNA, 25 bp, Artificial
  probe
  misc_feature (1)..(25): SEQ ID NO: 5258; WAN024E2U_s_at; Start 84; Stop 108
tgtctcagccgataagaaaggctcg

SEQ ID NO: 178916 - DNA, 25 bp, Artificial
  probe
  misc_feature (1)..(25): SEQ ID NO: 5258; WAN024E2U_s_at; Start 71; Stop 95
aatcgactgaaagtgtctcagccga

SEQ ID NO: 178917 - DNA, 25 bp, Artificial
  probe
  misc_feature (1)..(25): SEQ ID NO: 5258; WAN024E2U_s_at; Start 74; Stop 98
cgactgaaagtgtctcagccgataa

SEQ ID NO: 178918 - DNA, 25 bp, Artificial
  probe
  misc_feature (1)..(25): SEQ ID NO: 5258; WAN024E2U_s_at; Start 67; Stop 91
aaaaaatcgactgaaagtgtctcag

SEQ ID NO: 178919 - DNA, 25 bp, Artificial
  probe
  misc_feature (1)..(25): SEQ ID NO: 5258; WAN024E2U_s_at; Start 85; Stop 109
gtctcagccgataagaaaggctcgc

SEQ ID NO: 178920 - DNA, 25 bp, Artificial
  probe
  misc_feature (1)..(25): SEQ ID NO: 5258; WAN024E2U_s_at; Start 56; Stop 80
cagaaagcaagaaaaaatcgactga

SEQ ID NO: 178921 - DNA, 25 bp, Artificial
  probe
  misc_feature (1)..(25): SEQ ID NO: 5258; WAN024E2U_s_at; Start 82; Stop 106
agtgtctcagccgataagaaaggct

SEQ ID NO: 178922 - DNA, 25 bp, Artificial
  probe
  misc_feature (1)..(25): SEQ ID NO: 5258; WAN024E2U_s_at; Start 62; Stop 86
gcaagaaaaaatcgactgaaagtgt

SEQ ID NO: 178923 - DNA, 25 bp, Artificial
  probe
  misc_feature (1)..(25): SEQ ID NO: 5258; WAN024E2U_s_at; Start 20; Stop 44
aattatttcactgtcaaagtatatc

SEQ ID NO: 178924 - DNA, 25 bp, Artificial
  probe
  misc_feature (1)..(25): SEQ ID NO: 5258; WAN024E2U_s_at; Start 68; Stop 92
aaaaatcgactgaaagtgtctcagc

SEQ ID NO: 178925 - DNA, 25 bp, Artificial
  probe
  misc_feature (1)..(25): SEQ ID NO: 5258; WAN024E2U_s_at; Start 77; Stop 101
ctgaaagtgtctcagccgataagaa

SEQ ID NO: 178926 - DNA, 25 bp, Artificial
  probe
  misc_feature (1)..(25): SEQ ID NO: 5258; WAN024E2U_s_at; Start 83; Stop 107
gtgtctcagccgataagaaaggctc

SEQ ID NO: 178927 - DNA, 25 bp, Artificial
  probe
  misc_feature (1)..(25): SEQ ID NO: 5258; WAN024E2U_s_at; Start 28; Stop 52
cactgtcaaagtatatcttttttag

SEQ ID NO: 178928 - DNA, 25 bp, Artificial
  probe
  misc_feature (1)..(25): SEQ ID NO: 5258; WAN024E2U_s_at; Start 78; Stop 102
tgaaagtgtctcagccgataagaaa

SEQ ID NO: 178929 - DNA, 25 bp, Artificial
  probe
  misc_feature (1)..(25): SEQ ID NO: 5258; WAN024E2U_s_at; Start 70; Stop 94
aaatcgactgaaagtgtctcagccg

SEQ ID NO: 178930 - DNA, 25 bp, Artificial
  probe
  misc_feature (1)..(25): SEQ ID NO: 5258; WAN024E2U_s_at; Start 58; Stop 82
gaaagcaagaaaaaatcgactgaaa

SEQ ID NO: 178931 - DNA, 25 bp, Artificial
  probe
  misc_feature (1)..(25): SEQ ID NO: 5258; WAN024E2U_s_at; Start 30; Stop 54
ctgtcaaagtatatcttttttagga

SEQ ID NO: 178932 - DNA, 25 bp, Artificial
  probe
  misc_feature (1)..(25): SEQ ID NO: 5258; WAN024E2U_s_at; Start 72; Stop 96
atcgactgaaagtgtctcagccgat

SEQ ID NO: 178933 - DNA, 25 bp, Artificial
  probe
  misc_feature (1)..(25): SEQ ID NO: 5258; WAN024E2U_s_at; Start 57; Stop 81
agaaagcaagaaaaaatcgactgaa

SEQ ID NO: 178934 - DNA, 25 bp, Artificial
  probe
  misc_feature (1)..(25): SEQ ID NO: 5258; WAN024E2U_s_at; Start 59; Stop 83
aaagcaagaaaaaatcgactgaaag

SEQ ID NO: 178935 - DNA, 25 bp, Artificial
  probe
  misc_feature (1)..(25): SEQ ID NO: 5258; WAN024E2U_s_at; Start 12; Stop 36
gagtgttaaattatttcactgtcaa

SEQ ID NO: 178936 - DNA, 25 bp, Artificial
  probe
  misc_feature (1)..(25): SEQ ID NO: 5258; WAN024E2U_s_at; Start 63; Stop 87
caagaaaaaatcgactgaaagtgtc

SEQ ID NO: 178937 - DNA, 25 bp, Artificial
  probe
  misc_feature (1)..(25): SEQ ID NO: 5258; WAN024E2U_s_at; Start 65; Stop 89
agaaaaaatcgactgaaagtgtctc

SEQ ID NO: 178938 - DNA, 25 bp, Artificial
  probe
  misc_feature (1)..(25): SEQ ID NO: 5258; WAN024E2U_s_at; Start 73; Stop 97
tcgactgaaagtgtctcagccgata

SEQ ID NO: 178939 - DNA, 25 bp, Artificial
  probe
  misc_feature (1)..(25): SEQ ID NO: 5258; WAN024E2U_s_at; Start 75; Stop 99
gactgaaagtgtctcagccgataag

SEQ ID NO: 178940 - DNA, 25 bp, Artificial
  probe
  misc_feature (1)..(25): SEQ ID NO: 5258; WAN024E2U_s_at; Start 87; Stop 111
ctcagccgataagaaaggctcgctt

SEQ ID NO: 178941 - DNA, 25 bp, Artificial
  probe
  misc_feature (1)..(25): SEQ ID NO: 5258; WAN024E2U_s_at; Start 69; Stop 93
aaaatcgactgaaagtgtctcagcc

SEQ ID NO: 178942 - DNA, 25 bp, Artificial
  probe
  misc_feature (1)..(25): SEQ ID NO: 5258; WAN024E2U_s_at; Start 76; Stop 100
actgaaagtgtctcagccgataaga

SEQ ID NO: 178943 - DNA, 25 bp, Artificial
  probe
  misc_feature (1)..(25): SEQ ID NO: 5258; WAN024E2U_s_at; Start 16; Stop 40
gttaaattatttcactgtcaaagta

SEQ ID NO: 178944 - DNA, 25 bp, Artificial
  probe
  misc_feature (1)..(25): SEQ ID NO: 5275; WAN024E2V_at; Start 9; Stop 33
tattgagtataccactattttactc

SEQ ID NO: 178945 - DNA, 25 bp, Artificial
  probe
  misc_feature (1)..(25): SEQ ID NO: 5275; WAN024E2V_at; Start 40; Stop 64
gcaagggactttgtctatgtggagg

SEQ ID NO: 178946 - DNA, 25 bp, Artificial
  probe
  misc_feature (1)..(25): SEQ ID NO: 5275; WAN024E2V_at; Start 30; Stop 54
actccctctggcaagggactttgtc

SEQ ID NO: 178947 - DNA, 25 bp, Artificial
  probe
  misc_feature (1)..(25): SEQ ID NO: 5275; WAN024E2V_at; Start 63; Stop 87
gggattgggctcctatgtggtggag

SEQ ID NO: 178948 - DNA, 25 bp, Artificial
  probe
  misc_feature (1)..(25): SEQ ID NO: 5275; WAN024E2V_at; Start 16; Stop 40
tataccactattttactccctctgg

SEQ ID NO: 178949 - DNA, 25 bp, Artificial
  probe
  misc_feature (1)..(25): SEQ ID NO: 5275; WAN024E2V_at; Start 20; Stop 44
ccactattttactccctctggcaag

SEQ ID NO: 178950 - DNA, 25 bp, Artificial
  probe
  misc_feature (1)..(25): SEQ ID NO: 5275; WAN024E2V_at; Start 37; Stop 61
ctggcaagggactttgtctatgtgg

SEQ ID NO: 178951 - DNA, 25 bp, Artificial
  probe
  misc_feature (1)..(25): SEQ ID NO: 5275; WAN024E2V_at; Start 35; Stop 59
ctctggcaagggactttgtctatgt

SEQ ID NO: 178952 - DNA, 25 bp, Artificial
  probe
  misc_feature (1)..(25): SEQ ID NO: 5275; WAN024E2V_at; Start 7; Stop 31
tttattgagtataccactattttac

SEQ ID NO: 178953 - DNA, 25 bp, Artificial
  probe
  misc_feature (1)..(25): SEQ ID NO: 5275; WAN024E2V_at; Start 54; Stop 78
ctatgtggagggattgggctcctat

SEQ ID NO: 178954 - DNA, 25 bp, Artificial
  probe
  misc_feature (1)..(25): SEQ ID NO: 5275; WAN024E2V_at; Start 43; Stop 67
agggactttgtctatgtggagggat

SEQ ID NO: 178955 - DNA, 25 bp, Artificial
  probe
  misc_feature (1)..(25): SEQ ID NO: 5275; WAN024E2V_at; Start 11; Stop 35
ttgagtataccactattttactccc

SEQ ID NO: 178956 - DNA, 25 bp, Artificial
  probe
  misc_feature (1)..(25): SEQ ID NO: 5275; WAN024E2V_at; Start 29; Stop 53
tactccctctggcaagggactttgt

SEQ ID NO: 178957 - DNA, 25 bp, Artificial
  probe
  misc_feature (1)..(25): SEQ ID NO: 5275; WAN024E2V_at; Start 31; Stop 55
ctccctctggcaagggactttgtct

SEQ ID NO: 178958 - DNA, 25 bp, Artificial
  probe
  misc_feature (1)..(25): SEQ ID NO: 5275; WAN024E2V_at; Start 15; Stop 39
gtataccactattttactccctctg

SEQ ID NO: 178959 - DNA, 25 bp, Artificial
  probe
  misc_feature (1)..(25): SEQ ID NO: 5275; WAN024E2V_at; Start 61; Stop 85
gagggattgggctcctatgtggtgg

SEQ ID NO: 178960 - DNA, 25 bp, Artificial
  probe
  misc_feature (1)..(25): SEQ ID NO: 5275; WAN024E2V_at; Start 25; Stop 49
attttactccctctggcaagggact

SEQ ID NO: 178961 - DNA, 25 bp, Artificial
  probe
  misc_feature (1)..(25): SEQ ID NO: 5275; WAN024E2V_at; Start 38; Stop 62
tggcaagggactttgtctatgtgga

SEQ ID NO: 178962 - DNA, 25 bp, Artificial
  probe
  misc_feature (1)..(25): SEQ ID NO: 5275; WAN024E2V_at; Start 53; Stop 77
tctatgtggagggattgggctccta

SEQ ID NO: 178963 - DNA, 25 bp, Artificial
  probe
  misc_feature (1)..(25): SEQ ID NO: 5275; WAN024E2V_at; Start 21; Stop 45
cactattttactccctctggcaagg

SEQ ID NO: 178964 - DNA, 25 bp, Artificial
  probe
  misc_feature (1)..(25): SEQ ID NO: 5275; WAN024E2V_at; Start 41; Stop 65
caagggactttgtctatgtggaggg

SEQ ID NO: 178965 - DNA, 25 bp, Artificial
  probe
  misc_feature (1)..(25): SEQ ID NO: 5275; WAN024E2V_at; Start 17; Stop 41
ataccactattttactccctctggc

SEQ ID NO: 178966 - DNA, 25 bp, Artificial
  probe
  misc_feature (1)..(25): SEQ ID NO: 5275; WAN024E2V_at; Start 18; Stop 42
taccactattttactccctctggca

SEQ ID NO: 178967 - DNA, 25 bp, Artificial
  probe
  misc_feature (1)..(25): SEQ ID NO: 5275; WAN024E2V_at; Start 36; Stop 60
tctggcaagggactttgtctatgtg

SEQ ID NO: 178968 - DNA, 25 bp, Artificial
  probe
  misc_feature (1)..(25): SEQ ID NO: 5275; WAN024E2V_at; Start 62; Stop 86
agggattgggctcctatgtggtgga

SEQ ID NO: 178969 - DNA, 25 bp, Artificial
  probe
  misc_feature (1)..(25): SEQ ID NO: 5275; WAN024E2V_at; Start 34; Stop 58
cctctggcaagggactttgtctatg

SEQ ID NO: 178970 - DNA, 25 bp, Artificial
  probe
  misc_feature (1)..(25): SEQ ID NO: 5275; WAN024E2V_at; Start 24; Stop 48
tattttactccctctggcaagggac

SEQ ID NO: 178971 - DNA, 25 bp, Artificial
  probe
  misc_feature (1)..(25): SEQ ID NO: 5275; WAN024E2V_at; Start 23; Stop 47
ctattttactccctctggcaaggga

SEQ ID NO: 178972 - DNA, 25 bp, Artificial
  probe
  misc_feature (1)..(25): SEQ ID NO: 5275; WAN024E2V_at; Start 13; Stop 37
gagtataccactattttactccctc

SEQ ID NO: 178973 - DNA, 25 bp, Artificial
  probe
  misc_feature (1)..(25): SEQ ID NO: 5275; WAN024E2V_at; Start 32; Stop 56
tccctctggcaagggactttgtcta

SEQ ID NO: 178974 - DNA, 25 bp, Artificial
  probe
  misc_feature (1)..(25): SEQ ID NO: 5275; WAN024E2V_at; Start 19; Stop 43
accactattttactccctctggcaa

SEQ ID NO: 178975 - DNA, 25 bp, Artificial
  probe
  misc_feature (1)..(25): SEQ ID NO: 5275; WAN024E2V_at; Start 57; Stop 81
tgtggagggattgggctcctatgtg

SEQ ID NO: 178976 - DNA, 25 bp, Artificial
  probe
  misc_feature (1)..(25): SEQ ID NO: 5275; WAN024E2V_at; Start 12; Stop 36
tgagtataccactattttactccct

SEQ ID NO: 178977 - DNA, 25 bp, Artificial
  probe
  misc_feature (1)..(25): SEQ ID NO: 5275; WAN024E2V_at; Start 55; Stop 79
tatgtggagggattgggctcctatg

SEQ ID NO: 178978 - DNA, 25 bp, Artificial
  probe
  misc_feature (1)..(25): SEQ ID NO: 4108; WAN024E2W_at; Start 293; Stop 317
gctggacctacgaaggtgattttgt

SEQ ID NO: 178979 - DNA, 25 bp, Artificial
  probe
  misc_feature (1)..(25): SEQ ID NO: 4108; WAN024E2W_at; Start 280; Stop 304
caatctaaagaaggctggacctacg

SEQ ID NO: 178980 - DNA, 25 bp, Artificial
  probe
  misc_feature (1)..(25): SEQ ID NO: 4108; WAN024E2W_at; Start 283; Stop 307
tctaaagaaggctggacctacgaag

SEQ ID NO: 178981 - DNA, 25 bp, Artificial
  probe
  misc_feature (1)..(25): SEQ ID NO: 4108; WAN024E2W_at; Start 127; Stop 151
aaaggtgtcttaaaactcgataatg

SEQ ID NO: 178982 - DNA, 25 bp, Artificial
  probe
  misc_feature (1)..(25): SEQ ID NO: 4108; WAN024E2W_at; Start 92; Stop 116
gtgctgtactcgtcttttttctaaa

SEQ ID NO: 178983 - DNA, 25 bp, Artificial
  probe
  misc_feature (1)..(25): SEQ ID NO: 4108; WAN024E2W_at; Start 342; Stop 366
gaaactaacaacagaacaagaagtc

SEQ ID NO: 178984 - DNA, 25 bp, Artificial
  probe
  misc_feature (1)..(25): SEQ ID NO: 4108; WAN024E2W_at; Start 346; Stop 370
ctaacaacagaacaagaagtcgttt

SEQ ID NO: 178985 - DNA, 25 bp, Artificial
  probe
  misc_feature (1)..(25): SEQ ID NO: 4108; WAN024E2W_at; Start 215; Stop 239
tccaaaatggagaccaatatacagg

SEQ ID NO: 178986 - DNA, 25 bp, Artificial
  probe
  misc_feature (1)..(25): SEQ ID NO: 4108; WAN024E2W_at; Start 310; Stop 334
gattttgtaaatggtcaggctgaag

SEQ ID NO: 178987 - DNA, 25 bp, Artificial
  probe
  misc_feature (1)..(25): SEQ ID NO: 4108; WAN024E2W_at; Start 229; Stop 253
caatatacaggtggcttcaacaatg

SEQ ID NO: 178988 - DNA, 25 bp, Artificial
  probe
  misc_feature (1)..(25): SEQ ID NO: 4108; WAN024E2W_at; Start 199; Stop 223
caaggtaccattaccttccaaaatg

SEQ ID NO: 178989 - DNA, 25 bp, Artificial
  probe
  misc_feature (1)..(25): SEQ ID NO: 4108; WAN024E2W_at; Start 132; Stop 156
tgtcttaaaactcgataatggaacg

SEQ ID NO: 178990 - DNA, 25 bp, Artificial
  probe
  misc_feature (1)..(25): SEQ ID NO: 4108; WAN024E2W_at; Start 242; Stop 266
gcttcaacaatggagccttcaacgg

SEQ ID NO: 178991 - DNA, 25 bp, Artificial
  probe
  misc_feature (1)..(25): SEQ ID NO: 4108; WAN024E2W_at; Start 301; Stop 325
tacgaaggtgattttgtaaatggtc

SEQ ID NO: 178992 - DNA, 25 bp, Artificial
  probe
  misc_feature (1)..(25): SEQ ID NO: 4108; WAN024E2W_at; Start 353; Stop 377
cagaacaagaagtcgtttatgaagg

SEQ ID NO: 178993 - DNA, 25 bp, Artificial
  probe
  misc_feature (1)..(25): SEQ ID NO: 4108; WAN024E2W_at; Start 246; Stop 270
caacaatggagccttcaacggaaaa

SEQ ID NO: 178994 - DNA, 25 bp, Artificial
  probe
  misc_feature (1)..(25): SEQ ID NO: 4108; WAN024E2W_at; Start 151; Stop 175
ggaacgattgtttatgatggcagtc

SEQ ID NO: 178995 - DNA, 25 bp, Artificial
  probe
  misc_feature (1)..(25): SEQ ID NO: 4108; WAN024E2W_at; Start 249; Stop 273
caatggagccttcaacggaaaaggt

SEQ ID NO: 178996 - DNA, 25 bp, Artificial
  probe
  misc_feature (1)..(25): SEQ ID NO: 4108; WAN024E2W_at; Start 226; Stop 250
gaccaatatacaggtggcttcaaca

SEQ ID NO: 178997 - DNA, 25 bp, Artificial
  probe
  misc_feature (1)..(25): SEQ ID NO: 4108; WAN024E2W_at; Start 286; Stop 310
aaagaaggctggacctacgaaggtg

SEQ ID NO: 178998 - DNA, 25 bp, Artificial
  probe
  misc_feature (1)..(25): SEQ ID NO: 4108; WAN024E2W_at; Start 207; Stop 231
cattaccttccaaaatggagaccaa

SEQ ID NO: 178999 - DNA, 25 bp, Artificial
  probe
  misc_feature (1)..(25): SEQ ID NO: 4108; WAN024E2W_at; Start 232; Stop 256
tatacaggtggcttcaacaatggag

SEQ ID NO: 179000 - DNA, 25 bp, Artificial
  probe
  misc_feature (1)..(25): SEQ ID NO: 4108; WAN024E2W_at; Start 222; Stop 246
tggagaccaatatacaggtggcttc

SEQ ID NO: 179001 - DNA, 25 bp, Artificial
  probe
  misc_feature (1)..(25): SEQ ID NO: 4108; WAN024E2W_at; Start 358; Stop 382
caagaagtcgtttatgaaggaactt

SEQ ID NO: 179002 - DNA, 25 bp, Artificial
  probe
  misc_feature (1)..(25): SEQ ID NO: 4108; WAN024E2W_at; Start 278; Stop 302
ttcaatctaaagaaggctggaccta

SEQ ID NO: 179003 - DNA, 25 bp, Artificial
  probe
  misc_feature (1)..(25): SEQ ID NO: 4108; WAN024E2W_at; Start 234; Stop 258
tacaggtggcttcaacaatggagcc

SEQ ID NO: 179004 - DNA, 25 bp, Artificial
  probe
  misc_feature (1)..(25): SEQ ID NO: 4108; WAN024E2W_at; Start 312; Stop 336
ttttgtaaatggtcaggctgaagga

SEQ ID NO: 179005 - DNA, 25 bp, Artificial
  probe
  misc_feature (1)..(25): SEQ ID NO: 4108; WAN024E2W_at; Start 219; Stop 243
aaatggagaccaatatacaggtggc

SEQ ID NO: 179006 - DNA, 25 bp, Artificial
  probe
  misc_feature (1)..(25): SEQ ID NO: 4108; WAN024E2W_at; Start 137; Stop 161
taaaactcgataatggaacgattgt

SEQ ID NO: 179007 - DNA, 25 bp, Artificial
  probe
  misc_feature (1)..(25): SEQ ID NO: 4108; WAN024E2W_at; Start 157; Stop 181
attgtttatgatggcagtcttgtcc

SEQ ID NO: 179008 - DNA, 25 bp, Artificial
  probe
  misc_feature (1)..(25): SEQ ID NO: 4108; WAN024E2W_at; Start 111; Stop 135
tctaaatattccaggaaaaggtgtc

SEQ ID NO: 179009 - DNA, 25 bp, Artificial
  probe
  misc_feature (1)..(25): SEQ ID NO: 4108; WAN024E2W_at; Start 324; Stop 348
tcaggctgaaggaaaagggaaacta

SEQ ID NO: 179010 - DNA, 25 bp, Artificial
  probe
  misc_feature (1)..(25): SEQ ID NO: 4108; WAN024E2W_at; Start 238; Stop 262
ggtggcttcaacaatggagccttca

SEQ ID NO: 179011 - DNA, 25 bp, Artificial
  probe
  misc_feature (1)..(25): SEQ ID NO: 4108; WAN024E2W_at; Start 289; Stop 313
gaaggctggacctacgaaggtgatt

SEQ ID NO: 179012 - DNA, 25 bp, Artificial
  probe
  misc_feature (1)..(25): SEQ ID NO: 5452; WAN024E2X_at; Start 159; Stop 183
ccggttctacatccgcaaagatttg

SEQ ID NO: 179013 - DNA, 25 bp, Artificial
  probe
  misc_feature (1)..(25): SEQ ID NO: 5452; WAN024E2X_at; Start 282; Stop 306
caacgtcacgacatttttgaaggta

SEQ ID NO: 179014 - DNA, 25 bp, Artificial
  probe
  misc_feature (1)..(25): SEQ ID NO: 5452; WAN024E2X_at; Start 235; Stop 259
gaaaccaagctctaccatggcatgg

SEQ ID NO: 179015 - DNA, 25 bp, Artificial
  probe
  misc_feature (1)..(25): SEQ ID NO: 5452; WAN024E2X_at; Start 58; Stop 82
ggcagcatccattggagacccacca

SEQ ID NO: 179016 - DNA, 25 bp, Artificial
  probe
  misc_feature (1)..(25): SEQ ID NO: 5452; WAN024E2X_at; Start 223; Stop 247
gatacgatcaaggaaaccaagctct

SEQ ID NO: 179017 - DNA, 25 bp, Artificial
  probe
  misc_feature (1)..(25): SEQ ID NO: 5452; WAN024E2X_at; Start 147; Stop 171
tgatatctggatccggttctacatc

SEQ ID NO: 179018 - DNA, 25 bp, Artificial
  probe
  misc_feature (1)..(25): SEQ ID NO: 5452; WAN024E2X_at; Start 6; Stop 30
caaggtcacggaagtccacttctgg

SEQ ID NO: 179019 - DNA, 25 bp, Artificial
  probe
  misc_feature (1)..(25): SEQ ID NO: 5452; WAN024E2X_at; Start 81; Stop 105
caccgagtgcgatgatggtatctgg

SEQ ID NO: 179020 - DNA, 25 bp, Artificial
  probe
  misc_feature (1)..(25): SEQ ID NO: 5452; WAN024E2X_at; Start 205; Stop 229
aaggtccagttgttcgatgatacga

SEQ ID NO: 179021 - DNA, 25 bp, Artificial
  probe
  misc_feature (1)..(25): SEQ ID NO: 5452; WAN024E2X_at; Start 230; Stop 254
tcaaggaaaccaagctctaccatgg

SEQ ID NO: 179022 - DNA, 25 bp, Artificial
  probe
  misc_feature (1)..(25): SEQ ID NO: 5452; WAN024E2X_at; Start 1; Stop 25
ttggacaaggtcacggaagtccact

SEQ ID NO: 179023 - DNA, 25 bp, Artificial
  probe
  misc_feature (1)..(25): SEQ ID NO: 5452; WAN024E2X_at; Start 125; Stop 149
tcagtaccacggtttacagttgtga

SEQ ID NO: 179024 - DNA, 25 bp, Artificial
  probe
  misc_feature (1)..(25): SEQ ID NO: 5452; WAN024E2X_at; Start 104; Stop 128
ggtttgaaggcacgcataatctcag

SEQ ID NO: 179025 - DNA, 25 bp, Artificial
  probe
  misc_feature (1)..(25): SEQ ID NO: 5452; WAN024E2X_at; Start 138; Stop 162
ttacagttgtgatatctggatccgg

SEQ ID NO: 179026 - DNA, 25 bp, Artificial
  probe
  misc_feature (1)..(25): SEQ ID NO: 5452; WAN024E2X_at; Start 35; Stop 59
tcgtagaagagccacattactttgg

SEQ ID NO: 179027 - DNA, 25 bp, Artificial
  probe
  misc_feature (1)..(25): SEQ ID NO: 5452; WAN024E2X_at; Start 195; Stop 219
tattgcgacgaaggtccagttgttc

SEQ ID NO: 179028 - DNA, 25 bp, Artificial
  probe
  misc_feature (1)..(25): SEQ ID NO: 5452; WAN024E2X_at; Start 154; Stop 178
tggatccggttctacatccgcaaag

SEQ ID NO: 179029 - DNA, 25 bp, Artificial
  probe
  misc_feature (1)..(25): SEQ ID NO: 5452; WAN024E2X_at; Start 73; Stop 97
agacccaccaccgagtgcgatgatg

SEQ ID NO: 179030 - DNA, 25 bp, Artificial
  probe
  misc_feature (1)..(25): SEQ ID NO: 5452; WAN024E2X_at; Start 112; Stop 136
ggcacgcataatctcagtaccacgg

SEQ ID NO: 179031 - DNA, 25 bp, Artificial
  probe
  misc_feature (1)..(25): SEQ ID NO: 5452; WAN024E2X_at; Start 52; Stop 76
tactttggcagcatccattggagac

SEQ ID NO: 179032 - DNA, 25 bp, Artificial
  probe
  misc_feature (1)..(25): SEQ ID NO: 5452; WAN024E2X_at; Start 255; Stop 279
catggtcagtaacgatcatgacacg

SEQ ID NO: 179033 - DNA, 25 bp, Artificial
  probe
  misc_feature (1)..(25): SEQ ID NO: 5452; WAN024E2X_at; Start 26; Stop 50
tctggttgctcgtagaagagccaca

SEQ ID NO: 179034 - DNA, 25 bp, Artificial
  probe
  misc_feature (1)..(25): SEQ ID NO: 5452; WAN024E2X_at; Start 168; Stop 192
catccgcaaagatttggtaaacaac

SEQ ID NO: 179035 - DNA, 25 bp, Artificial
  probe
  misc_feature (1)..(25): SEQ ID NO: 5452; WAN024E2X_at; Start 220; Stop 244
gatgatacgatcaaggaaaccaagc

SEQ ID NO: 179036 - DNA, 25 bp, Artificial
  probe
  misc_feature (1)..(25): SEQ ID NO: 5452; WAN024E2X_at; Start 288; Stop 312
cacgacatttttgaaggtattgaat

SEQ ID NO: 179037 - DNA, 25 bp, Artificial
  probe
  misc_feature (1)..(25): SEQ ID NO: 5452; WAN024E2X_at; Start 94; Stop 118
gatggtatctggtttgaaggcacgc

SEQ ID NO: 179038 - DNA, 25 bp, Artificial
  probe
  misc_feature (1)..(25): SEQ ID NO: 5452; WAN024E2X_at; Start 189; Stop 213
caaccttattgcgacgaaggtccag

SEQ ID NO: 179039 - DNA, 25 bp, Artificial
  probe
  misc_feature (1)..(25): SEQ ID NO: 5452; WAN024E2X_at; Start 182; Stop 206
tggtaaacaaccttattgcgacgaa

SEQ ID NO: 179040 - DNA, 25 bp, Artificial
  probe
  misc_feature (1)..(25): SEQ ID NO: 5452; WAN024E2X_at; Start 16; Stop 40
gaagtccacttctggttgctcgtag

SEQ ID NO: 179041 - DNA, 25 bp, Artificial
  probe
  misc_feature (1)..(25): SEQ ID NO: 5452; WAN024E2X_at; Start 264; Stop 288
taacgatcatgacacgttcaacgtc

SEQ ID NO: 179042 - DNA, 25 bp, Artificial
  probe
  misc_feature (1)..(25): SEQ ID NO: 5452; WAN024E2X_at; Start 116; Stop 140
cgcataatctcagtaccacggttta

SEQ ID NO: 179043 - DNA, 25 bp, Artificial
  probe
  misc_feature (1)..(25): SEQ ID NO: 5452; WAN024E2X_at; Start 274; Stop 298
gacacgttcaacgtcacgacatttt

SEQ ID NO: 179044 - DNA, 25 bp, Artificial
  probe
  misc_feature (1)..(25): SEQ ID NO: 5452; WAN024E2X_at; Start 247; Stop 271
taccatggcatggtcagtaacgatc

SEQ ID NO: 179045 - DNA, 25 bp, Artificial
  probe
  misc_feature (1)..(25): SEQ ID NO: 5452; WAN024E2X_at; Start 40; Stop 64
gaagagccacattactttggcagca

SEQ ID NO: 179046 - DNA, 25 bp, Artificial
  probe
  misc_feature (1)..(25): SEQ ID NO: 5820; WAN024E2Y_at; Start 5; Stop 29
tctgcaatccaagttgctggtttac

SEQ ID NO: 179047 - DNA, 25 bp, Artificial
  probe
  misc_feature (1)..(25): SEQ ID NO: 5820; WAN024E2Y_at; Start 23; Stop 47
ggtttaccaacgatgtcagcgttca

SEQ ID NO: 179048 - DNA, 25 bp, Artificial
  probe
  misc_feature (1)..(25): SEQ ID NO: 5820; WAN024E2Y_at; Start 193; Stop 217
aactgcttgttcagatgcacagacc

SEQ ID NO: 179049 - DNA, 25 bp, Artificial
  probe
  misc_feature (1)..(25): SEQ ID NO: 5820; WAN024E2Y_at; Start 27; Stop 51
taccaacgatgtcagcgttcaattt

SEQ ID NO: 179050 - DNA, 25 bp, Artificial
  probe
  misc_feature (1)..(25): SEQ ID NO: 5820; WAN024E2Y_at; Start 200; Stop 224
tgttcagatgcacagaccataccgt

SEQ ID NO: 179051 - DNA, 25 bp, Artificial
  probe
  misc_feature (1)..(25): SEQ ID NO: 5820; WAN024E2Y_at; Start 186; Stop 210
caatgataactgcttgttcagatgc

SEQ ID NO: 179052 - DNA, 25 bp, Artificial
  probe
  misc_feature (1)..(25): SEQ ID NO: 5820; WAN024E2Y_at; Start 42; Stop 66
cgttcaattttgcaccagcacagtt

SEQ ID NO: 179053 - DNA, 25 bp, Artificial
  probe
  misc_feature (1)..(25): SEQ ID NO: 5820; WAN024E2Y_at; Start 123; Stop 147
tgtttacaaagtaagtgtggtaaga

SEQ ID NO: 179054 - DNA, 25 bp, Artificial
  probe
  misc_feature (1)..(25): SEQ ID NO: 5820; WAN024E2Y_at; Start 13; Stop 37
ccaagttgctggtttaccaacgatg

SEQ ID NO: 179055 - DNA, 25 bp, Artificial
  probe
  misc_feature (1)..(25): SEQ ID NO: 5820; WAN024E2Y_at; Start 94; Stop 118
gaactcttcaagaagagctttttct

SEQ ID NO: 179056 - DNA, 25 bp, Artificial
  probe
  misc_feature (1)..(25): SEQ ID NO: 5820; WAN024E2Y_at; Start 47; Stop 71
aattttgcaccagcacagtttttgc

SEQ ID NO: 179057 - DNA, 25 bp, Artificial
  probe
  misc_feature (1)..(25): SEQ ID NO: 5820; WAN024E2Y_at; Start 87; Stop 111
cgaagcagaactcttcaagaagagc

SEQ ID NO: 179058 - DNA, 25 bp, Artificial
  probe
  misc_feature (1)..(25): SEQ ID NO: 5820; WAN024E2Y_at; Start 10; Stop 34
aatccaagttgctggtttaccaacg

SEQ ID NO: 179059 - DNA, 25 bp, Artificial
  probe
  misc_feature (1)..(25): SEQ ID NO: 5820; WAN024E2Y_at; Start 82; Stop 106
gacgccgaagcagaactcttcaaga

SEQ ID NO: 179060 - DNA, 25 bp, Artificial
  probe
  misc_feature (1)..(25): SEQ ID NO: 5820; WAN024E2Y_at; Start 190; Stop 214
gataactgcttgttcagatgcacag

SEQ ID NO: 179061 - DNA, 25 bp, Artificial
  probe
  misc_feature (1)..(25): SEQ ID NO: 5820; WAN024E2Y_at; Start 151; Stop 175
gaactctgctacaaattcatcgtaa

SEQ ID NO: 179062 - DNA, 25 bp, Artificial
  probe
  misc_feature (1)..(25): SEQ ID NO: 5820; WAN024E2Y_at; Start 196; Stop 220
tgcttgttcagatgcacagaccata

SEQ ID NO: 179063 - DNA, 25 bp, Artificial
  probe
  misc_feature (1)..(25): SEQ ID NO: 5820; WAN024E2Y_at; Start 67; Stop 91
tttgctgtttgctttgacgccgaag

SEQ ID NO: 179064 - DNA, 25 bp, Artificial
  probe
  misc_feature (1)..(25): SEQ ID NO: 5820; WAN024E2Y_at; Start 79; Stop 103
tttgacgccgaagcagaactcttca

SEQ ID NO: 179065 - DNA, 25 bp, Artificial
  probe
  misc_feature (1)..(25): SEQ ID NO: 5820; WAN024E2Y_at; Start 1; Stop 25
ttgttctgcaatccaagttgctggt

SEQ ID NO: 179066 - DNA, 25 bp, Artificial
  probe
  misc_feature (1)..(25): SEQ ID NO: 5820; WAN024E2Y_at; Start 206; Stop 230
gatgcacagaccataccgttatcaa

SEQ ID NO: 179067 - DNA, 25 bp, Artificial
  probe
  misc_feature (1)..(25): SEQ ID NO: 5820; WAN024E2Y_at; Start 53; Stop 77
gcaccagcacagtttttgctgtttg

SEQ ID NO: 179068 - DNA, 25 bp, Artificial
  probe
  misc_feature (1)..(25): SEQ ID NO: 5820; WAN024E2Y_at; Start 203; Stop 227
tcagatgcacagaccataccgttat

SEQ ID NO: 179069 - DNA, 25 bp, Artificial
  probe
  misc_feature (1)..(25): SEQ ID NO: 5820; WAN024E2Y_at; Start 19; Stop 43
tgctggtttaccaacgatgtcagcg

SEQ ID NO: 179070 - DNA, 25 bp, Artificial
  probe
  misc_feature (1)..(25): SEQ ID NO: 5820; WAN024E2Y_at; Start 135; Stop 159
aagtgtggtaagatttgaactctgc

SEQ ID NO: 179071 - DNA, 25 bp, Artificial
  probe
  misc_feature (1)..(25): SEQ ID NO: 5820; WAN024E2Y_at; Start 62; Stop 86
cagtttttgctgtttgctttgacgc

SEQ ID NO: 179072 - DNA, 25 bp, Artificial
  probe
  misc_feature (1)..(25): SEQ ID NO: 5820; WAN024E2Y_at; Start 138; Stop 162
tgtggtaagatttgaactctgctac

SEQ ID NO: 179073 - DNA, 25 bp, Artificial
  probe
  misc_feature (1)..(25): SEQ ID NO: 5820; WAN024E2Y_at; Start 70; Stop 94
gctgtttgctttgacgccgaagcag

SEQ ID NO: 179074 - DNA, 25 bp, Artificial
  probe
  misc_feature (1)..(25): SEQ ID NO: 5820; WAN024E2Y_at; Start 39; Stop 63
cagcgttcaattttgcaccagcaca

SEQ ID NO: 179075 - DNA, 25 bp, Artificial
  probe
  misc_feature (1)..(25): SEQ ID NO: 5820; WAN024E2Y_at; Start 209; Stop 233
gcacagaccataccgttatcaaatg

SEQ ID NO: 179076 - DNA, 25 bp, Artificial
  probe
  misc_feature (1)..(25): SEQ ID NO: 5820; WAN024E2Y_at; Start 171; Stop 195
cgtaaatttctttatcaatgataac

SEQ ID NO: 179077 - DNA, 25 bp, Artificial
  probe
  misc_feature (1)..(25): SEQ ID NO: 5820; WAN024E2Y_at; Start 76; Stop 100
tgctttgacgccgaagcagaactct

SEQ ID NO: 179078 - DNA, 25 bp, Artificial
  probe
  misc_feature (1)..(25): SEQ ID NO: 5820; WAN024E2Y_at; Start 157; Stop 181
tgctacaaattcatcgtaaatttct

SEQ ID NO: 179079 - DNA, 25 bp, Artificial
  probe
  misc_feature (1)..(25): SEQ ID NO: 5820; WAN024E2Y_at; Start 34; Stop 58
gatgtcagcgttcaattttgcacca

SEQ ID NO: 179080 - DNA, 25 bp, Artificial
  probe
  misc_feature (1)..(25): SEQ ID NO: 3046; WAN024E2Z_at; Start 204; Stop 228
tagctggacgtgtaccgttgtaacg

SEQ ID NO: 179081 - DNA, 25 bp, Artificial
  probe
  misc_feature (1)..(25): SEQ ID NO: 3046; WAN024E2Z_at; Start 196; Stop 220
tgctgtcttagctggacgtgtaccg

SEQ ID NO: 179082 - DNA, 25 bp, Artificial
  probe
  misc_feature (1)..(25): SEQ ID NO: 3046; WAN024E2Z_at; Start 277; Stop 301
gaattgcgcaccaatcttatgggcc

SEQ ID NO: 179083 - DNA, 25 bp, Artificial
  probe
  misc_feature (1)..(25): SEQ ID NO: 3046; WAN024E2Z_at; Start 262; Stop 286
accgtggattgtgtggaattgcgca

SEQ ID NO: 179084 - DNA, 25 bp, Artificial
  probe
  misc_feature (1)..(25): SEQ ID NO: 3046; WAN024E2Z_at; Start 135; Stop 159
gcatgcgtgcgatatcttggtattt

SEQ ID NO: 179085 - DNA, 25 bp, Artificial
  probe
  misc_feature (1)..(25): SEQ ID NO: 3046; WAN024E2Z_at; Start 266; Stop 290
tggattgtgtggaattgcgcaccaa

SEQ ID NO: 179086 - DNA, 25 bp, Artificial
  probe
  misc_feature (1)..(25): SEQ ID NO: 3046; WAN024E2Z_at; Start 29; Stop 53
ccttggtctctaaaattcatttgga

SEQ ID NO: 179087 - DNA, 25 bp, Artificial
  probe
  misc_feature (1)..(25): SEQ ID NO: 3046; WAN024E2Z_at; Start 52; Stop 76
gatcccaatacgttcaccgagttcg

SEQ ID NO: 179088 - DNA, 25 bp, Artificial
  probe
  misc_feature (1)..(25): SEQ ID NO: 3046; WAN024E2Z_at; Start 95; Stop 119
gattcaaccccttcttctggagtag

SEQ ID NO: 179089 - DNA, 25 bp, Artificial
  probe
  misc_feature (1)..(25): SEQ ID NO: 3046; WAN024E2Z_at; Start 117; Stop 141
tagaagctggaagtccaagcatgcg

SEQ ID NO: 179090 - DNA, 25 bp, Artificial
  probe
  misc_feature (1)..(25): SEQ ID NO: 3046; WAN024E2Z_at; Start 70; Stop 94
gagttcgtagacagcttttgcgtaa

SEQ ID NO: 179091 - DNA, 25 bp, Artificial
  probe
  misc_feature (1)..(25): SEQ ID NO: 3046; WAN024E2Z_at; Start 251; Stop 275
gcatttgtacgaccgtggattgtgt

SEQ ID NO: 179092 - DNA, 25 bp, Artificial
  probe
  misc_feature (1)..(25): SEQ ID NO: 3046; WAN024E2Z_at; Start 122; Stop 146
gctggaagtccaagcatgcgtgcga

SEQ ID NO: 179093 - DNA, 25 bp, Artificial
  probe
  misc_feature (1)..(25): SEQ ID NO: 3046; WAN024E2Z_at; Start 282; Stop 306
gcgcaccaatcttatgggccattga

SEQ ID NO: 179094 - DNA, 25 bp, Artificial
  probe
  misc_feature (1)..(25): SEQ ID NO: 3046; WAN024E2Z_at; Start 14; Stop 38
tctttttcgtcaattccttggtctc

SEQ ID NO: 179095 - DNA, 25 bp, Artificial
  probe
  misc_feature (1)..(25): SEQ ID NO: 3046; WAN024E2Z_at; Start 244; Stop 268
caagatagcatttgtacgaccgtgg

SEQ ID NO: 179096 - DNA, 25 bp, Artificial
  probe
  misc_feature (1)..(25): SEQ ID NO: 3046; WAN024E2Z_at; Start 104; Stop 128
ccttcttctggagtagaagctggaa

SEQ ID NO: 179097 - DNA, 25 bp, Artificial
  probe
  misc_feature (1)..(25): SEQ ID NO: 3046; WAN024E2Z_at; Start 39; Stop 63
taaaattcatttggatcccaatacg

SEQ ID NO: 179098 - DNA, 25 bp, Artificial
  probe
  misc_feature (1)..(25): SEQ ID NO: 3046; WAN024E2Z_at; Start 176; Stop 200
tagttgtacttaggccatgttgctg

SEQ ID NO: 179099 - DNA, 25 bp, Artificial
  probe
  misc_feature (1)..(25): SEQ ID NO: 3046; WAN024E2Z_at; Start 182; Stop 206
tacttaggccatgttgctgtcttag

SEQ ID NO: 179100 - DNA, 25 bp, Artificial
  probe
  misc_feature (1)..(25): SEQ ID NO: 3046; WAN024E2Z_at; Start 81; Stop 105
cagcttttgcgtaagattcaacccc

SEQ ID NO: 179101 - DNA, 25 bp, Artificial
  probe
  misc_feature (1)..(25): SEQ ID NO: 3046; WAN024E2Z_at; Start 2; Stop 26
tgttctttccattctttttcgtcaa

SEQ ID NO: 179102 - DNA, 25 bp, Artificial
  probe
  misc_feature (1)..(25): SEQ ID NO: 3046; WAN024E2Z_at; Start 189; Stop 213
gccatgttgctgtcttagctggacg

SEQ ID NO: 179103 - DNA, 25 bp, Artificial
  probe
  misc_feature (1)..(25): SEQ ID NO: 3046; WAN024E2Z_at; Start 208; Stop 232
tggacgtgtaccgttgtaacggata

SEQ ID NO: 179104 - DNA, 25 bp, Artificial
  probe
  misc_feature (1)..(25): SEQ ID NO: 3046; WAN024E2Z_at; Start 229; Stop 253
gataacgtatggaagcaagatagca

SEQ ID NO: 179105 - DNA, 25 bp, Artificial
  probe
  misc_feature (1)..(25): SEQ ID NO: 3046; WAN024E2Z_at; Start 66; Stop 90
caccgagttcgtagacagcttttgc

SEQ ID NO: 179106 - DNA, 25 bp, Artificial
  probe
  misc_feature (1)..(25): SEQ ID NO: 3046; WAN024E2Z_at; Start 224; Stop 248
taacggataacgtatggaagcaaga

SEQ ID NO: 179107 - DNA, 25 bp, Artificial
  probe
  misc_feature (1)..(25): SEQ ID NO: 3046; WAN024E2Z_at; Start 161; Stop 185
tcatctgcacggtagtagttgtact

SEQ ID NO: 179108 - DNA, 25 bp, Artificial
  probe
  misc_feature (1)..(25): SEQ ID NO: 3046; WAN024E2Z_at; Start 60; Stop 84
tacgttcaccgagttcgtagacagc

SEQ ID NO: 179109 - DNA, 25 bp, Artificial
  probe
  misc_feature (1)..(25): SEQ ID NO: 3046; WAN024E2Z_at; Start 153; Stop 177
ggtatttttcatctgcacggtagta

SEQ ID NO: 179110 - DNA, 25 bp, Artificial
  probe
  misc_feature (1)..(25): SEQ ID NO: 3046; WAN024E2Z_at; Start 147; Stop 171
tatcttggtatttttcatctgcacg

SEQ ID NO: 179111 - DNA, 25 bp, Artificial
  probe
  misc_feature (1)..(25): SEQ ID NO: 3046; WAN024E2Z_at; Start 127; Stop 151
aagtccaagcatgcgtgcgatatct

SEQ ID NO: 179112 - DNA, 25 bp, Artificial
  probe
  misc_feature (1)..(25): SEQ ID NO: 3046; WAN024E2Z_at; Start 168; Stop 192
cacggtagtagttgtacttaggcca

SEQ ID NO: 179113 - DNA, 25 bp, Artificial
  probe
  misc_feature (1)..(25): SEQ ID NO: 3046; WAN024E2Z_at; Start 48; Stop 72
tttggatcccaatacgttcaccgag

SEQ ID NO: 179114 - DNA, 25 bp, Artificial
  probe
  misc_feature (1)..(25): SEQ ID NO: 4950; WAN024ER6_at; Start 304; Stop 328
tcttcaagggcaactagagcttttt

SEQ ID NO: 179115 - DNA, 25 bp, Artificial
  probe
  misc_feature (1)..(25): SEQ ID NO: 4950; WAN024ER6_at; Start 253; Stop 277
gatgctttggcaacgatgtagtcaa

SEQ ID NO: 179116 - DNA, 25 bp, Artificial
  probe
  misc_feature (1)..(25): SEQ ID NO: 4950; WAN024ER6_at; Start 244; Stop 268
gctgctactgatgctttggcaacga

SEQ ID NO: 179117 - DNA, 25 bp, Artificial
  probe
  misc_feature (1)..(25): SEQ ID NO: 4950; WAN024ER6_at; Start 365; Stop 389
tcttttcctctggtgtcacagtttt

SEQ ID NO: 179118 - DNA, 25 bp, Artificial
  probe
  misc_feature (1)..(25): SEQ ID NO: 4950; WAN024ER6_at; Start 34; Stop 58
ggagtaataccacaaacaacaccaa

SEQ ID NO: 179119 - DNA, 25 bp, Artificial
  probe
  misc_feature (1)..(25): SEQ ID NO: 4950; WAN024ER6_at; Start 71; Stop 95
taagagtcaatcctgttacatcgtc

SEQ ID NO: 179120 - DNA, 25 bp, Artificial
  probe
  misc_feature (1)..(25): SEQ ID NO: 4950; WAN024ER6_at; Start 353; Stop 377
cagcaacgagtttcttttcctctgg

SEQ ID NO: 179121 - DNA, 25 bp, Artificial
  probe
  misc_feature (1)..(25): SEQ ID NO: 4950; WAN024ER6_at; Start 55; Stop 79
ccaactggttcagcaataagagtca

SEQ ID NO: 179122 - DNA, 25 bp, Artificial
  probe
  misc_feature (1)..(25): SEQ ID NO: 4950; WAN024ER6_at; Start 323; Stop 347
ctttttgaaccaactcatctacgtg

SEQ ID NO: 179123 - DNA, 25 bp, Artificial
  probe
  misc_feature (1)..(25): SEQ ID NO: 4950; WAN024ER6_at; Start 257; Stop 281
ctttggcaacgatgtagtcaacttg

SEQ ID NO: 179124 - DNA, 25 bp, Artificial
  probe
  misc_feature (1)..(25): SEQ ID NO: 4950; WAN024ER6_at; Start 296; Stop 320
tacgcatttcttcaagggcaactag

SEQ ID NO: 179125 - DNA, 25 bp, Artificial
  probe
  misc_feature (1)..(25): SEQ ID NO: 4950; WAN024ER6_at; Start 206; Stop 230
caaaggcatgtaaagccaattctcc

SEQ ID NO: 179126 - DNA, 25 bp, Artificial
  probe
  misc_feature (1)..(25): SEQ ID NO: 4950; WAN024ER6_at; Start 360; Stop 384
gagtttcttttcctctggtgtcaca

SEQ ID NO: 179127 - DNA, 25 bp, Artificial
  probe
  misc_feature (1)..(25): SEQ ID NO: 4950; WAN024ER6_at; Start 299; Stop 323
gcatttcttcaagggcaactagagc

SEQ ID NO: 179128 - DNA, 25 bp, Artificial
  probe
  misc_feature (1)..(25): SEQ ID NO: 4950; WAN024ER6_at; Start 23; Stop 47
ggtttgttgttggagtaataccaca

SEQ ID NO: 179129 - DNA, 25 bp, Artificial
  probe
  misc_feature (1)..(25): SEQ ID NO: 4950; WAN024ER6_at; Start 391; Stop 415
ttatcagccatattttcctccatag

SEQ ID NO: 179130 - DNA, 25 bp, Artificial
  probe
  misc_feature (1)..(25): SEQ ID NO: 4950; WAN024ER6_at; Start 198; Stop 222
tgtttcttcaaaggcatgtaaagcc

SEQ ID NO: 179131 - DNA, 25 bp, Artificial
  probe
  misc_feature (1)..(25): SEQ ID NO: 4950; WAN024ER6_at; Start 128; Stop 152
gcatgttgtttactacgtgttcaca

SEQ ID NO: 179132 - DNA, 25 bp, Artificial
  probe
  misc_feature (1)..(25): SEQ ID NO: 4950; WAN024ER6_at; Start 65; Stop 89
cagcaataagagtcaatcctgttac

SEQ ID NO: 179133 - DNA, 25 bp, Artificial
  probe
  misc_feature (1)..(25): SEQ ID NO: 4950; WAN024ER6_at; Start 122; Stop 146
tgtggcgcatgttgtttactacgtg

SEQ ID NO: 179134 - DNA, 25 bp, Artificial
  probe
  misc_feature (1)..(25): SEQ ID NO: 4950; WAN024ER6_at; Start 191; Stop 215
cacgtcctgtttcttcaaaggcatg

SEQ ID NO: 179135 - DNA, 25 bp, Artificial
  probe
  misc_feature (1)..(25): SEQ ID NO: 4950; WAN024ER6_at; Start 186; Stop 210
tacaccacgtcctgtttcttcaaag

SEQ ID NO: 179136 - DNA, 25 bp, Artificial
  probe
  misc_feature (1)..(25): SEQ ID NO: 4950; WAN024ER6_at; Start 291; Stop 315
caatttacgcatttcttcaagggca

SEQ ID NO: 179137 - DNA, 25 bp, Artificial
  probe
  misc_feature (1)..(25): SEQ ID NO: 4950; WAN024ER6_at; Start 313; Stop 337
gcaactagagctttttgaaccaact

SEQ ID NO: 179138 - DNA, 25 bp, Artificial
  probe
  misc_feature (1)..(25): SEQ ID NO: 4950; WAN024ER6_at; Start 376; Stop 400
ggtgtcacagtttttttatcagcca

SEQ ID NO: 179139 - DNA, 25 bp, Artificial
  probe
  misc_feature (1)..(25): SEQ ID NO: 4950; WAN024ER6_at; Start 178; Stop 202
tcttcaaatacaccacgtcctgttt

SEQ ID NO: 179140 - DNA, 25 bp, Artificial
  probe
  misc_feature (1)..(25): SEQ ID NO: 4950; WAN024ER6_at; Start 82; Stop 106
cctgttacatcgtcttcttcgataa

SEQ ID NO: 179141 - DNA, 25 bp, Artificial
  probe
  misc_feature (1)..(25): SEQ ID NO: 4950; WAN024ER6_at; Start 74; Stop 98
gagtcaatcctgttacatcgtcttc

SEQ ID NO: 179142 - DNA, 25 bp, Artificial
  probe
  misc_feature (1)..(25): SEQ ID NO: 4950; WAN024ER6_at; Start 308; Stop 332
caagggcaactagagctttttgaac

SEQ ID NO: 179143 - DNA, 25 bp, Artificial
  probe
  misc_feature (1)..(25): SEQ ID NO: 4950; WAN024ER6_at; Start 109; Stop 133
ccaactgtcttagtgtggcgcatgt

SEQ ID NO: 179144 - DNA, 25 bp, Artificial
  probe
  misc_feature (1)..(25): SEQ ID NO: 4950; WAN024ER6_at; Start 5; Stop 29
agattgctgttgatgttgggtttgt

SEQ ID NO: 179145 - DNA, 25 bp, Artificial
  probe
  misc_feature (1)..(25): SEQ ID NO: 4950; WAN024ER6_at; Start 232; Stop 256
tgggcatccaaagctgctactgatg

SEQ ID NO: 179146 - DNA, 25 bp, Artificial
  probe
  misc_feature (1)..(25): SEQ ID NO: 4950; WAN024ER6_at; Start 46; Stop 70
caaacaacaccaactggttcagcaa

SEQ ID NO: 179147 - DNA, 25 bp, Artificial
  probe
  misc_feature (1)..(25): SEQ ID NO: 4950; WAN024ER6_at; Start 60; Stop 84
tggttcagcaataagagtcaatcct

SEQ ID NO: 179148 - DNA, 25 bp, Artificial
  probe
  misc_feature (1)..(25): SEQ ID NO: 4902; WAN024ER7_at; Start 2231; Stop 2255
caatggcccataagattggtgcgca

SEQ ID NO: 179149 - DNA, 25 bp, Artificial
  probe
  misc_feature (1)..(25): SEQ ID NO: 4902; WAN024ER7_at; Start 2029; Stop 2053
ttgactcacgcgacagaagcatacg

SEQ ID NO: 179150 - DNA, 25 bp, Artificial
  probe
  misc_feature (1)..(25): SEQ ID NO: 4902; WAN024ER7_at; Start 155; Stop 179
tcgttgccaaagcatcagtagcagc

SEQ ID NO: 179151 - DNA, 25 bp, Artificial
  probe
  misc_feature (1)..(25): SEQ ID NO: 4902; WAN024ER7_at; Start 2642; Stop 2666
gctacaaagaaagaccaggacgccg

SEQ ID NO: 179152 - DNA, 25 bp, Artificial
  probe
  misc_feature (1)..(25): SEQ ID NO: 4902; WAN024ER7_at; Start 1703; Stop 1727
ggtctccaatggatgctgccaaagt

SEQ ID NO: 179153 - DNA, 25 bp, Artificial
  probe
  misc_feature (1)..(25): SEQ ID NO: 4902; WAN024ER7_at; Start 2139; Stop 2163
gaatgcagacttccactcacgtgag

SEQ ID NO: 179154 - DNA, 25 bp, Artificial
  probe
  misc_feature (1)..(25): SEQ ID NO: 4902; WAN024ER7_at; Start 1551; Stop 1575
tcgtatcatcgaacaactggacctt

SEQ ID NO: 179155 - DNA, 25 bp, Artificial
  probe
  misc_feature (1)..(25): SEQ ID NO: 4902; WAN024ER7_at; Start 1870; Stop 1894
ggatctgaagtaacaccatttgccg

SEQ ID NO: 179156 - DNA, 25 bp, Artificial
  probe
  misc_feature (1)..(25): SEQ ID NO: 4902; WAN024ER7_at; Start 2168; Stop 2192
tgcataacgcttcaacaatcgctgg

SEQ ID NO: 179157 - DNA, 25 bp, Artificial
  probe
  misc_feature (1)..(25): SEQ ID NO: 4902; WAN024ER7_at; Start 495; Stop 519
tcatgcagctcgtatcgtccgcgat

SEQ ID NO: 179158 - DNA, 25 bp, Artificial
  probe
  misc_feature (1)..(25): SEQ ID NO: 4902; WAN024ER7_at; Start 2317; Stop 2341
ggtacacgtccagctaagacagcaa

SEQ ID NO: 179159 - DNA, 25 bp, Artificial
  probe
  misc_feature (1)..(25): SEQ ID NO: 4902; WAN024ER7_at; Start 901; Stop 925
gaagagttctgcttcggcgtcaaag

SEQ ID NO: 179160 - DNA, 25 bp, Artificial
  probe
  misc_feature (1)..(25): SEQ ID NO: 4902; WAN024ER7_at; Start 1322; Stop 1346
cacttggatgtggttcttacggacg

SEQ ID NO: 179161 - DNA, 25 bp, Artificial
  probe
  misc_feature (1)..(25): SEQ ID NO: 4902; WAN024ER7_at; Start 1741; Stop 1765
tacgagcaaccagaagtggacttcc

SEQ ID NO: 179162 - DNA, 25 bp, Artificial
  probe
  misc_feature (1)..(25): SEQ ID NO: 4902; WAN024ER7_at; Start 1167; Stop 1191
taacggtcttggacactcagcagct

SEQ ID NO: 179163 - DNA, 25 bp, Artificial
  probe
  misc_feature (1)..(25): SEQ ID NO: 4902; WAN024ER7_at; Start 587; Stop 611
caagtgcccttatgaaccacgaagg

SEQ ID NO: 179164 - DNA, 25 bp, Artificial
  probe
  misc_feature (1)..(25): SEQ ID NO: 4902; WAN024ER7_at; Start 1654; Stop 1678
gagattatgcgtgccttcaaaccag

SEQ ID NO: 179165 - DNA, 25 bp, Artificial
  probe
  misc_feature (1)..(25): SEQ ID NO: 4902; WAN024ER7_at; Start 1509; Stop 1533
gatcgttactgaccatgccatggta

SEQ ID NO: 179166 - DNA, 25 bp, Artificial
  probe
  misc_feature (1)..(25): SEQ ID NO: 4902; WAN024ER7_at; Start 1936; Stop 1960
gactactcattgacaccaactgtgg

SEQ ID NO: 179167 - DNA, 25 bp, Artificial
  probe
  misc_feature (1)..(25): SEQ ID NO: 4902; WAN024ER7_at; Start 621; Stop 645
aatccttgcaacaggtggtaatgcc

SEQ ID NO: 179168 - DNA, 25 bp, Artificial
  probe
  misc_feature (1)..(25): SEQ ID NO: 4902; WAN024ER7_at; Start 778; Stop 802
aacggtatggtctgtgcatctgaac

SEQ ID NO: 179169 - DNA, 25 bp, Artificial
  probe
  misc_feature (1)..(25): SEQ ID NO: 4902; WAN024ER7_at; Start 2446; Stop 2470
gcaaaagctgtctacgaactcggtg

SEQ ID NO: 179170 - DNA, 25 bp, Artificial
  probe
  misc_feature (1)..(25): SEQ ID NO: 4902; WAN024ER7_at; Start 429; Stop 453
gatttcattgaagacacgtaaccca

SEQ ID NO: 179171 - DNA, 25 bp, Artificial
  probe
  misc_feature (1)..(25): SEQ ID NO: 4902; WAN024ER7_at; Start 1597; Stop 1621
caaatctttgcggatgtagaaccgg

SEQ ID NO: 179172 - DNA, 25 bp, Artificial
  probe
  misc_feature (1)..(25): SEQ ID NO: 4902; WAN024ER7_at; Start 946; Stop 970
ggtgcaaaattgaacgctgacatcg

SEQ ID NO: 179173 - DNA, 25 bp, Artificial
  probe
  misc_feature (1)..(25): SEQ ID NO: 4902; WAN024ER7_at; Start 532; Stop 556
gctggtgctcctgaaaactgtgtgc

SEQ ID NO: 179174 - DNA, 25 bp, Artificial
  probe
  misc_feature (1)..(25): SEQ ID NO: 4902; WAN024ER7_at; Start 2216; Stop 2240
taggtatttctcactcaatggccca

SEQ ID NO: 179175 - DNA, 25 bp, Artificial
  probe
  misc_feature (1)..(25): SEQ ID NO: 4902; WAN024ER7_at; Start 2462; Stop 2486
aactcggtgaacgtattgggatcca

SEQ ID NO: 179176 - DNA, 25 bp, Artificial
  probe
  misc_feature (1)..(25): SEQ ID NO: 4902; WAN024ER7_at; Start 2183; Stop 2207
caatcgctggtatggcctttgccaa

SEQ ID NO: 179177 - DNA, 25 bp, Artificial
  probe
  misc_feature (1)..(25): SEQ ID NO: 4902; WAN024ER7_at; Start 572; Stop 596
catctatggaagcaacaagtgccct

SEQ ID NO: 179178 - DNA, 25 bp, Artificial
  probe
  misc_feature (1)..(25): SEQ ID NO: 4902; WAN024ER7_at; Start 1685; Stop 1709
tcatcgcactcggtggtgggtctcc

SEQ ID NO: 179179 - DNA, 25 bp, Artificial
  probe
  misc_feature (1)..(25): SEQ ID NO: 4902; WAN024ER7_at; Start 1191; Stop 1215
tatccacacagctgacgaagaattg

SEQ ID NO: 179180 - DNA, 25 bp, Artificial
  probe
  misc_feature (1)..(25): SEQ ID NO: 4902; WAN024ER7_at; Start 206; Stop 230
tacatgcctttgaagaaacaggacg

SEQ ID NO: 179181 - DNA, 25 bp, Artificial
  probe
  misc_feature (1)..(25): SEQ ID NO: 4902; WAN024ER7_at; Start 102; Stop 126
tctagttgcccttgaagaaatgcgt

SEQ ID NO: 179182 - DNA, 25 bp, Artificial
  probe
  misc_feature (1)..(25): SEQ ID NO: 7578; WAN024ER8_at; Start 54; Stop 78
taggaaatggctgtcaataagtgac

SEQ ID NO: 179183 - DNA, 25 bp, Artificial
  probe
  misc_feature (1)..(25): SEQ ID NO: 7578; WAN024ER8_at; Start 184; Stop 208
gccacttctgttggaaccttgataa

SEQ ID NO: 179184 - DNA, 25 bp, Artificial
  probe
  misc_feature (1)..(25): SEQ ID NO: 7578; WAN024ER8_at; Start 134; Stop 158
tcgtaacaatctcaacagctttagc

SEQ ID NO: 179185 - DNA, 25 bp, Artificial
  probe
  misc_feature (1)..(25): SEQ ID NO: 7578; WAN024ER8_at; Start 34; Stop 58
cacaaacaattggaatcatatagga

SEQ ID NO: 179186 - DNA, 25 bp, Artificial
  probe
  misc_feature (1)..(25): SEQ ID NO: 7578; WAN024ER8_at; Start 190; Stop 214
tctgttggaaccttgataatctttt

SEQ ID NO: 179187 - DNA, 25 bp, Artificial
  probe
  misc_feature (1)..(25): SEQ ID NO: 7578; WAN024ER8_at; Start 220; Stop 244
tcaaagcgttccataccagaaatct

SEQ ID NO: 179188 - DNA, 25 bp, Artificial
  probe
  misc_feature (1)..(25): SEQ ID NO: 7578; WAN024ER8_at; Start 180; Stop 204
gactgccacttctgttggaaccttg

SEQ ID NO: 179189 - DNA, 25 bp, Artificial
  probe
  misc_feature (1)..(25): SEQ ID NO: 7578; WAN024ER8_at; Start 90; Stop 114
aagtgtttcaacatatattttctcc

SEQ ID NO: 179190 - DNA, 25 bp, Artificial
  probe
  misc_feature (1)..(25): SEQ ID NO: 7578; WAN024ER8_at; Start 170; Stop 194
tgggagatttgactgccacttctgt

SEQ ID NO: 179191 - DNA, 25 bp, Artificial
  probe
  misc_feature (1)..(25): SEQ ID NO: 7578; WAN024ER8_at; Start 140; Stop 164
caatctcaacagctttagcaatcag

SEQ ID NO: 179192 - DNA, 25 bp, Artificial
  probe
  misc_feature (1)..(25): SEQ ID NO: 7578; WAN024ER8_at; Start 5; Stop 29
taaaccaatggcaactaagaatcct

SEQ ID NO: 179193 - DNA, 25 bp, Artificial
  probe
  misc_feature (1)..(25): SEQ ID NO: 7578; WAN024ER8_at; Start 250; Stop 274
tcaactgctaaaataactacatccg

SEQ ID NO: 179194 - DNA, 25 bp, Artificial
  probe
  misc_feature (1)..(25): SEQ ID NO: 7578; WAN024ER8_at; Start 258; Stop 282
taaaataactacatccgctgcatca

SEQ ID NO: 179195 - DNA, 25 bp, Artificial
  probe
  misc_feature (1)..(25): SEQ ID NO: 7578; WAN024ER8_at; Start 45; Stop 69
ggaatcatataggaaatggctgtca

SEQ ID NO: 179196 - DNA, 25 bp, Artificial
  probe
  misc_feature (1)..(25): SEQ ID NO: 7578; WAN024ER8_at; Start 2; Stop 26
tgctaaaccaatggcaactaagaat

SEQ ID NO: 179197 - DNA, 25 bp, Artificial
  probe
  misc_feature (1)..(25): SEQ ID NO: 7578; WAN024ER8_at; Start 175; Stop 199
gatttgactgccacttctgttggaa

SEQ ID NO: 179198 - DNA, 25 bp, Artificial
  probe
  misc_feature (1)..(25): SEQ ID NO: 7578; WAN024ER8_at; Start 22; Stop 46
agaatcctgcaccacaaacaattgg

SEQ ID NO: 179199 - DNA, 25 bp, Artificial
  probe
  misc_feature (1)..(25): SEQ ID NO: 7578; WAN024ER8_at; Start 203; Stop 227
tgataatctttttaccctcaaagcg

SEQ ID NO: 179200 - DNA, 25 bp, Artificial
  probe
  misc_feature (1)..(25): SEQ ID NO: 7578; WAN024ER8_at; Start 217; Stop 241
ccctcaaagcgttccataccagaaa

SEQ ID NO: 179201 - DNA, 25 bp, Artificial
  probe
  misc_feature (1)..(25): SEQ ID NO: 7578; WAN024ER8_at; Start 128; Stop 152
gttatttcgtaacaatctcaacagc

SEQ ID NO: 179202 - DNA, 25 bp, Artificial
  probe
  misc_feature (1)..(25): SEQ ID NO: 7578; WAN024ER8_at; Start 62; Stop 86
ggctgtcaataagtgaccttttaag

SEQ ID NO: 179203 - DNA, 25 bp, Artificial
  probe
  misc_feature (1)..(25): SEQ ID NO: 7578; WAN024ER8_at; Start 233; Stop 257
taccagaaatcttaacatcaactgc

SEQ ID NO: 179204 - DNA, 25 bp, Artificial
  probe
  misc_feature (1)..(25): SEQ ID NO: 7578; WAN024ER8_at; Start 254; Stop 278
ctgctaaaataactacatccgctgc

SEQ ID NO: 179205 - DNA, 25 bp, Artificial
  probe
  misc_feature (1)..(25): SEQ ID NO: 7578; WAN024ER8_at; Start 149; Stop 173
cagctttagcaatcagtttattggg

SEQ ID NO: 179206 - DNA, 25 bp, Artificial
  probe
  misc_feature (1)..(25): SEQ ID NO: 7578; WAN024ER8_at; Start 57; Stop 81
gaaatggctgtcaataagtgacctt

SEQ ID NO: 179207 - DNA, 25 bp, Artificial
  probe
  misc_feature (1)..(25): SEQ ID NO: 7578; WAN024ER8_at; Start 263; Stop 287
taactacatccgctgcatcaatctg

SEQ ID NO: 179208 - DNA, 25 bp, Artificial
  probe
  misc_feature (1)..(25): SEQ ID NO: 7578; WAN024ER8_at; Start 162; Stop 186
cagtttattgggagatttgactgcc

SEQ ID NO: 179209 - DNA, 25 bp, Artificial
  probe
  misc_feature (1)..(25): SEQ ID NO: 7578; WAN024ER8_at; Start 167; Stop 191
tattgggagatttgactgccacttc

SEQ ID NO: 179210 - DNA, 25 bp, Artificial
  probe
  misc_feature (1)..(25): SEQ ID NO: 7578; WAN024ER8_at; Start 225; Stop 249
gcgttccataccagaaatcttaaca

SEQ ID NO: 179211 - DNA, 25 bp, Artificial
  probe
  misc_feature (1)..(25): SEQ ID NO: 7578; WAN024ER8_at; Start 40; Stop 64
caattggaatcatataggaaatggc

SEQ ID NO: 179212 - DNA, 25 bp, Artificial
  probe
  misc_feature (1)..(25): SEQ ID NO: 7578; WAN024ER8_at; Start 14; Stop 38
ggcaactaagaatcctgcaccacaa

SEQ ID NO: 179213 - DNA, 25 bp, Artificial
  probe
  misc_feature (1)..(25): SEQ ID NO: 7578; WAN024ER8_at; Start 10; Stop 34
caatggcaactaagaatcctgcacc

SEQ ID NO: 179214 - DNA, 25 bp, Artificial
  probe
  misc_feature (1)..(25): SEQ ID NO: 7578; WAN024ER8_at; Start 238; Stop 262
gaaatcttaacatcaactgctaaaa

SEQ ID NO: 179215 - DNA, 25 bp, Artificial
  probe
  misc_feature (1)..(25): SEQ ID NO: 7578; WAN024ER8_at; Start 269; Stop 293
catccgctgcatcaatctgctcttg

SEQ ID NO: 179216 - DNA, 25 bp, Artificial
  probe
  misc_feature (1)..(25): SEQ ID NO: 7453; WAN024ER9_at; Start 71; Stop 95
tgcttgaagacgttgtttatcaccc

SEQ ID NO: 179217 - DNA, 25 bp, Artificial
  probe
  misc_feature (1)..(25): SEQ ID NO: 7453; WAN024ER9_at; Start 33; Stop 57
caagcgaaagattattcatagttta

SEQ ID NO: 179218 - DNA, 25 bp, Artificial
  probe
  misc_feature (1)..(25): SEQ ID NO: 7453; WAN024ER9_at; Start 27; Stop 51
taaggacaagcgaaagattattcat

SEQ ID NO: 179219 - DNA, 25 bp, Artificial
  probe
  misc_feature (1)..(25): SEQ ID NO: 7453; WAN024ER9_at; Start 55; Stop 79
ttatctcctgaatttttgcttgaag

SEQ ID NO: 179220 - DNA, 25 bp, Artificial
  probe
  misc_feature (1)..(25): SEQ ID NO: 7453; WAN024ER9_at; Start 59; Stop 83
ctcctgaatttttgcttgaagacgt

SEQ ID NO: 179221 - DNA, 25 bp, Artificial
  probe
  misc_feature (1)..(25): SEQ ID NO: 7453; WAN024ER9_at; Start 21; Stop 45
tatccataaggacaagcgaaagatt

SEQ ID NO: 179222 - DNA, 25 bp, Artificial
  probe
  misc_feature (1)..(25): SEQ ID NO: 7453; WAN024ER9_at; Start 30; Stop 54
ggacaagcgaaagattattcatagt

SEQ ID NO: 179223 - DNA, 25 bp, Artificial
  probe
  misc_feature (1)..(25): SEQ ID NO: 7453; WAN024ER9_at; Start 6; Stop 30
gattttgaacagatatatccataag

SEQ ID NO: 179224 - DNA, 25 bp, Artificial
  probe
  misc_feature (1)..(25): SEQ ID NO: 7453; WAN024ER9_at; Start 24; Stop 48
ccataaggacaagcgaaagattatt

SEQ ID NO: 179225 - DNA, 25 bp, Artificial
  probe
  misc_feature (1)..(25): SEQ ID NO: 7453; WAN024ER9_at; Start 38; Stop 62
gaaagattattcatagtttatctcc

SEQ ID NO: 179226 - DNA, 25 bp, Artificial
  probe
  misc_feature (1)..(25): SEQ ID NO: 7453; WAN024ER9_at; Start 10; Stop 34
ttgaacagatatatccataaggaca

SEQ ID NO: 179227 - DNA, 25 bp, Artificial
  probe
  misc_feature (1)..(25): SEQ ID NO: 7453; WAN024ER9_at; Start 9; Stop 33
tttgaacagatatatccataaggac

SEQ ID NO: 179228 - DNA, 25 bp, Artificial
  probe
  misc_feature (1)..(25): SEQ ID NO: 7453; WAN024ER9_at; Start 60; Stop 84
tcctgaatttttgcttgaagacgtt

SEQ ID NO: 179229 - DNA, 25 bp, Artificial
  probe
  misc_feature (1)..(25): SEQ ID NO: 7453; WAN024ER9_at; Start 72; Stop 96
gcttgaagacgttgtttatcaccct

SEQ ID NO: 179230 - DNA, 25 bp, Artificial
  probe
  misc_feature (1)..(25): SEQ ID NO: 7453; WAN024ER9_at; Start 75; Stop 99
tgaagacgttgtttatcaccctcgg

SEQ ID NO: 179231 - DNA, 25 bp, Artificial
  probe
  misc_feature (1)..(25): SEQ ID NO: 7453; WAN024ER9_at; Start 1; Stop 25
ttgacgattttgaacagatatatcc

SEQ ID NO: 179232 - DNA, 25 bp, Artificial
  probe
  misc_feature (1)..(25): SEQ ID NO: 7453; WAN024ER9_at; Start 19; Stop 43
tatatccataaggacaagcgaaaga

SEQ ID NO: 179233 - DNA, 25 bp, Artificial
  probe
  misc_feature (1)..(25): SEQ ID NO: 7453; WAN024ER9_at; Start 42; Stop 66
gattattcatagtttatctcctgaa

SEQ ID NO: 179234 - DNA, 25 bp, Artificial
  probe
  misc_feature (1)..(25): SEQ ID NO: 7453; WAN024ER9_at; Start 49; Stop 73
catagtttatctcctgaatttttgc

SEQ ID NO: 179235 - DNA, 25 bp, Artificial
  probe
  misc_feature (1)..(25): SEQ ID NO: 7453; WAN024ER9_at; Start 58; Stop 82
tctcctgaatttttgcttgaagacg

SEQ ID NO: 179236 - DNA, 25 bp, Artificial
  probe
  misc_feature (1)..(25): SEQ ID NO: 7453; WAN024ER9_at; Start 63; Stop 87
tgaatttttgcttgaagacgttgtt

SEQ ID NO: 179237 - DNA, 25 bp, Artificial
  probe
  misc_feature (1)..(25): SEQ ID NO: 7453; WAN024ER9_at; Start 74; Stop 98
ttgaagacgttgtttatcaccctcg

SEQ ID NO: 179238 - DNA, 25 bp, Artificial
  probe
  misc_feature (1)..(25): SEQ ID NO: 7453; WAN024ER9_at; Start 15; Stop 39
cagatatatccataaggacaagcga

SEQ ID NO: 179239 - DNA, 25 bp, Artificial
  probe
  misc_feature (1)..(25): SEQ ID NO: 7453; WAN024ER9_at; Start 17; Stop 41
gatatatccataaggacaagcgaaa

SEQ ID NO: 179240 - DNA, 25 bp, Artificial
  probe
  misc_feature (1)..(25): SEQ ID NO: 7453; WAN024ER9_at; Start 61; Stop 85
cctgaatttttgcttgaagacgttg

SEQ ID NO: 179241 - DNA, 25 bp, Artificial
  probe
  misc_feature (1)..(25): SEQ ID NO: 7453; WAN024ER9_at; Start 31; Stop 55
gacaagcgaaagattattcatagtt

SEQ ID NO: 179242 - DNA, 25 bp, Artificial
  probe
  misc_feature (1)..(25): SEQ ID NO: 7453; WAN024ER9_at; Start 56; Stop 80
tatctcctgaatttttgcttgaaga

SEQ ID NO: 179243 - DNA, 25 bp, Artificial
  probe
  misc_feature (1)..(25): SEQ ID NO: 7453; WAN024ER9_at; Start 73; Stop 97
cttgaagacgttgtttatcaccctc

SEQ ID NO: 179244 - DNA, 25 bp, Artificial
  probe
  misc_feature (1)..(25): SEQ ID NO: 7453; WAN024ER9_at; Start 53; Stop 77
gtttatctcctgaatttttgcttga

SEQ ID NO: 179245 - DNA, 25 bp, Artificial
  probe
  misc_feature (1)..(25): SEQ ID NO: 7453; WAN024ER9_at; Start 23; Stop 47
tccataaggacaagcgaaagattat

SEQ ID NO: 179246 - DNA, 25 bp, Artificial
  probe
  misc_feature (1)..(25): SEQ ID NO: 7453; WAN024ER9_at; Start 29; Stop 53
aggacaagcgaaagattattcatag

SEQ ID NO: 179247 - DNA, 25 bp, Artificial
  probe
  misc_feature (1)..(25): SEQ ID NO: 7453; WAN024ER9_at; Start 3; Stop 27
gacgattttgaacagatatatccat

SEQ ID NO: 179248 - DNA, 25 bp, Artificial
  probe
  misc_feature (1)..(25): SEQ ID NO: 7453; WAN024ER9_at; Start 14; Stop 38
acagatatatccataaggacaagcg

SEQ ID NO: 179249 - DNA, 25 bp, Artificial
  probe
  misc_feature (1)..(25): SEQ ID NO: 7453; WAN024ER9_at; Start 12; Stop 36
gaacagatatatccataaggacaag

SEQ ID NO: 179250 - DNA, 25 bp, Artificial
  probe
  misc_feature (1)..(25): SEQ ID NO: 7681; WAN024ERA_at; Start 114; Stop 138
acaattttcatacggataccctcca

SEQ ID NO: 179251 - DNA, 25 bp, Artificial
  probe
  misc_feature (1)..(25): SEQ ID NO: 7681; WAN024ERA_at; Start 214; Stop 238
cgtcattaccaagttttcgagcaaa

SEQ ID NO: 179252 - DNA, 25 bp, Artificial
  probe
  misc_feature (1)..(25): SEQ ID NO: 7681; WAN024ERA_at; Start 159; Stop 183
aaagctgcaatcacatcatcagatg

SEQ ID NO: 179253 - DNA, 25 bp, Artificial
  probe
  misc_feature (1)..(25): SEQ ID NO: 7681; WAN024ERA_at; Start 83; Stop 107
ggcaattcccacagtacaagctgca

SEQ ID NO: 179254 - DNA, 25 bp, Artificial
  probe
  misc_feature (1)..(25): SEQ ID NO: 7681; WAN024ERA_at; Start 2; Stop 26
tgtcccctgagtctcaacatgaatc

SEQ ID NO: 179255 - DNA, 25 bp, Artificial
  probe
  misc_feature (1)..(25): SEQ ID NO: 7681; WAN024ERA_at; Start 203; Stop 227
ggcaacaacttcgtcattaccaagt

SEQ ID NO: 179256 - DNA, 25 bp, Artificial
  probe
  misc_feature (1)..(25): SEQ ID NO: 7681; WAN024ERA_at; Start 152; Stop 176
ttaacaaaaagctgcaatcacatca

SEQ ID NO: 179257 - DNA, 25 bp, Artificial
  probe
  misc_feature (1)..(25): SEQ ID NO: 7681; WAN024ERA_at; Start 104; Stop 128
tgcaacaccaacaattttcatacgg

SEQ ID NO: 179258 - DNA, 25 bp, Artificial
  probe
  misc_feature (1)..(25): SEQ ID NO: 7681; WAN024ERA_at; Start 193; Stop 217
gaactaatttggcaacaacttcgtc

SEQ ID NO: 179259 - DNA, 25 bp, Artificial
  probe
  misc_feature (1)..(25): SEQ ID NO: 7681; WAN024ERA_at; Start 240; Stop 264
agtgataaggtcttcaaatgctccc

SEQ ID NO: 179260 - DNA, 25 bp, Artificial
  probe
  misc_feature (1)..(25): SEQ ID NO: 7681; WAN024ERA_at; Start 86; Stop 110
aattcccacagtacaagctgcaaca

SEQ ID NO: 179261 - DNA, 25 bp, Artificial
  probe
  misc_feature (1)..(25): SEQ ID NO: 7681; WAN024ERA_at; Start 45; Stop 69
gcggcattctctaatttttcctgtg

SEQ ID NO: 179262 - DNA, 25 bp, Artificial
  probe
  misc_feature (1)..(25): SEQ ID NO: 7681; WAN024ERA_at; Start 147; Stop 171
tcttattaacaaaaagctgcaatca

SEQ ID NO: 179263 - DNA, 25 bp, Artificial
  probe
  misc_feature (1)..(25): SEQ ID NO: 7681; WAN024ERA_at; Start 63; Stop 87
tcctgtgcaatataagtgtgggcaa

SEQ ID NO: 179264 - DNA, 25 bp, Artificial
  probe
  misc_feature (1)..(25): SEQ ID NO: 7681; WAN024ERA_at; Start 170; Stop 194
cacatcatcagatgtctgagcccga

SEQ ID NO: 179265 - DNA, 25 bp, Artificial
  probe
  misc_feature (1)..(25): SEQ ID NO: 7681; WAN024ERA_at; Start 187; Stop 211
gagcccgaactaatttggcaacaac

SEQ ID NO: 179266 - DNA, 25 bp, Artificial
  probe
  misc_feature (1)..(25): SEQ ID NO: 7681; WAN024ERA_at; Start 7; Stop 31
cctgagtctcaacatgaatcacatg

SEQ ID NO: 179267 - DNA, 25 bp, Artificial
  probe
  misc_feature (1)..(25): SEQ ID NO: 7681; WAN024ERA_at; Start 68; Stop 92
tgcaatataagtgtgggcaattccc

SEQ ID NO: 179268 - DNA, 25 bp, Artificial
  probe
  misc_feature (1)..(25): SEQ ID NO: 7681; WAN024ERA_at; Start 81; Stop 105
tgggcaattcccacagtacaagctg

SEQ ID NO: 179269 - DNA, 25 bp, Artificial
  probe
  misc_feature (1)..(25): SEQ ID NO: 7681; WAN024ERA_at; Start 21; Stop 45
tgaatcacatgtccagctacctttg

SEQ ID NO: 179270 - DNA, 25 bp, Artificial
  probe
  misc_feature (1)..(25): SEQ ID NO: 7681; WAN024ERA_at; Start 92; Stop 116
cacagtacaagctgcaacaccaaca

SEQ ID NO: 179271 - DNA, 25 bp, Artificial
  probe
  misc_feature (1)..(25): SEQ ID NO: 7681; WAN024ERA_at; Start 231; Stop 255
cgagcaaagagtgataaggtcttca

SEQ ID NO: 179272 - DNA, 25 bp, Artificial
  probe
  misc_feature (1)..(25): SEQ ID NO: 7681; WAN024ERA_at; Start 217; Stop 241
cattaccaagttttcgagcaaagag

SEQ ID NO: 179273 - DNA, 25 bp, Artificial
  probe
  misc_feature (1)..(25): SEQ ID NO: 7681; WAN024ERA_at; Start 177; Stop 201
tcagatgtctgagcccgaactaatt

SEQ ID NO: 179274 - DNA, 25 bp, Artificial
  probe
  misc_feature (1)..(25): SEQ ID NO: 7681; WAN024ERA_at; Start 61; Stop 85
tttcctgtgcaatataagtgtgggc

SEQ ID NO: 179275 - DNA, 25 bp, Artificial
  probe
  misc_feature (1)..(25): SEQ ID NO: 7681; WAN024ERA_at; Start 96; Stop 120
gtacaagctgcaacaccaacaattt

SEQ ID NO: 179276 - DNA, 25 bp, Artificial
  probe
  misc_feature (1)..(25): SEQ ID NO: 7681; WAN024ERA_at; Start 182; Stop 206
tgtctgagcccgaactaatttggca

SEQ ID NO: 179277 - DNA, 25 bp, Artificial
  probe
  misc_feature (1)..(25): SEQ ID NO: 7681; WAN024ERA_at; Start 222; Stop 246
ccaagttttcgagcaaagagtgata

SEQ ID NO: 179278 - DNA, 25 bp, Artificial
  probe
  misc_feature (1)..(25): SEQ ID NO: 7681; WAN024ERA_at; Start 70; Stop 94
caatataagtgtgggcaattcccac

SEQ ID NO: 179279 - DNA, 25 bp, Artificial
  probe
  misc_feature (1)..(25): SEQ ID NO: 7681; WAN024ERA_at; Start 28; Stop 52
catgtccagctacctttgcggcatt

SEQ ID NO: 179280 - DNA, 25 bp, Artificial
  probe
  misc_feature (1)..(25): SEQ ID NO: 7681; WAN024ERA_at; Start 111; Stop 135
ccaacaattttcatacggataccct

SEQ ID NO: 179281 - DNA, 25 bp, Artificial
  probe
  misc_feature (1)..(25): SEQ ID NO: 7681; WAN024ERA_at; Start 25; Stop 49
tcacatgtccagctacctttgcggc

SEQ ID NO: 179282 - DNA, 25 bp, Artificial
  probe
  misc_feature (1)..(25): SEQ ID NO: 7681; WAN024ERA_at; Start 227; Stop 251
ttttcgagcaaagagtgataaggtc

SEQ ID NO: 179283 - DNA, 25 bp, Artificial
  probe
  misc_feature (1)..(25): SEQ ID NO: 7681; WAN024ERA_at; Start 32; Stop 56
tccagctacctttgcggcattctct

SEQ ID NO: 179284 - DNA, 25 bp, Artificial
  probe
  misc_feature (1)..(25): SEQ ID NO: 6755; WAN024ERB_at; Start 1; Stop 25
atgctccctagcagcttctgtatca

SEQ ID NO: 179285 - DNA, 25 bp, Artificial
  probe
  misc_feature (1)..(25): SEQ ID NO: 6755; WAN024ERB_at; Start 153; Stop 177
tagcaatataattcccaataccggt

SEQ ID NO: 179286 - DNA, 25 bp, Artificial
  probe
  misc_feature (1)..(25): SEQ ID NO: 6755; WAN024ERB_at; Start 211; Stop 235
gataaattggtctctatcagacaca

SEQ ID NO: 179287 - DNA, 25 bp, Artificial
  probe
  misc_feature (1)..(25): SEQ ID NO: 6755; WAN024ERB_at; Start 74; Stop 98
gtctcccaaggaatctcattgtgat

SEQ ID NO: 179288 - DNA, 25 bp, Artificial
  probe
  misc_feature (1)..(25): SEQ ID NO: 6755; WAN024ERB_at; Start 65; Stop 89
ccatcaatggtctcccaaggaatct

SEQ ID NO: 179289 - DNA, 25 bp, Artificial
  probe
  misc_feature (1)..(25): SEQ ID NO: 6755; WAN024ERB_at; Start 121; Stop 145
cttctccacagcagaactcttgcta

SEQ ID NO: 179290 - DNA, 25 bp, Artificial
  probe
  misc_feature (1)..(25): SEQ ID NO: 6755; WAN024ERB_at; Start 23; Stop 47
tcatcaccaactgcaaagagtacaa

SEQ ID NO: 179291 - DNA, 25 bp, Artificial
  probe
  misc_feature (1)..(25): SEQ ID NO: 6755; WAN024ERB_at; Start 99; Stop 123
ttatagctatgactacccccgcctt

SEQ ID NO: 179292 - DNA, 25 bp, Artificial
  probe
  misc_feature (1)..(25): SEQ ID NO: 6755; WAN024ERB_at; Start 191; Stop 215
tctctctgataaagaccttcgataa

SEQ ID NO: 179293 - DNA, 25 bp, Artificial
  probe
  misc_feature (1)..(25): SEQ ID NO: 6755; WAN024ERB_at; Start 68; Stop 92
tcaatggtctcccaaggaatctcat

SEQ ID NO: 179294 - DNA, 25 bp, Artificial
  probe
  misc_feature (1)..(25): SEQ ID NO: 6755; WAN024ERB_at; Start 180; Stop 204
gtccttctgcctctctctgataaag

SEQ ID NO: 179295 - DNA, 25 bp, Artificial
  probe
  misc_feature (1)..(25): SEQ ID NO: 6755; WAN024ERB_at; Start 78; Stop 102
cccaaggaatctcattgtgatttat

SEQ ID NO: 179296 - DNA, 25 bp, Artificial
  probe
  misc_feature (1)..(25): SEQ ID NO: 6755; WAN024ERB_at; Start 223; Stop 247
tctatcagacacataacccgtctca

SEQ ID NO: 179297 - DNA, 25 bp, Artificial
  probe
  misc_feature (1)..(25): SEQ ID NO: 6755; WAN024ERB_at; Start 14; Stop 38
gcttctgtatcatcaccaactgcaa

SEQ ID NO: 179298 - DNA, 25 bp, Artificial
  probe
  misc_feature (1)..(25): SEQ ID NO: 6755; WAN024ERB_at; Start 72; Stop 96
tggtctcccaaggaatctcattgtg

SEQ ID NO: 179299 - DNA, 25 bp, Artificial
  probe
  misc_feature (1)..(25): SEQ ID NO: 6755; WAN024ERB_at; Start 188; Stop 212
gcctctctctgataaagaccttcga

SEQ ID NO: 179300 - DNA, 25 bp, Artificial
  probe
  misc_feature (1)..(25): SEQ ID NO: 6755; WAN024ERB_at; Start 159; Stop 183
tataattcccaataccggtctgtcc

SEQ ID NO: 179301 - DNA, 25 bp, Artificial
  probe
  misc_feature (1)..(25): SEQ ID NO: 6755; WAN024ERB_at; Start 30; Stop 54
caactgcaaagagtacaattacttt

SEQ ID NO: 179302 - DNA, 25 bp, Artificial
  probe
  misc_feature (1)..(25): SEQ ID NO: 6755; WAN024ERB_at; Start 196; Stop 220
ctgataaagaccttcgataaattgg

SEQ ID NO: 179303 - DNA, 25 bp, Artificial
  probe
  misc_feature (1)..(25): SEQ ID NO: 6755; WAN024ERB_at; Start 200; Stop 224
taaagaccttcgataaattggtctc

SEQ ID NO: 179304 - DNA, 25 bp, Artificial
  probe
  misc_feature (1)..(25): SEQ ID NO: 6755; WAN024ERB_at; Start 169; Stop 193
aataccggtctgtccttctgcctct

SEQ ID NO: 179305 - DNA, 25 bp, Artificial
  probe
  misc_feature (1)..(25): SEQ ID NO: 6755; WAN024ERB_at; Start 93; Stop 117
tgtgatttatagctatgactacccc

SEQ ID NO: 179306 - DNA, 25 bp, Artificial
  probe
  misc_feature (1)..(25): SEQ ID NO: 6755; WAN024ERB_at; Start 50; Stop 74
actttgacccctttcccatcaatgg

SEQ ID NO: 179307 - DNA, 25 bp, Artificial
  probe
  misc_feature (1)..(25): SEQ ID NO: 6755; WAN024ERB_at; Start 156; Stop 180
caatataattcccaataccggtctg

SEQ ID NO: 179308 - DNA, 25 bp, Artificial
  probe
  misc_feature (1)..(25): SEQ ID NO: 6755; WAN024ERB_at; Start 9; Stop 33
tagcagcttctgtatcatcaccaac

SEQ ID NO: 179309 - DNA, 25 bp, Artificial
  probe
  misc_feature (1)..(25): SEQ ID NO: 6755; WAN024ERB_at; Start 175; Stop 199
ggtctgtccttctgcctctctctga

SEQ ID NO: 179310 - DNA, 25 bp, Artificial
  probe
  misc_feature (1)..(25): SEQ ID NO: 6755; WAN024ERB_at; Start 218; Stop 242
tggtctctatcagacacataacccg

SEQ ID NO: 179311 - DNA, 25 bp, Artificial
  probe
  misc_feature (1)..(25): SEQ ID NO: 6755; WAN024ERB_at; Start 204; Stop 228
gaccttcgataaattggtctctatc

SEQ ID NO: 179312 - DNA, 25 bp, Artificial
  probe
  misc_feature (1)..(25): SEQ ID NO: 6755; WAN024ERB_at; Start 131; Stop 155
gcagaactcttgctatggggaatag

SEQ ID NO: 179313 - DNA, 25 bp, Artificial
  probe
  misc_feature (1)..(25): SEQ ID NO: 6755; WAN024ERB_at; Start 27; Stop 51
caccaactgcaaagagtacaattac

SEQ ID NO: 179314 - DNA, 25 bp, Artificial
  probe
  misc_feature (1)..(25): SEQ ID NO: 6755; WAN024ERB_at; Start 231; Stop 255
acacataacccgtctcaaccaatag

SEQ ID NO: 179315 - DNA, 25 bp, Artificial
  probe
  misc_feature (1)..(25): SEQ ID NO: 6755; WAN024ERB_at; Start 19; Stop 43
tgtatcatcaccaactgcaaagagt

SEQ ID NO: 179316 - DNA, 25 bp, Artificial
  probe
  misc_feature (1)..(25): SEQ ID NO: 6755; WAN024ERB_at; Start 61; Stop 85
tttcccatcaatggtctcccaagga

SEQ ID NO: 179317 - DNA, 25 bp, Artificial
  probe
  misc_feature (1)..(25): SEQ ID NO: 6755; WAN024ERB_at; Start 125; Stop 149
tccacagcagaactcttgctatggg

SEQ ID NO: 179318 - DNA, 25 bp, Artificial
  probe
  misc_feature (1)..(25): SEQ ID NO: 7011; WAN024ERC_at; Start 51; Stop 75
taacataagcactccaccaaatggc

SEQ ID NO: 179319 - DNA, 25 bp, Artificial
  probe
  misc_feature (1)..(25): SEQ ID NO: 7011; WAN024ERC_at; Start 19; Stop 43
caaataccagctactggacgagtca

SEQ ID NO: 179320 - DNA, 25 bp, Artificial
  probe
  misc_feature (1)..(25): SEQ ID NO: 7011; WAN024ERC_at; Start 191; Stop 215
caatattgacaatccccataggaac

SEQ ID NO: 179321 - DNA, 25 bp, Artificial
  probe
  misc_feature (1)..(25): SEQ ID NO: 7011; WAN024ERC_at; Start 220; Stop 244
gatttcaatgtttcgatttcctctt

SEQ ID NO: 179322 - DNA, 25 bp, Artificial
  probe
  misc_feature (1)..(25): SEQ ID NO: 7011; WAN024ERC_at; Start 144; Stop 168
gagacctggaaccaagttattcata

SEQ ID NO: 179323 - DNA, 25 bp, Artificial
  probe
  misc_feature (1)..(25): SEQ ID NO: 7011; WAN024ERC_at; Start 68; Stop 92
caaatggcacagcagaatcagcacc

SEQ ID NO: 179324 - DNA, 25 bp, Artificial
  probe
  misc_feature (1)..(25): SEQ ID NO: 7011; WAN024ERC_at; Start 100; Stop 124
aaagaaacagcaccaccaacagcac

SEQ ID NO: 179325 - DNA, 25 bp, Artificial
  probe
  misc_feature (1)..(25): SEQ ID NO: 7011; WAN024ERC_at; Start 113; Stop 137
caccaacagcaccaccgatacctgt

SEQ ID NO: 179326 - DNA, 25 bp, Artificial
  probe
  misc_feature (1)..(25): SEQ ID NO: 7011; WAN024ERC_at; Start 31; Stop 55
actggacgagtcatggttggtaaca

SEQ ID NO: 179327 - DNA, 25 bp, Artificial
  probe
  misc_feature (1)..(25): SEQ ID NO: 7011; WAN024ERC_at; Start 131; Stop 155
tacctgttgcaatgagacctggaac

SEQ ID NO: 179328 - DNA, 25 bp, Artificial
  probe
  misc_feature (1)..(25): SEQ ID NO: 7011; WAN024ERC_at; Start 74; Stop 98
gcacagcagaatcagcacccattgt

SEQ ID NO: 179329 - DNA, 25 bp, Artificial
  probe
  misc_feature (1)..(25): SEQ ID NO: 7011; WAN024ERC_at; Start 63; Stop 87
tccaccaaatggcacagcagaatca

SEQ ID NO: 179330 - DNA, 25 bp, Artificial
  probe
  misc_feature (1)..(25): SEQ ID NO: 7011; WAN024ERC_at; Start 37; Stop 61
cgagtcatggttggtaacataagca

SEQ ID NO: 179331 - DNA, 25 bp, Artificial
  probe
  misc_feature (1)..(25): SEQ ID NO: 7011; WAN024ERC_at; Start 128; Stop 152
cgatacctgttgcaatgagacctgg

SEQ ID NO: 179332 - DNA, 25 bp, Artificial
  probe
  misc_feature (1)..(25): SEQ ID NO: 7011; WAN024ERC_at; Start 44; Stop 68
tggttggtaacataagcactccacc

SEQ ID NO: 179333 - DNA, 25 bp, Artificial
  probe
  misc_feature (1)..(25): SEQ ID NO: 7011; WAN024ERC_at; Start 97; Stop 121
gtcaaagaaacagcaccaccaacag

SEQ ID NO: 179334 - DNA, 25 bp, Artificial
  probe
  misc_feature (1)..(25): SEQ ID NO: 7011; WAN024ERC_at; Start 175; Stop 199
ggaattacaccttcaacaatattga

SEQ ID NO: 179335 - DNA, 25 bp, Artificial
  probe
  misc_feature (1)..(25): SEQ ID NO: 7011; WAN024ERC_at; Start 5; Stop 29
tagctaacaaggcacaaataccagc

SEQ ID NO: 179336 - DNA, 25 bp, Artificial
  probe
  misc_feature (1)..(25): SEQ ID NO: 7011; WAN024ERC_at; Start 139; Stop 163
gcaatgagacctggaaccaagttat

SEQ ID NO: 179337 - DNA, 25 bp, Artificial
  probe
  misc_feature (1)..(25): SEQ ID NO: 7011; WAN024ERC_at; Start 85; Stop 109
tcagcacccattgtcaaagaaacag

SEQ ID NO: 179338 - DNA, 25 bp, Artificial
  probe
  misc_feature (1)..(25): SEQ ID NO: 7011; WAN024ERC_at; Start 211; Stop 235
ggaacagccgatttcaatgtttcga

SEQ ID NO: 179339 - DNA, 25 bp, Artificial
  probe
  misc_feature (1)..(25): SEQ ID NO: 7011; WAN024ERC_at; Start 135; Stop 159
tgttgcaatgagacctggaaccaag

SEQ ID NO: 179340 - DNA, 25 bp, Artificial
  probe
  misc_feature (1)..(25): SEQ ID NO: 7011; WAN024ERC_at; Start 167; Stop 191
taacaatcggaattacaccttcaac

SEQ ID NO: 179341 - DNA, 25 bp, Artificial
  probe
  misc_feature (1)..(25): SEQ ID NO: 7011; WAN024ERC_at; Start 92; Stop 116
ccattgtcaaagaaacagcaccacc

SEQ ID NO: 179342 - DNA, 25 bp, Artificial
  probe
  misc_feature (1)..(25): SEQ ID NO: 7011; WAN024ERC_at; Start 25; Stop 49
ccagctactggacgagtcatggttg

SEQ ID NO: 179343 - DNA, 25 bp, Artificial
  probe
  misc_feature (1)..(25): SEQ ID NO: 7011; WAN024ERC_at; Start 79; Stop 103
gcagaatcagcacccattgtcaaag

SEQ ID NO: 179344 - DNA, 25 bp, Artificial
  probe
  misc_feature (1)..(25): SEQ ID NO: 7011; WAN024ERC_at; Start 56; Stop 80
taagcactccaccaaatggcacagc

SEQ ID NO: 179345 - DNA, 25 bp, Artificial
  probe
  misc_feature (1)..(25): SEQ ID NO: 7011; WAN024ERC_at; Start 152; Stop 176
gaaccaagttattcataacaatcgg

SEQ ID NO: 179346 - DNA, 25 bp, Artificial
  probe
  misc_feature (1)..(25): SEQ ID NO: 7011; WAN024ERC_at; Start 203; Stop 227
tccccataggaacagccgatttcaa

SEQ ID NO: 179347 - DNA, 25 bp, Artificial
  probe
  misc_feature (1)..(25): SEQ ID NO: 7011; WAN024ERC_at; Start 41; Stop 65
tcatggttggtaacataagcactcc

SEQ ID NO: 179348 - DNA, 25 bp, Artificial
  probe
  misc_feature (1)..(25): SEQ ID NO: 7011; WAN024ERC_at; Start 198; Stop 222
gacaatccccataggaacagccgat

SEQ ID NO: 179349 - DNA, 25 bp, Artificial
  probe
  misc_feature (1)..(25): SEQ ID NO: 7011; WAN024ERC_at; Start 2; Stop 26
tgttagctaacaaggcacaaatacc

SEQ ID NO: 179350 - DNA, 25 bp, Artificial
  probe
  misc_feature (1)..(25): SEQ ID NO: 7011; WAN024ERC_at; Start 12; Stop 36
caaggcacaaataccagctactgga

SEQ ID NO: 179351 - DNA, 25 bp, Artificial
  probe
  misc_feature (1)..(25): SEQ ID NO: 7011; WAN024ERC_at; Start 196; Stop 220
ttgacaatccccataggaacagccg

SEQ ID NO: 179352 - DNA, 25 bp, Artificial
  probe
  misc_feature (1)..(25): SEQ ID NO: 1189; WAN024ERD_at; Start 187; Stop 211
gaaggaaactttcaacatcatgtct

SEQ ID NO: 179353 - DNA, 25 bp, Artificial
  probe
  misc_feature (1)..(25): SEQ ID NO: 1189; WAN024ERD_at; Start 83; Stop 107
gccttcttgtttctgaagatacaga

SEQ ID NO: 179354 - DNA, 25 bp, Artificial
  probe
  misc_feature (1)..(25): SEQ ID NO: 1189; WAN024ERD_at; Start 4; Stop 28
aataatctttcgcttgtccttatgg

SEQ ID NO: 179355 - DNA, 25 bp, Artificial
  probe
  misc_feature (1)..(25): SEQ ID NO: 1189; WAN024ERD_at; Start 52; Stop 76
gaagcctacaaagaattagcaaatc

SEQ ID NO: 179356 - DNA, 25 bp, Artificial
  probe
  misc_feature (1)..(25): SEQ ID NO: 1189; WAN024ERD_at; Start 100; Stop 124
gatacagaaaaaatagaagagcttc

SEQ ID NO: 179357 - DNA, 25 bp, Artificial
  probe
  misc_feature (1)..(25): SEQ ID NO: 1189; WAN024ERD_at; Start 329; Stop 353
tgatgagaagactagcagatgaatc

SEQ ID NO: 179358 - DNA, 25 bp, Artificial
  probe
  misc_feature (1)..(25): SEQ ID NO: 1189; WAN024ERD_at; Start 19; Stop 43
gtccttatggatatatctgttcaaa

SEQ ID NO: 179359 - DNA, 25 bp, Artificial
  probe
  misc_feature (1)..(25): SEQ ID NO: 1189; WAN024ERD_at; Start 140; Stop 164
gacagggaagtatagaggttgctaa

SEQ ID NO: 179360 - DNA, 25 bp, Artificial
  probe
  misc_feature (1)..(25): SEQ ID NO: 1189; WAN024ERD_at; Start 250; Stop 274
tcgaaggatatccagtgtgttgacc

SEQ ID NO: 179361 - DNA, 25 bp, Artificial
  probe
  misc_feature (1)..(25): SEQ ID NO: 1189; WAN024ERD_at; Start 380; Stop 404
caaaagaagaattacgggagataat

SEQ ID NO: 179362 - DNA, 25 bp, Artificial
  probe
  misc_feature (1)..(25): SEQ ID NO: 1189; WAN024ERD_at; Start 232; Stop 256
tcacctatcagagaatggtcgaagg

SEQ ID NO: 179363 - DNA, 25 bp, Artificial
  probe
  misc_feature (1)..(25): SEQ ID NO: 1189; WAN024ERD_at; Start 165; Stop 189
aggtgttcttctaccacattgtgaa

SEQ ID NO: 179364 - DNA, 25 bp, Artificial
  probe
  misc_feature (1)..(25): SEQ ID NO: 1189; WAN024ERD_at; Start 201; Stop 225
acatcatgtcttagtgattactaga

SEQ ID NO: 179365 - DNA, 25 bp, Artificial
  probe
  misc_feature (1)..(25): SEQ ID NO: 1189; WAN024ERD_at; Start 64; Stop 88
gaattagcaaatcaaatcagccttc

SEQ ID NO: 179366 - DNA, 25 bp, Artificial
  probe
  misc_feature (1)..(25): SEQ ID NO: 1189; WAN024ERD_at; Start 227; Stop 251
taaaatcacctatcagagaatggtc

SEQ ID NO: 179367 - DNA, 25 bp, Artificial
  probe
  misc_feature (1)..(25): SEQ ID NO: 1189; WAN024ERD_at; Start 335; Stop 359
gaagactagcagatgaatcattcat

SEQ ID NO: 179368 - DNA, 25 bp, Artificial
  probe
  misc_feature (1)..(25): SEQ ID NO: 1189; WAN024ERD_at; Start 273; Stop 297
ccttattatcggtttggccattgca

SEQ ID NO: 179369 - DNA, 25 bp, Artificial
  probe
  misc_feature (1)..(25): SEQ ID NO: 1189; WAN024ERD_at; Start 260; Stop 284
tccagtgtgttgaccttattatcgg

SEQ ID NO: 179370 - DNA, 25 bp, Artificial
  probe
  misc_feature (1)..(25): SEQ ID NO: 1189; WAN024ERD_at; Start 178; Stop 202
ccacattgtgaaggaaactttcaac

SEQ ID NO: 179371 - DNA, 25 bp, Artificial
  probe
  misc_feature (1)..(25): SEQ ID NO: 1189; WAN024ERD_at; Start 352; Stop 376
tcattcataaatcaattaaaacagt

SEQ ID NO: 179372 - DNA, 25 bp, Artificial
  probe
  misc_feature (1)..(25): SEQ ID NO: 1189; WAN024ERD_at; Start 239; Stop 263
tcagagaatggtcgaaggatatcca

SEQ ID NO: 179373 - DNA, 25 bp, Artificial
  probe
  misc_feature (1)..(25): SEQ ID NO: 1189; WAN024ERD_at; Start 283; Stop 307
ggtttggccattgcagtatcacagg

SEQ ID NO: 179374 - DNA, 25 bp, Artificial
  probe
  misc_feature (1)..(25): SEQ ID NO: 1189; WAN024ERD_at; Start 288; Stop 312
ggccattgcagtatcacaggacaag

SEQ ID NO: 179375 - DNA, 25 bp, Artificial
  probe
  misc_feature (1)..(25): SEQ ID NO: 1189; WAN024ERD_at; Start 40; Stop 64
caaaatcgtcaagaagcctacaaag

SEQ ID NO: 179376 - DNA, 25 bp, Artificial
  probe
  misc_feature (1)..(25): SEQ ID NO: 1189; WAN024ERD_at; Start 34; Stop 58
tctgttcaaaatcgtcaagaagcct

SEQ ID NO: 179377 - DNA, 25 bp, Artificial
  probe
  misc_feature (1)..(25): SEQ ID NO: 1189; WAN024ERD_at; Start 115; Stop 139
gaagagcttctatattaccgtgaga

SEQ ID NO: 179378 - DNA, 25 bp, Artificial
  probe
  misc_feature (1)..(25): SEQ ID NO: 1189; WAN024ERD_at; Start 394; Stop 418
cgggagataatatatggaaatcaaa

SEQ ID NO: 179379 - DNA, 25 bp, Artificial
  probe
  misc_feature (1)..(25): SEQ ID NO: 1189; WAN024ERD_at; Start 294; Stop 318
tgcagtatcacaggacaagtcatgt

SEQ ID NO: 179380 - DNA, 25 bp, Artificial
  probe
  misc_feature (1)..(25): SEQ ID NO: 1189; WAN024ERD_at; Start 302; Stop 326
cacaggacaagtcatgtattaaaac

SEQ ID NO: 179381 - DNA, 25 bp, Artificial
  probe
  misc_feature (1)..(25): SEQ ID NO: 1189; WAN024ERD_at; Start 154; Stop 178
gaggttgctaaaggtgttcttctac

SEQ ID NO: 179382 - DNA, 25 bp, Artificial
  probe
  misc_feature (1)..(25): SEQ ID NO: 1189; WAN024ERD_at; Start 212; Stop 236
tagtgattactagattaaaatcacc

SEQ ID NO: 179383 - DNA, 25 bp, Artificial
  probe
  misc_feature (1)..(25): SEQ ID NO: 1189; WAN024ERD_at; Start 76; Stop 100
caaatcagccttcttgtttctgaag

SEQ ID NO: 179384 - DNA, 25 bp, Artificial
  probe
  misc_feature (1)..(25): SEQ ID NO: 1189; WAN024ERD_at; Start 125; Stop 149
tatattaccgtgagagacagggaag

SEQ ID NO: 179385 - DNA, 25 bp, Artificial
  probe
  misc_feature (1)..(25): SEQ ID NO: 1189; WAN024ERD_at; Start 321; Stop 345
taaaacattgatgagaagactagca

SEQ ID NO: 179386 - DNA, 25 bp, Artificial
  probe
  misc_feature (1)..(25): SEQ ID NO: 2159; WAN024ERE_at; Start 379; Stop 403
ggtaatgacgaagttgttgccaaat

SEQ ID NO: 179387 - DNA, 25 bp, Artificial
  probe
  misc_feature (1)..(25): SEQ ID NO: 2159; WAN024ERE_at; Start 404; Stop 428
tagttcgggctcagacatctgatga

SEQ ID NO: 179388 - DNA, 25 bp, Artificial
  probe
  misc_feature (1)..(25): SEQ ID NO: 2159; WAN024ERE_at; Start 245; Stop 269
taaatcacaatgagattccttggga

SEQ ID NO: 179389 - DNA, 25 bp, Artificial
  probe
  misc_feature (1)..(25): SEQ ID NO: 2159; WAN024ERE_at; Start 164; Stop 188
gacagaccggtattgggaattatat

SEQ ID NO: 179390 - DNA, 25 bp, Artificial
  probe
  misc_feature (1)..(25): SEQ ID NO: 2159; WAN024ERE_at; Start 338; Stop 362
gggagcatttgaagaccttatcact

SEQ ID NO: 179391 - DNA, 25 bp, Artificial
  probe
  misc_feature (1)..(25): SEQ ID NO: 2159; WAN024ERE_at; Start 431; Stop 455
tgattgcagctttttgtctaactaa

SEQ ID NO: 179392 - DNA, 25 bp, Artificial
  probe
  misc_feature (1)..(25): SEQ ID NO: 2159; WAN024ERE_at; Start 88; Stop 112
caactattggttgagacgggttatg

SEQ ID NO: 179393 - DNA, 25 bp, Artificial
  probe
  misc_feature (1)..(25): SEQ ID NO: 2159; WAN024ERE_at; Start 348; Stop 372
gaagaccttatcactctttgctcga

SEQ ID NO: 179394 - DNA, 25 bp, Artificial
  probe
  misc_feature (1)..(25): SEQ ID NO: 2159; WAN024ERE_at; Start 417; Stop 441
gacatctgatgatgtgattgcagct

SEQ ID NO: 179395 - DNA, 25 bp, Artificial
  probe
  misc_feature (1)..(25): SEQ ID NO: 2159; WAN024ERE_at; Start 230; Stop 254
gggtagtcatagctataaatcacaa

SEQ ID NO: 179396 - DNA, 25 bp, Artificial
  probe
  misc_feature (1)..(25): SEQ ID NO: 2159; WAN024ERE_at; Start 293; Stop 317
aagtaattgtactctttgcagttgg

SEQ ID NO: 179397 - DNA, 25 bp, Artificial
  probe
  misc_feature (1)..(25): SEQ ID NO: 2159; WAN024ERE_at; Start 49; Stop 73
cagatgcagagcaaagaagaggttt

SEQ ID NO: 179398 - DNA, 25 bp, Artificial
  probe
  misc_feature (1)..(25): SEQ ID NO: 2159; WAN024ERE_at; Start 256; Stop 280
gagattccttgggagaccattgatg

SEQ ID NO: 179399 - DNA, 25 bp, Artificial
  probe
  misc_feature (1)..(25): SEQ ID NO: 2159; WAN024ERE_at; Start 64; Stop 88
gaagaggtttttgaggcattagctc

SEQ ID NO: 179400 - DNA, 25 bp, Artificial
  probe
  misc_feature (1)..(25): SEQ ID NO: 2159; WAN024ERE_at; Start 153; Stop 177
agaggcagaaggacagaccggtatt

SEQ ID NO: 179401 - DNA, 25 bp, Artificial
  probe
  misc_feature (1)..(25): SEQ ID NO: 2159; WAN024ERE_at; Start 201; Stop 225
tagcaagagttctgctgtggagaag

SEQ ID NO: 179402 - DNA, 25 bp, Artificial
  probe
  misc_feature (1)..(25): SEQ ID NO: 2159; WAN024ERE_at; Start 134; Stop 158
tcgaaggtctttatcagagagaggc

SEQ ID NO: 179403 - DNA, 25 bp, Artificial
  probe
  misc_feature (1)..(25): SEQ ID NO: 2159; WAN024ERE_at; Start 393; Stop 417
tgttgccaaattagttcgggctcag

SEQ ID NO: 179404 - DNA, 25 bp, Artificial
  probe
  misc_feature (1)..(25): SEQ ID NO: 2159; WAN024ERE_at; Start 356; Stop 380
tatcactctttgctcgaaaacttgg

SEQ ID NO: 179405 - DNA, 25 bp, Artificial
  probe
  misc_feature (1)..(25): SEQ ID NO: 2159; WAN024ERE_at; Start 18; Stop 42
tcttaatgtgagtctgatccagacg

SEQ ID NO: 179406 - DNA, 25 bp, Artificial
  probe
  misc_feature (1)..(25): SEQ ID NO: 2159; WAN024ERE_at; Start 319; Stop 343
gatgatacagaagctgctagggagc

SEQ ID NO: 179407 - DNA, 25 bp, Artificial
  probe
  misc_feature (1)..(25): SEQ ID NO: 2159; WAN024ERE_at; Start 33; Stop 57
gatccagacggatttacagatgcag

SEQ ID NO: 179408 - DNA, 25 bp, Artificial
  probe
  misc_feature (1)..(25): SEQ ID NO: 2159; WAN024ERE_at; Start 304; Stop 328
ctctttgcagttggtgatgatacag

SEQ ID NO: 179409 - DNA, 25 bp, Artificial
  probe
  misc_feature (1)..(25): SEQ ID NO: 2159; WAN024ERE_at; Start 180; Stop 204
gaattatattgctattccccatagc

SEQ ID NO: 179410 - DNA, 25 bp, Artificial
  probe
  misc_feature (1)..(25): SEQ ID NO: 2159; WAN024ERE_at; Start 76; Stop 100
gaggcattagctcaactattggttg

SEQ ID NO: 179411 - DNA, 25 bp, Artificial
  probe
  misc_feature (1)..(25): SEQ ID NO: 2159; WAN024ERE_at; Start 326; Stop 350
cagaagctgctagggagcatttgaa

SEQ ID NO: 179412 - DNA, 25 bp, Artificial
  probe
  misc_feature (1)..(25): SEQ ID NO: 2159; WAN024ERE_at; Start 9; Stop 33
caaagatattcttaatgtgagtctg

SEQ ID NO: 179413 - DNA, 25 bp, Artificial
  probe
  misc_feature (1)..(25): SEQ ID NO: 2159; WAN024ERE_at; Start 118; Stop 142
gatagagaccaatttatcgaaggtc

SEQ ID NO: 179414 - DNA, 25 bp, Artificial
  probe
  misc_feature (1)..(25): SEQ ID NO: 2159; WAN024ERE_at; Start 191; Stop 215
ctattccccatagcaagagttctgc

SEQ ID NO: 179415 - DNA, 25 bp, Artificial
  probe
  misc_feature (1)..(25): SEQ ID NO: 2159; WAN024ERE_at; Start 37; Stop 61
cagacggatttacagatgcagagca

SEQ ID NO: 179416 - DNA, 25 bp, Artificial
  probe
  misc_feature (1)..(25): SEQ ID NO: 2159; WAN024ERE_at; Start 144; Stop 168
ttatcagagagaggcagaaggacag

SEQ ID NO: 179417 - DNA, 25 bp, Artificial
  probe
  misc_feature (1)..(25): SEQ ID NO: 2159; WAN024ERE_at; Start 364; Stop 388
tttgctcgaaaacttggtaatgacg

SEQ ID NO: 179418 - DNA, 25 bp, Artificial
  probe
  misc_feature (1)..(25): SEQ ID NO: 2159; WAN024ERE_at; Start 262; Stop 286
ccttgggagaccattgatgggaaag

SEQ ID NO: 179419 - DNA, 25 bp, Artificial
  probe
  misc_feature (1)..(25): SEQ ID NO: 2159; WAN024ERE_at; Start 104; Stop 128
cgggttatgtgtctgatagagacca

SEQ ID NO: 179420 - DNA, 25 bp, Artificial
  probe
  misc_feature (1)..(25): SEQ ID NO: 3049; WAN024ERF_at; Start 277; Stop 301
gccaattctgttggttcagggttta

SEQ ID NO: 179421 - DNA, 25 bp, Artificial
  probe
  misc_feature (1)..(25): SEQ ID NO: 3049; WAN024ERF_at; Start 599; Stop 623
cgtttgtgttgactttacaggctga

SEQ ID NO: 179422 - DNA, 25 bp, Artificial
  probe
  misc_feature (1)..(25): SEQ ID NO: 3049; WAN024ERF_at; Start 554; Stop 578
tcagtgctgttgactttggtggccc

SEQ ID NO: 179423 - DNA, 25 bp, Artificial
  probe
  misc_feature (1)..(25): SEQ ID NO: 3049; WAN024ERF_at; Start 161; Stop 185
tagcaactatgggtggtaaagccct

SEQ ID NO: 179424 - DNA, 25 bp, Artificial
  probe
  misc_feature (1)..(25): SEQ ID NO: 3049; WAN024ERF_at; Start 108; Stop 132
gggtggtgttcctgacgctcttgta

SEQ ID NO: 179425 - DNA, 25 bp, Artificial
  probe
  misc_feature (1)..(25): SEQ ID NO: 3049; WAN024ERF_at; Start 614; Stop 638
tacaggctgaaggtgtgaaagaacc

SEQ ID NO: 179426 - DNA, 25 bp, Artificial
  probe
  misc_feature (1)..(25): SEQ ID NO: 3049; WAN024ERF_at; Start 669; Stop 693
tacaccagttggatttggattggcc

SEQ ID NO: 179427 - DNA, 25 bp, Artificial
  probe
  misc_feature (1)..(25): SEQ ID NO: 3049; WAN024ERF_at; Start 176; Stop 200
gtaaagcccttggtctcttgccagt

SEQ ID NO: 179428 - DNA, 25 bp, Artificial
  probe
  misc_feature (1)..(25): SEQ ID NO: 3049; WAN024ERF_at; Start 465; Stop 489
tatcgcagcctttaccaactggttg

SEQ ID NO: 179429 - DNA, 25 bp, Artificial
  probe
  misc_feature (1)..(25): SEQ ID NO: 3049; WAN024ERF_at; Start 448; Stop 472
tatattattggagcgcctatcgcag

SEQ ID NO: 179430 - DNA, 25 bp, Artificial
  probe
  misc_feature (1)..(25): SEQ ID NO: 3049; WAN024ERF_at; Start 684; Stop 708
tggattggcctattttatcgcgaaa

SEQ ID NO: 179431 - DNA, 25 bp, Artificial
  probe
  misc_feature (1)..(25): SEQ ID NO: 3049; WAN024ERF_at; Start 657; Stop 681
ggtgaatactgctacaccagttgga

SEQ ID NO: 179432 - DNA, 25 bp, Artificial
  probe
  misc_feature (1)..(25): SEQ ID NO: 3049; WAN024ERF_at; Start 123; Stop 147
cgctcttgtagcaggaaaattcact

SEQ ID NO: 179433 - DNA, 25 bp, Artificial
  probe
  misc_feature (1)..(25): SEQ ID NO: 3049; WAN024ERF_at; Start 929; Stop 953
caaccatgactcgtccagtagctgg

SEQ ID NO: 179434 - DNA, 25 bp, Artificial
  probe
  misc_feature (1)..(25): SEQ ID NO: 3049; WAN024ERF_at; Start 36; Stop 60
gacagccatttcctatatgattcca

SEQ ID NO: 179435 - DNA, 25 bp, Artificial
  probe
  misc_feature (1)..(25): SEQ ID NO: 3049; WAN024ERF_at; Start 1024; Stop 1048
catgcagaaccagttatgactgttg

SEQ ID NO: 179436 - DNA, 25 bp, Artificial
  probe
  misc_feature (1)..(25): SEQ ID NO: 3049; WAN024ERF_at; Start 309; Stop 333
tatcttgggaggttatatagctggt

SEQ ID NO: 179437 - DNA, 25 bp, Artificial
  probe
  misc_feature (1)..(25): SEQ ID NO: 3049; WAN024ERF_at; Start 986; Stop 1010
caggacttgtctacgcgattttgaa

SEQ ID NO: 179438 - DNA, 25 bp, Artificial
  probe
  misc_feature (1)..(25): SEQ ID NO: 3049; WAN024ERF_at; Start 191; Stop 215
tcttgccagttgttattgctacagg

SEQ ID NO: 179439 - DNA, 25 bp, Artificial
  probe
  misc_feature (1)..(25): SEQ ID NO: 3049; WAN024ERF_at; Start 497; Stop 521
tattacaaagcttgggaagtgcttc

SEQ ID NO: 179440 - DNA, 25 bp, Artificial
  probe
  misc_feature (1)..(25): SEQ ID NO: 3049; WAN024ERF_at; Start 875; Stop 899
ctttgacaatgggtgctgattctgc

SEQ ID NO: 179441 - DNA, 25 bp, Artificial
  probe
  misc_feature (1)..(25): SEQ ID NO: 3049; WAN024ERF_at; Start 57; Stop 81
tccaattgtttgtggtgcaggattc

SEQ ID NO: 179442 - DNA, 25 bp, Artificial
  probe
  misc_feature (1)..(25): SEQ ID NO: 3049; WAN024ERF_at; Start 241; Stop 265
ccagggattgcaccaggttttgttg

SEQ ID NO: 179443 - DNA, 25 bp, Artificial
  probe
  misc_feature (1)..(25): SEQ ID NO: 3049; WAN024ERF_at; Start 826; Stop 850
ccaggtctcattgcaacaggtatcg

SEQ ID NO: 179444 - DNA, 25 bp, Artificial
  probe
  misc_feature (1)..(25): SEQ ID NO: 3049; WAN024ERF_at; Start 570; Stop 594
tggtggcccacttaataaaacagtc

SEQ ID NO: 179445 - DNA, 25 bp, Artificial
  probe
  misc_feature (1)..(25): SEQ ID NO: 3049; WAN024ERF_at; Start 968; Stop 992
tagctaacattgtagtcacaggact

SEQ ID NO: 179446 - DNA, 25 bp, Artificial
  probe
  misc_feature (1)..(25): SEQ ID NO: 3049; WAN024ERF_at; Start 324; Stop 348
tatagctggtttcttggttcaagcg

SEQ ID NO: 179447 - DNA, 25 bp, Artificial
  probe
  misc_feature (1)..(25): SEQ ID NO: 3049; WAN024ERF_at; Start 749; Stop 773
cattgaaatcggctgttcctatggg

SEQ ID NO: 179448 - DNA, 25 bp, Artificial
  probe
  misc_feature (1)..(25): SEQ ID NO: 3049; WAN024ERF_at; Start 212; Stop 236
caggtttgtcttactcgattgctgg

SEQ ID NO: 179449 - DNA, 25 bp, Artificial
  probe
  misc_feature (1)..(25): SEQ ID NO: 3049; WAN024ERF_at; Start 780; Stop 804
caatattgttgaaggtgtaattccg

SEQ ID NO: 179450 - DNA, 25 bp, Artificial
  probe
  misc_feature (1)..(25): SEQ ID NO: 3049; WAN024ERF_at; Start 144; Stop 168
cactatctgggatgctttagcaact

SEQ ID NO: 179451 - DNA, 25 bp, Artificial
  probe
  misc_feature (1)..(25): SEQ ID NO: 3049; WAN024ERF_at; Start 810; Stop 834
tatgaataacttggttccaggtctc

SEQ ID NO: 179452 - DNA, 25 bp, Artificial
  probe
  misc_feature (1)..(25): SEQ ID NO: 3049; WAN024ERF_at; Start 20; Stop 44
taaaaggtcacttattgacagccat

SEQ ID NO: 179453 - DNA, 25 bp, Artificial
  probe
  misc_feature (1)..(25): SEQ ID NO: 3049; WAN024ERF_at; Start 913; Stop 937
ggagtgcttatgttaccaaccatga

SEQ ID NO: 179454 - DNA, 25 bp, Artificial
  probe
  misc_feature (1)..(25): SEQ ID NO: 5474; WAN024ERG_at; Start 91; Stop 115
gccgcaaaggtagctggacatgtga

SEQ ID NO: 179455 - DNA, 25 bp, Artificial
  probe
  misc_feature (1)..(25): SEQ ID NO: 5474; WAN024ERG_at; Start 283; Stop 307
cccaataaactgattgctaaagctg

SEQ ID NO: 179456 - DNA, 25 bp, Artificial
  probe
  misc_feature (1)..(25): SEQ ID NO: 5474; WAN024ERG_at; Start 71; Stop 95
cacaggaaaaattagagaatgccgc

SEQ ID NO: 179457 - DNA, 25 bp, Artificial
  probe
  misc_feature (1)..(25): SEQ ID NO: 5474; WAN024ERG_at; Start 248; Stop 272
ttatcaaggttccaacagaagtggc

SEQ ID NO: 179458 - DNA, 25 bp, Artificial
  probe
  misc_feature (1)..(25): SEQ ID NO: 5474; WAN024ERG_at; Start 255; Stop 279
ggttccaacagaagtggcagtcaaa

SEQ ID NO: 179459 - DNA, 25 bp, Artificial
  probe
  misc_feature (1)..(25): SEQ ID NO: 5474; WAN024ERG_at; Start 229; Stop 253
cgctttgagggtaaaaagattatca

SEQ ID NO: 179460 - DNA, 25 bp, Artificial
  probe
  misc_feature (1)..(25): SEQ ID NO: 5474; WAN024ERG_at; Start 169; Stop 193
cagattgatgcagcggatgtagtta

SEQ ID NO: 179461 - DNA, 25 bp, Artificial
  probe
  misc_feature (1)..(25): SEQ ID NO: 5474; WAN024ERG_at; Start 216; Stop 240
ttctggtatggaacgctttgagggt

SEQ ID NO: 179462 - DNA, 25 bp, Artificial
  probe
  misc_feature (1)..(25): SEQ ID NO: 5474; WAN024ERG_at; Start 95; Stop 119
caaaggtagctggacatgtgattca

SEQ ID NO: 179463 - DNA, 25 bp, Artificial
  probe
  misc_feature (1)..(25): SEQ ID NO: 5474; WAN024ERG_at; Start 163; Stop 187
caagagcagattgatgcagcggatg

SEQ ID NO: 179464 - DNA, 25 bp, Artificial
  probe
  misc_feature (1)..(25): SEQ ID NO: 5474; WAN024ERG_at; Start 252; Stop 276
caaggttccaacagaagtggcagtc

SEQ ID NO: 179465 - DNA, 25 bp, Artificial
  probe
  misc_feature (1)..(25): SEQ ID NO: 5474; WAN024ERG_at; Start 241; Stop 265
aaaaagattatcaaggttccaacag

SEQ ID NO: 179466 - DNA, 25 bp, Artificial
  probe
  misc_feature (1)..(25): SEQ ID NO: 5474; WAN024ERG_at; Start 260; Stop 284
caacagaagtggcagtcaaatctcc

SEQ ID NO: 179467 - DNA, 25 bp, Artificial
  probe
  misc_feature (1)..(25): SEQ ID NO: 5474; WAN024ERG_at; Start 109; Stop 133
catgtgattcatgttgagactcagg

SEQ ID NO: 179468 - DNA, 25 bp, Artificial
  probe
  misc_feature (1)..(25): SEQ ID NO: 5474; WAN024ERG_at; Start 178; Stop 202
gcagcggatgtagttattttagcag

SEQ ID NO: 179469 - DNA, 25 bp, Artificial
  probe
  misc_feature (1)..(25): SEQ ID NO: 5474; WAN024ERG_at; Start 298; Stop 322
gctaaagctgttgagattgttacga

SEQ ID NO: 179470 - DNA, 25 bp, Artificial
  probe
  misc_feature (1)..(25): SEQ ID NO: 5474; WAN024ERG_at; Start 263; Stop 287
cagaagtggcagtcaaatctcccaa

SEQ ID NO: 179471 - DNA, 25 bp, Artificial
  probe
  misc_feature (1)..(25): SEQ ID NO: 5474; WAN024ERG_at; Start 47; Stop 71
tgggaattgcccacacttatattgc

SEQ ID NO: 179472 - DNA, 25 bp, Artificial
  probe
  misc_feature (1)..(25): SEQ ID NO: 5474; WAN024ERG_at; Start 76; Stop 100
gaaaaattagagaatgccgcaaagg

SEQ ID NO: 179473 - DNA, 25 bp, Artificial
  probe
  misc_feature (1)..(25): SEQ ID NO: 5474; WAN024ERG_at; Start 159; Stop 183
gagtcaagagcagattgatgcagcg

SEQ ID NO: 179474 - DNA, 25 bp, Artificial
  probe
  misc_feature (1)..(25): SEQ ID NO: 5474; WAN024ERG_at; Start 197; Stop 221
tagcagttgatgttaagatttctgg

SEQ ID NO: 179475 - DNA, 25 bp, Artificial
  probe
  misc_feature (1)..(25): SEQ ID NO: 5474; WAN024ERG_at; Start 2; Stop 26
tggagggtatccgtatgaaaattgt

SEQ ID NO: 179476 - DNA, 25 bp, Artificial
  probe
  misc_feature (1)..(25): SEQ ID NO: 5474; WAN024ERG_at; Start 85; Stop 109
gagaatgccgcaaaggtagctggac

SEQ ID NO: 179477 - DNA, 25 bp, Artificial
  probe
  misc_feature (1)..(25): SEQ ID NO: 5474; WAN024ERG_at; Start 304; Stop 328
gctgttgagattgttacgaaataac

SEQ ID NO: 179478 - DNA, 25 bp, Artificial
  probe
  misc_feature (1)..(25): SEQ ID NO: 5474; WAN024ERG_at; Start 20; Stop 44
aaattgttggtgttgcagcttgtac

SEQ ID NO: 179479 - DNA, 25 bp, Artificial
  probe
  misc_feature (1)..(25): SEQ ID NO: 5474; WAN024ERG_at; Start 213; Stop 237
gatttctggtatggaacgctttgag

SEQ ID NO: 179480 - DNA, 25 bp, Artificial
  probe
  misc_feature (1)..(25): SEQ ID NO: 5474; WAN024ERG_at; Start 11; Stop 35
tccgtatgaaaattgttggtgttgc

SEQ ID NO: 179481 - DNA, 25 bp, Artificial
  probe
  misc_feature (1)..(25): SEQ ID NO: 5474; WAN024ERG_at; Start 145; Stop 169
gtagaaaatgaattgagtcaagagc

SEQ ID NO: 179482 - DNA, 25 bp, Artificial
  probe
  misc_feature (1)..(25): SEQ ID NO: 5474; WAN024ERG_at; Start 269; Stop 293
tggcagtcaaatctcccaataaact

SEQ ID NO: 179483 - DNA, 25 bp, Artificial
  probe
  misc_feature (1)..(25): SEQ ID NO: 5474; WAN024ERG_at; Start 35; Stop 59
cagcttgtactgtgggaattgccca

SEQ ID NO: 179484 - DNA, 25 bp, Artificial
  probe
  misc_feature (1)..(25): SEQ ID NO: 5474; WAN024ERG_at; Start 288; Stop 312
taaactgattgctaaagctgttgag

SEQ ID NO: 179485 - DNA, 25 bp, Artificial
  probe
  misc_feature (1)..(25): SEQ ID NO: 5474; WAN024ERG_at; Start 55; Stop 79
gcccacacttatattgcacaggaaa

SEQ ID NO: 179486 - DNA, 25 bp, Artificial
  probe
  misc_feature (1)..(25): SEQ ID NO: 5474; WAN024ERG_at; Start 182; Stop 206
cggatgtagttattttagcagttga

SEQ ID NO: 179487 - DNA, 25 bp, Artificial
  probe
  misc_feature (1)..(25): SEQ ID NO: 5474; WAN024ERG_at; Start 207; Stop 231
tgttaagatttctggtatggaacgc

SEQ ID NO: 179488 - DNA, 25 bp, Artificial
  probe
  misc_feature (1)..(25): SEQ ID NO: 4265; WAN024ERH_at; Start 1223; Stop 1247
gaacttcagagcttttacgagcacg

SEQ ID NO: 179489 - DNA, 25 bp, Artificial
  probe
  misc_feature (1)..(25): SEQ ID NO: 4265; WAN024ERH_at; Start 945; Stop 969
agatcctgactttgttgacttggcg

SEQ ID NO: 179490 - DNA, 25 bp, Artificial
  probe
  misc_feature (1)..(25): SEQ ID NO: 4265; WAN024ERH_at; Start 1424; Stop 1448
aacgtcttcaagcaaaaattcagga

SEQ ID NO: 179491 - DNA, 25 bp, Artificial
  probe
  misc_feature (1)..(25): SEQ ID NO: 4265; WAN024ERH_at; Start 901; Stop 925
tattttagccgtatgtgtatggaca

SEQ ID NO: 179492 - DNA, 25 bp, Artificial
  probe
  misc_feature (1)..(25): SEQ ID NO: 4265; WAN024ERH_at; Start 200; Stop 224
caagaagttccctcgtggacgttga

SEQ ID NO: 179493 - DNA, 25 bp, Artificial
  probe
  misc_feature (1)..(25): SEQ ID NO: 4265; WAN024ERH_at; Start 135; Stop 159
caacaaagattgtccggtagaagca

SEQ ID NO: 179494 - DNA, 25 bp, Artificial
  probe
  misc_feature (1)..(25): SEQ ID NO: 4265; WAN024ERH_at; Start 349; Stop 373
tcagtagtactaaaagatcgtcaga

SEQ ID NO: 179495 - DNA, 25 bp, Artificial
  probe
  misc_feature (1)..(25): SEQ ID NO: 4265; WAN024ERH_at; Start 326; Stop 350
gagaggaattctacgtaagcgagtc

SEQ ID NO: 179496 - DNA, 25 bp, Artificial
  probe
  misc_feature (1)..(25): SEQ ID NO: 4265; WAN024ERH_at; Start 379; Stop 403
caagagagtctagcaatttatgggt

SEQ ID NO: 179497 - DNA, 25 bp, Artificial
  probe
  misc_feature (1)..(25): SEQ ID NO: 4265; WAN024ERH_at; Start 525; Stop 549
taaggttcagcctcttgacggagaa

SEQ ID NO: 179498 - DNA, 25 bp, Artificial
  probe
  misc_feature (1)..(25): SEQ ID NO: 4265; WAN024ERH_at; Start 1180; Stop 1204
gcacgtcctctaaaaacagtagtga

SEQ ID NO: 179499 - DNA, 25 bp, Artificial
  probe
  misc_feature (1)..(25): SEQ ID NO: 4265; WAN024ERH_at; Start 1346; Stop 1370
tgacgacggtagctttgcaggaacc

SEQ ID NO: 179500 - DNA, 25 bp, Artificial
  probe
  misc_feature (1)..(25): SEQ ID NO: 4265; WAN024ERH_at; Start 287; Stop 311
tgttgactgctcctaagccacattc

SEQ ID NO: 179501 - DNA, 25 bp, Artificial
  probe
  misc_feature (1)..(25): SEQ ID NO: 4265; WAN024ERH_at; Start 824; Stop 848
tatcttcgagattgcaaaaaccatt

SEQ ID NO: 179502 - DNA, 25 bp, Artificial
  probe
  misc_feature (1)..(25): SEQ ID NO: 4265; WAN024ERH_at; Start 219; Stop 243
cgttgatgggaattttacagaggct

SEQ ID NO: 179503 - DNA, 25 bp, Artificial
  probe
  misc_feature (1)..(25): SEQ ID NO: 4265; WAN024ERH_at; Start 24; Stop 48
ggaaacgttgttgctccttttgcga

SEQ ID NO: 179504 - DNA, 25 bp, Artificial
  probe
  misc_feature (1)..(25): SEQ ID NO: 4265; WAN024ERH_at; Start 272; Stop 296
tactagaacgtctcttgttgactgc

SEQ ID NO: 179505 - DNA, 25 bp, Artificial
  probe
  misc_feature (1)..(25): SEQ ID NO: 4265; WAN024ERH_at; Start 871; Stop 895
tctcagcgagttttagatgtcactc

SEQ ID NO: 179506 - DNA, 25 bp, Artificial
  probe
  misc_feature (1)..(25): SEQ ID NO: 4265; WAN024ERH_at; Start 1238; Stop 1262
tacgagcacgattagaaaagcaatt

SEQ ID NO: 179507 - DNA, 25 bp, Artificial
  probe
  misc_feature (1)..(25): SEQ ID NO: 4265; WAN024ERH_at; Start 1114; Stop 1138
gcttccttgagtctggacgagattg

SEQ ID NO: 179508 - DNA, 25 bp, Artificial
  probe
  misc_feature (1)..(25): SEQ ID NO: 4265; WAN024ERH_at; Start 1330; Stop 1354
gatttagatttcattgtgacgacgg

SEQ ID NO: 179509 - DNA, 25 bp, Artificial
  probe
  misc_feature (1)..(25): SEQ ID NO: 4265; WAN024ERH_at; Start 1361; Stop 1385
tgcaggaaccagcaagtgtcccgtt

SEQ ID NO: 179510 - DNA, 25 bp, Artificial
  probe
  misc_feature (1)..(25): SEQ ID NO: 4265; WAN024ERH_at; Start 242; Stop 266
cttttgatcctgaagtaaggcgtga

SEQ ID NO: 179511 - DNA, 25 bp, Artificial
  probe
  misc_feature (1)..(25): SEQ ID NO: 4265; WAN024ERH_at; Start 678; Stop 702
tagtattcatgttgtagcaccttca

SEQ ID NO: 179512 - DNA, 25 bp, Artificial
  probe
  misc_feature (1)..(25): SEQ ID NO: 4265; WAN024ERH_at; Start 117; Stop 141
tcgccttgtcaagggaatcaacaaa

SEQ ID NO: 179513 - DNA, 25 bp, Artificial
  probe
  misc_feature (1)..(25): SEQ ID NO: 4265; WAN024ERH_at; Start 961; Stop 985
gacttggcgagtcatatcagtccct

SEQ ID NO: 179514 - DNA, 25 bp, Artificial
  probe
  misc_feature (1)..(25): SEQ ID NO: 4265; WAN024ERH_at; Start 1164; Stop 1188
gtttcaagaaaagcgagcacgtcct

SEQ ID NO: 179515 - DNA, 25 bp, Artificial
  probe
  misc_feature (1)..(25): SEQ ID NO: 4265; WAN024ERH_at; Start 1375; Stop 1399
agtgtcccgtttgtcctagttagtg

SEQ ID NO: 179516 - DNA, 25 bp, Artificial
  probe
  misc_feature (1)..(25): SEQ ID NO: 4265; WAN024ERH_at; Start 931; Stop 955
gagattgaaacgacagatcctgact

SEQ ID NO: 179517 - DNA, 25 bp, Artificial
  probe
  misc_feature (1)..(25): SEQ ID NO: 4265; WAN024ERH_at; Start 1409; Stop 1433
ccgagggtgataaacaacgtcttca

SEQ ID NO: 179518 - DNA, 25 bp, Artificial
  probe
  misc_feature (1)..(25): SEQ ID NO: 4265; WAN024ERH_at; Start 443; Stop 467
gggatgaggctcaaattcgttcagc

SEQ ID NO: 179519 - DNA, 25 bp, Artificial
  probe
  misc_feature (1)..(25): SEQ ID NO: 4265; WAN024ERH_at; Start 978; Stop 1002
cagtcccttactgaggagattagat

SEQ ID NO: 179520 - DNA, 25 bp, Artificial
  probe
  misc_feature (1)..(25): SEQ ID NO: 4265; WAN024ERH_at; Start 856; Stop 880
gggaagcttcctttttctcagcgag

SEQ ID NO: 179521 - DNA, 25 bp, Artificial
  probe
  misc_feature (1)..(25): SEQ ID NO: 4265; WAN024ERH_at; Start 1209; Stop 1233
tacatcaggtgtcggaacttcagag

SEQ ID NO: 179522 - DNA, 25 bp, Artificial
  probe
  misc_feature (1)..(25): SEQ ID NO: 5192; WAN024ERI_at; Start 39; Stop 63
cacgtttttagagacagcattgcga

SEQ ID NO: 179523 - DNA, 25 bp, Artificial
  probe
  misc_feature (1)..(25): SEQ ID NO: 5192; WAN024ERI_at; Start 163; Stop 187
gcttgtccattatttgctgcagtga

SEQ ID NO: 179524 - DNA, 25 bp, Artificial
  probe
  misc_feature (1)..(25): SEQ ID NO: 5192; WAN024ERI_at; Start 56; Stop 80
cattgcgactcactaagaatgttgc

SEQ ID NO: 179525 - DNA, 25 bp, Artificial
  probe
  misc_feature (1)..(25): SEQ ID NO: 5192; WAN024ERI_at; Start 146; Stop 170
tgatgatgtgtggaatggcttgtcc

SEQ ID NO: 179526 - DNA, 25 bp, Artificial
  probe
  misc_feature (1)..(25): SEQ ID NO: 5192; WAN024ERI_at; Start 59; Stop 83
tgcgactcactaagaatgttgctat

SEQ ID NO: 179527 - DNA, 25 bp, Artificial
  probe
  misc_feature (1)..(25): SEQ ID NO: 5192; WAN024ERI_at; Start 166; Stop 190
tgtccattatttgctgcagtgatgt

SEQ ID NO: 179528 - DNA, 25 bp, Artificial
  probe
  misc_feature (1)..(25): SEQ ID NO: 5192; WAN024ERI_at; Start 14; Stop 38
taccaggtccaaaagataatttagc

SEQ ID NO: 179529 - DNA, 25 bp, Artificial
  probe
  misc_feature (1)..(25): SEQ ID NO: 5192; WAN024ERI_at; Start 41; Stop 65
cgtttttagagacagcattgcgact

SEQ ID NO: 179530 - DNA, 25 bp, Artificial
  probe
  misc_feature (1)..(25): SEQ ID NO: 5192; WAN024ERI_at; Start 210; Stop 234
tagtaatggttctaggatggcactg

SEQ ID NO: 179531 - DNA, 25 bp, Artificial
  probe
  misc_feature (1)..(25): SEQ ID NO: 5192; WAN024ERI_at; Start 107; Stop 131
taccacccattaaagcgaatgtttg

SEQ ID NO: 179532 - DNA, 25 bp, Artificial
  probe
  misc_feature (1)..(25): SEQ ID NO: 5192; WAN024ERI_at; Start 62; Stop 86
gactcactaagaatgttgctattaa

SEQ ID NO: 179533 - DNA, 25 bp, Artificial
  probe
  misc_feature (1)..(25): SEQ ID NO: 5192; WAN024ERI_at; Start 76; Stop 100
gttgctattaataaacataatgtag

SEQ ID NO: 179534 - DNA, 25 bp, Artificial
  probe
  misc_feature (1)..(25): SEQ ID NO: 5192; WAN024ERI_at; Start 2; Stop 26
tgatattgaagataccaggtccaaa

SEQ ID NO: 179535 - DNA, 25 bp, Artificial
  probe
  misc_feature (1)..(25): SEQ ID NO: 5192; WAN024ERI_at; Start 121; Stop 145
gcgaatgtttgtatttgtgataggt

SEQ ID NO: 179536 - DNA, 25 bp, Artificial
  probe
  misc_feature (1)..(25): SEQ ID NO: 5192; WAN024ERI_at; Start 150; Stop 174
gatgtgtggaatggcttgtccatta

SEQ ID NO: 179537 - DNA, 25 bp, Artificial
  probe
  misc_feature (1)..(25): SEQ ID NO: 5192; WAN024ERI_at; Start 109; Stop 133
ccacccattaaagcgaatgtttgta

SEQ ID NO: 179538 - DNA, 25 bp, Artificial
  probe
  misc_feature (1)..(25): SEQ ID NO: 5192; WAN024ERI_at; Start 8; Stop 32
tgaagataccaggtccaaaagataa

SEQ ID NO: 179539 - DNA, 25 bp, Artificial
  probe
  misc_feature (1)..(25): SEQ ID NO: 5192; WAN024ERI_at; Start 194; Stop 218
cagtaatgttaattaatagtaatgg

SEQ ID NO: 179540 - DNA, 25 bp, Artificial
  probe
  misc_feature (1)..(25): SEQ ID NO: 5192; WAN024ERI_at; Start 35; Stop 59
tagccacgtttttagagacagcatt

SEQ ID NO: 179541 - DNA, 25 bp, Artificial
  probe
  misc_feature (1)..(25): SEQ ID NO: 5192; WAN024ERI_at; Start 44; Stop 68
ttttagagacagcattgcgactcac

SEQ ID NO: 179542 - DNA, 25 bp, Artificial
  probe
  misc_feature (1)..(25): SEQ ID NO: 5192; WAN024ERI_at; Start 181; Stop 205
gcagtgatgttttcagtaatgttaa

SEQ ID NO: 179543 - DNA, 25 bp, Artificial
  probe
  misc_feature (1)..(25): SEQ ID NO: 5192; WAN024ERI_at; Start 31; Stop 55
aatttagccacgtttttagagacag

SEQ ID NO: 179544 - DNA, 25 bp, Artificial
  probe
  misc_feature (1)..(25): SEQ ID NO: 5192; WAN024ERI_at; Start 132; Stop 156
tatttgtgataggttgatgatgtgt

SEQ ID NO: 179545 - DNA, 25 bp, Artificial
  probe
  misc_feature (1)..(25): SEQ ID NO: 5192; WAN024ERI_at; Start 28; Stop 52
gataatttagccacgtttttagaga

SEQ ID NO: 179546 - DNA, 25 bp, Artificial
  probe
  misc_feature (1)..(25): SEQ ID NO: 5192; WAN024ERI_at; Start 87; Stop 111
taaacataatgtagatccactacca

SEQ ID NO: 179547 - DNA, 25 bp, Artificial
  probe
  misc_feature (1)..(25): SEQ ID NO: 5192; WAN024ERI_at; Start 158; Stop 182
gaatggcttgtccattatttgctgc

SEQ ID NO: 179548 - DNA, 25 bp, Artificial
  probe
  misc_feature (1)..(25): SEQ ID NO: 5192; WAN024ERI_at; Start 213; Stop 237
taatggttctaggatggcactgtaa

SEQ ID NO: 179549 - DNA, 25 bp, Artificial
  probe
  misc_feature (1)..(25): SEQ ID NO: 5192; WAN024ERI_at; Start 97; Stop 121
gtagatccactaccacccattaaag

SEQ ID NO: 179550 - DNA, 25 bp, Artificial
  probe
  misc_feature (1)..(25): SEQ ID NO: 5192; WAN024ERI_at; Start 178; Stop 202
gctgcagtgatgttttcagtaatgt

SEQ ID NO: 179551 - DNA, 25 bp, Artificial
  probe
  misc_feature (1)..(25): SEQ ID NO: 5192; WAN024ERI_at; Start 51; Stop 75
gacagcattgcgactcactaagaat

SEQ ID NO: 179552 - DNA, 25 bp, Artificial
  probe
  misc_feature (1)..(25): SEQ ID NO: 5192; WAN024ERI_at; Start 18; Stop 42
aggtccaaaagataatttagccacg

SEQ ID NO: 179553 - DNA, 25 bp, Artificial
  probe
  misc_feature (1)..(25): SEQ ID NO: 5192; WAN024ERI_at; Start 47; Stop 71
tagagacagcattgcgactcactaa

SEQ ID NO: 179554 - DNA, 25 bp, Artificial
  probe
  misc_feature (1)..(25): SEQ ID NO: 5192; WAN024ERI_at; Start 100; Stop 124
gatccactaccacccattaaagcga

SEQ ID NO: 179555 - DNA, 25 bp, Artificial
  probe
  misc_feature (1)..(25): SEQ ID NO: 5192; WAN024ERI_at; Start 208; Stop 232
aatagtaatggttctaggatggcac

SEQ ID NO: 179556 - DNA, 25 bp, Artificial
  probe
  misc_feature (1)..(25): SEQ ID NO: 1839; WAN024ERJ_at; Start 200; Stop 224
taaccccggcgaacattgcgcctgt

SEQ ID NO: 179557 - DNA, 25 bp, Artificial
  probe
  misc_feature (1)..(25): SEQ ID NO: 1839; WAN024ERJ_at; Start 188; Stop 212
taatcgctacgataaccccggcgaa

SEQ ID NO: 179558 - DNA, 25 bp, Artificial
  probe
  misc_feature (1)..(25): SEQ ID NO: 1839; WAN024ERJ_at; Start 2; Stop 26
tgattgagattaagttcattccagt

SEQ ID NO: 179559 - DNA, 25 bp, Artificial
  probe
  misc_feature (1)..(25): SEQ ID NO: 1839; WAN024ERJ_at; Start 303; Stop 327
tggcatcatcacaattaaagaaact

SEQ ID NO: 179560 - DNA, 25 bp, Artificial
  probe
  misc_feature (1)..(25): SEQ ID NO: 1839; WAN024ERJ_at; Start 64; Stop 88
gagatgacggtcatgactggaagta

SEQ ID NO: 179561 - DNA, 25 bp, Artificial
  probe
  misc_feature (1)..(25): SEQ ID NO: 1839; WAN024ERJ_at; Start 210; Stop 234
gaacattgcgcctgtacctgtgttg

SEQ ID NO: 179562 - DNA, 25 bp, Artificial
  probe
  misc_feature (1)..(25): SEQ ID NO: 1839; WAN024ERJ_at; Start 336; Stop 360
cattgatgctgctaacgggttttcg

SEQ ID NO: 179563 - DNA, 25 bp, Artificial
  probe
  misc_feature (1)..(25): SEQ ID NO: 1839; WAN024ERJ_at; Start 237; Stop 261
gaatgaaagaacacctgaaatgttt

SEQ ID NO: 179564 - DNA, 25 bp, Artificial
  probe
  misc_feature (1)..(25): SEQ ID NO: 1839; WAN024ERJ_at; Start 45; Stop 69
tgaaacaaccccaaataaggagatg

SEQ ID NO: 179565 - DNA, 25 bp, Artificial
  probe
  misc_feature (1)..(25): SEQ ID NO: 1839; WAN024ERJ_at; Start 115; Stop 139
ggtggaatattttcaccaaggttca

SEQ ID NO: 179566 - DNA, 25 bp, Artificial
  probe
  misc_feature (1)..(25): SEQ ID NO: 1839; WAN024ERJ_at; Start 265; Stop 289
gcatcttttgctccgtcaggaacta

SEQ ID NO: 179567 - DNA, 25 bp, Artificial
  probe
  misc_feature (1)..(25): SEQ ID NO: 1839; WAN024ERJ_at; Start 80; Stop 104
ctggaagtaatacgctaaatgatct

SEQ ID NO: 179568 - DNA, 25 bp, Artificial
  probe
  misc_feature (1)..(25): SEQ ID NO: 1839; WAN024ERJ_at; Start 290; Stop 314
cagaaactgtatttggcatcatcac

SEQ ID NO: 179569 - DNA, 25 bp, Artificial
  probe
  misc_feature (1)..(25): SEQ ID NO: 1839; WAN024ERJ_at; Start 345; Stop 369
tgctaacgggttttcgaaatctctg

SEQ ID NO: 179570 - DNA, 25 bp, Artificial
  probe
  misc_feature (1)..(25): SEQ ID NO: 1839; WAN024ERJ_at; Start 33; Stop 57
gaataataatgctgaaacaacccca

SEQ ID NO: 179571 - DNA, 25 bp, Artificial
  probe
  misc_feature (1)..(25): SEQ ID NO: 1839; WAN024ERJ_at; Start 170; Stop 194
tgaataattctgttgcaataatcgc

SEQ ID NO: 179572 - DNA, 25 bp, Artificial
  probe
  misc_feature (1)..(25): SEQ ID NO: 1839; WAN024ERJ_at; Start 277; Stop 301
ccgtcaggaactacagaaactgtat

SEQ ID NO: 179573 - DNA, 25 bp, Artificial
  probe
  misc_feature (1)..(25): SEQ ID NO: 1839; WAN024ERJ_at; Start 359; Stop 383
cgaaatctctgtttttagctaagaa

SEQ ID NO: 179574 - DNA, 25 bp, Artificial
  probe
  misc_feature (1)..(25): SEQ ID NO: 1839; WAN024ERJ_at; Start 95; Stop 119
taaatgatctactaacagctggtgg

SEQ ID NO: 179575 - DNA, 25 bp, Artificial
  probe
  misc_feature (1)..(25): SEQ ID NO: 1839; WAN024ERJ_at; Start 184; Stop 208
gcaataatcgctacgataaccccgg

SEQ ID NO: 179576 - DNA, 25 bp, Artificial
  probe
  misc_feature (1)..(25): SEQ ID NO: 1839; WAN024ERJ_at; Start 230; Stop 254
tgttgttgaatgaaagaacacctga

SEQ ID NO: 179577 - DNA, 25 bp, Artificial
  probe
  misc_feature (1)..(25): SEQ ID NO: 1839; WAN024ERJ_at; Start 174; Stop 198
taattctgttgcaataatcgctacg

SEQ ID NO: 179578 - DNA, 25 bp, Artificial
  probe
  misc_feature (1)..(25): SEQ ID NO: 1839; WAN024ERJ_at; Start 53; Stop 77
ccccaaataaggagatgacggtcat

SEQ ID NO: 179579 - DNA, 25 bp, Artificial
  probe
  misc_feature (1)..(25): SEQ ID NO: 1839; WAN024ERJ_at; Start 127; Stop 151
tcaccaaggttcatttgtaaagctt

SEQ ID NO: 179580 - DNA, 25 bp, Artificial
  probe
  misc_feature (1)..(25): SEQ ID NO: 1839; WAN024ERJ_at; Start 323; Stop 347
aaactaatgatagcattgatgctgc

SEQ ID NO: 179581 - DNA, 25 bp, Artificial
  probe
  misc_feature (1)..(25): SEQ ID NO: 1839; WAN024ERJ_at; Start 220; Stop 244
cctgtacctgtgttgttgaatgaaa

SEQ ID NO: 179582 - DNA, 25 bp, Artificial
  probe
  misc_feature (1)..(25): SEQ ID NO: 1839; WAN024ERJ_at; Start 330; Stop 354
tgatagcattgatgctgctaacggg

SEQ ID NO: 179583 - DNA, 25 bp, Artificial
  probe
  misc_feature (1)..(25): SEQ ID NO: 1839; WAN024ERJ_at; Start 71; Stop 95
cggtcatgactggaagtaatacgct

SEQ ID NO: 179584 - DNA, 25 bp, Artificial
  probe
  misc_feature (1)..(25): SEQ ID NO: 1839; WAN024ERJ_at; Start 107; Stop 131
taacagctggtggaatattttcacc

SEQ ID NO: 179585 - DNA, 25 bp, Artificial
  probe
  misc_feature (1)..(25): SEQ ID NO: 1839; WAN024ERJ_at; Start 40; Stop 64
aatgctgaaacaaccccaaataagg

SEQ ID NO: 179586 - DNA, 25 bp, Artificial
  probe
  misc_feature (1)..(25): SEQ ID NO: 1839; WAN024ERJ_at; Start 213; Stop 237
cattgcgcctgtacctgtgttgttg

SEQ ID NO: 179587 - DNA, 25 bp, Artificial
  probe
  misc_feature (1)..(25): SEQ ID NO: 1839; WAN024ERJ_at; Start 273; Stop 297
tgctccgtcaggaactacagaaact

SEQ ID NO: 179588 - DNA, 25 bp, Artificial
  probe
  misc_feature (1)..(25): SEQ ID NO: 1839; WAN024ERJ_at; Start 9; Stop 33
gattaagttcattccagttatattg

SEQ ID NO: 179589 - DNA, 25 bp, Artificial
  probe
  misc_feature (1)..(25): SEQ ID NO: 1839; WAN024ERJ_at; Start 100; Stop 124
gatctactaacagctggtggaatat

SEQ ID NO: 179590 - DNA, 25 bp, Artificial
  probe
  misc_feature (1)..(25): SEQ ID NO: 669; WAN024ERK_at; Start 359; Stop 383
tagttcctgacggagcaaaagatgc

SEQ ID NO: 179591 - DNA, 25 bp, Artificial
  probe
  misc_feature (1)..(25): SEQ ID NO: 669; WAN024ERK_at; Start 763; Stop 787
tacagtgccatcctagaaccattac

SEQ ID NO: 179592 - DNA, 25 bp, Artificial
  probe
  misc_feature (1)..(25): SEQ ID NO: 669; WAN024ERK_at; Start 266; Stop 290
tcttagctaaaaacagagatttcga

SEQ ID NO: 179593 - DNA, 25 bp, Artificial
  probe
  misc_feature (1)..(25): SEQ ID NO: 669; WAN024ERK_at; Start 406; Stop 430
tcattcaacaacacaggtacaggcg

SEQ ID NO: 179594 - DNA, 25 bp, Artificial
  probe
  misc_feature (1)..(25): SEQ ID NO: 669; WAN024ERK_at; Start 748; Stop 772
caccaagcagttatttacagtgcca

SEQ ID NO: 179595 - DNA, 25 bp, Artificial
  probe
  misc_feature (1)..(25): SEQ ID NO: 669; WAN024ERK_at; Start 866; Stop 890
tacaaacattcgctttaatgggtgg

SEQ ID NO: 179596 - DNA, 25 bp, Artificial
  probe
  misc_feature (1)..(25): SEQ ID NO: 669; WAN024ERK_at; Start 497; Stop 521
aagctttacaaatgaaccttggtga

SEQ ID NO: 179597 - DNA, 25 bp, Artificial
  probe
  misc_feature (1)..(25): SEQ ID NO: 669; WAN024ERK_at; Start 553; Stop 577
agcgtattacttccagtcatgaccg

SEQ ID NO: 179598 - DNA, 25 bp, Artificial
  probe
  misc_feature (1)..(25): SEQ ID NO: 669; WAN024ERK_at; Start 76; Stop 100
ctaagagatgcattcgtaacagtaa

SEQ ID NO: 179599 - DNA, 25 bp, Artificial
  probe
  misc_feature (1)..(25): SEQ ID NO: 669; WAN024ERK_at; Start 813; Stop 837
cactgcagcaaataatggacaagcc

SEQ ID NO: 179600 - DNA, 25 bp, Artificial
  probe
  misc_feature (1)..(25): SEQ ID NO: 669; WAN024ERK_at; Start 1222; Stop 1246
gcacttggagttcttctatacattc

SEQ ID NO: 179601 - DNA, 25 bp, Artificial
  probe
  misc_feature (1)..(25): SEQ ID NO: 669; WAN024ERK_at; Start 1160; Stop 1184
taaatgcatggttagcaacagcagg

SEQ ID NO: 179602 - DNA, 25 bp, Artificial
  probe
  misc_feature (1)..(25): SEQ ID NO: 669; WAN024ERK_at; Start 675; Stop 699
tcatattggtacaagcttaatcggg

SEQ ID NO: 179603 - DNA, 25 bp, Artificial
  probe
  misc_feature (1)..(25): SEQ ID NO: 669; WAN024ERK_at; Start 961; Stop 985
gctaaattatcttttggacctggta

SEQ ID NO: 179604 - DNA, 25 bp, Artificial
  probe
  misc_feature (1)..(25): SEQ ID NO: 669; WAN024ERK_at; Start 334; Stop 358
gtgatgatgccaaatacagtttctg

SEQ ID NO: 179605 - DNA, 25 bp, Artificial
  probe
  misc_feature (1)..(25): SEQ ID NO: 669; WAN024ERK_at; Start 1115; Stop 1139
tgagtcctgcatttatacaagttcc

SEQ ID NO: 179606 - DNA, 25 bp, Artificial
  probe
  misc_feature (1)..(25): SEQ ID NO: 669; WAN024ERK_at; Start 1045; Stop 1069
gctattccatttatcacagttccag

SEQ ID NO: 179607 - DNA, 25 bp, Artificial
  probe
  misc_feature (1)..(25): SEQ ID NO: 669; WAN024ERK_at; Start 137; Stop 161
tgaacaacacggtatttaagtggat

SEQ ID NO: 179608 - DNA, 25 bp, Artificial
  probe
  misc_feature (1)..(25): SEQ ID NO: 669; WAN024ERK_at; Start 415; Stop 439
aacacaggtacaggcgcaatgttcg

SEQ ID NO: 179609 - DNA, 25 bp, Artificial
  probe
  misc_feature (1)..(25): SEQ ID NO: 669; WAN024ERK_at; Start 1004; Stop 1028
cagtattattcggttacccaatcgt

SEQ ID NO: 179610 - DNA, 25 bp, Artificial
  probe
  misc_feature (1)..(25): SEQ ID NO: 669; WAN024ERK_at; Start 348; Stop 372
tacagtttctgtagttcctgacgga

SEQ ID NO: 179611 - DNA, 25 bp, Artificial
  probe
  misc_feature (1)..(25): SEQ ID NO: 669; WAN024ERK_at; Start 281; Stop 305
gagatttcgaaaacccgttagcagc

SEQ ID NO: 179612 - DNA, 25 bp, Artificial
  probe
  misc_feature (1)..(25): SEQ ID NO: 669; WAN024ERK_at; Start 1207; Stop 1231
caattcatcatctttgcacttggag

SEQ ID NO: 179613 - DNA, 25 bp, Artificial
  probe
  misc_feature (1)..(25): SEQ ID NO: 669; WAN024ERK_at; Start 520; Stop 544
gaaaatattccaccagctgttagta

SEQ ID NO: 179614 - DNA, 25 bp, Artificial
  probe
  misc_feature (1)..(25): SEQ ID NO: 669; WAN024ERK_at; Start 1130; Stop 1154
tacaagttccttggactacaccagt

SEQ ID NO: 179615 - DNA, 25 bp, Artificial
  probe
  misc_feature (1)..(25): SEQ ID NO: 669; WAN024ERK_at; Start 976; Stop 1000
ggacctggtatcttcaatatcaatg

SEQ ID NO: 179616 - DNA, 25 bp, Artificial
  probe
  misc_feature (1)..(25): SEQ ID NO: 669; WAN024ERK_at; Start 570; Stop 594
catgaccgtcatctccttatttggg

SEQ ID NO: 179617 - DNA, 25 bp, Artificial
  probe
  misc_feature (1)..(25): SEQ ID NO: 669; WAN024ERK_at; Start 829; Stop 853
ggacaagccattccacacatcatca

SEQ ID NO: 179618 - DNA, 25 bp, Artificial
  probe
  misc_feature (1)..(25): SEQ ID NO: 669; WAN024ERK_at; Start 31; Stop 55
gccacctttgctggtaaactaggga

SEQ ID NO: 179619 - DNA, 25 bp, Artificial
  probe
  misc_feature (1)..(25): SEQ ID NO: 669; WAN024ERK_at; Start 798; Stop 822
cattactgaaaacatcactgcagca

SEQ ID NO: 179620 - DNA, 25 bp, Artificial
  probe
  misc_feature (1)..(25): SEQ ID NO: 669; WAN024ERK_at; Start 1185; Stop 1209
ggacgtgagagcagttctagttcaa

SEQ ID NO: 179621 - DNA, 25 bp, Artificial
  probe
  misc_feature (1)..(25): SEQ ID NO: 669; WAN024ERK_at; Start 390; Stop 414
catttcaggtgttctttcattcaac

SEQ ID NO: 179622 - DNA, 25 bp, Artificial
  probe
  misc_feature (1)..(25): SEQ ID NO: 669; WAN024ERK_at; Start 447; Stop 471
tatcgtagcgattattgcaacagaa

SEQ ID NO: 179623 - DNA, 25 bp, Artificial
  probe
  misc_feature (1)..(25): SEQ ID NO: 669; WAN024ERK_at; Start 878; Stop 902
ctttaatgggtggtagtggatctac

SEQ ID NO: 179624 - DNA, 25 bp, Artificial
  probe
  misc_feature (1)..(25): SEQ ID NO: 7546; WAN024ERL_at; Start 42; Stop 66
tcctgataaactcatcggatgcctt

SEQ ID NO: 179625 - DNA, 25 bp, Artificial
  probe
  misc_feature (1)..(25): SEQ ID NO: 7546; WAN024ERL_at; Start 187; Stop 211
tttactttctgctgttccagtatcg

SEQ ID NO: 179626 - DNA, 25 bp, Artificial
  probe
  misc_feature (1)..(25): SEQ ID NO: 7546; WAN024ERL_at; Start 35; Stop 59
tttgccctcctgataaactcatcgg

SEQ ID NO: 179627 - DNA, 25 bp, Artificial
  probe
  misc_feature (1)..(25): SEQ ID NO: 7546; WAN024ERL_at; Start 68; Stop 92
caataaattcgtccaggcataaatc

SEQ ID NO: 179628 - DNA, 25 bp, Artificial
  probe
  misc_feature (1)..(25): SEQ ID NO: 7546; WAN024ERL_at; Start 54; Stop 78
catcggatgcctttcaataaattcg

SEQ ID NO: 179629 - DNA, 25 bp, Artificial
  probe
  misc_feature (1)..(25): SEQ ID NO: 7546; WAN024ERL_at; Start 3; Stop 27
gcacataacagatgctattgcaagc

SEQ ID NO: 179630 - DNA, 25 bp, Artificial
  probe
  misc_feature (1)..(25): SEQ ID NO: 7546; WAN024ERL_at; Start 78; Stop 102
gtccaggcataaatcttttaaccca

SEQ ID NO: 179631 - DNA, 25 bp, Artificial
  probe
  misc_feature (1)..(25): SEQ ID NO: 7546; WAN024ERL_at; Start 96; Stop 120
taacccaaatcattcatacctctct

SEQ ID NO: 179632 - DNA, 25 bp, Artificial
  probe
  misc_feature (1)..(25): SEQ ID NO: 7546; WAN024ERL_at; Start 11; Stop 35
cagatgctattgcaagcctttgctt

SEQ ID NO: 179633 - DNA, 25 bp, Artificial
  probe
  misc_feature (1)..(25): SEQ ID NO: 7546; WAN024ERL_at; Start 161; Stop 185
actttcttcctcctcatgaggtcag

SEQ ID NO: 179634 - DNA, 25 bp, Artificial
  probe
  misc_feature (1)..(25): SEQ ID NO: 7546; WAN024ERL_at; Start 182; Stop 206
tcagttttactttctgctgttccag

SEQ ID NO: 179635 - DNA, 25 bp, Artificial
  probe
  misc_feature (1)..(25): SEQ ID NO: 7546; WAN024ERL_at; Start 83; Stop 107
ggcataaatcttttaacccaaatca

SEQ ID NO: 179636 - DNA, 25 bp, Artificial
  probe
  misc_feature (1)..(25): SEQ ID NO: 7546; WAN024ERL_at; Start 71; Stop 95
taaattcgtccaggcataaatcttt

SEQ ID NO: 179637 - DNA, 25 bp, Artificial
  probe
  misc_feature (1)..(25): SEQ ID NO: 7546; WAN024ERL_at; Start 31; Stop 55
tgcttttgccctcctgataaactca

SEQ ID NO: 179638 - DNA, 25 bp, Artificial
  probe
  misc_feature (1)..(25): SEQ ID NO: 7546; WAN024ERL_at; Start 45; Stop 69
tgataaactcatcggatgcctttca

SEQ ID NO: 179639 - DNA, 25 bp, Artificial
  probe
  misc_feature (1)..(25): SEQ ID NO: 7546; WAN024ERL_at; Start 8; Stop 32
taacagatgctattgcaagcctttg

SEQ ID NO: 179640 - DNA, 25 bp, Artificial
  probe
  misc_feature (1)..(25): SEQ ID NO: 7546; WAN024ERL_at; Start 91; Stop 115
tcttttaacccaaatcattcatacc

SEQ ID NO: 179641 - DNA, 25 bp, Artificial
  probe
  misc_feature (1)..(25): SEQ ID NO: 7546; WAN024ERL_at; Start 156; Stop 180
gagccactttcttcctcctcatgag

SEQ ID NO: 179642 - DNA, 25 bp, Artificial
  probe
  misc_feature (1)..(25): SEQ ID NO: 7546; WAN024ERL_at; Start 38; Stop 62
gccctcctgataaactcatcggatg

SEQ ID NO: 179643 - DNA, 25 bp, Artificial
  probe
  misc_feature (1)..(25): SEQ ID NO: 7546; WAN024ERL_at; Start 23; Stop 47
caagcctttgcttttgccctcctga

SEQ ID NO: 179644 - DNA, 25 bp, Artificial
  probe
  misc_feature (1)..(25): SEQ ID NO: 7546; WAN024ERL_at; Start 171; Stop 195
tcctcatgaggtcagttttactttc

SEQ ID NO: 179645 - DNA, 25 bp, Artificial
  probe
  misc_feature (1)..(25): SEQ ID NO: 7546; WAN024ERL_at; Start 65; Stop 89
tttcaataaattcgtccaggcataa

SEQ ID NO: 179646 - DNA, 25 bp, Artificial
  probe
  misc_feature (1)..(25): SEQ ID NO: 7546; WAN024ERL_at; Start 169; Stop 193
cctcctcatgaggtcagttttactt

SEQ ID NO: 179647 - DNA, 25 bp, Artificial
  probe
  misc_feature (1)..(25): SEQ ID NO: 7546; WAN024ERL_at; Start 18; Stop 42
tattgcaagcctttgcttttgccct

SEQ ID NO: 179648 - DNA, 25 bp, Artificial
  probe
  misc_feature (1)..(25): SEQ ID NO: 7546; WAN024ERL_at; Start 135; Stop 159
ttacaaaacccctgacctcatgagc

SEQ ID NO: 179649 - DNA, 25 bp, Artificial
  probe
  misc_feature (1)..(25): SEQ ID NO: 7546; WAN024ERL_at; Start 59; Stop 83
gatgcctttcaataaattcgtccag

SEQ ID NO: 179650 - DNA, 25 bp, Artificial
  probe
  misc_feature (1)..(25): SEQ ID NO: 7546; WAN024ERL_at; Start 75; Stop 99
ttcgtccaggcataaatcttttaac

SEQ ID NO: 179651 - DNA, 25 bp, Artificial
  probe
  misc_feature (1)..(25): SEQ ID NO: 7546; WAN024ERL_at; Start 26; Stop 50
gcctttgcttttgccctcctgataa

SEQ ID NO: 179652 - DNA, 25 bp, Artificial
  probe
  misc_feature (1)..(25): SEQ ID NO: 7546; WAN024ERL_at; Start 201; Stop 225
ttccagtatcgtttttcctcgctag

SEQ ID NO: 179653 - DNA, 25 bp, Artificial
  probe
  misc_feature (1)..(25): SEQ ID NO: 7546; WAN024ERL_at; Start 197; Stop 221
gctgttccagtatcgtttttcctcg

SEQ ID NO: 179654 - DNA, 25 bp, Artificial
  probe
  misc_feature (1)..(25): SEQ ID NO: 7546; WAN024ERL_at; Start 6; Stop 30
cataacagatgctattgcaagcctt

SEQ ID NO: 179655 - DNA, 25 bp, Artificial
  probe
  misc_feature (1)..(25): SEQ ID NO: 7546; WAN024ERL_at; Start 50; Stop 74
aactcatcggatgcctttcaataaa

SEQ ID NO: 179656 - DNA, 25 bp, Artificial
  probe
  misc_feature (1)..(25): SEQ ID NO: 7546; WAN024ERL_at; Start 175; Stop 199
catgaggtcagttttactttctgct

SEQ ID NO: 179657 - DNA, 25 bp, Artificial
  probe
  misc_feature (1)..(25): SEQ ID NO: 7546; WAN024ERL_at; Start 141; Stop 165
aacccctgacctcatgagccacttt

SEQ ID NO: 179658 - DNA, 25 bp, Artificial
  probe
  misc_feature (1)..(25): SEQ ID NO: 6314; WAN024ERM_at; Start 61; Stop 85
gaaaaacgatactggaacagcagaa

SEQ ID NO: 179659 - DNA, 25 bp, Artificial
  probe
  misc_feature (1)..(25): SEQ ID NO: 6314; WAN024ERM_at; Start 63; Stop 87
aaaacgatactggaacagcagaaag

SEQ ID NO: 179660 - DNA, 25 bp, Artificial
  probe
  misc_feature (1)..(25): SEQ ID NO: 6314; WAN024ERM_at; Start 31; Stop 55
gagtctgcccttttgaggaaatcta

SEQ ID NO: 179661 - DNA, 25 bp, Artificial
  probe
  misc_feature (1)..(25): SEQ ID NO: 6314; WAN024ERM_at; Start 38; Stop 62
cccttttgaggaaatctagcgagga

SEQ ID NO: 179662 - DNA, 25 bp, Artificial
  probe
  misc_feature (1)..(25): SEQ ID NO: 6314; WAN024ERM_at; Start 34; Stop 58
tctgcccttttgaggaaatctagcg

SEQ ID NO: 179663 - DNA, 25 bp, Artificial
  probe
  misc_feature (1)..(25): SEQ ID NO: 6314; WAN024ERM_at; Start 50; Stop 74
aatctagcgaggaaaaacgatactg

SEQ ID NO: 179664 - DNA, 25 bp, Artificial
  probe
  misc_feature (1)..(25): SEQ ID NO: 6314; WAN024ERM_at; Start 48; Stop 72
gaaatctagcgaggaaaaacgatac

SEQ ID NO: 179665 - DNA, 25 bp, Artificial
  probe
  misc_feature (1)..(25): SEQ ID NO: 6314; WAN024ERM_at; Start 21; Stop 45
accaagggaggagtctgcccttttg

SEQ ID NO: 179666 - DNA, 25 bp, Artificial
  probe
  misc_feature (1)..(25): SEQ ID NO: 6314; WAN024ERM_at; Start 6; Stop 30
aaaatcgtgtgacgaaccaagggag

SEQ ID NO: 179667 - DNA, 25 bp, Artificial
  probe
  misc_feature (1)..(25): SEQ ID NO: 6314; WAN024ERM_at; Start 57; Stop 81
cgaggaaaaacgatactggaacagc

SEQ ID NO: 179668 - DNA, 25 bp, Artificial
  probe
  misc_feature (1)..(25): SEQ ID NO: 6314; WAN024ERM_at; Start 28; Stop 52
gaggagtctgcccttttgaggaaat

SEQ ID NO: 179669 - DNA, 25 bp, Artificial
  probe
  misc_feature (1)..(25): SEQ ID NO: 6314; WAN024ERM_at; Start 2; Stop 26
tgaaaaaatcgtgtgacgaaccaag

SEQ ID NO: 179670 - DNA, 25 bp, Artificial
  probe
  misc_feature (1)..(25): SEQ ID NO: 6314; WAN024ERM_at; Start 47; Stop 71
ggaaatctagcgaggaaaaacgata

SEQ ID NO: 179671 - DNA, 25 bp, Artificial
  probe
  misc_feature (1)..(25): SEQ ID NO: 6314; WAN024ERM_at; Start 54; Stop 78
tagcgaggaaaaacgatactggaac

SEQ ID NO: 179672 - DNA, 25 bp, Artificial
  probe
  misc_feature (1)..(25): SEQ ID NO: 6314; WAN024ERM_at; Start 39; Stop 63
ccttttgaggaaatctagcgaggaa

SEQ ID NO: 179673 - DNA, 25 bp, Artificial
  probe
  misc_feature (1)..(25): SEQ ID NO: 6314; WAN024ERM_at; Start 59; Stop 83
aggaaaaacgatactggaacagcag

SEQ ID NO: 179674 - DNA, 25 bp, Artificial
  probe
  misc_feature (1)..(25): SEQ ID NO: 6314; WAN024ERM_at; Start 8; Stop 32
aatcgtgtgacgaaccaagggagga

SEQ ID NO: 179675 - DNA, 25 bp, Artificial
  probe
  misc_feature (1)..(25): SEQ ID NO: 6314; WAN024ERM_at; Start 7; Stop 31
aaatcgtgtgacgaaccaagggagg

SEQ ID NO: 179676 - DNA, 25 bp, Artificial
  probe
  misc_feature (1)..(25): SEQ ID NO: 6314; WAN024ERM_at; Start 44; Stop 68
tgaggaaatctagcgaggaaaaacg

SEQ ID NO: 179677 - DNA, 25 bp, Artificial
  probe
  misc_feature (1)..(25): SEQ ID NO: 6314; WAN024ERM_at; Start 22; Stop 46
ccaagggaggagtctgcccttttga

SEQ ID NO: 179678 - DNA, 25 bp, Artificial
  probe
  misc_feature (1)..(25): SEQ ID NO: 6314; WAN024ERM_at; Start 60; Stop 84
ggaaaaacgatactggaacagcaga

SEQ ID NO: 179679 - DNA, 25 bp, Artificial
  probe
  misc_feature (1)..(25): SEQ ID NO: 6314; WAN024ERM_at; Start 52; Stop 76
tctagcgaggaaaaacgatactgga

SEQ ID NO: 179680 - DNA, 25 bp, Artificial
  probe
  misc_feature (1)..(25): SEQ ID NO: 6314; WAN024ERM_at; Start 37; Stop 61
gcccttttgaggaaatctagcgagg

SEQ ID NO: 179681 - DNA, 25 bp, Artificial
  probe
  misc_feature (1)..(25): SEQ ID NO: 6314; WAN024ERM_at; Start 43; Stop 67
ttgaggaaatctagcgaggaaaaac

SEQ ID NO: 179682 - DNA, 25 bp, Artificial
  probe
  misc_feature (1)..(25): SEQ ID NO: 6314; WAN024ERM_at; Start 58; Stop 82
gaggaaaaacgatactggaacagca

SEQ ID NO: 179683 - DNA, 25 bp, Artificial
  probe
  misc_feature (1)..(25): SEQ ID NO: 6314; WAN024ERM_at; Start 32; Stop 56
agtctgcccttttgaggaaatctag

SEQ ID NO: 179684 - DNA, 25 bp, Artificial
  probe
  misc_feature (1)..(25): SEQ ID NO: 6314; WAN024ERM_at; Start 40; Stop 64
cttttgaggaaatctagcgaggaaa

SEQ ID NO: 179685 - DNA, 25 bp, Artificial
  probe
  misc_feature (1)..(25): SEQ ID NO: 6314; WAN024ERM_at; Start 35; Stop 59
ctgcccttttgaggaaatctagcga

SEQ ID NO: 179686 - DNA, 25 bp, Artificial
  probe
  misc_feature (1)..(25): SEQ ID NO: 6314; WAN024ERM_at; Start 10; Stop 34
tcgtgtgacgaaccaagggaggagt

SEQ ID NO: 179687 - DNA, 25 bp, Artificial
  probe
  misc_feature (1)..(25): SEQ ID NO: 6314; WAN024ERM_at; Start 36; Stop 60
tgcccttttgaggaaatctagcgag

SEQ ID NO: 179688 - DNA, 25 bp, Artificial
  probe
  misc_feature (1)..(25): SEQ ID NO: 6314; WAN024ERM_at; Start 56; Stop 80
gcgaggaaaaacgatactggaacag

SEQ ID NO: 179689 - DNA, 25 bp, Artificial
  probe
  misc_feature (1)..(25): SEQ ID NO: 6314; WAN024ERM_at; Start 30; Stop 54
ggagtctgcccttttgaggaaatct

SEQ ID NO: 179690 - DNA, 25 bp, Artificial
  probe
  misc_feature (1)..(25): SEQ ID NO: 6314; WAN024ERM_at; Start 53; Stop 77
ctagcgaggaaaaacgatactggaa

SEQ ID NO: 179691 - DNA, 25 bp, Artificial
  probe
  misc_feature (1)..(25): SEQ ID NO: 6314; WAN024ERM_at; Start 29; Stop 53
aggagtctgcccttttgaggaaatc

SEQ ID NO: 179692 - DNA, 25 bp, Artificial
  probe
  misc_feature (1)..(25): SEQ ID NO: 4000; WAN024ERN_at; Start 822; Stop 846
cgtctccagtggtagtttaacccat

SEQ ID NO: 179693 - DNA, 25 bp, Artificial
  probe
  misc_feature (1)..(25): SEQ ID NO: 4000; WAN024ERN_at; Start 406; Stop 430
gaagccttaggcgatgattgcatta

SEQ ID NO: 179694 - DNA, 25 bp, Artificial
  probe
  misc_feature (1)..(25): SEQ ID NO: 4000; WAN024ERN_at; Start 721; Stop 745
gaacaggccattaccctaattgcag

SEQ ID NO: 179695 - DNA, 25 bp, Artificial
  probe
  misc_feature (1)..(25): SEQ ID NO: 4000; WAN024ERN_at; Start 553; Stop 577
cacattgcggcagtaggtagtgttc

SEQ ID NO: 179696 - DNA, 25 bp, Artificial
  probe
  misc_feature (1)..(25): SEQ ID NO: 4000; WAN024ERN_at; Start 854; Stop 878
agagtcttgatttttccatgaaggg

SEQ ID NO: 179697 - DNA, 25 bp, Artificial
  probe
  misc_feature (1)..(25): SEQ ID NO: 4000; WAN024ERN_at; Start 296; Stop 320
tggttttagaaatcataggctcggt

SEQ ID NO: 179698 - DNA, 25 bp, Artificial
  probe
  misc_feature (1)..(25): SEQ ID NO: 4000; WAN024ERN_at; Start 539; Stop 563
tgctaaaagacaatcacattgcggc

SEQ ID NO: 179699 - DNA, 25 bp, Artificial
  probe
  misc_feature (1)..(25): SEQ ID NO: 4000; WAN024ERN_at; Start 85; Stop 109
gccttgcgagaagatgttcattccg

SEQ ID NO: 179700 - DNA, 25 bp, Artificial
  probe
  misc_feature (1)..(25): SEQ ID NO: 4000; WAN024ERN_at; Start 774; Stop 798
tattgatatgaccactattagccgt

SEQ ID NO: 179701 - DNA, 25 bp, Artificial
  probe
  misc_feature (1)..(25): SEQ ID NO: 4000; WAN024ERN_at; Start 632; Stop 656
tggaagtggaaagccttgctgctgc

SEQ ID NO: 179702 - DNA, 25 bp, Artificial
  probe
  misc_feature (1)..(25): SEQ ID NO: 4000; WAN024ERN_at; Start 794; Stop 818
gccgttttcgtggtttagcgattga

SEQ ID NO: 179703 - DNA, 25 bp, Artificial
  probe
  misc_feature (1)..(25): SEQ ID NO: 4000; WAN024ERN_at; Start 434; Stop 458
tatttgatactcgaaaaactactcc

SEQ ID NO: 179704 - DNA, 25 bp, Artificial
  probe
  misc_feature (1)..(25): SEQ ID NO: 4000; WAN024ERN_at; Start 153; Stop 177
caaggtgtcgctttttgccaaggaa

SEQ ID NO: 179705 - DNA, 25 bp, Artificial
  probe
  misc_feature (1)..(25): SEQ ID NO: 4000; WAN024ERN_at; Start 472; Stop 496
tttgagaaatatgccgtgagagttg

SEQ ID NO: 179706 - DNA, 25 bp, Artificial
  probe
  misc_feature (1)..(25): SEQ ID NO: 4000; WAN024ERN_at; Start 839; Stop 863
taacccatagtgctaagagtcttga

SEQ ID NO: 179707 - DNA, 25 bp, Artificial
  probe
  misc_feature (1)..(25): SEQ ID NO: 4000; WAN024ERN_at; Start 100; Stop 124
gttcattccgaagattacagtacca

SEQ ID NO: 179708 - DNA, 25 bp, Artificial
  probe
  misc_feature (1)..(25): SEQ ID NO: 4000; WAN024ERN_at; Start 568; Stop 592
ggtagtgttcaaaaggcaattgctc

SEQ ID NO: 179709 - DNA, 25 bp, Artificial
  probe
  misc_feature (1)..(25): SEQ ID NO: 4000; WAN024ERN_at; Start 237; Stop 261
ggtgaccttccagaatcctcatcaa

SEQ ID NO: 179710 - DNA, 25 bp, Artificial
  probe
  misc_feature (1)..(25): SEQ ID NO: 4000; WAN024ERN_at; Start 138; Stop 162
tcatcatggccaagccaaggtgtcg

SEQ ID NO: 179711 - DNA, 25 bp, Artificial
  probe
  misc_feature (1)..(25): SEQ ID NO: 4000; WAN024ERN_at; Start 583; Stop 607
gcaattgctcaagcgcgtgcctatg

SEQ ID NO: 179712 - DNA, 25 bp, Artificial
  probe
  misc_feature (1)..(25): SEQ ID NO: 4000; WAN024ERN_at; Start 168; Stop 192
tgccaaggaagctggtgttttagcg

SEQ ID NO: 179713 - DNA, 25 bp, Artificial
  probe
  misc_feature (1)..(25): SEQ ID NO: 4000; WAN024ERN_at; Start 492; Stop 516
agttggcggtggctataatcatcgc

SEQ ID NO: 179714 - DNA, 25 bp, Artificial
  probe
  misc_feature (1)..(25): SEQ ID NO: 4000; WAN024ERN_at; Start 670; Stop 694
gcggcgggtgctgatattatcatgt

SEQ ID NO: 179715 - DNA, 25 bp, Artificial
  probe
  misc_feature (1)..(25): SEQ ID NO: 4000; WAN024ERN_at; Start 390; Stop 414
gacagctgcttatgtagaagcctta

SEQ ID NO: 179716 - DNA, 25 bp, Artificial
  probe
  misc_feature (1)..(25): SEQ ID NO: 4000; WAN024ERN_at; Start 706; Stop 730
tcattggaacagattgaacaggcca

SEQ ID NO: 179717 - DNA, 25 bp, Artificial
  probe
  misc_feature (1)..(25): SEQ ID NO: 4000; WAN024ERN_at; Start 327; Stop 351
tctcttaacatgtgaacgcgttgcc

SEQ ID NO: 179718 - DNA, 25 bp, Artificial
  probe
  misc_feature (1)..(25): SEQ ID NO: 4000; WAN024ERN_at; Start 224; Stop 248
tatttgatgccgaggtgaccttcca

SEQ ID NO: 179719 - DNA, 25 bp, Artificial
  probe
  misc_feature (1)..(25): SEQ ID NO: 4000; WAN024ERN_at; Start 604; Stop 628
tatgccccttttgtgaaaatggtcg

SEQ ID NO: 179720 - DNA, 25 bp, Artificial
  probe
  misc_feature (1)..(25): SEQ ID NO: 4000; WAN024ERN_at; Start 67; Stop 91
gatgatacattgaaagcagccttgc

SEQ ID NO: 179721 - DNA, 25 bp, Artificial
  probe
  misc_feature (1)..(25): SEQ ID NO: 4000; WAN024ERN_at; Start 737; Stop 761
taattgcaggacgttctcggattga

SEQ ID NO: 179722 - DNA, 25 bp, Artificial
  probe
  misc_feature (1)..(25): SEQ ID NO: 4000; WAN024ERN_at; Start 309; Stop 333
cataggctcggtgagaagtctctta

SEQ ID NO: 179723 - DNA, 25 bp, Artificial
  probe
  misc_feature (1)..(25): SEQ ID NO: 4000; WAN024ERN_at; Start 364; Stop 388
caacatttatcagggattgcttcga

SEQ ID NO: 179724 - DNA, 25 bp, Artificial
  probe
  misc_feature (1)..(25): SEQ ID NO: 4000; WAN024ERN_at; Start 809; Stop 833
tagcgattgattacgtctccagtgg

SEQ ID NO: 179725 - DNA, 25 bp, Artificial
  probe
  misc_feature (1)..(25): SEQ ID NO: 4000; WAN024ERN_at; Start 646; Stop 670
cttgctgctgccgaagaagctgcgg

SEQ ID NO: 179726 - DNA, 25 bp, Artificial
  probe
  misc_feature (1)..(25): SEQ ID NO: 7611; WAN024ERO_at; Start 36; Stop 60
tactatagatgggcaagaaaagatg

SEQ ID NO: 179727 - DNA, 25 bp, Artificial
  probe
  misc_feature (1)..(25): SEQ ID NO: 7611; WAN024ERO_at; Start 41; Stop 65
tagatgggcaagaaaagatgggcaa

SEQ ID NO: 179728 - DNA, 25 bp, Artificial
  probe
  misc_feature (1)..(25): SEQ ID NO: 7611; WAN024ERO_at; Start 45; Stop 69
tgggcaagaaaagatgggcaagaaa

SEQ ID NO: 179729 - DNA, 25 bp, Artificial
  probe
  misc_feature (1)..(25): SEQ ID NO: 7611; WAN024ERO_at; Start 33; Stop 57
tattactatagatgggcaagaaaag

SEQ ID NO: 179730 - DNA, 25 bp, Artificial
  probe
  misc_feature (1)..(25): SEQ ID NO: 7611; WAN024ERO_at; Start 29; Stop 53
caaatattactatagatgggcaaga

SEQ ID NO: 179731 - DNA, 25 bp, Artificial
  probe
  misc_feature (1)..(25): SEQ ID NO: 7611; WAN024ERO_at; Start 34; Stop 58
attactatagatgggcaagaaaaga

SEQ ID NO: 179732 - DNA, 25 bp, Artificial
  probe
  misc_feature (1)..(25): SEQ ID NO: 7611; WAN024ERO_at; Start 30; Stop 54
aaatattactatagatgggcaagaa

SEQ ID NO: 179733 - DNA, 25 bp, Artificial
  probe
  misc_feature (1)..(25): SEQ ID NO: 7611; WAN024ERO_at; Start 38; Stop 62
ctatagatgggcaagaaaagatggg

SEQ ID NO: 179734 - DNA, 25 bp, Artificial
  probe
  misc_feature (1)..(25): SEQ ID NO: 7611; WAN024ERO_at; Start 46; Stop 70
gggcaagaaaagatgggcaagaaat

SEQ ID NO: 179735 - DNA, 25 bp, Artificial
  probe
  misc_feature (1)..(25): SEQ ID NO: 7611; WAN024ERO_at; Start 35; Stop 59
ttactatagatgggcaagaaaagat

SEQ ID NO: 179736 - DNA, 25 bp, Artificial
  probe
  misc_feature (1)..(25): SEQ ID NO: 7611; WAN024ERO_at; Start 32; Stop 56
atattactatagatgggcaagaaaa

SEQ ID NO: 179737 - DNA, 25 bp, Artificial
  probe
  misc_feature (1)..(25): SEQ ID NO: 7611; WAN024ERO_at; Start 37; Stop 61
actatagatgggcaagaaaagatgg

SEQ ID NO: 179738 - DNA, 25 bp, Artificial
  probe
  misc_feature (1)..(25): SEQ ID NO: 7611; WAN024ERO_at; Start 42; Stop 66
agatgggcaagaaaagatgggcaag

SEQ ID NO: 179739 - DNA, 25 bp, Artificial
  probe
  misc_feature (1)..(25): SEQ ID NO: 7611; WAN024ERO_at; Start 43; Stop 67
gatgggcaagaaaagatgggcaaga

SEQ ID NO: 179740 - DNA, 25 bp, Artificial
  probe
  misc_feature (1)..(25): SEQ ID NO: 7611; WAN024ERO_at; Start 28; Stop 52
tcaaatattactatagatgggcaag

SEQ ID NO: 179741 - DNA, 25 bp, Artificial
  probe
  misc_feature (1)..(25): SEQ ID NO: 7611; WAN024ERO_at; Start 40; Stop 64
atagatgggcaagaaaagatgggca

SEQ ID NO: 179742 - DNA, 25 bp, Artificial
  probe
  misc_feature (1)..(25): SEQ ID NO: 7611; WAN024ERO_at; Start 44; Stop 68
atgggcaagaaaagatgggcaagaa

SEQ ID NO: 179743 - DNA, 25 bp, Artificial
  probe
  misc_feature (1)..(25): SEQ ID NO: 7611; WAN024ERO_at; Start 31; Stop 55
aatattactatagatgggcaagaaa

SEQ ID NO: 179744 - DNA, 25 bp, Artificial
  probe
  misc_feature (1)..(25): SEQ ID NO: 7611; WAN024ERO_at; Start 39; Stop 63
tatagatgggcaagaaaagatgggc

SEQ ID NO: 179745 - DNA, 25 bp, Artificial
  probe
  misc_feature (1)..(25): SEQ ID NO: 3949; WAN024ERP_at; Start 37; Stop 61
ttgtgcaaccaaaaatgccagcagc

SEQ ID NO: 179746 - DNA, 25 bp, Artificial
  probe
  misc_feature (1)..(25): SEQ ID NO: 3949; WAN024ERP_at; Start 146; Stop 170
cctatttccttggaacgttgcatga

SEQ ID NO: 179747 - DNA, 25 bp, Artificial
  probe
  misc_feature (1)..(25): SEQ ID NO: 3949; WAN024ERP_at; Start 20; Stop 44
gccaaacttcccaccccttgtgcaa

SEQ ID NO: 179748 - DNA, 25 bp, Artificial
  probe
  misc_feature (1)..(25): SEQ ID NO: 3949; WAN024ERP_at; Start 116; Stop 140
cgattctgataaccaactgctttca

SEQ ID NO: 179749 - DNA, 25 bp, Artificial
  probe
  misc_feature (1)..(25): SEQ ID NO: 3949; WAN024ERP_at; Start 67; Stop 91
gatgcctacaatccagatagcctcg

SEQ ID NO: 179750 - DNA, 25 bp, Artificial
  probe
  misc_feature (1)..(25): SEQ ID NO: 3949; WAN024ERP_at; Start 57; Stop 81
gcagcaaggcgatgcctacaatcca

SEQ ID NO: 179751 - DNA, 25 bp, Artificial
  probe
  misc_feature (1)..(25): SEQ ID NO: 3949; WAN024ERP_at; Start 52; Stop 76
tgccagcagcaaggcgatgcctaca

SEQ ID NO: 179752 - DNA, 25 bp, Artificial
  probe
  misc_feature (1)..(25): SEQ ID NO: 3949; WAN024ERP_at; Start 123; Stop 147
gataaccaactgctttcatgacacc

SEQ ID NO: 179753 - DNA, 25 bp, Artificial
  probe
  misc_feature (1)..(25): SEQ ID NO: 3949; WAN024ERP_at; Start 48; Stop 72
aaaatgccagcagcaaggcgatgcc

SEQ ID NO: 179754 - DNA, 25 bp, Artificial
  probe
  misc_feature (1)..(25): SEQ ID NO: 3949; WAN024ERP_at; Start 64; Stop 88
ggcgatgcctacaatccagatagcc

SEQ ID NO: 179755 - DNA, 25 bp, Artificial
  probe
  misc_feature (1)..(25): SEQ ID NO: 3949; WAN024ERP_at; Start 114; Stop 138
cacgattctgataaccaactgcttt

SEQ ID NO: 179756 - DNA, 25 bp, Artificial
  probe
  misc_feature (1)..(25): SEQ ID NO: 3949; WAN024ERP_at; Start 78; Stop 102
tccagatagcctcgtaaataaaaat

SEQ ID NO: 179757 - DNA, 25 bp, Artificial
  probe
  misc_feature (1)..(25): SEQ ID NO: 3949; WAN024ERP_at; Start 183; Stop 207
taatgataccaatcataaccgctgc

SEQ ID NO: 179758 - DNA, 25 bp, Artificial
  probe
  misc_feature (1)..(25): SEQ ID NO: 3949; WAN024ERP_at; Start 80; Stop 104
cagatagcctcgtaaataaaaattc

SEQ ID NO: 179759 - DNA, 25 bp, Artificial
  probe
  misc_feature (1)..(25): SEQ ID NO: 3949; WAN024ERP_at; Start 152; Stop 176
tccttggaacgttgcatgatattga

SEQ ID NO: 179760 - DNA, 25 bp, Artificial
  probe
  misc_feature (1)..(25): SEQ ID NO: 3949; WAN024ERP_at; Start 50; Stop 74
aatgccagcagcaaggcgatgccta

SEQ ID NO: 179761 - DNA, 25 bp, Artificial
  probe
  misc_feature (1)..(25): SEQ ID NO: 3949; WAN024ERP_at; Start 1; Stop 25
gtgacttacaatcgcattcgccaaa

SEQ ID NO: 179762 - DNA, 25 bp, Artificial
  probe
  misc_feature (1)..(25): SEQ ID NO: 3949; WAN024ERP_at; Start 70; Stop 94
gcctacaatccagatagcctcgtaa

SEQ ID NO: 179763 - DNA, 25 bp, Artificial
  probe
  misc_feature (1)..(25): SEQ ID NO: 3949; WAN024ERP_at; Start 142; Stop 166
gacacctatttccttggaacgttgc

SEQ ID NO: 179764 - DNA, 25 bp, Artificial
  probe
  misc_feature (1)..(25): SEQ ID NO: 3949; WAN024ERP_at; Start 6; Stop 30
ttacaatcgcattcgccaaacttcc

SEQ ID NO: 179765 - DNA, 25 bp, Artificial
  probe
  misc_feature (1)..(25): SEQ ID NO: 3949; WAN024ERP_at; Start 169; Stop 193
gatattgatgtaaataatgatacca

SEQ ID NO: 179766 - DNA, 25 bp, Artificial
  probe
  misc_feature (1)..(25): SEQ ID NO: 3949; WAN024ERP_at; Start 187; Stop 211
gataccaatcataaccgctgctacc

SEQ ID NO: 179767 - DNA, 25 bp, Artificial
  probe
  misc_feature (1)..(25): SEQ ID NO: 3949; WAN024ERP_at; Start 33; Stop 57
ccccttgtgcaaccaaaaatgccag

SEQ ID NO: 179768 - DNA, 25 bp, Artificial
  probe
  misc_feature (1)..(25): SEQ ID NO: 3949; WAN024ERP_at; Start 3; Stop 27
gacttacaatcgcattcgccaaact

SEQ ID NO: 179769 - DNA, 25 bp, Artificial
  probe
  misc_feature (1)..(25): SEQ ID NO: 3949; WAN024ERP_at; Start 194; Stop 218
atcataaccgctgctaccacaatag

SEQ ID NO: 179770 - DNA, 25 bp, Artificial
  probe
  misc_feature (1)..(25): SEQ ID NO: 3949; WAN024ERP_at; Start 198; Stop 222
taaccgctgctaccacaatagcttg

SEQ ID NO: 179771 - DNA, 25 bp, Artificial
  probe
  misc_feature (1)..(25): SEQ ID NO: 3949; WAN024ERP_at; Start 201; Stop 225
ccgctgctaccacaatagcttgtga

SEQ ID NO: 179772 - DNA, 25 bp, Artificial
  probe
  misc_feature (1)..(25): SEQ ID NO: 3949; WAN024ERP_at; Start 41; Stop 65
gcaaccaaaaatgccagcagcaagg

SEQ ID NO: 179773 - DNA, 25 bp, Artificial
  probe
  misc_feature (1)..(25): SEQ ID NO: 3949; WAN024ERP_at; Start 61; Stop 85
caaggcgatgcctacaatccagata

SEQ ID NO: 179774 - DNA, 25 bp, Artificial
  probe
  misc_feature (1)..(25): SEQ ID NO: 3949; WAN024ERP_at; Start 134; Stop 158
gctttcatgacacctatttccttgg

SEQ ID NO: 179775 - DNA, 25 bp, Artificial
  probe
  misc_feature (1)..(25): SEQ ID NO: 3949; WAN024ERP_at; Start 73; Stop 97
tacaatccagatagcctcgtaaata

SEQ ID NO: 179776 - DNA, 25 bp, Artificial
  probe
  misc_feature (1)..(25): SEQ ID NO: 3949; WAN024ERP_at; Start 45; Stop 69
ccaaaaatgccagcagcaaggcgat

SEQ ID NO: 179777 - DNA, 25 bp, Artificial
  probe
  misc_feature (1)..(25): SEQ ID NO: 3949; WAN024ERP_at; Start 139; Stop 163
catgacacctatttccttggaacgt

SEQ ID NO: 179778 - DNA, 25 bp, Artificial
  probe
  misc_feature (1)..(25): SEQ ID NO: 3949; WAN024ERP_at; Start 158; Stop 182
gaacgttgcatgatattgatgtaaa

SEQ ID NO: 179779 - DNA, 25 bp, Artificial
  probe
  misc_feature (1)..(25): SEQ ID NO: 745; WAN024ERQ_at; Start 1131; Stop 1155
agaaacacatgtttttaaagacaag

SEQ ID NO: 179780 - DNA, 25 bp, Artificial
  probe
  misc_feature (1)..(25): SEQ ID NO: 745; WAN024ERQ_at; Start 1158; Stop 1182
agatttgttggctaaaatcatcaat

SEQ ID NO: 179781 - DNA, 25 bp, Artificial
  probe
  misc_feature (1)..(25): SEQ ID NO: 745; WAN024ERQ_at; Start 1146; Stop 1170
taaagacaaggaagatttgttggct

SEQ ID NO: 179782 - DNA, 25 bp, Artificial
  probe
  misc_feature (1)..(25): SEQ ID NO: 745; WAN024ERQ_at; Start 1155; Stop 1179
ggaagatttgttggctaaaatcatc

SEQ ID NO: 179783 - DNA, 25 bp, Artificial
  probe
  misc_feature (1)..(25): SEQ ID NO: 745; WAN024ERQ_at; Start 1157; Stop 1181
aagatttgttggctaaaatcatcaa

SEQ ID NO: 179784 - DNA, 25 bp, Artificial
  probe
  misc_feature (1)..(25): SEQ ID NO: 745; WAN024ERQ_at; Start 1130; Stop 1154
cagaaacacatgtttttaaagacaa

SEQ ID NO: 179785 - DNA, 25 bp, Artificial
  probe
  misc_feature (1)..(25): SEQ ID NO: 745; WAN024ERQ_at; Start 1161; Stop 1185
tttgttggctaaaatcatcaataat

SEQ ID NO: 179786 - DNA, 25 bp, Artificial
  probe
  misc_feature (1)..(25): SEQ ID NO: 745; WAN024ERQ_at; Start 1152; Stop 1176
caaggaagatttgttggctaaaatc

SEQ ID NO: 179787 - DNA, 25 bp, Artificial
  probe
  misc_feature (1)..(25): SEQ ID NO: 745; WAN024ERQ_at; Start 1160; Stop 1184
atttgttggctaaaatcatcaataa

SEQ ID NO: 179788 - DNA, 25 bp, Artificial
  probe
  misc_feature (1)..(25): SEQ ID NO: 745; WAN024ERQ_at; Start 1129; Stop 1153
ccagaaacacatgtttttaaagaca

SEQ ID NO: 179789 - DNA, 25 bp, Artificial
  probe
  misc_feature (1)..(25): SEQ ID NO: 745; WAN024ERQ_at; Start 1165; Stop 1189
ttggctaaaatcatcaataatcagt

SEQ ID NO: 179790 - DNA, 25 bp, Artificial
  probe
  misc_feature (1)..(25): SEQ ID NO: 745; WAN024ERQ_at; Start 1166; Stop 1190
tggctaaaatcatcaataatcagtt

SEQ ID NO: 179791 - DNA, 25 bp, Artificial
  probe
  misc_feature (1)..(25): SEQ ID NO: 745; WAN024ERQ_at; Start 1153; Stop 1177
aaggaagatttgttggctaaaatca

SEQ ID NO: 179792 - DNA, 25 bp, Artificial
  probe
  misc_feature (1)..(25): SEQ ID NO: 745; WAN024ERQ_at; Start 1167; Stop 1191
ggctaaaatcatcaataatcagttg

SEQ ID NO: 179793 - DNA, 25 bp, Artificial
  probe
  misc_feature (1)..(25): SEQ ID NO: 745; WAN024ERQ_at; Start 1136; Stop 1160
cacatgtttttaaagacaaggaaga

SEQ ID NO: 179794 - DNA, 25 bp, Artificial
  probe
  misc_feature (1)..(25): SEQ ID NO: 745; WAN024ERQ_at; Start 1145; Stop 1169
ttaaagacaaggaagatttgttggc

SEQ ID NO: 179795 - DNA, 25 bp, Artificial
  probe
  misc_feature (1)..(25): SEQ ID NO: 745; WAN024ERQ_at; Start 1135; Stop 1159
acacatgtttttaaagacaaggaag

SEQ ID NO: 179796 - DNA, 25 bp, Artificial
  probe
  misc_feature (1)..(25): SEQ ID NO: 745; WAN024ERQ_at; Start 1150; Stop 1174
gacaaggaagatttgttggctaaaa

SEQ ID NO: 179797 - DNA, 25 bp, Artificial
  probe
  misc_feature (1)..(25): SEQ ID NO: 745; WAN024ERQ_at; Start 1148; Stop 1172
aagacaaggaagatttgttggctaa

SEQ ID NO: 179798 - DNA, 25 bp, Artificial
  probe
  misc_feature (1)..(25): SEQ ID NO: 745; WAN024ERQ_at; Start 1151; Stop 1175
acaaggaagatttgttggctaaaat

SEQ ID NO: 179799 - DNA, 25 bp, Artificial
  probe
  misc_feature (1)..(25): SEQ ID NO: 745; WAN024ERQ_at; Start 1164; Stop 1188
gttggctaaaatcatcaataatcag

SEQ ID NO: 179800 - DNA, 25 bp, Artificial
  probe
  misc_feature (1)..(25): SEQ ID NO: 745; WAN024ERQ_at; Start 1149; Stop 1173
agacaaggaagatttgttggctaaa

SEQ ID NO: 179801 - DNA, 25 bp, Artificial
  probe
  misc_feature (1)..(25): SEQ ID NO: 745; WAN024ERQ_at; Start 1159; Stop 1183
gatttgttggctaaaatcatcaata

SEQ ID NO: 179802 - DNA, 25 bp, Artificial
  probe
  misc_feature (1)..(25): SEQ ID NO: 745; WAN024ERQ_at; Start 1138; Stop 1162
catgtttttaaagacaaggaagatt

SEQ ID NO: 179803 - DNA, 25 bp, Artificial
  probe
  misc_feature (1)..(25): SEQ ID NO: 745; WAN024ERQ_at; Start 1137; Stop 1161
acatgtttttaaagacaaggaagat

SEQ ID NO: 179804 - DNA, 25 bp, Artificial
  probe
  misc_feature (1)..(25): SEQ ID NO: 745; WAN024ERQ_at; Start 1154; Stop 1178
aggaagatttgttggctaaaatcat

SEQ ID NO: 179805 - DNA, 25 bp, Artificial
  probe
  misc_feature (1)..(25): SEQ ID NO: 745; WAN024ERQ_at; Start 1162; Stop 1186
ttgttggctaaaatcatcaataatc

SEQ ID NO: 179806 - DNA, 25 bp, Artificial
  probe
  misc_feature (1)..(25): SEQ ID NO: 745; WAN024ERQ_at; Start 1156; Stop 1180
gaagatttgttggctaaaatcatca

SEQ ID NO: 179807 - DNA, 25 bp, Artificial
  probe
  misc_feature (1)..(25): SEQ ID NO: 745; WAN024ERQ_at; Start 1163; Stop 1187
tgttggctaaaatcatcaataatca

SEQ ID NO: 179808 - DNA, 25 bp, Artificial
  probe
  misc_feature (1)..(25): SEQ ID NO: 745; WAN024ERQ_at; Start 1147; Stop 1171
aaagacaaggaagatttgttggcta

SEQ ID NO: 179809 - DNA, 25 bp, Artificial
  probe
  misc_feature (1)..(25): SEQ ID NO: 745; WAN024ERQ_at; Start 1128; Stop 1152
tccagaaacacatgtttttaaagac

SEQ ID NO: 179810 - DNA, 25 bp, Artificial
  probe
  misc_feature (1)..(25): SEQ ID NO: 743; WAN024ERR_at; Start 1218; Stop 1242
tgaacactcgatagaagtgattcag

SEQ ID NO: 179811 - DNA, 25 bp, Artificial
  probe
  misc_feature (1)..(25): SEQ ID NO: 743; WAN024ERR_at; Start 1245; Stop 1269
ttatgaaagagtgataaatgatagt

SEQ ID NO: 179812 - DNA, 25 bp, Artificial
  probe
  misc_feature (1)..(25): SEQ ID NO: 743; WAN024ERR_at; Start 1208; Stop 1232
aaactttagatgaacactcgataga

SEQ ID NO: 179813 - DNA, 25 bp, Artificial
  probe
  misc_feature (1)..(25): SEQ ID NO: 743; WAN024ERR_at; Start 1219; Stop 1243
gaacactcgatagaagtgattcagt

SEQ ID NO: 179814 - DNA, 25 bp, Artificial
  probe
  misc_feature (1)..(25): SEQ ID NO: 743; WAN024ERR_at; Start 1221; Stop 1245
acactcgatagaagtgattcagtat

SEQ ID NO: 179815 - DNA, 25 bp, Artificial
  probe
  misc_feature (1)..(25): SEQ ID NO: 743; WAN024ERR_at; Start 1138; Stop 1162
catgtttttaaaaatcagaatgatt

SEQ ID NO: 179816 - DNA, 25 bp, Artificial
  probe
  misc_feature (1)..(25): SEQ ID NO: 743; WAN024ERR_at; Start 1234; Stop 1258
gtgattcagtattatgaaagagtga

SEQ ID NO: 179817 - DNA, 25 bp, Artificial
  probe
  misc_feature (1)..(25): SEQ ID NO: 743; WAN024ERR_at; Start 1240; Stop 1264
cagtattatgaaagagtgataaatg

SEQ ID NO: 179818 - DNA, 25 bp, Artificial
  probe
  misc_feature (1)..(25): SEQ ID NO: 743; WAN024ERR_at; Start 1222; Stop 1246
cactcgatagaagtgattcagtatt

SEQ ID NO: 179819 - DNA, 25 bp, Artificial
  probe
  misc_feature (1)..(25): SEQ ID NO: 743; WAN024ERR_at; Start 1203; Stop 1227
attgaaaactttagatgaacactcg

SEQ ID NO: 179820 - DNA, 25 bp, Artificial
  probe
  misc_feature (1)..(25): SEQ ID NO: 743; WAN024ERR_at; Start 1205; Stop 1229
tgaaaactttagatgaacactcgat

SEQ ID NO: 179821 - DNA, 25 bp, Artificial
  probe
  misc_feature (1)..(25): SEQ ID NO: 743; WAN024ERR_at; Start 1209; Stop 1233
aactttagatgaacactcgatagaa

SEQ ID NO: 179822 - DNA, 25 bp, Artificial
  probe
  misc_feature (1)..(25): SEQ ID NO: 743; WAN024ERR_at; Start 1229; Stop 1253
tagaagtgattcagtattatgaaag

SEQ ID NO: 179823 - DNA, 25 bp, Artificial
  probe
  misc_feature (1)..(25): SEQ ID NO: 743; WAN024ERR_at; Start 1204; Stop 1228
ttgaaaactttagatgaacactcga

SEQ ID NO: 179824 - DNA, 25 bp, Artificial
  probe
  misc_feature (1)..(25): SEQ ID NO: 743; WAN024ERR_at; Start 1215; Stop 1239
agatgaacactcgatagaagtgatt

SEQ ID NO: 179825 - DNA, 25 bp, Artificial
  probe
  misc_feature (1)..(25): SEQ ID NO: 743; WAN024ERR_at; Start 1207; Stop 1231
aaaactttagatgaacactcgatag

SEQ ID NO: 179826 - DNA, 25 bp, Artificial
  probe
  misc_feature (1)..(25): SEQ ID NO: 743; WAN024ERR_at; Start 1224; Stop 1248
ctcgatagaagtgattcagtattat

SEQ ID NO: 179827 - DNA, 25 bp, Artificial
  probe
  misc_feature (1)..(25): SEQ ID NO: 743; WAN024ERR_at; Start 1210; Stop 1234
actttagatgaacactcgatagaag

SEQ ID NO: 179828 - DNA, 25 bp, Artificial
  probe
  misc_feature (1)..(25): SEQ ID NO: 743; WAN024ERR_at; Start 1225; Stop 1249
tcgatagaagtgattcagtattatg

SEQ ID NO: 179829 - DNA, 25 bp, Artificial
  probe
  misc_feature (1)..(25): SEQ ID NO: 743; WAN024ERR_at; Start 1206; Stop 1230
gaaaactttagatgaacactcgata

SEQ ID NO: 179830 - DNA, 25 bp, Artificial
  probe
  misc_feature (1)..(25): SEQ ID NO: 743; WAN024ERR_at; Start 1213; Stop 1237
ttagatgaacactcgatagaagtga

SEQ ID NO: 179831 - DNA, 25 bp, Artificial
  probe
  misc_feature (1)..(25): SEQ ID NO: 743; WAN024ERR_at; Start 1212; Stop 1236
tttagatgaacactcgatagaagtg

SEQ ID NO: 179832 - DNA, 25 bp, Artificial
  probe
  misc_feature (1)..(25): SEQ ID NO: 743; WAN024ERR_at; Start 1211; Stop 1235
ctttagatgaacactcgatagaagt

SEQ ID NO: 179833 - DNA, 25 bp, Artificial
  probe
  misc_feature (1)..(25): SEQ ID NO: 743; WAN024ERR_at; Start 1202; Stop 1226
aattgaaaactttagatgaacactc

SEQ ID NO: 179834 - DNA, 25 bp, Artificial
  probe
  misc_feature (1)..(25): SEQ ID NO: 743; WAN024ERR_at; Start 1199; Stop 1223
caaaattgaaaactttagatgaaca

SEQ ID NO: 179835 - DNA, 25 bp, Artificial
  probe
  misc_feature (1)..(25): SEQ ID NO: 743; WAN024ERR_at; Start 1239; Stop 1263
tcagtattatgaaagagtgataaat

SEQ ID NO: 179836 - DNA, 25 bp, Artificial
  probe
  misc_feature (1)..(25): SEQ ID NO: 743; WAN024ERR_at; Start 1231; Stop 1255
gaagtgattcagtattatgaaagag

SEQ ID NO: 179837 - DNA, 25 bp, Artificial
  probe
  misc_feature (1)..(25): SEQ ID NO: 743; WAN024ERR_at; Start 1236; Stop 1260
gattcagtattatgaaagagtgata

SEQ ID NO: 179838 - DNA, 25 bp, Artificial
  probe
  misc_feature (1)..(25): SEQ ID NO: 743; WAN024ERR_at; Start 1216; Stop 1240
gatgaacactcgatagaagtgattc

SEQ ID NO: 179839 - DNA, 25 bp, Artificial
  probe
  misc_feature (1)..(25): SEQ ID NO: 743; WAN024ERR_at; Start 1226; Stop 1250
cgatagaagtgattcagtattatga

SEQ ID NO: 179840 - DNA, 25 bp, Artificial
  probe
  misc_feature (1)..(25): SEQ ID NO: 743; WAN024ERR_at; Start 1220; Stop 1244
aacactcgatagaagtgattcagta

SEQ ID NO: 179841 - DNA, 25 bp, Artificial
  probe
  misc_feature (1)..(25): SEQ ID NO: 743; WAN024ERR_at; Start 1223; Stop 1247
actcgatagaagtgattcagtatta

SEQ ID NO: 179842 - DNA, 25 bp, Artificial
  probe
  misc_feature (1)..(25): SEQ ID NO: 743; WAN024ERR_at; Start 1185; Stop 1209
tgatatagaaaatacaaaattgaaa

SEQ ID NO: 179843 - DNA, 25 bp, Artificial
  probe
  misc_feature (1)..(25): SEQ ID NO: 743; WAN024ERR_at; Start 1214; Stop 1238
tagatgaacactcgatagaagtgat

SEQ ID NO: 179844 - DNA, 25 bp, Artificial
  probe
  misc_feature (1)..(25): SEQ ID NO: 5461; WAN024ERS_at; Start 364; Stop 388
gacatggaggacagcaacagtttca

SEQ ID NO: 179845 - DNA, 25 bp, Artificial
  probe
  misc_feature (1)..(25): SEQ ID NO: 5461; WAN024ERS_at; Start 328; Stop 352
caaacgaagattgtacgtgtaatca

SEQ ID NO: 179846 - DNA, 25 bp, Artificial
  probe
  misc_feature (1)..(25): SEQ ID NO: 5461; WAN024ERS_at; Start 619; Stop 643
gtagcagcggttatgattggtatca

SEQ ID NO: 179847 - DNA, 25 bp, Artificial
  probe
  misc_feature (1)..(25): SEQ ID NO: 5461; WAN024ERS_at; Start 805; Stop 829
ttggcgaatgcgattgtaagtcact

SEQ ID NO: 179848 - DNA, 25 bp, Artificial
  probe
  misc_feature (1)..(25): SEQ ID NO: 5461; WAN024ERS_at; Start 423; Stop 447
ggctggatttacgaaagctgtatct

SEQ ID NO: 179849 - DNA, 25 bp, Artificial
  probe
  misc_feature (1)..(25): SEQ ID NO: 5461; WAN024ERS_at; Start 351; Stop 375
caatgatgaagatgacatggaggac

SEQ ID NO: 179850 - DNA, 25 bp, Artificial
  probe
  misc_feature (1)..(25): SEQ ID NO: 5461; WAN024ERS_at; Start 755; Stop 779
taggcatcgccttgctgctggcatt

SEQ ID NO: 179851 - DNA, 25 bp, Artificial
  probe
  misc_feature (1)..(25): SEQ ID NO: 5461; WAN024ERS_at; Start 561; Stop 585
tacctttattcgtgttattcaggga

SEQ ID NO: 179852 - DNA, 25 bp, Artificial
  probe
  misc_feature (1)..(25): SEQ ID NO: 5461; WAN024ERS_at; Start 725; Stop 749
gaatttttatttacgaggctatctg

SEQ ID NO: 179853 - DNA, 25 bp, Artificial
  probe
  misc_feature (1)..(25): SEQ ID NO: 5461; WAN024ERS_at; Start 540; Stop 564
gagagttcttgatattgtgattacc

SEQ ID NO: 179854 - DNA, 25 bp, Artificial
  probe
  misc_feature (1)..(25): SEQ ID NO: 5461; WAN024ERS_at; Start 120; Stop 144
ctctgttagtaataatgagacggac

SEQ ID NO: 179855 - DNA, 25 bp, Artificial
  probe
  misc_feature (1)..(25): SEQ ID NO: 5461; WAN024ERS_at; Start 404; Stop 428
tggaaacgattttgaaagaggctgg

SEQ ID NO: 179856 - DNA, 25 bp, Artificial
  probe
  misc_feature (1)..(25): SEQ ID NO: 5461; WAN024ERS_at; Start 826; Stop 850
cacttttacccatccatcactaagg

SEQ ID NO: 179857 - DNA, 25 bp, Artificial
  probe
  misc_feature (1)..(25): SEQ ID NO: 5461; WAN024ERS_at; Start 605; Stop 629
cacaagctattgtggtagcagcggt

SEQ ID NO: 179858 - DNA, 25 bp, Artificial
  probe
  misc_feature (1)..(25): SEQ ID NO: 5461; WAN024ERS_at; Start 771; Stop 795
gctggcatttttggttgcacaaggg

SEQ ID NO: 179859 - DNA, 25 bp, Artificial
  probe
  misc_feature (1)..(25): SEQ ID NO: 5461; WAN024ERS_at; Start 594; Stop 618
tgtgctttcatcacaagctattgtg

SEQ ID NO: 179860 - DNA, 25 bp, Artificial
  probe
  misc_feature (1)..(25): SEQ ID NO: 5461; WAN024ERS_at; Start 191; Stop 215
taacgattccaagcagtttactaaa

SEQ ID NO: 179861 - DNA, 25 bp, Artificial
  probe
  misc_feature (1)..(25): SEQ ID NO: 5461; WAN024ERS_at; Start 47; Stop 71
ggcaagaaatggatctgagtcaaac

SEQ ID NO: 179862 - DNA, 25 bp, Artificial
  probe
  misc_feature (1)..(25): SEQ ID NO: 5461; WAN024ERS_at; Start 653; Stop 677
tcaatatcatgcaacgttccaagga

SEQ ID NO: 179863 - DNA, 25 bp, Artificial
  probe
  misc_feature (1)..(25): SEQ ID NO: 5461; WAN024ERS_at; Start 690; Stop 714
gaaagcagttggttatcagaatcgt

SEQ ID NO: 179864 - DNA, 25 bp, Artificial
  probe
  misc_feature (1)..(25): SEQ ID NO: 5461; WAN024ERS_at; Start 475; Stop 499
tcacagacaaaagtagtaacagaag

SEQ ID NO: 179865 - DNA, 25 bp, Artificial
  probe
  misc_feature (1)..(25): SEQ ID NO: 5461; WAN024ERS_at; Start 212; Stop 236
taaaaaattggaatgaacagacagg

SEQ ID NO: 179866 - DNA, 25 bp, Artificial
  probe
  misc_feature (1)..(25): SEQ ID NO: 5461; WAN024ERS_at; Start 275; Stop 299
tctcagccagcattgtagaaagtgc

SEQ ID NO: 179867 - DNA, 25 bp, Artificial
  probe
  misc_feature (1)..(25): SEQ ID NO: 5461; WAN024ERS_at; Start 57; Stop 81
ggatctgagtcaaacgatgccttct

SEQ ID NO: 179868 - DNA, 25 bp, Artificial
  probe
  misc_feature (1)..(25): SEQ ID NO: 5461; WAN024ERS_at; Start 579; Stop 603
tcagggattattgattgtgctttca

SEQ ID NO: 179869 - DNA, 25 bp, Artificial
  probe
  misc_feature (1)..(25): SEQ ID NO: 5461; WAN024ERS_at; Start 176; Stop 200
caaatgaacagggattaacgattcc

SEQ ID NO: 179870 - DNA, 25 bp, Artificial
  probe
  misc_feature (1)..(25): SEQ ID NO: 5461; WAN024ERS_at; Start 312; Stop 336
taagattgctcaatttcaaacgaag

SEQ ID NO: 179871 - DNA, 25 bp, Artificial
  probe
  misc_feature (1)..(25): SEQ ID NO: 5461; WAN024ERS_at; Start 667; Stop 691
cgttccaaggaaataggtgtcatga

SEQ ID NO: 179872 - DNA, 25 bp, Artificial
  probe
  misc_feature (1)..(25): SEQ ID NO: 5461; WAN024ERS_at; Start 742; Stop 766
gctatctggattgtaggcatcgcct

SEQ ID NO: 179873 - DNA, 25 bp, Artificial
  probe
  misc_feature (1)..(25): SEQ ID NO: 5461; WAN024ERS_at; Start 387; Stop 411
catgctgtctcatcaaatggaaacg

SEQ ID NO: 179874 - DNA, 25 bp, Artificial
  probe
  misc_feature (1)..(25): SEQ ID NO: 5461; WAN024ERS_at; Start 72; Stop 96
gatgccttcttatgctcaagtagtg

SEQ ID NO: 179875 - DNA, 25 bp, Artificial
  probe
  misc_feature (1)..(25): SEQ ID NO: 5461; WAN024ERS_at; Start 261; Stop 285
tattggcaaatcagtctcagccagc

SEQ ID NO: 179876 - DNA, 25 bp, Artificial
  probe
  misc_feature (1)..(25): SEQ ID NO: 5461; WAN024ERS_at; Start 459; Stop 483
ggaactcaaagatccatcacagaca

SEQ ID NO: 179877 - DNA, 25 bp, Artificial
  probe
  misc_feature (1)..(25): SEQ ID NO: 5461; WAN024ERS_at; Start 225; Stop 249
tgaacagacaggaaaaaatttgaca

SEQ ID NO: 179878 - DNA, 25 bp, Artificial
  probe
  misc_feature (1)..(25): SEQ ID NO: 2098; WAN024ERT_at; Start 187; Stop 211
aaaaatcgccgcctgagtgaggatg

SEQ ID NO: 179879 - DNA, 25 bp, Artificial
  probe
  misc_feature (1)..(25): SEQ ID NO: 2098; WAN024ERT_at; Start 198; Stop 222
cctgagtgaggatgataagcagtta

SEQ ID NO: 179880 - DNA, 25 bp, Artificial
  probe
  misc_feature (1)..(25): SEQ ID NO: 2098; WAN024ERT_at; Start 44; Stop 68
ctgacggacatacgcatgattttac

SEQ ID NO: 179881 - DNA, 25 bp, Artificial
  probe
  misc_feature (1)..(25): SEQ ID NO: 2098; WAN024ERT_at; Start 7; Stop 31
gatttgacgacacataaagtctgtc

SEQ ID NO: 179882 - DNA, 25 bp, Artificial
  probe
  misc_feature (1)..(25): SEQ ID NO: 2098; WAN024ERT_at; Start 192; Stop 216
tcgccgcctgagtgaggatgataag

SEQ ID NO: 179883 - DNA, 25 bp, Artificial
  probe
  misc_feature (1)..(25): SEQ ID NO: 2098; WAN024ERT_at; Start 137; Stop 161
taggcatcttgaaatttcatgagaa

SEQ ID NO: 179884 - DNA, 25 bp, Artificial
  probe
  misc_feature (1)..(25): SEQ ID NO: 2098; WAN024ERT_at; Start 290; Stop 314
tcatgtcagtcccttatcgtaaccg

SEQ ID NO: 179885 - DNA, 25 bp, Artificial
  probe
  misc_feature (1)..(25): SEQ ID NO: 2098; WAN024ERT_at; Start 68; Stop 92
ctctcttcaaagaaagtattggaca

SEQ ID NO: 179886 - DNA, 25 bp, Artificial
  probe
  misc_feature (1)..(25): SEQ ID NO: 2098; WAN024ERT_at; Start 31; Stop 55
caaatggccttttctgacggacata

SEQ ID NO: 179887 - DNA, 25 bp, Artificial
  probe
  misc_feature (1)..(25): SEQ ID NO: 2098; WAN024ERT_at; Start 124; Stop 148
gacctaggttatttaggcatcttga

SEQ ID NO: 179888 - DNA, 25 bp, Artificial
  probe
  misc_feature (1)..(25): SEQ ID NO: 2098; WAN024ERT_at; Start 17; Stop 41
cacataaagtctgtcaaatggcctt

SEQ ID NO: 179889 - DNA, 25 bp, Artificial
  probe
  misc_feature (1)..(25): SEQ ID NO: 2098; WAN024ERT_at; Start 38; Stop 62
ccttttctgacggacatacgcatga

SEQ ID NO: 179890 - DNA, 25 bp, Artificial
  probe
  misc_feature (1)..(25): SEQ ID NO: 2098; WAN024ERT_at; Start 275; Stop 299
tcaagaccttccaaatcatgtcagt

SEQ ID NO: 179891 - DNA, 25 bp, Artificial
  probe
  misc_feature (1)..(25): SEQ ID NO: 2098; WAN024ERT_at; Start 2; Stop 26
tgctggatttgacgacacataaagt

SEQ ID NO: 179892 - DNA, 25 bp, Artificial
  probe
  misc_feature (1)..(25): SEQ ID NO: 2098; WAN024ERT_at; Start 264; Stop 288
taacgctaaattcaagaccttccaa

SEQ ID NO: 179893 - DNA, 25 bp, Artificial
  probe
  misc_feature (1)..(25): SEQ ID NO: 2098; WAN024ERT_at; Start 235; Stop 259
tcagcgatacgaattgaaattgaac

SEQ ID NO: 179894 - DNA, 25 bp, Artificial
  probe
  misc_feature (1)..(25): SEQ ID NO: 2098; WAN024ERT_at; Start 103; Stop 127
gaaacgacgcttgcctttgttgacc

SEQ ID NO: 179895 - DNA, 25 bp, Artificial
  probe
  misc_feature (1)..(25): SEQ ID NO: 2098; WAN024ERT_at; Start 157; Stop 181
gagaatactttcattcctgctaaaa

SEQ ID NO: 179896 - DNA, 25 bp, Artificial
  probe
  misc_feature (1)..(25): SEQ ID NO: 2098; WAN024ERT_at; Start 221; Stop 245
taaataaagagatgtcagcgatacg

SEQ ID NO: 179897 - DNA, 25 bp, Artificial
  probe
  misc_feature (1)..(25): SEQ ID NO: 2098; WAN024ERT_at; Start 108; Stop 132
gacgcttgcctttgttgacctaggt

SEQ ID NO: 179898 - DNA, 25 bp, Artificial
  probe
  misc_feature (1)..(25): SEQ ID NO: 2098; WAN024ERT_at; Start 56; Stop 80
cgcatgattttactctcttcaaaga

SEQ ID NO: 179899 - DNA, 25 bp, Artificial
  probe
  misc_feature (1)..(25): SEQ ID NO: 2098; WAN024ERT_at; Start 174; Stop 198
tgctaaaaattccaaaaatcgccgc

SEQ ID NO: 179900 - DNA, 25 bp, Artificial
  probe
  misc_feature (1)..(25): SEQ ID NO: 2098; WAN024ERT_at; Start 79; Stop 103
gaaagtattggacaaagtttgcctg

SEQ ID NO: 179901 - DNA, 25 bp, Artificial
  probe
  misc_feature (1)..(25): SEQ ID NO: 2098; WAN024ERT_at; Start 216; Stop 240
gcagttaaataaagagatgtcagcg

SEQ ID NO: 179902 - DNA, 25 bp, Artificial
  probe
  misc_feature (1)..(25): SEQ ID NO: 2098; WAN024ERT_at; Start 179; Stop 203
aaaattccaaaaatcgccgcctgag

SEQ ID NO: 179903 - DNA, 25 bp, Artificial
  probe
  misc_feature (1)..(25): SEQ ID NO: 2098; WAN024ERT_at; Start 92; Stop 116
aaagtttgcctgaaacgacgcttgc

SEQ ID NO: 179904 - DNA, 25 bp, Artificial
  probe
  misc_feature (1)..(25): SEQ ID NO: 2098; WAN024ERT_at; Start 352; Stop 376
gccatcatcaattatgaagtgaacc

SEQ ID NO: 179905 - DNA, 25 bp, Artificial
  probe
  misc_feature (1)..(25): SEQ ID NO: 2098; WAN024ERT_at; Start 337; Stop 361
gcggaattaatttgtgccatcatca

SEQ ID NO: 179906 - DNA, 25 bp, Artificial
  probe
  misc_feature (1)..(25): SEQ ID NO: 2098; WAN024ERT_at; Start 296; Stop 320
cagtcccttatcgtaaccgcagaaa

SEQ ID NO: 179907 - DNA, 25 bp, Artificial
  probe
  misc_feature (1)..(25): SEQ ID NO: 2098; WAN024ERT_at; Start 87; Stop 111
tggacaaagtttgcctgaaacgacg

SEQ ID NO: 179908 - DNA, 25 bp, Artificial
  probe
  misc_feature (1)..(25): SEQ ID NO: 2098; WAN024ERT_at; Start 249; Stop 273
tgaaattgaacattttaacgctaaa

SEQ ID NO: 179909 - DNA, 25 bp, Artificial
  probe
  misc_feature (1)..(25): SEQ ID NO: 2098; WAN024ERT_at; Start 229; Stop 253
gagatgtcagcgatacgaattgaaa

SEQ ID NO: 179910 - DNA, 25 bp, Artificial
  probe
  misc_feature (1)..(25): SEQ ID NO: 2098; WAN024ERT_at; Start 97; Stop 121
ttgcctgaaacgacgcttgcctttg

SEQ ID NO: 179911 - DNA, 25 bp, Artificial
  probe
  misc_feature (1)..(25): SEQ ID NO: 2098; WAN024ERT_at; Start 331; Stop 355
ttacgggcggaattaatttgtgcca

SEQ ID NO: 179912 - DNA, 25 bp, Artificial
  probe
  misc_feature (1)..(25): SEQ ID NO: 3378; WAN024ERU_at; Start 283; Stop 307
cgtctgctggcctttgattttggcg

SEQ ID NO: 179913 - DNA, 25 bp, Artificial
  probe
  misc_feature (1)..(25): SEQ ID NO: 3378; WAN024ERU_at; Start 362; Stop 386
cgtcaggtagctttgatttggacca

SEQ ID NO: 179914 - DNA, 25 bp, Artificial
  probe
  misc_feature (1)..(25): SEQ ID NO: 3378; WAN024ERU_at; Start 376; Stop 400
gatttggaccatttagaagccccga

SEQ ID NO: 179915 - DNA, 25 bp, Artificial
  probe
  misc_feature (1)..(25): SEQ ID NO: 3378; WAN024ERU_at; Start 353; Stop 377
cacttcgtgcgtcaggtagctttga

SEQ ID NO: 179916 - DNA, 25 bp, Artificial
  probe
  misc_feature (1)..(25): SEQ ID NO: 3378; WAN024ERU_at; Start 22; Stop 46
tgcaaaagaatagacttgttcggta

SEQ ID NO: 179917 - DNA, 25 bp, Artificial
  probe
  misc_feature (1)..(25): SEQ ID NO: 3378; WAN024ERU_at; Start 66; Stop 90
tatttttatggaaacagtatacgac

SEQ ID NO: 179918 - DNA, 25 bp, Artificial
  probe
  misc_feature (1)..(25): SEQ ID NO: 3378; WAN024ERU_at; Start 174; Stop 198
gaattcagcctatcagattcagcac

SEQ ID NO: 179919 - DNA, 25 bp, Artificial
  probe
  misc_feature (1)..(25): SEQ ID NO: 3378; WAN024ERU_at; Start 142; Stop 166
aaggaaacctttcaactcatgctag

SEQ ID NO: 179920 - DNA, 25 bp, Artificial
  probe
  misc_feature (1)..(25): SEQ ID NO: 3378; WAN024ERU_at; Start 396; Stop 420
cccgagtgctgctgtggctattgac

SEQ ID NO: 179921 - DNA, 25 bp, Artificial
  probe
  misc_feature (1)..(25): SEQ ID NO: 3378; WAN024ERU_at; Start 151; Stop 175
tttcaactcatgctagaacacctga

SEQ ID NO: 179922 - DNA, 25 bp, Artificial
  probe
  misc_feature (1)..(25): SEQ ID NO: 3378; WAN024ERU_at; Start 15; Stop 39
gttcgcctgcaaaagaatagacttg

SEQ ID NO: 179923 - DNA, 25 bp, Artificial
  probe
  misc_feature (1)..(25): SEQ ID NO: 3378; WAN024ERU_at; Start 268; Stop 292
tattatcccactcagcgtctgctgg

SEQ ID NO: 179924 - DNA, 25 bp, Artificial
  probe
  misc_feature (1)..(25): SEQ ID NO: 3378; WAN024ERU_at; Start 1; Stop 25
ctgattttgaggaagttcgcctgca

SEQ ID NO: 179925 - DNA, 25 bp, Artificial
  probe
  misc_feature (1)..(25): SEQ ID NO: 3378; WAN024ERU_at; Start 184; Stop 208
tatcagattcagcaccgaaaaggtg

SEQ ID NO: 179926 - DNA, 25 bp, Artificial
  probe
  misc_feature (1)..(25): SEQ ID NO: 3378; WAN024ERU_at; Start 207; Stop 231
tggacgtccacgtagtctgcccatg

SEQ ID NO: 179927 - DNA, 25 bp, Artificial
  probe
  misc_feature (1)..(25): SEQ ID NO: 3378; WAN024ERU_at; Start 219; Stop 243
tagtctgcccatggaagaccagctc

SEQ ID NO: 179928 - DNA, 25 bp, Artificial
  probe
  misc_feature (1)..(25): SEQ ID NO: 3378; WAN024ERU_at; Start 405; Stop 429
tgctgtggctattgacgtgaccgaa

SEQ ID NO: 179929 - DNA, 25 bp, Artificial
  probe
  misc_feature (1)..(25): SEQ ID NO: 3378; WAN024ERU_at; Start 254; Stop 278
tccgttacttgcgatattatcccac

SEQ ID NO: 179930 - DNA, 25 bp, Artificial
  probe
  misc_feature (1)..(25): SEQ ID NO: 3378; WAN024ERU_at; Start 345; Stop 369
ggaggatacacttcgtgcgtcaggt

SEQ ID NO: 179931 - DNA, 25 bp, Artificial
  probe
  misc_feature (1)..(25): SEQ ID NO: 3378; WAN024ERU_at; Start 74; Stop 98
tggaaacagtatacgacaaagcaca

SEQ ID NO: 179932 - DNA, 25 bp, Artificial
  probe
  misc_feature (1)..(25): SEQ ID NO: 3378; WAN024ERU_at; Start 425; Stop 449
ccgaaagtccgattcagcgtccaaa

SEQ ID NO: 179933 - DNA, 25 bp, Artificial
  probe
  misc_feature (1)..(25): SEQ ID NO: 3378; WAN024ERU_at; Start 115; Stop 139
aacttcaaactattgattggtgtca

SEQ ID NO: 179934 - DNA, 25 bp, Artificial
  probe
  misc_feature (1)..(25): SEQ ID NO: 3378; WAN024ERU_at; Start 389; Stop 413
tagaagccccgagtgctgctgtggc

SEQ ID NO: 179935 - DNA, 25 bp, Artificial
  probe
  misc_feature (1)..(25): SEQ ID NO: 3378; WAN024ERU_at; Start 225; Stop 249
gcccatggaagaccagctcattatg

SEQ ID NO: 179936 - DNA, 25 bp, Artificial
  probe
  misc_feature (1)..(25): SEQ ID NO: 3378; WAN024ERU_at; Start 88; Stop 112
gacaaagcacaaaaacttaactcaa

SEQ ID NO: 179937 - DNA, 25 bp, Artificial
  probe
  misc_feature (1)..(25): SEQ ID NO: 3378; WAN024ERU_at; Start 412; Stop 436
gctattgacgtgaccgaaagtccga

SEQ ID NO: 179938 - DNA, 25 bp, Artificial
  probe
  misc_feature (1)..(25): SEQ ID NO: 3378; WAN024ERU_at; Start 335; Stop 359
tcacttgggtggaggatacacttcg

SEQ ID NO: 179939 - DNA, 25 bp, Artificial
  probe
  misc_feature (1)..(25): SEQ ID NO: 3378; WAN024ERU_at; Start 380; Stop 404
tggaccatttagaagccccgagtgc

SEQ ID NO: 179940 - DNA, 25 bp, Artificial
  probe
  misc_feature (1)..(25): SEQ ID NO: 3378; WAN024ERU_at; Start 329; Stop 353
ccatcatcacttgggtggaggatac

SEQ ID NO: 179941 - DNA, 25 bp, Artificial
  probe
  misc_feature (1)..(25): SEQ ID NO: 3378; WAN024ERU_at; Start 166; Stop 190
gaacacctgaattcagcctatcaga

SEQ ID NO: 179942 - DNA, 25 bp, Artificial
  probe
  misc_feature (1)..(25): SEQ ID NO: 3378; WAN024ERU_at; Start 296; Stop 320
ttgattttggcgtcggtgtagctac

SEQ ID NO: 179943 - DNA, 25 bp, Artificial
  probe
  misc_feature (1)..(25): SEQ ID NO: 3378; WAN024ERU_at; Start 314; Stop 338
tagctacggtaaatgccatcatcac

SEQ ID NO: 179944 - DNA, 25 bp, Artificial
  probe
  misc_feature (1)..(25): SEQ ID NO: 3378; WAN024ERU_at; Start 306; Stop 330
cgtcggtgtagctacggtaaatgcc

SEQ ID NO: 179945 - DNA, 25 bp, Artificial
  probe
  misc_feature (1)..(25): SEQ ID NO: 3378; WAN024ERU_at; Start 192; Stop 216
tcagcaccgaaaaggtggacgtcca

SEQ ID NO: 179946 - DNA, 25 bp, Artificial
  probe
  misc_feature (1)..(25): SEQ ID NO: 7272; WAN024ERV_at; Start 35; Stop 59
gcgaccctctctataacagcaattc

SEQ ID NO: 179947 - DNA, 25 bp, Artificial
  probe
  misc_feature (1)..(25): SEQ ID NO: 7272; WAN024ERV_at; Start 34; Stop 58
ggcgaccctctctataacagcaatt

SEQ ID NO: 179948 - DNA, 25 bp, Artificial
  probe
  misc_feature (1)..(25): SEQ ID NO: 7272; WAN024ERV_at; Start 51; Stop 75
cagcaattcaaagacaagtcggctt

SEQ ID NO: 179949 - DNA, 25 bp, Artificial
  probe
  misc_feature (1)..(25): SEQ ID NO: 7272; WAN024ERV_at; Start 54; Stop 78
caattcaaagacaagtcggcttatg

SEQ ID NO: 179950 - DNA, 25 bp, Artificial
  probe
  misc_feature (1)..(25): SEQ ID NO: 7272; WAN024ERV_at; Start 53; Stop 77
gcaattcaaagacaagtcggcttat

SEQ ID NO: 179951 - DNA, 25 bp, Artificial
  probe
  misc_feature (1)..(25): SEQ ID NO: 7272; WAN024ERV_at; Start 127; Stop 151
ttaaacttcactgccctctcaaata

SEQ ID NO: 179952 - DNA, 25 bp, Artificial
  probe
  misc_feature (1)..(25): SEQ ID NO: 7272; WAN024ERV_at; Start 99; Stop 123
ctttacccatccacttacattagaa

SEQ ID NO: 179953 - DNA, 25 bp, Artificial
  probe
  misc_feature (1)..(25): SEQ ID NO: 7272; WAN024ERV_at; Start 143; Stop 167
tctcaaatacttttgaaacagaatt

SEQ ID NO: 179954 - DNA, 25 bp, Artificial
  probe
  misc_feature (1)..(25): SEQ ID NO: 7272; WAN024ERV_at; Start 27; Stop 51
tattttgggcgaccctctctataac

SEQ ID NO: 179955 - DNA, 25 bp, Artificial
  probe
  misc_feature (1)..(25): SEQ ID NO: 7272; WAN024ERV_at; Start 133; Stop 157
ttcactgccctctcaaatacttttg

SEQ ID NO: 179956 - DNA, 25 bp, Artificial
  probe
  misc_feature (1)..(25): SEQ ID NO: 7272; WAN024ERV_at; Start 135; Stop 159
cactgccctctcaaatacttttgaa

SEQ ID NO: 179957 - DNA, 25 bp, Artificial
  probe
  misc_feature (1)..(25): SEQ ID NO: 7272; WAN024ERV_at; Start 106; Stop 130
catccacttacattagaaaaattaa

SEQ ID NO: 179958 - DNA, 25 bp, Artificial
  probe
  misc_feature (1)..(25): SEQ ID NO: 7272; WAN024ERV_at; Start 1; Stop 25
gtgcacctttcgcatcataacttcc

SEQ ID NO: 179959 - DNA, 25 bp, Artificial
  probe
  misc_feature (1)..(25): SEQ ID NO: 7272; WAN024ERV_at; Start 139; Stop 163
gccctctcaaatacttttgaaacag

SEQ ID NO: 179960 - DNA, 25 bp, Artificial
  probe
  misc_feature (1)..(25): SEQ ID NO: 7272; WAN024ERV_at; Start 49; Stop 73
aacagcaattcaaagacaagtcggc

SEQ ID NO: 179961 - DNA, 25 bp, Artificial
  probe
  misc_feature (1)..(25): SEQ ID NO: 7272; WAN024ERV_at; Start 25; Stop 49
cctattttgggcgaccctctctata

SEQ ID NO: 179962 - DNA, 25 bp, Artificial
  probe
  misc_feature (1)..(25): SEQ ID NO: 7272; WAN024ERV_at; Start 44; Stop 68
tctataacagcaattcaaagacaag

SEQ ID NO: 179963 - DNA, 25 bp, Artificial
  probe
  misc_feature (1)..(25): SEQ ID NO: 7272; WAN024ERV_at; Start 116; Stop 140
cattagaaaaattaaacttcactgc

SEQ ID NO: 179964 - DNA, 25 bp, Artificial
  probe
  misc_feature (1)..(25): SEQ ID NO: 7272; WAN024ERV_at; Start 15; Stop 39
tcataacttccctattttgggcgac

SEQ ID NO: 179965 - DNA, 25 bp, Artificial
  probe
  misc_feature (1)..(25): SEQ ID NO: 7272; WAN024ERV_at; Start 32; Stop 56
tgggcgaccctctctataacagcaa

SEQ ID NO: 179966 - DNA, 25 bp, Artificial
  probe
  misc_feature (1)..(25): SEQ ID NO: 7272; WAN024ERV_at; Start 125; Stop 149
aattaaacttcactgccctctcaaa

SEQ ID NO: 179967 - DNA, 25 bp, Artificial
  probe
  misc_feature (1)..(25): SEQ ID NO: 7272; WAN024ERV_at; Start 37; Stop 61
gaccctctctataacagcaattcaa

SEQ ID NO: 179968 - DNA, 25 bp, Artificial
  probe
  misc_feature (1)..(25): SEQ ID NO: 7272; WAN024ERV_at; Start 30; Stop 54
tttgggcgaccctctctataacagc

SEQ ID NO: 179969 - DNA, 25 bp, Artificial
  probe
  misc_feature (1)..(25): SEQ ID NO: 7272; WAN024ERV_at; Start 48; Stop 72
taacagcaattcaaagacaagtcgg

SEQ ID NO: 179970 - DNA, 25 bp, Artificial
  probe
  misc_feature (1)..(25): SEQ ID NO: 7272; WAN024ERV_at; Start 11; Stop 35
cgcatcataacttccctattttggg

SEQ ID NO: 179971 - DNA, 25 bp, Artificial
  probe
  misc_feature (1)..(25): SEQ ID NO: 7272; WAN024ERV_at; Start 12; Stop 36
gcatcataacttccctattttgggc

SEQ ID NO: 179972 - DNA, 25 bp, Artificial
  probe
  misc_feature (1)..(25): SEQ ID NO: 7272; WAN024ERV_at; Start 31; Stop 55
ttgggcgaccctctctataacagca

SEQ ID NO: 179973 - DNA, 25 bp, Artificial
  probe
  misc_feature (1)..(25): SEQ ID NO: 7272; WAN024ERV_at; Start 123; Stop 147
aaaattaaacttcactgccctctca

SEQ ID NO: 179974 - DNA, 25 bp, Artificial
  probe
  misc_feature (1)..(25): SEQ ID NO: 7272; WAN024ERV_at; Start 102; Stop 126
tacccatccacttacattagaaaaa

SEQ ID NO: 179975 - DNA, 25 bp, Artificial
  probe
  misc_feature (1)..(25): SEQ ID NO: 7272; WAN024ERV_at; Start 46; Stop 70
tataacagcaattcaaagacaagtc

SEQ ID NO: 179976 - DNA, 25 bp, Artificial
  probe
  misc_feature (1)..(25): SEQ ID NO: 7272; WAN024ERV_at; Start 50; Stop 74
acagcaattcaaagacaagtcggct

SEQ ID NO: 179977 - DNA, 25 bp, Artificial
  probe
  misc_feature (1)..(25): SEQ ID NO: 7272; WAN024ERV_at; Start 39; Stop 63
ccctctctataacagcaattcaaag

SEQ ID NO: 179978 - DNA, 25 bp, Artificial
  probe
  misc_feature (1)..(25): SEQ ID NO: 7272; WAN024ERV_at; Start 33; Stop 57
gggcgaccctctctataacagcaat

SEQ ID NO: 179979 - DNA, 25 bp, Artificial
  probe
  misc_feature (1)..(25): SEQ ID NO: 7272; WAN024ERV_at; Start 5; Stop 29
acctttcgcatcataacttccctat

SEQ ID NO: 179980 - DNA, 25 bp, Artificial
  probe
  misc_feature (1)..(25): SEQ ID NO: 5860; WAN024ERW_at; Start 18; Stop 42
taatctgcttacatgcgtttcagca

SEQ ID NO: 179981 - DNA, 25 bp, Artificial
  probe
  misc_feature (1)..(25): SEQ ID NO: 5860; WAN024ERW_at; Start 48; Stop 72
cccattttttgcatcaactattctt

SEQ ID NO: 179982 - DNA, 25 bp, Artificial
  probe
  misc_feature (1)..(25): SEQ ID NO: 5860; WAN024ERW_at; Start 105; Stop 129
gtctctgaaaacaagttcttttctg

SEQ ID NO: 179983 - DNA, 25 bp, Artificial
  probe
  misc_feature (1)..(25): SEQ ID NO: 5860; WAN024ERW_at; Start 215; Stop 239
gatttttggcaaagagaactaagcc

SEQ ID NO: 179984 - DNA, 25 bp, Artificial
  probe
  misc_feature (1)..(25): SEQ ID NO: 5860; WAN024ERW_at; Start 151; Stop 175
gcccaatattctctagaaatctctt

SEQ ID NO: 179985 - DNA, 25 bp, Artificial
  probe
  misc_feature (1)..(25): SEQ ID NO: 5860; WAN024ERW_at; Start 74; Stop 98
ttctacgatcatggcgatcacgtcc

SEQ ID NO: 179986 - DNA, 25 bp, Artificial
  probe
  misc_feature (1)..(25): SEQ ID NO: 5860; WAN024ERW_at; Start 224; Stop 248
caaagagaactaagccactggtttc

SEQ ID NO: 179987 - DNA, 25 bp, Artificial
  probe
  misc_feature (1)..(25): SEQ ID NO: 5860; WAN024ERW_at; Start 71; Stop 95
tttttctacgatcatggcgatcacg

SEQ ID NO: 179988 - DNA, 25 bp, Artificial
  probe
  misc_feature (1)..(25): SEQ ID NO: 5860; WAN024ERW_at; Start 92; Stop 116
cacgtccaattttgtctctgaaaac

SEQ ID NO: 179989 - DNA, 25 bp, Artificial
  probe
  misc_feature (1)..(25): SEQ ID NO: 5860; WAN024ERW_at; Start 77; Stop 101
tacgatcatggcgatcacgtccaat

SEQ ID NO: 179990 - DNA, 25 bp, Artificial
  probe
  misc_feature (1)..(25): SEQ ID NO: 5860; WAN024ERW_at; Start 98; Stop 122
caattttgtctctgaaaacaagttc

SEQ ID NO: 179991 - DNA, 25 bp, Artificial
  probe
  misc_feature (1)..(25): SEQ ID NO: 5860; WAN024ERW_at; Start 80; Stop 104
gatcatggcgatcacgtccaatttt

SEQ ID NO: 179992 - DNA, 25 bp, Artificial
  probe
  misc_feature (1)..(25): SEQ ID NO: 5860; WAN024ERW_at; Start 167; Stop 191
aaatctcttttttctccaataagcg

SEQ ID NO: 179993 - DNA, 25 bp, Artificial
  probe
  misc_feature (1)..(25): SEQ ID NO: 5860; WAN024ERW_at; Start 194; Stop 218
tgagaatgggcaggataaaaggatt

SEQ ID NO: 179994 - DNA, 25 bp, Artificial
  probe
  misc_feature (1)..(25): SEQ ID NO: 5860; WAN024ERW_at; Start 200; Stop 224
tgggcaggataaaaggatttttggc

SEQ ID NO: 179995 - DNA, 25 bp, Artificial
  probe
  misc_feature (1)..(25): SEQ ID NO: 5860; WAN024ERW_at; Start 116; Stop 140
caagttcttttctgttgatatttcc

SEQ ID NO: 179996 - DNA, 25 bp, Artificial
  probe
  misc_feature (1)..(25): SEQ ID NO: 5860; WAN024ERW_at; Start 147; Stop 171
tagagcccaatattctctagaaatc

SEQ ID NO: 179997 - DNA, 25 bp, Artificial
  probe
  misc_feature (1)..(25): SEQ ID NO: 5860; WAN024ERW_at; Start 66; Stop 90
tattctttttctacgatcatggcga

SEQ ID NO: 179998 - DNA, 25 bp, Artificial
  probe
  misc_feature (1)..(25): SEQ ID NO: 5860; WAN024ERW_at; Start 89; Stop 113
gatcacgtccaattttgtctctgaa

SEQ ID NO: 179999 - DNA, 25 bp, Artificial
  probe
  misc_feature (1)..(25): SEQ ID NO: 5860; WAN024ERW_at; Start 173; Stop 197
cttttttctccaataagcgattgag

SEQ ID NO: 180000 - DNA, 25 bp, Artificial
  probe
  misc_feature (1)..(25): SEQ ID NO: 5860; WAN024ERW_at; Start 22; Stop 46
ctgcttacatgcgtttcagcatatt

SEQ ID NO: 180001 - DNA, 25 bp, Artificial
  probe
  misc_feature (1)..(25): SEQ ID NO: 5860; WAN024ERW_at; Start 57; Stop 81
tgcatcaactattctttttctacga

SEQ ID NO: 180002 - DNA, 25 bp, Artificial
  probe
  misc_feature (1)..(25): SEQ ID NO: 5860; WAN024ERW_at; Start 186; Stop 210
taagcgattgagaatgggcaggata

SEQ ID NO: 180003 - DNA, 25 bp, Artificial
  probe
  misc_feature (1)..(25): SEQ ID NO: 5860; WAN024ERW_at; Start 85; Stop 109
tggcgatcacgtccaattttgtctc

SEQ ID NO: 180004 - DNA, 25 bp, Artificial
  probe
  misc_feature (1)..(25): SEQ ID NO: 5860; WAN024ERW_at; Start 10; Stop 34
aattgctttaatctgcttacatgcg

SEQ ID NO: 180005 - DNA, 25 bp, Artificial
  probe
  misc_feature (1)..(25): SEQ ID NO: 5860; WAN024ERW_at; Start 132; Stop 156
gatatttccatcaactagagcccaa

SEQ ID NO: 180006 - DNA, 25 bp, Artificial
  probe
  misc_feature (1)..(25): SEQ ID NO: 5860; WAN024ERW_at; Start 240; Stop 264
actggtttccatgtccagacgatga

SEQ ID NO: 180007 - DNA, 25 bp, Artificial
  probe
  misc_feature (1)..(25): SEQ ID NO: 5860; WAN024ERW_at; Start 220; Stop 244
ttggcaaagagaactaagccactgg

SEQ ID NO: 180008 - DNA, 25 bp, Artificial
  probe
  misc_feature (1)..(25): SEQ ID NO: 5860; WAN024ERW_at; Start 183; Stop 207
caataagcgattgagaatgggcagg

SEQ ID NO: 180009 - DNA, 25 bp, Artificial
  probe
  misc_feature (1)..(25): SEQ ID NO: 5860; WAN024ERW_at; Start 189; Stop 213
gcgattgagaatgggcaggataaaa

SEQ ID NO: 180010 - DNA, 25 bp, Artificial
  probe
  misc_feature (1)..(25): SEQ ID NO: 5860; WAN024ERW_at; Start 237; Stop 261
gccactggtttccatgtccagacga

SEQ ID NO: 180011 - DNA, 25 bp, Artificial
  probe
  misc_feature (1)..(25): SEQ ID NO: 5860; WAN024ERW_at; Start 2; Stop 26
tgtttgagaattgctttaatctgct

SEQ ID NO: 180012 - DNA, 25 bp, Artificial
  probe
  misc_feature (1)..(25): SEQ ID NO: 5860; WAN024ERW_at; Start 137; Stop 161
ttccatcaactagagcccaatattc

SEQ ID NO: 180013 - DNA, 25 bp, Artificial
  probe
  misc_feature (1)..(25): SEQ ID NO: 5860; WAN024ERW_at; Start 180; Stop 204
ctccaataagcgattgagaatgggc

SEQ ID NO: 180014 - DNA, 25 bp, Artificial
  probe
  misc_feature (1)..(25): SEQ ID NO: 1930; WAN024ERX_at; Start 658; Stop 682
tgcaagctaaagacagggcgaaccc

SEQ ID NO: 180015 - DNA, 25 bp, Artificial
  probe
  misc_feature (1)..(25): SEQ ID NO: 1930; WAN024ERX_at; Start 169; Stop 193
gatgtttgccagttgacttttgacg

SEQ ID NO: 180016 - DNA, 25 bp, Artificial
  probe
  misc_feature (1)..(25): SEQ ID NO: 1930; WAN024ERX_at; Start 390; Stop 414
catggaaaccagtggcttagttctc

SEQ ID NO: 180017 - DNA, 25 bp, Artificial
  probe
  misc_feature (1)..(25): SEQ ID NO: 1930; WAN024ERX_at; Start 63; Stop 87
ggaacaactcctcatccctagaaaa

SEQ ID NO: 180018 - DNA, 25 bp, Artificial
  probe
  misc_feature (1)..(25): SEQ ID NO: 1930; WAN024ERX_at; Start 49; Stop 73
aagcaattacttgaggaacaactcc

SEQ ID NO: 180019 - DNA, 25 bp, Artificial
  probe
  misc_feature (1)..(25): SEQ ID NO: 1930; WAN024ERX_at; Start 365; Stop 389
cctgctatgtcgttcatcgtctgga

SEQ ID NO: 180020 - DNA, 25 bp, Artificial
  probe
  misc_feature (1)..(25): SEQ ID NO: 1930; WAN024ERX_at; Start 305; Stop 329
atggtaatcaaccaaacgaaattgc

SEQ ID NO: 180021 - DNA, 25 bp, Artificial
  probe
  misc_feature (1)..(25): SEQ ID NO: 1930; WAN024ERX_at; Start 336; Stop 360
taaccatgtcagtacctatgttggc

SEQ ID NO: 180022 - DNA, 25 bp, Artificial
  probe
  misc_feature (1)..(25): SEQ ID NO: 1930; WAN024ERX_at; Start 424; Stop 448
aatccttttatcctgcccattctca

SEQ ID NO: 180023 - DNA, 25 bp, Artificial
  probe
  misc_feature (1)..(25): SEQ ID NO: 1930; WAN024ERX_at; Start 677; Stop 701
gaacccatcagattcgtgtgcacct

SEQ ID NO: 180024 - DNA, 25 bp, Artificial
  probe
  misc_feature (1)..(25): SEQ ID NO: 1930; WAN024ERX_at; Start 561; Stop 585
tcgtagaaaaagaatagttgatgca

SEQ ID NO: 180025 - DNA, 25 bp, Artificial
  probe
  misc_feature (1)..(25): SEQ ID NO: 1930; WAN024ERX_at; Start 469; Stop 493
gagatttctagagaatattgggctc

SEQ ID NO: 180026 - DNA, 25 bp, Artificial
  probe
  misc_feature (1)..(25): SEQ ID NO: 1930; WAN024ERX_at; Start 627; Stop 651
gcaattctcaaacaagacttccttg

SEQ ID NO: 180027 - DNA, 25 bp, Artificial
  probe
  misc_feature (1)..(25): SEQ ID NO: 1930; WAN024ERX_at; Start 545; Stop 569
gacgtgatcgccatgatcgtagaaa

SEQ ID NO: 180028 - DNA, 25 bp, Artificial
  probe
  misc_feature (1)..(25): SEQ ID NO: 1930; WAN024ERX_at; Start 438; Stop 462
gcccattctcaatcgcttattggag

SEQ ID NO: 180029 - DNA, 25 bp, Artificial
  probe
  misc_feature (1)..(25): SEQ ID NO: 1930; WAN024ERX_at; Start 452; Stop 476
gcttattggagaaaaaagagatttc

SEQ ID NO: 180030 - DNA, 25 bp, Artificial
  probe
  misc_feature (1)..(25): SEQ ID NO: 1930; WAN024ERX_at; Start 2; Stop 26
tgcaattcacatttacattacccgc

SEQ ID NO: 180031 - DNA, 25 bp, Artificial
  probe
  misc_feature (1)..(25): SEQ ID NO: 1930; WAN024ERX_at; Start 499; Stop 523
gatggaaatatcaacagaaaagaac

SEQ ID NO: 180032 - DNA, 25 bp, Artificial
  probe
  misc_feature (1)..(25): SEQ ID NO: 1930; WAN024ERX_at; Start 481; Stop 505
gaatattgggctctagttgatggaa

SEQ ID NO: 180033 - DNA, 25 bp, Artificial
  probe
  misc_feature (1)..(25): SEQ ID NO: 1930; WAN024ERX_at; Start 225; Stop 249
gggcaacccagacttagtgcaggaa

SEQ ID NO: 180034 - DNA, 25 bp, Artificial
  probe
  misc_feature (1)..(25): SEQ ID NO: 1930; WAN024ERX_at; Start 378; Stop 402
tcatcgtctggacatggaaaccagt

SEQ ID NO: 180035 - DNA, 25 bp, Artificial
  probe
  misc_feature (1)..(25): SEQ ID NO: 1930; WAN024ERX_at; Start 352; Stop 376
tatgttggccaaacctgctatgtcg

SEQ ID NO: 180036 - DNA, 25 bp, Artificial
  probe
  misc_feature (1)..(25): SEQ ID NO: 1930; WAN024ERX_at; Start 269; Stop 293
tgattattgtaaacaaaccagaggg

SEQ ID NO: 180037 - DNA, 25 bp, Artificial
  probe
  misc_feature (1)..(25): SEQ ID NO: 1930; WAN024ERX_at; Start 293; Stop 317
ggatgaaaacgcatggtaatcaacc

SEQ ID NO: 180038 - DNA, 25 bp, Artificial
  probe
  misc_feature (1)..(25): SEQ ID NO: 1930; WAN024ERX_at; Start 239; Stop 263
tagtgcaggaagtttatcaagatca

SEQ ID NO: 180039 - DNA, 25 bp, Artificial
  probe
  misc_feature (1)..(25): SEQ ID NO: 1930; WAN024ERX_at; Start 665; Stop 689
taaagacagggcgaacccatcagat

SEQ ID NO: 180040 - DNA, 25 bp, Artificial
  probe
  misc_feature (1)..(25): SEQ ID NO: 1930; WAN024ERX_at; Start 74; Stop 98
tcatccctagaaaaatccgtcattt

SEQ ID NO: 180041 - DNA, 25 bp, Artificial
  probe
  misc_feature (1)..(25): SEQ ID NO: 1930; WAN024ERX_at; Start 730; Stop 754
gaccctctctataatagtaaatcaa

SEQ ID NO: 180042 - DNA, 25 bp, Artificial
  probe
  misc_feature (1)..(25): SEQ ID NO: 1930; WAN024ERX_at; Start 176; Stop 200
gccagttgacttttgacgaggaaga

SEQ ID NO: 180043 - DNA, 25 bp, Artificial
  probe
  misc_feature (1)..(25): SEQ ID NO: 1930; WAN024ERX_at; Start 534; Stop 558
agacaaaattggacgtgatcgccat

SEQ ID NO: 180044 - DNA, 25 bp, Artificial
  probe
  misc_feature (1)..(25): SEQ ID NO: 1930; WAN024ERX_at; Start 596; Stop 620
aatatgctgaaacgcatgtaagcag

SEQ ID NO: 180045 - DNA, 25 bp, Artificial
  probe
  misc_feature (1)..(25): SEQ ID NO: 1930; WAN024ERX_at; Start 155; Stop 179
tcgtaaatcctggagatgtttgcca

SEQ ID NO: 180046 - DNA, 25 bp, Artificial
  probe
  misc_feature (1)..(25): SEQ ID NO: 1930; WAN024ERX_at; Start 826; Stop 850
ttcactaccctttcaaatacatttg

SEQ ID NO: 180047 - DNA, 25 bp, Artificial
  probe
  misc_feature (1)..(25): SEQ ID NO: 1930; WAN024ERX_at; Start 403; Stop 427
ggcttagttctctttgccaaaaatc

SEQ ID NO: 180048 - DNA, 25 bp, Artificial
  probe
  misc_feature (1)..(25): SEQ ID NO: 901; WAN024ERY_at; Start 471; Stop 495
taacaaagtgaaaatgattatctct

SEQ ID NO: 180049 - DNA, 25 bp, Artificial
  probe
  misc_feature (1)..(25): SEQ ID NO: 901; WAN024ERY_at; Start 78; Stop 102
gaaagaaaatctattacaacgtgca

SEQ ID NO: 180050 - DNA, 25 bp, Artificial
  probe
  misc_feature (1)..(25): SEQ ID NO: 901; WAN024ERY_at; Start 188; Stop 212
aagtagaagaaaatcgctttccagg

SEQ ID NO: 180051 - DNA, 25 bp, Artificial
  probe
  misc_feature (1)..(25): SEQ ID NO: 901; WAN024ERY_at; Start 502; Stop 526
ggtaatgacacagttgcagaagtaa

SEQ ID NO: 180052 - DNA, 25 bp, Artificial
  probe
  misc_feature (1)..(25): SEQ ID NO: 901; WAN024ERY_at; Start 293; Stop 317
gatcacacgggaacagatcaaaacc

SEQ ID NO: 180053 - DNA, 25 bp, Artificial
  probe
  misc_feature (1)..(25): SEQ ID NO: 901; WAN024ERY_at; Start 126; Stop 150
tattctacgcgttgaaattccaaca

SEQ ID NO: 180054 - DNA, 25 bp, Artificial
  probe
  misc_feature (1)..(25): SEQ ID NO: 901; WAN024ERY_at; Start 303; Stop 327
gaacagatcaaaaccaactccatta

SEQ ID NO: 180055 - DNA, 25 bp, Artificial
  probe
  misc_feature (1)..(25): SEQ ID NO: 901; WAN024ERY_at; Start 346; Stop 370
gacattttggtatctatgggacaaa

SEQ ID NO: 180056 - DNA, 25 bp, Artificial
  probe
  misc_feature (1)..(25): SEQ ID NO: 901; WAN024ERY_at; Start 47; Stop 71
tacaaacttattctggttatgaaaa

SEQ ID NO: 180057 - DNA, 25 bp, Artificial
  probe
  misc_feature (1)..(25): SEQ ID NO: 901; WAN024ERY_at; Start 64; Stop 88
tatgaaaataaggtgaaagaaaatc

SEQ ID NO: 180058 - DNA, 25 bp, Artificial
  probe
  misc_feature (1)..(25): SEQ ID NO: 901; WAN024ERY_at; Start 244; Stop 268
gaagcttggtttgttgttcgaaaca

SEQ ID NO: 180059 - DNA, 25 bp, Artificial
  probe
  misc_feature (1)..(25): SEQ ID NO: 901; WAN024ERY_at; Start 407; Stop 431
aaactgtacgtattattgatggtgc

SEQ ID NO: 180060 - DNA, 25 bp, Artificial
  probe
  misc_feature (1)..(25): SEQ ID NO: 901; WAN024ERY_at; Start 97; Stop 121
cgtgcacaaacctacaatatgttgg

SEQ ID NO: 180061 - DNA, 25 bp, Artificial
  probe
  misc_feature (1)..(25): SEQ ID NO: 901; WAN024ERY_at; Start 424; Stop 448
gatggtgcttttgcagactacactg

SEQ ID NO: 180062 - DNA, 25 bp, Artificial
  probe
  misc_feature (1)..(25): SEQ ID NO: 901; WAN024ERY_at; Start 354; Stop 378
ggtatctatgggacaaactgttcaa

SEQ ID NO: 180063 - DNA, 25 bp, Artificial
  probe
  misc_feature (1)..(25): SEQ ID NO: 901; WAN024ERY_at; Start 139; Stop 163
gaaattccaacacaaacagtgcaag

SEQ ID NO: 180064 - DNA, 25 bp, Artificial
  probe
  misc_feature (1)..(25): SEQ ID NO: 901; WAN024ERY_at; Start 437; Stop 461
cagactacactggtaagattacaga

SEQ ID NO: 180065 - DNA, 25 bp, Artificial
  probe
  misc_feature (1)..(25): SEQ ID NO: 901; WAN024ERY_at; Start 203; Stop 227
gctttccaggttatgttcttgtaga

SEQ ID NO: 180066 - DNA, 25 bp, Artificial
  probe
  misc_feature (1)..(25): SEQ ID NO: 901; WAN024ERY_at; Start 230; Stop 254
tggtcatgacagatgaagcttggtt

SEQ ID NO: 180067 - DNA, 25 bp, Artificial
  probe
  misc_feature (1)..(25): SEQ ID NO: 901; WAN024ERY_at; Start 489; Stop 513
tatctctatgtttggtaatgacaca

SEQ ID NO: 180068 - DNA, 25 bp, Artificial
  probe
  misc_feature (1)..(25): SEQ ID NO: 901; WAN024ERY_at; Start 148; Stop 172
acacaaacagtgcaagttgaaaaaa

SEQ ID NO: 180069 - DNA, 25 bp, Artificial
  probe
  misc_feature (1)..(25): SEQ ID NO: 901; WAN024ERY_at; Start 530; Stop 554
taaaccaaatcgcagaattataact

SEQ ID NO: 180070 - DNA, 25 bp, Artificial
  probe
  misc_feature (1)..(25): SEQ ID NO: 901; WAN024ERY_at; Start 456; Stop 480
tacagaaattgataataacaaagtg

SEQ ID NO: 180071 - DNA, 25 bp, Artificial
  probe
  misc_feature (1)..(25): SEQ ID NO: 901; WAN024ERY_at; Start 279; Stop 303
tacaggatttgtcggatcacacggg

SEQ ID NO: 180072 - DNA, 25 bp, Artificial
  probe
  misc_feature (1)..(25): SEQ ID NO: 901; WAN024ERY_at; Start 116; Stop 140
tgttggataatattctacgcgttga

SEQ ID NO: 180073 - DNA, 25 bp, Artificial
  probe
  misc_feature (1)..(25): SEQ ID NO: 901; WAN024ERY_at; Start 174; Stop 198
tggaaagagaaaagaagtagaagaa

SEQ ID NO: 180074 - DNA, 25 bp, Artificial
  probe
  misc_feature (1)..(25): SEQ ID NO: 901; WAN024ERY_at; Start 284; Stop 308
gatttgtcggatcacacgggaacag

SEQ ID NO: 180075 - DNA, 25 bp, Artificial
  probe
  misc_feature (1)..(25): SEQ ID NO: 901; WAN024ERY_at; Start 216; Stop 240
tgttcttgtagaaatggtcatgaca

SEQ ID NO: 180076 - DNA, 25 bp, Artificial
  probe
  misc_feature (1)..(25): SEQ ID NO: 901; WAN024ERY_at; Start 260; Stop 284
ttcgaaacacaccaaatgttacagg

SEQ ID NO: 180077 - DNA, 25 bp, Artificial
  probe
  misc_feature (1)..(25): SEQ ID NO: 901; WAN024ERY_at; Start 385; Stop 409
gatttcgatgttgagattggtcaaa

SEQ ID NO: 180078 - DNA, 25 bp, Artificial
  probe
  misc_feature (1)..(25): SEQ ID NO: 901; WAN024ERY_at; Start 367; Stop 391
caaactgttcaagaatttgatttcg

SEQ ID NO: 180079 - DNA, 25 bp, Artificial
  probe
  misc_feature (1)..(25): SEQ ID NO: 901; WAN024ERY_at; Start 320; Stop 344
ctccattattggaacaagaaattcg

SEQ ID NO: 180080 - DNA, 25 bp, Artificial
  probe
  misc_feature (1)..(25): SEQ ID NO: 901; WAN024ERY_at; Start 87; Stop 111
tctattacaacgtgcacaaacctac

SEQ ID NO: 180081 - DNA, 25 bp, Artificial
  probe
  misc_feature (1)..(25): SEQ ID NO: 901; WAN024ERY_at; Start 397; Stop 421
gagattggtcaaactgtacgtatta

SEQ ID NO: 180082 - DNA, 25 bp, Artificial
  probe
  misc_feature (1)..(25): SEQ ID NO: 7239; WAN024ERZ_at; Start 57; Stop 81
tggaccaattaaggcaacacattca

SEQ ID NO: 180083 - DNA, 25 bp, Artificial
  probe
  misc_feature (1)..(25): SEQ ID NO: 7239; WAN024ERZ_at; Start 255; Stop 279
gaagcaaggcttgatcaaaccaatc

SEQ ID NO: 180084 - DNA, 25 bp, Artificial
  probe
  misc_feature (1)..(25): SEQ ID NO: 7239; WAN024ERZ_at; Start 33; Stop 57
gagtgttgtctttccggcaccattt

SEQ ID NO: 180085 - DNA, 25 bp, Artificial
  probe
  misc_feature (1)..(25): SEQ ID NO: 7239; WAN024ERZ_at; Start 13; Stop 37
tctccaagcaaacaatctaagagtg

SEQ ID NO: 180086 - DNA, 25 bp, Artificial
  probe
  misc_feature (1)..(25): SEQ ID NO: 7239; WAN024ERZ_at; Start 149; Stop 173
caactttaaccacagtcatgagact

SEQ ID NO: 180087 - DNA, 25 bp, Artificial
  probe
  misc_feature (1)..(25): SEQ ID NO: 7239; WAN024ERZ_at; Start 163; Stop 187
gtcatgagactctcctttcaaccac

SEQ ID NO: 180088 - DNA, 25 bp, Artificial
  probe
  misc_feature (1)..(25): SEQ ID NO: 7239; WAN024ERZ_at; Start 66; Stop 90
taaggcaacacattcaccatcgttg

SEQ ID NO: 180089 - DNA, 25 bp, Artificial
  probe
  misc_feature (1)..(25): SEQ ID NO: 7239; WAN024ERZ_at; Start 159; Stop 183
cacagtcatgagactctcctttcaa

SEQ ID NO: 180090 - DNA, 25 bp, Artificial
  probe
  misc_feature (1)..(25): SEQ ID NO: 7239; WAN024ERZ_at; Start 59; Stop 83
gaccaattaaggcaacacattcacc

SEQ ID NO: 180091 - DNA, 25 bp, Artificial
  probe
  misc_feature (1)..(25): SEQ ID NO: 7239; WAN024ERZ_at; Start 86; Stop 110
cgttgatttcaaaggagatgttccg

SEQ ID NO: 180092 - DNA, 25 bp, Artificial
  probe
  misc_feature (1)..(25): SEQ ID NO: 7239; WAN024ERZ_at; Start 258; Stop 282
gcaaggcttgatcaaaccaatcagt

SEQ ID NO: 180093 - DNA, 25 bp, Artificial
  probe
  misc_feature (1)..(25): SEQ ID NO: 7239; WAN024ERZ_at; Start 80; Stop 104
caccatcgttgatttcaaaggagat

SEQ ID NO: 180094 - DNA, 25 bp, Artificial
  probe
  misc_feature (1)..(25): SEQ ID NO: 7239; WAN024ERZ_at; Start 267; Stop 291
gatcaaaccaatcagtaaacatttc

SEQ ID NO: 180095 - DNA, 25 bp, Artificial
  probe
  misc_feature (1)..(25): SEQ ID NO: 7239; WAN024ERZ_at; Start 3; Stop 27
gaccagtttatctccaagcaaacaa

SEQ ID NO: 180096 - DNA, 25 bp, Artificial
  probe
  misc_feature (1)..(25): SEQ ID NO: 7239; WAN024ERZ_at; Start 30; Stop 54
taagagtgttgtctttccggcacca

SEQ ID NO: 180097 - DNA, 25 bp, Artificial
  probe
  misc_feature (1)..(25): SEQ ID NO: 7239; WAN024ERZ_at; Start 95; Stop 119
caaaggagatgttccgcaaaatttc

SEQ ID NO: 180098 - DNA, 25 bp, Artificial
  probe
  misc_feature (1)..(25): SEQ ID NO: 7239; WAN024ERZ_at; Start 53; Stop 77
catttggaccaattaaggcaacaca

SEQ ID NO: 180099 - DNA, 25 bp, Artificial
  probe
  misc_feature (1)..(25): SEQ ID NO: 7239; WAN024ERZ_at; Start 1; Stop 25
gtgaccagtttatctccaagcaaac

SEQ ID NO: 180100 - DNA, 25 bp, Artificial
  probe
  misc_feature (1)..(25): SEQ ID NO: 7239; WAN024ERZ_at; Start 9; Stop 33
tttatctccaagcaaacaatctaag

SEQ ID NO: 180101 - DNA, 25 bp, Artificial
  probe
  misc_feature (1)..(25): SEQ ID NO: 7239; WAN024ERZ_at; Start 89; Stop 113
tgatttcaaaggagatgttccgcaa

SEQ ID NO: 180102 - DNA, 25 bp, Artificial
  probe
  misc_feature (1)..(25): SEQ ID NO: 7239; WAN024ERZ_at; Start 153; Stop 177
tttaaccacagtcatgagactctcc

SEQ ID NO: 180103 - DNA, 25 bp, Artificial
  probe
  misc_feature (1)..(25): SEQ ID NO: 7239; WAN024ERZ_at; Start 25; Stop 49
caatctaagagtgttgtctttccgg

SEQ ID NO: 180104 - DNA, 25 bp, Artificial
  probe
  misc_feature (1)..(25): SEQ ID NO: 7239; WAN024ERZ_at; Start 139; Stop 163
ctcaatttttcaactttaaccacag

SEQ ID NO: 180105 - DNA, 25 bp, Artificial
  probe
  misc_feature (1)..(25): SEQ ID NO: 7239; WAN024ERZ_at; Start 48; Stop 72
ggcaccatttggaccaattaaggca

SEQ ID NO: 180106 - DNA, 25 bp, Artificial
  probe
  misc_feature (1)..(25): SEQ ID NO: 7239; WAN024ERZ_at; Start 76; Stop 100
cattcaccatcgttgatttcaaagg

SEQ ID NO: 180107 - DNA, 25 bp, Artificial
  probe
  misc_feature (1)..(25): SEQ ID NO: 7239; WAN024ERZ_at; Start 102; Stop 126
gatgttccgcaaaatttccttgtct

SEQ ID NO: 180108 - DNA, 25 bp, Artificial
  probe
  misc_feature (1)..(25): SEQ ID NO: 7239; WAN024ERZ_at; Start 41; Stop 65
tctttccggcaccatttggaccaat

SEQ ID NO: 180109 - DNA, 25 bp, Artificial
  probe
  misc_feature (1)..(25): SEQ ID NO: 7239; WAN024ERZ_at; Start 39; Stop 63
tgtctttccggcaccatttggacca

SEQ ID NO: 180110 - DNA, 25 bp, Artificial
  probe
  misc_feature (1)..(25): SEQ ID NO: 7239; WAN024ERZ_at; Start 63; Stop 87
aattaaggcaacacattcaccatcg

SEQ ID NO: 180111 - DNA, 25 bp, Artificial
  probe
  misc_feature (1)..(25): SEQ ID NO: 7239; WAN024ERZ_at; Start 45; Stop 69
tccggcaccatttggaccaattaag

SEQ ID NO: 180112 - DNA, 25 bp, Artificial
  probe
  misc_feature (1)..(25): SEQ ID NO: 7239; WAN024ERZ_at; Start 262; Stop 286
ggcttgatcaaaccaatcagtaaac

SEQ ID NO: 180113 - DNA, 25 bp, Artificial
  probe
  misc_feature (1)..(25): SEQ ID NO: 7239; WAN024ERZ_at; Start 69; Stop 93
ggcaacacattcaccatcgttgatt

SEQ ID NO: 180114 - DNA, 25 bp, Artificial
  probe
  misc_feature (1)..(25): SEQ ID NO: 7239; WAN024ERZ_at; Start 16; Stop 40
ccaagcaaacaatctaagagtgttg

SEQ ID NO: 180115 - DNA, 25 bp, Artificial
  probe
  misc_feature (1)..(25): SEQ ID NO: 7239; WAN024ERZ_at; Start 99; Stop 123
ggagatgttccgcaaaatttccttg

SEQ ID NO: 180116 - DNA, 25 bp, Artificial
  probe
  misc_feature (1)..(25): SEQ ID NO: 7640; WAN024ES2_at; Start 64; Stop 88
gccttgcccttgatgtttttattta

SEQ ID NO: 180117 - DNA, 25 bp, Artificial
  probe
  misc_feature (1)..(25): SEQ ID NO: 7640; WAN024ES2_at; Start 7; Stop 31
ccaatcaaggcgacgcattcacctt

SEQ ID NO: 180118 - DNA, 25 bp, Artificial
  probe
  misc_feature (1)..(25): SEQ ID NO: 7640; WAN024ES2_at; Start 57; Stop 81
caaaatagccttgcccttgatgttt

SEQ ID NO: 180119 - DNA, 25 bp, Artificial
  probe
  misc_feature (1)..(25): SEQ ID NO: 7640; WAN024ES2_at; Start 90; Stop 114
gctttctaccttaatcatattcatg

SEQ ID NO: 180120 - DNA, 25 bp, Artificial
  probe
  misc_feature (1)..(25): SEQ ID NO: 7640; WAN024ES2_at; Start 105; Stop 129
catattcatgatattctcctttcaa

SEQ ID NO: 180121 - DNA, 25 bp, Artificial
  probe
  misc_feature (1)..(25): SEQ ID NO: 7640; WAN024ES2_at; Start 31; Stop 55
tcagctacctcaaaggaaataccct

SEQ ID NO: 180122 - DNA, 25 bp, Artificial
  probe
  misc_feature (1)..(25): SEQ ID NO: 7640; WAN024ES2_at; Start 2; Stop 26
tgggcccaatcaaggcgacgcattc

SEQ ID NO: 180123 - DNA, 25 bp, Artificial
  probe
  misc_feature (1)..(25): SEQ ID NO: 7640; WAN024ES2_at; Start 21; Stop 45
gcattcaccttcagctacctcaaag

SEQ ID NO: 180124 - DNA, 25 bp, Artificial
  probe
  misc_feature (1)..(25): SEQ ID NO: 7640; WAN024ES2_at; Start 54; Stop 78
cttcaaaatagccttgcccttgatg

SEQ ID NO: 180125 - DNA, 25 bp, Artificial
  probe
  misc_feature (1)..(25): SEQ ID NO: 7640; WAN024ES2_at; Start 26; Stop 50
caccttcagctacctcaaaggaaat

SEQ ID NO: 180126 - DNA, 25 bp, Artificial
  probe
  misc_feature (1)..(25): SEQ ID NO: 7640; WAN024ES2_at; Start 68; Stop 92
tgcccttgatgtttttatttaggct

SEQ ID NO: 180127 - DNA, 25 bp, Artificial
  probe
  misc_feature (1)..(25): SEQ ID NO: 7640; WAN024ES2_at; Start 203; Stop 227
agcaaggtttggtcaaaccaacctg

SEQ ID NO: 180128 - DNA, 25 bp, Artificial
  probe
  misc_feature (1)..(25): SEQ ID NO: 7640; WAN024ES2_at; Start 62; Stop 86
tagccttgcccttgatgtttttatt

SEQ ID NO: 180129 - DNA, 25 bp, Artificial
  probe
  misc_feature (1)..(25): SEQ ID NO: 7640; WAN024ES2_at; Start 51; Stop 75
acccttcaaaatagccttgcccttg

SEQ ID NO: 180130 - DNA, 25 bp, Artificial
  probe
  misc_feature (1)..(25): SEQ ID NO: 7640; WAN024ES2_at; Start 3; Stop 27
gggcccaatcaaggcgacgcattca

SEQ ID NO: 180131 - DNA, 25 bp, Artificial
  probe
  misc_feature (1)..(25): SEQ ID NO: 7640; WAN024ES2_at; Start 14; Stop 38
aggcgacgcattcaccttcagctac

SEQ ID NO: 180132 - DNA, 25 bp, Artificial
  probe
  misc_feature (1)..(25): SEQ ID NO: 7640; WAN024ES2_at; Start 10; Stop 34
atcaaggcgacgcattcaccttcag

SEQ ID NO: 180133 - DNA, 25 bp, Artificial
  probe
  misc_feature (1)..(25): SEQ ID NO: 7640; WAN024ES2_at; Start 25; Stop 49
tcaccttcagctacctcaaaggaaa

SEQ ID NO: 180134 - DNA, 25 bp, Artificial
  probe
  misc_feature (1)..(25): SEQ ID NO: 7640; WAN024ES2_at; Start 11; Stop 35
tcaaggcgacgcattcaccttcagc

SEQ ID NO: 180135 - DNA, 25 bp, Artificial
  probe
  misc_feature (1)..(25): SEQ ID NO: 7640; WAN024ES2_at; Start 13; Stop 37
aaggcgacgcattcaccttcagcta

SEQ ID NO: 180136 - DNA, 25 bp, Artificial
  probe
  misc_feature (1)..(25): SEQ ID NO: 7640; WAN024ES2_at; Start 46; Stop 70
gaaatacccttcaaaatagccttgc

SEQ ID NO: 180137 - DNA, 25 bp, Artificial
  probe
  misc_feature (1)..(25): SEQ ID NO: 7640; WAN024ES2_at; Start 49; Stop 73
atacccttcaaaatagccttgccct

SEQ ID NO: 180138 - DNA, 25 bp, Artificial
  probe
  misc_feature (1)..(25): SEQ ID NO: 7640; WAN024ES2_at; Start 1; Stop 25
ttgggcccaatcaaggcgacgcatt

SEQ ID NO: 180139 - DNA, 25 bp, Artificial
  probe
  misc_feature (1)..(25): SEQ ID NO: 7640; WAN024ES2_at; Start 34; Stop 58
gctacctcaaaggaaatacccttca

SEQ ID NO: 180140 - DNA, 25 bp, Artificial
  probe
  misc_feature (1)..(25): SEQ ID NO: 7640; WAN024ES2_at; Start 56; Stop 80
tcaaaatagccttgcccttgatgtt

SEQ ID NO: 180141 - DNA, 25 bp, Artificial
  probe
  misc_feature (1)..(25): SEQ ID NO: 7640; WAN024ES2_at; Start 28; Stop 52
ccttcagctacctcaaaggaaatac

SEQ ID NO: 180142 - DNA, 25 bp, Artificial
  probe
  misc_feature (1)..(25): SEQ ID NO: 7640; WAN024ES2_at; Start 8; Stop 32
caatcaaggcgacgcattcaccttc

SEQ ID NO: 180143 - DNA, 25 bp, Artificial
  probe
  misc_feature (1)..(25): SEQ ID NO: 7640; WAN024ES2_at; Start 109; Stop 133
ttcatgatattctcctttcaaccac

SEQ ID NO: 180144 - DNA, 25 bp, Artificial
  probe
  misc_feature (1)..(25): SEQ ID NO: 7640; WAN024ES2_at; Start 23; Stop 47
attcaccttcagctacctcaaagga

SEQ ID NO: 180145 - DNA, 25 bp, Artificial
  probe
  misc_feature (1)..(25): SEQ ID NO: 7640; WAN024ES2_at; Start 30; Stop 54
ttcagctacctcaaaggaaataccc

SEQ ID NO: 180146 - DNA, 25 bp, Artificial
  probe
  misc_feature (1)..(25): SEQ ID NO: 7640; WAN024ES2_at; Start 87; Stop 111
taggctttctaccttaatcatattc

SEQ ID NO: 180147 - DNA, 25 bp, Artificial
  probe
  misc_feature (1)..(25): SEQ ID NO: 7640; WAN024ES2_at; Start 60; Stop 84
aatagccttgcccttgatgttttta

SEQ ID NO: 180148 - DNA, 25 bp, Artificial
  probe
  misc_feature (1)..(25): SEQ ID NO: 7640; WAN024ES2_at; Start 12; Stop 36
caaggcgacgcattcaccttcagct

SEQ ID NO: 180149 - DNA, 25 bp, Artificial
  probe
  misc_feature (1)..(25): SEQ ID NO: 7640; WAN024ES2_at; Start 74; Stop 98
tgatgtttttatttaggctttctac

SEQ ID NO: 180150 - DNA, 25 bp, Artificial
  probe
  misc_feature (1)..(25): SEQ ID NO: 1430; WAN024ES3_at; Start 105; Stop 129
tggtccaaatggtgccggaaagaca

SEQ ID NO: 180151 - DNA, 25 bp, Artificial
  probe
  misc_feature (1)..(25): SEQ ID NO: 1430; WAN024ES3_at; Start 298; Stop 322
cgtatctatccaaatcctttgagca

SEQ ID NO: 180152 - DNA, 25 bp, Artificial
  probe
  misc_feature (1)..(25): SEQ ID NO: 1430; WAN024ES3_at; Start 131; Stop 155
cactcttagattgtttgcttggaga

SEQ ID NO: 180153 - DNA, 25 bp, Artificial
  probe
  misc_feature (1)..(25): SEQ ID NO: 1430; WAN024ES3_at; Start 694; Stop 718
gaagtcgtagagcagtcaaatttgg

SEQ ID NO: 180154 - DNA, 25 bp, Artificial
  probe
  misc_feature (1)..(25): SEQ ID NO: 1430; WAN024ES3_at; Start 115; Stop 139
ggtgccggaaagacaacactcttag

SEQ ID NO: 180155 - DNA, 25 bp, Artificial
  probe
  misc_feature (1)..(25): SEQ ID NO: 1430; WAN024ES3_at; Start 208; Stop 232
tctaagttagactatactagggctt

SEQ ID NO: 180156 - DNA, 25 bp, Artificial
  probe
  misc_feature (1)..(25): SEQ ID NO: 1430; WAN024ES3_at; Start 662; Stop 686
aaaagcactttatccttcctatagc

SEQ ID NO: 180157 - DNA, 25 bp, Artificial
  probe
  misc_feature (1)..(25): SEQ ID NO: 1430; WAN024ES3_at; Start 573; Stop 597
ggaacacactgcagaccgcattttg

SEQ ID NO: 180158 - DNA, 25 bp, Artificial
  probe
  misc_feature (1)..(25): SEQ ID NO: 1430; WAN024ES3_at; Start 222; Stop 246
tactagggcttacctccctcaagaa

SEQ ID NO: 180159 - DNA, 25 bp, Artificial
  probe
  misc_feature (1)..(25): SEQ ID NO: 1430; WAN024ES3_at; Start 679; Stop 703
cctatagcttacaaggaagtcgtag

SEQ ID NO: 180160 - DNA, 25 bp, Artificial
  probe
  misc_feature (1)..(25): SEQ ID NO: 1430; WAN024ES3_at; Start 787; Stop 811
ctattagcccaagcaggatgtagga

SEQ ID NO: 180161 - DNA, 25 bp, Artificial
  probe
  misc_feature (1)..(25): SEQ ID NO: 1430; WAN024ES3_at; Start 800; Stop 824
caggatgtaggatgcaagaaatcga

SEQ ID NO: 180162 - DNA, 25 bp, Artificial
  probe
  misc_feature (1)..(25): SEQ ID NO: 1430; WAN024ES3_at; Start 725; Stop 749
actggaccctaaagcaagattcttt

SEQ ID NO: 180163 - DNA, 25 bp, Artificial
  probe
  misc_feature (1)..(25): SEQ ID NO: 1430; WAN024ES3_at; Start 168; Stop 192
aagcggtcaagtatctattcaaggt

SEQ ID NO: 180164 - DNA, 25 bp, Artificial
  probe
  misc_feature (1)..(25): SEQ ID NO: 1430; WAN024ES3_at; Start 454; Stop 478
ttagatgagcctactgcgtccatgg

SEQ ID NO: 180165 - DNA, 25 bp, Artificial
  probe
  misc_feature (1)..(25): SEQ ID NO: 1430; WAN024ES3_at; Start 194; Stop 218
taccagtgacgagttctaagttaga

SEQ ID NO: 180166 - DNA, 25 bp, Artificial
  probe
  misc_feature (1)..(25): SEQ ID NO: 1430; WAN024ES3_at; Start 505; Stop 529
gaaattgtccaggagttaaaagcgc

SEQ ID NO: 180167 - DNA, 25 bp, Artificial
  probe
  misc_feature (1)..(25): SEQ ID NO: 1430; WAN024ES3_at; Start 742; Stop 766
gattctttacaagtagtcactcgag

SEQ ID NO: 180168 - DNA, 25 bp, Artificial
  probe
  misc_feature (1)..(25): SEQ ID NO: 1430; WAN024ES3_at; Start 716; Stop 740
tggttgaaaactggaccctaaagca

SEQ ID NO: 180169 - DNA, 25 bp, Artificial
  probe
  misc_feature (1)..(25): SEQ ID NO: 1430; WAN024ES3_at; Start 426; Stop 450
cttaattgggcgaccaaagattgtt

SEQ ID NO: 180170 - DNA, 25 bp, Artificial
  probe
  misc_feature (1)..(25): SEQ ID NO: 1430; WAN024ES3_at; Start 646; Stop 670
cgtagcgaggaaatagaaaagcact

SEQ ID NO: 180171 - DNA, 25 bp, Artificial
  probe
  misc_feature (1)..(25): SEQ ID NO: 1430; WAN024ES3_at; Start 756; Stop 780
agtcactcgagaagcagatgctttc

SEQ ID NO: 180172 - DNA, 25 bp, Artificial
  probe
  misc_feature (1)..(25): SEQ ID NO: 1430; WAN024ES3_at; Start 373; Stop 397
ttggcagaaaaattatcaggcggtc

SEQ ID NO: 180173 - DNA, 25 bp, Artificial
  probe
  misc_feature (1)..(25): SEQ ID NO: 1430; WAN024ES3_at; Start 353; Stop 377
tcaagcaacaaaaagaacagttggc

SEQ ID NO: 180174 - DNA, 25 bp, Artificial
  probe
  misc_feature (1)..(25): SEQ ID NO: 1430; WAN024ES3_at; Start 88; Stop 112
gaatgtgttgccttaattggtccaa

SEQ ID NO: 180175 - DNA, 25 bp, Artificial
  probe
  misc_feature (1)..(25): SEQ ID NO: 1430; WAN024ES3_at; Start 561; Stop 585
tattgaggaagtggaacacactgca

SEQ ID NO: 180176 - DNA, 25 bp, Artificial
  probe
  misc_feature (1)..(25): SEQ ID NO: 1430; WAN024ES3_at; Start 68; Stop 92
cctttgaaatcaacgatggtgaatg

SEQ ID NO: 180177 - DNA, 25 bp, Artificial
  probe
  misc_feature (1)..(25): SEQ ID NO: 1430; WAN024ES3_at; Start 313; Stop 337
cctttgagcaatcaggaaattgatc

SEQ ID NO: 180178 - DNA, 25 bp, Artificial
  probe
  misc_feature (1)..(25): SEQ ID NO: 1430; WAN024ES3_at; Start 589; Stop 613
cgcattttgctcttaaataagggag

SEQ ID NO: 180179 - DNA, 25 bp, Artificial
  probe
  misc_feature (1)..(25): SEQ ID NO: 1430; WAN024ES3_at; Start 772; Stop 796
gatgctttctgggaactattagccc

SEQ ID NO: 180180 - DNA, 25 bp, Artificial
  probe
  misc_feature (1)..(25): SEQ ID NO: 1430; WAN024ES3_at; Start 468; Stop 492
tgcgtccatggatacctcaactcgt

SEQ ID NO: 180181 - DNA, 25 bp, Artificial
  probe
  misc_feature (1)..(25): SEQ ID NO: 1430; WAN024ES3_at; Start 183; Stop 207
tattcaaggtttaccagtgacgagt

SEQ ID NO: 180182 - DNA, 25 bp, Artificial
  probe
  misc_feature (1)..(25): SEQ ID NO: 1430; WAN024ES3_at; Start 636; Stop 660
tctagctatgcgtagcgaggaaata

SEQ ID NO: 180183 - DNA, 25 bp, Artificial
  probe
  misc_feature (1)..(25): SEQ ID NO: 1430; WAN024ES3_at; Start 547; Stop 571
tattcgtcccattatattgaggaag

SEQ ID NO: 180184 - DNA, 25 bp, Artificial
  probe
  misc_feature (1)..(25): SEQ ID NO: 1215; WAN024ES4_at; Start 727; Stop 751
tggtcacaaaaacaggatgctctac

SEQ ID NO: 180185 - DNA, 25 bp, Artificial
  probe
  misc_feature (1)..(25): SEQ ID NO: 1215; WAN024ES4_at; Start 76; Stop 100
gtagctgaaggtgaatgcgtcgcct

SEQ ID NO: 180186 - DNA, 25 bp, Artificial
  probe
  misc_feature (1)..(25): SEQ ID NO: 1215; WAN024ES4_at; Start 92; Stop 116
gcgtcgccttgattgggcccaatgg

SEQ ID NO: 180187 - DNA, 25 bp, Artificial
  probe
  misc_feature (1)..(25): SEQ ID NO: 1215; WAN024ES4_at; Start 468; Stop 492
tgctgccatggatacttcaactcgt

SEQ ID NO: 180188 - DNA, 25 bp, Artificial
  probe
  misc_feature (1)..(25): SEQ ID NO: 1215; WAN024ES4_at; Start 215; Stop 239
tagactatattagaggttatctgcc

SEQ ID NO: 180189 - DNA, 25 bp, Artificial
  probe
  misc_feature (1)..(25): SEQ ID NO: 1215; WAN024ES4_at; Start 131; Stop 155
cactcttggactgtctgcttggaga

SEQ ID NO: 180190 - DNA, 25 bp, Artificial
  probe
  misc_feature (1)..(25): SEQ ID NO: 1215; WAN024ES4_at; Start 747; Stop 771
tctacaagtagtcacacgcgaagca

SEQ ID NO: 180191 - DNA, 25 bp, Artificial
  probe
  misc_feature (1)..(25): SEQ ID NO: 1215; WAN024ES4_at; Start 440; Stop 464
caaagcttgtctttttagatgaacc

SEQ ID NO: 180192 - DNA, 25 bp, Artificial
  probe
  misc_feature (1)..(25): SEQ ID NO: 1215; WAN024ES4_at; Start 39; Stop 63
caagggcaaggctattttgaagggt

SEQ ID NO: 180193 - DNA, 25 bp, Artificial
  probe
  misc_feature (1)..(25): SEQ ID NO: 1215; WAN024ES4_at; Start 690; Stop 714
caaggaagtcattgagcagtctaac

SEQ ID NO: 180194 - DNA, 25 bp, Artificial
  probe
  misc_feature (1)..(25): SEQ ID NO: 1215; WAN024ES4_at; Start 761; Stop 785
cacgcgaagcagatgctttttggga

SEQ ID NO: 180195 - DNA, 25 bp, Artificial
  probe
  misc_feature (1)..(25): SEQ ID NO: 1215; WAN024ES4_at; Start 373; Stop 397
ttcgcagaaaaattgtcaggcgggc

SEQ ID NO: 180196 - DNA, 25 bp, Artificial
  probe
  misc_feature (1)..(25): SEQ ID NO: 1215; WAN024ES4_at; Start 232; Stop 256
tatctgcctcaagaaaatgtcatcg

SEQ ID NO: 180197 - DNA, 25 bp, Artificial
  probe
  misc_feature (1)..(25): SEQ ID NO: 1215; WAN024ES4_at; Start 168; Stop 192
aagcggtcaagtatccatccaaggc

SEQ ID NO: 180198 - DNA, 25 bp, Artificial
  probe
  misc_feature (1)..(25): SEQ ID NO: 1215; WAN024ES4_at; Start 61; Stop 85
ggtatttcctttgaggtagctgaag

SEQ ID NO: 180199 - DNA, 25 bp, Artificial
  probe
  misc_feature (1)..(25): SEQ ID NO: 1215; WAN024ES4_at; Start 640; Stop 664
gctatgcgtagtgagggaattgaaa

SEQ ID NO: 180200 - DNA, 25 bp, Artificial
  probe
  misc_feature (1)..(25): SEQ ID NO: 1215; WAN024ES4_at; Start 117; Stop 141
tgctgggaagaccacactcttggac

SEQ ID NO: 180201 - DNA, 25 bp, Artificial
  probe
  misc_feature (1)..(25): SEQ ID NO: 1215; WAN024ES4_at; Start 357; Stop 381
gcaacaaaaagagcaattcgcagaa

SEQ ID NO: 180202 - DNA, 25 bp, Artificial
  probe
  misc_feature (1)..(25): SEQ ID NO: 1215; WAN024ES4_at; Start 26; Stop 50
taaataaaaacatcaagggcaaggc

SEQ ID NO: 180203 - DNA, 25 bp, Artificial
  probe
  misc_feature (1)..(25): SEQ ID NO: 1215; WAN024ES4_at; Start 796; Stop 820
caagcaggatgtggcatacaagaaa

SEQ ID NO: 180204 - DNA, 25 bp, Artificial
  probe
  misc_feature (1)..(25): SEQ ID NO: 1215; WAN024ES4_at; Start 108; Stop 132
gcccaatggtgctgggaagaccaca

SEQ ID NO: 180205 - DNA, 25 bp, Artificial
  probe
  misc_feature (1)..(25): SEQ ID NO: 1215; WAN024ES4_at; Start 561; Stop 585
tattgaagaggtagagcatacggct

SEQ ID NO: 180206 - DNA, 25 bp, Artificial
  probe
  misc_feature (1)..(25): SEQ ID NO: 1215; WAN024ES4_at; Start 709; Stop 733
tctaacttggttgaaaactggtcac

SEQ ID NO: 180207 - DNA, 25 bp, Artificial
  probe
  misc_feature (1)..(25): SEQ ID NO: 1215; WAN024ES4_at; Start 455; Stop 479
tagatgaaccaactgctgccatgga

SEQ ID NO: 180208 - DNA, 25 bp, Artificial
  probe
  misc_feature (1)..(25): SEQ ID NO: 1215; WAN024ES4_at; Start 781; Stop 805
tgggaactgttagttcaagcaggat

SEQ ID NO: 180209 - DNA, 25 bp, Artificial
  probe
  misc_feature (1)..(25): SEQ ID NO: 1215; WAN024ES4_at; Start 679; Stop 703
cctctggcatacaaggaagtcattg

SEQ ID NO: 180210 - DNA, 25 bp, Artificial
  probe
  misc_feature (1)..(25): SEQ ID NO: 1215; WAN024ES4_at; Start 299; Stop 323
gtatctatccaaattccttgagcga

SEQ ID NO: 180211 - DNA, 25 bp, Artificial
  probe
  misc_feature (1)..(25): SEQ ID NO: 1215; WAN024ES4_at; Start 574; Stop 598
gagcatacggctgaccggattttgg

SEQ ID NO: 180212 - DNA, 25 bp, Artificial
  probe
  misc_feature (1)..(25): SEQ ID NO: 1215; WAN024ES4_at; Start 508; Stop 532
atcgttcgggacctaaaagcgcaag

SEQ ID NO: 180213 - DNA, 25 bp, Artificial
  probe
  misc_feature (1)..(25): SEQ ID NO: 1215; WAN024ES4_at; Start 426; Stop 450
cttgattgggcgaccaaagcttgtc

SEQ ID NO: 180214 - DNA, 25 bp, Artificial
  probe
  misc_feature (1)..(25): SEQ ID NO: 1215; WAN024ES4_at; Start 313; Stop 337
tccttgagcgatcaggaaatcgatc

SEQ ID NO: 180215 - DNA, 25 bp, Artificial
  probe
  misc_feature (1)..(25): SEQ ID NO: 1215; WAN024ES4_at; Start 183; Stop 207
catccaaggcttgtcagtgacgagt

SEQ ID NO: 180216 - DNA, 25 bp, Artificial
  probe
  misc_feature (1)..(25): SEQ ID NO: 1215; WAN024ES4_at; Start 663; Stop 687
aaagcattttatccttcctctggca

SEQ ID NO: 180217 - DNA, 25 bp, Artificial
  probe
  misc_feature (1)..(25): SEQ ID NO: 1215; WAN024ES4_at; Start 346; Stop 370
cagtttgaccagcaacaaaaagagc

SEQ ID NO: 180218 - DNA, 25 bp, Artificial
  probe
  misc_feature (1)..(25): SEQ ID NO: 5591; WAN024ES5_at; Start 14; Stop 38
caaggtcaaaccaagcgctacgaag

SEQ ID NO: 180219 - DNA, 25 bp, Artificial
  probe
  misc_feature (1)..(25): SEQ ID NO: 5591; WAN024ES5_at; Start 158; Stop 182
cagcatacttgttatctttgataga

SEQ ID NO: 180220 - DNA, 25 bp, Artificial
  probe
  misc_feature (1)..(25): SEQ ID NO: 5591; WAN024ES5_at; Start 196; Stop 220
tatttacagggctatgacgcaatgt

SEQ ID NO: 180221 - DNA, 25 bp, Artificial
  probe
  misc_feature (1)..(25): SEQ ID NO: 5591; WAN024ES5_at; Start 50; Stop 74
tactatcagcaaaagtgcagcccca

SEQ ID NO: 180222 - DNA, 25 bp, Artificial
  probe
  misc_feature (1)..(25): SEQ ID NO: 5591; WAN024ES5_at; Start 38; Stop 62
ggcaatacttcctactatcagcaaa

SEQ ID NO: 180223 - DNA, 25 bp, Artificial
  probe
  misc_feature (1)..(25): SEQ ID NO: 5591; WAN024ES5_at; Start 19; Stop 43
tcaaaccaagcgctacgaaggcaat

SEQ ID NO: 180224 - DNA, 25 bp, Artificial
  probe
  misc_feature (1)..(25): SEQ ID NO: 5591; WAN024ES5_at; Start 183; Stop 207
taatattctaccatatttacagggc

SEQ ID NO: 180225 - DNA, 25 bp, Artificial
  probe
  misc_feature (1)..(25): SEQ ID NO: 5591; WAN024ES5_at; Start 146; Stop 170
caaataatcaaccagcatacttgtt

SEQ ID NO: 180226 - DNA, 25 bp, Artificial
  probe
  misc_feature (1)..(25): SEQ ID NO: 5591; WAN024ES5_at; Start 88; Stop 112
gagacatgtccacacctcttacaaa

SEQ ID NO: 180227 - DNA, 25 bp, Artificial
  probe
  misc_feature (1)..(25): SEQ ID NO: 5591; WAN024ES5_at; Start 22; Stop 46
aaccaagcgctacgaaggcaatact

SEQ ID NO: 180228 - DNA, 25 bp, Artificial
  probe
  misc_feature (1)..(25): SEQ ID NO: 5591; WAN024ES5_at; Start 1; Stop 25
ttggtaagagagtcaaggtcaaacc

SEQ ID NO: 180229 - DNA, 25 bp, Artificial
  probe
  misc_feature (1)..(25): SEQ ID NO: 5591; WAN024ES5_at; Start 66; Stop 90
gcagccccaatccaatttccaagag

SEQ ID NO: 180230 - DNA, 25 bp, Artificial
  probe
  misc_feature (1)..(25): SEQ ID NO: 5591; WAN024ES5_at; Start 8; Stop 32
gagagtcaaggtcaaaccaagcgct

SEQ ID NO: 180231 - DNA, 25 bp, Artificial
  probe
  misc_feature (1)..(25): SEQ ID NO: 5591; WAN024ES5_at; Start 77; Stop 101
ccaatttccaagagacatgtccaca

SEQ ID NO: 180232 - DNA, 25 bp, Artificial
  probe
  misc_feature (1)..(25): SEQ ID NO: 5591; WAN024ES5_at; Start 100; Stop 124
cacctcttacaaaatgcccaactga

SEQ ID NO: 180233 - DNA, 25 bp, Artificial
  probe
  misc_feature (1)..(25): SEQ ID NO: 5591; WAN024ES5_at; Start 30; Stop 54
gctacgaaggcaatacttcctacta

SEQ ID NO: 180234 - DNA, 25 bp, Artificial
  probe
  misc_feature (1)..(25): SEQ ID NO: 5591; WAN024ES5_at; Start 213; Stop 237
cgcaatgttttctgccagttgttga

SEQ ID NO: 180235 - DNA, 25 bp, Artificial
  probe
  misc_feature (1)..(25): SEQ ID NO: 5591; WAN024ES5_at; Start 46; Stop 70
ttcctactatcagcaaaagtgcagc

SEQ ID NO: 180236 - DNA, 25 bp, Artificial
  probe
  misc_feature (1)..(25): SEQ ID NO: 5591; WAN024ES5_at; Start 53; Stop 77
tatcagcaaaagtgcagccccaatc

SEQ ID NO: 180237 - DNA, 25 bp, Artificial
  probe
  misc_feature (1)..(25): SEQ ID NO: 5591; WAN024ES5_at; Start 81; Stop 105
tttccaagagacatgtccacacctc

SEQ ID NO: 180238 - DNA, 25 bp, Artificial
  probe
  misc_feature (1)..(25): SEQ ID NO: 5591; WAN024ES5_at; Start 122; Stop 146
tgagaaaaccaccaagattgaaacc

SEQ ID NO: 180239 - DNA, 25 bp, Artificial
  probe
  misc_feature (1)..(25): SEQ ID NO: 5591; WAN024ES5_at; Start 5; Stop 29
taagagagtcaaggtcaaaccaagc

SEQ ID NO: 180240 - DNA, 25 bp, Artificial
  probe
  misc_feature (1)..(25): SEQ ID NO: 5591; WAN024ES5_at; Start 25; Stop 49
caagcgctacgaaggcaatacttcc

SEQ ID NO: 180241 - DNA, 25 bp, Artificial
  probe
  misc_feature (1)..(25): SEQ ID NO: 5591; WAN024ES5_at; Start 11; Stop 35
agtcaaggtcaaaccaagcgctacg

SEQ ID NO: 180242 - DNA, 25 bp, Artificial
  probe
  misc_feature (1)..(25): SEQ ID NO: 5591; WAN024ES5_at; Start 170; Stop 194
tatctttgatagataatattctacc

SEQ ID NO: 180243 - DNA, 25 bp, Artificial
  probe
  misc_feature (1)..(25): SEQ ID NO: 5591; WAN024ES5_at; Start 137; Stop 161
gattgaaaccaaataatcaaccagc

SEQ ID NO: 180244 - DNA, 25 bp, Artificial
  probe
  misc_feature (1)..(25): SEQ ID NO: 5591; WAN024ES5_at; Start 114; Stop 138
tgcccaactgagaaaaccaccaaga

SEQ ID NO: 180245 - DNA, 25 bp, Artificial
  probe
  misc_feature (1)..(25): SEQ ID NO: 5591; WAN024ES5_at; Start 141; Stop 165
gaaaccaaataatcaaccagcatac

SEQ ID NO: 180246 - DNA, 25 bp, Artificial
  probe
  misc_feature (1)..(25): SEQ ID NO: 5591; WAN024ES5_at; Start 107; Stop 131
tacaaaatgcccaactgagaaaacc

SEQ ID NO: 180247 - DNA, 25 bp, Artificial
  probe
  misc_feature (1)..(25): SEQ ID NO: 5591; WAN024ES5_at; Start 73; Stop 97
caatccaatttccaagagacatgtc

SEQ ID NO: 180248 - DNA, 25 bp, Artificial
  probe
  misc_feature (1)..(25): SEQ ID NO: 5591; WAN024ES5_at; Start 191; Stop 215
taccatatttacagggctatgacgc

SEQ ID NO: 180249 - DNA, 25 bp, Artificial
  probe
  misc_feature (1)..(25): SEQ ID NO: 5591; WAN024ES5_at; Start 62; Stop 86
aagtgcagccccaatccaatttcca

SEQ ID NO: 180250 - DNA, 25 bp, Artificial
  probe
  misc_feature (1)..(25): SEQ ID NO: 5591; WAN024ES5_at; Start 200; Stop 224
tacagggctatgacgcaatgttttc

SEQ ID NO: 180251 - DNA, 25 bp, Artificial
  probe
  misc_feature (1)..(25): SEQ ID NO: 5591; WAN024ES5_at; Start 206; Stop 230
gctatgacgcaatgttttctgccag

SEQ ID NO: 180252 - DNA, 25 bp, Artificial
  probe
  misc_feature (1)..(25): SEQ ID NO: 7646; WAN024ES6_at; Start 205; Stop 229
ggtataatcattgtatcacaaaagg

SEQ ID NO: 180253 - DNA, 25 bp, Artificial
  probe
  misc_feature (1)..(25): SEQ ID NO: 7646; WAN024ES6_at; Start 156; Stop 180
taaaacaaggattttcttaggcatg

SEQ ID NO: 180254 - DNA, 25 bp, Artificial
  probe
  misc_feature (1)..(25): SEQ ID NO: 7646; WAN024ES6_at; Start 131; Stop 155
gcatggaaatagttccacccgtatg

SEQ ID NO: 180255 - DNA, 25 bp, Artificial
  probe
  misc_feature (1)..(25): SEQ ID NO: 7646; WAN024ES6_at; Start 51; Stop 75
ttggattccttcaagtgggttggac

SEQ ID NO: 180256 - DNA, 25 bp, Artificial
  probe
  misc_feature (1)..(25): SEQ ID NO: 7646; WAN024ES6_at; Start 92; Stop 116
tatctgaactcgtcacaacagcgcc

SEQ ID NO: 180257 - DNA, 25 bp, Artificial
  probe
  misc_feature (1)..(25): SEQ ID NO: 7646; WAN024ES6_at; Start 184; Stop 208
tactcactctttctgaaatgtggta

SEQ ID NO: 180258 - DNA, 25 bp, Artificial
  probe
  misc_feature (1)..(25): SEQ ID NO: 7646; WAN024ES6_at; Start 35; Stop 59
agtccaaggcgtggacttggattcc

SEQ ID NO: 180259 - DNA, 25 bp, Artificial
  probe
  misc_feature (1)..(25): SEQ ID NO: 7646; WAN024ES6_at; Start 134; Stop 158
tggaaatagttccacccgtatgtaa

SEQ ID NO: 180260 - DNA, 25 bp, Artificial
  probe
  misc_feature (1)..(25): SEQ ID NO: 7646; WAN024ES6_at; Start 54; Stop 78
gattccttcaagtgggttggacaca

SEQ ID NO: 180261 - DNA, 25 bp, Artificial
  probe
  misc_feature (1)..(25): SEQ ID NO: 7646; WAN024ES6_at; Start 96; Stop 120
tgaactcgtcacaacagcgccagaa

SEQ ID NO: 180262 - DNA, 25 bp, Artificial
  probe
  misc_feature (1)..(25): SEQ ID NO: 7646; WAN024ES6_at; Start 68; Stop 92
ggttggacacatggttcatgggatt

SEQ ID NO: 180263 - DNA, 25 bp, Artificial
  probe
  misc_feature (1)..(25): SEQ ID NO: 7646; WAN024ES6_at; Start 46; Stop 70
tggacttggattccttcaagtgggt

SEQ ID NO: 180264 - DNA, 25 bp, Artificial
  probe
  misc_feature (1)..(25): SEQ ID NO: 7646; WAN024ES6_at; Start 180; Stop 204
gatttactcactctttctgaaatgt

SEQ ID NO: 180265 - DNA, 25 bp, Artificial
  probe
  misc_feature (1)..(25): SEQ ID NO: 7646; WAN024ES6_at; Start 124; Stop 148
tcggcctgcatggaaatagttccac

SEQ ID NO: 180266 - DNA, 25 bp, Artificial
  probe
  misc_feature (1)..(25): SEQ ID NO: 7646; WAN024ES6_at; Start 175; Stop 199
ggcatgatttactcactctttctga

SEQ ID NO: 180267 - DNA, 25 bp, Artificial
  probe
  misc_feature (1)..(25): SEQ ID NO: 7646; WAN024ES6_at; Start 41; Stop 65
aggcgtggacttggattccttcaag

SEQ ID NO: 180268 - DNA, 25 bp, Artificial
  probe
  misc_feature (1)..(25): SEQ ID NO: 7646; WAN024ES6_at; Start 57; Stop 81
tccttcaagtgggttggacacatgg

SEQ ID NO: 180269 - DNA, 25 bp, Artificial
  probe
  misc_feature (1)..(25): SEQ ID NO: 7646; WAN024ES6_at; Start 104; Stop 128
tcacaacagcgccagaagcatcggc

SEQ ID NO: 180270 - DNA, 25 bp, Artificial
  probe
  misc_feature (1)..(25): SEQ ID NO: 7646; WAN024ES6_at; Start 168; Stop 192
tttcttaggcatgatttactcactc

SEQ ID NO: 180271 - DNA, 25 bp, Artificial
  probe
  misc_feature (1)..(25): SEQ ID NO: 7646; WAN024ES6_at; Start 165; Stop 189
gattttcttaggcatgatttactca

SEQ ID NO: 180272 - DNA, 25 bp, Artificial
  probe
  misc_feature (1)..(25): SEQ ID NO: 7646; WAN024ES6_at; Start 87; Stop 111
gggattatctgaactcgtcacaaca

SEQ ID NO: 180273 - DNA, 25 bp, Artificial
  probe
  misc_feature (1)..(25): SEQ ID NO: 7646; WAN024ES6_at; Start 71; Stop 95
tggacacatggttcatgggattatc

SEQ ID NO: 180274 - DNA, 25 bp, Artificial
  probe
  misc_feature (1)..(25): SEQ ID NO: 7646; WAN024ES6_at; Start 111; Stop 135
agcgccagaagcatcggcctgcatg

SEQ ID NO: 180275 - DNA, 25 bp, Artificial
  probe
  misc_feature (1)..(25): SEQ ID NO: 7646; WAN024ES6_at; Start 8; Stop 32
tgatatggggacttggaaggttaaa

SEQ ID NO: 180276 - DNA, 25 bp, Artificial
  probe
  misc_feature (1)..(25): SEQ ID NO: 7646; WAN024ES6_at; Start 83; Stop 107
tcatgggattatctgaactcgtcac

SEQ ID NO: 180277 - DNA, 25 bp, Artificial
  probe
  misc_feature (1)..(25): SEQ ID NO: 7646; WAN024ES6_at; Start 189; Stop 213
actctttctgaaatgtggtataatc

SEQ ID NO: 180278 - DNA, 25 bp, Artificial
  probe
  misc_feature (1)..(25): SEQ ID NO: 7646; WAN024ES6_at; Start 122; Stop 146
catcggcctgcatggaaatagttcc

SEQ ID NO: 180279 - DNA, 25 bp, Artificial
  probe
  misc_feature (1)..(25): SEQ ID NO: 7646; WAN024ES6_at; Start 39; Stop 63
caaggcgtggacttggattccttca

SEQ ID NO: 180280 - DNA, 25 bp, Artificial
  probe
  misc_feature (1)..(25): SEQ ID NO: 7646; WAN024ES6_at; Start 75; Stop 99
cacatggttcatgggattatctgaa

SEQ ID NO: 180281 - DNA, 25 bp, Artificial
  probe
  misc_feature (1)..(25): SEQ ID NO: 7646; WAN024ES6_at; Start 118; Stop 142
gaagcatcggcctgcatggaaatag

SEQ ID NO: 180282 - DNA, 25 bp, Artificial
  probe
  misc_feature (1)..(25): SEQ ID NO: 7646; WAN024ES6_at; Start 60; Stop 84
ttcaagtgggttggacacatggttc

SEQ ID NO: 180283 - DNA, 25 bp, Artificial
  probe
  misc_feature (1)..(25): SEQ ID NO: 7646; WAN024ES6_at; Start 127; Stop 151
gcctgcatggaaatagttccacccg

SEQ ID NO: 180284 - DNA, 25 bp, Artificial
  probe
  misc_feature (1)..(25): SEQ ID NO: 7646; WAN024ES6_at; Start 62; Stop 86
caagtgggttggacacatggttcat

SEQ ID NO: 180285 - DNA, 25 bp, Artificial
  probe
  misc_feature (1)..(25): SEQ ID NO: 7646; WAN024ES6_at; Start 99; Stop 123
actcgtcacaacagcgccagaagca

SEQ ID NO: 180286 - DNA, 25 bp, Artificial
  probe
  misc_feature (1)..(25): SEQ ID NO: 2605; WAN024ES7_at; Start 97; Stop 121
catcaagacaaaactgccgtaggtg

SEQ ID NO: 180287 - DNA, 25 bp, Artificial
  probe
  misc_feature (1)..(25): SEQ ID NO: 2605; WAN024ES7_at; Start 15; Stop 39
caaaatgagccttgccatctggaaa

SEQ ID NO: 180288 - DNA, 25 bp, Artificial
  probe
  misc_feature (1)..(25): SEQ ID NO: 2605; WAN024ES7_at; Start 23; Stop 47
gccttgccatctggaaaaattttcc

SEQ ID NO: 180289 - DNA, 25 bp, Artificial
  probe
  misc_feature (1)..(25): SEQ ID NO: 2605; WAN024ES7_at; Start 300; Stop 324
taaaaccagccctatgggttgcacc

SEQ ID NO: 180290 - DNA, 25 bp, Artificial
  probe
  misc_feature (1)..(25): SEQ ID NO: 2605; WAN024ES7_at; Start 219; Stop 243
gatgaagttgcgatacagcttgacc

SEQ ID NO: 180291 - DNA, 25 bp, Artificial
  probe
  misc_feature (1)..(25): SEQ ID NO: 2605; WAN024ES7_at; Start 291; Stop 315
cttctattttaaaaccagccctatg

SEQ ID NO: 180292 - DNA, 25 bp, Artificial
  probe
  misc_feature (1)..(25): SEQ ID NO: 2605; WAN024ES7_at; Start 273; Stop 297
gaacaaactccaccaattcttctat

SEQ ID NO: 180293 - DNA, 25 bp, Artificial
  probe
  misc_feature (1)..(25): SEQ ID NO: 2605; WAN024ES7_at; Start 266; Stop 290
gctgctcgaacaaactccaccaatt

SEQ ID NO: 180294 - DNA, 25 bp, Artificial
  probe
  misc_feature (1)..(25): SEQ ID NO: 2605; WAN024ES7_at; Start 7; Stop 31
cactggatcaaaatgagccttgcca

SEQ ID NO: 180295 - DNA, 25 bp, Artificial
  probe
  misc_feature (1)..(25): SEQ ID NO: 2605; WAN024ES7_at; Start 199; Stop 223
tgctgccttatcaagggcctgatga

SEQ ID NO: 180296 - DNA, 25 bp, Artificial
  probe
  misc_feature (1)..(25): SEQ ID NO: 2605; WAN024ES7_at; Start 64; Stop 88
gacaatatcaaaaatacgttctggg

SEQ ID NO: 180297 - DNA, 25 bp, Artificial
  probe
  misc_feature (1)..(25): SEQ ID NO: 2605; WAN024ES7_at; Start 94; Stop 118
ccccatcaagacaaaactgccgtag

SEQ ID NO: 180298 - DNA, 25 bp, Artificial
  probe
  misc_feature (1)..(25): SEQ ID NO: 2605; WAN024ES7_at; Start 120; Stop 144
tgaagtaaagcgtgtcaatcaaggc

SEQ ID NO: 180299 - DNA, 25 bp, Artificial
  probe
  misc_feature (1)..(25): SEQ ID NO: 2605; WAN024ES7_at; Start 248; Stop 272
tcttcttcagaaggactggctgctc

SEQ ID NO: 180300 - DNA, 25 bp, Artificial
  probe
  misc_feature (1)..(25): SEQ ID NO: 2605; WAN024ES7_at; Start 130; Stop 154
cgtgtcaatcaaggcatccacttgc

SEQ ID NO: 180301 - DNA, 25 bp, Artificial
  probe
  misc_feature (1)..(25): SEQ ID NO: 2605; WAN024ES7_at; Start 172; Stop 196
agcaggtgtcttcttggctacttta

SEQ ID NO: 180302 - DNA, 25 bp, Artificial
  probe
  misc_feature (1)..(25): SEQ ID NO: 2605; WAN024ES7_at; Start 255; Stop 279
cagaaggactggctgctcgaacaaa

SEQ ID NO: 180303 - DNA, 25 bp, Artificial
  probe
  misc_feature (1)..(25): SEQ ID NO: 2605; WAN024ES7_at; Start 153; Stop 177
gccctatcaaatcttgctgagcagg

SEQ ID NO: 180304 - DNA, 25 bp, Artificial
  probe
  misc_feature (1)..(25): SEQ ID NO: 2605; WAN024ES7_at; Start 222; Stop 246
gaagttgcgatacagcttgaccaaa

SEQ ID NO: 180305 - DNA, 25 bp, Artificial
  probe
  misc_feature (1)..(25): SEQ ID NO: 2605; WAN024ES7_at; Start 125; Stop 149
taaagcgtgtcaatcaaggcatcca

SEQ ID NO: 180306 - DNA, 25 bp, Artificial
  probe
  misc_feature (1)..(25): SEQ ID NO: 2605; WAN024ES7_at; Start 168; Stop 192
gctgagcaggtgtcttcttggctac

SEQ ID NO: 180307 - DNA, 25 bp, Artificial
  probe
  misc_feature (1)..(25): SEQ ID NO: 2605; WAN024ES7_at; Start 306; Stop 330
cagccctatgggttgcaccctctaa

SEQ ID NO: 180308 - DNA, 25 bp, Artificial
  probe
  misc_feature (1)..(25): SEQ ID NO: 2605; WAN024ES7_at; Start 160; Stop 184
caaatcttgctgagcaggtgtcttc

SEQ ID NO: 180309 - DNA, 25 bp, Artificial
  probe
  misc_feature (1)..(25): SEQ ID NO: 2605; WAN024ES7_at; Start 210; Stop 234
caagggcctgatgaagttgcgatac

SEQ ID NO: 180310 - DNA, 25 bp, Artificial
  probe
  misc_feature (1)..(25): SEQ ID NO: 2605; WAN024ES7_at; Start 2; Stop 26
tgggtcactggatcaaaatgagcct

SEQ ID NO: 180311 - DNA, 25 bp, Artificial
  probe
  misc_feature (1)..(25): SEQ ID NO: 2605; WAN024ES7_at; Start 227; Stop 251
tgcgatacagcttgaccaaaatctt

SEQ ID NO: 180312 - DNA, 25 bp, Artificial
  probe
  misc_feature (1)..(25): SEQ ID NO: 2605; WAN024ES7_at; Start 234; Stop 258
cagcttgaccaaaatcttcttcaga

SEQ ID NO: 180313 - DNA, 25 bp, Artificial
  probe
  misc_feature (1)..(25): SEQ ID NO: 2605; WAN024ES7_at; Start 260; Stop 284
ggactggctgctcgaacaaactcca

SEQ ID NO: 180314 - DNA, 25 bp, Artificial
  probe
  misc_feature (1)..(25): SEQ ID NO: 2605; WAN024ES7_at; Start 69; Stop 93
tatcaaaaatacgttctgggtccac

SEQ ID NO: 180315 - DNA, 25 bp, Artificial
  probe
  misc_feature (1)..(25): SEQ ID NO: 2605; WAN024ES7_at; Start 207; Stop 231
tatcaagggcctgatgaagttgcga

SEQ ID NO: 180316 - DNA, 25 bp, Artificial
  probe
  misc_feature (1)..(25): SEQ ID NO: 2605; WAN024ES7_at; Start 39; Stop 63
aaattttccccatattggcctgatg

SEQ ID NO: 180317 - DNA, 25 bp, Artificial
  probe
  misc_feature (1)..(25): SEQ ID NO: 2605; WAN024ES7_at; Start 111; Stop 135
tgccgtaggtgaagtaaagcgtgtc

SEQ ID NO: 180318 - DNA, 25 bp, Artificial
  probe
  misc_feature (1)..(25): SEQ ID NO: 2605; WAN024ES7_at; Start 139; Stop 163
caaggcatccacttgccctatcaaa

SEQ ID NO: 180319 - DNA, 25 bp, Artificial
  probe
  misc_feature (1)..(25): SEQ ID NO: 2605; WAN024ES7_at; Start 51; Stop 75
tattggcctgatggacaatatcaaa

SEQ ID NO: 180320 - DNA, 25 bp, Artificial
  probe
  misc_feature (1)..(25): SEQ ID NO: 2010; WAN024ES8_at; Start 618; Stop 642
catctcggcttatgctggtatgaca

SEQ ID NO: 180321 - DNA, 25 bp, Artificial
  probe
  misc_feature (1)..(25): SEQ ID NO: 2010; WAN024ES8_at; Start 451; Stop 475
cacgctgccaagtatgtcaccaaaa

SEQ ID NO: 180322 - DNA, 25 bp, Artificial
  probe
  misc_feature (1)..(25): SEQ ID NO: 2010; WAN024ES8_at; Start 312; Stop 336
tatcgttctaacaggagccatgcgt

SEQ ID NO: 180323 - DNA, 25 bp, Artificial
  probe
  misc_feature (1)..(25): SEQ ID NO: 2010; WAN024ES8_at; Start 711; Stop 735
taatattcccaaagaaacggctcaa

SEQ ID NO: 180324 - DNA, 25 bp, Artificial
  probe
  misc_feature (1)..(25): SEQ ID NO: 2010; WAN024ES8_at; Start 85; Stop 109
gataatcccatgaaccatgtgtcca

SEQ ID NO: 180325 - DNA, 25 bp, Artificial
  probe
  misc_feature (1)..(25): SEQ ID NO: 2010; WAN024ES8_at; Start 942; Stop 966
gaaagactatatggaaggctaacta

SEQ ID NO: 180326 - DNA, 25 bp, Artificial
  probe
  misc_feature (1)..(25): SEQ ID NO: 2010; WAN024ES8_at; Start 226; Stop 250
tacgatggagtggtgatcacacacg

SEQ ID NO: 180327 - DNA, 25 bp, Artificial
  probe
  misc_feature (1)..(25): SEQ ID NO: 2010; WAN024ES8_at; Start 926; Stop 950
taacaggacaggctttgaaagacta

SEQ ID NO: 180328 - DNA, 25 bp, Artificial
  probe
  misc_feature (1)..(25): SEQ ID NO: 2010; WAN024ES8_at; Start 294; Stop 318
ggaagttccccatatgcctatcgtt

SEQ ID NO: 180329 - DNA, 25 bp, Artificial
  probe
  misc_feature (1)..(25): SEQ ID NO: 2010; WAN024ES8_at; Start 781; Stop 805
tcacgatgctttaacggtattgccg

SEQ ID NO: 180330 - DNA, 25 bp, Artificial
  probe
  misc_feature (1)..(25): SEQ ID NO: 2010; WAN024ES8_at; Start 602; Stop 626
aaggtttagtccctatcatctcggc

SEQ ID NO: 180331 - DNA, 25 bp, Artificial
  probe
  misc_feature (1)..(25): SEQ ID NO: 2010; WAN024ES8_at; Start 245; Stop 269
cacacggaaccgatactttagagga

SEQ ID NO: 180332 - DNA, 25 bp, Artificial
  probe
  misc_feature (1)..(25): SEQ ID NO: 2010; WAN024ES8_at; Start 914; Stop 938
tcaatgccggactaacaggacaggc

SEQ ID NO: 180333 - DNA, 25 bp, Artificial
  probe
  misc_feature (1)..(25): SEQ ID NO: 2010; WAN024ES8_at; Start 574; Stop 598
cgtgttcgctttgaccttgatcaca

SEQ ID NO: 180334 - DNA, 25 bp, Artificial
  probe
  misc_feature (1)..(25): SEQ ID NO: 2010; WAN024ES8_at; Start 794; Stop 818
acggtattgccgagcctgtttatgc

SEQ ID NO: 180335 - DNA, 25 bp, Artificial
  probe
  misc_feature (1)..(25): SEQ ID NO: 2010; WAN024ES8_at; Start 52; Stop 76
gccgatgcttctggcgctgttgtga

SEQ ID NO: 180336 - DNA, 25 bp, Artificial
  probe
  misc_feature (1)..(25): SEQ ID NO: 2010; WAN024ES8_at; Start 528; Stop 552
tctcatcatgaaacaggaaatcctc

SEQ ID NO: 180337 - DNA, 25 bp, Artificial
  probe
  misc_feature (1)..(25): SEQ ID NO: 2010; WAN024ES8_at; Start 281; Stop 305
tccttgataccatggaagttcccca

SEQ ID NO: 180338 - DNA, 25 bp, Artificial
  probe
  misc_feature (1)..(25): SEQ ID NO: 2010; WAN024ES8_at; Start 34; Stop 58
ggaactatttccatgcaggccgatg

SEQ ID NO: 180339 - DNA, 25 bp, Artificial
  probe
  misc_feature (1)..(25): SEQ ID NO: 2010; WAN024ES8_at; Start 69; Stop 93
tgttgtgacgagttcagataatccc

SEQ ID NO: 180340 - DNA, 25 bp, Artificial
  probe
  misc_feature (1)..(25): SEQ ID NO: 2010; WAN024ES8_at; Start 682; Stop 706
ggtttgattatccaagccttcggag

SEQ ID NO: 180341 - DNA, 25 bp, Artificial
  probe
  misc_feature (1)..(25): SEQ ID NO: 2010; WAN024ES8_at; Start 435; Stop 459
tatgaacgatgaaatccacgctgcc

SEQ ID NO: 180342 - DNA, 25 bp, Artificial
  probe
  misc_feature (1)..(25): SEQ ID NO: 2010; WAN024ES8_at; Start 188; Stop 212
tggtcctctaccagaaaattaaaga

SEQ ID NO: 180343 - DNA, 25 bp, Artificial
  probe
  misc_feature (1)..(25): SEQ ID NO: 2010; WAN024ES8_at; Start 664; Stop 688
gatttagaacacttggacggtttga

SEQ ID NO: 180344 - DNA, 25 bp, Artificial
  probe
  misc_feature (1)..(25): SEQ ID NO: 2010; WAN024ES8_at; Start 697; Stop 721
gccttcggagctggtaatattccca

SEQ ID NO: 180345 - DNA, 25 bp, Artificial
  probe
  misc_feature (1)..(25): SEQ ID NO: 2010; WAN024ES8_at; Start 544; Stop 568
gaaatcctctacttcaaaacagctg

SEQ ID NO: 180346 - DNA, 25 bp, Artificial
  probe
  misc_feature (1)..(25): SEQ ID NO: 2010; WAN024ES8_at; Start 740; Stop 764
tagaaagccttctgcaaaaaggaat

SEQ ID NO: 180347 - DNA, 25 bp, Artificial
  probe
  misc_feature (1)..(25): SEQ ID NO: 2010; WAN024ES8_at; Start 168; Stop 192
tatcaaacccaaacatatgctggtc

SEQ ID NO: 180348 - DNA, 25 bp, Artificial
  probe
  misc_feature (1)..(25): SEQ ID NO: 2010; WAN024ES8_at; Start 374; Stop 398
acctaagtgctttacgagtggccag

SEQ ID NO: 180349 - DNA, 25 bp, Artificial
  probe
  misc_feature (1)..(25): SEQ ID NO: 2010; WAN024ES8_at; Start 117; Stop 141
tgaaggaatccaagtccacgccttg

SEQ ID NO: 180350 - DNA, 25 bp, Artificial
  probe
  misc_feature (1)..(25): SEQ ID NO: 2010; WAN024ES8_at; Start 211; Stop 235
gaggaagcagataactacgatggag

SEQ ID NO: 180351 - DNA, 25 bp, Artificial
  probe
  misc_feature (1)..(25): SEQ ID NO: 2010; WAN024ES8_at; Start 404; Stop 428
acagggctgctgacaaaggagtttt

SEQ ID NO: 180352 - DNA, 25 bp, Artificial
  probe
  misc_feature (1)..(25): SEQ ID NO: 2010; WAN024ES8_at; Start 102; Stop 126
tgtgtccaacccacttgaaggaatc

SEQ ID NO: 180353 - DNA, 25 bp, Artificial
  probe
  misc_feature (1)..(25): SEQ ID NO: 2010; WAN024ES8_at; Start 766; Stop 790
ccagtcgctctggtatcacgatgct

SEQ ID NO: 180354 - DNA, 25 bp, Artificial
  probe
  misc_feature (1)..(25): SEQ ID NO: 5679; WAN024ES9_at; Start 61; Stop 85
gatggaaccttggtcaacaatcgca

SEQ ID NO: 180355 - DNA, 25 bp, Artificial
  probe
  misc_feature (1)..(25): SEQ ID NO: 5679; WAN024ES9_at; Start 583; Stop 607
gaagacttgaaattgacacgtagca

SEQ ID NO: 180356 - DNA, 25 bp, Artificial
  probe
  misc_feature (1)..(25): SEQ ID NO: 5679; WAN024ES9_at; Start 912; Stop 936
ggtcaagaccttccaccacatgatg

SEQ ID NO: 180357 - DNA, 25 bp, Artificial
  probe
  misc_feature (1)..(25): SEQ ID NO: 5679; WAN024ES9_at; Start 1168; Stop 1192
gacacgctttacttcacctacggca

SEQ ID NO: 180358 - DNA, 25 bp, Artificial
  probe
  misc_feature (1)..(25): SEQ ID NO: 5679; WAN024ES9_at; Start 1080; Stop 1104
tcatcaggcccttgataaggcagca

SEQ ID NO: 180359 - DNA, 25 bp, Artificial
  probe
  misc_feature (1)..(25): SEQ ID NO: 5679; WAN024ES9_at; Start 952; Stop 976
gaagaacctcgagcttgggatttag

SEQ ID NO: 180360 - DNA, 25 bp, Artificial
  probe
  misc_feature (1)..(25): SEQ ID NO: 5679; WAN024ES9_at; Start 1107; Stop 1131
taaagtagccaagaagacacctgct

SEQ ID NO: 180361 - DNA, 25 bp, Artificial
  probe
  misc_feature (1)..(25): SEQ ID NO: 5679; WAN024ES9_at; Start 1384; Stop 1408
gcttacgaacgccataaagagagaa

SEQ ID NO: 180362 - DNA, 25 bp, Artificial
  probe
  misc_feature (1)..(25): SEQ ID NO: 5679; WAN024ES9_at; Start 1150; Stop 1174
caagtggatgccttgattgacacgc

SEQ ID NO: 180363 - DNA, 25 bp, Artificial
  probe
  misc_feature (1)..(25): SEQ ID NO: 5679; WAN024ES9_at; Start 616; Stop 640
gcatcggatgtcatcaatcagggaa

SEQ ID NO: 180364 - DNA, 25 bp, Artificial
  probe
  misc_feature (1)..(25): SEQ ID NO: 5679; WAN024ES9_at; Start 345; Stop 369
caaggatgccatgttgggttctaaa

SEQ ID NO: 180365 - DNA, 25 bp, Artificial
  probe
  misc_feature (1)..(25): SEQ ID NO: 5679; WAN024ES9_at; Start 1259; Stop 1283
aaatttttccagatggcaaggctca

SEQ ID NO: 180366 - DNA, 25 bp, Artificial
  probe
  misc_feature (1)..(25): SEQ ID NO: 5679; WAN024ES9_at; Start 1368; Stop 1392
gcagcgccagctcaaggcttacgaa

SEQ ID NO: 180367 - DNA, 25 bp, Artificial
  probe
  misc_feature (1)..(25): SEQ ID NO: 5679; WAN024ES9_at; Start 783; Stop 807
cagtgtcaaggaagctgccaagcac

SEQ ID NO: 180368 - DNA, 25 bp, Artificial
  probe
  misc_feature (1)..(25): SEQ ID NO: 5679; WAN024ES9_at; Start 528; Stop 552
ccaagttttgatgctgatgacacca

SEQ ID NO: 180369 - DNA, 25 bp, Artificial
  probe
  misc_feature (1)..(25): SEQ ID NO: 5679; WAN024ES9_at; Start 448; Stop 472
cagtcttttaatcgcatggtcagca

SEQ ID NO: 180370 - DNA, 25 bp, Artificial
  probe
  misc_feature (1)..(25): SEQ ID NO: 5679; WAN024ES9_at; Start 211; Stop 235
tttgcggtaacctataatggccagt

SEQ ID NO: 180371 - DNA, 25 bp, Artificial
  probe
  misc_feature (1)..(25): SEQ ID NO: 5679; WAN024ES9_at; Start 1330; Stop 1354
gaaaaatatgctccagaacctgcta

SEQ ID NO: 180372 - DNA, 25 bp, Artificial
  probe
  misc_feature (1)..(25): SEQ ID NO: 5679; WAN024ES9_at; Start 78; Stop 102
caatcgcaagagtgttttgaaatcc

SEQ ID NO: 180373 - DNA, 25 bp, Artificial
  probe
  misc_feature (1)..(25): SEQ ID NO: 5679; WAN024ES9_at; Start 753; Stop 777
tatgtcggtcgctatgggaaatggt

SEQ ID NO: 180374 - DNA, 25 bp, Artificial
  probe
  misc_feature (1)..(25): SEQ ID NO: 5679; WAN024ES9_at; Start 404; Stop 428
gaattagtcgcttcgttccctctgt

SEQ ID NO: 180375 - DNA, 25 bp, Artificial
  probe
  misc_feature (1)..(25): SEQ ID NO: 5679; WAN024ES9_at; Start 467; Stop 491
tcagcaaggttgttccccaaaagga

SEQ ID NO: 180376 - DNA, 25 bp, Artificial
  probe
  misc_feature (1)..(25): SEQ ID NO: 5679; WAN024ES9_at; Start 366; Stop 390
taaaatcatgtcctttggtctgggt

SEQ ID NO: 180377 - DNA, 25 bp, Artificial
  probe
  misc_feature (1)..(25): SEQ ID NO: 5679; WAN024ES9_at; Start 937; Stop 961
gatgaacgaacccaagaagaacctc

SEQ ID NO: 180378 - DNA, 25 bp, Artificial
  probe
  misc_feature (1)..(25): SEQ ID NO: 5679; WAN024ES9_at; Start 564; Stop 588
gaaggcggcagctgattttgaagac

SEQ ID NO: 180379 - DNA, 25 bp, Artificial
  probe
  misc_feature (1)..(25): SEQ ID NO: 5679; WAN024ES9_at; Start 1353; Stop 1377
tattaaaaaggaactgcagcgccag

SEQ ID NO: 180380 - DNA, 25 bp, Artificial
  probe
  misc_feature (1)..(25): SEQ ID NO: 5679; WAN024ES9_at; Start 490; Stop 514
gaagaggacctgcttcacctgatga

SEQ ID NO: 180381 - DNA, 25 bp, Artificial
  probe
  misc_feature (1)..(25): SEQ ID NO: 5679; WAN024ES9_at; Start 1126; Stop 1150
cctgctcagcaagatttgatagggc

SEQ ID NO: 180382 - DNA, 25 bp, Artificial
  probe
  misc_feature (1)..(25): SEQ ID NO: 5679; WAN024ES9_at; Start 972; Stop 996
tttagagggtgcaacccatagggct

SEQ ID NO: 180383 - DNA, 25 bp, Artificial
  probe
  misc_feature (1)..(25): SEQ ID NO: 5679; WAN024ES9_at; Start 1052; Stop 1076
aagattttggtcaagctgtatcgca

SEQ ID NO: 180384 - DNA, 25 bp, Artificial
  probe
  misc_feature (1)..(25): SEQ ID NO: 5679; WAN024ES9_at; Start 1275; Stop 1299
caaggctcattttgatccagtgacc

SEQ ID NO: 180385 - DNA, 25 bp, Artificial
  probe
  misc_feature (1)..(25): SEQ ID NO: 5679; WAN024ES9_at; Start 422; Stop 446
cctctgttttaactcggacggtgag

SEQ ID NO: 180386 - DNA, 25 bp, Artificial
  probe
  misc_feature (1)..(25): SEQ ID NO: 5679; WAN024ES9_at; Start 250; Stop 274
gacagagtcttgttcacgagcccta

SEQ ID NO: 180387 - DNA, 25 bp, Artificial
  probe
  misc_feature (1)..(25): SEQ ID NO: 5679; WAN024ES9_at; Start 305; Stop 329
gctatgctaaaaaagagggcacgga

SEQ ID NO: 180388 - DNA, 25 bp, Artificial
  probe
  misc_feature (1)..(25): SEQ ID NO: 5421; WAN024ESA_at; Start 180; Stop 204
acatgtcattgacacacgcgctctc

SEQ ID NO: 180389 - DNA, 25 bp, Artificial
  probe
  misc_feature (1)..(25): SEQ ID NO: 5421; WAN024ESA_at; Start 356; Stop 380
cacgtactattccagatgccgagga

SEQ ID NO: 180390 - DNA, 25 bp, Artificial
  probe
  misc_feature (1)..(25): SEQ ID NO: 5421; WAN024ESA_at; Start 332; Stop 356
tgggaaatccaaagaccctgctagc

SEQ ID NO: 180391 - DNA, 25 bp, Artificial
  probe
  misc_feature (1)..(25): SEQ ID NO: 5421; WAN024ESA_at; Start 142; Stop 166
cattctgctctacgaaacgacgcta

SEQ ID NO: 180392 - DNA, 25 bp, Artificial
  probe
  misc_feature (1)..(25): SEQ ID NO: 5421; WAN024ESA_at; Start 30; Stop 54
caattatagtaagaaaatttcagga

SEQ ID NO: 180393 - DNA, 25 bp, Artificial
  probe
  misc_feature (1)..(25): SEQ ID NO: 5421; WAN024ESA_at; Start 152; Stop 176
tacgaaacgacgctaaactcaccat

SEQ ID NO: 180394 - DNA, 25 bp, Artificial
  probe
  misc_feature (1)..(25): SEQ ID NO: 5421; WAN024ESA_at; Start 379; Stop 403
gaagtggacctcatcctcgttggcg

SEQ ID NO: 180395 - DNA, 25 bp, Artificial
  probe
  misc_feature (1)..(25): SEQ ID NO: 5421; WAN024ESA_at; Start 255; Stop 279
cgctgaaagtctgatgaaagagtac

SEQ ID NO: 180396 - DNA, 25 bp, Artificial
  probe
  misc_feature (1)..(25): SEQ ID NO: 5421; WAN024ESA_at; Start 79; Stop 103
caaaatatcatggtcgcaatcgatg

SEQ ID NO: 180397 - DNA, 25 bp, Artificial
  probe
  misc_feature (1)..(25): SEQ ID NO: 5421; WAN024ESA_at; Start 454; Stop 478
tacatactccgccatgctaaggtcg

SEQ ID NO: 180398 - DNA, 25 bp, Artificial
  probe
  misc_feature (1)..(25): SEQ ID NO: 5421; WAN024ESA_at; Start 66; Stop 90
ggcacaacgttaccaaaatatcatg

SEQ ID NO: 180399 - DNA, 25 bp, Artificial
  probe
  misc_feature (1)..(25): SEQ ID NO: 5421; WAN024ESA_at; Start 392; Stop 416
tcctcgttggcgcaactggtctcaa

SEQ ID NO: 180400 - DNA, 25 bp, Artificial
  probe
  misc_feature (1)..(25): SEQ ID NO: 5421; WAN024ESA_at; Start 409; Stop 433
ggtctcaacgcctttgaacgcctct

SEQ ID NO: 180401 - DNA, 25 bp, Artificial
  probe
  misc_feature (1)..(25): SEQ ID NO: 5421; WAN024ESA_at; Start 302; Stop 326
gggtagcagatgttcatatcgtcat

SEQ ID NO: 180402 - DNA, 25 bp, Artificial
  probe
  misc_feature (1)..(25): SEQ ID NO: 5421; WAN024ESA_at; Start 401; Stop 425
gcgcaactggtctcaacgcctttga

SEQ ID NO: 180403 - DNA, 25 bp, Artificial
  probe
  misc_feature (1)..(25): SEQ ID NO: 5421; WAN024ESA_at; Start 92; Stop 116
tcgcaatcgatggttctaaggaagc

SEQ ID NO: 180404 - DNA, 25 bp, Artificial
  probe
  misc_feature (1)..(25): SEQ ID NO: 5421; WAN024ESA_at; Start 131; Stop 155
tcaagggagttcattctgctctacg

SEQ ID NO: 180405 - DNA, 25 bp, Artificial
  probe
  misc_feature (1)..(25): SEQ ID NO: 5421; WAN024ESA_at; Start 47; Stop 71
tttcaggaggtttcattatggcaca

SEQ ID NO: 180406 - DNA, 25 bp, Artificial
  probe
  misc_feature (1)..(25): SEQ ID NO: 5421; WAN024ESA_at; Start 216; Stop 240
cacctttgatgctgaagtttacgaa

SEQ ID NO: 180407 - DNA, 25 bp, Artificial
  probe
  misc_feature (1)..(25): SEQ ID NO: 5421; WAN024ESA_at; Start 279; Stop 303
cgaaaaacgtgctaaagatgctggg

SEQ ID NO: 180408 - DNA, 25 bp, Artificial
  probe
  misc_feature (1)..(25): SEQ ID NO: 5421; WAN024ESA_at; Start 116; Stop 140
cggacttggcttttgtcaagggagt

SEQ ID NO: 180409 - DNA, 25 bp, Artificial
  probe
  misc_feature (1)..(25): SEQ ID NO: 5421; WAN024ESA_at; Start 233; Stop 257
tttacgaagaactccaagtcgacgc

SEQ ID NO: 180410 - DNA, 25 bp, Artificial
  probe
  misc_feature (1)..(25): SEQ ID NO: 5421; WAN024ESA_at; Start 367; Stop 391
ccagatgccgaggaagtggacctca

SEQ ID NO: 180411 - DNA, 25 bp, Artificial
  probe
  misc_feature (1)..(25): SEQ ID NO: 5421; WAN024ESA_at; Start 7; Stop 31
tacttctatagtgaaaaggtttaca

SEQ ID NO: 180412 - DNA, 25 bp, Artificial
  probe
  misc_feature (1)..(25): SEQ ID NO: 5421; WAN024ESA_at; Start 442; Stop 466
tcttcatctgaatacatactccgcc

SEQ ID NO: 180413 - DNA, 25 bp, Artificial
  probe
  misc_feature (1)..(25): SEQ ID NO: 5421; WAN024ESA_at; Start 56; Stop 80
gtttcattatggcacaacgttacca

SEQ ID NO: 180414 - DNA, 25 bp, Artificial
  probe
  misc_feature (1)..(25): SEQ ID NO: 5421; WAN024ESA_at; Start 318; Stop 342
tatcgtcattgaaatgggaaatcca

SEQ ID NO: 180415 - DNA, 25 bp, Artificial
  probe
  misc_feature (1)..(25): SEQ ID NO: 5421; WAN024ESA_at; Start 206; Stop 230
aaagcgtatccacctttgatgctga

SEQ ID NO: 180416 - DNA, 25 bp, Artificial
  probe
  misc_feature (1)..(25): SEQ ID NO: 5421; WAN024ESA_at; Start 341; Stop 365
caaagaccctgctagcacgtactat

SEQ ID NO: 180417 - DNA, 25 bp, Artificial
  probe
  misc_feature (1)..(25): SEQ ID NO: 5421; WAN024ESA_at; Start 190; Stop 214
gacacacgcgctctccaaagcgtat

SEQ ID NO: 180418 - DNA, 25 bp, Artificial
  probe
  misc_feature (1)..(25): SEQ ID NO: 5421; WAN024ESA_at; Start 267; Stop 291
gatgaaagagtacgaaaaacgtgct

SEQ ID NO: 180419 - DNA, 25 bp, Artificial
  probe
  misc_feature (1)..(25): SEQ ID NO: 5421; WAN024ESA_at; Start 102; Stop 126
tggttctaaggaagcggacttggct

SEQ ID NO: 180420 - DNA, 25 bp, Artificial
  probe
  misc_feature (1)..(25): SEQ ID NO: 5421; WAN024ESA_at; Start 466; Stop 490
catgctaaggtcgatttgctggttg

SEQ ID NO: 180421 - DNA, 25 bp, Artificial
  probe
  misc_feature (1)..(25): SEQ ID NO: 5421; WAN024ESA_at; Start 245; Stop 269
tccaagtcgacgctgaaagtctgat

SEQ ID NO: 180422 - DNA, 25 bp, Artificial
  probe
  misc_feature (1)..(25): SEQ ID NO: 3891; WAN024ESB_at; Start 340; Stop 364
cgttcttaacctcgcctttagcaag

SEQ ID NO: 180423 - DNA, 25 bp, Artificial
  probe
  misc_feature (1)..(25): SEQ ID NO: 3891; WAN024ESB_at; Start 358; Stop 382
tagcaaggtttttcttctatacgaa

SEQ ID NO: 180424 - DNA, 25 bp, Artificial
  probe
  misc_feature (1)..(25): SEQ ID NO: 3891; WAN024ESB_at; Start 318; Stop 342
tgcaaaatacctgctatctctacgt

SEQ ID NO: 180425 - DNA, 25 bp, Artificial
  probe
  misc_feature (1)..(25): SEQ ID NO: 3891; WAN024ESB_at; Start 285; Stop 309
tctaggtttatcttttggtatgtga

SEQ ID NO: 180426 - DNA, 25 bp, Artificial
  probe
  misc_feature (1)..(25): SEQ ID NO: 3891; WAN024ESB_at; Start 338; Stop 362
tacgttcttaacctcgcctttagca

SEQ ID NO: 180427 - DNA, 25 bp, Artificial
  probe
  misc_feature (1)..(25): SEQ ID NO: 3891; WAN024ESB_at; Start 217; Stop 241
tacttgatgatatgggggcttttcc

SEQ ID NO: 180428 - DNA, 25 bp, Artificial
  probe
  misc_feature (1)..(25): SEQ ID NO: 3891; WAN024ESB_at; Start 325; Stop 349
tacctgctatctctacgttcttaac

SEQ ID NO: 180429 - DNA, 25 bp, Artificial
  probe
  misc_feature (1)..(25): SEQ ID NO: 3891; WAN024ESB_at; Start 252; Stop 276
tcttctttatgactcctttctaggc

SEQ ID NO: 180430 - DNA, 25 bp, Artificial
  probe
  misc_feature (1)..(25): SEQ ID NO: 3891; WAN024ESB_at; Start 243; Stop 267
catgtttaatcttctttatgactcc

SEQ ID NO: 180431 - DNA, 25 bp, Artificial
  probe
  misc_feature (1)..(25): SEQ ID NO: 3891; WAN024ESB_at; Start 58; Stop 82
ggaattatcctagtttcagtcttgg

SEQ ID NO: 180432 - DNA, 25 bp, Artificial
  probe
  misc_feature (1)..(25): SEQ ID NO: 3891; WAN024ESB_at; Start 232; Stop 256
gggcttttcctcatgtttaatcttc

SEQ ID NO: 180433 - DNA, 25 bp, Artificial
  probe
  misc_feature (1)..(25): SEQ ID NO: 3891; WAN024ESB_at; Start 296; Stop 320
cttttggtatgtgatgtgtctttgc

SEQ ID NO: 180434 - DNA, 25 bp, Artificial
  probe
  misc_feature (1)..(25): SEQ ID NO: 3891; WAN024ESB_at; Start 208; Stop 232
cgttgggattacttgatgatatggg

SEQ ID NO: 180435 - DNA, 25 bp, Artificial
  probe
  misc_feature (1)..(25): SEQ ID NO: 3891; WAN024ESB_at; Start 70; Stop 94
gtttcagtcttggtagaagtgatca

SEQ ID NO: 180436 - DNA, 25 bp, Artificial
  probe
  misc_feature (1)..(25): SEQ ID NO: 3891; WAN024ESB_at; Start 163; Stop 187
gtactctaccatctaatcttatttc

SEQ ID NO: 180437 - DNA, 25 bp, Artificial
  probe
  misc_feature (1)..(25): SEQ ID NO: 3891; WAN024ESB_at; Start 370; Stop 394
tcttctatacgaaactagtaacaca

SEQ ID NO: 180438 - DNA, 25 bp, Artificial
  probe
  misc_feature (1)..(25): SEQ ID NO: 3891; WAN024ESB_at; Start 3; Stop 27
gaaggaagggagaatgatgaaaaac

SEQ ID NO: 180439 - DNA, 25 bp, Artificial
  probe
  misc_feature (1)..(25): SEQ ID NO: 3891; WAN024ESB_at; Start 329; Stop 353
tgctatctctacgttcttaacctcg

SEQ ID NO: 180440 - DNA, 25 bp, Artificial
  probe
  misc_feature (1)..(25): SEQ ID NO: 3891; WAN024ESB_at; Start 65; Stop 89
tcctagtttcagtcttggtagaagt

SEQ ID NO: 180441 - DNA, 25 bp, Artificial
  probe
  misc_feature (1)..(25): SEQ ID NO: 3891; WAN024ESB_at; Start 306; Stop 330
gtgatgtgtctttgcaaaatacctg

SEQ ID NO: 180442 - DNA, 25 bp, Artificial
  probe
  misc_feature (1)..(25): SEQ ID NO: 3891; WAN024ESB_at; Start 311; Stop 335
gtgtctttgcaaaatacctgctatc

SEQ ID NO: 180443 - DNA, 25 bp, Artificial
  probe
  misc_feature (1)..(25): SEQ ID NO: 3891; WAN024ESB_at; Start 10; Stop 34
gggagaatgatgaaaaactcttttc

SEQ ID NO: 180444 - DNA, 25 bp, Artificial
  probe
  misc_feature (1)..(25): SEQ ID NO: 3891; WAN024ESB_at; Start 109; Stop 133
gagagtctggtaccgcttctttatc

SEQ ID NO: 180445 - DNA, 25 bp, Artificial
  probe
  misc_feature (1)..(25): SEQ ID NO: 3891; WAN024ESB_at; Start 159; Stop 183
tcatgtactctaccatctaatctta

SEQ ID NO: 180446 - DNA, 25 bp, Artificial
  probe
  misc_feature (1)..(25): SEQ ID NO: 3891; WAN024ESB_at; Start 75; Stop 99
agtcttggtagaagtgatcatgatc

SEQ ID NO: 180447 - DNA, 25 bp, Artificial
  probe
  misc_feature (1)..(25): SEQ ID NO: 3891; WAN024ESB_at; Start 259; Stop 283
tatgactcctttctaggcttgcttt

SEQ ID NO: 180448 - DNA, 25 bp, Artificial
  probe
  misc_feature (1)..(25): SEQ ID NO: 3891; WAN024ESB_at; Start 204; Stop 228
tgggcgttgggattacttgatgata

SEQ ID NO: 180449 - DNA, 25 bp, Artificial
  probe
  misc_feature (1)..(25): SEQ ID NO: 3891; WAN024ESB_at; Start 272; Stop 296
taggcttgctttttctaggtttatc

SEQ ID NO: 180450 - DNA, 25 bp, Artificial
  probe
  misc_feature (1)..(25): SEQ ID NO: 3891; WAN024ESB_at; Start 103; Stop 127
caattagagagtctggtaccgcttc

SEQ ID NO: 180451 - DNA, 25 bp, Artificial
  probe
  misc_feature (1)..(25): SEQ ID NO: 3891; WAN024ESB_at; Start 388; Stop 412
taacacatttcagtaaacttgtcgc

SEQ ID NO: 180452 - DNA, 25 bp, Artificial
  probe
  misc_feature (1)..(25): SEQ ID NO: 3891; WAN024ESB_at; Start 401; Stop 425
taaacttgtcgcattctctttctag

SEQ ID NO: 180453 - DNA, 25 bp, Artificial
  probe
  misc_feature (1)..(25): SEQ ID NO: 3891; WAN024ESB_at; Start 46; Stop 70
ttcctttattatggaattatcctag

SEQ ID NO: 180454 - DNA, 25 bp, Artificial
  probe
  misc_feature (1)..(25): SEQ ID NO: 3891; WAN024ESB_at; Start 377; Stop 401
tacgaaactagtaacacatttcagt

SEQ ID NO: 180455 - DNA, 25 bp, Artificial
  probe
  misc_feature (1)..(25): SEQ ID NO: 3891; WAN024ESB_at; Start 393; Stop 417
catttcagtaaacttgtcgcattct

SEQ ID NO: 180456 - DNA, 25 bp, Artificial
  probe
  misc_feature (1)..(25): SEQ ID NO: 5177; WAN024ESC_at; Start 238; Stop 262
gaagcagtcactttaggcctggaca

SEQ ID NO: 180457 - DNA, 25 bp, Artificial
  probe
  misc_feature (1)..(25): SEQ ID NO: 5177; WAN024ESC_at; Start 122; Stop 146
tcttattagaagaaacgaatccttc

SEQ ID NO: 180458 - DNA, 25 bp, Artificial
  probe
  misc_feature (1)..(25): SEQ ID NO: 5177; WAN024ESC_at; Start 146; Stop 170
cacattttcaccgattgacagcaga

SEQ ID NO: 180459 - DNA, 25 bp, Artificial
  probe
  misc_feature (1)..(25): SEQ ID NO: 5177; WAN024ESC_at; Start 208; Stop 232
gttcacatgattacagcagatggtc

SEQ ID NO: 180460 - DNA, 25 bp, Artificial
  probe
  misc_feature (1)..(25): SEQ ID NO: 5177; WAN024ESC_at; Start 410; Stop 434
tggcgacctatccagagcacaagga

SEQ ID NO: 180461 - DNA, 25 bp, Artificial
  probe
  misc_feature (1)..(25): SEQ ID NO: 5177; WAN024ESC_at; Start 416; Stop 440
cctatccagagcacaaggagatgat

SEQ ID NO: 180462 - DNA, 25 bp, Artificial
  probe
  misc_feature (1)..(25): SEQ ID NO: 5177; WAN024ESC_at; Start 64; Stop 88
gcttcagacactataaaccttgctg

SEQ ID NO: 180463 - DNA, 25 bp, Artificial
  probe
  misc_feature (1)..(25): SEQ ID NO: 5177; WAN024ESC_at; Start 347; Stop 371
cttgtcttgttgctcctggttttga

SEQ ID NO: 180464 - DNA, 25 bp, Artificial
  probe
  misc_feature (1)..(25): SEQ ID NO: 5177; WAN024ESC_at; Start 257; Stop 281
tggacatatccaaagggcaacaact

SEQ ID NO: 180465 - DNA, 25 bp, Artificial
  probe
  misc_feature (1)..(25): SEQ ID NO: 5177; WAN024ESC_at; Start 185; Stop 209
ttcatgcaggatccccacttactgt

SEQ ID NO: 180466 - DNA, 25 bp, Artificial
  probe
  misc_feature (1)..(25): SEQ ID NO: 5177; WAN024ESC_at; Start 235; Stop 259
tacgaagcagtcactttaggcctgg

SEQ ID NO: 180467 - DNA, 25 bp, Artificial
  probe
  misc_feature (1)..(25): SEQ ID NO: 5177; WAN024ESC_at; Start 34; Stop 58
gaaggtggctattttagacaaacaa

SEQ ID NO: 180468 - DNA, 25 bp, Artificial
  probe
  misc_feature (1)..(25): SEQ ID NO: 5177; WAN024ESC_at; Start 219; Stop 243
tacagcagatggtcactacgaagca

SEQ ID NO: 180469 - DNA, 25 bp, Artificial
  probe
  misc_feature (1)..(25): SEQ ID NO: 5177; WAN024ESC_at; Start 303; Stop 327
cactatttggggatcaacagttgat

SEQ ID NO: 180470 - DNA, 25 bp, Artificial
  probe
  misc_feature (1)..(25): SEQ ID NO: 5177; WAN024ESC_at; Start 95; Stop 119
gaagggcgctttataccagtattta

SEQ ID NO: 180471 - DNA, 25 bp, Artificial
  probe
  misc_feature (1)..(25): SEQ ID NO: 5177; WAN024ESC_at; Start 153; Stop 177
tcaccgattgacagcagatgaaatc

SEQ ID NO: 180472 - DNA, 25 bp, Artificial
  probe
  misc_feature (1)..(25): SEQ ID NO: 5177; WAN024ESC_at; Start 288; Stop 312
ctgtgttcctaagggcactatttgg

SEQ ID NO: 180473 - DNA, 25 bp, Artificial
  probe
  misc_feature (1)..(25): SEQ ID NO: 5177; WAN024ESC_at; Start 48; Stop 72
tagacaaacaaaaaaagcttcagac

SEQ ID NO: 180474 - DNA, 25 bp, Artificial
  probe
  misc_feature (1)..(25): SEQ ID NO: 5177; WAN024ESC_at; Start 268; Stop 292
aaagggcaacaacttcactactgtg

SEQ ID NO: 180475 - DNA, 25 bp, Artificial
  probe
  misc_feature (1)..(25): SEQ ID NO: 5177; WAN024ESC_at; Start 193; Stop 217
ggatccccacttactgttcacatga

SEQ ID NO: 180476 - DNA, 25 bp, Artificial
  probe
  misc_feature (1)..(25): SEQ ID NO: 5177; WAN024ESC_at; Start 337; Stop 361
gctctggtttcttgtcttgttgctc

SEQ ID NO: 180477 - DNA, 25 bp, Artificial
  probe
  misc_feature (1)..(25): SEQ ID NO: 5177; WAN024ESC_at; Start 421; Stop 445
ccagagcacaaggagatgattgagc

SEQ ID NO: 180478 - DNA, 25 bp, Artificial
  probe
  misc_feature (1)..(25): SEQ ID NO: 5177; WAN024ESC_at; Start 72; Stop 96
cactataaaccttgctggtaaggga

SEQ ID NO: 180479 - DNA, 25 bp, Artificial
  probe
  misc_feature (1)..(25): SEQ ID NO: 5177; WAN024ESC_at; Start 226; Stop 250
gatggtcactacgaagcagtcactt

SEQ ID NO: 180480 - DNA, 25 bp, Artificial
  probe
  misc_feature (1)..(25): SEQ ID NO: 5177; WAN024ESC_at; Start 250; Stop 274
ttaggcctggacatatccaaagggc

SEQ ID NO: 180481 - DNA, 25 bp, Artificial
  probe
  misc_feature (1)..(25): SEQ ID NO: 5177; WAN024ESC_at; Start 282; Stop 306
tcactactgtgttcctaagggcact

SEQ ID NO: 180482 - DNA, 25 bp, Artificial
  probe
  misc_feature (1)..(25): SEQ ID NO: 5177; WAN024ESC_at; Start 5; Stop 29
taagaactctagagttagctcccca

SEQ ID NO: 180483 - DNA, 25 bp, Artificial
  probe
  misc_feature (1)..(25): SEQ ID NO: 5177; WAN024ESC_at; Start 375; Stop 399
tgaggattttgaattatttgaaagg

SEQ ID NO: 180484 - DNA, 25 bp, Artificial
  probe
  misc_feature (1)..(25): SEQ ID NO: 5177; WAN024ESC_at; Start 179; Stop 203
ggtattttcatgcaggatccccact

SEQ ID NO: 180485 - DNA, 25 bp, Artificial
  probe
  misc_feature (1)..(25): SEQ ID NO: 5177; WAN024ESC_at; Start 135; Stop 159
aacgaatccttcacattttcaccga

SEQ ID NO: 180486 - DNA, 25 bp, Artificial
  probe
  misc_feature (1)..(25): SEQ ID NO: 5177; WAN024ESC_at; Start 92; Stop 116
agggaagggcgctttataccagtat

SEQ ID NO: 180487 - DNA, 25 bp, Artificial
  probe
  misc_feature (1)..(25): SEQ ID NO: 5177; WAN024ESC_at; Start 164; Stop 188
cagcagatgaaatctggtattttca

SEQ ID NO: 180488 - DNA, 25 bp, Artificial
  probe
  misc_feature (1)..(25): SEQ ID NO: 5177; WAN024ESC_at; Start 361; Stop 385
cctggttttgaatttgaggattttg

SEQ ID NO: 180489 - DNA, 25 bp, Artificial
  probe
  misc_feature (1)..(25): SEQ ID NO: 5177; WAN024ESC_at; Start 402; Stop 426
agatctactggcgacctatccagag

SEQ ID NO: 180490 - DNA, 25 bp, Artificial
  probe
  misc_feature (1)..(25): SEQ ID NO: 1255; WAN024ESD_at; Start 181; Stop 205
gttactcaggctcgcactatgggtg

SEQ ID NO: 180491 - DNA, 25 bp, Artificial
  probe
  misc_feature (1)..(25): SEQ ID NO: 1255; WAN024ESD_at; Start 577; Stop 601
tccgtgtcatgtttatttaatccca

SEQ ID NO: 180492 - DNA, 25 bp, Artificial
  probe
  misc_feature (1)..(25): SEQ ID NO: 1255; WAN024ESD_at; Start 473; Stop 497
caacaatttataggtgtttgaggac

SEQ ID NO: 180493 - DNA, 25 bp, Artificial
  probe
  misc_feature (1)..(25): SEQ ID NO: 1255; WAN024ESD_at; Start 540; Stop 564
cacatatacggtgtcaaagaaagaa

SEQ ID NO: 180494 - DNA, 25 bp, Artificial
  probe
  misc_feature (1)..(25): SEQ ID NO: 1255; WAN024ESD_at; Start 264; Stop 288
gcaattacttcaagctagagttccg

SEQ ID NO: 180495 - DNA, 25 bp, Artificial
  probe
  misc_feature (1)..(25): SEQ ID NO: 1255; WAN024ESD_at; Start 359; Stop 383
tccctaaggaattaacacctagcga

SEQ ID NO: 180496 - DNA, 25 bp, Artificial
  probe
  misc_feature (1)..(25): SEQ ID NO: 1255; WAN024ESD_at; Start 768; Stop 792
gccactttctcagcatgttttaaaa

SEQ ID NO: 180497 - DNA, 25 bp, Artificial
  probe
  misc_feature (1)..(25): SEQ ID NO: 1255; WAN024ESD_at; Start 371; Stop 395
taacacctagcgaacaattaacgtg

SEQ ID NO: 180498 - DNA, 25 bp, Artificial
  probe
  misc_feature (1)..(25): SEQ ID NO: 1255; WAN024ESD_at; Start 57; Stop 81
tgaggaactgactttgactttacca

SEQ ID NO: 180499 - DNA, 25 bp, Artificial
  probe
  misc_feature (1)..(25): SEQ ID NO: 1255; WAN024ESD_at; Start 695; Stop 719
caacttttttagctgaaacggatga

SEQ ID NO: 180500 - DNA, 25 bp, Artificial
  probe
  misc_feature (1)..(25): SEQ ID NO: 1255; WAN024ESD_at; Start 758; Stop 782
agttatccttgccactttctcagca

SEQ ID NO: 180501 - DNA, 25 bp, Artificial
  probe
  misc_feature (1)..(25): SEQ ID NO: 1255; WAN024ESD_at; Start 621; Stop 645
gccagatggcgatataaagcagata

SEQ ID NO: 180502 - DNA, 25 bp, Artificial
  probe
  misc_feature (1)..(25): SEQ ID NO: 1255; WAN024ESD_at; Start 733; Stop 757
gtcatatggcagagaaaattcaatc

SEQ ID NO: 180503 - DNA, 25 bp, Artificial
  probe
  misc_feature (1)..(25): SEQ ID NO: 1255; WAN024ESD_at; Start 682; Stop 706
gctttgtcgcattcaacttttttag

SEQ ID NO: 180504 - DNA, 25 bp, Artificial
  probe
  misc_feature (1)..(25): SEQ ID NO: 1255; WAN024ESD_at; Start 562; Stop 586
gaattattcttaaaatccgtgtcat

SEQ ID NO: 180505 - DNA, 25 bp, Artificial
  probe
  misc_feature (1)..(25): SEQ ID NO: 1255; WAN024ESD_at; Start 459; Stop 483
tggacttccaaactcaacaatttat

SEQ ID NO: 180506 - DNA, 25 bp, Artificial
  probe
  misc_feature (1)..(25): SEQ ID NO: 1255; WAN024ESD_at; Start 378; Stop 402
tagcgaacaattaacgtggattgcc

SEQ ID NO: 180507 - DNA, 25 bp, Artificial
  probe
  misc_feature (1)..(25): SEQ ID NO: 1255; WAN024ESD_at; Start 68; Stop 92
ctttgactttaccaatcagttttgt

SEQ ID NO: 180508 - DNA, 25 bp, Artificial
  probe
  misc_feature (1)..(25): SEQ ID NO: 1255; WAN024ESD_at; Start 228; Stop 252
tttggtgttttcgaagttatcagac

SEQ ID NO: 180509 - DNA, 25 bp, Artificial
  probe
  misc_feature (1)..(25): SEQ ID NO: 1255; WAN024ESD_at; Start 673; Stop 697
ggtgcttatgctttgtcgcattcaa

SEQ ID NO: 180510 - DNA, 25 bp, Artificial
  probe
  misc_feature (1)..(25): SEQ ID NO: 1255; WAN024ESD_at; Start 452; Stop 476
aagtcactggacttccaaactcaac

SEQ ID NO: 180511 - DNA, 25 bp, Artificial
  probe
  misc_feature (1)..(25): SEQ ID NO: 1255; WAN024ESD_at; Start 746; Stop 770
gaaaattcaatcagttatccttgcc

SEQ ID NO: 180512 - DNA, 25 bp, Artificial
  probe
  misc_feature (1)..(25): SEQ ID NO: 1255; WAN024ESD_at; Start 511; Stop 535
tattggttaaacaagcaaaataagc

SEQ ID NO: 180513 - DNA, 25 bp, Artificial
  probe
  misc_feature (1)..(25): SEQ ID NO: 1255; WAN024ESD_at; Start 42; Stop 66
tgttgatgtcagtattgaggaactg

SEQ ID NO: 180514 - DNA, 25 bp, Artificial
  probe
  misc_feature (1)..(25): SEQ ID NO: 1255; WAN024ESD_at; Start 439; Stop 463
gatttgctttcacaagtcactggac

SEQ ID NO: 180515 - DNA, 25 bp, Artificial
  probe
  misc_feature (1)..(25): SEQ ID NO: 1255; WAN024ESD_at; Start 546; Stop 570
tacggtgtcaaagaaagaattattc

SEQ ID NO: 180516 - DNA, 25 bp, Artificial
  probe
  misc_feature (1)..(25): SEQ ID NO: 1255; WAN024ESD_at; Start 31; Stop 55
caatccttttatgttgatgtcagta

SEQ ID NO: 180517 - DNA, 25 bp, Artificial
  probe
  misc_feature (1)..(25): SEQ ID NO: 1255; WAN024ESD_at; Start 274; Stop 298
caagctagagttccgtttgtagact

SEQ ID NO: 180518 - DNA, 25 bp, Artificial
  probe
  misc_feature (1)..(25): SEQ ID NO: 1255; WAN024ESD_at; Start 390; Stop 414
aacgtggattgcctttttattgaca

SEQ ID NO: 180519 - DNA, 25 bp, Artificial
  probe
  misc_feature (1)..(25): SEQ ID NO: 1255; WAN024ESD_at; Start 3; Stop 27
gaatgtcaaaaagataatgtcaatt

SEQ ID NO: 180520 - DNA, 25 bp, Artificial
  probe
  misc_feature (1)..(25): SEQ ID NO: 1255; WAN024ESD_at; Start 172; Stop 196
agttcatttgttactcaggctcgca

SEQ ID NO: 180521 - DNA, 25 bp, Artificial
  probe
  misc_feature (1)..(25): SEQ ID NO: 1255; WAN024ESD_at; Start 90; Stop 114
tgtaaaaaggtttgagtatactcaa

SEQ ID NO: 180522 - DNA, 25 bp, Artificial
  probe
  misc_feature (1)..(25): SEQ ID NO: 1255; WAN024ESD_at; Start 110; Stop 134
ctcaaatgacttttcataaggaatc

SEQ ID NO: 180523 - DNA, 25 bp, Artificial
  probe
  misc_feature (1)..(25): SEQ ID NO: 1255; WAN024ESD_at; Start 526; Stop 550
caaaataagctttacacatatacgg

SEQ ID NO: 180524 - DNA, 25 bp, Artificial
  probe
  misc_feature (1)..(25): SEQ ID NO: 3539; WAN024ESE_at; Start 183; Stop 207
aaaacgattaaatgagctgatagat

SEQ ID NO: 180525 - DNA, 25 bp, Artificial
  probe
  misc_feature (1)..(25): SEQ ID NO: 3539; WAN024ESE_at; Start 56; Stop 80
cattcaaatttgtagaaggatataa

SEQ ID NO: 180526 - DNA, 25 bp, Artificial
  probe
  misc_feature (1)..(25): SEQ ID NO: 3539; WAN024ESE_at; Start 177; Stop 201
ttttcaaaaacgattaaatgagctg

SEQ ID NO: 180527 - DNA, 25 bp, Artificial
  probe
  misc_feature (1)..(25): SEQ ID NO: 3539; WAN024ESE_at; Start 74; Stop 98
gatataaaatatacctgacagaatc

SEQ ID NO: 180528 - DNA, 25 bp, Artificial
  probe
  misc_feature (1)..(25): SEQ ID NO: 3539; WAN024ESE_at; Start 123; Stop 147
ggacaatgtcataaaatattttgag

SEQ ID NO: 180529 - DNA, 25 bp, Artificial
  probe
  misc_feature (1)..(25): SEQ ID NO: 3539; WAN024ESE_at; Start 181; Stop 205
caaaaacgattaaatgagctgatag

SEQ ID NO: 180530 - DNA, 25 bp, Artificial
  probe
  misc_feature (1)..(25): SEQ ID NO: 3539; WAN024ESE_at; Start 114; Stop 138
taaacaaatggacaatgtcataaaa

SEQ ID NO: 180531 - DNA, 25 bp, Artificial
  probe
  misc_feature (1)..(25): SEQ ID NO: 3539; WAN024ESE_at; Start 66; Stop 90
tgtagaaggatataaaatatacctg

SEQ ID NO: 180532 - DNA, 25 bp, Artificial
  probe
  misc_feature (1)..(25): SEQ ID NO: 3539; WAN024ESE_at; Start 103; Stop 127
gaatctggaattaaacaaatggaca

SEQ ID NO: 180533 - DNA, 25 bp, Artificial
  probe
  misc_feature (1)..(25): SEQ ID NO: 3539; WAN024ESE_at; Start 150; Stop 174
tattgaatctaaaagtattgcttta

SEQ ID NO: 180534 - DNA, 25 bp, Artificial
  probe
  misc_feature (1)..(25): SEQ ID NO: 3539; WAN024ESE_at; Start 109; Stop 133
ggaattaaacaaatggacaatgtca

SEQ ID NO: 180535 - DNA, 25 bp, Artificial
  probe
  misc_feature (1)..(25): SEQ ID NO: 3539; WAN024ESE_at; Start 87; Stop 111
cctgacagaatctaaagaatctgga

SEQ ID NO: 180536 - DNA, 25 bp, Artificial
  probe
  misc_feature (1)..(25): SEQ ID NO: 3539; WAN024ESE_at; Start 79; Stop 103
aaaatatacctgacagaatctaaag

SEQ ID NO: 180537 - DNA, 25 bp, Artificial
  probe
  misc_feature (1)..(25): SEQ ID NO: 3539; WAN024ESE_at; Start 46; Stop 70
gaaaaatctacattcaaatttgtag

SEQ ID NO: 180538 - DNA, 25 bp, Artificial
  probe
  misc_feature (1)..(25): SEQ ID NO: 3539; WAN024ESE_at; Start 106; Stop 130
tctggaattaaacaaatggacaatg

SEQ ID NO: 180539 - DNA, 25 bp, Artificial
  probe
  misc_feature (1)..(25): SEQ ID NO: 3539; WAN024ESE_at; Start 85; Stop 109
tacctgacagaatctaaagaatctg

SEQ ID NO: 180540 - DNA, 25 bp, Artificial
  probe
  misc_feature (1)..(25): SEQ ID NO: 3539; WAN024ESE_at; Start 70; Stop 94
gaaggatataaaatatacctgacag

SEQ ID NO: 180541 - DNA, 25 bp, Artificial
  probe
  misc_feature (1)..(25): SEQ ID NO: 3539; WAN024ESE_at; Start 186; Stop 210
acgattaaatgagctgatagattaa

SEQ ID NO: 180542 - DNA, 25 bp, Artificial
  probe
  misc_feature (1)..(25): SEQ ID NO: 3539; WAN024ESE_at; Start 83; Stop 107
tatacctgacagaatctaaagaatc

SEQ ID NO: 180543 - DNA, 25 bp, Artificial
  probe
  misc_feature (1)..(25): SEQ ID NO: 3539; WAN024ESE_at; Start 76; Stop 100
tataaaatatacctgacagaatcta

SEQ ID NO: 180544 - DNA, 25 bp, Artificial
  probe
  misc_feature (1)..(25): SEQ ID NO: 3539; WAN024ESE_at; Start 165; Stop 189
tattgctttatattttcaaaaacga

SEQ ID NO: 180545 - DNA, 25 bp, Artificial
  probe
  misc_feature (1)..(25): SEQ ID NO: 3539; WAN024ESE_at; Start 99; Stop 123
taaagaatctggaattaaacaaatg

SEQ ID NO: 180546 - DNA, 25 bp, Artificial
  probe
  misc_feature (1)..(25): SEQ ID NO: 3539; WAN024ESE_at; Start 73; Stop 97
ggatataaaatatacctgacagaat

SEQ ID NO: 180547 - DNA, 25 bp, Artificial
  probe
  misc_feature (1)..(25): SEQ ID NO: 3539; WAN024ESE_at; Start 108; Stop 132
tggaattaaacaaatggacaatgtc

SEQ ID NO: 180548 - DNA, 25 bp, Artificial
  probe
  misc_feature (1)..(25): SEQ ID NO: 3539; WAN024ESE_at; Start 97; Stop 121
tctaaagaatctggaattaaacaaa

SEQ ID NO: 180549 - DNA, 25 bp, Artificial
  probe
  misc_feature (1)..(25): SEQ ID NO: 3539; WAN024ESE_at; Start 88; Stop 112
ctgacagaatctaaagaatctggaa

SEQ ID NO: 180550 - DNA, 25 bp, Artificial
  probe
  misc_feature (1)..(25): SEQ ID NO: 3539; WAN024ESE_at; Start 101; Stop 125
aagaatctggaattaaacaaatgga

SEQ ID NO: 180551 - DNA, 25 bp, Artificial
  probe
  misc_feature (1)..(25): SEQ ID NO: 3539; WAN024ESE_at; Start 94; Stop 118
gaatctaaagaatctggaattaaac

SEQ ID NO: 180552 - DNA, 25 bp, Artificial
  probe
  misc_feature (1)..(25): SEQ ID NO: 3539; WAN024ESE_at; Start 179; Stop 203
ttcaaaaacgattaaatgagctgat

SEQ ID NO: 180553 - DNA, 25 bp, Artificial
  probe
  misc_feature (1)..(25): SEQ ID NO: 3539; WAN024ESE_at; Start 185; Stop 209
aacgattaaatgagctgatagatta

SEQ ID NO: 180554 - DNA, 25 bp, Artificial
  probe
  misc_feature (1)..(25): SEQ ID NO: 3539; WAN024ESE_at; Start 146; Stop 170
agtttattgaatctaaaagtattgc

SEQ ID NO: 180555 - DNA, 25 bp, Artificial
  probe
  misc_feature (1)..(25): SEQ ID NO: 3539; WAN024ESE_at; Start 68; Stop 92
tagaaggatataaaatatacctgac

SEQ ID NO: 180556 - DNA, 25 bp, Artificial
  probe
  misc_feature (1)..(25): SEQ ID NO: 3539; WAN024ESE_at; Start 90; Stop 114
gacagaatctaaagaatctggaatt

SEQ ID NO: 180557 - DNA, 25 bp, Artificial
  probe
  misc_feature (1)..(25): SEQ ID NO: 3539; WAN024ESE_at; Start 110; Stop 134
gaattaaacaaatggacaatgtcat

SEQ ID NO: 180558 - DNA, 25 bp, Artificial
  probe
  misc_feature (1)..(25): SEQ ID NO: 4217; WAN024ESF_at; Start 219; Stop 243
caccaggaagaagcaattcatcgac

SEQ ID NO: 180559 - DNA, 25 bp, Artificial
  probe
  misc_feature (1)..(25): SEQ ID NO: 4217; WAN024ESF_at; Start 8; Stop 32
ggttcctgccagttaaagcctcgac

SEQ ID NO: 180560 - DNA, 25 bp, Artificial
  probe
  misc_feature (1)..(25): SEQ ID NO: 4217; WAN024ESF_at; Start 209; Stop 233
tagattcgtccaccaggaagaagca

SEQ ID NO: 180561 - DNA, 25 bp, Artificial
  probe
  misc_feature (1)..(25): SEQ ID NO: 4217; WAN024ESF_at; Start 76; Stop 100
aaactgctcatcatcatcgatacgg

SEQ ID NO: 180562 - DNA, 25 bp, Artificial
  probe
  misc_feature (1)..(25): SEQ ID NO: 4217; WAN024ESF_at; Start 192; Stop 216
tgaaatttctttgctcgtagattcg

SEQ ID NO: 180563 - DNA, 25 bp, Artificial
  probe
  misc_feature (1)..(25): SEQ ID NO: 4217; WAN024ESF_at; Start 120; Stop 144
ttgggaagatatagagccccgcctt

SEQ ID NO: 180564 - DNA, 25 bp, Artificial
  probe
  misc_feature (1)..(25): SEQ ID NO: 4217; WAN024ESF_at; Start 17; Stop 41
cagttaaagcctcgaccatgaacca

SEQ ID NO: 180565 - DNA, 25 bp, Artificial
  probe
  misc_feature (1)..(25): SEQ ID NO: 4217; WAN024ESF_at; Start 94; Stop 118
gatacggtacatattgcggtcgatt

SEQ ID NO: 180566 - DNA, 25 bp, Artificial
  probe
  misc_feature (1)..(25): SEQ ID NO: 4217; WAN024ESF_at; Start 118; Stop 142
ttttgggaagatatagagccccgcc

SEQ ID NO: 180567 - DNA, 25 bp, Artificial
  probe
  misc_feature (1)..(25): SEQ ID NO: 4217; WAN024ESF_at; Start 103; Stop 127
catattgcggtcgatttttgggaag

SEQ ID NO: 180568 - DNA, 25 bp, Artificial
  probe
  misc_feature (1)..(25): SEQ ID NO: 4217; WAN024ESF_at; Start 64; Stop 88
gaaatcaaggacaaactgctcatca

SEQ ID NO: 180569 - DNA, 25 bp, Artificial
  probe
  misc_feature (1)..(25): SEQ ID NO: 4217; WAN024ESF_at; Start 122; Stop 146
gggaagatatagagccccgccttgg

SEQ ID NO: 180570 - DNA, 25 bp, Artificial
  probe
  misc_feature (1)..(25): SEQ ID NO: 4217; WAN024ESF_at; Start 54; Stop 78
cctgcttcaagaaatcaaggacaaa

SEQ ID NO: 180571 - DNA, 25 bp, Artificial
  probe
  misc_feature (1)..(25): SEQ ID NO: 4217; WAN024ESF_at; Start 35; Stop 59
tgaaccaagagaaccttttcctgct

SEQ ID NO: 180572 - DNA, 25 bp, Artificial
  probe
  misc_feature (1)..(25): SEQ ID NO: 4217; WAN024ESF_at; Start 60; Stop 84
tcaagaaatcaaggacaaactgctc

SEQ ID NO: 180573 - DNA, 25 bp, Artificial
  probe
  misc_feature (1)..(25): SEQ ID NO: 4217; WAN024ESF_at; Start 43; Stop 67
gagaaccttttcctgcttcaagaaa

SEQ ID NO: 180574 - DNA, 25 bp, Artificial
  probe
  misc_feature (1)..(25): SEQ ID NO: 4217; WAN024ESF_at; Start 164; Stop 188
cctggaatatcttgaatggcattat

SEQ ID NO: 180575 - DNA, 25 bp, Artificial
  probe
  misc_feature (1)..(25): SEQ ID NO: 4217; WAN024ESF_at; Start 81; Stop 105
gctcatcatcatcgatacggtacat

SEQ ID NO: 180576 - DNA, 25 bp, Artificial
  probe
  misc_feature (1)..(25): SEQ ID NO: 4217; WAN024ESF_at; Start 148; Stop 172
tttaacggcagacaaacctggaata

SEQ ID NO: 180577 - DNA, 25 bp, Artificial
  probe
  misc_feature (1)..(25): SEQ ID NO: 4217; WAN024ESF_at; Start 127; Stop 151
gatatagagccccgccttgggttta

SEQ ID NO: 180578 - DNA, 25 bp, Artificial
  probe
  misc_feature (1)..(25): SEQ ID NO: 4217; WAN024ESF_at; Start 28; Stop 52
tcgaccatgaaccaagagaaccttt

SEQ ID NO: 180579 - DNA, 25 bp, Artificial
  probe
  misc_feature (1)..(25): SEQ ID NO: 4217; WAN024ESF_at; Start 21; Stop 45
taaagcctcgaccatgaaccaagag

SEQ ID NO: 180580 - DNA, 25 bp, Artificial
  probe
  misc_feature (1)..(25): SEQ ID NO: 4217; WAN024ESF_at; Start 222; Stop 246
caggaagaagcaattcatcgactga

SEQ ID NO: 180581 - DNA, 25 bp, Artificial
  probe
  misc_feature (1)..(25): SEQ ID NO: 4217; WAN024ESF_at; Start 153; Stop 177
cggcagacaaacctggaatatcttg

SEQ ID NO: 180582 - DNA, 25 bp, Artificial
  probe
  misc_feature (1)..(25): SEQ ID NO: 4217; WAN024ESF_at; Start 115; Stop 139
gatttttgggaagatatagagcccc

SEQ ID NO: 180583 - DNA, 25 bp, Artificial
  probe
  misc_feature (1)..(25): SEQ ID NO: 4217; WAN024ESF_at; Start 71; Stop 95
aggacaaactgctcatcatcatcga

SEQ ID NO: 180584 - DNA, 25 bp, Artificial
  probe
  misc_feature (1)..(25): SEQ ID NO: 4217; WAN024ESF_at; Start 206; Stop 230
tcgtagattcgtccaccaggaagaa

SEQ ID NO: 180585 - DNA, 25 bp, Artificial
  probe
  misc_feature (1)..(25): SEQ ID NO: 4217; WAN024ESF_at; Start 215; Stop 239
cgtccaccaggaagaagcaattcat

SEQ ID NO: 180586 - DNA, 25 bp, Artificial
  probe
  misc_feature (1)..(25): SEQ ID NO: 4217; WAN024ESF_at; Start 1; Stop 25
gtggtctggttcctgccagttaaag

SEQ ID NO: 180587 - DNA, 25 bp, Artificial
  probe
  misc_feature (1)..(25): SEQ ID NO: 4217; WAN024ESF_at; Start 177; Stop 201
gaatggcattatagatgaaatttct

SEQ ID NO: 180588 - DNA, 25 bp, Artificial
  probe
  misc_feature (1)..(25): SEQ ID NO: 4217; WAN024ESF_at; Start 12; Stop 36
cctgccagttaaagcctcgaccatg

SEQ ID NO: 180589 - DNA, 25 bp, Artificial
  probe
  misc_feature (1)..(25): SEQ ID NO: 4217; WAN024ESF_at; Start 201; Stop 225
tttgctcgtagattcgtccaccagg

SEQ ID NO: 180590 - DNA, 25 bp, Artificial
  probe
  misc_feature (1)..(25): SEQ ID NO: 4217; WAN024ESF_at; Start 40; Stop 64
caagagaaccttttcctgcttcaag

SEQ ID NO: 180591 - DNA, 25 bp, Artificial
  probe
  misc_feature (1)..(25): SEQ ID NO: 4217; WAN024ESF_at; Start 90; Stop 114
catcgatacggtacatattgcggtc

SEQ ID NO: 180592 - DNA, 25 bp, Artificial
  probe
  misc_feature (1)..(25): SEQ ID NO: 880; WAN024ESG_at; Start 666; Stop 690
tgtggcgagcttggcaccagatgtc

SEQ ID NO: 180593 - DNA, 25 bp, Artificial
  probe
  misc_feature (1)..(25): SEQ ID NO: 880; WAN024ESG_at; Start 140; Stop 164
gctttacagcgccagacgaggtcat

SEQ ID NO: 180594 - DNA, 25 bp, Artificial
  probe
  misc_feature (1)..(25): SEQ ID NO: 880; WAN024ESG_at; Start 382; Stop 406
gactatcctctatggacggcggctg

SEQ ID NO: 180595 - DNA, 25 bp, Artificial
  probe
  misc_feature (1)..(25): SEQ ID NO: 880; WAN024ESG_at; Start 829; Stop 853
tgctctaacgttttggcccaacaag

SEQ ID NO: 180596 - DNA, 25 bp, Artificial
  probe
  misc_feature (1)..(25): SEQ ID NO: 880; WAN024ESG_at; Start 763; Stop 787
tctggccctaagactcatgttaagg

SEQ ID NO: 180597 - DNA, 25 bp, Artificial
  probe
  misc_feature (1)..(25): SEQ ID NO: 880; WAN024ESG_at; Start 407; Stop 431
tcagcctagctggaggaaatgccgt

SEQ ID NO: 180598 - DNA, 25 bp, Artificial
  probe
  misc_feature (1)..(25): SEQ ID NO: 880; WAN024ESG_at; Start 1034; Stop 1058
tcgatgatgatgagcagtttgtcct

SEQ ID NO: 180599 - DNA, 25 bp, Artificial
  probe
  misc_feature (1)..(25): SEQ ID NO: 880; WAN024ESG_at; Start 778; Stop 802
catgttaagggctatatcgaagggc

SEQ ID NO: 180600 - DNA, 25 bp, Artificial
  probe
  misc_feature (1)..(25): SEQ ID NO: 880; WAN024ESG_at; Start 807; Stop 831
tatgctgtccaatatgcgcctttgc

SEQ ID NO: 180601 - DNA, 25 bp, Artificial
  probe
  misc_feature (1)..(25): SEQ ID NO: 880; WAN024ESG_at; Start 117; Stop 141
tacaggaaatccagcagaatttggc

SEQ ID NO: 180602 - DNA, 25 bp, Artificial
  probe
  misc_feature (1)..(25): SEQ ID NO: 880; WAN024ESG_at; Start 997; Stop 1021
tatatcttcccaaaaatcgaccgca

SEQ ID NO: 180603 - DNA, 25 bp, Artificial
  probe
  misc_feature (1)..(25): SEQ ID NO: 880; WAN024ESG_at; Start 229; Stop 253
gcccgtaaggccatcatgcagtatt

SEQ ID NO: 180604 - DNA, 25 bp, Artificial
  probe
  misc_feature (1)..(25): SEQ ID NO: 880; WAN024ESG_at; Start 358; Stop 382
gatgaggtcttagtgccaatgccag

SEQ ID NO: 180605 - DNA, 25 bp, Artificial
  probe
  misc_feature (1)..(25): SEQ ID NO: 880; WAN024ESG_at; Start 556; Stop 580
cctaaggaactcttgctggagatta

SEQ ID NO: 180606 - DNA, 25 bp, Artificial
  probe
  misc_feature (1)..(25): SEQ ID NO: 880; WAN024ESG_at; Start 904; Stop 928
cctggtggacgaatctacgagcaaa

SEQ ID NO: 180607 - DNA, 25 bp, Artificial
  probe
  misc_feature (1)..(25): SEQ ID NO: 880; WAN024ESG_at; Start 1077; Stop 1101
aaaggttctcttggttcatggtcga

SEQ ID NO: 180608 - DNA, 25 bp, Artificial
  probe
  misc_feature (1)..(25): SEQ ID NO: 880; WAN024ESG_at; Start 250; Stop 274
tattgccagctgaagaaattcccaa

SEQ ID NO: 180609 - DNA, 25 bp, Artificial
  probe
  misc_feature (1)..(25): SEQ ID NO: 880; WAN024ESG_at; Start 683; Stop 707
cagatgtcttctgtgtcagcatgaa

SEQ ID NO: 180610 - DNA, 25 bp, Artificial
  probe
  misc_feature (1)..(25): SEQ ID NO: 880; WAN024ESG_at; Start 724; Stop 748
caccgcatagcaggtttccgtgtgg

SEQ ID NO: 180611 - DNA, 25 bp, Artificial
  probe
  misc_feature (1)..(25): SEQ ID NO: 880; WAN024ESG_at; Start 641; Stop 665
taatggacggacatgtgcatacgcc

SEQ ID NO: 180612 - DNA, 25 bp, Artificial
  probe
  misc_feature (1)..(25): SEQ ID NO: 880; WAN024ESG_at; Start 539; Stop 563
caactggagccctttatcctaagga

SEQ ID NO: 180613 - DNA, 25 bp, Artificial
  probe
  misc_feature (1)..(25): SEQ ID NO: 880; WAN024ESG_at; Start 792; Stop 816
tatcgaagggctcaatatgctgtcc

SEQ ID NO: 180614 - DNA, 25 bp, Artificial
  probe
  misc_feature (1)..(25): SEQ ID NO: 880; WAN024ESG_at; Start 1159; Stop 1183
gagttagcccaaatccaagaaaaga

SEQ ID NO: 180615 - DNA, 25 bp, Artificial
  probe
  misc_feature (1)..(25): SEQ ID NO: 880; WAN024ESG_at; Start 1143; Stop 1167
ccttcctcgtgttgatgagttagcc

SEQ ID NO: 180616 - DNA, 25 bp, Artificial
  probe
  misc_feature (1)..(25): SEQ ID NO: 880; WAN024ESG_at; Start 57; Stop 81
tcctgtattggaagaagccatgcgg

SEQ ID NO: 180617 - DNA, 25 bp, Artificial
  probe
  misc_feature (1)..(25): SEQ ID NO: 880; WAN024ESG_at; Start 748; Stop 772
ggttggatggtcttgtctggcccta

SEQ ID NO: 180618 - DNA, 25 bp, Artificial
  probe
  misc_feature (1)..(25): SEQ ID NO: 880; WAN024ESG_at; Start 611; Stop 635
tctttgcggatgaaatctatgaccg

SEQ ID NO: 180619 - DNA, 25 bp, Artificial
  probe
  misc_feature (1)..(25): SEQ ID NO: 880; WAN024ESG_at; Start 889; Stop 913
gatgaattgcttcttcctggtggac

SEQ ID NO: 180620 - DNA, 25 bp, Artificial
  probe
  misc_feature (1)..(25): SEQ ID NO: 880; WAN024ESG_at; Start 1015; Stop 1039
gaccgcaatatgtaccgtatcgatg

SEQ ID NO: 180621 - DNA, 25 bp, Artificial
  probe
  misc_feature (1)..(25): SEQ ID NO: 880; WAN024ESG_at; Start 952; Stop 976
caagatattccaggtttgtctgccg

SEQ ID NO: 180622 - DNA, 25 bp, Artificial
  probe
  misc_feature (1)..(25): SEQ ID NO: 880; WAN024ESG_at; Start 626; Stop 650
tctatgaccgcatggtaatggacgg

SEQ ID NO: 180623 - DNA, 25 bp, Artificial
  probe
  misc_feature (1)..(25): SEQ ID NO: 880; WAN024ESG_at; Start 1097; Stop 1121
gtcgaggctttaactggcaggaacc

SEQ ID NO: 180624 - DNA, 25 bp, Artificial
  probe
  misc_feature (1)..(25): SEQ ID NO: 880; WAN024ESG_at; Start 709; Stop 733
ggtctgtcaaaatcccaccgcatag

SEQ ID NO: 180625 - DNA, 25 bp, Artificial
  probe
  misc_feature (1)..(25): SEQ ID NO: 880; WAN024ESG_at; Start 177; Stop 201
tatgaatgcgcgtgatagtgaaggc

SEQ ID NO: 180626 - DNA, 25 bp, Artificial
  probe
  misc_feature (1)..(25): SEQ ID NO: 1337; WAN024ESH_at; Start 322; Stop 346
agtatttctctaaatgtcttcgagg

SEQ ID NO: 180627 - DNA, 25 bp, Artificial
  probe
  misc_feature (1)..(25): SEQ ID NO: 1337; WAN024ESH_at; Start 49; Stop 73
gtatgccagtggtccaactccctag

SEQ ID NO: 180628 - DNA, 25 bp, Artificial
  probe
  misc_feature (1)..(25): SEQ ID NO: 1337; WAN024ESH_at; Start 1; Stop 25
atgacaattcgttttgaagaaaagg

SEQ ID NO: 180629 - DNA, 25 bp, Artificial
  probe
  misc_feature (1)..(25): SEQ ID NO: 1337; WAN024ESH_at; Start 361; Stop 385
cagaatctttaccaaaaagaaggat

SEQ ID NO: 180630 - DNA, 25 bp, Artificial
  probe
  misc_feature (1)..(25): SEQ ID NO: 1337; WAN024ESH_at; Start 406; Stop 430
gaagcacctgtacgaaaatatagta

SEQ ID NO: 180631 - DNA, 25 bp, Artificial
  probe
  misc_feature (1)..(25): SEQ ID NO: 1337; WAN024ESH_at; Start 395; Stop 419
ttcaaatggttgaagcacctgtacg

SEQ ID NO: 180632 - DNA, 25 bp, Artificial
  probe
  misc_feature (1)..(25): SEQ ID NO: 1337; WAN024ESH_at; Start 355; Stop 379
agagctcagaatctttaccaaaaag

SEQ ID NO: 180633 - DNA, 25 bp, Artificial
  probe
  misc_feature (1)..(25): SEQ ID NO: 1337; WAN024ESH_at; Start 54; Stop 78
ccagtggtccaactccctaggcaaa

SEQ ID NO: 180634 - DNA, 25 bp, Artificial
  probe
  misc_feature (1)..(25): SEQ ID NO: 1337; WAN024ESH_at; Start 36; Stop 60
aaacgctcaatttgtatgccagtgg

SEQ ID NO: 180635 - DNA, 25 bp, Artificial
  probe
  misc_feature (1)..(25): SEQ ID NO: 1337; WAN024ESH_at; Start 379; Stop 403
gaaggatttgaaatcgttcaaatgg

SEQ ID NO: 180636 - DNA, 25 bp, Artificial
  probe
  misc_feature (1)..(25): SEQ ID NO: 1337; WAN024ESH_at; Start 392; Stop 416
tcgttcaaatggttgaagcacctgt

SEQ ID NO: 180637 - DNA, 25 bp, Artificial
  probe
  misc_feature (1)..(25): SEQ ID NO: 1337; WAN024ESH_at; Start 24; Stop 48
ggtgagcacagaaaacgctcaattt

SEQ ID NO: 180638 - DNA, 25 bp, Artificial
  probe
  misc_feature (1)..(25): SEQ ID NO: 1337; WAN024ESH_at; Start 330; Stop 354
tctaaatgtcttcgaggcaaatcaa

SEQ ID NO: 180639 - DNA, 25 bp, Artificial
  probe
  misc_feature (1)..(25): SEQ ID NO: 1337; WAN024ESH_at; Start 11; Stop 35
gttttgaagaaaaggtgagcacaga

SEQ ID NO: 180640 - DNA, 25 bp, Artificial
  probe
  misc_feature (1)..(25): SEQ ID NO: 1337; WAN024ESH_at; Start 29; Stop 53
gcacagaaaacgctcaatttgtatg

SEQ ID NO: 180641 - DNA, 25 bp, Artificial
  probe
  misc_feature (1)..(25): SEQ ID NO: 1337; WAN024ESH_at; Start 15; Stop 39
tgaagaaaaggtgagcacagaaaac

SEQ ID NO: 180642 - DNA, 25 bp, Artificial
  probe
  misc_feature (1)..(25): SEQ ID NO: 1337; WAN024ESH_at; Start 40; Stop 64
gctcaatttgtatgccagtggtcca

SEQ ID NO: 180643 - DNA, 25 bp, Artificial
  probe
  misc_feature (1)..(25): SEQ ID NO: 1337; WAN024ESH_at; Start 336; Stop 360
tgtcttcgaggcaaatcaaagagct

SEQ ID NO: 180644 - DNA, 25 bp, Artificial
  probe
  misc_feature (1)..(25): SEQ ID NO: 1337; WAN024ESH_at; Start 332; Stop 356
taaatgtcttcgaggcaaatcaaag

SEQ ID NO: 180645 - DNA, 25 bp, Artificial
  probe
  misc_feature (1)..(25): SEQ ID NO: 1337; WAN024ESH_at; Start 53; Stop 77
gccagtggtccaactccctaggcaa

SEQ ID NO: 180646 - DNA, 25 bp, Artificial
  probe
  misc_feature (1)..(25): SEQ ID NO: 1337; WAN024ESH_at; Start 338; Stop 362
tcttcgaggcaaatcaaagagctca

SEQ ID NO: 180647 - DNA, 25 bp, Artificial
  probe
  misc_feature (1)..(25): SEQ ID NO: 1337; WAN024ESH_at; Start 324; Stop 348
tatttctctaaatgtcttcgaggca

SEQ ID NO: 180648 - DNA, 25 bp, Artificial
  probe
  misc_feature (1)..(25): SEQ ID NO: 1337; WAN024ESH_at; Start 402; Stop 426
ggttgaagcacctgtacgaaaatat

SEQ ID NO: 180649 - DNA, 25 bp, Artificial
  probe
  misc_feature (1)..(25): SEQ ID NO: 1337; WAN024ESH_at; Start 397; Stop 421
caaatggttgaagcacctgtacgaa

SEQ ID NO: 180650 - DNA, 25 bp, Artificial
  probe
  misc_feature (1)..(25): SEQ ID NO: 1337; WAN024ESH_at; Start 343; Stop 367
gaggcaaatcaaagagctcagaatc

SEQ ID NO: 180651 - DNA, 25 bp, Artificial
  probe
  misc_feature (1)..(25): SEQ ID NO: 1337; WAN024ESH_at; Start 32; Stop 56
cagaaaacgctcaatttgtatgcca

SEQ ID NO: 180652 - DNA, 25 bp, Artificial
  probe
  misc_feature (1)..(25): SEQ ID NO: 1337; WAN024ESH_at; Start 345; Stop 369
ggcaaatcaaagagctcagaatctt

SEQ ID NO: 180653 - DNA, 25 bp, Artificial
  probe
  misc_feature (1)..(25): SEQ ID NO: 1337; WAN024ESH_at; Start 19; Stop 43
gaaaaggtgagcacagaaaacgctc

SEQ ID NO: 180654 - DNA, 25 bp, Artificial
  probe
  misc_feature (1)..(25): SEQ ID NO: 1337; WAN024ESH_at; Start 43; Stop 67
caatttgtatgccagtggtccaact

SEQ ID NO: 180655 - DNA, 25 bp, Artificial
  probe
  misc_feature (1)..(25): SEQ ID NO: 1337; WAN024ESH_at; Start 46; Stop 70
tttgtatgccagtggtccaactccc

SEQ ID NO: 180656 - DNA, 25 bp, Artificial
  probe
  misc_feature (1)..(25): SEQ ID NO: 1337; WAN024ESH_at; Start 9; Stop 33
tcgttttgaagaaaaggtgagcaca

SEQ ID NO: 180657 - DNA, 25 bp, Artificial
  probe
  misc_feature (1)..(25): SEQ ID NO: 1337; WAN024ESH_at; Start 351; Stop 375
tcaaagagctcagaatctttaccaa

SEQ ID NO: 180658 - DNA, 25 bp, Artificial
  probe
  misc_feature (1)..(25): SEQ ID NO: 1337; WAN024ESH_at; Start 340; Stop 364
ttcgaggcaaatcaaagagctcaga

SEQ ID NO: 180659 - DNA, 25 bp, Artificial
  probe
  misc_feature (1)..(25): SEQ ID NO: 1337; WAN024ESH_at; Start 389; Stop 413
aaatcgttcaaatggttgaagcacc

SEQ ID NO: 180660 - DNA, 25 bp, Artificial
  probe
  misc_feature (1)..(25): SEQ ID NO: 5369; WAN024ESI_at; Start 248; Stop 272
tcactgctcagccagactttgcgac

SEQ ID NO: 180661 - DNA, 25 bp, Artificial
  probe
  misc_feature (1)..(25): SEQ ID NO: 5369; WAN024ESI_at; Start 1; Stop 25
ttgcgtgctctgaacatttcccatt

SEQ ID NO: 180662 - DNA, 25 bp, Artificial
  probe
  misc_feature (1)..(25): SEQ ID NO: 5369; WAN024ESI_at; Start 412; Stop 436
gaccctcgctatttagaagtctggg

SEQ ID NO: 180663 - DNA, 25 bp, Artificial
  probe
  misc_feature (1)..(25): SEQ ID NO: 5369; WAN024ESI_at; Start 553; Stop 577
gagaaaattgacaaccgctaactaa

SEQ ID NO: 180664 - DNA, 25 bp, Artificial
  probe
  misc_feature (1)..(25): SEQ ID NO: 5369; WAN024ESI_at; Start 262; Stop 286
gactttgcgacgattcatatttcct

SEQ ID NO: 180665 - DNA, 25 bp, Artificial
  probe
  misc_feature (1)..(25): SEQ ID NO: 5369; WAN024ESI_at; Start 219; Stop 243
tatcctcgatatgtctctgctggga

SEQ ID NO: 180666 - DNA, 25 bp, Artificial
  probe
  misc_feature (1)..(25): SEQ ID NO: 5369; WAN024ESI_at; Start 268; Stop 292
gcgacgattcatatttcctacattc

SEQ ID NO: 180667 - DNA, 25 bp, Artificial
  probe
  misc_feature (1)..(25): SEQ ID NO: 5369; WAN024ESI_at; Start 497; Stop 521
gaactaagtatgagggcttggcaga

SEQ ID NO: 180668 - DNA, 25 bp, Artificial
  probe
  misc_feature (1)..(25): SEQ ID NO: 5369; WAN024ESI_at; Start 239; Stop 263
tgggacaaatcactgctcagccaga

SEQ ID NO: 180669 - DNA, 25 bp, Artificial
  probe
  misc_feature (1)..(25): SEQ ID NO: 5369; WAN024ESI_at; Start 128; Stop 152
tcgaagctgtcacctttgcctacgg

SEQ ID NO: 180670 - DNA, 25 bp, Artificial
  probe
  misc_feature (1)..(25): SEQ ID NO: 5369; WAN024ESI_at; Start 11; Stop 35
tgaacatttcccattttggaaggag

SEQ ID NO: 180671 - DNA, 25 bp, Artificial
  probe
  misc_feature (1)..(25): SEQ ID NO: 5369; WAN024ESI_at; Start 255; Stop 279
tcagccagactttgcgacgattcat

SEQ ID NO: 180672 - DNA, 25 bp, Artificial
  probe
  misc_feature (1)..(25): SEQ ID NO: 5369; WAN024ESI_at; Start 447; Stop 471
tccgcgcggtggcatttcaatcgac

SEQ ID NO: 180673 - DNA, 25 bp, Artificial
  probe
  misc_feature (1)..(25): SEQ ID NO: 5369; WAN024ESI_at; Start 374; Stop 398
gtatcaacaccatcgggaaagactt

SEQ ID NO: 180674 - DNA, 25 bp, Artificial
  probe
  misc_feature (1)..(25): SEQ ID NO: 5369; WAN024ESI_at; Start 514; Stop 538
ttggcagaacaacgcctcttccaac

SEQ ID NO: 180675 - DNA, 25 bp, Artificial
  probe
  misc_feature (1)..(25): SEQ ID NO: 5369; WAN024ESI_at; Start 118; Stop 142
tatgaaacagtcgaagctgtcacct

SEQ ID NO: 180676 - DNA, 25 bp, Artificial
  probe
  misc_feature (1)..(25): SEQ ID NO: 5369; WAN024ESI_at; Start 504; Stop 528
gtatgagggcttggcagaacaacgc

SEQ ID NO: 180677 - DNA, 25 bp, Artificial
  probe
  misc_feature (1)..(25): SEQ ID NO: 5369; WAN024ESI_at; Start 205; Stop 229
ggcattcgtcaccatatcctcgata

SEQ ID NO: 180678 - DNA, 25 bp, Artificial
  probe
  misc_feature (1)..(25): SEQ ID NO: 5369; WAN024ESI_at; Start 183; Stop 207
tagagaaatcgctaaggaacagggc

SEQ ID NO: 180679 - DNA, 25 bp, Artificial
  probe
  misc_feature (1)..(25): SEQ ID NO: 5369; WAN024ESI_at; Start 483; Stop 507
ctacggtaagcaaggaactaagtat

SEQ ID NO: 180680 - DNA, 25 bp, Artificial
  probe
  misc_feature (1)..(25): SEQ ID NO: 5369; WAN024ESI_at; Start 191; Stop 215
tcgctaaggaacagggcattcgtca

SEQ ID NO: 180681 - DNA, 25 bp, Artificial
  probe
  misc_feature (1)..(25): SEQ ID NO: 5369; WAN024ESI_at; Start 511; Stop 535
ggcttggcagaacaacgcctcttcc

SEQ ID NO: 180682 - DNA, 25 bp, Artificial
  probe
  misc_feature (1)..(25): SEQ ID NO: 5369; WAN024ESI_at; Start 232; Stop 256
tctctgctgggacaaatcactgctc

SEQ ID NO: 180683 - DNA, 25 bp, Artificial
  probe
  misc_feature (1)..(25): SEQ ID NO: 5369; WAN024ESI_at; Start 489; Stop 513
taagcaaggaactaagtatgagggc

SEQ ID NO: 180684 - DNA, 25 bp, Artificial
  probe
  misc_feature (1)..(25): SEQ ID NO: 5369; WAN024ESI_at; Start 198; Stop 222
ggaacagggcattcgtcaccatatc

SEQ ID NO: 180685 - DNA, 25 bp, Artificial
  probe
  misc_feature (1)..(25): SEQ ID NO: 5369; WAN024ESI_at; Start 108; Stop 132
catgcaacactatgaaacagtcgaa

SEQ ID NO: 180686 - DNA, 25 bp, Artificial
  probe
  misc_feature (1)..(25): SEQ ID NO: 5369; WAN024ESI_at; Start 455; Stop 479
gtggcatttcaatcgacccctacta

SEQ ID NO: 180687 - DNA, 25 bp, Artificial
  probe
  misc_feature (1)..(25): SEQ ID NO: 5369; WAN024ESI_at; Start 532; Stop 556
ttccaacacgacctttatccagaga

SEQ ID NO: 180688 - DNA, 25 bp, Artificial
  probe
  misc_feature (1)..(25): SEQ ID NO: 5369; WAN024ESI_at; Start 436; Stop 460
ggaaaattcactccgcgcggtggca

SEQ ID NO: 180689 - DNA, 25 bp, Artificial
  probe
  misc_feature (1)..(25): SEQ ID NO: 5369; WAN024ESI_at; Start 547; Stop 571
tatccagagaaaattgacaaccgct

SEQ ID NO: 180690 - DNA, 25 bp, Artificial
  probe
  misc_feature (1)..(25): SEQ ID NO: 5369; WAN024ESI_at; Start 367; Stop 391
gaaaactgtatcaacaccatcggga

SEQ ID NO: 180691 - DNA, 25 bp, Artificial
  probe
  misc_feature (1)..(25): SEQ ID NO: 5369; WAN024ESI_at; Start 20; Stop 44
cccattttggaaggagtactatgaa

SEQ ID NO: 180692 - DNA, 25 bp, Artificial
  probe
  misc_feature (1)..(25): SEQ ID NO: 5369; WAN024ESI_at; Start 132; Stop 156
agctgtcacctttgcctacggccaa

SEQ ID NO: 180693 - DNA, 25 bp, Artificial
  probe
  misc_feature (1)..(25): SEQ ID NO: 5369; WAN024ESI_at; Start 406; Stop 430
ttgctagaccctcgctatttagaag

SEQ ID NO: 180694 - DNA, 25 bp, Artificial
  probe
  misc_feature (1)..(25): SEQ ID NO: 2411; WAN024ESJ_at; Start 82; Stop 106
gcttgtttttctgcttccactcttg

SEQ ID NO: 180695 - DNA, 25 bp, Artificial
  probe
  misc_feature (1)..(25): SEQ ID NO: 2411; WAN024ESJ_at; Start 28; Stop 52
tctgcttccttcacatcttccatag

SEQ ID NO: 180696 - DNA, 25 bp, Artificial
  probe
  misc_feature (1)..(25): SEQ ID NO: 2411; WAN024ESJ_at; Start 59; Stop 83
cattttcaatctctttgagagctgc

SEQ ID NO: 180697 - DNA, 25 bp, Artificial
  probe
  misc_feature (1)..(25): SEQ ID NO: 2411; WAN024ESJ_at; Start 47; Stop 71
ccatagttttcgcattttcaatctc

SEQ ID NO: 180698 - DNA, 25 bp, Artificial
  probe
  misc_feature (1)..(25): SEQ ID NO: 2411; WAN024ESJ_at; Start 56; Stop 80
tcgcattttcaatctctttgagagc

SEQ ID NO: 180699 - DNA, 25 bp, Artificial
  probe
  misc_feature (1)..(25): SEQ ID NO: 2411; WAN024ESJ_at; Start 134; Stop 158
aaagcggtgcgcctttgatttcatc

SEQ ID NO: 180700 - DNA, 25 bp, Artificial
  probe
  misc_feature (1)..(25): SEQ ID NO: 2411; WAN024ESJ_at; Start 39; Stop 63
cacatcttccatagttttcgcattt

SEQ ID NO: 180701 - DNA, 25 bp, Artificial
  probe
  misc_feature (1)..(25): SEQ ID NO: 2411; WAN024ESJ_at; Start 121; Stop 145
ttttctttatcagaaagcggtgcgc

SEQ ID NO: 180702 - DNA, 25 bp, Artificial
  probe
  misc_feature (1)..(25): SEQ ID NO: 2411; WAN024ESJ_at; Start 186; Stop 210
ggcatttttagctgattctttttca

SEQ ID NO: 180703 - DNA, 25 bp, Artificial
  probe
  misc_feature (1)..(25): SEQ ID NO: 2411; WAN024ESJ_at; Start 139; Stop 163
ggtgcgcctttgatttcatcctgct

SEQ ID NO: 180704 - DNA, 25 bp, Artificial
  probe
  misc_feature (1)..(25): SEQ ID NO: 2411; WAN024ESJ_at; Start 130; Stop 154
tcagaaagcggtgcgcctttgattt

SEQ ID NO: 180705 - DNA, 25 bp, Artificial
  probe
  misc_feature (1)..(25): SEQ ID NO: 2411; WAN024ESJ_at; Start 34; Stop 58
tccttcacatcttccatagttttcg

SEQ ID NO: 180706 - DNA, 25 bp, Artificial
  probe
  misc_feature (1)..(25): SEQ ID NO: 2411; WAN024ESJ_at; Start 142; Stop 166
gcgcctttgatttcatcctgcttgt

SEQ ID NO: 180707 - DNA, 25 bp, Artificial
  probe
  misc_feature (1)..(25): SEQ ID NO: 2411; WAN024ESJ_at; Start 94; Stop 118
gcttccactcttgctaaaagttctg

SEQ ID NO: 180708 - DNA, 25 bp, Artificial
  probe
  misc_feature (1)..(25): SEQ ID NO: 2411; WAN024ESJ_at; Start 2; Stop 26
tggcaatggcttgcactccaatcgt

SEQ ID NO: 180709 - DNA, 25 bp, Artificial
  probe
  misc_feature (1)..(25): SEQ ID NO: 2411; WAN024ESJ_at; Start 168; Stop 192
cttggctgctttttcaatggcattt

SEQ ID NO: 180710 - DNA, 25 bp, Artificial
  probe
  misc_feature (1)..(25): SEQ ID NO: 2411; WAN024ESJ_at; Start 208; Stop 232
tcagtagctaattgcttagaagctt

SEQ ID NO: 180711 - DNA, 25 bp, Artificial
  probe
  misc_feature (1)..(25): SEQ ID NO: 2411; WAN024ESJ_at; Start 199; Stop 223
gattctttttcagtagctaattgct

SEQ ID NO: 180712 - DNA, 25 bp, Artificial
  probe
  misc_feature (1)..(25): SEQ ID NO: 2411; WAN024ESJ_at; Start 97; Stop 121
tccactcttgctaaaagttctgctt

SEQ ID NO: 180713 - DNA, 25 bp, Artificial
  probe
  misc_feature (1)..(25): SEQ ID NO: 2411; WAN024ESJ_at; Start 20; Stop 44
caatcgtttctgcttccttcacatc

SEQ ID NO: 180714 - DNA, 25 bp, Artificial
  probe
  misc_feature (1)..(25): SEQ ID NO: 2411; WAN024ESJ_at; Start 77; Stop 101
gagctgcttgtttttctgcttccac

SEQ ID NO: 180715 - DNA, 25 bp, Artificial
  probe
  misc_feature (1)..(25): SEQ ID NO: 2411; WAN024ESJ_at; Start 216; Stop 240
taattgcttagaagcttgtgattga

SEQ ID NO: 180716 - DNA, 25 bp, Artificial
  probe
  misc_feature (1)..(25): SEQ ID NO: 2411; WAN024ESJ_at; Start 64; Stop 88
tcaatctctttgagagctgcttgtt

SEQ ID NO: 180717 - DNA, 25 bp, Artificial
  probe
  misc_feature (1)..(25): SEQ ID NO: 2411; WAN024ESJ_at; Start 86; Stop 110
gtttttctgcttccactcttgctaa

SEQ ID NO: 180718 - DNA, 25 bp, Artificial
  probe
  misc_feature (1)..(25): SEQ ID NO: 2411; WAN024ESJ_at; Start 101; Stop 125
ctcttgctaaaagttctgctttttc

SEQ ID NO: 180719 - DNA, 25 bp, Artificial
  probe
  misc_feature (1)..(25): SEQ ID NO: 2411; WAN024ESJ_at; Start 181; Stop 205
tcaatggcatttttagctgattctt

SEQ ID NO: 180720 - DNA, 25 bp, Artificial
  probe
  misc_feature (1)..(25): SEQ ID NO: 2411; WAN024ESJ_at; Start 212; Stop 236
tagctaattgcttagaagcttgtga

SEQ ID NO: 180721 - DNA, 25 bp, Artificial
  probe
  misc_feature (1)..(25): SEQ ID NO: 2411; WAN024ESJ_at; Start 137; Stop 161
gcggtgcgcctttgatttcatcctg

SEQ ID NO: 180722 - DNA, 25 bp, Artificial
  probe
  misc_feature (1)..(25): SEQ ID NO: 2411; WAN024ESJ_at; Start 124; Stop 148
tctttatcagaaagcggtgcgcctt

SEQ ID NO: 180723 - DNA, 25 bp, Artificial
  probe
  misc_feature (1)..(25): SEQ ID NO: 2411; WAN024ESJ_at; Start 171; Stop 195
ggctgctttttcaatggcattttta

SEQ ID NO: 180724 - DNA, 25 bp, Artificial
  probe
  misc_feature (1)..(25): SEQ ID NO: 2411; WAN024ESJ_at; Start 5; Stop 29
caatggcttgcactccaatcgtttc

SEQ ID NO: 180725 - DNA, 25 bp, Artificial
  probe
  misc_feature (1)..(25): SEQ ID NO: 2411; WAN024ESJ_at; Start 9; Stop 33
ggcttgcactccaatcgtttctgct

SEQ ID NO: 180726 - DNA, 25 bp, Artificial
  probe
  misc_feature (1)..(25): SEQ ID NO: 2411; WAN024ESJ_at; Start 128; Stop 152
tatcagaaagcggtgcgcctttgat

SEQ ID NO: 180727 - DNA, 25 bp, Artificial
  probe
  misc_feature (1)..(25): SEQ ID NO: 2411; WAN024ESJ_at; Start 16; Stop 40
actccaatcgtttctgcttccttca

SEQ ID NO: 180728 - DNA, 25 bp, Artificial
  probe
  misc_feature (1)..(25): SEQ ID NO: 3937; WAN024ESK_at; Start 586; Stop 610
gcagcacttgctagtcttggtctag

SEQ ID NO: 180729 - DNA, 25 bp, Artificial
  probe
  misc_feature (1)..(25): SEQ ID NO: 3937; WAN024ESK_at; Start 199; Stop 223
gctcaatcacaagcttctaagcaat

SEQ ID NO: 180730 - DNA, 25 bp, Artificial
  probe
  misc_feature (1)..(25): SEQ ID NO: 3937; WAN024ESK_at; Start 323; Stop 347
cagaacttttagcaagagtggaagc

SEQ ID NO: 180731 - DNA, 25 bp, Artificial
  probe
  misc_feature (1)..(25): SEQ ID NO: 3937; WAN024ESK_at; Start 564; Stop 588
taacacaggttcagcatcaagtgca

SEQ ID NO: 180732 - DNA, 25 bp, Artificial
  probe
  misc_feature (1)..(25): SEQ ID NO: 3937; WAN024ESK_at; Start 549; Stop 573
tggcaaacaattacctaacacaggt

SEQ ID NO: 180733 - DNA, 25 bp, Artificial
  probe
  misc_feature (1)..(25): SEQ ID NO: 3937; WAN024ESK_at; Start 502; Stop 526
caagcaactgcaggaacaatgcaag

SEQ ID NO: 180734 - DNA, 25 bp, Artificial
  probe
  misc_feature (1)..(25): SEQ ID NO: 3937; WAN024ESK_at; Start 638; Stop 662
taggaagaaagactagacgtagaaa

SEQ ID NO: 180735 - DNA, 25 bp, Artificial
  probe
  misc_feature (1)..(25): SEQ ID NO: 3937; WAN024ESK_at; Start 349; Stop 373
gaaaaacaagcagctctcaaagaga

SEQ ID NO: 180736 - DNA, 25 bp, Artificial
  probe
  misc_feature (1)..(25): SEQ ID NO: 3937; WAN024ESK_at; Start 177; Stop 201
tcacacaggttcacaaaactcagct

SEQ ID NO: 180737 - DNA, 25 bp, Artificial
  probe
  misc_feature (1)..(25): SEQ ID NO: 3937; WAN024ESK_at; Start 295; Stop 319
ggcgcaccgctttctgataaagaaa

SEQ ID NO: 180738 - DNA, 25 bp, Artificial
  probe
  misc_feature (1)..(25): SEQ ID NO: 3937; WAN024ESK_at; Start 632; Stop 656
ctttgctaggaagaaagactagacg

SEQ ID NO: 180739 - DNA, 25 bp, Artificial
  probe
  misc_feature (1)..(25): SEQ ID NO: 3937; WAN024ESK_at; Start 34; Stop 58
tctgcgaaaggtgaatctgtaactc

SEQ ID NO: 180740 - DNA, 25 bp, Artificial
  probe
  misc_feature (1)..(25): SEQ ID NO: 3937; WAN024ESK_at; Start 524; Stop 548
aagatgttacctaccagtcacctgc

SEQ ID NO: 180741 - DNA, 25 bp, Artificial
  probe
  misc_feature (1)..(25): SEQ ID NO: 3937; WAN024ESK_at; Start 510; Stop 534
tgcaggaacaatgcaagatgttacc

SEQ ID NO: 180742 - DNA, 25 bp, Artificial
  probe
  misc_feature (1)..(25): SEQ ID NO: 3937; WAN024ESK_at; Start 211; Stop 235
gcttctaagcaattagctactgaaa

SEQ ID NO: 180743 - DNA, 25 bp, Artificial
  probe
  misc_feature (1)..(25): SEQ ID NO: 3937; WAN024ESK_at; Start 43; Stop 67
ggtgaatctgtaactcaagaagcta

SEQ ID NO: 180744 - DNA, 25 bp, Artificial
  probe
  misc_feature (1)..(25): SEQ ID NO: 3937; WAN024ESK_at; Start 338; Stop 362
gagtggaagcagaaaaacaagcagc

SEQ ID NO: 180745 - DNA, 25 bp, Artificial
  probe
  misc_feature (1)..(25): SEQ ID NO: 3937; WAN024ESK_at; Start 538; Stop 562
cagtcacctgctggcaaacaattac

SEQ ID NO: 180746 - DNA, 25 bp, Artificial
  probe
  misc_feature (1)..(25): SEQ ID NO: 3937; WAN024ESK_at; Start 187; Stop 211
tcacaaaactcagctcaatcacaag

SEQ ID NO: 180747 - DNA, 25 bp, Artificial
  probe
  misc_feature (1)..(25): SEQ ID NO: 3937; WAN024ESK_at; Start 383; Stop 407
cgaaaactatggaagatgtgaagga

SEQ ID NO: 180748 - DNA, 25 bp, Artificial
  probe
  misc_feature (1)..(25): SEQ ID NO: 3937; WAN024ESK_at; Start 571; Stop 595
ggttcagcatcaagtgcagcacttg

SEQ ID NO: 180749 - DNA, 25 bp, Artificial
  probe
  misc_feature (1)..(25): SEQ ID NO: 3937; WAN024ESK_at; Start 414; Stop 438
aacgattggagtgcaagccattgcc

SEQ ID NO: 180750 - DNA, 25 bp, Artificial
  probe
  misc_feature (1)..(25): SEQ ID NO: 3937; WAN024ESK_at; Start 483; Stop 507
taagacaacaagtgcaccgcaagca

SEQ ID NO: 180751 - DNA, 25 bp, Artificial
  probe
  misc_feature (1)..(25): SEQ ID NO: 3937; WAN024ESK_at; Start 19; Stop 43
gatacagttcaacaatctgcgaaag

SEQ ID NO: 180752 - DNA, 25 bp, Artificial
  probe
  misc_feature (1)..(25): SEQ ID NO: 3937; WAN024ESK_at; Start 492; Stop 516
aagtgcaccgcaagcaactgcagga

SEQ ID NO: 180753 - DNA, 25 bp, Artificial
  probe
  misc_feature (1)..(25): SEQ ID NO: 3937; WAN024ESK_at; Start 249; Stop 273
aaatgccattgaaaaagcagccaag

SEQ ID NO: 180754 - DNA, 25 bp, Artificial
  probe
  misc_feature (1)..(25): SEQ ID NO: 3937; WAN024ESK_at; Start 282; Stop 306
ggatgaaatcaaaggcgcaccgctt

SEQ ID NO: 180755 - DNA, 25 bp, Artificial
  probe
  misc_feature (1)..(25): SEQ ID NO: 3937; WAN024ESK_at; Start 5; Stop 29
cgattctaggaaaagatacagttca

SEQ ID NO: 180756 - DNA, 25 bp, Artificial
  probe
  misc_feature (1)..(25): SEQ ID NO: 3937; WAN024ESK_at; Start 399; Stop 423
tgtgaaggaagcagaaacgattgga

SEQ ID NO: 180757 - DNA, 25 bp, Artificial
  probe
  misc_feature (1)..(25): SEQ ID NO: 3937; WAN024ESK_at; Start 622; Stop 646
agtggttttgctttgctaggaagaa

SEQ ID NO: 180758 - DNA, 25 bp, Artificial
  probe
  misc_feature (1)..(25): SEQ ID NO: 3937; WAN024ESK_at; Start 235; Stop 259
aaagaatcagctaaaaatgccattg

SEQ ID NO: 180759 - DNA, 25 bp, Artificial
  probe
  misc_feature (1)..(25): SEQ ID NO: 3937; WAN024ESK_at; Start 57; Stop 81
tcaagaagctacaccagagtataag

SEQ ID NO: 180760 - DNA, 25 bp, Artificial
  probe
  misc_feature (1)..(25): SEQ ID NO: 3937; WAN024ESK_at; Start 276; Stop 300
caagcaggatgaaatcaaaggcgca

SEQ ID NO: 180761 - DNA, 25 bp, Artificial
  probe
  misc_feature (1)..(25): SEQ ID NO: 3937; WAN024ESK_at; Start 221; Stop 245
aattagctactgaaaaagaatcagc

SEQ ID NO: 180762 - DNA, 25 bp, Artificial
  probe
  misc_feature (1)..(25): SEQ ID NO: 2879; WAN024ESL_at; Start 157; Stop 181
caaaacacagatgaaaacatccacg

SEQ ID NO: 180763 - DNA, 25 bp, Artificial
  probe
  misc_feature (1)..(25): SEQ ID NO: 2879; WAN024ESL_at; Start 94; Stop 118
caaatcaaaaccagcgtccgtcaag

SEQ ID NO: 180764 - DNA, 25 bp, Artificial
  probe
  misc_feature (1)..(25): SEQ ID NO: 2879; WAN024ESL_at; Start 124; Stop 148
gatgcgcgtgaattaatcaaggtta

SEQ ID NO: 180765 - DNA, 25 bp, Artificial
  probe
  misc_feature (1)..(25): SEQ ID NO: 2879; WAN024ESL_at; Start 130; Stop 154
cgtgaattaatcaaggttactctct

SEQ ID NO: 180766 - DNA, 25 bp, Artificial
  probe
  misc_feature (1)..(25): SEQ ID NO: 2879; WAN024ESL_at; Start 290; Stop 314
ctaagaaagtcaaagaaatctaact

SEQ ID NO: 180767 - DNA, 25 bp, Artificial
  probe
  misc_feature (1)..(25): SEQ ID NO: 2879; WAN024ESL_at; Start 75; Stop 99
gaaaaatggactcaacgaccaaatc

SEQ ID NO: 180768 - DNA, 25 bp, Artificial
  probe
  misc_feature (1)..(25): SEQ ID NO: 2879; WAN024ESL_at; Start 259; Stop 283
caatctagcaagaaagaaaatcgca

SEQ ID NO: 180769 - DNA, 25 bp, Artificial
  probe
  misc_feature (1)..(25): SEQ ID NO: 2879; WAN024ESL_at; Start 83; Stop 107
gactcaacgaccaaatcaaaaccag

SEQ ID NO: 180770 - DNA, 25 bp, Artificial
  probe
  misc_feature (1)..(25): SEQ ID NO: 2879; WAN024ESL_at; Start 115; Stop 139
caagctcttgatgcgcgtgaattaa

SEQ ID NO: 180771 - DNA, 25 bp, Artificial
  probe
  misc_feature (1)..(25): SEQ ID NO: 2879; WAN024ESL_at; Start 53; Stop 77
tcaaacctatcatccaaatcgggaa

SEQ ID NO: 180772 - DNA, 25 bp, Artificial
  probe
  misc_feature (1)..(25): SEQ ID NO: 2879; WAN024ESL_at; Start 38; Stop 62
gccaggcacacaccctcaaacctat

SEQ ID NO: 180773 - DNA, 25 bp, Artificial
  probe
  misc_feature (1)..(25): SEQ ID NO: 2879; WAN024ESL_at; Start 101; Stop 125
aaaccagcgtccgtcaagctcttga

SEQ ID NO: 180774 - DNA, 25 bp, Artificial
  probe
  misc_feature (1)..(25): SEQ ID NO: 2879; WAN024ESL_at; Start 98; Stop 122
tcaaaaccagcgtccgtcaagctct

SEQ ID NO: 180775 - DNA, 25 bp, Artificial
  probe
  misc_feature (1)..(25): SEQ ID NO: 2879; WAN024ESL_at; Start 105; Stop 129
cagcgtccgtcaagctcttgatgcg

SEQ ID NO: 180776 - DNA, 25 bp, Artificial
  probe
  misc_feature (1)..(25): SEQ ID NO: 2879; WAN024ESL_at; Start 178; Stop 202
cacgaagtagctgaaattttggaag

SEQ ID NO: 180777 - DNA, 25 bp, Artificial
  probe
  misc_feature (1)..(25): SEQ ID NO: 2879; WAN024ESL_at; Start 67; Stop 91
caaatcgggaaaaatggactcaacg

SEQ ID NO: 180778 - DNA, 25 bp, Artificial
  probe
  misc_feature (1)..(25): SEQ ID NO: 2879; WAN024ESL_at; Start 209; Stop 233
tcggtgtggatacagtccaaaaaat

SEQ ID NO: 180779 - DNA, 25 bp, Artificial
  probe
  misc_feature (1)..(25): SEQ ID NO: 2879; WAN024ESL_at; Start 86; Stop 110
tcaacgaccaaatcaaaaccagcgt

SEQ ID NO: 180780 - DNA, 25 bp, Artificial
  probe
  misc_feature (1)..(25): SEQ ID NO: 2879; WAN024ESL_at; Start 71; Stop 95
tcgggaaaaatggactcaacgacca

SEQ ID NO: 180781 - DNA, 25 bp, Artificial
  probe
  misc_feature (1)..(25): SEQ ID NO: 2879; WAN024ESL_at; Start 187; Stop 211
gctgaaattttggaagaagaaatcg

SEQ ID NO: 180782 - DNA, 25 bp, Artificial
  probe
  misc_feature (1)..(25): SEQ ID NO: 2879; WAN024ESL_at; Start 174; Stop 198
catccacgaagtagctgaaattttg

SEQ ID NO: 180783 - DNA, 25 bp, Artificial
  probe
  misc_feature (1)..(25): SEQ ID NO: 2879; WAN024ESL_at; Start 2; Stop 26
tgtcattaacatcaaaacaacgtgc

SEQ ID NO: 180784 - DNA, 25 bp, Artificial
  probe
  misc_feature (1)..(25): SEQ ID NO: 2879; WAN024ESL_at; Start 202; Stop 226
gaagaaatcggtgtggatacagtcc

SEQ ID NO: 180785 - DNA, 25 bp, Artificial
  probe
  misc_feature (1)..(25): SEQ ID NO: 2879; WAN024ESL_at; Start 276; Stop 300
aaatcgcaagatttctaagaaagtc

SEQ ID NO: 180786 - DNA, 25 bp, Artificial
  probe
  misc_feature (1)..(25): SEQ ID NO: 2879; WAN024ESL_at; Start 205; Stop 229
gaaatcggtgtggatacagtccaaa

SEQ ID NO: 180787 - DNA, 25 bp, Artificial
  probe
  misc_feature (1)..(25): SEQ ID NO: 2879; WAN024ESL_at; Start 215; Stop 239
tggatacagtccaaaaaataggacg

SEQ ID NO: 180788 - DNA, 25 bp, Artificial
  probe
  misc_feature (1)..(25): SEQ ID NO: 2879; WAN024ESL_at; Start 7; Stop 31
ttaacatcaaaacaacgtgccttcc

SEQ ID NO: 180789 - DNA, 25 bp, Artificial
  probe
  misc_feature (1)..(25): SEQ ID NO: 2879; WAN024ESL_at; Start 246; Stop 270
gattttgtttaaacaatctagcaag

SEQ ID NO: 180790 - DNA, 25 bp, Artificial
  probe
  misc_feature (1)..(25): SEQ ID NO: 2879; WAN024ESL_at; Start 15; Stop 39
aaaacaacgtgccttcctcaacagc

SEQ ID NO: 180791 - DNA, 25 bp, Artificial
  probe
  misc_feature (1)..(25): SEQ ID NO: 2879; WAN024ESL_at; Start 59; Stop 83
ctatcatccaaatcgggaaaaatgg

SEQ ID NO: 180792 - DNA, 25 bp, Artificial
  probe
  misc_feature (1)..(25): SEQ ID NO: 2879; WAN024ESL_at; Start 169; Stop 193
gaaaacatccacgaagtagctgaaa

SEQ ID NO: 180793 - DNA, 25 bp, Artificial
  probe
  misc_feature (1)..(25): SEQ ID NO: 2879; WAN024ESL_at; Start 145; Stop 169
gttactctcttacaaaacacagatg

SEQ ID NO: 180794 - DNA, 25 bp, Artificial
  probe
  misc_feature (1)..(25): SEQ ID NO: 2879; WAN024ESL_at; Start 264; Stop 288
tagcaagaaagaaaatcgcaagatt

SEQ ID NO: 180795 - DNA, 25 bp, Artificial
  probe
  misc_feature (1)..(25): SEQ ID NO: 2879; WAN024ESL_at; Start 166; Stop 190
gatgaaaacatccacgaagtagctg

SEQ ID NO: 180796 - DNA, 25 bp, Artificial
  probe
  misc_feature (1)..(25): SEQ ID NO: 1767; WAN024ESM_at; Start 166; Stop 190
tcaggaaacgttacaattcacccag

SEQ ID NO: 180797 - DNA, 25 bp, Artificial
  probe
  misc_feature (1)..(25): SEQ ID NO: 1767; WAN024ESM_at; Start 62; Stop 86
taatcttggaagcaaaacgtgccca

SEQ ID NO: 180798 - DNA, 25 bp, Artificial
  probe
  misc_feature (1)..(25): SEQ ID NO: 1767; WAN024ESM_at; Start 241; Stop 265
cgccgcaaagaagaagaagaaaaga

SEQ ID NO: 180799 - DNA, 25 bp, Artificial
  probe
  misc_feature (1)..(25): SEQ ID NO: 1767; WAN024ESM_at; Start 124; Stop 148
aagtctgaaaaatcaactcttcgcg

SEQ ID NO: 180800 - DNA, 25 bp, Artificial
  probe
  misc_feature (1)..(25): SEQ ID NO: 1767; WAN024ESM_at; Start 157; Stop 181
gaaatcgaatcaggaaacgttacaa

SEQ ID NO: 180801 - DNA, 25 bp, Artificial
  probe
  misc_feature (1)..(25): SEQ ID NO: 1767; WAN024ESM_at; Start 274; Stop 298
gagcaaattgctaaagaaaaagaag

SEQ ID NO: 180802 - DNA, 25 bp, Artificial
  probe
  misc_feature (1)..(25): SEQ ID NO: 1767; WAN024ESM_at; Start 29; Stop 53
tgctcgacaaggttccttcaaaata

SEQ ID NO: 180803 - DNA, 25 bp, Artificial
  probe
  misc_feature (1)..(25): SEQ ID NO: 1767; WAN024ESM_at; Start 183; Stop 207
tcacccagatccagaaggaaaacgt

SEQ ID NO: 180804 - DNA, 25 bp, Artificial
  probe
  misc_feature (1)..(25): SEQ ID NO: 1767; WAN024ESM_at; Start 76; Stop 100
aaacgtgcccacgaattggaagcag

SEQ ID NO: 180805 - DNA, 25 bp, Artificial
  probe
  misc_feature (1)..(25): SEQ ID NO: 1767; WAN024ESM_at; Start 65; Stop 89
tcttggaagcaaaacgtgcccacga

SEQ ID NO: 180806 - DNA, 25 bp, Artificial
  probe
  misc_feature (1)..(25): SEQ ID NO: 1767; WAN024ESM_at; Start 16; Stop 40
tctattgataccttgctcgacaagg

SEQ ID NO: 180807 - DNA, 25 bp, Artificial
  probe
  misc_feature (1)..(25): SEQ ID NO: 1767; WAN024ESM_at; Start 52; Stop 76
tattcactcgtaatcttggaagcaa

SEQ ID NO: 180808 - DNA, 25 bp, Artificial
  probe
  misc_feature (1)..(25): SEQ ID NO: 1767; WAN024ESM_at; Start 190; Stop 214
gatccagaaggaaaacgtgaagcag

SEQ ID NO: 180809 - DNA, 25 bp, Artificial
  probe
  misc_feature (1)..(25): SEQ ID NO: 1767; WAN024ESM_at; Start 202; Stop 226
aaacgtgaagcagtgcgtcgccgta

SEQ ID NO: 180810 - DNA, 25 bp, Artificial
  probe
  misc_feature (1)..(25): SEQ ID NO: 1767; WAN024ESM_at; Start 84; Stop 108
ccacgaattggaagcaggtgcccca

SEQ ID NO: 180811 - DNA, 25 bp, Artificial
  probe
  misc_feature (1)..(25): SEQ ID NO: 1767; WAN024ESM_at; Start 70; Stop 94
gaagcaaaacgtgcccacgaattgg

SEQ ID NO: 180812 - DNA, 25 bp, Artificial
  probe
  misc_feature (1)..(25): SEQ ID NO: 1767; WAN024ESM_at; Start 130; Stop 154
gaaaaatcaactcttcgcgctttag

SEQ ID NO: 180813 - DNA, 25 bp, Artificial
  probe
  misc_feature (1)..(25): SEQ ID NO: 1767; WAN024ESM_at; Start 193; Stop 217
ccagaaggaaaacgtgaagcagtgc

SEQ ID NO: 180814 - DNA, 25 bp, Artificial
  probe
  misc_feature (1)..(25): SEQ ID NO: 1767; WAN024ESM_at; Start 199; Stop 223
ggaaaacgtgaagcagtgcgtcgcc

SEQ ID NO: 180815 - DNA, 25 bp, Artificial
  probe
  misc_feature (1)..(25): SEQ ID NO: 1767; WAN024ESM_at; Start 224; Stop 248
gtatcgaagaagaaaaacgccgcaa

SEQ ID NO: 180816 - DNA, 25 bp, Artificial
  probe
  misc_feature (1)..(25): SEQ ID NO: 1767; WAN024ESM_at; Start 98; Stop 122
caggtgccccagcaactcaaggttt

SEQ ID NO: 180817 - DNA, 25 bp, Artificial
  probe
  misc_feature (1)..(25): SEQ ID NO: 1767; WAN024ESM_at; Start 227; Stop 251
tcgaagaagaaaaacgccgcaaaga

SEQ ID NO: 180818 - DNA, 25 bp, Artificial
  probe
  misc_feature (1)..(25): SEQ ID NO: 1767; WAN024ESM_at; Start 282; Stop 306
tgctaaagaaaaagaagatggtgaa

SEQ ID NO: 180819 - DNA, 25 bp, Artificial
  probe
  misc_feature (1)..(25): SEQ ID NO: 1767; WAN024ESM_at; Start 81; Stop 105
tgcccacgaattggaagcaggtgcc

SEQ ID NO: 180820 - DNA, 25 bp, Artificial
  probe
  misc_feature (1)..(25): SEQ ID NO: 1767; WAN024ESM_at; Start 212; Stop 236
cagtgcgtcgccgtatcgaagaaga

SEQ ID NO: 180821 - DNA, 25 bp, Artificial
  probe
  misc_feature (1)..(25): SEQ ID NO: 1767; WAN024ESM_at; Start 39; Stop 63
ggttccttcaaaatattcactcgta

SEQ ID NO: 180822 - DNA, 25 bp, Artificial
  probe
  misc_feature (1)..(25): SEQ ID NO: 1767; WAN024ESM_at; Start 177; Stop 201
tacaattcacccagatccagaagga

SEQ ID NO: 180823 - DNA, 25 bp, Artificial
  probe
  misc_feature (1)..(25): SEQ ID NO: 1767; WAN024ESM_at; Start 141; Stop 165
tcttcgcgctttagaagaaatcgaa

SEQ ID NO: 180824 - DNA, 25 bp, Artificial
  probe
  misc_feature (1)..(25): SEQ ID NO: 1767; WAN024ESM_at; Start 90; Stop 114
attggaagcaggtgccccagcaact

SEQ ID NO: 180825 - DNA, 25 bp, Artificial
  probe
  misc_feature (1)..(25): SEQ ID NO: 1767; WAN024ESM_at; Start 207; Stop 231
tgaagcagtgcgtcgccgtatcgaa

SEQ ID NO: 180826 - DNA, 25 bp, Artificial
  probe
  misc_feature (1)..(25): SEQ ID NO: 1767; WAN024ESM_at; Start 56; Stop 80
cactcgtaatcttggaagcaaaacg

SEQ ID NO: 180827 - DNA, 25 bp, Artificial
  probe
  misc_feature (1)..(25): SEQ ID NO: 1767; WAN024ESM_at; Start 10; Stop 34
aaaccctctattgataccttgctcg

SEQ ID NO: 180828 - DNA, 25 bp, Artificial
  probe
  misc_feature (1)..(25): SEQ ID NO: 1767; WAN024ESM_at; Start 3; Stop 27
gatgttaaaaccctctattgatacc

SEQ ID NO: 180829 - DNA, 25 bp, Artificial
  probe
  misc_feature (1)..(25): SEQ ID NO: 1767; WAN024ESM_at; Start 172; Stop 196
aacgttacaattcacccagatccag

SEQ ID NO: 180830 - DNA, 25 bp, Artificial
  probe
  misc_feature (1)..(25): SEQ ID NO: 5467; WAN024ESN_at; Start 1666; Stop 1690
aaaagccagctattttttgccaagg

SEQ ID NO: 180831 - DNA, 25 bp, Artificial
  probe
  misc_feature (1)..(25): SEQ ID NO: 5467; WAN024ESN_at; Start 144; Stop 168
tcaaccagtagctagtcgcgaagag

SEQ ID NO: 180832 - DNA, 25 bp, Artificial
  probe
  misc_feature (1)..(25): SEQ ID NO: 5467; WAN024ESN_at; Start 1170; Stop 1194
tctcagtgactacacaccgtcaggg

SEQ ID NO: 180833 - DNA, 25 bp, Artificial
  probe
  misc_feature (1)..(25): SEQ ID NO: 5467; WAN024ESN_at; Start 1567; Stop 1591
ggaactacggctaatagtgccttga

SEQ ID NO: 180834 - DNA, 25 bp, Artificial
  probe
  misc_feature (1)..(25): SEQ ID NO: 5467; WAN024ESN_at; Start 66; Stop 90
gataacttccgttgaccatcgagaa

SEQ ID NO: 180835 - DNA, 25 bp, Artificial
  probe
  misc_feature (1)..(25): SEQ ID NO: 5467; WAN024ESN_at; Start 969; Stop 993
taaatggagccagtcctcagaccgt

SEQ ID NO: 180836 - DNA, 25 bp, Artificial
  probe
  misc_feature (1)..(25): SEQ ID NO: 5467; WAN024ESN_at; Start 1464; Stop 1488
taatgatgggtacaagacaacacgc

SEQ ID NO: 180837 - DNA, 25 bp, Artificial
  probe
  misc_feature (1)..(25): SEQ ID NO: 5467; WAN024ESN_at; Start 1068; Stop 1092
gacatttactgaagaacggttagcc

SEQ ID NO: 180838 - DNA, 25 bp, Artificial
  probe
  misc_feature (1)..(25): SEQ ID NO: 5467; WAN024ESN_at; Start 1866; Stop 1890
tttactggcgcaaggaggagttctc

SEQ ID NO: 180839 - DNA, 25 bp, Artificial
  probe
  misc_feature (1)..(25): SEQ ID NO: 5467; WAN024ESN_at; Start 179; Stop 203
ctttgagtcacttggcggtagagca

SEQ ID NO: 180840 - DNA, 25 bp, Artificial
  probe
  misc_feature (1)..(25): SEQ ID NO: 5467; WAN024ESN_at; Start 1430; Stop 1454
cttttacagaaacaggacaggaacg

SEQ ID NO: 180841 - DNA, 25 bp, Artificial
  probe
  misc_feature (1)..(25): SEQ ID NO: 5467; WAN024ESN_at; Start 1839; Stop 1863
gacaatctatgagcttcatggcaag

SEQ ID NO: 180842 - DNA, 25 bp, Artificial
  probe
  misc_feature (1)..(25): SEQ ID NO: 5467; WAN024ESN_at; Start 1821; Stop 1845
taaacgtcttgctggtatgacaatc

SEQ ID NO: 180843 - DNA, 25 bp, Artificial
  probe
  misc_feature (1)..(25): SEQ ID NO: 5467; WAN024ESN_at; Start 1449; Stop 1473
ggaacgtttcctctataatgatggg

SEQ ID NO: 180844 - DNA, 25 bp, Artificial
  probe
  misc_feature (1)..(25): SEQ ID NO: 5467; WAN024ESN_at; Start 1509; Stop 1533
tattgtagttctaacgccgcaagcg

SEQ ID NO: 180845 - DNA, 25 bp, Artificial
  probe
  misc_feature (1)..(25): SEQ ID NO: 5467; WAN024ESN_at; Start 884; Stop 908
tcttagctgtattggtggtcggatc

SEQ ID NO: 180846 - DNA, 25 bp, Artificial
  probe
  misc_feature (1)..(25): SEQ ID NO: 5467; WAN024ESN_at; Start 1133; Stop 1157
tctcagatggagcagaagtggacct

SEQ ID NO: 180847 - DNA, 25 bp, Artificial
  probe
  misc_feature (1)..(25): SEQ ID NO: 5467; WAN024ESN_at; Start 705; Stop 729
tatggcaacggtgcaactggtcatc

SEQ ID NO: 180848 - DNA, 25 bp, Artificial
  probe
  misc_feature (1)..(25): SEQ ID NO: 5467; WAN024ESN_at; Start 235; Stop 259
ccaaatgaagctggagaaacacgct

SEQ ID NO: 180849 - DNA, 25 bp, Artificial
  probe
  misc_feature (1)..(25): SEQ ID NO: 5467; WAN024ESN_at; Start 1787; Stop 1811
tctattttgagcagttcagacggga

SEQ ID NO: 180850 - DNA, 25 bp, Artificial
  probe
  misc_feature (1)..(25): SEQ ID NO: 5467; WAN024ESN_at; Start 1731; Stop 1755
tgggacgattttgaccctgtctacg

SEQ ID NO: 180851 - DNA, 25 bp, Artificial
  probe
  misc_feature (1)..(25): SEQ ID NO: 5467; WAN024ESN_at; Start 295; Stop 319
gaaggtctgaccatttcctccaagg

SEQ ID NO: 180852 - DNA, 25 bp, Artificial
  probe
  misc_feature (1)..(25): SEQ ID NO: 5467; WAN024ESN_at; Start 1319; Stop 1343
gagagcagtctgtctactaccaagg

SEQ ID NO: 180853 - DNA, 25 bp, Artificial
  probe
  misc_feature (1)..(25): SEQ ID NO: 5467; WAN024ESN_at; Start 1599; Stop 1623
tcgatatggagacagcatcacagct

SEQ ID NO: 180854 - DNA, 25 bp, Artificial
  probe
  misc_feature (1)..(25): SEQ ID NO: 5467; WAN024ESN_at; Start 678; Stop 702
gattctctggtatcaaggtgccttg

SEQ ID NO: 180855 - DNA, 25 bp, Artificial
  probe
  misc_feature (1)..(25): SEQ ID NO: 5467; WAN024ESN_at; Start 313; Stop 337
tccaaggagagtgcagaaacgagtg

SEQ ID NO: 180856 - DNA, 25 bp, Artificial
  probe
  misc_feature (1)..(25): SEQ ID NO: 5467; WAN024ESN_at; Start 823; Stop 847
gatctattgaaagggaaactccctc

SEQ ID NO: 180857 - DNA, 25 bp, Artificial
  probe
  misc_feature (1)..(25): SEQ ID NO: 5467; WAN024ESN_at; Start 926; Stop 950
taccccactaccgtgaaatgcagga

SEQ ID NO: 180858 - DNA, 25 bp, Artificial
  probe
  misc_feature (1)..(25): SEQ ID NO: 5467; WAN024ESN_at; Start 464; Stop 488
tattgacggccacccctatggtgct

SEQ ID NO: 180859 - DNA, 25 bp, Artificial
  probe
  misc_feature (1)..(25): SEQ ID NO: 5467; WAN024ESN_at; Start 1047; Stop 1071
taaggataatcgtgagtggcagaca

SEQ ID NO: 180860 - DNA, 25 bp, Artificial
  probe
  misc_feature (1)..(25): SEQ ID NO: 5467; WAN024ESN_at; Start 1298; Stop 1322
tgatcttgcctgagagcttgcgaga

SEQ ID NO: 180861 - DNA, 25 bp, Artificial
  probe
  misc_feature (1)..(25): SEQ ID NO: 5467; WAN024ESN_at; Start 1686; Stop 1710
caaggtactaaatgacaaacgggtg

SEQ ID NO: 180862 - DNA, 25 bp, Artificial
  probe
  misc_feature (1)..(25): SEQ ID NO: 5467; WAN024ESN_at; Start 1153; Stop 1177
gacctagatggcaatcgtctcagtg

SEQ ID NO: 180863 - DNA, 25 bp, Artificial
  probe
  misc_feature (1)..(25): SEQ ID NO: 5467; WAN024ESN_at; Start 378; Stop 402
tggagtgagcttacagaccaccttg

SEQ ID NO: 180864 - DNA, 25 bp, Artificial
  probe
  misc_feature (1)..(25): SEQ ID NO: 1918; WAN024ESO_at; Start 313; Stop 337
ggaactgtcagccttttgaaagcca

SEQ ID NO: 180865 - DNA, 25 bp, Artificial
  probe
  misc_feature (1)..(25): SEQ ID NO: 1918; WAN024ESO_at; Start 43; Stop 67
ggaacccacactgttattgaattga

SEQ ID NO: 180866 - DNA, 25 bp, Artificial
  probe
  misc_feature (1)..(25): SEQ ID NO: 1918; WAN024ESO_at; Start 819; Stop 843
tatccaaaacatggaaaaagcggtg

SEQ ID NO: 180867 - DNA, 25 bp, Artificial
  probe
  misc_feature (1)..(25): SEQ ID NO: 1918; WAN024ESO_at; Start 723; Stop 747
taagggtcacgttgcagctttgaaa

SEQ ID NO: 180868 - DNA, 25 bp, Artificial
  probe
  misc_feature (1)..(25): SEQ ID NO: 1918; WAN024ESO_at; Start 610; Stop 634
tatgtgactcaagtagccgttggaa

SEQ ID NO: 180869 - DNA, 25 bp, Artificial
  probe
  misc_feature (1)..(25): SEQ ID NO: 1918; WAN024ESO_at; Start 95; Stop 119
tggataatcttgtcaatagcaatcg

SEQ ID NO: 180870 - DNA, 25 bp, Artificial
  probe
  misc_feature (1)..(25): SEQ ID NO: 1918; WAN024ESO_at; Start 448; Stop 472
tacggtcgtactaagctcatgctag

SEQ ID NO: 180871 - DNA, 25 bp, Artificial
  probe
  misc_feature (1)..(25): SEQ ID NO: 1918; WAN024ESO_at; Start 869; Stop 893
tagaacgtcgcccaggtgatatcgc

SEQ ID NO: 180872 - DNA, 25 bp, Artificial
  probe
  misc_feature (1)..(25): SEQ ID NO: 1918; WAN024ESO_at; Start 593; Stop 617
caaacaatctcttgccatatgtgac

SEQ ID NO: 180873 - DNA, 25 bp, Artificial
  probe
  misc_feature (1)..(25): SEQ ID NO: 1918; WAN024ESO_at; Start 542; Stop 566
caatcggagcccatgagagtggtga

SEQ ID NO: 180874 - DNA, 25 bp, Artificial
  probe
  misc_feature (1)..(25): SEQ ID NO: 1918; WAN024ESO_at; Start 493; Stop 517
tacaaagcagactcagaatggaatg

SEQ ID NO: 180875 - DNA, 25 bp, Artificial
  probe
  misc_feature (1)..(25): SEQ ID NO: 1918; WAN024ESO_at; Start 708; Stop 732
cgttgtcgatttggctaagggtcac

SEQ ID NO: 180876 - DNA, 25 bp, Artificial
  probe
  misc_feature (1)..(25): SEQ ID NO: 1918; WAN024ESO_at; Start 882; Stop 906
aggtgatatcgctgcctgctactca

SEQ ID NO: 180877 - DNA, 25 bp, Artificial
  probe
  misc_feature (1)..(25): SEQ ID NO: 1918; WAN024ESO_at; Start 167; Stop 191
tctatgaggcagatattcgtgacac

SEQ ID NO: 180878 - DNA, 25 bp, Artificial
  probe
  misc_feature (1)..(25): SEQ ID NO: 1918; WAN024ESO_at; Start 369; Stop 393
cagttcttctgcgacagtttacggg

SEQ ID NO: 180879 - DNA, 25 bp, Artificial
  probe
  misc_feature (1)..(25): SEQ ID NO: 1918; WAN024ESO_at; Start 399; Stop 423
gcacacagtgcccatcttggaagat

SEQ ID NO: 180880 - DNA, 25 bp, Artificial
  probe
  misc_feature (1)..(25): SEQ ID NO: 1918; WAN024ESO_at; Start 268; Stop 292
gaatcaacacgtatccctcttgcct

SEQ ID NO: 180881 - DNA, 25 bp, Artificial
  probe
  misc_feature (1)..(25): SEQ ID NO: 1918; WAN024ESO_at; Start 667; Stop 691
tacgatacggaagatggaacaggtg

SEQ ID NO: 180882 - DNA, 25 bp, Artificial
  probe
  misc_feature (1)..(25): SEQ ID NO: 1918; WAN024ESO_at; Start 292; Stop 316
tactatgacaacaatatcgctggaa

SEQ ID NO: 180883 - DNA, 25 bp, Artificial
  probe
  misc_feature (1)..(25): SEQ ID NO: 1918; WAN024ESO_at; Start 532; Stop 556
tactttaacccaatcggagcccatg

SEQ ID NO: 180884 - DNA, 25 bp, Artificial
  probe
  misc_feature (1)..(25): SEQ ID NO: 1918; WAN024ESO_at; Start 626; Stop 650
ccgttggaaaattagagcaagtgca

SEQ ID NO: 180885 - DNA, 25 bp, Artificial
  probe
  misc_feature (1)..(25): SEQ ID NO: 1918; WAN024ESO_at; Start 649; Stop 673
caagtgtttggagacgattacgata

SEQ ID NO: 180886 - DNA, 25 bp, Artificial
  probe
  misc_feature (1)..(25): SEQ ID NO: 1918; WAN024ESO_at; Start 683; Stop 707
gaacaggtgttcgtgactatatcca

SEQ ID NO: 180887 - DNA, 25 bp, Artificial
  probe
  misc_feature (1)..(25): SEQ ID NO: 1918; WAN024ESO_at; Start 416; Stop 440
tggaagatttcccactttcagtgac

SEQ ID NO: 180888 - DNA, 25 bp, Artificial
  probe
  misc_feature (1)..(25): SEQ ID NO: 1918; WAN024ESO_at; Start 237; Stop 261
cattcactttgctggtttgaaggct

SEQ ID NO: 180889 - DNA, 25 bp, Artificial
  probe
  misc_feature (1)..(25): SEQ ID NO: 1918; WAN024ESO_at; Start 854; Stop 878
ttccttaccgcatcgtagaacgtcg

SEQ ID NO: 180890 - DNA, 25 bp, Artificial
  probe
  misc_feature (1)..(25): SEQ ID NO: 1918; WAN024ESO_at; Start 79; Stop 103
catcaagttgttgtggtggataatc

SEQ ID NO: 180891 - DNA, 25 bp, Artificial
  probe
  misc_feature (1)..(25): SEQ ID NO: 1918; WAN024ESO_at; Start 195; Stop 219
taccctcagagatattttcaagcag

SEQ ID NO: 180892 - DNA, 25 bp, Artificial
  probe
  misc_feature (1)..(25): SEQ ID NO: 1918; WAN024ESO_at; Start 210; Stop 234
tttcaagcaggaagaaccgactggt

SEQ ID NO: 180893 - DNA, 25 bp, Artificial
  probe
  misc_feature (1)..(25): SEQ ID NO: 1918; WAN024ESO_at; Start 431; Stop 455
tttcagtgaccaacccatacggtcg

SEQ ID NO: 180894 - DNA, 25 bp, Artificial
  probe
  misc_feature (1)..(25): SEQ ID NO: 1918; WAN024ESO_at; Start 253; Stop 277
ttgaaggctgttggcgaatcaacac

SEQ ID NO: 180895 - DNA, 25 bp, Artificial
  probe
  misc_feature (1)..(25): SEQ ID NO: 1918; WAN024ESO_at; Start 329; Stop 353
tgaaagccatggaagaaaacaactg

SEQ ID NO: 180896 - DNA, 25 bp, Artificial
  probe
  misc_feature (1)..(25): SEQ ID NO: 1918; WAN024ESO_at; Start 10; Stop 34
aagattttggtaactggtggtgccg

SEQ ID NO: 180897 - DNA, 25 bp, Artificial
  probe
  misc_feature (1)..(25): SEQ ID NO: 1918; WAN024ESO_at; Start 152; Stop 176
gagttgagattcctttctatgaggc

SEQ ID NO: 180898 - DNA, 25 bp, Artificial
  probe
  misc_feature (1)..(25): SEQ ID NO: 2815; WAN024ESP_at; Start 474; Stop 498
tccaaatgccaaggataatcctttc

SEQ ID NO: 180899 - DNA, 25 bp, Artificial
  probe
  misc_feature (1)..(25): SEQ ID NO: 2815; WAN024ESP_at; Start 532; Stop 556
aatgttgtgtttaagtggtgtctga

SEQ ID NO: 180900 - DNA, 25 bp, Artificial
  probe
  misc_feature (1)..(25): SEQ ID NO: 2815; WAN024ESP_at; Start 307; Stop 331
gaaaatttcctttgccactatatcg

SEQ ID NO: 180901 - DNA, 25 bp, Artificial
  probe
  misc_feature (1)..(25): SEQ ID NO: 2815; WAN024ESP_at; Start 418; Stop 442
ccctttctgtatatgatgtttgctc

SEQ ID NO: 180902 - DNA, 25 bp, Artificial
  probe
  misc_feature (1)..(25): SEQ ID NO: 2815; WAN024ESP_at; Start 257; Stop 281
tgatttaccatttcctcttggcgcc

SEQ ID NO: 180903 - DNA, 25 bp, Artificial
  probe
  misc_feature (1)..(25): SEQ ID NO: 2815; WAN024ESP_at; Start 227; Stop 251
gggtcaccatgagtatcatgattac

SEQ ID NO: 180904 - DNA, 25 bp, Artificial
  probe
  misc_feature (1)..(25): SEQ ID NO: 2815; WAN024ESP_at; Start 15; Stop 39
taaacttgtattttatagccgtatc

SEQ ID NO: 180905 - DNA, 25 bp, Artificial
  probe
  misc_feature (1)..(25): SEQ ID NO: 2815; WAN024ESP_at; Start 432; Stop 456
gatgtttgctctttttaatggcttg

SEQ ID NO: 180906 - DNA, 25 bp, Artificial
  probe
  misc_feature (1)..(25): SEQ ID NO: 2815; WAN024ESP_at; Start 285; Stop 309
tgcgactaatttctataccctagaa

SEQ ID NO: 180907 - DNA, 25 bp, Artificial
  probe
  misc_feature (1)..(25): SEQ ID NO: 2815; WAN024ESP_at; Start 204; Stop 228
aagtctcttgcgcttaaaaggtggg

SEQ ID NO: 180908 - DNA, 25 bp, Artificial
  probe
  misc_feature (1)..(25): SEQ ID NO: 2815; WAN024ESP_at; Start 30; Stop 54
tagccgtatcttcttgtttctagcg

SEQ ID NO: 180909 - DNA, 25 bp, Artificial
  probe
  misc_feature (1)..(25): SEQ ID NO: 2815; WAN024ESP_at; Start 463; Stop 487
aaactcaatattccaaatgccaagg

SEQ ID NO: 180910 - DNA, 25 bp, Artificial
  probe
  misc_feature (1)..(25): SEQ ID NO: 2815; WAN024ESP_at; Start 242; Stop 266
tcatgattacctgtgtgatttacca

SEQ ID NO: 180911 - DNA, 25 bp, Artificial
  probe
  misc_feature (1)..(25): SEQ ID NO: 2815; WAN024ESP_at; Start 447; Stop 471
taatggcttggttctaaaactcaat

SEQ ID NO: 180912 - DNA, 25 bp, Artificial
  probe
  misc_feature (1)..(25): SEQ ID NO: 2815; WAN024ESP_at; Start 379; Stop 403
caatacaagatttgggatccagcag

SEQ ID NO: 180913 - DNA, 25 bp, Artificial
  probe
  misc_feature (1)..(25): SEQ ID NO: 2815; WAN024ESP_at; Start 367; Stop 391
gacaaacagggtcaatacaagattt

SEQ ID NO: 180914 - DNA, 25 bp, Artificial
  probe
  misc_feature (1)..(25): SEQ ID NO: 2815; WAN024ESP_at; Start 272; Stop 296
tcttggcgcccattgcgactaattt

SEQ ID NO: 180915 - DNA, 25 bp, Artificial
  probe
  misc_feature (1)..(25): SEQ ID NO: 2815; WAN024ESP_at; Start 38; Stop 62
tcttcttgtttctagcggcttttac

SEQ ID NO: 180916 - DNA, 25 bp, Artificial
  probe
  misc_feature (1)..(25): SEQ ID NO: 2815; WAN024ESP_at; Start 548; Stop 572
ggtgtctgattatctttgttgccta

SEQ ID NO: 180917 - DNA, 25 bp, Artificial
  probe
  misc_feature (1)..(25): SEQ ID NO: 2815; WAN024ESP_at; Start 402; Stop 426
agtgtggaccattttaccctttctg

SEQ ID NO: 180918 - DNA, 25 bp, Artificial
  probe
  misc_feature (1)..(25): SEQ ID NO: 2815; WAN024ESP_at; Start 568; Stop 592
gcctatatggtagcaggatttattt

SEQ ID NO: 180919 - DNA, 25 bp, Artificial
  probe
  misc_feature (1)..(25): SEQ ID NO: 2815; WAN024ESP_at; Start 333; Stop 357
tcccatctggtttttagcggatacc

SEQ ID NO: 180920 - DNA, 25 bp, Artificial
  probe
  misc_feature (1)..(25): SEQ ID NO: 2815; WAN024ESP_at; Start 347; Stop 371
tagcggataccctcttttttgacaa

SEQ ID NO: 180921 - DNA, 25 bp, Artificial
  probe
  misc_feature (1)..(25): SEQ ID NO: 2815; WAN024ESP_at; Start 115; Stop 139
tacacggttctgtccaacctcttgg

SEQ ID NO: 180922 - DNA, 25 bp, Artificial
  probe
  misc_feature (1)..(25): SEQ ID NO: 2815; WAN024ESP_at; Start 560; Stop 584
tctttgttgcctatatggtagcagg

SEQ ID NO: 180923 - DNA, 25 bp, Artificial
  probe
  misc_feature (1)..(25): SEQ ID NO: 2815; WAN024ESP_at; Start 174; Stop 198
gagccgtgtaggtgaaaattggcaa

SEQ ID NO: 180924 - DNA, 25 bp, Artificial
  probe
  misc_feature (1)..(25): SEQ ID NO: 2815; WAN024ESP_at; Start 387; Stop 411
gatttgggatccagcagtgtggacc

SEQ ID NO: 180925 - DNA, 25 bp, Artificial
  probe
  misc_feature (1)..(25): SEQ ID NO: 2815; WAN024ESP_at; Start 606; Stop 630
gcaaatcaagagaaagtcatcctaa

SEQ ID NO: 180926 - DNA, 25 bp, Artificial
  probe
  misc_feature (1)..(25): SEQ ID NO: 2815; WAN024ESP_at; Start 506; Stop 530
tctttttgaatgtgaacaagggttg

SEQ ID NO: 180927 - DNA, 25 bp, Artificial
  probe
  misc_feature (1)..(25): SEQ ID NO: 2815; WAN024ESP_at; Start 157; Stop 181
tatcttctaaaggttatgagccgtg

SEQ ID NO: 180928 - DNA, 25 bp, Artificial
  probe
  misc_feature (1)..(25): SEQ ID NO: 2815; WAN024ESP_at; Start 593; Stop 617
tctactttatcaagcaaatcaagag

SEQ ID NO: 180929 - DNA, 25 bp, Artificial
  probe
  misc_feature (1)..(25): SEQ ID NO: 2815; WAN024ESP_at; Start 88; Stop 112
catggtggttttgggatgcttctct

SEQ ID NO: 180930 - DNA, 25 bp, Artificial
  probe
  misc_feature (1)..(25): SEQ ID NO: 2815; WAN024ESP_at; Start 319; Stop 343
tgccactatatcgttcccatctggt

SEQ ID NO: 180931 - DNA, 25 bp, Artificial
  probe
  misc_feature (1)..(25): SEQ ID NO: 2815; WAN024ESP_at; Start 100; Stop 124
gggatgcttctctattacacggttc

SEQ ID NO: 180932 - DNA, 25 bp, Artificial
  probe
  misc_feature (1)..(25): SEQ ID NO: 1105; WAN024ESQ_at; Start 362; Stop 386
gggcagcagccctcccagaaattct

SEQ ID NO: 180933 - DNA, 25 bp, Artificial
  probe
  misc_feature (1)..(25): SEQ ID NO: 1105; WAN024ESQ_at; Start 293; Stop 317
taggccttattttagcaactattgc

SEQ ID NO: 180934 - DNA, 25 bp, Artificial
  probe
  misc_feature (1)..(25): SEQ ID NO: 1105; WAN024ESQ_at; Start 312; Stop 336
tattgccatggtaggaggctacgcc

SEQ ID NO: 180935 - DNA, 25 bp, Artificial
  probe
  misc_feature (1)..(25): SEQ ID NO: 1105; WAN024ESQ_at; Start 315; Stop 339
tgccatggtaggaggctacgccttg

SEQ ID NO: 180936 - DNA, 25 bp, Artificial
  probe
  misc_feature (1)..(25): SEQ ID NO: 1105; WAN024ESQ_at; Start 231; Stop 255
tagcttggtcaaccatggcttgcag

SEQ ID NO: 180937 - DNA, 25 bp, Artificial
  probe
  misc_feature (1)..(25): SEQ ID NO: 1105; WAN024ESQ_at; Start 80; Stop 104
aaatcccaacacctacaggaattct

SEQ ID NO: 180938 - DNA, 25 bp, Artificial
  probe
  misc_feature (1)..(25): SEQ ID NO: 1105; WAN024ESQ_at; Start 308; Stop 332
caactattgccatggtaggaggcta

SEQ ID NO: 180939 - DNA, 25 bp, Artificial
  probe
  misc_feature (1)..(25): SEQ ID NO: 1105; WAN024ESQ_at; Start 410; Stop 434
tagggatgattgtaggatttattct

SEQ ID NO: 180940 - DNA, 25 bp, Artificial
  probe
  misc_feature (1)..(25): SEQ ID NO: 1105; WAN024ESQ_at; Start 286; Stop 310
cagtggttaggccttattttagcaa

SEQ ID NO: 180941 - DNA, 25 bp, Artificial
  probe
  misc_feature (1)..(25): SEQ ID NO: 1105; WAN024ESQ_at; Start 55; Stop 79
tctgtggttctaggttatttcttaa

SEQ ID NO: 180942 - DNA, 25 bp, Artificial
  probe
  misc_feature (1)..(25): SEQ ID NO: 1105; WAN024ESQ_at; Start 237; Stop 261
ggtcaaccatggcttgcagggattt

SEQ ID NO: 180943 - DNA, 25 bp, Artificial
  probe
  misc_feature (1)..(25): SEQ ID NO: 1105; WAN024ESQ_at; Start 243; Stop 267
ccatggcttgcagggatttttcgca

SEQ ID NO: 180944 - DNA, 25 bp, Artificial
  probe
  misc_feature (1)..(25): SEQ ID NO: 1105; WAN024ESQ_at; Start 217; Stop 241
cagtggatgttctttagcttggtca

SEQ ID NO: 180945 - DNA, 25 bp, Artificial
  probe
  misc_feature (1)..(25): SEQ ID NO: 1105; WAN024ESQ_at; Start 205; Stop 229
tcaggctaccctcagtggatgttct

SEQ ID NO: 180946 - DNA, 25 bp, Artificial
  probe
  misc_feature (1)..(25): SEQ ID NO: 1105; WAN024ESQ_at; Start 120; Stop 144
tggtgtcttctttgcggccttttac

SEQ ID NO: 180947 - DNA, 25 bp, Artificial
  probe
  misc_feature (1)..(25): SEQ ID NO: 1105; WAN024ESQ_at; Start 48; Stop 72
cgccctttctgtggttctaggttat

SEQ ID NO: 180948 - DNA, 25 bp, Artificial
  probe
  misc_feature (1)..(25): SEQ ID NO: 1105; WAN024ESQ_at; Start 424; Stop 448
ggatttattcttagtcaaagtatca

SEQ ID NO: 180949 - DNA, 25 bp, Artificial
  probe
  misc_feature (1)..(25): SEQ ID NO: 1105; WAN024ESQ_at; Start 21; Stop 45
taaaatcgcccttgtatccctatta

SEQ ID NO: 180950 - DNA, 25 bp, Artificial
  probe
  misc_feature (1)..(25): SEQ ID NO: 1105; WAN024ESQ_at; Start 398; Stop 422
tgcaaaatatggtagggatgattgt

SEQ ID NO: 180951 - DNA, 25 bp, Artificial
  probe
  misc_feature (1)..(25): SEQ ID NO: 1105; WAN024ESQ_at; Start 113; Stop 137
tagatgctggtgtcttctttgcggc

SEQ ID NO: 180952 - DNA, 25 bp, Artificial
  probe
  misc_feature (1)..(25): SEQ ID NO: 1105; WAN024ESQ_at; Start 439; Stop 463
caaagtatcaagaagattaagtaac

SEQ ID NO: 180953 - DNA, 25 bp, Artificial
  probe
  misc_feature (1)..(25): SEQ ID NO: 1105; WAN024ESQ_at; Start 211; Stop 235
taccctcagtggatgttctttagct

SEQ ID NO: 180954 - DNA, 25 bp, Artificial
  probe
  misc_feature (1)..(25): SEQ ID NO: 1105; WAN024ESQ_at; Start 25; Stop 49
atcgcccttgtatccctattaaccg

SEQ ID NO: 180955 - DNA, 25 bp, Artificial
  probe
  misc_feature (1)..(25): SEQ ID NO: 1105; WAN024ESQ_at; Start 141; Stop 165
ttactttggtagtcgtgaaggagcg

SEQ ID NO: 180956 - DNA, 25 bp, Artificial
  probe
  misc_feature (1)..(25): SEQ ID NO: 1105; WAN024ESQ_at; Start 264; Stop 288
cgcaggatttaaaggaaaaagtcag

SEQ ID NO: 180957 - DNA, 25 bp, Artificial
  probe
  misc_feature (1)..(25): SEQ ID NO: 1105; WAN024ESQ_at; Start 167; Stop 191
tagtcggaggactagcaagtttctt

SEQ ID NO: 180958 - DNA, 25 bp, Artificial
  probe
  misc_feature (1)..(25): SEQ ID NO: 1105; WAN024ESQ_at; Start 191; Stop 215
tgattgacctcttatcaggctaccc

SEQ ID NO: 180959 - DNA, 25 bp, Artificial
  probe
  misc_feature (1)..(25): SEQ ID NO: 1105; WAN024ESQ_at; Start 252; Stop 276
gcagggatttttcgcaggatttaaa

SEQ ID NO: 180960 - DNA, 25 bp, Artificial
  probe
  misc_feature (1)..(25): SEQ ID NO: 1105; WAN024ESQ_at; Start 86; Stop 110
caacacctacaggaattctaactct

SEQ ID NO: 180961 - DNA, 25 bp, Artificial
  probe
  misc_feature (1)..(25): SEQ ID NO: 1105; WAN024ESQ_at; Start 150; Stop 174
tagtcgtgaaggagcggtagtcgga

SEQ ID NO: 180962 - DNA, 25 bp, Artificial
  probe
  misc_feature (1)..(25): SEQ ID NO: 1105; WAN024ESQ_at; Start 176; Stop 200
gactagcaagtttcttgattgacct

SEQ ID NO: 180963 - DNA, 25 bp, Artificial
  probe
  misc_feature (1)..(25): SEQ ID NO: 1105; WAN024ESQ_at; Start 224; Stop 248
tgttctttagcttggtcaaccatgg

SEQ ID NO: 180964 - DNA, 25 bp, Artificial
  probe
  misc_feature (1)..(25): SEQ ID NO: 1105; WAN024ESQ_at; Start 200; Stop 224
tcttatcaggctaccctcagtggat

SEQ ID NO: 180965 - DNA, 25 bp, Artificial
  probe
  misc_feature (1)..(25): SEQ ID NO: 1105; WAN024ESQ_at; Start 98; Stop 122
gaattctaactcttttagatgctgg

SEQ ID NO: 180966 - DNA, 25 bp, Artificial
  probe
  misc_feature (1)..(25): SEQ ID NO: 1077; WAN024ESR_at; Start 380; Stop 404
tcccttatgtcagtgtgattacgcc

SEQ ID NO: 180967 - DNA, 25 bp, Artificial
  probe
  misc_feature (1)..(25): SEQ ID NO: 1077; WAN024ESR_at; Start 692; Stop 716
gctctaaggctttcgtttatcgtgc

SEQ ID NO: 180968 - DNA, 25 bp, Artificial
  probe
  misc_feature (1)..(25): SEQ ID NO: 1077; WAN024ESR_at; Start 268; Stop 292
gactttatcaaacaacgcccaggag

SEQ ID NO: 180969 - DNA, 25 bp, Artificial
  probe
  misc_feature (1)..(25): SEQ ID NO: 1077; WAN024ESR_at; Start 324; Stop 348
caaggaaacgcatgatgtagctgtc

SEQ ID NO: 180970 - DNA, 25 bp, Artificial
  probe
  misc_feature (1)..(25): SEQ ID NO: 1077; WAN024ESR_at; Start 724; Stop 748
caagcagatcagtatggagtaagac

SEQ ID NO: 180971 - DNA, 25 bp, Artificial
  probe
  misc_feature (1)..(25): SEQ ID NO: 1077; WAN024ESR_at; Start 464; Stop 488
aaactgcagcgcagaaattgcatga

SEQ ID NO: 180972 - DNA, 25 bp, Artificial
  probe
  misc_feature (1)..(25): SEQ ID NO: 1077; WAN024ESR_at; Start 484; Stop 508
catgatttaggagcgccagcagtca

SEQ ID NO: 180973 - DNA, 25 bp, Artificial
  probe
  misc_feature (1)..(25): SEQ ID NO: 1077; WAN024ESR_at; Start 309; Stop 333
tcctgtcttggtctgcaaggaaacg

SEQ ID NO: 180974 - DNA, 25 bp, Artificial
  probe
  misc_feature (1)..(25): SEQ ID NO: 1077; WAN024ESR_at; Start 415; Stop 439
gaagcagaattattatccggtcagg

SEQ ID NO: 180975 - DNA, 25 bp, Artificial
  probe
  misc_feature (1)..(25): SEQ ID NO: 1077; WAN024ESR_at; Start 56; Stop 80
gactgtcagctgatttggctaccta

SEQ ID NO: 180976 - DNA, 25 bp, Artificial
  probe
  misc_feature (1)..(25): SEQ ID NO: 1077; WAN024ESR_at; Start 87; Stop 111
gaacggcttgcatgggtttgtagca

SEQ ID NO: 180977 - DNA, 25 bp, Artificial
  probe
  misc_feature (1)..(25): SEQ ID NO: 1077; WAN024ESR_at; Start 599; Stop 623
tccaaggccaaaatgctggtgcagg

SEQ ID NO: 180978 - DNA, 25 bp, Artificial
  probe
  misc_feature (1)..(25): SEQ ID NO: 1077; WAN024ESR_at; Start 449; Stop 473
ccttggaagacatgaaaactgcagc

SEQ ID NO: 180979 - DNA, 25 bp, Artificial
  probe
  misc_feature (1)..(25): SEQ ID NO: 1077; WAN024ESR_at; Start 513; Stop 537
caagggaggcaatcgtcttagtcag

SEQ ID NO: 180980 - DNA, 25 bp, Artificial
  probe
  misc_feature (1)..(25): SEQ ID NO: 1077; WAN024ESR_at; Start 352; Stop 376
gagctctgccaagagttgattcgct

SEQ ID NO: 180981 - DNA, 25 bp, Artificial
  probe
  misc_feature (1)..(25): SEQ ID NO: 1077; WAN024ESR_at; Start 562; Stop 586
gatggacagacctttactatcctag

SEQ ID NO: 180982 - DNA, 25 bp, Artificial
  probe
  misc_feature (1)..(25): SEQ ID NO: 1077; WAN024ESR_at; Start 224; Stop 248
agattggtcttctccctactgtcag

SEQ ID NO: 180983 - DNA, 25 bp, Artificial
  probe
  misc_feature (1)..(25): SEQ ID NO: 1077; WAN024ESR_at; Start 675; Stop 699
tttgccagcagtagaaagctctaag

SEQ ID NO: 180984 - DNA, 25 bp, Artificial
  probe
  misc_feature (1)..(25): SEQ ID NO: 1077; WAN024ESR_at; Start 114; Stop 138
gacttgtttgacagccttgacagaa

SEQ ID NO: 180985 - DNA, 25 bp, Artificial
  probe
  misc_feature (1)..(25): SEQ ID NO: 1077; WAN024ESR_at; Start 626; Stop 650
gtacctttgcctctagcattgccag

SEQ ID NO: 180986 - DNA, 25 bp, Artificial
  probe
  misc_feature (1)..(25): SEQ ID NO: 1077; WAN024ESR_at; Start 253; Stop 277
gctgagaaggccttggactttatca

SEQ ID NO: 180987 - DNA, 25 bp, Artificial
  probe
  misc_feature (1)..(25): SEQ ID NO: 1077; WAN024ESR_at; Start 41; Stop 65
tttttagtggtggtggactgtcagc

SEQ ID NO: 180988 - DNA, 25 bp, Artificial
  probe
  misc_feature (1)..(25): SEQ ID NO: 1077; WAN024ESR_at; Start 709; Stop 733
tatcgtgctattgcacaagcagatc

SEQ ID NO: 180989 - DNA, 25 bp, Artificial
  probe
  misc_feature (1)..(25): SEQ ID NO: 1077; WAN024ESR_at; Start 612; Stop 636
tgctggtgcaggttgtacctttgcc

SEQ ID NO: 180990 - DNA, 25 bp, Artificial
  probe
  misc_feature (1)..(25): SEQ ID NO: 1077; WAN024ESR_at; Start 148; Stop 172
gaagtctttccaactgatgatacca

SEQ ID NO: 180991 - DNA, 25 bp, Artificial
  probe
  misc_feature (1)..(25): SEQ ID NO: 1077; WAN024ESR_at; Start 584; Stop 608
tagaaaatccagttatccaaggcca

SEQ ID NO: 180992 - DNA, 25 bp, Artificial
  probe
  misc_feature (1)..(25): SEQ ID NO: 1077; WAN024ESR_at; Start 339; Stop 363
tgtagctgtcagtgagctctgccaa

SEQ ID NO: 180993 - DNA, 25 bp, Artificial
  probe
  misc_feature (1)..(25): SEQ ID NO: 1077; WAN024ESR_at; Start 396; Stop 420
gattacgcctaatctcccagaagca

SEQ ID NO: 180994 - DNA, 25 bp, Artificial
  probe
  misc_feature (1)..(25): SEQ ID NO: 1077; WAN024ESR_at; Start 10; Stop 34
aatcgtattttagcactttctggaa

SEQ ID NO: 180995 - DNA, 25 bp, Artificial
  probe
  misc_feature (1)..(25): SEQ ID NO: 1077; WAN024ESR_at; Start 72; Stop 96
ggctacctataccttgaacggcttg

SEQ ID NO: 180996 - DNA, 25 bp, Artificial
  probe
  misc_feature (1)..(25): SEQ ID NO: 1077; WAN024ESR_at; Start 738; Stop 762
tggagtaagacaatatgaagcaaac

SEQ ID NO: 180997 - DNA, 25 bp, Artificial
  probe
  misc_feature (1)..(25): SEQ ID NO: 1077; WAN024ESR_at; Start 528; Stop 552
tcttagtcaggacaaggctgtggat

SEQ ID NO: 180998 - DNA, 25 bp, Artificial
  probe
  misc_feature (1)..(25): SEQ ID NO: 1077; WAN024ESR_at; Start 499; Stop 523
ccagcagtcattatcaagggaggca

SEQ ID NO: 180999 - DNA, 25 bp, Artificial
  probe
  misc_feature (1)..(25): SEQ ID NO: 1077; WAN024ESR_at; Start 287; Stop 311
caggagtacctgtggtgttggatcc

SEQ ID NO: 181000 - DNA, 25 bp, Artificial
  probe
  misc_feature (1)..(25): SEQ ID NO: 5393; WAN024ESS_at; Start 271; Stop 295
caagaagctgatttttttgaacgca

SEQ ID NO: 181001 - DNA, 25 bp, Artificial
  probe
  misc_feature (1)..(25): SEQ ID NO: 5393; WAN024ESS_at; Start 81; Stop 105
catggaaaatatgaccaatcatctc

SEQ ID NO: 181002 - DNA, 25 bp, Artificial
  probe
  misc_feature (1)..(25): SEQ ID NO: 5393; WAN024ESS_at; Start 230; Stop 254
aggaggatgtggatttgaccctacc

SEQ ID NO: 181003 - DNA, 25 bp, Artificial
  probe
  misc_feature (1)..(25): SEQ ID NO: 5393; WAN024ESS_at; Start 139; Stop 163
cttgattttgctagtattgaagggc

SEQ ID NO: 181004 - DNA, 25 bp, Artificial
  probe
  misc_feature (1)..(25): SEQ ID NO: 5393; WAN024ESS_at; Start 153; Stop 177
tattgaagggcaaaggcaaaagcat

SEQ ID NO: 181005 - DNA, 25 bp, Artificial
  probe
  misc_feature (1)..(25): SEQ ID NO: 5393; WAN024ESS_at; Start 100; Stop 124
catctccttttggttcaaatccgag

SEQ ID NO: 181006 - DNA, 25 bp, Artificial
  probe
  misc_feature (1)..(25): SEQ ID NO: 5393; WAN024ESS_at; Start 111; Stop 135
ggttcaaatccgagtgcatggctat

SEQ ID NO: 181007 - DNA, 25 bp, Artificial
  probe
  misc_feature (1)..(25): SEQ ID NO: 5393; WAN024ESS_at; Start 148; Stop 172
gctagtattgaagggcaaaggcaaa

SEQ ID NO: 181008 - DNA, 25 bp, Artificial
  probe
  misc_feature (1)..(25): SEQ ID NO: 5393; WAN024ESS_at; Start 39; Stop 63
tgattatcctagtgccagaggtggt

SEQ ID NO: 181009 - DNA, 25 bp, Artificial
  probe
  misc_feature (1)..(25): SEQ ID NO: 5393; WAN024ESS_at; Start 157; Stop 181
gaagggcaaaggcaaaagcattatc

SEQ ID NO: 181010 - DNA, 25 bp, Artificial
  probe
  misc_feature (1)..(25): SEQ ID NO: 5393; WAN024ESS_at; Start 72; Stop 96
tatcctcatcatggaaaatatgacc

SEQ ID NO: 181011 - DNA, 25 bp, Artificial
  probe
  misc_feature (1)..(25): SEQ ID NO: 5393; WAN024ESS_at; Start 285; Stop 309
ttttgaacgcatgtttcgagagaac

SEQ ID NO: 181012 - DNA, 25 bp, Artificial
  probe
  misc_feature (1)..(25): SEQ ID NO: 5393; WAN024ESS_at; Start 88; Stop 112
aatatgaccaatcatctccttttgg

SEQ ID NO: 181013 - DNA, 25 bp, Artificial
  probe
  misc_feature (1)..(25): SEQ ID NO: 5393; WAN024ESS_at; Start 52; Stop 76
gccagaggtggtttagaagatatcc

SEQ ID NO: 181014 - DNA, 25 bp, Artificial
  probe
  misc_feature (1)..(25): SEQ ID NO: 5393; WAN024ESS_at; Start 229; Stop 253
gaggaggatgtggatttgaccctac

SEQ ID NO: 181015 - DNA, 25 bp, Artificial
  probe
  misc_feature (1)..(25): SEQ ID NO: 5393; WAN024ESS_at; Start 65; Stop 89
tagaagatatcctcatcatggaaaa

SEQ ID NO: 181016 - DNA, 25 bp, Artificial
  probe
  misc_feature (1)..(25): SEQ ID NO: 5393; WAN024ESS_at; Start 61; Stop 85
ggtttagaagatatcctcatcatgg

SEQ ID NO: 181017 - DNA, 25 bp, Artificial
  probe
  misc_feature (1)..(25): SEQ ID NO: 5393; WAN024ESS_at; Start 163; Stop 187
caaaggcaaaagcattatcgtttga

SEQ ID NO: 181018 - DNA, 25 bp, Artificial
  probe
  misc_feature (1)..(25): SEQ ID NO: 5393; WAN024ESS_at; Start 120; Stop 144
ccgagtgcatggctatttgcttgat

SEQ ID NO: 181019 - DNA, 25 bp, Artificial
  probe
  misc_feature (1)..(25): SEQ ID NO: 5393; WAN024ESS_at; Start 287; Stop 311
ttgaacgcatgtttcgagagaactg

SEQ ID NO: 181020 - DNA, 25 bp, Artificial
  probe
  misc_feature (1)..(25): SEQ ID NO: 5393; WAN024ESS_at; Start 58; Stop 82
ggtggtttagaagatatcctcatca

SEQ ID NO: 181021 - DNA, 25 bp, Artificial
  probe
  misc_feature (1)..(25): SEQ ID NO: 5393; WAN024ESS_at; Start 160; Stop 184
gggcaaaggcaaaagcattatcgtt

SEQ ID NO: 181022 - DNA, 25 bp, Artificial
  probe
  misc_feature (1)..(25): SEQ ID NO: 5393; WAN024ESS_at; Start 46; Stop 70
cctagtgccagaggtggtttagaag

SEQ ID NO: 181023 - DNA, 25 bp, Artificial
  probe
  misc_feature (1)..(25): SEQ ID NO: 5393; WAN024ESS_at; Start 35; Stop 59
tatctgattatcctagtgccagagg

SEQ ID NO: 181024 - DNA, 25 bp, Artificial
  probe
  misc_feature (1)..(25): SEQ ID NO: 5393; WAN024ESS_at; Start 116; Stop 140
aaatccgagtgcatggctatttgct

SEQ ID NO: 181025 - DNA, 25 bp, Artificial
  probe
  misc_feature (1)..(25): SEQ ID NO: 5393; WAN024ESS_at; Start 108; Stop 132
tttggttcaaatccgagtgcatggc

SEQ ID NO: 181026 - DNA, 25 bp, Artificial
  probe
  misc_feature (1)..(25): SEQ ID NO: 5393; WAN024ESS_at; Start 43; Stop 67
tatcctagtgccagaggtggtttag

SEQ ID NO: 181027 - DNA, 25 bp, Artificial
  probe
  misc_feature (1)..(25): SEQ ID NO: 5393; WAN024ESS_at; Start 213; Stop 237
gacagtggatgatgtggaggaggat

SEQ ID NO: 181028 - DNA, 25 bp, Artificial
  probe
  misc_feature (1)..(25): SEQ ID NO: 5393; WAN024ESS_at; Start 1; Stop 25
ttgctcatgtgtgaaaaaatccgta

SEQ ID NO: 181029 - DNA, 25 bp, Artificial
  probe
  misc_feature (1)..(25): SEQ ID NO: 5393; WAN024ESS_at; Start 263; Stop 287
gaagttatcaagaagctgatttttt

SEQ ID NO: 181030 - DNA, 25 bp, Artificial
  probe
  misc_feature (1)..(25): SEQ ID NO: 5393; WAN024ESS_at; Start 104; Stop 128
tccttttggttcaaatccgagtgca

SEQ ID NO: 181031 - DNA, 25 bp, Artificial
  probe
  misc_feature (1)..(25): SEQ ID NO: 5393; WAN024ESS_at; Start 5; Stop 29
tcatgtgtgaaaaaatccgtattcg

SEQ ID NO: 181032 - DNA, 25 bp, Artificial
  probe
  misc_feature (1)..(25): SEQ ID NO: 5393; WAN024ESS_at; Start 31; Stop 55
agggtatctgattatcctagtgcca

SEQ ID NO: 181033 - DNA, 25 bp, Artificial
  probe
  misc_feature (1)..(25): SEQ ID NO: 5393; WAN024ESS_at; Start 178; Stop 202
tatcgtttgaaaaatttacctcaga

SEQ ID NO: 181034 - DNA, 25 bp, Artificial
  probe
  misc_feature (1)..(25): SEQ ID NO: 3008; WAN024EST_at; Start 176; Stop 200
tttataatggacaacctttagagct

SEQ ID NO: 181035 - DNA, 25 bp, Artificial
  probe
  misc_feature (1)..(25): SEQ ID NO: 3008; WAN024EST_at; Start 164; Stop 188
cagggcaaatcttttataatggaca

SEQ ID NO: 181036 - DNA, 25 bp, Artificial
  probe
  misc_feature (1)..(25): SEQ ID NO: 3008; WAN024EST_at; Start 447; Stop 471
gattgacccagaaatcattggctac

SEQ ID NO: 181037 - DNA, 25 bp, Artificial
  probe
  misc_feature (1)..(25): SEQ ID NO: 3008; WAN024EST_at; Start 106; Stop 130
tctggtggaggtaagacaactcttt

SEQ ID NO: 181038 - DNA, 25 bp, Artificial
  probe
  misc_feature (1)..(25): SEQ ID NO: 3008; WAN024EST_at; Start 60; Stop 84
cagtctaagtattcctgaaaagcaa

SEQ ID NO: 181039 - DNA, 25 bp, Artificial
  probe
  misc_feature (1)..(25): SEQ ID NO: 3008; WAN024EST_at; Start 90; Stop 114
ggctatcgttggaccttctggtgga

SEQ ID NO: 181040 - DNA, 25 bp, Artificial
  probe
  misc_feature (1)..(25): SEQ ID NO: 3008; WAN024EST_at; Start 122; Stop 146
caactcttttacgtatgcttgcagg

SEQ ID NO: 181041 - DNA, 25 bp, Artificial
  probe
  misc_feature (1)..(25): SEQ ID NO: 3008; WAN024EST_at; Start 496; Stop 520
ccagaattacgtttggaagtggaga

SEQ ID NO: 181042 - DNA, 25 bp, Artificial
  probe
  misc_feature (1)..(25): SEQ ID NO: 3008; WAN024EST_at; Start 534; Stop 558
aaatagggaacttgggatgacccag

SEQ ID NO: 181043 - DNA, 25 bp, Artificial
  probe
  misc_feature (1)..(25): SEQ ID NO: 3008; WAN024EST_at; Start 469; Stop 493
tacgatgaaccaacttctgccctgg

SEQ ID NO: 181044 - DNA, 25 bp, Artificial
  probe
  misc_feature (1)..(25): SEQ ID NO: 3008; WAN024EST_at; Start 151; Stop 175
gaaaccattgattcagggcaaatct

SEQ ID NO: 181045 - DNA, 25 bp, Artificial
  probe
  misc_feature (1)..(25): SEQ ID NO: 3008; WAN024EST_at; Start 300; Stop 324
gaagaccatgggaatgaagcaggaa

SEQ ID NO: 181046 - DNA, 25 bp, Artificial
  probe
  misc_feature (1)..(25): SEQ ID NO: 3008; WAN024EST_at; Start 13; Stop 37
cgaaatatcaataaagtctttggag

SEQ ID NO: 181047 - DNA, 25 bp, Artificial
  probe
  misc_feature (1)..(25): SEQ ID NO: 3008; WAN024EST_at; Start 435; Stop 459
gcgtgctatgatgattgacccagaa

SEQ ID NO: 181048 - DNA, 25 bp, Artificial
  probe
  misc_feature (1)..(25): SEQ ID NO: 3008; WAN024EST_at; Start 371; Stop 395
gaggacacgcagaggcctatccttt

SEQ ID NO: 181049 - DNA, 25 bp, Artificial
  probe
  misc_feature (1)..(25): SEQ ID NO: 3008; WAN024EST_at; Start 425; Stop 449
tggctttggcgcgtgctatgatgat

SEQ ID NO: 181050 - DNA, 25 bp, Artificial
  probe
  misc_feature (1)..(25): SEQ ID NO: 3008; WAN024EST_at; Start 137; Stop 161
tgcttgcaggtcttgaaaccattga

SEQ ID NO: 181051 - DNA, 25 bp, Artificial
  probe
  misc_feature (1)..(25): SEQ ID NO: 3008; WAN024EST_at; Start 358; Stop 382
cagttaggactaggaggacacgcag

SEQ ID NO: 181052 - DNA, 25 bp, Artificial
  probe
  misc_feature (1)..(25): SEQ ID NO: 3008; WAN024EST_at; Start 548; Stop 572
ggatgacccagattgtggttaccca

SEQ ID NO: 181053 - DNA, 25 bp, Artificial
  probe
  misc_feature (1)..(25): SEQ ID NO: 3008; WAN024EST_at; Start 347; Stop 371
gactcttggaacagttaggactagg

SEQ ID NO: 181054 - DNA, 25 bp, Artificial
  probe
  misc_feature (1)..(25): SEQ ID NO: 3008; WAN024EST_at; Start 29; Stop 53
tctttggagacaaacaaatcctgtc

SEQ ID NO: 181055 - DNA, 25 bp, Artificial
  probe
  misc_feature (1)..(25): SEQ ID NO: 3008; WAN024EST_at; Start 334; Stop 358
aagaaggcgagtggactcttggaac

SEQ ID NO: 181056 - DNA, 25 bp, Artificial
  probe
  misc_feature (1)..(25): SEQ ID NO: 3008; WAN024EST_at; Start 397; Stop 421
tcactatctggtgggcaaaagcagc

SEQ ID NO: 181057 - DNA, 25 bp, Artificial
  probe
  misc_feature (1)..(25): SEQ ID NO: 3008; WAN024EST_at; Start 81; Stop 105
gcaaatcctggctatcgttggacct

SEQ ID NO: 181058 - DNA, 25 bp, Artificial
  probe
  misc_feature (1)..(25): SEQ ID NO: 3008; WAN024EST_at; Start 510; Stop 534
ggaagtggagaagctaatcttgcaa

SEQ ID NO: 181059 - DNA, 25 bp, Artificial
  probe
  misc_feature (1)..(25): SEQ ID NO: 3008; WAN024EST_at; Start 289; Stop 313
ttatcgcctgtgaagaccatgggaa

SEQ ID NO: 181060 - DNA, 25 bp, Artificial
  probe
  misc_feature (1)..(25): SEQ ID NO: 3008; WAN024EST_at; Start 563; Stop 587
tggttacccatgatttgcagtttgc

SEQ ID NO: 181061 - DNA, 25 bp, Artificial
  probe
  misc_feature (1)..(25): SEQ ID NO: 3008; WAN024EST_at; Start 68; Stop 92
gtattcctgaaaagcaaatcctggc

SEQ ID NO: 181062 - DNA, 25 bp, Artificial
  probe
  misc_feature (1)..(25): SEQ ID NO: 3008; WAN024EST_at; Start 484; Stop 508
tctgccctggatccagaattacgtt

SEQ ID NO: 181063 - DNA, 25 bp, Artificial
  probe
  misc_feature (1)..(25): SEQ ID NO: 3008; WAN024EST_at; Start 382; Stop 406
gaggcctatcctttctcactatctg

SEQ ID NO: 181064 - DNA, 25 bp, Artificial
  probe
  misc_feature (1)..(25): SEQ ID NO: 3008; WAN024EST_at; Start 524; Stop 548
taatcttgcaaaatagggaacttgg

SEQ ID NO: 181065 - DNA, 25 bp, Artificial
  probe
  misc_feature (1)..(25): SEQ ID NO: 3008; WAN024EST_at; Start 597; Stop 621
cgcagatgtattattgaaagtagaa

SEQ ID NO: 181066 - DNA, 25 bp, Artificial
  probe
  misc_feature (1)..(25): SEQ ID NO: 3008; WAN024EST_at; Start 461; Stop 485
tcattggctacgatgaaccaacttc

SEQ ID NO: 181067 - DNA, 25 bp, Artificial
  probe
  misc_feature (1)..(25): SEQ ID NO: 3008; WAN024EST_at; Start 578; Stop 602
tgcagtttgctgaaaatatcgcaga

SEQ ID NO: 181068 - DNA, 25 bp, Artificial
  probe
  misc_feature (1)..(25): SEQ ID NO: 656; WAN024ESU_at; Start 770; Stop 794
tccaagaaatcagccaaaaatggtt

SEQ ID NO: 181069 - DNA, 25 bp, Artificial
  probe
  misc_feature (1)..(25): SEQ ID NO: 656; WAN024ESU_at; Start 594; Stop 618
gattgaccgtgtctatgcaaactat

SEQ ID NO: 181070 - DNA, 25 bp, Artificial
  probe
  misc_feature (1)..(25): SEQ ID NO: 656; WAN024ESU_at; Start 226; Stop 250
tacggaatcacggtaaattggcaac

SEQ ID NO: 181071 - DNA, 25 bp, Artificial
  probe
  misc_feature (1)..(25): SEQ ID NO: 656; WAN024ESU_at; Start 64; Stop 88
aaaaattctagcgaaactagtggag

SEQ ID NO: 181072 - DNA, 25 bp, Artificial
  probe
  misc_feature (1)..(25): SEQ ID NO: 656; WAN024ESU_at; Start 760; Stop 784
gacggcaagttccaagaaatcagcc

SEQ ID NO: 181073 - DNA, 25 bp, Artificial
  probe
  misc_feature (1)..(25): SEQ ID NO: 656; WAN024ESU_at; Start 676; Stop 700
acagaagcttttgcggttggagccc

SEQ ID NO: 181074 - DNA, 25 bp, Artificial
  probe
  misc_feature (1)..(25): SEQ ID NO: 656; WAN024ESU_at; Start 450; Stop 474
tcaagctggttcatctggttatgcg

SEQ ID NO: 181075 - DNA, 25 bp, Artificial
  probe
  misc_feature (1)..(25): SEQ ID NO: 656; WAN024ESU_at; Start 417; Stop 441
tgcaaaggatatgactggaaagaca

SEQ ID NO: 181076 - DNA, 25 bp, Artificial
  probe
  misc_feature (1)..(25): SEQ ID NO: 656; WAN024ESU_at; Start 238; Stop 262
gtaaattggcaaccgattgattggg

SEQ ID NO: 181077 - DNA, 25 bp, Artificial
  probe
  misc_feature (1)..(25): SEQ ID NO: 656; WAN024ESU_at; Start 519; Stop 543
taaggaagcgaatcaataccaaacc

SEQ ID NO: 181078 - DNA, 25 bp, Artificial
  probe
  misc_feature (1)..(25): SEQ ID NO: 656; WAN024ESU_at; Start 660; Stop 684
tacagttggactagaaacagaagct

SEQ ID NO: 181079 - DNA, 25 bp, Artificial
  probe
  misc_feature (1)..(25): SEQ ID NO: 656; WAN024ESU_at; Start 566; Stop 590
tgaaaaacgatcgaattgatggtct

SEQ ID NO: 181080 - DNA, 25 bp, Artificial
  probe
  misc_feature (1)..(25): SEQ ID NO: 656; WAN024ESU_at; Start 172; Stop 196
gatggttcttatgcaggatttgata

SEQ ID NO: 181081 - DNA, 25 bp, Artificial
  probe
  misc_feature (1)..(25): SEQ ID NO: 656; WAN024ESU_at; Start 788; Stop 812
aatggtttggagaagatgtagcaac

SEQ ID NO: 181082 - DNA, 25 bp, Artificial
  probe
  misc_feature (1)..(25): SEQ ID NO: 656; WAN024ESU_at; Start 47; Stop 71
tcttagtagcttgtgggaaaaattc

SEQ ID NO: 181083 - DNA, 25 bp, Artificial
  probe
  misc_feature (1)..(25): SEQ ID NO: 656; WAN024ESU_at; Start 623; Stop 647
tagaagcagaaggtgttttaaacga

SEQ ID NO: 181084 - DNA, 25 bp, Artificial
  probe
  misc_feature (1)..(25): SEQ ID NO: 656; WAN024ESU_at; Start 469; Stop 493
tatgcggactttgaagcaaatccag

SEQ ID NO: 181085 - DNA, 25 bp, Artificial
  probe
  misc_feature (1)..(25): SEQ ID NO: 656; WAN024ESU_at; Start 303; Stop 327
gatttggaatggctattccgctaca

SEQ ID NO: 181086 - DNA, 25 bp, Artificial
  probe
  misc_feature (1)..(25): SEQ ID NO: 656; WAN024ESU_at; Start 7; Stop 31
aaatggatgcttgtattagtcagtc

SEQ ID NO: 181087 - DNA, 25 bp, Artificial
  probe
  misc_feature (1)..(25): SEQ ID NO: 656; WAN024ESU_at; Start 403; Stop 427
tctggtatcacgactgcaaaggata

SEQ ID NO: 181088 - DNA, 25 bp, Artificial
  probe
  misc_feature (1)..(25): SEQ ID NO: 656; WAN024ESU_at; Start 188; Stop 212
gatttgatattgatttagctacagc

SEQ ID NO: 181089 - DNA, 25 bp, Artificial
  probe
  misc_feature (1)..(25): SEQ ID NO: 656; WAN024ESU_at; Start 504; Stop 528
gaatattgtcgctaataaggaagcg

SEQ ID NO: 181090 - DNA, 25 bp, Artificial
  probe
  misc_feature (1)..(25): SEQ ID NO: 656; WAN024ESU_at; Start 28; Stop 52
agtctgatgactgctttgttcttag

SEQ ID NO: 181091 - DNA, 25 bp, Artificial
  probe
  misc_feature (1)..(25): SEQ ID NO: 656; WAN024ESU_at; Start 155; Stop 179
tgggatttgctcagaaagatggttc

SEQ ID NO: 181092 - DNA, 25 bp, Artificial
  probe
  misc_feature (1)..(25): SEQ ID NO: 656; WAN024ESU_at; Start 373; Stop 397
aatgagcaggtattggttacgaaga

SEQ ID NO: 181093 - DNA, 25 bp, Artificial
  probe
  misc_feature (1)..(25): SEQ ID NO: 656; WAN024ESU_at; Start 434; Stop 458
gaaagacattaggagctcaagctgg

SEQ ID NO: 181094 - DNA, 25 bp, Artificial
  probe
  misc_feature (1)..(25): SEQ ID NO: 656; WAN024ESU_at; Start 745; Stop 769
tctagtctttacaaggacggcaagt

SEQ ID NO: 181095 - DNA, 25 bp, Artificial
  probe
  misc_feature (1)..(25): SEQ ID NO: 656; WAN024ESU_at; Start 140; Stop 164
gtacttttgttccaatgggatttgc

SEQ ID NO: 181096 - DNA, 25 bp, Artificial
  probe
  misc_feature (1)..(25): SEQ ID NO: 656; WAN024ESU_at; Start 550; Stop 574
gaagccttgattgatttgaaaaacg

SEQ ID NO: 181097 - DNA, 25 bp, Artificial
  probe
  misc_feature (1)..(25): SEQ ID NO: 656; WAN024ESU_at; Start 274; Stop 298
gctgaattgacaaaaggaacgattg

SEQ ID NO: 181098 - DNA, 25 bp, Artificial
  probe
  misc_feature (1)..(25): SEQ ID NO: 656; WAN024ESU_at; Start 331; Stop 355
gaacgccgtgaaaaggtggctttca

SEQ ID NO: 181099 - DNA, 25 bp, Artificial
  probe
  misc_feature (1)..(25): SEQ ID NO: 656; WAN024ESU_at; Start 345; Stop 369
ggtggctttcagtaactcatatatg

SEQ ID NO: 181100 - DNA, 25 bp, Artificial
  probe
  misc_feature (1)..(25): SEQ ID NO: 656; WAN024ESU_at; Start 690; Stop 714
ggttggagcccgtaaggaagataca

SEQ ID NO: 181101 - DNA, 25 bp, Artificial
  probe
  misc_feature (1)..(25): SEQ ID NO: 656; WAN024ESU_at; Start 251; Stop 275
cgattgattgggatttgaaagaagc

SEQ ID NO: 181102 - DNA, 25 bp, Artificial
  probe
  misc_feature (1)..(25): SEQ ID NO: 2350; WAN024ESV_at; Start 59; Stop 83
gcttaacaccagaagaaaaagtgga

SEQ ID NO: 181103 - DNA, 25 bp, Artificial
  probe
  misc_feature (1)..(25): SEQ ID NO: 2350; WAN024ESV_at; Start 97; Stop 121
cgtgaggagtacatcgaaggttatc

SEQ ID NO: 181104 - DNA, 25 bp, Artificial
  probe
  misc_feature (1)..(25): SEQ ID NO: 2350; WAN024ESV_at; Start 123; Stop 147
ccgcgctgttcgtcaccacattgaa

SEQ ID NO: 181105 - DNA, 25 bp, Artificial
  probe
  misc_feature (1)..(25): SEQ ID NO: 2350; WAN024ESV_at; Start 208; Stop 232
caacgtgaaaaaggattacatggcc

SEQ ID NO: 181106 - DNA, 25 bp, Artificial
  probe
  misc_feature (1)..(25): SEQ ID NO: 2350; WAN024ESV_at; Start 108; Stop 132
catcgaaggttatcgccgcgctgtt

SEQ ID NO: 181107 - DNA, 25 bp, Artificial
  probe
  misc_feature (1)..(25): SEQ ID NO: 2350; WAN024ESV_at; Start 132; Stop 156
tcgtcaccacattgaaggaatcaaa

SEQ ID NO: 181108 - DNA, 25 bp, Artificial
  probe
  misc_feature (1)..(25): SEQ ID NO: 2350; WAN024ESV_at; Start 178; Stop 202
gatgttacaccagaaaaactacgcc

SEQ ID NO: 181109 - DNA, 25 bp, Artificial
  probe
  misc_feature (1)..(25): SEQ ID NO: 2350; WAN024ESV_at; Start 214; Stop 238
gaaaaaggattacatggccgtagtc

SEQ ID NO: 181110 - DNA, 25 bp, Artificial
  probe
  misc_feature (1)..(25): SEQ ID NO: 2350; WAN024ESV_at; Start 237; Stop 261
tcttgatgatccaaattcataacta

SEQ ID NO: 181111 - DNA, 25 bp, Artificial
  probe
  misc_feature (1)..(25): SEQ ID NO: 2350; WAN024ESV_at; Start 231; Stop 255
ccgtagtcttgatgatccaaattca

SEQ ID NO: 181112 - DNA, 25 bp, Artificial
  probe
  misc_feature (1)..(25): SEQ ID NO: 2350; WAN024ESV_at; Start 62; Stop 86
taacaccagaagaaaaagtggaaca

SEQ ID NO: 181113 - DNA, 25 bp, Artificial
  probe
  misc_feature (1)..(25): SEQ ID NO: 2350; WAN024ESV_at; Start 165; Stop 189
cgaagaaggaaacgatgttacacca

SEQ ID NO: 181114 - DNA, 25 bp, Artificial
  probe
  misc_feature (1)..(25): SEQ ID NO: 2350; WAN024ESV_at; Start 53; Stop 77
cagaaggcttaacaccagaagaaaa

SEQ ID NO: 181115 - DNA, 25 bp, Artificial
  probe
  misc_feature (1)..(25): SEQ ID NO: 2350; WAN024ESV_at; Start 161; Stop 185
tggacgaagaaggaaacgatgttac

SEQ ID NO: 181116 - DNA, 25 bp, Artificial
  probe
  misc_feature (1)..(25): SEQ ID NO: 2350; WAN024ESV_at; Start 169; Stop 193
gaaggaaacgatgttacaccagaaa

SEQ ID NO: 181117 - DNA, 25 bp, Artificial
  probe
  misc_feature (1)..(25): SEQ ID NO: 2350; WAN024ESV_at; Start 149; Stop 173
gaatcaaaattgtggacgaagaagg

SEQ ID NO: 181118 - DNA, 25 bp, Artificial
  probe
  misc_feature (1)..(25): SEQ ID NO: 2350; WAN024ESV_at; Start 199; Stop 223
cgccaagtacaacgtgaaaaaggat

SEQ ID NO: 181119 - DNA, 25 bp, Artificial
  probe
  misc_feature (1)..(25): SEQ ID NO: 2350; WAN024ESV_at; Start 76; Stop 100
aaagtggaacaagccaaactacgtg

SEQ ID NO: 181120 - DNA, 25 bp, Artificial
  probe
  misc_feature (1)..(25): SEQ ID NO: 2350; WAN024ESV_at; Start 85; Stop 109
caagccaaactacgtgaggagtaca

SEQ ID NO: 181121 - DNA, 25 bp, Artificial
  probe
  misc_feature (1)..(25): SEQ ID NO: 2350; WAN024ESV_at; Start 221; Stop 245
gattacatggccgtagtcttgatga

SEQ ID NO: 181122 - DNA, 25 bp, Artificial
  probe
  misc_feature (1)..(25): SEQ ID NO: 2350; WAN024ESV_at; Start 27; Stop 51
caatgagcttgctaaaaagaaaaaa

SEQ ID NO: 181123 - DNA, 25 bp, Artificial
  probe
  misc_feature (1)..(25): SEQ ID NO: 2350; WAN024ESV_at; Start 185; Stop 209
caccagaaaaactacgccaagtaca

SEQ ID NO: 181124 - DNA, 25 bp, Artificial
  probe
  misc_feature (1)..(25): SEQ ID NO: 2350; WAN024ESV_at; Start 49; Stop 73
aaaacagaaggcttaacaccagaag

SEQ ID NO: 181125 - DNA, 25 bp, Artificial
  probe
  misc_feature (1)..(25): SEQ ID NO: 2350; WAN024ESV_at; Start 90; Stop 114
caaactacgtgaggagtacatcgaa

SEQ ID NO: 181126 - DNA, 25 bp, Artificial
  probe
  misc_feature (1)..(25): SEQ ID NO: 2350; WAN024ESV_at; Start 127; Stop 151
gctgttcgtcaccacattgaaggaa

SEQ ID NO: 181127 - DNA, 25 bp, Artificial
  probe
  misc_feature (1)..(25): SEQ ID NO: 2350; WAN024ESV_at; Start 226; Stop 250
catggccgtagtcttgatgatccaa

SEQ ID NO: 181128 - DNA, 25 bp, Artificial
  probe
  misc_feature (1)..(25): SEQ ID NO: 2350; WAN024ESV_at; Start 141; Stop 165
cattgaaggaatcaaaattgtggac

SEQ ID NO: 181129 - DNA, 25 bp, Artificial
  probe
  misc_feature (1)..(25): SEQ ID NO: 2350; WAN024ESV_at; Start 106; Stop 130
tacatcgaaggttatcgccgcgctg

SEQ ID NO: 181130 - DNA, 25 bp, Artificial
  probe
  misc_feature (1)..(25): SEQ ID NO: 2350; WAN024ESV_at; Start 11; Stop 35
aaaaaattgctcgtatcaatgagct

SEQ ID NO: 181131 - DNA, 25 bp, Artificial
  probe
  misc_feature (1)..(25): SEQ ID NO: 2350; WAN024ESV_at; Start 103; Stop 127
gagtacatcgaaggttatcgccgcg

SEQ ID NO: 181132 - DNA, 25 bp, Artificial
  probe
  misc_feature (1)..(25): SEQ ID NO: 2350; WAN024ESV_at; Start 116; Stop 140
gttatcgccgcgctgttcgtcacca

SEQ ID NO: 181133 - DNA, 25 bp, Artificial
  probe
  misc_feature (1)..(25): SEQ ID NO: 2350; WAN024ESV_at; Start 211; Stop 235
cgtgaaaaaggattacatggccgta

SEQ ID NO: 181134 - DNA, 25 bp, Artificial
  probe
  misc_feature (1)..(25): SEQ ID NO: 2350; WAN024ESV_at; Start 21; Stop 45
tcgtatcaatgagcttgctaaaaag

SEQ ID NO: 181135 - DNA, 25 bp, Artificial
  probe
  misc_feature (1)..(25): SEQ ID NO: 2350; WAN024ESV_at; Start 81; Stop 105
ggaacaagccaaactacgtgaggag

SEQ ID NO: 181136 - DNA, 25 bp, Artificial
  probe
  misc_feature (1)..(25): SEQ ID NO: 5250; WAN024ESW_at; Start 346; Stop 370
taatctgcaattctcatctattctc

SEQ ID NO: 181137 - DNA, 25 bp, Artificial
  probe
  misc_feature (1)..(25): SEQ ID NO: 5250; WAN024ESW_at; Start 204; Stop 228
gatttcgatgacattgacctgatca

SEQ ID NO: 181138 - DNA, 25 bp, Artificial
  probe
  misc_feature (1)..(25): SEQ ID NO: 5250; WAN024ESW_at; Start 389; Stop 413
tactattgtaacacattccccttgt

SEQ ID NO: 181139 - DNA, 25 bp, Artificial
  probe
  misc_feature (1)..(25): SEQ ID NO: 5250; WAN024ESW_at; Start 400; Stop 424
cacattccccttgtattttgggaat

SEQ ID NO: 181140 - DNA, 25 bp, Artificial
  probe
  misc_feature (1)..(25): SEQ ID NO: 5250; WAN024ESW_at; Start 111; Stop 135
caaaattggcaccaaacggtggtca

SEQ ID NO: 181141 - DNA, 25 bp, Artificial
  probe
  misc_feature (1)..(25): SEQ ID NO: 5250; WAN024ESW_at; Start 217; Stop 241
ttgacctgatcatcaatttcagccg

SEQ ID NO: 181142 - DNA, 25 bp, Artificial
  probe
  misc_feature (1)..(25): SEQ ID NO: 5250; WAN024ESW_at; Start 89; Stop 113
caaaatcacgcagggtatctgccaa

SEQ ID NO: 181143 - DNA, 25 bp, Artificial
  probe
  misc_feature (1)..(25): SEQ ID NO: 5250; WAN024ESW_at; Start 304; Stop 328
aaggtaaaaccgtgacgctccagca

SEQ ID NO: 181144 - DNA, 25 bp, Artificial
  probe
  misc_feature (1)..(25): SEQ ID NO: 5250; WAN024ESW_at; Start 316; Stop 340
tgacgctccagcactgccttggtca

SEQ ID NO: 181145 - DNA, 25 bp, Artificial
  probe
  misc_feature (1)..(25): SEQ ID NO: 5250; WAN024ESW_at; Start 331; Stop 355
gccttggtcacgctataatctgcaa

SEQ ID NO: 181146 - DNA, 25 bp, Artificial
  probe
  misc_feature (1)..(25): SEQ ID NO: 5250; WAN024ESW_at; Start 40; Stop 64
tgcgccaaatcaaccttgagaatat

SEQ ID NO: 181147 - DNA, 25 bp, Artificial
  probe
  misc_feature (1)..(25): SEQ ID NO: 5250; WAN024ESW_at; Start 437; Stop 461
aaaaaactatctttcctcatgaaga

SEQ ID NO: 181148 - DNA, 25 bp, Artificial
  probe
  misc_feature (1)..(25): SEQ ID NO: 5250; WAN024ESW_at; Start 133; Stop 157
tcaatctcaaaagccatgacttggg

SEQ ID NO: 181149 - DNA, 25 bp, Artificial
  probe
  misc_feature (1)..(25): SEQ ID NO: 5250; WAN024ESW_at; Start 253; Stop 277
ttttgaaggatattggtatccgtca

SEQ ID NO: 181150 - DNA, 25 bp, Artificial
  probe
  misc_feature (1)..(25): SEQ ID NO: 5250; WAN024ESW_at; Start 226; Stop 250
tcatcaatttcagccgtatccacaa

SEQ ID NO: 181151 - DNA, 25 bp, Artificial
  probe
  misc_feature (1)..(25): SEQ ID NO: 5250; WAN024ESW_at; Start 55; Stop 79
ttgagaatatcttcgttaactacgg

SEQ ID NO: 181152 - DNA, 25 bp, Artificial
  probe
  misc_feature (1)..(25): SEQ ID NO: 5250; WAN024ESW_at; Start 83; Stop 107
cattatcaaaatcacgcagggtatc

SEQ ID NO: 181153 - DNA, 25 bp, Artificial
  probe
  misc_feature (1)..(25): SEQ ID NO: 5250; WAN024ESW_at; Start 337; Stop 361
gtcacgctataatctgcaattctca

SEQ ID NO: 181154 - DNA, 25 bp, Artificial
  probe
  misc_feature (1)..(25): SEQ ID NO: 5250; WAN024ESW_at; Start 75; Stop 99
tacggtcacattatcaaaatcacgc

SEQ ID NO: 181155 - DNA, 25 bp, Artificial
  probe
  misc_feature (1)..(25): SEQ ID NO: 5250; WAN024ESW_at; Start 60; Stop 84
aatatcttcgttaactacggtcaca

SEQ ID NO: 181156 - DNA, 25 bp, Artificial
  probe
  misc_feature (1)..(25): SEQ ID NO: 5250; WAN024ESW_at; Start 169; Stop 193
gccaaaaattctgtcaaggcaccaa

SEQ ID NO: 181157 - DNA, 25 bp, Artificial
  probe
  misc_feature (1)..(25): SEQ ID NO: 5250; WAN024ESW_at; Start 122; Stop 146
ccaaacggtggtcaatctcaaaagc

SEQ ID NO: 181158 - DNA, 25 bp, Artificial
  probe
  misc_feature (1)..(25): SEQ ID NO: 5250; WAN024ESW_at; Start 177; Stop 201
ttctgtcaaggcaccaatacctggc

SEQ ID NO: 181159 - DNA, 25 bp, Artificial
  probe
  misc_feature (1)..(25): SEQ ID NO: 5250; WAN024ESW_at; Start 97; Stop 121
cgcagggtatctgccaaaattggca

SEQ ID NO: 181160 - DNA, 25 bp, Artificial
  probe
  misc_feature (1)..(25): SEQ ID NO: 5250; WAN024ESW_at; Start 33; Stop 57
gatatgttgcgccaaatcaaccttg

SEQ ID NO: 181161 - DNA, 25 bp, Artificial
  probe
  misc_feature (1)..(25): SEQ ID NO: 5250; WAN024ESW_at; Start 413; Stop 437
tattttgggaatgaaaatcatacca

SEQ ID NO: 181162 - DNA, 25 bp, Artificial
  probe
  misc_feature (1)..(25): SEQ ID NO: 5250; WAN024ESW_at; Start 182; Stop 206
tcaaggcaccaatacctggcccgat

SEQ ID NO: 181163 - DNA, 25 bp, Artificial
  probe
  misc_feature (1)..(25): SEQ ID NO: 5250; WAN024ESW_at; Start 157; Stop 181
gctgcacgctcagccaaaaattctg

SEQ ID NO: 181164 - DNA, 25 bp, Artificial
  probe
  misc_feature (1)..(25): SEQ ID NO: 5250; WAN024ESW_at; Start 192; Stop 216
aatacctggcccgatttcgatgaca

SEQ ID NO: 181165 - DNA, 25 bp, Artificial
  probe
  misc_feature (1)..(25): SEQ ID NO: 5250; WAN024ESW_at; Start 200; Stop 224
gcccgatttcgatgacattgacctg

SEQ ID NO: 181166 - DNA, 25 bp, Artificial
  probe
  misc_feature (1)..(25): SEQ ID NO: 5250; WAN024ESW_at; Start 424; Stop 448
tgaaaatcataccaaaaaactatct

SEQ ID NO: 181167 - DNA, 25 bp, Artificial
  probe
  misc_feature (1)..(25): SEQ ID NO: 5250; WAN024ESW_at; Start 236; Stop 260
cagccgtatccacaattttttgaag

SEQ ID NO: 181168 - DNA, 25 bp, Artificial
  probe
  misc_feature (1)..(25): SEQ ID NO: 5250; WAN024ESW_at; Start 149; Stop 173
tgacttgggctgcacgctcagccaa

SEQ ID NO: 181169 - DNA, 25 bp, Artificial
  probe
  misc_feature (1)..(25): SEQ ID NO: 5250; WAN024ESW_at; Start 141; Stop 165
aaaagccatgacttgggctgcacgc

SEQ ID NO: 181170 - DNA, 25 bp, Artificial
  probe
  misc_feature (1)..(25): SEQ ID NO: 1523; WAN024ESX_at; Start 566; Stop 590
ctcgtacggtctttgtgccagcgcc

SEQ ID NO: 181171 - DNA, 25 bp, Artificial
  probe
  misc_feature (1)..(25): SEQ ID NO: 1523; WAN024ESX_at; Start 450; Stop 474
catgatgcagaaagaagtagcggac

SEQ ID NO: 181172 - DNA, 25 bp, Artificial
  probe
  misc_feature (1)..(25): SEQ ID NO: 1523; WAN024ESX_at; Start 409; Stop 433
cacttgattgagagtggcattcctt

SEQ ID NO: 181173 - DNA, 25 bp, Artificial
  probe
  misc_feature (1)..(25): SEQ ID NO: 1523; WAN024ESX_at; Start 465; Stop 489
agtagcggaccgcatttcagcccag

SEQ ID NO: 181174 - DNA, 25 bp, Artificial
  probe
  misc_feature (1)..(25): SEQ ID NO: 1523; WAN024ESX_at; Start 391; Stop 415
acgacgcctattctcatgcacttga

SEQ ID NO: 181175 - DNA, 25 bp, Artificial
  probe
  misc_feature (1)..(25): SEQ ID NO: 1523; WAN024ESX_at; Start 356; Stop 380
caatcaaggtagtggctaatttgcc

SEQ ID NO: 181176 - DNA, 25 bp, Artificial
  probe
  misc_feature (1)..(25): SEQ ID NO: 1523; WAN024ESX_at; Start 783; Stop 807
ggcaggcttgtcaccaagtgtgcgt

SEQ ID NO: 181177 - DNA, 25 bp, Artificial
  probe
  misc_feature (1)..(25): SEQ ID NO: 1523; WAN024ESX_at; Start 303; Stop 327
tctcaaggttgatttggcgcaacat

SEQ ID NO: 181178 - DNA, 25 bp, Artificial
  probe
  misc_feature (1)..(25): SEQ ID NO: 1523; WAN024ESX_at; Start 508; Stop 532
ggtagcttgtctatcgccgtgcagt

SEQ ID NO: 181179 - DNA, 25 bp, Artificial
  probe
  misc_feature (1)..(25): SEQ ID NO: 1523; WAN024ESX_at; Start 256; Stop 280
gataccctgcgtgattttgataatg

SEQ ID NO: 181180 - DNA, 25 bp, Artificial
  probe
  misc_feature (1)..(25): SEQ ID NO: 1523; WAN024ESX_at; Start 694; Stop 718
catcgccgcaagaccttgtggaata

SEQ ID NO: 181181 - DNA, 25 bp, Artificial
  probe
  misc_feature (1)..(25): SEQ ID NO: 1523; WAN024ESX_at; Start 196; Stop 220
gagcgtgcagcccaagtcatggctt

SEQ ID NO: 181182 - DNA, 25 bp, Artificial
  probe
  misc_feature (1)..(25): SEQ ID NO: 1523; WAN024ESX_at; Start 842; Stop 866
tagcagacgcacttaaagggcaagg

SEQ ID NO: 181183 - DNA, 25 bp, Artificial
  probe
  misc_feature (1)..(25): SEQ ID NO: 1523; WAN024ESX_at; Start 581; Stop 605
tgccagcgccaaatgtggattcagc

SEQ ID NO: 181184 - DNA, 25 bp, Artificial
  probe
  misc_feature (1)..(25): SEQ ID NO: 1523; WAN024ESX_at; Start 372; Stop 396
taatttgccttactacatcacgacg

SEQ ID NO: 181185 - DNA, 25 bp, Artificial
  probe
  misc_feature (1)..(25): SEQ ID NO: 1523; WAN024ESX_at; Start 827; Stop 851
cagaatttgccggtctagcagacgc

SEQ ID NO: 181186 - DNA, 25 bp, Artificial
  probe
  misc_feature (1)..(25): SEQ ID NO: 1523; WAN024ESX_at; Start 106; Stop 130
caaaaaattgtggatacggctgaaa

SEQ ID NO: 181187 - DNA, 25 bp, Artificial
  probe
  misc_feature (1)..(25): SEQ ID NO: 1523; WAN024ESX_at; Start 723; Stop 747
gacaggttactttggtaagactgaa

SEQ ID NO: 181188 - DNA, 25 bp, Artificial
  probe
  misc_feature (1)..(25): SEQ ID NO: 1523; WAN024ESX_at; Start 492; Stop 516
taacaccaaggcttacggtagcttg

SEQ ID NO: 181189 - DNA, 25 bp, Artificial
  probe
  misc_feature (1)..(25): SEQ ID NO: 1523; WAN024ESX_at; Start 32; Stop 56
cagtgctggagcgtcacggttttac

SEQ ID NO: 181190 - DNA, 25 bp, Artificial
  probe
  misc_feature (1)..(25): SEQ ID NO: 1523; WAN024ESX_at; Start 158; Stop 182
tcgggccaggtattggtgccttgac

SEQ ID NO: 181191 - DNA, 25 bp, Artificial
  probe
  misc_feature (1)..(25): SEQ ID NO: 1523; WAN024ESX_at; Start 738; Stop 762
taagactgaagaggtcaaggacaag

SEQ ID NO: 181192 - DNA, 25 bp, Artificial
  probe
  misc_feature (1)..(25): SEQ ID NO: 1523; WAN024ESX_at; Start 752; Stop 776
tcaaggacaagctgaccaaggcttt

SEQ ID NO: 181193 - DNA, 25 bp, Artificial
  probe
  misc_feature (1)..(25): SEQ ID NO: 1523; WAN024ESX_at; Start 767; Stop 791
ccaaggctttggaccaggcaggctt

SEQ ID NO: 181194 - DNA, 25 bp, Artificial
  probe
  misc_feature (1)..(25): SEQ ID NO: 1523; WAN024ESX_at; Start 549; Stop 573
ggttgcctttatcgtgcctcgtacg

SEQ ID NO: 181195 - DNA, 25 bp, Artificial
  probe
  misc_feature (1)..(25): SEQ ID NO: 1523; WAN024ESX_at; Start 611; Stop 635
tgaaaatggtgcgtcgtccagagcc

SEQ ID NO: 181196 - DNA, 25 bp, Artificial
  probe
  misc_feature (1)..(25): SEQ ID NO: 1523; WAN024ESX_at; Start 532; Stop 556
tattacatgacagccaaggttgcct

SEQ ID NO: 181197 - DNA, 25 bp, Artificial
  probe
  misc_feature (1)..(25): SEQ ID NO: 1523; WAN024ESX_at; Start 629; Stop 653
cagagccagccgtagcagtagaaga

SEQ ID NO: 181198 - DNA, 25 bp, Artificial
  probe
  misc_feature (1)..(25): SEQ ID NO: 1523; WAN024ESX_at; Start 8; Stop 32
ttgcagattatagcgtgaccaaggc

SEQ ID NO: 181199 - DNA, 25 bp, Artificial
  probe
  misc_feature (1)..(25): SEQ ID NO: 1523; WAN024ESX_at; Start 596; Stop 620
tggattcagccatcttgaaaatggt

SEQ ID NO: 181200 - DNA, 25 bp, Artificial
  probe
  misc_feature (1)..(25): SEQ ID NO: 1523; WAN024ESX_at; Start 143; Stop 167
tcaatgtcatcgaaatcgggccagg

SEQ ID NO: 181201 - DNA, 25 bp, Artificial
  probe
  misc_feature (1)..(25): SEQ ID NO: 1523; WAN024ESX_at; Start 812; Stop 836
aagctctcagcttggcagaatttgc

SEQ ID NO: 181202 - DNA, 25 bp, Artificial
  probe
  misc_feature (1)..(25): SEQ ID NO: 1523; WAN024ESX_at; Start 679; Stop 703
aaggctagttttacccatcgccgca

SEQ ID NO: 181203 - DNA, 25 bp, Artificial
  probe
  misc_feature (1)..(25): SEQ ID NO: 1523; WAN024ESX_at; Start 217; Stop 241
gcttttgagattgaccaccgtttgg

SEQ ID NO: 181204 - DNA, 25 bp, Artificial
  probe
  misc_feature (1)..(25): SEQ ID NO: 5705; WAN024ESY_at; Start 29; Stop 53
aaagtagagattacaaggcttgttt

SEQ ID NO: 181205 - DNA, 25 bp, Artificial
  probe
  misc_feature (1)..(25): SEQ ID NO: 5705; WAN024ESY_at; Start 27; Stop 51
caaaagtagagattacaaggcttgt

SEQ ID NO: 181206 - DNA, 25 bp, Artificial
  probe
  misc_feature (1)..(25): SEQ ID NO: 5705; WAN024ESY_at; Start 20; Stop 44
aattcttcaaaagtagagattacaa

SEQ ID NO: 181207 - DNA, 25 bp, Artificial
  probe
  misc_feature (1)..(25): SEQ ID NO: 5705; WAN024ESY_at; Start 54; Stop 78
aagaaagaattcaaagaccttgaca

SEQ ID NO: 181208 - DNA, 25 bp, Artificial
  probe
  misc_feature (1)..(25): SEQ ID NO: 5705; WAN024ESY_at; Start 90; Stop 114
aatggttattataaaaaatggtctg

SEQ ID NO: 181209 - DNA, 25 bp, Artificial
  probe
  misc_feature (1)..(25): SEQ ID NO: 5705; WAN024ESY_at; Start 58; Stop 82
aagaattcaaagaccttgacaaata

SEQ ID NO: 181210 - DNA, 25 bp, Artificial
  probe
  misc_feature (1)..(25): SEQ ID NO: 5705; WAN024ESY_at; Start 25; Stop 49
ttcaaaagtagagattacaaggctt

SEQ ID NO: 181211 - DNA, 25 bp, Artificial
  probe
  misc_feature (1)..(25): SEQ ID NO: 5705; WAN024ESY_at; Start 26; Stop 50
tcaaaagtagagattacaaggcttg

SEQ ID NO: 181212 - DNA, 25 bp, Artificial
  probe
  misc_feature (1)..(25): SEQ ID NO: 5705; WAN024ESY_at; Start 59; Stop 83
agaattcaaagaccttgacaaataa

SEQ ID NO: 181213 - DNA, 25 bp, Artificial
  probe
  misc_feature (1)..(25): SEQ ID NO: 5705; WAN024ESY_at; Start 57; Stop 81
aaagaattcaaagaccttgacaaat

SEQ ID NO: 181214 - DNA, 25 bp, Artificial
  probe
  misc_feature (1)..(25): SEQ ID NO: 5705; WAN024ESY_at; Start 33; Stop 57
tagagattacaaggcttgtttaaga

SEQ ID NO: 181215 - DNA, 25 bp, Artificial
  probe
  misc_feature (1)..(25): SEQ ID NO: 5705; WAN024ESY_at; Start 24; Stop 48
cttcaaaagtagagattacaaggct

SEQ ID NO: 181216 - DNA, 25 bp, Artificial
  probe
  misc_feature (1)..(25): SEQ ID NO: 5705; WAN024ESY_at; Start 23; Stop 47
tcttcaaaagtagagattacaaggc

SEQ ID NO: 181217 - DNA, 25 bp, Artificial
  probe
  misc_feature (1)..(25): SEQ ID NO: 5705; WAN024ESY_at; Start 91; Stop 115
atggttattataaaaaatggtctga

SEQ ID NO: 181218 - DNA, 25 bp, Artificial
  probe
  misc_feature (1)..(25): SEQ ID NO: 5705; WAN024ESY_at; Start 42; Stop 66
caaggcttgtttaagaaagaattca

SEQ ID NO: 181219 - DNA, 25 bp, Artificial
  probe
  misc_feature (1)..(25): SEQ ID NO: 5705; WAN024ESY_at; Start 64; Stop 88
tcaaagaccttgacaaataaaaata

SEQ ID NO: 181220 - DNA, 25 bp, Artificial
  probe
  misc_feature (1)..(25): SEQ ID NO: 5705; WAN024ESY_at; Start 18; Stop 42
taaattcttcaaaagtagagattac

SEQ ID NO: 181221 - DNA, 25 bp, Artificial
  probe
  misc_feature (1)..(25): SEQ ID NO: 5705; WAN024ESY_at; Start 60; Stop 84
gaattcaaagaccttgacaaataaa

SEQ ID NO: 181222 - DNA, 25 bp, Artificial
  probe
  misc_feature (1)..(25): SEQ ID NO: 5705; WAN024ESY_at; Start 32; Stop 56
gtagagattacaaggcttgtttaag

SEQ ID NO: 181223 - DNA, 25 bp, Artificial
  probe
  misc_feature (1)..(25): SEQ ID NO: 5705; WAN024ESY_at; Start 53; Stop 77
taagaaagaattcaaagaccttgac

SEQ ID NO: 181224 - DNA, 25 bp, Artificial
  probe
  misc_feature (1)..(25): SEQ ID NO: 5705; WAN024ESY_at; Start 22; Stop 46
ttcttcaaaagtagagattacaagg

SEQ ID NO: 181225 - DNA, 25 bp, Artificial
  probe
  misc_feature (1)..(25): SEQ ID NO: 5705; WAN024ESY_at; Start 52; Stop 76
ttaagaaagaattcaaagaccttga

SEQ ID NO: 181226 - DNA, 25 bp, Artificial
  probe
  misc_feature (1)..(25): SEQ ID NO: 5705; WAN024ESY_at; Start 36; Stop 60
agattacaaggcttgtttaagaaag

SEQ ID NO: 181227 - DNA, 25 bp, Artificial
  probe
  misc_feature (1)..(25): SEQ ID NO: 5705; WAN024ESY_at; Start 15; Stop 39
aaataaattcttcaaaagtagagat

SEQ ID NO: 181228 - DNA, 25 bp, Artificial
  probe
  misc_feature (1)..(25): SEQ ID NO: 5705; WAN024ESY_at; Start 28; Stop 52
aaaagtagagattacaaggcttgtt

SEQ ID NO: 181229 - DNA, 25 bp, Artificial
  probe
  misc_feature (1)..(25): SEQ ID NO: 5705; WAN024ESY_at; Start 21; Stop 45
attcttcaaaagtagagattacaag

SEQ ID NO: 181230 - DNA, 25 bp, Artificial
  probe
  misc_feature (1)..(25): SEQ ID NO: 5705; WAN024ESY_at; Start 30; Stop 54
aagtagagattacaaggcttgttta

SEQ ID NO: 181231 - DNA, 25 bp, Artificial
  probe
  misc_feature (1)..(25): SEQ ID NO: 5705; WAN024ESY_at; Start 46; Stop 70
gcttgtttaagaaagaattcaaaga

SEQ ID NO: 181232 - DNA, 25 bp, Artificial
  probe
  misc_feature (1)..(25): SEQ ID NO: 5705; WAN024ESY_at; Start 55; Stop 79
agaaagaattcaaagaccttgacaa

SEQ ID NO: 181233 - DNA, 25 bp, Artificial
  probe
  misc_feature (1)..(25): SEQ ID NO: 5705; WAN024ESY_at; Start 37; Stop 61
gattacaaggcttgtttaagaaaga

SEQ ID NO: 181234 - DNA, 25 bp, Artificial
  probe
  misc_feature (1)..(25): SEQ ID NO: 5705; WAN024ESY_at; Start 31; Stop 55
agtagagattacaaggcttgtttaa

SEQ ID NO: 181235 - DNA, 25 bp, Artificial
  probe
  misc_feature (1)..(25): SEQ ID NO: 5705; WAN024ESY_at; Start 35; Stop 59
gagattacaaggcttgtttaagaaa

SEQ ID NO: 181236 - DNA, 25 bp, Artificial
  probe
  misc_feature (1)..(25): SEQ ID NO: 5705; WAN024ESY_at; Start 19; Stop 43
aaattcttcaaaagtagagattaca

SEQ ID NO: 181237 - DNA, 25 bp, Artificial
  probe
  misc_feature (1)..(25): SEQ ID NO: 5705; WAN024ESY_at; Start 56; Stop 80
gaaagaattcaaagaccttgacaaa

SEQ ID NO: 181238 - DNA, 25 bp, Artificial
  probe
  misc_feature (1)..(25): SEQ ID NO: 7609; WAN024ESZ_at; Start 124; Stop 148
aagactgcggtcatatttttcctga

SEQ ID NO: 181239 - DNA, 25 bp, Artificial
  probe
  misc_feature (1)..(25): SEQ ID NO: 7609; WAN024ESZ_at; Start 150; Stop 174
cagtttcttctgtttgaggagcttc

SEQ ID NO: 181240 - DNA, 25 bp, Artificial
  probe
  misc_feature (1)..(25): SEQ ID NO: 7609; WAN024ESZ_at; Start 15; Stop 39
cactcataatcagcagttcttccag

SEQ ID NO: 181241 - DNA, 25 bp, Artificial
  probe
  misc_feature (1)..(25): SEQ ID NO: 7609; WAN024ESZ_at; Start 27; Stop 51
gcagttcttccagttcctcgaaaaa

SEQ ID NO: 181242 - DNA, 25 bp, Artificial
  probe
  misc_feature (1)..(25): SEQ ID NO: 7609; WAN024ESZ_at; Start 88; Stop 112
attcaagcgggcaccgaaacctgtg

SEQ ID NO: 181243 - DNA, 25 bp, Artificial
  probe
  misc_feature (1)..(25): SEQ ID NO: 7609; WAN024ESZ_at; Start 98; Stop 122
gcaccgaaacctgtgcgagttttct

SEQ ID NO: 181244 - DNA, 25 bp, Artificial
  probe
  misc_feature (1)..(25): SEQ ID NO: 7609; WAN024ESZ_at; Start 176; Stop 200
ggttcaagcacttcagaattatttt

SEQ ID NO: 181245 - DNA, 25 bp, Artificial
  probe
  misc_feature (1)..(25): SEQ ID NO: 7609; WAN024ESZ_at; Start 63; Stop 87
cagagcggaagttagcaaagaaggc

SEQ ID NO: 181246 - DNA, 25 bp, Artificial
  probe
  misc_feature (1)..(25): SEQ ID NO: 7609; WAN024ESZ_at; Start 81; Stop 105
agaaggcattcaagcgggcaccgaa

SEQ ID NO: 181247 - DNA, 25 bp, Artificial
  probe
  misc_feature (1)..(25): SEQ ID NO: 7609; WAN024ESZ_at; Start 49; Stop 73
aaattcttcgtcaacagagcggaag

SEQ ID NO: 181248 - DNA, 25 bp, Artificial
  probe
  misc_feature (1)..(25): SEQ ID NO: 7609; WAN024ESZ_at; Start 163; Stop 187
ttgaggagcttctggttcaagcact

SEQ ID NO: 181249 - DNA, 25 bp, Artificial
  probe
  misc_feature (1)..(25): SEQ ID NO: 7609; WAN024ESZ_at; Start 137; Stop 161
tatttttcctgaacagtttcttctg

SEQ ID NO: 181250 - DNA, 25 bp, Artificial
  probe
  misc_feature (1)..(25): SEQ ID NO: 7609; WAN024ESZ_at; Start 37; Stop 61
cagttcctcgaaaaattcttcgtca

SEQ ID NO: 181251 - DNA, 25 bp, Artificial
  probe
  misc_feature (1)..(25): SEQ ID NO: 7609; WAN024ESZ_at; Start 92; Stop 116
aagcgggcaccgaaacctgtgcgag

SEQ ID NO: 181252 - DNA, 25 bp, Artificial
  probe
  misc_feature (1)..(25): SEQ ID NO: 7609; WAN024ESZ_at; Start 59; Stop 83
tcaacagagcggaagttagcaaaga

SEQ ID NO: 181253 - DNA, 25 bp, Artificial
  probe
  misc_feature (1)..(25): SEQ ID NO: 7609; WAN024ESZ_at; Start 46; Stop 70
gaaaaattcttcgtcaacagagcgg

SEQ ID NO: 181254 - DNA, 25 bp, Artificial
  probe
  misc_feature (1)..(25): SEQ ID NO: 7609; WAN024ESZ_at; Start 114; Stop 138
gagttttcttaagactgcggtcata

SEQ ID NO: 181255 - DNA, 25 bp, Artificial
  probe
  misc_feature (1)..(25): SEQ ID NO: 7609; WAN024ESZ_at; Start 130; Stop 154
gcggtcatatttttcctgaacagtt

SEQ ID NO: 181256 - DNA, 25 bp, Artificial
  probe
  misc_feature (1)..(25): SEQ ID NO: 7609; WAN024ESZ_at; Start 1; Stop 25
ttggacaccaacatcactcataatc

SEQ ID NO: 181257 - DNA, 25 bp, Artificial
  probe
  misc_feature (1)..(25): SEQ ID NO: 7609; WAN024ESZ_at; Start 103; Stop 127
gaaacctgtgcgagttttcttaaga

SEQ ID NO: 181258 - DNA, 25 bp, Artificial
  probe
  misc_feature (1)..(25): SEQ ID NO: 7609; WAN024ESZ_at; Start 55; Stop 79
ttcgtcaacagagcggaagttagca

SEQ ID NO: 181259 - DNA, 25 bp, Artificial
  probe
  misc_feature (1)..(25): SEQ ID NO: 7609; WAN024ESZ_at; Start 75; Stop 99
tagcaaagaaggcattcaagcgggc

SEQ ID NO: 181260 - DNA, 25 bp, Artificial
  probe
  misc_feature (1)..(25): SEQ ID NO: 7609; WAN024ESZ_at; Start 95; Stop 119
cgggcaccgaaacctgtgcgagttt

SEQ ID NO: 181261 - DNA, 25 bp, Artificial
  probe
  misc_feature (1)..(25): SEQ ID NO: 7609; WAN024ESZ_at; Start 67; Stop 91
gcggaagttagcaaagaaggcattc

SEQ ID NO: 181262 - DNA, 25 bp, Artificial
  probe
  misc_feature (1)..(25): SEQ ID NO: 7609; WAN024ESZ_at; Start 156; Stop 180
cttctgtttgaggagcttctggttc

SEQ ID NO: 181263 - DNA, 25 bp, Artificial
  probe
  misc_feature (1)..(25): SEQ ID NO: 7609; WAN024ESZ_at; Start 6; Stop 30
caccaacatcactcataatcagcag

SEQ ID NO: 181264 - DNA, 25 bp, Artificial
  probe
  misc_feature (1)..(25): SEQ ID NO: 7609; WAN024ESZ_at; Start 78; Stop 102
caaagaaggcattcaagcgggcacc

SEQ ID NO: 181265 - DNA, 25 bp, Artificial
  probe
  misc_feature (1)..(25): SEQ ID NO: 7609; WAN024ESZ_at; Start 109; Stop 133
tgtgcgagttttcttaagactgcgg

SEQ ID NO: 181266 - DNA, 25 bp, Artificial
  probe
  misc_feature (1)..(25): SEQ ID NO: 7609; WAN024ESZ_at; Start 168; Stop 192
gagcttctggttcaagcacttcaga

SEQ ID NO: 181267 - DNA, 25 bp, Artificial
  probe
  misc_feature (1)..(25): SEQ ID NO: 7609; WAN024ESZ_at; Start 22; Stop 46
aatcagcagttcttccagttcctcg

SEQ ID NO: 181268 - DNA, 25 bp, Artificial
  probe
  misc_feature (1)..(25): SEQ ID NO: 7609; WAN024ESZ_at; Start 219; Stop 243
gctcaagcttctcttcctctggtaa

SEQ ID NO: 181269 - DNA, 25 bp, Artificial
  probe
  misc_feature (1)..(25): SEQ ID NO: 7609; WAN024ESZ_at; Start 203; Stop 227
tctacagttccttcgtgctcaagct

SEQ ID NO: 181270 - DNA, 25 bp, Artificial
  probe
  misc_feature (1)..(25): SEQ ID NO: 7609; WAN024ESZ_at; Start 195; Stop 219
tattttcttctacagttccttcgtg

SEQ ID NO: 181271 - DNA, 25 bp, Artificial
  probe
  misc_feature (1)..(25): SEQ ID NO: 7609; WAN024ESZ_at; Start 208; Stop 232
agttccttcgtgctcaagcttctct

SEQ ID NO: 181272 - DNA, 25 bp, Artificial
  probe
  misc_feature (1)..(25): SEQ ID NO: 2562; WAN024ET2_at; Start 1035; Stop 1059
tgaaaccttcttggcacttgatgca

SEQ ID NO: 181273 - DNA, 25 bp, Artificial
  probe
  misc_feature (1)..(25): SEQ ID NO: 2562; WAN024ET2_at; Start 588; Stop 612
acttcgtcgtgtcatcattgagaaa

SEQ ID NO: 181274 - DNA, 25 bp, Artificial
  probe
  misc_feature (1)..(25): SEQ ID NO: 2562; WAN024ET2_at; Start 441; Stop 465
tgctaacttccgctctgttgacgaa

SEQ ID NO: 181275 - DNA, 25 bp, Artificial
  probe
  misc_feature (1)..(25): SEQ ID NO: 2562; WAN024ET2_at; Start 825; Stop 849
gggccgacgagtagatgttccagta

SEQ ID NO: 181276 - DNA, 25 bp, Artificial
  probe
  misc_feature (1)..(25): SEQ ID NO: 2562; WAN024ET2_at; Start 774; Stop 798
ggttgcagcagataccttccgtgcg

SEQ ID NO: 181277 - DNA, 25 bp, Artificial
  probe
  misc_feature (1)..(25): SEQ ID NO: 2562; WAN024ET2_at; Start 1005; Stop 1029
tatcaaacgtgttgtgccagaagca

SEQ ID NO: 181278 - DNA, 25 bp, Artificial
  probe
  misc_feature (1)..(25): SEQ ID NO: 2562; WAN024ET2_at; Start 1227; Stop 1251
cgatgatattggagagtttaactca

SEQ ID NO: 181279 - DNA, 25 bp, Artificial
  probe
  misc_feature (1)..(25): SEQ ID NO: 2562; WAN024ET2_at; Start 759; Stop 783
taagaaggtcatgctggttgcagca

SEQ ID NO: 181280 - DNA, 25 bp, Artificial
  probe
  misc_feature (1)..(25): SEQ ID NO: 2562; WAN024ET2_at; Start 1167; Stop 1191
tctagccattcgtgaagaactcaat

SEQ ID NO: 181281 - DNA, 25 bp, Artificial
  probe
  misc_feature (1)..(25): SEQ ID NO: 2562; WAN024ET2_at; Start 861; Stop 885
tgaaaaagctgatccagccagcgtg

SEQ ID NO: 181282 - DNA, 25 bp, Artificial
  probe
  misc_feature (1)..(25): SEQ ID NO: 2562; WAN024ET2_at; Start 371; Stop 395
ttcaggaaaaatatgaccgcagtct

SEQ ID NO: 181283 - DNA, 25 bp, Artificial
  probe
  misc_feature (1)..(25): SEQ ID NO: 2562; WAN024ET2_at; Start 541; Stop 565
gaactacgttacgaagccaagcttg

SEQ ID NO: 181284 - DNA, 25 bp, Artificial
  probe
  misc_feature (1)..(25): SEQ ID NO: 2562; WAN024ET2_at; Start 637; Stop 661
ggtagctacgatgaaagcatccact

SEQ ID NO: 181285 - DNA, 25 bp, Artificial
  probe
  misc_feature (1)..(25): SEQ ID NO: 2562; WAN024ET2_at; Start 622; Stop 646
ctttatgaaaaggatggtagctacg

SEQ ID NO: 181286 - DNA, 25 bp, Artificial
  probe
  misc_feature (1)..(25): SEQ ID NO: 2562; WAN024ET2_at; Start 1134; Stop 1158
taagattgatggaactgctcgagga

SEQ ID NO: 181287 - DNA, 25 bp, Artificial
  probe
  misc_feature (1)..(25): SEQ ID NO: 2562; WAN024ET2_at; Start 468; Stop 492
atttttcgaggaactggaagaactg

SEQ ID NO: 181288 - DNA, 25 bp, Artificial
  probe
  misc_feature (1)..(25): SEQ ID NO: 2562; WAN024ET2_at; Start 790; Stop 814
ttccgtgcgggtgcagtagctcagc

SEQ ID NO: 181289 - DNA, 25 bp, Artificial
  probe
  misc_feature (1)..(25): SEQ ID NO: 2562; WAN024ET2_at; Start 1053; Stop 1077
tgatgcatcaacaggtcaaaatgcc

SEQ ID NO: 181290 - DNA, 25 bp, Artificial
  probe
  misc_feature (1)..(25): SEQ ID NO: 2562; WAN024ET2_at; Start 652; Stop 676
agcatccacttccaagataacttga

SEQ ID NO: 181291 - DNA, 25 bp, Artificial
  probe
  misc_feature (1)..(25): SEQ ID NO: 2562; WAN024ET2_at; Start 1019; Stop 1043
tgccagaagcaccacatgaaacctt

SEQ ID NO: 181292 - DNA, 25 bp, Artificial
  probe
  misc_feature (1)..(25): SEQ ID NO: 2562; WAN024ET2_at; Start 979; Stop 1003
gctgagttggaaaagattggtcgta

SEQ ID NO: 181293 - DNA, 25 bp, Artificial
  probe
  misc_feature (1)..(25): SEQ ID NO: 2562; WAN024ET2_at; Start 47; Stop 71
tcgaagaagttgtaaaagaagctct

SEQ ID NO: 181294 - DNA, 25 bp, Artificial
  probe
  misc_feature (1)..(25): SEQ ID NO: 2562; WAN024ET2_at; Start 64; Stop 88
gaagctctggaaaatcttgatttgt

SEQ ID NO: 181295 - DNA, 25 bp, Artificial
  probe
  misc_feature (1)..(25): SEQ ID NO: 2562; WAN024ET2_at; Start 946; Stop 970
gctggtcgtctgcaaaataaggata

SEQ ID NO: 181296 - DNA, 25 bp, Artificial
  probe
  misc_feature (1)..(25): SEQ ID NO: 2562; WAN024ET2_at; Start 1066; Stop 1090
ggtcaaaatgccctagtacaggcca

SEQ ID NO: 181297 - DNA, 25 bp, Artificial
  probe
  misc_feature (1)..(25): SEQ ID NO: 2562; WAN024ET2_at; Start 561; Stop 585
gcttgaaaatgccaagaaacctgat

SEQ ID NO: 181298 - DNA, 25 bp, Artificial
  probe
  misc_feature (1)..(25): SEQ ID NO: 2562; WAN024ET2_at; Start 1151; Stop 1175
ctcgaggaggtgtggttctagccat

SEQ ID NO: 181299 - DNA, 25 bp, Artificial
  probe
  misc_feature (1)..(25): SEQ ID NO: 2562; WAN024ET2_at; Start 845; Stop 869
cagtagtaactggacctgaaaaagc

SEQ ID NO: 181300 - DNA, 25 bp, Artificial
  probe
  misc_feature (1)..(25): SEQ ID NO: 2562; WAN024ET2_at; Start 963; Stop 987
taaggataaccttatggctgagttg

SEQ ID NO: 181301 - DNA, 25 bp, Artificial
  probe
  misc_feature (1)..(25): SEQ ID NO: 2562; WAN024ET2_at; Start 517; Stop 541
caagtcgcttctaacttaacggagg

SEQ ID NO: 181302 - DNA, 25 bp, Artificial
  probe
  misc_feature (1)..(25): SEQ ID NO: 2562; WAN024ET2_at; Start 677; Stop 701
cagttatgctctttgttggtgtgaa

SEQ ID NO: 181303 - DNA, 25 bp, Artificial
  probe
  misc_feature (1)..(25): SEQ ID NO: 2562; WAN024ET2_at; Start 931; Stop 955
ctcatgattgatactgctggtcgtc

SEQ ID NO: 181304 - DNA, 25 bp, Artificial
  probe
  misc_feature (1)..(25): SEQ ID NO: 2562; WAN024ET2_at; Start 495; Stop 519
gattatgagtgatgttggtgtccaa

SEQ ID NO: 181305 - DNA, 25 bp, Artificial
  probe
  misc_feature (1)..(25): SEQ ID NO: 2562; WAN024ET2_at; Start 1077; Stop 1101
cctagtacaggccaaagaattttcg

SEQ ID NO: 181306 - DNA, 25 bp, Artificial
  probe
  misc_feature (1)..(25): SEQ ID NO: 3890; WAN024ET3_at; Start 267; Stop 291
tggaagagaacataatctcagaacc

SEQ ID NO: 181307 - DNA, 25 bp, Artificial
  probe
  misc_feature (1)..(25): SEQ ID NO: 3890; WAN024ET3_at; Start 114; Stop 138
ccagttcaaaaacgcctccaggatt

SEQ ID NO: 181308 - DNA, 25 bp, Artificial
  probe
  misc_feature (1)..(25): SEQ ID NO: 3890; WAN024ET3_at; Start 483; Stop 507
catacaagtgaaagggagtcgggaa

SEQ ID NO: 181309 - DNA, 25 bp, Artificial
  probe
  misc_feature (1)..(25): SEQ ID NO: 3890; WAN024ET3_at; Start 138; Stop 162
tataacgacaagagatgatttctgg

SEQ ID NO: 181310 - DNA, 25 bp, Artificial
  probe
  misc_feature (1)..(25): SEQ ID NO: 3890; WAN024ET3_at; Start 198; Stop 222
caaaggcatccaagttaatggtcgc

SEQ ID NO: 181311 - DNA, 25 bp, Artificial
  probe
  misc_feature (1)..(25): SEQ ID NO: 3890; WAN024ET3_at; Start 151; Stop 175
gatgatttctggaatgcctgctact

SEQ ID NO: 181312 - DNA, 25 bp, Artificial
  probe
  misc_feature (1)..(25): SEQ ID NO: 3890; WAN024ET3_at; Start 420; Stop 444
agcccttgttccacgaaaaagcttg

SEQ ID NO: 181313 - DNA, 25 bp, Artificial
  probe
  misc_feature (1)..(25): SEQ ID NO: 3890; WAN024ET3_at; Start 282; Stop 306
tctcagaacccagaaagtccagttt

SEQ ID NO: 181314 - DNA, 25 bp, Artificial
  probe
  misc_feature (1)..(25): SEQ ID NO: 3890; WAN024ET3_at; Start 294; Stop 318
gaaagtccagtttatggctcatcaa

SEQ ID NO: 181315 - DNA, 25 bp, Artificial
  probe
  misc_feature (1)..(25): SEQ ID NO: 3890; WAN024ET3_at; Start 19; Stop 43
ggctcctttttccttcaagatagca

SEQ ID NO: 181316 - DNA, 25 bp, Artificial
  probe
  misc_feature (1)..(25): SEQ ID NO: 3890; WAN024ET3_at; Start 181; Stop 205
cagatgttcaatatcttcaaaggca

SEQ ID NO: 181317 - DNA, 25 bp, Artificial
  probe
  misc_feature (1)..(25): SEQ ID NO: 3890; WAN024ET3_at; Start 162; Stop 186
gaatgcctgctactctctccagatg

SEQ ID NO: 181318 - DNA, 25 bp, Artificial
  probe
  misc_feature (1)..(25): SEQ ID NO: 3890; WAN024ET3_at; Start 343; Stop 367
cacaccacaaccttcttcttggaga

SEQ ID NO: 181319 - DNA, 25 bp, Artificial
  probe
  misc_feature (1)..(25): SEQ ID NO: 3890; WAN024ET3_at; Start 504; Stop 528
ggaactcggcaacaatcgcttctaa

SEQ ID NO: 181320 - DNA, 25 bp, Artificial
  probe
  misc_feature (1)..(25): SEQ ID NO: 3890; WAN024ET3_at; Start 2; Stop 26
tgaagcccaaaagtcttggctcctt

SEQ ID NO: 181321 - DNA, 25 bp, Artificial
  probe
  misc_feature (1)..(25): SEQ ID NO: 3890; WAN024ET3_at; Start 226; Stop 250
caattcacgtgcataggcgtattcc

SEQ ID NO: 181322 - DNA, 25 bp, Artificial
  probe
  misc_feature (1)..(25): SEQ ID NO: 3890; WAN024ET3_at; Start 403; Stop 427
tgcaaaatattccttaaagcccttg

SEQ ID NO: 181323 - DNA, 25 bp, Artificial
  probe
  misc_feature (1)..(25): SEQ ID NO: 3890; WAN024ET3_at; Start 212; Stop 236
ttaatggtcgcacccaattcacgtg

SEQ ID NO: 181324 - DNA, 25 bp, Artificial
  probe
  misc_feature (1)..(25): SEQ ID NO: 3890; WAN024ET3_at; Start 249; Stop 273
ccttgtctggcgtgttgttggaaga

SEQ ID NO: 181325 - DNA, 25 bp, Artificial
  probe
  misc_feature (1)..(25): SEQ ID NO: 3890; WAN024ET3_at; Start 309; Stop 333
ggctcatcaaaagctctacataact

SEQ ID NO: 181326 - DNA, 25 bp, Artificial
  probe
  misc_feature (1)..(25): SEQ ID NO: 3890; WAN024ET3_at; Start 65; Stop 89
ttggtcatgccaaacttagcctccc

SEQ ID NO: 181327 - DNA, 25 bp, Artificial
  probe
  misc_feature (1)..(25): SEQ ID NO: 3890; WAN024ET3_at; Start 325; Stop 349
tacataactagagcagtccacacca

SEQ ID NO: 181328 - DNA, 25 bp, Artificial
  probe
  misc_feature (1)..(25): SEQ ID NO: 3890; WAN024ET3_at; Start 37; Stop 61
gatagcaaaggcttcaaagagctgg

SEQ ID NO: 181329 - DNA, 25 bp, Artificial
  probe
  misc_feature (1)..(25): SEQ ID NO: 3890; WAN024ET3_at; Start 51; Stop 75
caaagagctggtccttggtcatgcc

SEQ ID NO: 181330 - DNA, 25 bp, Artificial
  probe
  misc_feature (1)..(25): SEQ ID NO: 3890; WAN024ET3_at; Start 498; Stop 522
gagtcgggaactcggcaacaatcgc

SEQ ID NO: 181331 - DNA, 25 bp, Artificial
  probe
  misc_feature (1)..(25): SEQ ID NO: 3890; WAN024ET3_at; Start 373; Stop 397
caaaatagctggagttggagtagcc

SEQ ID NO: 181332 - DNA, 25 bp, Artificial
  probe
  misc_feature (1)..(25): SEQ ID NO: 3890; WAN024ET3_at; Start 93; Stop 117
gattgtccataatgtctgtccccag

SEQ ID NO: 181333 - DNA, 25 bp, Artificial
  probe
  misc_feature (1)..(25): SEQ ID NO: 3890; WAN024ET3_at; Start 426; Stop 450
tgttccacgaaaaagcttggttgac

SEQ ID NO: 181334 - DNA, 25 bp, Artificial
  probe
  misc_feature (1)..(25): SEQ ID NO: 3890; WAN024ET3_at; Start 388; Stop 412
tggagtagccttaactgcaaaatat

SEQ ID NO: 181335 - DNA, 25 bp, Artificial
  probe
  misc_feature (1)..(25): SEQ ID NO: 3890; WAN024ET3_at; Start 103; Stop 127
aatgtctgtccccagttcaaaaacg

SEQ ID NO: 181336 - DNA, 25 bp, Artificial
  probe
  misc_feature (1)..(25): SEQ ID NO: 3890; WAN024ET3_at; Start 126; Stop 150
cgcctccaggattataacgacaaga

SEQ ID NO: 181337 - DNA, 25 bp, Artificial
  probe
  misc_feature (1)..(25): SEQ ID NO: 3890; WAN024ET3_at; Start 80; Stop 104
ttagcctccccaggattgtccataa

SEQ ID NO: 181338 - DNA, 25 bp, Artificial
  probe
  misc_feature (1)..(25): SEQ ID NO: 3890; WAN024ET3_at; Start 237; Stop 261
cataggcgtattccttgtctggcgt

SEQ ID NO: 181339 - DNA, 25 bp, Artificial
  probe
  misc_feature (1)..(25): SEQ ID NO: 3890; WAN024ET3_at; Start 468; Stop 492
gaatccccttctcatcatacaagtg

SEQ ID NO: 181340 - DNA, 25 bp, Artificial
  probe
  misc_feature (1)..(25): SEQ ID NO: 4956; WAN024ET4_at; Start 23; Stop 47
gcctattttttagaaagcaatctgt

SEQ ID NO: 181341 - DNA, 25 bp, Artificial
  probe
  misc_feature (1)..(25): SEQ ID NO: 4956; WAN024ET4_at; Start 75; Stop 99
cagattattcttcaaaatcgaagcc

SEQ ID NO: 181342 - DNA, 25 bp, Artificial
  probe
  misc_feature (1)..(25): SEQ ID NO: 4956; WAN024ET4_at; Start 20; Stop 44
tttgcctattttttagaaagcaatc

SEQ ID NO: 181343 - DNA, 25 bp, Artificial
  probe
  misc_feature (1)..(25): SEQ ID NO: 4956; WAN024ET4_at; Start 37; Stop 61
aagcaatctgtttttcaatttcatt

SEQ ID NO: 181344 - DNA, 25 bp, Artificial
  probe
  misc_feature (1)..(25): SEQ ID NO: 4956; WAN024ET4_at; Start 72; Stop 96
tatcagattattcttcaaaatcgaa

SEQ ID NO: 181345 - DNA, 25 bp, Artificial
  probe
  misc_feature (1)..(25): SEQ ID NO: 4956; WAN024ET4_at; Start 74; Stop 98
tcagattattcttcaaaatcgaagc

SEQ ID NO: 181346 - DNA, 25 bp, Artificial
  probe
  misc_feature (1)..(25): SEQ ID NO: 4956; WAN024ET4_at; Start 30; Stop 54
ttttagaaagcaatctgtttttcaa

SEQ ID NO: 181347 - DNA, 25 bp, Artificial
  probe
  misc_feature (1)..(25): SEQ ID NO: 4956; WAN024ET4_at; Start 52; Stop 76
caatttcattttcaatctattatca

SEQ ID NO: 181348 - DNA, 25 bp, Artificial
  probe
  misc_feature (1)..(25): SEQ ID NO: 4956; WAN024ET4_at; Start 70; Stop 94
attatcagattattcttcaaaatcg

SEQ ID NO: 181349 - DNA, 25 bp, Artificial
  probe
  misc_feature (1)..(25): SEQ ID NO: 4956; WAN024ET4_at; Start 79; Stop 103
ttattcttcaaaatcgaagccatat

SEQ ID NO: 181350 - DNA, 25 bp, Artificial
  probe
  misc_feature (1)..(25): SEQ ID NO: 4956; WAN024ET4_at; Start 80; Stop 104
tattcttcaaaatcgaagccatata

SEQ ID NO: 181351 - DNA, 25 bp, Artificial
  probe
  misc_feature (1)..(25): SEQ ID NO: 4956; WAN024ET4_at; Start 69; Stop 93
tattatcagattattcttcaaaatc

SEQ ID NO: 181352 - DNA, 25 bp, Artificial
  probe
  misc_feature (1)..(25): SEQ ID NO: 4956; WAN024ET4_at; Start 67; Stop 91
tctattatcagattattcttcaaaa

SEQ ID NO: 181353 - DNA, 25 bp, Artificial
  probe
  misc_feature (1)..(25): SEQ ID NO: 4956; WAN024ET4_at; Start 24; Stop 48
cctattttttagaaagcaatctgtt

SEQ ID NO: 181354 - DNA, 25 bp, Artificial
  probe
  misc_feature (1)..(25): SEQ ID NO: 4956; WAN024ET4_at; Start 31; Stop 55
tttagaaagcaatctgtttttcaat

SEQ ID NO: 181355 - DNA, 25 bp, Artificial
  probe
  misc_feature (1)..(25): SEQ ID NO: 4956; WAN024ET4_at; Start 77; Stop 101
gattattcttcaaaatcgaagccat

SEQ ID NO: 181356 - DNA, 25 bp, Artificial
  probe
  misc_feature (1)..(25): SEQ ID NO: 4956; WAN024ET4_at; Start 55; Stop 79
tttcattttcaatctattatcagat

SEQ ID NO: 181357 - DNA, 25 bp, Artificial
  probe
  misc_feature (1)..(25): SEQ ID NO: 4956; WAN024ET4_at; Start 54; Stop 78
atttcattttcaatctattatcaga

SEQ ID NO: 181358 - DNA, 25 bp, Artificial
  probe
  misc_feature (1)..(25): SEQ ID NO: 4956; WAN024ET4_at; Start 25; Stop 49
ctattttttagaaagcaatctgttt

SEQ ID NO: 181359 - DNA, 25 bp, Artificial
  probe
  misc_feature (1)..(25): SEQ ID NO: 4956; WAN024ET4_at; Start 64; Stop 88
caatctattatcagattattcttca

SEQ ID NO: 181360 - DNA, 25 bp, Artificial
  probe
  misc_feature (1)..(25): SEQ ID NO: 4956; WAN024ET4_at; Start 65; Stop 89
aatctattatcagattattcttcaa

SEQ ID NO: 181361 - DNA, 25 bp, Artificial
  probe
  misc_feature (1)..(25): SEQ ID NO: 4956; WAN024ET4_at; Start 29; Stop 53
tttttagaaagcaatctgtttttca

SEQ ID NO: 181362 - DNA, 25 bp, Artificial
  probe
  misc_feature (1)..(25): SEQ ID NO: 4956; WAN024ET4_at; Start 36; Stop 60
aaagcaatctgtttttcaatttcat

SEQ ID NO: 181363 - DNA, 25 bp, Artificial
  probe
  misc_feature (1)..(25): SEQ ID NO: 4956; WAN024ET4_at; Start 32; Stop 56
ttagaaagcaatctgtttttcaatt

SEQ ID NO: 181364 - DNA, 25 bp, Artificial
  probe
  misc_feature (1)..(25): SEQ ID NO: 4956; WAN024ET4_at; Start 73; Stop 97
atcagattattcttcaaaatcgaag

SEQ ID NO: 181365 - DNA, 25 bp, Artificial
  probe
  misc_feature (1)..(25): SEQ ID NO: 4956; WAN024ET4_at; Start 33; Stop 57
tagaaagcaatctgtttttcaattt

SEQ ID NO: 181366 - DNA, 25 bp, Artificial
  probe
  misc_feature (1)..(25): SEQ ID NO: 4956; WAN024ET4_at; Start 21; Stop 45
ttgcctattttttagaaagcaatct

SEQ ID NO: 181367 - DNA, 25 bp, Artificial
  probe
  misc_feature (1)..(25): SEQ ID NO: 4956; WAN024ET4_at; Start 81; Stop 105
attcttcaaaatcgaagccatataa

SEQ ID NO: 181368 - DNA, 25 bp, Artificial
  probe
  misc_feature (1)..(25): SEQ ID NO: 4956; WAN024ET4_at; Start 78; Stop 102
attattcttcaaaatcgaagccata

SEQ ID NO: 181369 - DNA, 25 bp, Artificial
  probe
  misc_feature (1)..(25): SEQ ID NO: 4956; WAN024ET4_at; Start 71; Stop 95
ttatcagattattcttcaaaatcga

SEQ ID NO: 181370 - DNA, 25 bp, Artificial
  probe
  misc_feature (1)..(25): SEQ ID NO: 4956; WAN024ET4_at; Start 76; Stop 100
agattattcttcaaaatcgaagcca

SEQ ID NO: 181371 - DNA, 25 bp, Artificial
  probe
  misc_feature (1)..(25): SEQ ID NO: 4956; WAN024ET4_at; Start 34; Stop 58
agaaagcaatctgtttttcaatttc

SEQ ID NO: 181372 - DNA, 25 bp, Artificial
  probe
  misc_feature (1)..(25): SEQ ID NO: 4956; WAN024ET4_at; Start 35; Stop 59
gaaagcaatctgtttttcaatttca

SEQ ID NO: 181373 - DNA, 25 bp, Artificial
  probe
  misc_feature (1)..(25): SEQ ID NO: 4956; WAN024ET4_at; Start 53; Stop 77
aatttcattttcaatctattatcag

SEQ ID NO: 181374 - DNA, 25 bp, Artificial
  probe
  misc_feature (1)..(25): SEQ ID NO: 702; WAN024ET5_at; Start 833; Stop 857
cacctcacggtgctctagtcacaag

SEQ ID NO: 181375 - DNA, 25 bp, Artificial
  probe
  misc_feature (1)..(25): SEQ ID NO: 702; WAN024ET5_at; Start 1126; Stop 1150
tataatgccaaattacgttctgcgg

SEQ ID NO: 181376 - DNA, 25 bp, Artificial
  probe
  misc_feature (1)..(25): SEQ ID NO: 702; WAN024ET5_at; Start 17; Stop 41
tcaatagagaagagttagaagcgat

SEQ ID NO: 181377 - DNA, 25 bp, Artificial
  probe
  misc_feature (1)..(25): SEQ ID NO: 702; WAN024ET5_at; Start 339; Stop 363
gaccattaacttggatgcctttgaa

SEQ ID NO: 181378 - DNA, 25 bp, Artificial
  probe
  misc_feature (1)..(25): SEQ ID NO: 702; WAN024ET5_at; Start 366; Stop 390
tattgaacatctggagagagtagca

SEQ ID NO: 181379 - DNA, 25 bp, Artificial
  probe
  misc_feature (1)..(25): SEQ ID NO: 702; WAN024ET5_at; Start 774; Stop 798
tacgtcagcaggtcttggtcaggtc

SEQ ID NO: 181380 - DNA, 25 bp, Artificial
  probe
  misc_feature (1)..(25): SEQ ID NO: 702; WAN024ET5_at; Start 1048; Stop 1072
gaactgcctcatacagaaatcggtg

SEQ ID NO: 181381 - DNA, 25 bp, Artificial
  probe
  misc_feature (1)..(25): SEQ ID NO: 702; WAN024ET5_at; Start 723; Stop 747
cgatatcgccttgattggtgaggga

SEQ ID NO: 181382 - DNA, 25 bp, Artificial
  probe
  misc_feature (1)..(25): SEQ ID NO: 702; WAN024ET5_at; Start 470; Stop 494
gggaggctaagtttggcatgaccaa

SEQ ID NO: 181383 - DNA, 25 bp, Artificial
  probe
  misc_feature (1)..(25): SEQ ID NO: 702; WAN024ET5_at; Start 709; Stop 733
gaccaggagccgaacgatatcgcct

SEQ ID NO: 181384 - DNA, 25 bp, Artificial
  probe
  misc_feature (1)..(25): SEQ ID NO: 702; WAN024ET5_at; Start 115; Stop 139
caagctttttcgtggaacaagggct

SEQ ID NO: 181385 - DNA, 25 bp, Artificial
  probe
  misc_feature (1)..(25): SEQ ID NO: 702; WAN024ET5_at; Start 920; Stop 944
tcatgcgtccagctatgtacggagc

SEQ ID NO: 181386 - DNA, 25 bp, Artificial
  probe
  misc_feature (1)..(25): SEQ ID NO: 702; WAN024ET5_at; Start 940; Stop 964
ggagcttaccatcatattagcaacg

SEQ ID NO: 181387 - DNA, 25 bp, Artificial
  probe
  misc_feature (1)..(25): SEQ ID NO: 702; WAN024ET5_at; Start 566; Stop 590
tagcgtccaataccgtgacccatct

SEQ ID NO: 181388 - DNA, 25 bp, Artificial
  probe
  misc_feature (1)..(25): SEQ ID NO: 702; WAN024ET5_at; Start 956; Stop 980
ttagcaacgtgacccatccagatgg

SEQ ID NO: 181389 - DNA, 25 bp, Artificial
  probe
  misc_feature (1)..(25): SEQ ID NO: 702; WAN024ET5_at; Start 409; Stop 433
tcttgtcgttataatcctggaggcg

SEQ ID NO: 181390 - DNA, 25 bp, Artificial
  probe
  misc_feature (1)..(25): SEQ ID NO: 702; WAN024ET5_at; Start 1086; Stop 1110
tcatgatacaggtgcccacggattt

SEQ ID NO: 181391 - DNA, 25 bp, Artificial
  probe
  misc_feature (1)..(25): SEQ ID NO: 702; WAN024ET5_at; Start 485; Stop 509
gcatgaccaaggaccagctctttga

SEQ ID NO: 181392 - DNA, 25 bp, Artificial
  probe
  misc_feature (1)..(25): SEQ ID NO: 702; WAN024ET5_at; Start 447; Stop 471
gacagacattatggacaatcctggg

SEQ ID NO: 181393 - DNA, 25 bp, Artificial
  probe
  misc_feature (1)..(25): SEQ ID NO: 702; WAN024ET5_at; Start 664; Stop 688
gactttatcaatctttctggcggta

SEQ ID NO: 181394 - DNA, 25 bp, Artificial
  probe
  misc_feature (1)..(25): SEQ ID NO: 702; WAN024ET5_at; Start 253; Stop 277
aaactggactttctgggttctgaga

SEQ ID NO: 181395 - DNA, 25 bp, Artificial
  probe
  misc_feature (1)..(25): SEQ ID NO: 702; WAN024ET5_at; Start 1148; Stop 1172
cggaaatcctctataccgaagaagg

SEQ ID NO: 181396 - DNA, 25 bp, Artificial
  probe
  misc_feature (1)..(25): SEQ ID NO: 702; WAN024ET5_at; Start 592; Stop 616
tattatccagagttggctcgtcagc

SEQ ID NO: 181397 - DNA, 25 bp, Artificial
  probe
  misc_feature (1)..(25): SEQ ID NO: 702; WAN024ET5_at; Start 903; Stop 927
tgcctcagcagtcaacctcatgcgt

SEQ ID NO: 181398 - DNA, 25 bp, Artificial
  probe
  misc_feature (1)..(25): SEQ ID NO: 702; WAN024ET5_at; Start 34; Stop 58
gaagcgattgttgccgagttcccga

SEQ ID NO: 181399 - DNA, 25 bp, Artificial
  probe
  misc_feature (1)..(25): SEQ ID NO: 702; WAN024ET5_at; Start 381; Stop 405
gagagtagcaggcattccagaaatc

SEQ ID NO: 181400 - DNA, 25 bp, Artificial
  probe
  misc_feature (1)..(25): SEQ ID NO: 702; WAN024ET5_at; Start 1102; Stop 1126
cacggattttcaatgggctaccagt

SEQ ID NO: 181401 - DNA, 25 bp, Artificial
  probe
  misc_feature (1)..(25): SEQ ID NO: 702; WAN024ET5_at; Start 630; Stop 654
tgttgaaatcaaggaaaagttgggc

SEQ ID NO: 181402 - DNA, 25 bp, Artificial
  probe
  misc_feature (1)..(25): SEQ ID NO: 702; WAN024ET5_at; Start 811; Stop 835
gaattgggtcgttttatgctggcac

SEQ ID NO: 181403 - DNA, 25 bp, Artificial
  probe
  misc_feature (1)..(25): SEQ ID NO: 702; WAN024ET5_at; Start 235; Stop 259
gagcttttgatgagccataaactgg

SEQ ID NO: 181404 - DNA, 25 bp, Artificial
  probe
  misc_feature (1)..(25): SEQ ID NO: 702; WAN024ET5_at; Start 295; Stop 319
aacacgccagacaaggaatacgcct

SEQ ID NO: 181405 - DNA, 25 bp, Artificial
  probe
  misc_feature (1)..(25): SEQ ID NO: 702; WAN024ET5_at; Start 310; Stop 334
gaatacgcctatgcacgtgaattgg

SEQ ID NO: 181406 - DNA, 25 bp, Artificial
  probe
  misc_feature (1)..(25): SEQ ID NO: 702; WAN024ET5_at; Start 323; Stop 347
cacgtgaattgggtgcgaccattaa

SEQ ID NO: 181407 - DNA, 25 bp, Artificial
  probe
  misc_feature (1)..(25): SEQ ID NO: 702; WAN024ET5_at; Start 154; Stop 178
gcagttaaggctactccaactccag

SEQ ID NO: 181408 - DNA, 25 bp, Artificial
  probe
  misc_feature (1)..(25): SEQ ID NO: 2385; WAN024ET6_at; Start 86; Stop 110
tatttgcagcagtagctgactatct

SEQ ID NO: 181409 - DNA, 25 bp, Artificial
  probe
  misc_feature (1)..(25): SEQ ID NO: 2385; WAN024ET6_at; Start 18; Stop 42
tttgatcgctaaagtagcagaagct

SEQ ID NO: 181410 - DNA, 25 bp, Artificial
  probe
  misc_feature (1)..(25): SEQ ID NO: 2385; WAN024ET6_at; Start 210; Stop 234
gacaattgcagcttctaaagtacca

SEQ ID NO: 181411 - DNA, 25 bp, Artificial
  probe
  misc_feature (1)..(25): SEQ ID NO: 2385; WAN024ET6_at; Start 175; Stop 199
cgtaaaggtcgcaacccacaaactg

SEQ ID NO: 181412 - DNA, 25 bp, Artificial
  probe
  misc_feature (1)..(25): SEQ ID NO: 2385; WAN024ET6_at; Start 170; Stop 194
cagaacgtaaaggtcgcaacccaca

SEQ ID NO: 181413 - DNA, 25 bp, Artificial
  probe
  misc_feature (1)..(25): SEQ ID NO: 2385; WAN024ET6_at; Start 223; Stop 247
tctaaagtaccagcattcaaagctg

SEQ ID NO: 181414 - DNA, 25 bp, Artificial
  probe
  misc_feature (1)..(25): SEQ ID NO: 2385; WAN024ET6_at; Start 61; Stop 85
gactcagcagcagcagttgaagctg

SEQ ID NO: 181415 - DNA, 25 bp, Artificial
  probe
  misc_feature (1)..(25): SEQ ID NO: 2385; WAN024ET6_at; Start 12; Stop 36
acaagatttgatcgctaaagtagca

SEQ ID NO: 181416 - DNA, 25 bp, Artificial
  probe
  misc_feature (1)..(25): SEQ ID NO: 2385; WAN024ET6_at; Start 73; Stop 97
gcagttgaagctgtatttgcagcag

SEQ ID NO: 181417 - DNA, 25 bp, Artificial
  probe
  misc_feature (1)..(25): SEQ ID NO: 2385; WAN024ET6_at; Start 255; Stop 279
tcttaaagacgctgttaaataacta

SEQ ID NO: 181418 - DNA, 25 bp, Artificial
  probe
  misc_feature (1)..(25): SEQ ID NO: 2385; WAN024ET6_at; Start 194; Stop 218
aaactggtaaagaaatgacaattgc

SEQ ID NO: 181419 - DNA, 25 bp, Artificial
  probe
  misc_feature (1)..(25): SEQ ID NO: 2385; WAN024ET6_at; Start 95; Stop 119
cagtagctgactatcttgcagctgg

SEQ ID NO: 181420 - DNA, 25 bp, Artificial
  probe
  misc_feature (1)..(25): SEQ ID NO: 2385; WAN024ET6_at; Start 189; Stop 213
cccacaaactggtaaagaaatgaca

SEQ ID NO: 181421 - DNA, 25 bp, Artificial
  probe
  misc_feature (1)..(25): SEQ ID NO: 2385; WAN024ET6_at; Start 235; Stop 259
gcattcaaagctggtaaagctctta

SEQ ID NO: 181422 - DNA, 25 bp, Artificial
  probe
  misc_feature (1)..(25): SEQ ID NO: 2385; WAN024ET6_at; Start 57; Stop 81
gaaagactcagcagcagcagttgaa

SEQ ID NO: 181423 - DNA, 25 bp, Artificial
  probe
  misc_feature (1)..(25): SEQ ID NO: 2385; WAN024ET6_at; Start 54; Stop 78
taagaaagactcagcagcagcagtt

SEQ ID NO: 181424 - DNA, 25 bp, Artificial
  probe
  misc_feature (1)..(25): SEQ ID NO: 2385; WAN024ET6_at; Start 213; Stop 237
aattgcagcttctaaagtaccagca

SEQ ID NO: 181425 - DNA, 25 bp, Artificial
  probe
  misc_feature (1)..(25): SEQ ID NO: 2385; WAN024ET6_at; Start 247; Stop 271
ggtaaagctcttaaagacgctgtta

SEQ ID NO: 181426 - DNA, 25 bp, Artificial
  probe
  misc_feature (1)..(25): SEQ ID NO: 2385; WAN024ET6_at; Start 79; Stop 103
gaagctgtatttgcagcagtagctg

SEQ ID NO: 181427 - DNA, 25 bp, Artificial
  probe
  misc_feature (1)..(25): SEQ ID NO: 2385; WAN024ET6_at; Start 100; Stop 124
gctgactatcttgcagctggtgaaa

SEQ ID NO: 181428 - DNA, 25 bp, Artificial
  probe
  misc_feature (1)..(25): SEQ ID NO: 2385; WAN024ET6_at; Start 82; Stop 106
gctgtatttgcagcagtagctgact

SEQ ID NO: 181429 - DNA, 25 bp, Artificial
  probe
  misc_feature (1)..(25): SEQ ID NO: 2385; WAN024ET6_at; Start 52; Stop 76
actaagaaagactcagcagcagcag

SEQ ID NO: 181430 - DNA, 25 bp, Artificial
  probe
  misc_feature (1)..(25): SEQ ID NO: 2385; WAN024ET6_at; Start 182; Stop 206
gtcgcaacccacaaactggtaaaga

SEQ ID NO: 181431 - DNA, 25 bp, Artificial
  probe
  misc_feature (1)..(25): SEQ ID NO: 2385; WAN024ET6_at; Start 198; Stop 222
tggtaaagaaatgacaattgcagct

SEQ ID NO: 181432 - DNA, 25 bp, Artificial
  probe
  misc_feature (1)..(25): SEQ ID NO: 2385; WAN024ET6_at; Start 107; Stop 131
atcttgcagctggtgaaaaagttca

SEQ ID NO: 181433 - DNA, 25 bp, Artificial
  probe
  misc_feature (1)..(25): SEQ ID NO: 2385; WAN024ET6_at; Start 2; Stop 26
tggcaaacaaacaagatttgatcgc

SEQ ID NO: 181434 - DNA, 25 bp, Artificial
  probe
  misc_feature (1)..(25): SEQ ID NO: 2385; WAN024ET6_at; Start 233; Stop 257
cagcattcaaagctggtaaagctct

SEQ ID NO: 181435 - DNA, 25 bp, Artificial
  probe
  misc_feature (1)..(25): SEQ ID NO: 2385; WAN024ET6_at; Start 103; Stop 127
gactatcttgcagctggtgaaaaag

SEQ ID NO: 181436 - DNA, 25 bp, Artificial
  probe
  misc_feature (1)..(25): SEQ ID NO: 2385; WAN024ET6_at; Start 205; Stop 229
gaaatgacaattgcagcttctaaag

SEQ ID NO: 181437 - DNA, 25 bp, Artificial
  probe
  misc_feature (1)..(25): SEQ ID NO: 2385; WAN024ET6_at; Start 91; Stop 115
gcagcagtagctgactatcttgcag

SEQ ID NO: 181438 - DNA, 25 bp, Artificial
  probe
  misc_feature (1)..(25): SEQ ID NO: 2385; WAN024ET6_at; Start 169; Stop 193
gcagaacgtaaaggtcgcaacccac

SEQ ID NO: 181439 - DNA, 25 bp, Artificial
  probe
  misc_feature (1)..(25): SEQ ID NO: 2385; WAN024ET6_at; Start 217; Stop 241
gcagcttctaaagtaccagcattca

SEQ ID NO: 181440 - DNA, 25 bp, Artificial
  probe
  misc_feature (1)..(25): SEQ ID NO: 2385; WAN024ET6_at; Start 64; Stop 88
tcagcagcagcagttgaagctgtat

SEQ ID NO: 181441 - DNA, 25 bp, Artificial
  probe
  misc_feature (1)..(25): SEQ ID NO: 2385; WAN024ET6_at; Start 244; Stop 268
gctggtaaagctcttaaagacgctg

SEQ ID NO: 181442 - DNA, 25 bp, Artificial
  probe
  misc_feature (1)..(25): SEQ ID NO: 6502; WAN024ET7_x_at; Start 101; Stop 125
cagcttatcaaaaaagtcggacaag

SEQ ID NO: 181443 - DNA, 25 bp, Artificial
  probe
  misc_feature (1)..(25): SEQ ID NO: 6502; WAN024ET7_x_at; Start 31; Stop 55
gatacacgatttaagcgtcttgttg

SEQ ID NO: 181444 - DNA, 25 bp, Artificial
  probe
  misc_feature (1)..(25): SEQ ID NO: 6502; WAN024ET7_x_at; Start 29; Stop 53
ctgatacacgatttaagcgtcttgt

SEQ ID NO: 181445 - DNA, 25 bp, Artificial
  probe
  misc_feature (1)..(25): SEQ ID NO: 6502; WAN024ET7_x_at; Start 54; Stop 78
tggtgttcagcgtaccacttttgaa

SEQ ID NO: 181446 - DNA, 25 bp, Artificial
  probe
  misc_feature (1)..(25): SEQ ID NO: 6502; WAN024ET7_x_at; Start 26; Stop 50
taactgatacacgatttaagcgtct

SEQ ID NO: 181447 - DNA, 25 bp, Artificial
  probe
  misc_feature (1)..(25): SEQ ID NO: 6502; WAN024ET7_x_at; Start 104; Stop 128
cttatcaaaaaagtcggacaagctg

SEQ ID NO: 181448 - DNA, 25 bp, Artificial
  probe
  misc_feature (1)..(25): SEQ ID NO: 6502; WAN024ET7_x_at; Start 63; Stop 87
gcgtaccacttttgaagagatgtta

SEQ ID NO: 181449 - DNA, 25 bp, Artificial
  probe
  misc_feature (1)..(25): SEQ ID NO: 6502; WAN024ET7_x_at; Start 14; Stop 38
caagtaaacaattaactgatacacg

SEQ ID NO: 181450 - DNA, 25 bp, Artificial
  probe
  misc_feature (1)..(25): SEQ ID NO: 6502; WAN024ET7_x_at; Start 103; Stop 127
gcttatcaaaaaagtcggacaagct

SEQ ID NO: 181451 - DNA, 25 bp, Artificial
  probe
  misc_feature (1)..(25): SEQ ID NO: 6502; WAN024ET7_x_at; Start 66; Stop 90
taccacttttgaagagatgttagct

SEQ ID NO: 181452 - DNA, 25 bp, Artificial
  probe
  misc_feature (1)..(25): SEQ ID NO: 6502; WAN024ET7_x_at; Start 27; Stop 51
aactgatacacgatttaagcgtctt

SEQ ID NO: 181453 - DNA, 25 bp, Artificial
  probe
  misc_feature (1)..(25): SEQ ID NO: 6502; WAN024ET7_x_at; Start 60; Stop 84
tcagcgtaccacttttgaagagatg

SEQ ID NO: 181454 - DNA, 25 bp, Artificial
  probe
  misc_feature (1)..(25): SEQ ID NO: 6502; WAN024ET7_x_at; Start 53; Stop 77
ttggtgttcagcgtaccacttttga

SEQ ID NO: 181455 - DNA, 25 bp, Artificial
  probe
  misc_feature (1)..(25): SEQ ID NO: 6502; WAN024ET7_x_at; Start 107; Stop 131
atcaaaaaagtcggacaagctggta

SEQ ID NO: 181456 - DNA, 25 bp, Artificial
  probe
  misc_feature (1)..(25): SEQ ID NO: 6502; WAN024ET7_x_at; Start 28; Stop 52
actgatacacgatttaagcgtcttg

SEQ ID NO: 181457 - DNA, 25 bp, Artificial
  probe
  misc_feature (1)..(25): SEQ ID NO: 6502; WAN024ET7_x_at; Start 25; Stop 49
ttaactgatacacgatttaagcgtc

SEQ ID NO: 181458 - DNA, 25 bp, Artificial
  probe
  misc_feature (1)..(25): SEQ ID NO: 6502; WAN024ET7_x_at; Start 61; Stop 85
cagcgtaccacttttgaagagatgt

SEQ ID NO: 181459 - DNA, 25 bp, Artificial
  probe
  misc_feature (1)..(25): SEQ ID NO: 6502; WAN024ET7_x_at; Start 32; Stop 56
atacacgatttaagcgtcttgttgg

SEQ ID NO: 181460 - DNA, 25 bp, Artificial
  probe
  misc_feature (1)..(25): SEQ ID NO: 6502; WAN024ET7_x_at; Start 21; Stop 45
acaattaactgatacacgatttaag

SEQ ID NO: 181461 - DNA, 25 bp, Artificial
  probe
  misc_feature (1)..(25): SEQ ID NO: 6502; WAN024ET7_x_at; Start 15; Stop 39
aagtaaacaattaactgatacacga

SEQ ID NO: 181462 - DNA, 25 bp, Artificial
  probe
  misc_feature (1)..(25): SEQ ID NO: 6502; WAN024ET7_x_at; Start 106; Stop 130
tatcaaaaaagtcggacaagctggt

SEQ ID NO: 181463 - DNA, 25 bp, Artificial
  probe
  misc_feature (1)..(25): SEQ ID NO: 6502; WAN024ET7_x_at; Start 99; Stop 123
aacagcttatcaaaaaagtcggaca

SEQ ID NO: 181464 - DNA, 25 bp, Artificial
  probe
  misc_feature (1)..(25): SEQ ID NO: 6502; WAN024ET7_x_at; Start 24; Stop 48
attaactgatacacgatttaagcgt

SEQ ID NO: 181465 - DNA, 25 bp, Artificial
  probe
  misc_feature (1)..(25): SEQ ID NO: 6502; WAN024ET7_x_at; Start 62; Stop 86
agcgtaccacttttgaagagatgtt

SEQ ID NO: 181466 - DNA, 25 bp, Artificial
  probe
  misc_feature (1)..(25): SEQ ID NO: 6502; WAN024ET7_x_at; Start 22; Stop 46
caattaactgatacacgatttaagc

SEQ ID NO: 181467 - DNA, 25 bp, Artificial
  probe
  misc_feature (1)..(25): SEQ ID NO: 6502; WAN024ET7_x_at; Start 33; Stop 57
tacacgatttaagcgtcttgttggt

SEQ ID NO: 181468 - DNA, 25 bp, Artificial
  probe
  misc_feature (1)..(25): SEQ ID NO: 6502; WAN024ET7_x_at; Start 23; Stop 47
aattaactgatacacgatttaagcg

SEQ ID NO: 181469 - DNA, 25 bp, Artificial
  probe
  misc_feature (1)..(25): SEQ ID NO: 6502; WAN024ET7_x_at; Start 105; Stop 129
ttatcaaaaaagtcggacaagctgg

SEQ ID NO: 181470 - DNA, 25 bp, Artificial
  probe
  misc_feature (1)..(25): SEQ ID NO: 6502; WAN024ET7_x_at; Start 108; Stop 132
tcaaaaaagtcggacaagctggtaa

SEQ ID NO: 181471 - DNA, 25 bp, Artificial
  probe
  misc_feature (1)..(25): SEQ ID NO: 6502; WAN024ET7_x_at; Start 64; Stop 88
cgtaccacttttgaagagatgttag

SEQ ID NO: 181472 - DNA, 25 bp, Artificial
  probe
  misc_feature (1)..(25): SEQ ID NO: 6502; WAN024ET7_x_at; Start 30; Stop 54
tgatacacgatttaagcgtcttgtt

SEQ ID NO: 181473 - DNA, 25 bp, Artificial
  probe
  misc_feature (1)..(25): SEQ ID NO: 6502; WAN024ET7_x_at; Start 65; Stop 89
gtaccacttttgaagagatgttagc

SEQ ID NO: 181474 - DNA, 25 bp, Artificial
  probe
  misc_feature (1)..(25): SEQ ID NO: 6502; WAN024ET7_x_at; Start 100; Stop 124
acagcttatcaaaaaagtcggacaa

SEQ ID NO: 181475 - DNA, 25 bp, Artificial
  probe
  misc_feature (1)..(25): SEQ ID NO: 6502; WAN024ET7_x_at; Start 102; Stop 126
agcttatcaaaaaagtcggacaagc

SEQ ID NO: 181476 - DNA, 25 bp, Artificial
  probe
  misc_feature (1)..(25): SEQ ID NO: 2266; WAN024ET8_at; Start 43; Stop 67
gctaaaaacaatcttccagagtctt

SEQ ID NO: 181477 - DNA, 25 bp, Artificial
  probe
  misc_feature (1)..(25): SEQ ID NO: 2266; WAN024ET8_at; Start 71; Stop 95
gggaaacctactcagcatttgcaaa

SEQ ID NO: 181478 - DNA, 25 bp, Artificial
  probe
  misc_feature (1)..(25): SEQ ID NO: 2266; WAN024ET8_at; Start 39; Stop 63
aaaagctaaaaacaatcttccagag

SEQ ID NO: 181479 - DNA, 25 bp, Artificial
  probe
  misc_feature (1)..(25): SEQ ID NO: 2266; WAN024ET8_at; Start 82; Stop 106
tcagcatttgcaaatacaaatggcg

SEQ ID NO: 181480 - DNA, 25 bp, Artificial
  probe
  misc_feature (1)..(25): SEQ ID NO: 2266; WAN024ET8_at; Start 75; Stop 99
aacctactcagcatttgcaaataca

SEQ ID NO: 181481 - DNA, 25 bp, Artificial
  probe
  misc_feature (1)..(25): SEQ ID NO: 2266; WAN024ET8_at; Start 66; Stop 90
tttctgggaaacctactcagcattt

SEQ ID NO: 181482 - DNA, 25 bp, Artificial
  probe
  misc_feature (1)..(25): SEQ ID NO: 2266; WAN024ET8_at; Start 54; Stop 78
tcttccagagtctttctgggaaacc

SEQ ID NO: 181483 - DNA, 25 bp, Artificial
  probe
  misc_feature (1)..(25): SEQ ID NO: 2266; WAN024ET8_at; Start 22; Stop 46
gttgatttagaatacaaaaaagcta

SEQ ID NO: 181484 - DNA, 25 bp, Artificial
  probe
  misc_feature (1)..(25): SEQ ID NO: 2266; WAN024ET8_at; Start 86; Stop 110
catttgcaaatacaaatggcgggaa

SEQ ID NO: 181485 - DNA, 25 bp, Artificial
  probe
  misc_feature (1)..(25): SEQ ID NO: 2266; WAN024ET8_at; Start 96; Stop 120
tacaaatggcgggaaaataattctc

SEQ ID NO: 181486 - DNA, 25 bp, Artificial
  probe
  misc_feature (1)..(25): SEQ ID NO: 2266; WAN024ET8_at; Start 61; Stop 85
gagtctttctgggaaacctactcag

SEQ ID NO: 181487 - DNA, 25 bp, Artificial
  probe
  misc_feature (1)..(25): SEQ ID NO: 2266; WAN024ET8_at; Start 90; Stop 114
tgcaaatacaaatggcgggaaaata

SEQ ID NO: 181488 - DNA, 25 bp, Artificial
  probe
  misc_feature (1)..(25): SEQ ID NO: 2266; WAN024ET8_at; Start 49; Stop 73
aacaatcttccagagtctttctggg

SEQ ID NO: 181489 - DNA, 25 bp, Artificial
  probe
  misc_feature (1)..(25): SEQ ID NO: 2266; WAN024ET8_at; Start 73; Stop 97
gaaacctactcagcatttgcaaata

SEQ ID NO: 181490 - DNA, 25 bp, Artificial
  probe
  misc_feature (1)..(25): SEQ ID NO: 2266; WAN024ET8_at; Start 59; Stop 83
cagagtctttctgggaaacctactc

SEQ ID NO: 181491 - DNA, 25 bp, Artificial
  probe
  misc_feature (1)..(25): SEQ ID NO: 2266; WAN024ET8_at; Start 13; Stop 37
tttgaaggggttgatttagaataca

SEQ ID NO: 181492 - DNA, 25 bp, Artificial
  probe
  misc_feature (1)..(25): SEQ ID NO: 2266; WAN024ET8_at; Start 98; Stop 122
caaatggcgggaaaataattctcgg

SEQ ID NO: 181493 - DNA, 25 bp, Artificial
  probe
  misc_feature (1)..(25): SEQ ID NO: 2266; WAN024ET8_at; Start 70; Stop 94
tgggaaacctactcagcatttgcaa

SEQ ID NO: 181494 - DNA, 25 bp, Artificial
  probe
  misc_feature (1)..(25): SEQ ID NO: 2266; WAN024ET8_at; Start 51; Stop 75
caatcttccagagtctttctgggaa

SEQ ID NO: 181495 - DNA, 25 bp, Artificial
  probe
  misc_feature (1)..(25): SEQ ID NO: 2266; WAN024ET8_at; Start 41; Stop 65
aagctaaaaacaatcttccagagtc

SEQ ID NO: 181496 - DNA, 25 bp, Artificial
  probe
  misc_feature (1)..(25): SEQ ID NO: 2266; WAN024ET8_at; Start 62; Stop 86
agtctttctgggaaacctactcagc

SEQ ID NO: 181497 - DNA, 25 bp, Artificial
  probe
  misc_feature (1)..(25): SEQ ID NO: 2266; WAN024ET8_at; Start 64; Stop 88
tctttctgggaaacctactcagcat

SEQ ID NO: 181498 - DNA, 25 bp, Artificial
  probe
  misc_feature (1)..(25): SEQ ID NO: 2266; WAN024ET8_at; Start 89; Stop 113
ttgcaaatacaaatggcgggaaaat

SEQ ID NO: 181499 - DNA, 25 bp, Artificial
  probe
  misc_feature (1)..(25): SEQ ID NO: 2266; WAN024ET8_at; Start 91; Stop 115
gcaaatacaaatggcgggaaaataa

SEQ ID NO: 181500 - DNA, 25 bp, Artificial
  probe
  misc_feature (1)..(25): SEQ ID NO: 2266; WAN024ET8_at; Start 47; Stop 71
aaaacaatcttccagagtctttctg

SEQ ID NO: 181501 - DNA, 25 bp, Artificial
  probe
  misc_feature (1)..(25): SEQ ID NO: 2266; WAN024ET8_at; Start 77; Stop 101
cctactcagcatttgcaaatacaaa

SEQ ID NO: 181502 - DNA, 25 bp, Artificial
  probe
  misc_feature (1)..(25): SEQ ID NO: 2266; WAN024ET8_at; Start 69; Stop 93
ctgggaaacctactcagcatttgca

SEQ ID NO: 181503 - DNA, 25 bp, Artificial
  probe
  misc_feature (1)..(25): SEQ ID NO: 2266; WAN024ET8_at; Start 45; Stop 69
taaaaacaatcttccagagtctttc

SEQ ID NO: 181504 - DNA, 25 bp, Artificial
  probe
  misc_feature (1)..(25): SEQ ID NO: 2266; WAN024ET8_at; Start 63; Stop 87
gtctttctgggaaacctactcagca

SEQ ID NO: 181505 - DNA, 25 bp, Artificial
  probe
  misc_feature (1)..(25): SEQ ID NO: 2266; WAN024ET8_at; Start 65; Stop 89
ctttctgggaaacctactcagcatt

SEQ ID NO: 181506 - DNA, 25 bp, Artificial
  probe
  misc_feature (1)..(25): SEQ ID NO: 2266; WAN024ET8_at; Start 68; Stop 92
tctgggaaacctactcagcatttgc

SEQ ID NO: 181507 - DNA, 25 bp, Artificial
  probe
  misc_feature (1)..(25): SEQ ID NO: 2266; WAN024ET8_at; Start 57; Stop 81
tccagagtctttctgggaaacctac

SEQ ID NO: 181508 - DNA, 25 bp, Artificial
  probe
  misc_feature (1)..(25): SEQ ID NO: 2266; WAN024ET8_at; Start 85; Stop 109
gcatttgcaaatacaaatggcggga

SEQ ID NO: 181509 - DNA, 25 bp, Artificial
  probe
  misc_feature (1)..(25): SEQ ID NO: 2266; WAN024ET8_at; Start 72; Stop 96
ggaaacctactcagcatttgcaaat

SEQ ID NO: 181510 - DNA, 25 bp, Artificial
  probe
  misc_feature (1)..(25): SEQ ID NO: 1616; WAN024ET9_at; Start 1196; Stop 1220
tgaaatttgcccgtcagcttcgtgg

SEQ ID NO: 181511 - DNA, 25 bp, Artificial
  probe
  misc_feature (1)..(25): SEQ ID NO: 1616; WAN024ET9_at; Start 590; Stop 614
caaatttaggtatggttcgcaccca

SEQ ID NO: 181512 - DNA, 25 bp, Artificial
  probe
  misc_feature (1)..(25): SEQ ID NO: 1616; WAN024ET9_at; Start 214; Stop 238
gaaaaagggatgaccaaagggatgc

SEQ ID NO: 181513 - DNA, 25 bp, Artificial
  probe
  misc_feature (1)..(25): SEQ ID NO: 1616; WAN024ET9_at; Start 430; Stop 454
aatggagaaccaggtcaggaacgtg

SEQ ID NO: 181514 - DNA, 25 bp, Artificial
  probe
  misc_feature (1)..(25): SEQ ID NO: 1616; WAN024ET9_at; Start 123; Stop 147
tcgtggaggcaatgtggtcttcgtt

SEQ ID NO: 181515 - DNA, 25 bp, Artificial
  probe
  misc_feature (1)..(25): SEQ ID NO: 1616; WAN024ET9_at; Start 340; Stop 364
caagaatttatcgttgcccacggtg

SEQ ID NO: 181516 - DNA, 25 bp, Artificial
  probe
  misc_feature (1)..(25): SEQ ID NO: 1616; WAN024ET9_at; Start 85; Stop 109
tatgtccctaatggaggcccttggg

SEQ ID NO: 181517 - DNA, 25 bp, Artificial
  probe
  misc_feature (1)..(25): SEQ ID NO: 1616; WAN024ET9_at; Start 1024; Stop 1048
gaatttttgctctacgacgagtccg

SEQ ID NO: 181518 - DNA, 25 bp, Artificial
  probe
  misc_feature (1)..(25): SEQ ID NO: 1616; WAN024ET9_at; Start 530; Stop 554
taagtgttattacctcagctaagcc

SEQ ID NO: 181519 - DNA, 25 bp, Artificial
  probe
  misc_feature (1)..(25): SEQ ID NO: 1616; WAN024ET9_at; Start 445; Stop 469
caggaacgtgagttacaattggaac

SEQ ID NO: 181520 - DNA, 25 bp, Artificial
  probe
  misc_feature (1)..(25): SEQ ID NO: 1616; WAN024ET9_at; Start 1230; Stop 1254
tgatgaagcccttcgtgcgcgtgga

SEQ ID NO: 181521 - DNA, 25 bp, Artificial
  probe
  misc_feature (1)..(25): SEQ ID NO: 1616; WAN024ET9_at; Start 632; Stop 656
cagtagccgacttgccaggtttgat

SEQ ID NO: 181522 - DNA, 25 bp, Artificial
  probe
  misc_feature (1)..(25): SEQ ID NO: 1616; WAN024ET9_at; Start 197; Stop 221
tcaaggctgattctggtgaaaaagg

SEQ ID NO: 181523 - DNA, 25 bp, Artificial
  probe
  misc_feature (1)..(25): SEQ ID NO: 1616; WAN024ET9_at; Start 796; Stop 820
gagctggagtcttacaatcttcgcc

SEQ ID NO: 181524 - DNA, 25 bp, Artificial
  probe
  misc_feature (1)..(25): SEQ ID NO: 1616; WAN024ET9_at; Start 143; Stop 167
tcgttgtagacgaaggactacgtac

SEQ ID NO: 181525 - DNA, 25 bp, Artificial
  probe
  misc_feature (1)..(25): SEQ ID NO: 1616; WAN024ET9_at; Start 979; Stop 1003
gcaacacttttagatgctacagctg

SEQ ID NO: 181526 - DNA, 25 bp, Artificial
  probe
  misc_feature (1)..(25): SEQ ID NO: 1616; WAN024ET9_at; Start 394; Stop 418
gcgacaccaaaaaatcctgcaccgg

SEQ ID NO: 181527 - DNA, 25 bp, Artificial
  probe
  misc_feature (1)..(25): SEQ ID NO: 1616; WAN024ET9_at; Start 669; Stop 693
tcaaggtgttggtttgggaactcag

SEQ ID NO: 181528 - DNA, 25 bp, Artificial
  probe
  misc_feature (1)..(25): SEQ ID NO: 1616; WAN024ET9_at; Start 504; Stop 528
cccatctgtagggaagtcaacactt

SEQ ID NO: 181529 - DNA, 25 bp, Artificial
  probe
  misc_feature (1)..(25): SEQ ID NO: 1616; WAN024ET9_at; Start 411; Stop 435
tgcaccggaaatctctgaaaatgga

SEQ ID NO: 181530 - DNA, 25 bp, Artificial
  probe
  misc_feature (1)..(25): SEQ ID NO: 1616; WAN024ET9_at; Start 1000; Stop 1024
gctgaattgttagacaagacaccag

SEQ ID NO: 181531 - DNA, 25 bp, Artificial
  probe
  misc_feature (1)..(25): SEQ ID NO: 1616; WAN024ET9_at; Start 238; Stop 262
catggtcgtggtgctgaggacctta

SEQ ID NO: 181532 - DNA, 25 bp, Artificial
  probe
  misc_feature (1)..(25): SEQ ID NO: 1616; WAN024ET9_at; Start 547; Stop 571
gctaagcctaaaattggtgcctacc

SEQ ID NO: 181533 - DNA, 25 bp, Artificial
  probe
  misc_feature (1)..(25): SEQ ID NO: 1616; WAN024ET9_at; Start 852; Stop 876
taagatggacatgcctgagagtcag

SEQ ID NO: 181534 - DNA, 25 bp, Artificial
  probe
  misc_feature (1)..(25): SEQ ID NO: 1616; WAN024ET9_at; Start 617; Stop 641
caggtgaatcctttgcagtagccga

SEQ ID NO: 181535 - DNA, 25 bp, Artificial
  probe
  misc_feature (1)..(25): SEQ ID NO: 1616; WAN024ET9_at; Start 810; Stop 834
caatcttcgcctcatggagcgtcca

SEQ ID NO: 181536 - DNA, 25 bp, Artificial
  probe
  misc_feature (1)..(25): SEQ ID NO: 1616; WAN024ET9_at; Start 282; Stop 306
tacgactgttcgtgatgcggagact

SEQ ID NO: 181537 - DNA, 25 bp, Artificial
  probe
  misc_feature (1)..(25): SEQ ID NO: 1616; WAN024ET9_at; Start 955; Stop 979
tctggattgaccaagcaaggtctgg

SEQ ID NO: 181538 - DNA, 25 bp, Artificial
  probe
  misc_feature (1)..(25): SEQ ID NO: 1616; WAN024ET9_at; Start 22; Stop 46
gctaagattaaggtcaaggctggta

SEQ ID NO: 181539 - DNA, 25 bp, Artificial
  probe
  misc_feature (1)..(25): SEQ ID NO: 1616; WAN024ET9_at; Start 297; Stop 321
tgcggagactggcaaggttttaaca

SEQ ID NO: 181540 - DNA, 25 bp, Artificial
  probe
  misc_feature (1)..(25): SEQ ID NO: 1616; WAN024ET9_at; Start 1093; Stop 1117
gcctttgaaattagtcgtgatgacg

SEQ ID NO: 181541 - DNA, 25 bp, Artificial
  probe
  misc_feature (1)..(25): SEQ ID NO: 1616; WAN024ET9_at; Start 158; Stop 182
gactacgtaccttgatggatttccg

SEQ ID NO: 181542 - DNA, 25 bp, Artificial
  probe
  misc_feature (1)..(25): SEQ ID NO: 1616; WAN024ET9_at; Start 1114; Stop 1138
gacgatgcgacatgggtactttctg

SEQ ID NO: 181543 - DNA, 25 bp, Artificial
  probe
  misc_feature (1)..(25): SEQ ID NO: 1616; WAN024ET9_at; Start 698; Stop 722
tccgtcacatcgagcgtacacgtgt

SEQ ID NO: 181544 - DNA, 25 bp, Artificial
  probe
  misc_feature (1)..(25): SEQ ID NO: 7424; WAN024ETA_at; Start 15; Stop 39
actatcctttctttatcctacttca

SEQ ID NO: 181545 - DNA, 25 bp, Artificial
  probe
  misc_feature (1)..(25): SEQ ID NO: 7424; WAN024ETA_at; Start 27; Stop 51
ttatcctacttcaacagaaggttca

SEQ ID NO: 181546 - DNA, 25 bp, Artificial
  probe
  misc_feature (1)..(25): SEQ ID NO: 7424; WAN024ETA_at; Start 3; Stop 27
gaagagacataaactatcctttctt

SEQ ID NO: 181547 - DNA, 25 bp, Artificial
  probe
  misc_feature (1)..(25): SEQ ID NO: 7424; WAN024ETA_at; Start 31; Stop 55
cctacttcaacagaaggttcattgg

SEQ ID NO: 181548 - DNA, 25 bp, Artificial
  probe
  misc_feature (1)..(25): SEQ ID NO: 7424; WAN024ETA_at; Start 35; Stop 59
cttcaacagaaggttcattggttga

SEQ ID NO: 181549 - DNA, 25 bp, Artificial
  probe
  misc_feature (1)..(25): SEQ ID NO: 7424; WAN024ETA_at; Start 42; Stop 66
agaaggttcattggttgattttcca

SEQ ID NO: 181550 - DNA, 25 bp, Artificial
  probe
  misc_feature (1)..(25): SEQ ID NO: 7424; WAN024ETA_at; Start 32; Stop 56
ctacttcaacagaaggttcattggt

SEQ ID NO: 181551 - DNA, 25 bp, Artificial
  probe
  misc_feature (1)..(25): SEQ ID NO: 7424; WAN024ETA_at; Start 24; Stop 48
tctttatcctacttcaacagaaggt

SEQ ID NO: 181552 - DNA, 25 bp, Artificial
  probe
  misc_feature (1)..(25): SEQ ID NO: 7424; WAN024ETA_at; Start 46; Stop 70
ggttcattggttgattttccaattc

SEQ ID NO: 181553 - DNA, 25 bp, Artificial
  probe
  misc_feature (1)..(25): SEQ ID NO: 7424; WAN024ETA_at; Start 34; Stop 58
acttcaacagaaggttcattggttg

SEQ ID NO: 181554 - DNA, 25 bp, Artificial
  probe
  misc_feature (1)..(25): SEQ ID NO: 7424; WAN024ETA_at; Start 57; Stop 81
tgattttccaattctcggtacaact

SEQ ID NO: 181555 - DNA, 25 bp, Artificial
  probe
  misc_feature (1)..(25): SEQ ID NO: 7424; WAN024ETA_at; Start 56; Stop 80
ttgattttccaattctcggtacaac

SEQ ID NO: 181556 - DNA, 25 bp, Artificial
  probe
  misc_feature (1)..(25): SEQ ID NO: 7424; WAN024ETA_at; Start 1; Stop 25
ttgaagagacataaactatcctttc

SEQ ID NO: 181557 - DNA, 25 bp, Artificial
  probe
  misc_feature (1)..(25): SEQ ID NO: 7424; WAN024ETA_at; Start 38; Stop 62
caacagaaggttcattggttgattt

SEQ ID NO: 181558 - DNA, 25 bp, Artificial
  probe
  misc_feature (1)..(25): SEQ ID NO: 7424; WAN024ETA_at; Start 53; Stop 77
tggttgattttccaattctcggtac

SEQ ID NO: 181559 - DNA, 25 bp, Artificial
  probe
  misc_feature (1)..(25): SEQ ID NO: 7424; WAN024ETA_at; Start 19; Stop 43
tcctttctttatcctacttcaacag

SEQ ID NO: 181560 - DNA, 25 bp, Artificial
  probe
  misc_feature (1)..(25): SEQ ID NO: 7424; WAN024ETA_at; Start 44; Stop 68
aaggttcattggttgattttccaat

SEQ ID NO: 181561 - DNA, 25 bp, Artificial
  probe
  misc_feature (1)..(25): SEQ ID NO: 7424; WAN024ETA_at; Start 41; Stop 65
cagaaggttcattggttgattttcc

SEQ ID NO: 181562 - DNA, 25 bp, Artificial
  probe
  misc_feature (1)..(25): SEQ ID NO: 7424; WAN024ETA_at; Start 36; Stop 60
ttcaacagaaggttcattggttgat

SEQ ID NO: 181563 - DNA, 25 bp, Artificial
  probe
  misc_feature (1)..(25): SEQ ID NO: 7424; WAN024ETA_at; Start 43; Stop 67
gaaggttcattggttgattttccaa

SEQ ID NO: 181564 - DNA, 25 bp, Artificial
  probe
  misc_feature (1)..(25): SEQ ID NO: 7424; WAN024ETA_at; Start 6; Stop 30
gagacataaactatcctttctttat

SEQ ID NO: 181565 - DNA, 25 bp, Artificial
  probe
  misc_feature (1)..(25): SEQ ID NO: 7424; WAN024ETA_at; Start 28; Stop 52
tatcctacttcaacagaaggttcat

SEQ ID NO: 181566 - DNA, 25 bp, Artificial
  probe
  misc_feature (1)..(25): SEQ ID NO: 7424; WAN024ETA_at; Start 33; Stop 57
tacttcaacagaaggttcattggtt

SEQ ID NO: 181567 - DNA, 25 bp, Artificial
  probe
  misc_feature (1)..(25): SEQ ID NO: 7424; WAN024ETA_at; Start 20; Stop 44
cctttctttatcctacttcaacaga

SEQ ID NO: 181568 - DNA, 25 bp, Artificial
  probe
  misc_feature (1)..(25): SEQ ID NO: 7424; WAN024ETA_at; Start 23; Stop 47
ttctttatcctacttcaacagaagg

SEQ ID NO: 181569 - DNA, 25 bp, Artificial
  probe
  misc_feature (1)..(25): SEQ ID NO: 7424; WAN024ETA_at; Start 25; Stop 49
ctttatcctacttcaacagaaggtt

SEQ ID NO: 181570 - DNA, 25 bp, Artificial
  probe
  misc_feature (1)..(25): SEQ ID NO: 7424; WAN024ETA_at; Start 8; Stop 32
gacataaactatcctttctttatcc

SEQ ID NO: 181571 - DNA, 25 bp, Artificial
  probe
  misc_feature (1)..(25): SEQ ID NO: 7424; WAN024ETA_at; Start 2; Stop 26
tgaagagacataaactatcctttct

SEQ ID NO: 181572 - DNA, 25 bp, Artificial
  probe
  misc_feature (1)..(25): SEQ ID NO: 7424; WAN024ETA_at; Start 54; Stop 78
ggttgattttccaattctcggtaca

SEQ ID NO: 181573 - DNA, 25 bp, Artificial
  probe
  misc_feature (1)..(25): SEQ ID NO: 7424; WAN024ETA_at; Start 30; Stop 54
tcctacttcaacagaaggttcattg

SEQ ID NO: 181574 - DNA, 25 bp, Artificial
  probe
  misc_feature (1)..(25): SEQ ID NO: 7424; WAN024ETA_at; Start 17; Stop 41
tatcctttctttatcctacttcaac

SEQ ID NO: 181575 - DNA, 25 bp, Artificial
  probe
  misc_feature (1)..(25): SEQ ID NO: 7424; WAN024ETA_at; Start 26; Stop 50
tttatcctacttcaacagaaggttc

SEQ ID NO: 181576 - DNA, 25 bp, Artificial
  probe
  misc_feature (1)..(25): SEQ ID NO: 7424; WAN024ETA_at; Start 50; Stop 74
cattggttgattttccaattctcgg

SEQ ID NO: 181577 - DNA, 25 bp, Artificial
  probe
  misc_feature (1)..(25): SEQ ID NO: 7424; WAN024ETA_at; Start 55; Stop 79
gttgattttccaattctcggtacaa

SEQ ID NO: 181578 - DNA, 25 bp, Artificial
  probe
  misc_feature (1)..(25): SEQ ID NO: 1093; WAN024ETB_at; Start 988; Stop 1012
aatgccatggttgcactcggtgtcg

SEQ ID NO: 181579 - DNA, 25 bp, Artificial
  probe
  misc_feature (1)..(25): SEQ ID NO: 1093; WAN024ETB_at; Start 339; Stop 363
tcagccagctgagtacttaaaaatc

SEQ ID NO: 181580 - DNA, 25 bp, Artificial
  probe
  misc_feature (1)..(25): SEQ ID NO: 1093; WAN024ETB_at; Start 834; Stop 858
aaaacgaggttatttgccagaagct

SEQ ID NO: 181581 - DNA, 25 bp, Artificial
  probe
  misc_feature (1)..(25): SEQ ID NO: 1093; WAN024ETB_at; Start 1129; Stop 1153
tcagtggcagtagcctttgtcttaa

SEQ ID NO: 181582 - DNA, 25 bp, Artificial
  probe
  misc_feature (1)..(25): SEQ ID NO: 1093; WAN024ETB_at; Start 973; Stop 997
gcggagaatcctttcaatgccatgg

SEQ ID NO: 181583 - DNA, 25 bp, Artificial
  probe
  misc_feature (1)..(25): SEQ ID NO: 1093; WAN024ETB_at; Start 127; Stop 151
gccttgcagttggttcgaaaccaag

SEQ ID NO: 181584 - DNA, 25 bp, Artificial
  probe
  misc_feature (1)..(25): SEQ ID NO: 1093; WAN024ETB_at; Start 210; Stop 234
ttttttgagaaatgagcgactaatc

SEQ ID NO: 181585 - DNA, 25 bp, Artificial
  probe
  misc_feature (1)..(25): SEQ ID NO: 1093; WAN024ETB_at; Start 438; Stop 462
gactcaaaatcaatggcttccccgt

SEQ ID NO: 181586 - DNA, 25 bp, Artificial
  probe
  misc_feature (1)..(25): SEQ ID NO: 1093; WAN024ETB_at; Start 595; Stop 619
tggttttcaaccattctggcgctcg

SEQ ID NO: 181587 - DNA, 25 bp, Artificial
  probe
  misc_feature (1)..(25): SEQ ID NO: 1093; WAN024ETB_at; Start 96; Stop 120
cagtgctattttaattgaagaaggc

SEQ ID NO: 181588 - DNA, 25 bp, Artificial
  probe
  misc_feature (1)..(25): SEQ ID NO: 1093; WAN024ETB_at; Start 1184; Stop 1208
tgtaccgagaattggaaaatcaacc

SEQ ID NO: 181589 - DNA, 25 bp, Artificial
  probe
  misc_feature (1)..(25): SEQ ID NO: 1093; WAN024ETB_at; Start 68; Stop 92
tgggcttgattgtggtctattcgac

SEQ ID NO: 181590 - DNA, 25 bp, Artificial
  probe
  misc_feature (1)..(25): SEQ ID NO: 1093; WAN024ETB_at; Start 475; Stop 499
tggcgattcgttctcctagttctga

SEQ ID NO: 181591 - DNA, 25 bp, Artificial
  probe
  misc_feature (1)..(25): SEQ ID NO: 1093; WAN024ETB_at; Start 753; Stop 777
tgcaggtcaccagttagctaattct

SEQ ID NO: 181592 - DNA, 25 bp, Artificial
  probe
  misc_feature (1)..(25): SEQ ID NO: 1093; WAN024ETB_at; Start 1114; Stop 1138
agtcttctagtcttatcagtggcag

SEQ ID NO: 181593 - DNA, 25 bp, Artificial
  probe
  misc_feature (1)..(25): SEQ ID NO: 1093; WAN024ETB_at; Start 456; Stop 480
tccccgtgcttttaatgattggcga

SEQ ID NO: 181594 - DNA, 25 bp, Artificial
  probe
  misc_feature (1)..(25): SEQ ID NO: 1093; WAN024ETB_at; Start 808; Stop 832
ggtctaggtcttggaaactcgattg

SEQ ID NO: 181595 - DNA, 25 bp, Artificial
  probe
  misc_feature (1)..(25): SEQ ID NO: 1093; WAN024ETB_at; Start 570; Stop 594
tacagttagtggaatcgcttatcgc

SEQ ID NO: 181596 - DNA, 25 bp, Artificial
  probe
  misc_feature (1)..(25): SEQ ID NO: 1093; WAN024ETB_at; Start 374; Stop 398
ggtatttagctcaccgattctccaa

SEQ ID NO: 181597 - DNA, 25 bp, Artificial
  probe
  misc_feature (1)..(25): SEQ ID NO: 1093; WAN024ETB_at; Start 740; Stop 764
ccgatcgtgctgatgcaggtcacca

SEQ ID NO: 181598 - DNA, 25 bp, Artificial
  probe
  misc_feature (1)..(25): SEQ ID NO: 1093; WAN024ETB_at; Start 1155; Stop 1179
tattgatgccagtgaaaaacgcgct

SEQ ID NO: 181599 - DNA, 25 bp, Artificial
  probe
  misc_feature (1)..(25): SEQ ID NO: 1093; WAN024ETB_at; Start 1197; Stop 1221
ggaaaatcaaccaatgaaccttctg

SEQ ID NO: 181600 - DNA, 25 bp, Artificial
  probe
  misc_feature (1)..(25): SEQ ID NO: 1093; WAN024ETB_at; Start 848; Stop 872
tgccagaagctcatacagactttgt

SEQ ID NO: 181601 - DNA, 25 bp, Artificial
  probe
  misc_feature (1)..(25): SEQ ID NO: 1093; WAN024ETB_at; Start 641; Stop 665
tcttgaccactatcagcctaatcgg

SEQ ID NO: 181602 - DNA, 25 bp, Artificial
  probe
  misc_feature (1)..(25): SEQ ID NO: 1093; WAN024ETB_at; Start 305; Stop 329
catacggttggatttcggttgcagg

SEQ ID NO: 181603 - DNA, 25 bp, Artificial
  probe
  misc_feature (1)..(25): SEQ ID NO: 1093; WAN024ETB_at; Start 1097; Stop 1121
tatcccagggtggaaatagtcttct

SEQ ID NO: 181604 - DNA, 25 bp, Artificial
  probe
  misc_feature (1)..(25): SEQ ID NO: 1093; WAN024ETB_at; Start 769; Stop 793
gctaattcttattttgccatggtca

SEQ ID NO: 181605 - DNA, 25 bp, Artificial
  probe
  misc_feature (1)..(25): SEQ ID NO: 1093; WAN024ETB_at; Start 657; Stop 681
cctaatcggtgttgagaccttttca

SEQ ID NO: 181606 - DNA, 25 bp, Artificial
  probe
  misc_feature (1)..(25): SEQ ID NO: 1093; WAN024ETB_at; Start 727; Stop 751
tttaatccttttgccgatcgtgctg

SEQ ID NO: 181607 - DNA, 25 bp, Artificial
  probe
  misc_feature (1)..(25): SEQ ID NO: 1093; WAN024ETB_at; Start 1038; Stop 1062
tgtcaatatcggagggatttcgggc

SEQ ID NO: 181608 - DNA, 25 bp, Artificial
  probe
  misc_feature (1)..(25): SEQ ID NO: 1093; WAN024ETB_at; Start 392; Stop 416
tctccaaacagcaagaagaaatagc

SEQ ID NO: 181609 - DNA, 25 bp, Artificial
  probe
  misc_feature (1)..(25): SEQ ID NO: 1093; WAN024ETB_at; Start 81; Stop 105
ggtctattcgaccaccagtgctatt

SEQ ID NO: 181610 - DNA, 25 bp, Artificial
  probe
  misc_feature (1)..(25): SEQ ID NO: 1093; WAN024ETB_at; Start 1053; Stop 1077
gatttcgggcttgattccatctaca

SEQ ID NO: 181611 - DNA, 25 bp, Artificial
  probe
  misc_feature (1)..(25): SEQ ID NO: 1093; WAN024ETB_at; Start 518; Stop 542
tccctgatttaggaaatgcgactat

SEQ ID NO: 181612 - DNA, 25 bp, Artificial
  probe
  misc_feature (1)..(25): SEQ ID NO: 2304; WAN024ETC_at; Start 515; Stop 539
ctgttcagtattgggagttgcagaa

SEQ ID NO: 181613 - DNA, 25 bp, Artificial
  probe
  misc_feature (1)..(25): SEQ ID NO: 2304; WAN024ETC_at; Start 20; Stop 44
cgcttagccgaaaagaaatctatca

SEQ ID NO: 181614 - DNA, 25 bp, Artificial
  probe
  misc_feature (1)..(25): SEQ ID NO: 2304; WAN024ETC_at; Start 338; Stop 362
cagctattggcttttgtaatgagaa

SEQ ID NO: 181615 - DNA, 25 bp, Artificial
  probe
  misc_feature (1)..(25): SEQ ID NO: 2304; WAN024ETC_at; Start 360; Stop 384
gaagttaaaactatatttagcaagc

SEQ ID NO: 181616 - DNA, 25 bp, Artificial
  probe
  misc_feature (1)..(25): SEQ ID NO: 2304; WAN024ETC_at; Start 463; Stop 487
gcgaaagaattaatccaatcaggtc

SEQ ID NO: 181617 - DNA, 25 bp, Artificial
  probe
  misc_feature (1)..(25): SEQ ID NO: 2304; WAN024ETC_at; Start 298; Stop 322
gcctatacagggaaattagaactct

SEQ ID NO: 181618 - DNA, 25 bp, Artificial
  probe
  misc_feature (1)..(25): SEQ ID NO: 2304; WAN024ETC_at; Start 148; Stop 172
gcagtaacggatgaacaaaaactta

SEQ ID NO: 181619 - DNA, 25 bp, Artificial
  probe
  misc_feature (1)..(25): SEQ ID NO: 2304; WAN024ETC_at; Start 133; Stop 157
gctgtctgtgttttagcagtaacgg

SEQ ID NO: 181620 - DNA, 25 bp, Artificial
  probe
  misc_feature (1)..(25): SEQ ID NO: 2304; WAN024ETC_at; Start 208; Stop 232
gtctcttacgaaattccagccggaa

SEQ ID NO: 181621 - DNA, 25 bp, Artificial
  probe
  misc_feature (1)..(25): SEQ ID NO: 2304; WAN024ETC_at; Start 162; Stop 186
acaaaaacttatcttggtcaagcag

SEQ ID NO: 181622 - DNA, 25 bp, Artificial
  probe
  misc_feature (1)..(25): SEQ ID NO: 2304; WAN024ETC_at; Start 375; Stop 399
tttagcaagcgatttgacaaaagtg

SEQ ID NO: 181623 - DNA, 25 bp, Artificial
  probe
  misc_feature (1)..(25): SEQ ID NO: 2304; WAN024ETC_at; Start 82; Stop 106
ttaccagaaggcaagggaactgccc

SEQ ID NO: 181624 - DNA, 25 bp, Artificial
  probe
  misc_feature (1)..(25): SEQ ID NO: 2304; WAN024ETC_at; Start 389; Stop 413
tgacaaaagtggaaaatccgcgtcc

SEQ ID NO: 181625 - DNA, 25 bp, Artificial
  probe
  misc_feature (1)..(25): SEQ ID NO: 2304; WAN024ETC_at; Start 305; Stop 329
cagggaaattagaactcttgtacga

SEQ ID NO: 181626 - DNA, 25 bp, Artificial
  probe
  misc_feature (1)..(25): SEQ ID NO: 2304; WAN024ETC_at; Start 276; Stop 300
tcgtgaattagaggaagaaacagcc

SEQ ID NO: 181627 - DNA, 25 bp, Artificial
  probe
  misc_feature (1)..(25): SEQ ID NO: 2304; WAN024ETC_at; Start 70; Stop 94
gatcaggttgaattaccagaaggca

SEQ ID NO: 181628 - DNA, 25 bp, Artificial
  probe
  misc_feature (1)..(25): SEQ ID NO: 2304; WAN024ETC_at; Start 411; Stop 435
tccgcaggatgaggatgaaaccttg

SEQ ID NO: 181629 - DNA, 25 bp, Artificial
  probe
  misc_feature (1)..(25): SEQ ID NO: 2304; WAN024ETC_at; Start 418; Stop 442
gatgaggatgaaaccttggaagtcc

SEQ ID NO: 181630 - DNA, 25 bp, Artificial
  probe
  misc_feature (1)..(25): SEQ ID NO: 2304; WAN024ETC_at; Start 29; Stop 53
gaaaagaaatctatcaaggaccaat

SEQ ID NO: 181631 - DNA, 25 bp, Artificial
  probe
  misc_feature (1)..(25): SEQ ID NO: 2304; WAN024ETC_at; Start 40; Stop 64
tatcaaggaccaatatttaaactgg

SEQ ID NO: 181632 - DNA, 25 bp, Artificial
  probe
  misc_feature (1)..(25): SEQ ID NO: 2304; WAN024ETC_at; Start 286; Stop 310
gaggaagaaacagcctatacaggga

SEQ ID NO: 181633 - DNA, 25 bp, Artificial
  probe
  misc_feature (1)..(25): SEQ ID NO: 2304; WAN024ETC_at; Start 55; Stop 79
tttaaactggtccaagatcaggttg

SEQ ID NO: 181634 - DNA, 25 bp, Artificial
  probe
  misc_feature (1)..(25): SEQ ID NO: 2304; WAN024ETC_at; Start 324; Stop 348
gtacgatttttattcagctattggc

SEQ ID NO: 181635 - DNA, 25 bp, Artificial
  probe
  misc_feature (1)..(25): SEQ ID NO: 2304; WAN024ETC_at; Start 445; Stop 469
gaagtgagcttagaagaagcgaaag

SEQ ID NO: 181636 - DNA, 25 bp, Artificial
  probe
  misc_feature (1)..(25): SEQ ID NO: 2304; WAN024ETC_at; Start 176; Stop 200
tggtcaagcagtaccgcaaagctat

SEQ ID NO: 181637 - DNA, 25 bp, Artificial
  probe
  misc_feature (1)..(25): SEQ ID NO: 2304; WAN024ETC_at; Start 394; Stop 418
aaagtggaaaatccgcgtccgcagg

SEQ ID NO: 181638 - DNA, 25 bp, Artificial
  probe
  misc_feature (1)..(25): SEQ ID NO: 2304; WAN024ETC_at; Start 491; Stop 515
tctgtgatgccaagacaattatggc

SEQ ID NO: 181639 - DNA, 25 bp, Artificial
  probe
  misc_feature (1)..(25): SEQ ID NO: 2304; WAN024ETC_at; Start 478; Stop 502
caatcaggtcatatctgtgatgcca

SEQ ID NO: 181640 - DNA, 25 bp, Artificial
  probe
  misc_feature (1)..(25): SEQ ID NO: 2304; WAN024ETC_at; Start 405; Stop 429
tccgcgtccgcaggatgaggatgaa

SEQ ID NO: 181641 - DNA, 25 bp, Artificial
  probe
  misc_feature (1)..(25): SEQ ID NO: 2304; WAN024ETC_at; Start 440; Stop 464
tccttgaagtgagcttagaagaagc

SEQ ID NO: 181642 - DNA, 25 bp, Artificial
  probe
  misc_feature (1)..(25): SEQ ID NO: 2304; WAN024ETC_at; Start 429; Stop 453
aaccttggaagtccttgaagtgagc

SEQ ID NO: 181643 - DNA, 25 bp, Artificial
  probe
  misc_feature (1)..(25): SEQ ID NO: 2304; WAN024ETC_at; Start 500; Stop 524
ccaagacaattatggctgttcagta

SEQ ID NO: 181644 - DNA, 25 bp, Artificial
  probe
  misc_feature (1)..(25): SEQ ID NO: 2304; WAN024ETC_at; Start 265; Stop 289
gcagctgcccttcgtgaattagagg

SEQ ID NO: 181645 - DNA, 25 bp, Artificial
  probe
  misc_feature (1)..(25): SEQ ID NO: 2304; WAN024ETC_at; Start 182; Stop 206
agcagtaccgcaaagctatcgaggc

SEQ ID NO: 181646 - DNA, 25 bp, Artificial
  probe
  misc_feature (1)..(25): SEQ ID NO: 1859; WAN024ETD_at; Start 337; Stop 361
tttgaagtggattttgctccagttg

SEQ ID NO: 181647 - DNA, 25 bp, Artificial
  probe
  misc_feature (1)..(25): SEQ ID NO: 1859; WAN024ETD_at; Start 1070; Stop 1094
atgatatgagtcaggtcgagcagtt

SEQ ID NO: 181648 - DNA, 25 bp, Artificial
  probe
  misc_feature (1)..(25): SEQ ID NO: 1859; WAN024ETD_at; Start 454; Stop 478
ggctctatccaacctattgaggcta

SEQ ID NO: 181649 - DNA, 25 bp, Artificial
  probe
  misc_feature (1)..(25): SEQ ID NO: 1859; WAN024ETD_at; Start 934; Stop 958
gaagactatgatattttcatctcaa

SEQ ID NO: 181650 - DNA, 25 bp, Artificial
  probe
  misc_feature (1)..(25): SEQ ID NO: 1859; WAN024ETD_at; Start 922; Stop 946
gttcacgcctttgaagactatgata

SEQ ID NO: 181651 - DNA, 25 bp, Artificial
  probe
  misc_feature (1)..(25): SEQ ID NO: 1859; WAN024ETD_at; Start 43; Stop 67
gaagcccttgaaacctatatgcagg

SEQ ID NO: 181652 - DNA, 25 bp, Artificial
  probe
  misc_feature (1)..(25): SEQ ID NO: 1859; WAN024ETD_at; Start 341; Stop 365
aagtggattttgctccagttgataa

SEQ ID NO: 181653 - DNA, 25 bp, Artificial
  probe
  misc_feature (1)..(25): SEQ ID NO: 1859; WAN024ETD_at; Start 790; Stop 814
actgggcagatgaaggcagtgattc

SEQ ID NO: 181654 - DNA, 25 bp, Artificial
  probe
  misc_feature (1)..(25): SEQ ID NO: 1859; WAN024ETD_at; Start 472; Stop 496
gaggctatttcagaattcttggcag

SEQ ID NO: 181655 - DNA, 25 bp, Artificial
  probe
  misc_feature (1)..(25): SEQ ID NO: 1859; WAN024ETD_at; Start 774; Stop 798
tatctttaggagcaagactgggcag

SEQ ID NO: 181656 - DNA, 25 bp, Artificial
  probe
  misc_feature (1)..(25): SEQ ID NO: 1859; WAN024ETD_at; Start 772; Stop 796
gatatctttaggagcaagactgggc

SEQ ID NO: 181657 - DNA, 25 bp, Artificial
  probe
  misc_feature (1)..(25): SEQ ID NO: 1859; WAN024ETD_at; Start 874; Stop 898
cctcatattctgacttttggaatca

SEQ ID NO: 181658 - DNA, 25 bp, Artificial
  probe
  misc_feature (1)..(25): SEQ ID NO: 1859; WAN024ETD_at; Start 778; Stop 802
tttaggagcaagactgggcagatga

SEQ ID NO: 181659 - DNA, 25 bp, Artificial
  probe
  misc_feature (1)..(25): SEQ ID NO: 1859; WAN024ETD_at; Start 436; Stop 460
gctgtgaacaatgaaatcggctcta

SEQ ID NO: 181660 - DNA, 25 bp, Artificial
  probe
  misc_feature (1)..(25): SEQ ID NO: 1859; WAN024ETD_at; Start 155; Stop 179
ttgcagatttaatcggtaagaaaag

SEQ ID NO: 181661 - DNA, 25 bp, Artificial
  probe
  misc_feature (1)..(25): SEQ ID NO: 1859; WAN024ETD_at; Start 925; Stop 949
cacgcctttgaagactatgatattt

SEQ ID NO: 181662 - DNA, 25 bp, Artificial
  probe
  misc_feature (1)..(25): SEQ ID NO: 1859; WAN024ETD_at; Start 462; Stop 486
ccaacctattgaggctatttcagaa

SEQ ID NO: 181663 - DNA, 25 bp, Artificial
  probe
  misc_feature (1)..(25): SEQ ID NO: 1859; WAN024ETD_at; Start 432; Stop 456
catggctgtgaacaatgaaatcggc

SEQ ID NO: 181664 - DNA, 25 bp, Artificial
  probe
  misc_feature (1)..(25): SEQ ID NO: 1859; WAN024ETD_at; Start 444; Stop 468
caatgaaatcggctctatccaacct

SEQ ID NO: 181665 - DNA, 25 bp, Artificial
  probe
  misc_feature (1)..(25): SEQ ID NO: 1859; WAN024ETD_at; Start 548; Stop 572
ttccgactgaaaagtatctgacaga

SEQ ID NO: 181666 - DNA, 25 bp, Artificial
  probe
  misc_feature (1)..(25): SEQ ID NO: 1859; WAN024ETD_at; Start 700; Stop 724
cgttcgacaactgaaaatgtggcag

SEQ ID NO: 181667 - DNA, 25 bp, Artificial
  probe
  misc_feature (1)..(25): SEQ ID NO: 1859; WAN024ETD_at; Start 479; Stop 503
tttcagaattcttggcagacaagcc

SEQ ID NO: 181668 - DNA, 25 bp, Artificial
  probe
  misc_feature (1)..(25): SEQ ID NO: 1859; WAN024ETD_at; Start 768; Stop 792
gctagatatctttaggagcaagact

SEQ ID NO: 181669 - DNA, 25 bp, Artificial
  probe
  misc_feature (1)..(25): SEQ ID NO: 1859; WAN024ETD_at; Start 1066; Stop 1090
gaaaatgatatgagtcaggtcgagc

SEQ ID NO: 181670 - DNA, 25 bp, Artificial
  probe
  misc_feature (1)..(25): SEQ ID NO: 1859; WAN024ETD_at; Start 1117; Stop 1141
tacaatcaaactagaaaagtaagat

SEQ ID NO: 181671 - DNA, 25 bp, Artificial
  probe
  misc_feature (1)..(25): SEQ ID NO: 1859; WAN024ETD_at; Start 440; Stop 464
tgaacaatgaaatcggctctatcca

SEQ ID NO: 181672 - DNA, 25 bp, Artificial
  probe
  misc_feature (1)..(25): SEQ ID NO: 1859; WAN024ETD_at; Start 763; Stop 787
gaaaagctagatatctttaggagca

SEQ ID NO: 181673 - DNA, 25 bp, Artificial
  probe
  misc_feature (1)..(25): SEQ ID NO: 1859; WAN024ETD_at; Start 475; Stop 499
gctatttcagaattcttggcagaca

SEQ ID NO: 181674 - DNA, 25 bp, Artificial
  probe
  misc_feature (1)..(25): SEQ ID NO: 1859; WAN024ETD_at; Start 757; Stop 781
tctatggaaaagctagatatcttta

SEQ ID NO: 181675 - DNA, 25 bp, Artificial
  probe
  misc_feature (1)..(25): SEQ ID NO: 1859; WAN024ETD_at; Start 448; Stop 472
gaaatcggctctatccaacctattg

SEQ ID NO: 181676 - DNA, 25 bp, Artificial
  probe
  misc_feature (1)..(25): SEQ ID NO: 1859; WAN024ETD_at; Start 148; Stop 172
caacagattgcagatttaatcggta

SEQ ID NO: 181677 - DNA, 25 bp, Artificial
  probe
  misc_feature (1)..(25): SEQ ID NO: 1859; WAN024ETD_at; Start 701; Stop 725
gttcgacaactgaaaatgtggcagg

SEQ ID NO: 181678 - DNA, 25 bp, Artificial
  probe
  misc_feature (1)..(25): SEQ ID NO: 1859; WAN024ETD_at; Start 151; Stop 175
cagattgcagatttaatcggtaaga

SEQ ID NO: 181679 - DNA, 25 bp, Artificial
  probe
  misc_feature (1)..(25): SEQ ID NO: 1859; WAN024ETD_at; Start 551; Stop 575
cgactgaaaagtatctgacagaacg

SEQ ID NO: 181680 - DNA, 25 bp, Artificial
  probe
  misc_feature (1)..(25): SEQ ID NO: 6655; WAN024ETE_at; Start 40; Stop 64
aatttatttctacgaaacatgagtt

SEQ ID NO: 181681 - DNA, 25 bp, Artificial
  probe
  misc_feature (1)..(25): SEQ ID NO: 6655; WAN024ETE_at; Start 4; Stop 28
atggttaagagtaaaatttctgtgg

SEQ ID NO: 181682 - DNA, 25 bp, Artificial
  probe
  misc_feature (1)..(25): SEQ ID NO: 6655; WAN024ETE_at; Start 37; Stop 61
aataatttatttctacgaaacatga

SEQ ID NO: 181683 - DNA, 25 bp, Artificial
  probe
  misc_feature (1)..(25): SEQ ID NO: 6655; WAN024ETE_at; Start 41; Stop 65
atttatttctacgaaacatgagtta

SEQ ID NO: 181684 - DNA, 25 bp, Artificial
  probe
  misc_feature (1)..(25): SEQ ID NO: 6655; WAN024ETE_at; Start 52; Stop 76
cgaaacatgagttacctcccttact

SEQ ID NO: 181685 - DNA, 25 bp, Artificial
  probe
  misc_feature (1)..(25): SEQ ID NO: 6655; WAN024ETE_at; Start 47; Stop 71
ttctacgaaacatgagttacctccc

SEQ ID NO: 181686 - DNA, 25 bp, Artificial
  probe
  misc_feature (1)..(25): SEQ ID NO: 6655; WAN024ETE_at; Start 49; Stop 73
ctacgaaacatgagttacctccctt

SEQ ID NO: 181687 - DNA, 25 bp, Artificial
  probe
  misc_feature (1)..(25): SEQ ID NO: 6655; WAN024ETE_at; Start 9; Stop 33
taagagtaaaatttctgtggtccaa

SEQ ID NO: 181688 - DNA, 25 bp, Artificial
  probe
  misc_feature (1)..(25): SEQ ID NO: 6655; WAN024ETE_at; Start 36; Stop 60
aaataatttatttctacgaaacatg

SEQ ID NO: 181689 - DNA, 25 bp, Artificial
  probe
  misc_feature (1)..(25): SEQ ID NO: 6655; WAN024ETE_at; Start 42; Stop 66
tttatttctacgaaacatgagttac

SEQ ID NO: 181690 - DNA, 25 bp, Artificial
  probe
  misc_feature (1)..(25): SEQ ID NO: 6655; WAN024ETE_at; Start 39; Stop 63
taatttatttctacgaaacatgagt

SEQ ID NO: 181691 - DNA, 25 bp, Artificial
  probe
  misc_feature (1)..(25): SEQ ID NO: 6655; WAN024ETE_at; Start 44; Stop 68
tatttctacgaaacatgagttacct

SEQ ID NO: 181692 - DNA, 25 bp, Artificial
  probe
  misc_feature (1)..(25): SEQ ID NO: 6655; WAN024ETE_at; Start 56; Stop 80
acatgagttacctcccttactttat

SEQ ID NO: 181693 - DNA, 25 bp, Artificial
  probe
  misc_feature (1)..(25): SEQ ID NO: 6655; WAN024ETE_at; Start 2; Stop 26
tgatggttaagagtaaaatttctgt

SEQ ID NO: 181694 - DNA, 25 bp, Artificial
  probe
  misc_feature (1)..(25): SEQ ID NO: 6655; WAN024ETE_at; Start 3; Stop 27
gatggttaagagtaaaatttctgtg

SEQ ID NO: 181695 - DNA, 25 bp, Artificial
  probe
  misc_feature (1)..(25): SEQ ID NO: 6655; WAN024ETE_at; Start 57; Stop 81
catgagttacctcccttactttatt

SEQ ID NO: 181696 - DNA, 25 bp, Artificial
  probe
  misc_feature (1)..(25): SEQ ID NO: 6655; WAN024ETE_at; Start 45; Stop 69
atttctacgaaacatgagttacctc

SEQ ID NO: 181697 - DNA, 25 bp, Artificial
  probe
  misc_feature (1)..(25): SEQ ID NO: 6655; WAN024ETE_at; Start 50; Stop 74
tacgaaacatgagttacctccctta

SEQ ID NO: 181698 - DNA, 25 bp, Artificial
  probe
  misc_feature (1)..(25): SEQ ID NO: 6655; WAN024ETE_at; Start 38; Stop 62
ataatttatttctacgaaacatgag

SEQ ID NO: 181699 - DNA, 25 bp, Artificial
  probe
  misc_feature (1)..(25): SEQ ID NO: 6655; WAN024ETE_at; Start 48; Stop 72
tctacgaaacatgagttacctccct

SEQ ID NO: 181700 - DNA, 25 bp, Artificial
  probe
  misc_feature (1)..(25): SEQ ID NO: 6655; WAN024ETE_at; Start 43; Stop 67
ttatttctacgaaacatgagttacc

SEQ ID NO: 181701 - DNA, 25 bp, Artificial
  probe
  misc_feature (1)..(25): SEQ ID NO: 6655; WAN024ETE_at; Start 46; Stop 70
tttctacgaaacatgagttacctcc

SEQ ID NO: 181702 - DNA, 25 bp, Artificial
  probe
  misc_feature (1)..(25): SEQ ID NO: 6655; WAN024ETE_at; Start 1; Stop 25
atgatggttaagagtaaaatttctg

SEQ ID NO: 181703 - DNA, 25 bp, Artificial
  probe
  misc_feature (1)..(25): SEQ ID NO: 6655; WAN024ETE_at; Start 8; Stop 32
ttaagagtaaaatttctgtggtcca

SEQ ID NO: 181704 - DNA, 25 bp, Artificial
  probe
  misc_feature (1)..(25): SEQ ID NO: 5170; WAN024ETF_at; Start 280; Stop 304
caaagtatgactacaaaagtcggta

SEQ ID NO: 181705 - DNA, 25 bp, Artificial
  probe
  misc_feature (1)..(25): SEQ ID NO: 5170; WAN024ETF_at; Start 460; Stop 484
aaaagattgtctgtgaaacctggtt

SEQ ID NO: 181706 - DNA, 25 bp, Artificial
  probe
  misc_feature (1)..(25): SEQ ID NO: 5170; WAN024ETF_at; Start 453; Stop 477
gatgtctaaaagattgtctgtgaaa

SEQ ID NO: 181707 - DNA, 25 bp, Artificial
  probe
  misc_feature (1)..(25): SEQ ID NO: 5170; WAN024ETF_at; Start 455; Stop 479
tgtctaaaagattgtctgtgaaacc

SEQ ID NO: 181708 - DNA, 25 bp, Artificial
  probe
  misc_feature (1)..(25): SEQ ID NO: 5170; WAN024ETF_at; Start 28; Stop 52
aatattttagatagatttttggcgt

SEQ ID NO: 181709 - DNA, 25 bp, Artificial
  probe
  misc_feature (1)..(25): SEQ ID NO: 5170; WAN024ETF_at; Start 279; Stop 303
tcaaagtatgactacaaaagtcggt

SEQ ID NO: 181710 - DNA, 25 bp, Artificial
  probe
  misc_feature (1)..(25): SEQ ID NO: 5170; WAN024ETF_at; Start 571; Stop 595
gtatctttcaagactgatttcttgc

SEQ ID NO: 181711 - DNA, 25 bp, Artificial
  probe
  misc_feature (1)..(25): SEQ ID NO: 5170; WAN024ETF_at; Start 285; Stop 309
tatgactacaaaagtcggtaaagtg

SEQ ID NO: 181712 - DNA, 25 bp, Artificial
  probe
  misc_feature (1)..(25): SEQ ID NO: 5170; WAN024ETF_at; Start 450; Stop 474
aaagatgtctaaaagattgtctgtg

SEQ ID NO: 181713 - DNA, 25 bp, Artificial
  probe
  misc_feature (1)..(25): SEQ ID NO: 5170; WAN024ETF_at; Start 459; Stop 483
taaaagattgtctgtgaaacctggt

SEQ ID NO: 181714 - DNA, 25 bp, Artificial
  probe
  misc_feature (1)..(25): SEQ ID NO: 5170; WAN024ETF_at; Start 464; Stop 488
gattgtctgtgaaacctggtttgct

SEQ ID NO: 181715 - DNA, 25 bp, Artificial
  probe
  misc_feature (1)..(25): SEQ ID NO: 5170; WAN024ETF_at; Start 480; Stop 504
tggtttgctttgttattggcaagtt

SEQ ID NO: 181716 - DNA, 25 bp, Artificial
  probe
  misc_feature (1)..(25): SEQ ID NO: 5170; WAN024ETF_at; Start 467; Stop 491
tgtctgtgaaacctggtttgctttg

SEQ ID NO: 181717 - DNA, 25 bp, Artificial
  probe
  misc_feature (1)..(25): SEQ ID NO: 5170; WAN024ETF_at; Start 108; Stop 132
tatttggatagaagatccaggagat

SEQ ID NO: 181718 - DNA, 25 bp, Artificial
  probe
  misc_feature (1)..(25): SEQ ID NO: 5170; WAN024ETF_at; Start 257; Stop 281
gtctaaattttaaagaacattctca

SEQ ID NO: 181719 - DNA, 25 bp, Artificial
  probe
  misc_feature (1)..(25): SEQ ID NO: 5170; WAN024ETF_at; Start 476; Stop 500
aacctggtttgctttgttattggca

SEQ ID NO: 181720 - DNA, 25 bp, Artificial
  probe
  misc_feature (1)..(25): SEQ ID NO: 5170; WAN024ETF_at; Start 448; Stop 472
ttaaagatgtctaaaagattgtctg

SEQ ID NO: 181721 - DNA, 25 bp, Artificial
  probe
  misc_feature (1)..(25): SEQ ID NO: 5170; WAN024ETF_at; Start 478; Stop 502
cctggtttgctttgttattggcaag

SEQ ID NO: 181722 - DNA, 25 bp, Artificial
  probe
  misc_feature (1)..(25): SEQ ID NO: 5170; WAN024ETF_at; Start 457; Stop 481
tctaaaagattgtctgtgaaacctg

SEQ ID NO: 181723 - DNA, 25 bp, Artificial
  probe
  misc_feature (1)..(25): SEQ ID NO: 5170; WAN024ETF_at; Start 274; Stop 298
cattctcaaagtatgactacaaaag

SEQ ID NO: 181724 - DNA, 25 bp, Artificial
  probe
  misc_feature (1)..(25): SEQ ID NO: 5170; WAN024ETF_at; Start 574; Stop 598
tctttcaagactgatttcttgctta

SEQ ID NO: 181725 - DNA, 25 bp, Artificial
  probe
  misc_feature (1)..(25): SEQ ID NO: 5170; WAN024ETF_at; Start 463; Stop 487
agattgtctgtgaaacctggtttgc

SEQ ID NO: 181726 - DNA, 25 bp, Artificial
  probe
  misc_feature (1)..(25): SEQ ID NO: 5170; WAN024ETF_at; Start 277; Stop 301
tctcaaagtatgactacaaaagtcg

SEQ ID NO: 181727 - DNA, 25 bp, Artificial
  probe
  misc_feature (1)..(25): SEQ ID NO: 5170; WAN024ETF_at; Start 563; Stop 587
ttgataatgtatctttcaagactga

SEQ ID NO: 181728 - DNA, 25 bp, Artificial
  probe
  misc_feature (1)..(25): SEQ ID NO: 5170; WAN024ETF_at; Start 288; Stop 312
gactacaaaagtcggtaaagtgata

SEQ ID NO: 181729 - DNA, 25 bp, Artificial
  probe
  misc_feature (1)..(25): SEQ ID NO: 5170; WAN024ETF_at; Start 271; Stop 295
gaacattctcaaagtatgactacaa

SEQ ID NO: 181730 - DNA, 25 bp, Artificial
  probe
  misc_feature (1)..(25): SEQ ID NO: 5170; WAN024ETF_at; Start 578; Stop 602
tcaagactgatttcttgcttatttt

SEQ ID NO: 181731 - DNA, 25 bp, Artificial
  probe
  misc_feature (1)..(25): SEQ ID NO: 5170; WAN024ETF_at; Start 290; Stop 314
ctacaaaagtcggtaaagtgatacg

SEQ ID NO: 181732 - DNA, 25 bp, Artificial
  probe
  misc_feature (1)..(25): SEQ ID NO: 5170; WAN024ETF_at; Start 473; Stop 497
tgaaacctggtttgctttgttattg

SEQ ID NO: 181733 - DNA, 25 bp, Artificial
  probe
  misc_feature (1)..(25): SEQ ID NO: 5170; WAN024ETF_at; Start 283; Stop 307
agtatgactacaaaagtcggtaaag

SEQ ID NO: 181734 - DNA, 25 bp, Artificial
  probe
  misc_feature (1)..(25): SEQ ID NO: 5170; WAN024ETF_at; Start 567; Stop 591
taatgtatctttcaagactgatttc

SEQ ID NO: 181735 - DNA, 25 bp, Artificial
  probe
  misc_feature (1)..(25): SEQ ID NO: 5170; WAN024ETF_at; Start 458; Stop 482
ctaaaagattgtctgtgaaacctgg

SEQ ID NO: 181736 - DNA, 25 bp, Artificial
  probe
  misc_feature (1)..(25): SEQ ID NO: 5170; WAN024ETF_at; Start 462; Stop 486
aagattgtctgtgaaacctggtttg

SEQ ID NO: 181737 - DNA, 25 bp, Artificial
  probe
  misc_feature (1)..(25): SEQ ID NO: 5170; WAN024ETF_at; Start 267; Stop 291
taaagaacattctcaaagtatgact

SEQ ID NO: 181738 - DNA, 25 bp, Artificial
  probe
  misc_feature (1)..(25): SEQ ID NO: 3083; WAN024ETG_at; Start 600; Stop 624
ggatcgcttgcatattgcaggctta

SEQ ID NO: 181739 - DNA, 25 bp, Artificial
  probe
  misc_feature (1)..(25): SEQ ID NO: 3083; WAN024ETG_at; Start 381; Stop 405
ccagaatttggatgtagaagctaca

SEQ ID NO: 181740 - DNA, 25 bp, Artificial
  probe
  misc_feature (1)..(25): SEQ ID NO: 3083; WAN024ETG_at; Start 672; Stop 696
gattgacgcaatcattataggttgt

SEQ ID NO: 181741 - DNA, 25 bp, Artificial
  probe
  misc_feature (1)..(25): SEQ ID NO: 3083; WAN024ETG_at; Start 993; Stop 1017
tggaatgattgtcgcagtgccaacc

SEQ ID NO: 181742 - DNA, 25 bp, Artificial
  probe
  misc_feature (1)..(25): SEQ ID NO: 3083; WAN024ETG_at; Start 59; Stop 83
tcttttacctatggagacagatggg

SEQ ID NO: 181743 - DNA, 25 bp, Artificial
  probe
  misc_feature (1)..(25): SEQ ID NO: 3083; WAN024ETG_at; Start 626; Stop 650
taaagaatttaaatgcgacgattgc

SEQ ID NO: 181744 - DNA, 25 bp, Artificial
  probe
  misc_feature (1)..(25): SEQ ID NO: 3083; WAN024ETG_at; Start 89; Stop 113
tgattaacccttttgttagcgtgct

SEQ ID NO: 181745 - DNA, 25 bp, Artificial
  probe
  misc_feature (1)..(25): SEQ ID NO: 3083; WAN024ETG_at; Start 370; Stop 394
tatcctgcgctccagaatttggatg

SEQ ID NO: 181746 - DNA, 25 bp, Artificial
  probe
  misc_feature (1)..(25): SEQ ID NO: 3083; WAN024ETG_at; Start 337; Stop 361
cgagtacaagacttaatcatagact

SEQ ID NO: 181747 - DNA, 25 bp, Artificial
  probe
  misc_feature (1)..(25): SEQ ID NO: 3083; WAN024ETG_at; Start 930; Stop 954
gaaggttcatccaatcacgatttta

SEQ ID NO: 181748 - DNA, 25 bp, Artificial
  probe
  misc_feature (1)..(25): SEQ ID NO: 3083; WAN024ETG_at; Start 657; Stop 681
tattagtggagtttcgattgacgca

SEQ ID NO: 181749 - DNA, 25 bp, Artificial
  probe
  misc_feature (1)..(25): SEQ ID NO: 3083; WAN024ETG_at; Start 889; Stop 913
gatggcaatatcttatatcctcgaa

SEQ ID NO: 181750 - DNA, 25 bp, Artificial
  probe
  misc_feature (1)..(25): SEQ ID NO: 3083; WAN024ETG_at; Start 476; Stop 500
ggagcgtcttgtcagctcttatcag

SEQ ID NO: 181751 - DNA, 25 bp, Artificial
  probe
  misc_feature (1)..(25): SEQ ID NO: 3083; WAN024ETG_at; Start 764; Stop 788
tagccaatttaattccttatgtggg

SEQ ID NO: 181752 - DNA, 25 bp, Artificial
  probe
  misc_feature (1)..(25): SEQ ID NO: 3083; WAN024ETG_at; Start 356; Stop 380
tagacttatctaattatcctgcgct

SEQ ID NO: 181753 - DNA, 25 bp, Artificial
  probe
  misc_feature (1)..(25): SEQ ID NO: 3083; WAN024ETG_at; Start 799; Stop 823
ggtttgattcctatgatcatcgcaa

SEQ ID NO: 181754 - DNA, 25 bp, Artificial
  probe
  misc_feature (1)..(25): SEQ ID NO: 3083; WAN024ETG_at; Start 557; Stop 581
gacataaattcttgcccatgcttga

SEQ ID NO: 181755 - DNA, 25 bp, Artificial
  probe
  misc_feature (1)..(25): SEQ ID NO: 3083; WAN024ETG_at; Start 642; Stop 666
gacgattgctcgctatattagtgga

SEQ ID NO: 181756 - DNA, 25 bp, Artificial
  probe
  misc_feature (1)..(25): SEQ ID NO: 3083; WAN024ETG_at; Start 747; Stop 771
tgccattttttctggtgtagccaat

SEQ ID NO: 181757 - DNA, 25 bp, Artificial
  probe
  misc_feature (1)..(25): SEQ ID NO: 3083; WAN024ETG_at; Start 393; Stop 417
tgtagaagctacaattcagcagtta

SEQ ID NO: 181758 - DNA, 25 bp, Artificial
  probe
  misc_feature (1)..(25): SEQ ID NO: 3083; WAN024ETG_at; Start 194; Stop 218
tctgtaaactcaatcgtttgcttgg

SEQ ID NO: 181759 - DNA, 25 bp, Artificial
  probe
  misc_feature (1)..(25): SEQ ID NO: 3083; WAN024ETG_at; Start 225; Stop 249
aattaccttgtgtactttggtctgg

SEQ ID NO: 181760 - DNA, 25 bp, Artificial
  probe
  misc_feature (1)..(25): SEQ ID NO: 3083; WAN024ETG_at; Start 322; Stop 346
caaactatttatagtcgagtacaag

SEQ ID NO: 181761 - DNA, 25 bp, Artificial
  probe
  misc_feature (1)..(25): SEQ ID NO: 3083; WAN024ETG_at; Start 452; Stop 476
taaatagcgtatcaaatagtgtggg

SEQ ID NO: 181762 - DNA, 25 bp, Artificial
  probe
  misc_feature (1)..(25): SEQ ID NO: 3083; WAN024ETG_at; Start 917; Stop 941
taggaagtgttatgaaggttcatcc

SEQ ID NO: 181763 - DNA, 25 bp, Artificial
  probe
  misc_feature (1)..(25): SEQ ID NO: 3083; WAN024ETG_at; Start 257; Stop 281
tcataggtgttgtctatctcttacc

SEQ ID NO: 181764 - DNA, 25 bp, Artificial
  probe
  misc_feature (1)..(25): SEQ ID NO: 3083; WAN024ETG_at; Start 409; Stop 433
cagcagttaaacttatcctatgttg

SEQ ID NO: 181765 - DNA, 25 bp, Artificial
  probe
  misc_feature (1)..(25): SEQ ID NO: 3083; WAN024ETG_at; Start 102; Stop 126
tgttagcgtgcttaatacaattatg

SEQ ID NO: 181766 - DNA, 25 bp, Artificial
  probe
  misc_feature (1)..(25): SEQ ID NO: 3083; WAN024ETG_at; Start 1079; Stop 1103
tgaaagaacgagaaagagaattagc

SEQ ID NO: 181767 - DNA, 25 bp, Artificial
  probe
  misc_feature (1)..(25): SEQ ID NO: 3083; WAN024ETG_at; Start 571; Stop 595
cccatgcttgaaagaacgattctaa

SEQ ID NO: 181768 - DNA, 25 bp, Artificial
  probe
  misc_feature (1)..(25): SEQ ID NO: 3083; WAN024ETG_at; Start 587; Stop 611
cgattctaaagagggatcgcttgca

SEQ ID NO: 181769 - DNA, 25 bp, Artificial
  probe
  misc_feature (1)..(25): SEQ ID NO: 3083; WAN024ETG_at; Start 838; Stop 862
ccccatagactgctgattgcagtga

SEQ ID NO: 181770 - DNA, 25 bp, Artificial
  probe
  misc_feature (1)..(25): SEQ ID NO: 3083; WAN024ETG_at; Start 787; Stop 811
gggccaagtattggtttgattccta

SEQ ID NO: 181771 - DNA, 25 bp, Artificial
  probe
  misc_feature (1)..(25): SEQ ID NO: 3083; WAN024ETG_at; Start 871; Stop 895
cttgttgttcagcaggtagatggca

SEQ ID NO: 181772 - DNA, 25 bp, Artificial
  probe
  misc_feature (1)..(25): SEQ ID NO: 5132; WAN024ETH_at; Start 105; Stop 129
tagatactgggcacaagccaagata

SEQ ID NO: 181773 - DNA, 25 bp, Artificial
  probe
  misc_feature (1)..(25): SEQ ID NO: 5132; WAN024ETH_at; Start 194; Stop 218
gaaccaagtcagtgacagccatgag

SEQ ID NO: 181774 - DNA, 25 bp, Artificial
  probe
  misc_feature (1)..(25): SEQ ID NO: 5132; WAN024ETH_at; Start 323; Stop 347
tcaggaaatcaatctgcaagagagc

SEQ ID NO: 181775 - DNA, 25 bp, Artificial
  probe
  misc_feature (1)..(25): SEQ ID NO: 5132; WAN024ETH_at; Start 396; Stop 420
gtagcgcaaggcctctgtcaagaca

SEQ ID NO: 181776 - DNA, 25 bp, Artificial
  probe
  misc_feature (1)..(25): SEQ ID NO: 5132; WAN024ETH_at; Start 139; Stop 163
gtttggctagtgacaatcttgtgct

SEQ ID NO: 181777 - DNA, 25 bp, Artificial
  probe
  misc_feature (1)..(25): SEQ ID NO: 5132; WAN024ETH_at; Start 298; Stop 322
tccttagccttggtgaagagagcaa

SEQ ID NO: 181778 - DNA, 25 bp, Artificial
  probe
  misc_feature (1)..(25): SEQ ID NO: 5132; WAN024ETH_at; Start 411; Stop 435
tgtcaagacatcatctaccgtccgt

SEQ ID NO: 181779 - DNA, 25 bp, Artificial
  probe
  misc_feature (1)..(25): SEQ ID NO: 5132; WAN024ETH_at; Start 329; Stop 353
aatcaatctgcaagagagcttctcc

SEQ ID NO: 181780 - DNA, 25 bp, Artificial
  probe
  misc_feature (1)..(25): SEQ ID NO: 5132; WAN024ETH_at; Start 33; Stop 57
caagtcatcatctctgtctgtcaat

SEQ ID NO: 181781 - DNA, 25 bp, Artificial
  probe
  misc_feature (1)..(25): SEQ ID NO: 5132; WAN024ETH_at; Start 160; Stop 184
tgctgttcttcgttgatttccttga

SEQ ID NO: 181782 - DNA, 25 bp, Artificial
  probe
  misc_feature (1)..(25): SEQ ID NO: 5132; WAN024ETH_at; Start 342; Stop 366
gagagcttctcctccactgactgta

SEQ ID NO: 181783 - DNA, 25 bp, Artificial
  probe
  misc_feature (1)..(25): SEQ ID NO: 5132; WAN024ETH_at; Start 248; Stop 272
tattacggaaaggaagagcacaggt

SEQ ID NO: 181784 - DNA, 25 bp, Artificial
  probe
  misc_feature (1)..(25): SEQ ID NO: 5132; WAN024ETH_at; Start 20; Stop 44
taccaagttcaatcaagtcatcatc

SEQ ID NO: 181785 - DNA, 25 bp, Artificial
  probe
  misc_feature (1)..(25): SEQ ID NO: 5132; WAN024ETH_at; Start 41; Stop 65
catctctgtctgtcaatcctggaac

SEQ ID NO: 181786 - DNA, 25 bp, Artificial
  probe
  misc_feature (1)..(25): SEQ ID NO: 5132; WAN024ETH_at; Start 183; Stop 207
gatatccaaaagaaccaagtcagtg

SEQ ID NO: 181787 - DNA, 25 bp, Artificial
  probe
  misc_feature (1)..(25): SEQ ID NO: 5132; WAN024ETH_at; Start 216; Stop 240
gagtttgtcaaacttctcaaggtaa

SEQ ID NO: 181788 - DNA, 25 bp, Artificial
  probe
  misc_feature (1)..(25): SEQ ID NO: 5132; WAN024ETH_at; Start 84; Stop 108
gacaggttttccaatatctgataga

SEQ ID NO: 181789 - DNA, 25 bp, Artificial
  probe
  misc_feature (1)..(25): SEQ ID NO: 5132; WAN024ETH_at; Start 308; Stop 332
tggtgaagagagcaatcaggaaatc

SEQ ID NO: 181790 - DNA, 25 bp, Artificial
  probe
  misc_feature (1)..(25): SEQ ID NO: 5132; WAN024ETH_at; Start 270; Stop 294
ggtgtccaaggtacagtggattcct

SEQ ID NO: 181791 - DNA, 25 bp, Artificial
  probe
  misc_feature (1)..(25): SEQ ID NO: 5132; WAN024ETH_at; Start 53; Stop 77
tcaatcctggaactagcacgtggcg

SEQ ID NO: 181792 - DNA, 25 bp, Artificial
  probe
  misc_feature (1)..(25): SEQ ID NO: 5132; WAN024ETH_at; Start 150; Stop 174
gacaatcttgtgctgttcttcgttg

SEQ ID NO: 181793 - DNA, 25 bp, Artificial
  probe
  misc_feature (1)..(25): SEQ ID NO: 5132; WAN024ETH_at; Start 113; Stop 137
gggcacaagccaagatatttttatt

SEQ ID NO: 181794 - DNA, 25 bp, Artificial
  probe
  misc_feature (1)..(25): SEQ ID NO: 5132; WAN024ETH_at; Start 62; Stop 86
gaactagcacgtggcgaatccagac

SEQ ID NO: 181795 - DNA, 25 bp, Artificial
  probe
  misc_feature (1)..(25): SEQ ID NO: 5132; WAN024ETH_at; Start 286; Stop 310
tggattccttgttccttagccttgg

SEQ ID NO: 181796 - DNA, 25 bp, Artificial
  probe
  misc_feature (1)..(25): SEQ ID NO: 5132; WAN024ETH_at; Start 356; Stop 380
cactgactgtaatcccacccttatt

SEQ ID NO: 181797 - DNA, 25 bp, Artificial
  probe
  misc_feature (1)..(25): SEQ ID NO: 5132; WAN024ETH_at; Start 98; Stop 122
tatctgatagatactgggcacaagc

SEQ ID NO: 181798 - DNA, 25 bp, Artificial
  probe
  misc_feature (1)..(25): SEQ ID NO: 5132; WAN024ETH_at; Start 71; Stop 95
cgtggcgaatccagacaggttttcc

SEQ ID NO: 181799 - DNA, 25 bp, Artificial
  probe
  misc_feature (1)..(25): SEQ ID NO: 5132; WAN024ETH_at; Start 203; Stop 227
cagtgacagccatgagtttgtcaaa

SEQ ID NO: 181800 - DNA, 25 bp, Artificial
  probe
  misc_feature (1)..(25): SEQ ID NO: 5132; WAN024ETH_at; Start 128; Stop 152
tatttttattggtttggctagtgac

SEQ ID NO: 181801 - DNA, 25 bp, Artificial
  probe
  misc_feature (1)..(25): SEQ ID NO: 5132; WAN024ETH_at; Start 2; Stop 26
tgagggtcttgacgaacttaccaag

SEQ ID NO: 181802 - DNA, 25 bp, Artificial
  probe
  misc_feature (1)..(25): SEQ ID NO: 5132; WAN024ETH_at; Start 261; Stop 285
aagagcacaggtgtccaaggtacag

SEQ ID NO: 181803 - DNA, 25 bp, Artificial
  probe
  misc_feature (1)..(25): SEQ ID NO: 5132; WAN024ETH_at; Start 419; Stop 443
catcatctaccgtccgttcacgtga

SEQ ID NO: 181804 - DNA, 25 bp, Artificial
  probe
  misc_feature (1)..(25): SEQ ID NO: 5132; WAN024ETH_at; Start 379; Stop 403
tttccccagaaaccacggtagcgca

SEQ ID NO: 181805 - DNA, 25 bp, Artificial
  probe
  misc_feature (1)..(25): SEQ ID NO: 5132; WAN024ETH_at; Start 174; Stop 198
gatttccttgatatccaaaagaacc

SEQ ID NO: 181806 - DNA, 25 bp, Artificial
  probe
  misc_feature (1)..(25): SEQ ID NO: 2933; WAN024ETI_at; Start 14; Stop 38
caattgattatggacaagtgacagg

SEQ ID NO: 181807 - DNA, 25 bp, Artificial
  probe
  misc_feature (1)..(25): SEQ ID NO: 2933; WAN024ETI_at; Start 507; Stop 531
tctatcagatattggaaaacctgtc

SEQ ID NO: 181808 - DNA, 25 bp, Artificial
  probe
  misc_feature (1)..(25): SEQ ID NO: 2933; WAN024ETI_at; Start 299; Stop 323
tcttcaccaaggctaaggaacaagg

SEQ ID NO: 181809 - DNA, 25 bp, Artificial
  probe
  misc_feature (1)..(25): SEQ ID NO: 2933; WAN024ETI_at; Start 591; Stop 615
tggtaagttcgtcaagaccctcaaa

SEQ ID NO: 181810 - DNA, 25 bp, Artificial
  probe
  misc_feature (1)..(25): SEQ ID NO: 2933; WAN024ETI_at; Start 159; Stop 183
ggagtccaataagtcacgtgaacgg

SEQ ID NO: 181811 - DNA, 25 bp, Artificial
  probe
  misc_feature (1)..(25): SEQ ID NO: 2933; WAN024ETI_at; Start 192; Stop 216
tgatgtcttgacagaggccttgcgc

SEQ ID NO: 181812 - DNA, 25 bp, Artificial
  probe
  misc_feature (1)..(25): SEQ ID NO: 2933; WAN024ETI_at; Start 521; Stop 545
gaaaacctgtctggattcgccacgt

SEQ ID NO: 181813 - DNA, 25 bp, Artificial
  probe
  misc_feature (1)..(25): SEQ ID NO: 2933; WAN024ETI_at; Start 534; Stop 558
gattcgccacgtgctagttccagga

SEQ ID NO: 181814 - DNA, 25 bp, Artificial
  probe
  misc_feature (1)..(25): SEQ ID NO: 2933; WAN024ETI_at; Start 631; Stop 655
gaaattctaccttatcacaccatgg

SEQ ID NO: 181815 - DNA, 25 bp, Artificial
  probe
  misc_feature (1)..(25): SEQ ID NO: 2933; WAN024ETI_at; Start 93; Stop 117
tattgtctttttgcagggctgtcac

SEQ ID NO: 181816 - DNA, 25 bp, Artificial
  probe
  misc_feature (1)..(25): SEQ ID NO: 2933; WAN024ETI_at; Start 408; Stop 432
cactgacttggttcttttggatatc

SEQ ID NO: 181817 - DNA, 25 bp, Artificial
  probe
  misc_feature (1)..(25): SEQ ID NO: 2933; WAN024ETI_at; Start 175; Stop 199
cgtgaacggacggtagatgatgtct

SEQ ID NO: 181818 - DNA, 25 bp, Artificial
  probe
  misc_feature (1)..(25): SEQ ID NO: 2933; WAN024ETI_at; Start 265; Stop 289
gaagctctcttgcagattgatttcc

SEQ ID NO: 181819 - DNA, 25 bp, Artificial
  probe
  misc_feature (1)..(25): SEQ ID NO: 2933; WAN024ETI_at; Start 384; Stop 408
gaagtttgacaaactcatggctgtc

SEQ ID NO: 181820 - DNA, 25 bp, Artificial
  probe
  misc_feature (1)..(25): SEQ ID NO: 2933; WAN024ETI_at; Start 680; Stop 704
gaattccatattccctcgaaggagt

SEQ ID NO: 181821 - DNA, 25 bp, Artificial
  probe
  misc_feature (1)..(25): SEQ ID NO: 2933; WAN024ETI_at; Start 205; Stop 229
gaggccttgcgctaccgtggtttct

SEQ ID NO: 181822 - DNA, 25 bp, Artificial
  probe
  misc_feature (1)..(25): SEQ ID NO: 2933; WAN024ETI_at; Start 646; Stop 670
cacaccatgggtgagttcaagtggc

SEQ ID NO: 181823 - DNA, 25 bp, Artificial
  probe
  misc_feature (1)..(25): SEQ ID NO: 2933; WAN024ETI_at; Start 548; Stop 572
tagttccaggattgacagacagaga

SEQ ID NO: 181824 - DNA, 25 bp, Artificial
  probe
  misc_feature (1)..(25): SEQ ID NO: 2933; WAN024ETI_at; Start 312; Stop 336
taaggaacaaggaatccactgtacc

SEQ ID NO: 181825 - DNA, 25 bp, Artificial
  probe
  misc_feature (1)..(25): SEQ ID NO: 2933; WAN024ETI_at; Start 249; Stop 273
tacagtcagtggaggagaagctctc

SEQ ID NO: 181826 - DNA, 25 bp, Artificial
  probe
  misc_feature (1)..(25): SEQ ID NO: 2933; WAN024ETI_at; Start 129; Stop 153
gtattgccacaacccagacacttgg

SEQ ID NO: 181827 - DNA, 25 bp, Artificial
  probe
  misc_feature (1)..(25): SEQ ID NO: 2933; WAN024ETI_at; Start 478; Stop 502
aataaaaatatcttggcttgtgccc

SEQ ID NO: 181828 - DNA, 25 bp, Artificial
  probe
  misc_feature (1)..(25): SEQ ID NO: 2933; WAN024ETI_at; Start 492; Stop 516
ggcttgtgcccagtatctatcagat

SEQ ID NO: 181829 - DNA, 25 bp, Artificial
  probe
  misc_feature (1)..(25): SEQ ID NO: 2933; WAN024ETI_at; Start 115; Stop 139
cacatgcgttgccagtattgccaca

SEQ ID NO: 181830 - DNA, 25 bp, Artificial
  probe
  misc_feature (1)..(25): SEQ ID NO: 2933; WAN024ETI_at; Start 234; Stop 258
aaataagggtgggattacagtcagt

SEQ ID NO: 181831 - DNA, 25 bp, Artificial
  probe
  misc_feature (1)..(25): SEQ ID NO: 2933; WAN024ETI_at; Start 663; Stop 687
caagtggcgtgaacttggaattcca

SEQ ID NO: 181832 - DNA, 25 bp, Artificial
  probe
  misc_feature (1)..(25): SEQ ID NO: 2933; WAN024ETI_at; Start 42; Stop 66
ggtgcattcgacagaaagctttggg

SEQ ID NO: 181833 - DNA, 25 bp, Artificial
  probe
  misc_feature (1)..(25): SEQ ID NO: 2933; WAN024ETI_at; Start 743; Stop 767
aactcatggataccgaaagttatca

SEQ ID NO: 181834 - DNA, 25 bp, Artificial
  probe
  misc_feature (1)..(25): SEQ ID NO: 2933; WAN024ETI_at; Start 716; Stop 740
cagcagatcgcgtcaagaacgctaa

SEQ ID NO: 181835 - DNA, 25 bp, Artificial
  probe
  misc_feature (1)..(25): SEQ ID NO: 2933; WAN024ETI_at; Start 432; Stop 456
caaggaaatcaacgaagaacagcac

SEQ ID NO: 181836 - DNA, 25 bp, Artificial
  probe
  misc_feature (1)..(25): SEQ ID NO: 2933; WAN024ETI_at; Start 445; Stop 469
gaagaacagcacaagattgtcacta

SEQ ID NO: 181837 - DNA, 25 bp, Artificial
  probe
  misc_feature (1)..(25): SEQ ID NO: 2933; WAN024ETI_at; Start 569; Stop 593
gagatgatgacttgattgaacttgg

SEQ ID NO: 181838 - DNA, 25 bp, Artificial
  probe
  misc_feature (1)..(25): SEQ ID NO: 2933; WAN024ETI_at; Start 145; Stop 169
gacacttgggctatggagtccaata

SEQ ID NO: 181839 - DNA, 25 bp, Artificial
  probe
  misc_feature (1)..(25): SEQ ID NO: 2933; WAN024ETI_at; Start 701; Stop 725
gagtcaaaccaccaacagcagatcg

SEQ ID NO: 181840 - DNA, 25 bp, Artificial
  probe
  misc_feature (1)..(25): SEQ ID NO: 2981; WAN024ETJ_at; Start 464; Stop 488
catgggactttacgatgtttgagga

SEQ ID NO: 181841 - DNA, 25 bp, Artificial
  probe
  misc_feature (1)..(25): SEQ ID NO: 2981; WAN024ETJ_at; Start 30; Stop 54
tcaaatgttaaatgaagaattgtcc

SEQ ID NO: 181842 - DNA, 25 bp, Artificial
  probe
  misc_feature (1)..(25): SEQ ID NO: 2981; WAN024ETJ_at; Start 250; Stop 274
cactttcaggaaactgttattgttg

SEQ ID NO: 181843 - DNA, 25 bp, Artificial
  probe
  misc_feature (1)..(25): SEQ ID NO: 2981; WAN024ETJ_at; Start 389; Stop 413
cagagattgaggattacgatgctat

SEQ ID NO: 181844 - DNA, 25 bp, Artificial
  probe
  misc_feature (1)..(25): SEQ ID NO: 2981; WAN024ETJ_at; Start 142; Stop 166
gcaggcttttatttgttcgatggaa

SEQ ID NO: 181845 - DNA, 25 bp, Artificial
  probe
  misc_feature (1)..(25): SEQ ID NO: 2981; WAN024ETJ_at; Start 54; Stop 78
cttcctattggaaggcgaaaccaat

SEQ ID NO: 181846 - DNA, 25 bp, Artificial
  probe
  misc_feature (1)..(25): SEQ ID NO: 2981; WAN024ETJ_at; Start 19; Stop 43
caatcacgttatcaaatgttaaatg

SEQ ID NO: 181847 - DNA, 25 bp, Artificial
  probe
  misc_feature (1)..(25): SEQ ID NO: 2981; WAN024ETJ_at; Start 83; Stop 107
tggctaatctttccaacgccagtgc

SEQ ID NO: 181848 - DNA, 25 bp, Artificial
  probe
  misc_feature (1)..(25): SEQ ID NO: 2981; WAN024ETJ_at; Start 151; Stop 175
tatttgttcgatggaaaggaattgg

SEQ ID NO: 181849 - DNA, 25 bp, Artificial
  probe
  misc_feature (1)..(25): SEQ ID NO: 2981; WAN024ETJ_at; Start 362; Stop 386
tacttggagttctggatctggattc

SEQ ID NO: 181850 - DNA, 25 bp, Artificial
  probe
  misc_feature (1)..(25): SEQ ID NO: 2981; WAN024ETJ_at; Start 376; Stop 400
gatctggattcttcagagattgagg

SEQ ID NO: 181851 - DNA, 25 bp, Artificial
  probe
  misc_feature (1)..(25): SEQ ID NO: 2981; WAN024ETJ_at; Start 397; Stop 421
gaggattacgatgctatggatcgag

SEQ ID NO: 181852 - DNA, 25 bp, Artificial
  probe
  misc_feature (1)..(25): SEQ ID NO: 2981; WAN024ETJ_at; Start 68; Stop 92
gcgaaaccaatgttttggctaatct

SEQ ID NO: 181853 - DNA, 25 bp, Artificial
  probe
  misc_feature (1)..(25): SEQ ID NO: 2981; WAN024ETJ_at; Start 5; Stop 29
taaaatcagaaaaacaatcacgtta

SEQ ID NO: 181854 - DNA, 25 bp, Artificial
  probe
  misc_feature (1)..(25): SEQ ID NO: 2981; WAN024ETJ_at; Start 433; Stop 457
caatttgtcgctattttgcttgaaa

SEQ ID NO: 181855 - DNA, 25 bp, Artificial
  probe
  misc_feature (1)..(25): SEQ ID NO: 2981; WAN024ETJ_at; Start 335; Stop 359
tggtgccgatgatgaagaatggtca

SEQ ID NO: 181856 - DNA, 25 bp, Artificial
  probe
  misc_feature (1)..(25): SEQ ID NO: 2981; WAN024ETJ_at; Start 205; Stop 229
tgcatccgtattgcactaggcaagg

SEQ ID NO: 181857 - DNA, 25 bp, Artificial
  probe
  misc_feature (1)..(25): SEQ ID NO: 2981; WAN024ETJ_at; Start 106; Stop 130
gctctcataaaatcacgttttccta

SEQ ID NO: 181858 - DNA, 25 bp, Artificial
  probe
  misc_feature (1)..(25): SEQ ID NO: 2981; WAN024ETJ_at; Start 127; Stop 151
cctaataccgtatttgcaggctttt

SEQ ID NO: 181859 - DNA, 25 bp, Artificial
  probe
  misc_feature (1)..(25): SEQ ID NO: 2981; WAN024ETJ_at; Start 213; Stop 237
tattgcactaggcaagggtgtttgt

SEQ ID NO: 181860 - DNA, 25 bp, Artificial
  probe
  misc_feature (1)..(25): SEQ ID NO: 2981; WAN024ETJ_at; Start 43; Stop 67
gaagaattgtccttcctattggaag

SEQ ID NO: 181861 - DNA, 25 bp, Artificial
  probe
  misc_feature (1)..(25): SEQ ID NO: 2981; WAN024ETJ_at; Start 348; Stop 372
gaagaatggtcagttacttggagtt

SEQ ID NO: 181862 - DNA, 25 bp, Artificial
  probe
  misc_feature (1)..(25): SEQ ID NO: 2981; WAN024ETJ_at; Start 409; Stop 433
gctatggatcgagattatttggaac

SEQ ID NO: 181863 - DNA, 25 bp, Artificial
  probe
  misc_feature (1)..(25): SEQ ID NO: 2981; WAN024ETJ_at; Start 96; Stop 120
caacgccagtgctctcataaaatca

SEQ ID NO: 181864 - DNA, 25 bp, Artificial
  probe
  misc_feature (1)..(25): SEQ ID NO: 2981; WAN024ETJ_at; Start 184; Stop 208
cccttccaaggaggtgtttcctgca

SEQ ID NO: 181865 - DNA, 25 bp, Artificial
  probe
  misc_feature (1)..(25): SEQ ID NO: 2981; WAN024ETJ_at; Start 240; Stop 264
tgaggcagctcactttcaggaaact

SEQ ID NO: 181866 - DNA, 25 bp, Artificial
  probe
  misc_feature (1)..(25): SEQ ID NO: 2981; WAN024ETJ_at; Start 419; Stop 443
gagattatttggaacaatttgtcgc

SEQ ID NO: 181867 - DNA, 25 bp, Artificial
  probe
  misc_feature (1)..(25): SEQ ID NO: 2981; WAN024ETJ_at; Start 231; Stop 255
tgtttgtggtgaggcagctcacttt

SEQ ID NO: 181868 - DNA, 25 bp, Artificial
  probe
  misc_feature (1)..(25): SEQ ID NO: 2981; WAN024ETJ_at; Start 277; Stop 301
gatgtgacgacctatctcaactata

SEQ ID NO: 181869 - DNA, 25 bp, Artificial
  probe
  misc_feature (1)..(25): SEQ ID NO: 2981; WAN024ETJ_at; Start 320; Stop 344
ctaaaagtgaaattgtggtgccgat

SEQ ID NO: 181870 - DNA, 25 bp, Artificial
  probe
  misc_feature (1)..(25): SEQ ID NO: 2981; WAN024ETJ_at; Start 190; Stop 214
caaggaggtgtttcctgcatccgta

SEQ ID NO: 181871 - DNA, 25 bp, Artificial
  probe
  misc_feature (1)..(25): SEQ ID NO: 2981; WAN024ETJ_at; Start 476; Stop 500
cgatgtttgaggaaaaatcttaact

SEQ ID NO: 181872 - DNA, 25 bp, Artificial
  probe
  misc_feature (1)..(25): SEQ ID NO: 2981; WAN024ETJ_at; Start 304; Stop 328
tcttgtgatagtctagctaaaagtg

SEQ ID NO: 181873 - DNA, 25 bp, Artificial
  probe
  misc_feature (1)..(25): SEQ ID NO: 2981; WAN024ETJ_at; Start 264; Stop 288
tgttattgttggagatgtgacgacc

SEQ ID NO: 181874 - DNA, 25 bp, Artificial
  probe
  misc_feature (1)..(25): SEQ ID NO: 1702; WAN024ETK_at; Start 677; Stop 701
ccatctatgtagatgctggagtgga

SEQ ID NO: 181875 - DNA, 25 bp, Artificial
  probe
  misc_feature (1)..(25): SEQ ID NO: 1702; WAN024ETK_at; Start 339; Stop 363
acttcaaatcctactgtcccgtacg

SEQ ID NO: 181876 - DNA, 25 bp, Artificial
  probe
  misc_feature (1)..(25): SEQ ID NO: 1702; WAN024ETK_at; Start 317; Stop 341
gaaaatccacaaccagtcgcctact

SEQ ID NO: 181877 - DNA, 25 bp, Artificial
  probe
  misc_feature (1)..(25): SEQ ID NO: 1702; WAN024ETK_at; Start 625; Stop 649
tttcaaaatccacaaaacgatcgtc

SEQ ID NO: 181878 - DNA, 25 bp, Artificial
  probe
  misc_feature (1)..(25): SEQ ID NO: 1702; WAN024ETK_at; Start 906; Stop 930
taaaagcaagaaccatgaaatcgat

SEQ ID NO: 181879 - DNA, 25 bp, Artificial
  probe
  misc_feature (1)..(25): SEQ ID NO: 1702; WAN024ETK_at; Start 705; Stop 729
tattgaaagttggtatctggaccgt

SEQ ID NO: 181880 - DNA, 25 bp, Artificial
  probe
  misc_feature (1)..(25): SEQ ID NO: 1702; WAN024ETK_at; Start 494; Stop 518
tcttggaccgcatcaaaaatggaca

SEQ ID NO: 181881 - DNA, 25 bp, Artificial
  probe
  misc_feature (1)..(25): SEQ ID NO: 1702; WAN024ETK_at; Start 867; Stop 891
tattgaaccaaccagaaatcgtgca

SEQ ID NO: 181882 - DNA, 25 bp, Artificial
  probe
  misc_feature (1)..(25): SEQ ID NO: 1702; WAN024ETK_at; Start 526; Stop 550
gatattcctgtctattctcatgaag

SEQ ID NO: 181883 - DNA, 25 bp, Artificial
  probe
  misc_feature (1)..(25): SEQ ID NO: 1702; WAN024ETK_at; Start 158; Stop 182
gtctccaagacgttacagatatcta

SEQ ID NO: 181884 - DNA, 25 bp, Artificial
  probe
  misc_feature (1)..(25): SEQ ID NO: 1702; WAN024ETK_at; Start 460; Stop 484
cctgaaagctatgatatggaagctc

SEQ ID NO: 181885 - DNA, 25 bp, Artificial
  probe
  misc_feature (1)..(25): SEQ ID NO: 1702; WAN024ETK_at; Start 84; Stop 108
tttacatcgaaagacaacacctcct

SEQ ID NO: 181886 - DNA, 25 bp, Artificial
  probe
  misc_feature (1)..(25): SEQ ID NO: 1702; WAN024ETK_at; Start 173; Stop 197
cagatatctatctccccttggctca

SEQ ID NO: 181887 - DNA, 25 bp, Artificial
  probe
  misc_feature (1)..(25): SEQ ID NO: 1702; WAN024ETK_at; Start 397; Stop 421
gatggttttctctatcccaatcaaa

SEQ ID NO: 181888 - DNA, 25 bp, Artificial
  probe
  misc_feature (1)..(25): SEQ ID NO: 1702; WAN024ETK_at; Start 145; Stop 169
aatgaccaaatcagtctccaagacg

SEQ ID NO: 181889 - DNA, 25 bp, Artificial
  probe
  misc_feature (1)..(25): SEQ ID NO: 1702; WAN024ETK_at; Start 881; Stop 905
gaaatcgtgcagaagtgattcttca

SEQ ID NO: 181890 - DNA, 25 bp, Artificial
  probe
  misc_feature (1)..(25): SEQ ID NO: 1702; WAN024ETK_at; Start 68; Stop 92
gccagacttggcaatctttacatcg

SEQ ID NO: 181891 - DNA, 25 bp, Artificial
  probe
  misc_feature (1)..(25): SEQ ID NO: 1702; WAN024ETK_at; Start 201; Stop 225
gattcagatttacaagcgaactaag

SEQ ID NO: 181892 - DNA, 25 bp, Artificial
  probe
  misc_feature (1)..(25): SEQ ID NO: 1702; WAN024ETK_at; Start 639; Stop 663
aaacgatcgtctctatatcactgac

SEQ ID NO: 181893 - DNA, 25 bp, Artificial
  probe
  misc_feature (1)..(25): SEQ ID NO: 1702; WAN024ETK_at; Start 573; Stop 597
gaaacaaagtgtcaaagctgctgat

SEQ ID NO: 181894 - DNA, 25 bp, Artificial
  probe
  misc_feature (1)..(25): SEQ ID NO: 1702; WAN024ETK_at; Start 753; Stop 777
ccaaaacgaccctgatagctactat

SEQ ID NO: 181895 - DNA, 25 bp, Artificial
  probe
  misc_feature (1)..(25): SEQ ID NO: 1702; WAN024ETK_at; Start 213; Stop 237
caagcgaactaaggaagatttagcc

SEQ ID NO: 181896 - DNA, 25 bp, Artificial
  probe
  misc_feature (1)..(25): SEQ ID NO: 1702; WAN024ETK_at; Start 127; Stop 151
gaatctatcaagagttttaatgacc

SEQ ID NO: 181897 - DNA, 25 bp, Artificial
  probe
  misc_feature (1)..(25): SEQ ID NO: 1702; WAN024ETK_at; Start 413; Stop 437
ccaatcaaaccttgattgagcaggg

SEQ ID NO: 181898 - DNA, 25 bp, Artificial
  probe
  misc_feature (1)..(25): SEQ ID NO: 1702; WAN024ETK_at; Start 49; Stop 73
cattttgaaaaaatcagccgccaga

SEQ ID NO: 181899 - DNA, 25 bp, Artificial
  probe
  misc_feature (1)..(25): SEQ ID NO: 1702; WAN024ETK_at; Start 479; Stop 503
aagctcttctcaacttcttggaccg

SEQ ID NO: 181900 - DNA, 25 bp, Artificial
  probe
  misc_feature (1)..(25): SEQ ID NO: 1702; WAN024ETK_at; Start 368; Stop 392
cagatgctacggttgagttggttac

SEQ ID NO: 181901 - DNA, 25 bp, Artificial
  probe
  misc_feature (1)..(25): SEQ ID NO: 1702; WAN024ETK_at; Start 780; Stop 804
tcgttttactcagatgccgattggg

SEQ ID NO: 181902 - DNA, 25 bp, Artificial
  probe
  misc_feature (1)..(25): SEQ ID NO: 1702; WAN024ETK_at; Start 541; Stop 565
tctcatgaagtttacgacatcgtac

SEQ ID NO: 181903 - DNA, 25 bp, Artificial
  probe
  misc_feature (1)..(25): SEQ ID NO: 1702; WAN024ETK_at; Start 511; Stop 535
aatggacaagatgtagatattcctg

SEQ ID NO: 181904 - DNA, 25 bp, Artificial
  probe
  misc_feature (1)..(25): SEQ ID NO: 1702; WAN024ETK_at; Start 661; Stop 685
gacttctttgacttttccatctatg

SEQ ID NO: 181905 - DNA, 25 bp, Artificial
  probe
  misc_feature (1)..(25): SEQ ID NO: 1702; WAN024ETK_at; Start 96; Stop 120
gacaacacctcctttgacagaagaa

SEQ ID NO: 181906 - DNA, 25 bp, Artificial
  probe
  misc_feature (1)..(25): SEQ ID NO: 1702; WAN024ETK_at; Start 303; Stop 327
gagtgttgccgttggaaaatccaca

SEQ ID NO: 181907 - DNA, 25 bp, Artificial
  probe
  misc_feature (1)..(25): SEQ ID NO: 1702; WAN024ETK_at; Start 445; Stop 469
aatcgtaaaggatttcctgaaagct

SEQ ID NO: 181908 - DNA, 25 bp, Artificial
  probe
  misc_feature (1)..(25): SEQ ID NO: 6526; WAN024ETL_at; Start 150; Stop 174
aacatctggttccatagccaaccca

SEQ ID NO: 181909 - DNA, 25 bp, Artificial
  probe
  misc_feature (1)..(25): SEQ ID NO: 6526; WAN024ETL_at; Start 50; Stop 74
taaccatggtcattcctgacttggc

SEQ ID NO: 181910 - DNA, 25 bp, Artificial
  probe
  misc_feature (1)..(25): SEQ ID NO: 6526; WAN024ETL_at; Start 136; Stop 160
tcgtcaaagagcaaaacatctggtt

SEQ ID NO: 181911 - DNA, 25 bp, Artificial
  probe
  misc_feature (1)..(25): SEQ ID NO: 6526; WAN024ETL_at; Start 60; Stop 84
cattcctgacttggctagatcttgc

SEQ ID NO: 181912 - DNA, 25 bp, Artificial
  probe
  misc_feature (1)..(25): SEQ ID NO: 6526; WAN024ETL_at; Start 108; Stop 132
catctcaggatctagggctgaagtt

SEQ ID NO: 181913 - DNA, 25 bp, Artificial
  probe
  misc_feature (1)..(25): SEQ ID NO: 6526; WAN024ETL_at; Start 183; Stop 207
ggcaatccgctgttgctggccacct

SEQ ID NO: 181914 - DNA, 25 bp, Artificial
  probe
  misc_feature (1)..(25): SEQ ID NO: 6526; WAN024ETL_at; Start 15; Stop 39
cacctcacgggcaaatcccatctca

SEQ ID NO: 181915 - DNA, 25 bp, Artificial
  probe
  misc_feature (1)..(25): SEQ ID NO: 6526; WAN024ETL_at; Start 6; Stop 30
acgatctgccacctcacgggcaaat

SEQ ID NO: 181916 - DNA, 25 bp, Artificial
  probe
  misc_feature (1)..(25): SEQ ID NO: 6526; WAN024ETL_at; Start 40; Stop 64
tgtgttacgataaccatggtcattc

SEQ ID NO: 181917 - DNA, 25 bp, Artificial
  probe
  misc_feature (1)..(25): SEQ ID NO: 6526; WAN024ETL_at; Start 163; Stop 187
atagccaacccacgcgcgatggcaa

SEQ ID NO: 181918 - DNA, 25 bp, Artificial
  probe
  misc_feature (1)..(25): SEQ ID NO: 6526; WAN024ETL_at; Start 191; Stop 215
gctgttgctggccacctgacaaact

SEQ ID NO: 181919 - DNA, 25 bp, Artificial
  probe
  misc_feature (1)..(25): SEQ ID NO: 6526; WAN024ETL_at; Start 201; Stop 225
gccacctgacaaactctgtggataa

SEQ ID NO: 181920 - DNA, 25 bp, Artificial
  probe
  misc_feature (1)..(25): SEQ ID NO: 6526; WAN024ETL_at; Start 144; Stop 168
gagcaaaacatctggttccatagcc

SEQ ID NO: 181921 - DNA, 25 bp, Artificial
  probe
  misc_feature (1)..(25): SEQ ID NO: 6526; WAN024ETL_at; Start 81; Stop 105
ttgcataacagccagaacttctcca

SEQ ID NO: 181922 - DNA, 25 bp, Artificial
  probe
  misc_feature (1)..(25): SEQ ID NO: 6526; WAN024ETL_at; Start 54; Stop 78
catggtcattcctgacttggctaga

SEQ ID NO: 181923 - DNA, 25 bp, Artificial
  probe
  misc_feature (1)..(25): SEQ ID NO: 6526; WAN024ETL_at; Start 173; Stop 197
cacgcgcgatggcaatccgctgttg

SEQ ID NO: 181924 - DNA, 25 bp, Artificial
  probe
  misc_feature (1)..(25): SEQ ID NO: 6526; WAN024ETL_at; Start 45; Stop 69
tacgataaccatggtcattcctgac

SEQ ID NO: 181925 - DNA, 25 bp, Artificial
  probe
  misc_feature (1)..(25): SEQ ID NO: 6526; WAN024ETL_at; Start 116; Stop 140
gatctagggctgaagttggctcgtc

SEQ ID NO: 181926 - DNA, 25 bp, Artificial
  probe
  misc_feature (1)..(25): SEQ ID NO: 6526; WAN024ETL_at; Start 127; Stop 151
gaagttggctcgtcaaagagcaaaa

SEQ ID NO: 181927 - DNA, 25 bp, Artificial
  probe
  misc_feature (1)..(25): SEQ ID NO: 6526; WAN024ETL_at; Start 120; Stop 144
tagggctgaagttggctcgtcaaag

SEQ ID NO: 181928 - DNA, 25 bp, Artificial
  probe
  misc_feature (1)..(25): SEQ ID NO: 6526; WAN024ETL_at; Start 77; Stop 101
gatcttgcataacagccagaacttc

SEQ ID NO: 181929 - DNA, 25 bp, Artificial
  probe
  misc_feature (1)..(25): SEQ ID NO: 6526; WAN024ETL_at; Start 196; Stop 220
tgctggccacctgacaaactctgtg

SEQ ID NO: 181930 - DNA, 25 bp, Artificial
  probe
  misc_feature (1)..(25): SEQ ID NO: 6526; WAN024ETL_at; Start 105; Stop 129
aaccatctcaggatctagggctgaa

SEQ ID NO: 181931 - DNA, 25 bp, Artificial
  probe
  misc_feature (1)..(25): SEQ ID NO: 6526; WAN024ETL_at; Start 73; Stop 97
gctagatcttgcataacagccagaa

SEQ ID NO: 181932 - DNA, 25 bp, Artificial
  probe
  misc_feature (1)..(25): SEQ ID NO: 6526; WAN024ETL_at; Start 139; Stop 163
tcaaagagcaaaacatctggttcca

SEQ ID NO: 181933 - DNA, 25 bp, Artificial
  probe
  misc_feature (1)..(25): SEQ ID NO: 6526; WAN024ETL_at; Start 147; Stop 171
caaaacatctggttccatagccaac

SEQ ID NO: 181934 - DNA, 25 bp, Artificial
  probe
  misc_feature (1)..(25): SEQ ID NO: 6526; WAN024ETL_at; Start 180; Stop 204
gatggcaatccgctgttgctggcca

SEQ ID NO: 181935 - DNA, 25 bp, Artificial
  probe
  misc_feature (1)..(25): SEQ ID NO: 6526; WAN024ETL_at; Start 176; Stop 200
gcgcgatggcaatccgctgttgctg

SEQ ID NO: 181936 - DNA, 25 bp, Artificial
  probe
  misc_feature (1)..(25): SEQ ID NO: 6526; WAN024ETL_at; Start 86; Stop 110
taacagccagaacttctccaaccat

SEQ ID NO: 181937 - DNA, 25 bp, Artificial
  probe
  misc_feature (1)..(25): SEQ ID NO: 6526; WAN024ETL_at; Start 102; Stop 126
tccaaccatctcaggatctagggct

SEQ ID NO: 181938 - DNA, 25 bp, Artificial
  probe
  misc_feature (1)..(25): SEQ ID NO: 6526; WAN024ETL_at; Start 67; Stop 91
gacttggctagatcttgcataacag

SEQ ID NO: 181939 - DNA, 25 bp, Artificial
  probe
  misc_feature (1)..(25): SEQ ID NO: 6526; WAN024ETL_at; Start 124; Stop 148
gctgaagttggctcgtcaaagagca

SEQ ID NO: 181940 - DNA, 25 bp, Artificial
  probe
  misc_feature (1)..(25): SEQ ID NO: 6526; WAN024ETL_at; Start 63; Stop 87
tcctgacttggctagatcttgcata

SEQ ID NO: 181941 - DNA, 25 bp, Artificial
  probe
  misc_feature (1)..(25): SEQ ID NO: 6526; WAN024ETL_at; Start 133; Stop 157
ggctcgtcaaagagcaaaacatctg

SEQ ID NO: 181942 - DNA, 25 bp, Artificial
  probe
  misc_feature (1)..(25): SEQ ID NO: 1356; WAN024ETM_at; Start 211; Stop 235
gacaagaagaatgacctgtttgcca

SEQ ID NO: 181943 - DNA, 25 bp, Artificial
  probe
  misc_feature (1)..(25): SEQ ID NO: 1356; WAN024ETM_at; Start 446; Stop 470
ttgccatcgcgcgtgggttggctat

SEQ ID NO: 181944 - DNA, 25 bp, Artificial
  probe
  misc_feature (1)..(25): SEQ ID NO: 1356; WAN024ETM_at; Start 396; Stop 420
taaggcagacgcttatccacagagt

SEQ ID NO: 181945 - DNA, 25 bp, Artificial
  probe
  misc_feature (1)..(25): SEQ ID NO: 1356; WAN024ETM_at; Start 2; Stop 26
tgacagaaaccttgataaaaattga

SEQ ID NO: 181946 - DNA, 25 bp, Artificial
  probe
  misc_feature (1)..(25): SEQ ID NO: 1356; WAN024ETM_at; Start 92; Stop 116
gagaagttgtcgttatcatcggtcc

SEQ ID NO: 181947 - DNA, 25 bp, Artificial
  probe
  misc_feature (1)..(25): SEQ ID NO: 1356; WAN024ETM_at; Start 668; Stop 692
cacctgagcagatttttgaacaaac

SEQ ID NO: 181948 - DNA, 25 bp, Artificial
  probe
  misc_feature (1)..(25): SEQ ID NO: 1356; WAN024ETM_at; Start 384; Stop 408
tggtttgccagataaggcagacgct

SEQ ID NO: 181949 - DNA, 25 bp, Artificial
  probe
  misc_feature (1)..(25): SEQ ID NO: 1356; WAN024ETM_at; Start 59; Stop 83
tattgaagggcatcaacctcgagat

SEQ ID NO: 181950 - DNA, 25 bp, Artificial
  probe
  misc_feature (1)..(25): SEQ ID NO: 1356; WAN024ETM_at; Start 219; Stop 243
gaatgacctgtttgccatgcgtgag

SEQ ID NO: 181951 - DNA, 25 bp, Artificial
  probe
  misc_feature (1)..(25): SEQ ID NO: 1356; WAN024ETM_at; Start 193; Stop 217
gagggagtcgatattacggacaaga

SEQ ID NO: 181952 - DNA, 25 bp, Artificial
  probe
  misc_feature (1)..(25): SEQ ID NO: 1356; WAN024ETM_at; Start 95; Stop 119
aagttgtcgttatcatcggtccttc

SEQ ID NO: 181953 - DNA, 25 bp, Artificial
  probe
  misc_feature (1)..(25): SEQ ID NO: 1356; WAN024ETM_at; Start 78; Stop 102
cgagattaaaagaggagaagttgtc

SEQ ID NO: 181954 - DNA, 25 bp, Artificial
  probe
  misc_feature (1)..(25): SEQ ID NO: 1356; WAN024ETM_at; Start 673; Stop 697
gagcagatttttgaacaaacccaag

SEQ ID NO: 181955 - DNA, 25 bp, Artificial
  probe
  misc_feature (1)..(25): SEQ ID NO: 1356; WAN024ETM_at; Start 230; Stop 254
ttgccatgcgtgagaagatgggcat

SEQ ID NO: 181956 - DNA, 25 bp, Artificial
  probe
  misc_feature (1)..(25): SEQ ID NO: 1356; WAN024ETM_at; Start 374; Stop 398
tggaaaaagttggtttgccagataa

SEQ ID NO: 181957 - DNA, 25 bp, Artificial
  probe
  misc_feature (1)..(25): SEQ ID NO: 1356; WAN024ETM_at; Start 274; Stop 298
ctctttcctaatatgactgtgatgg

SEQ ID NO: 181958 - DNA, 25 bp, Artificial
  probe
  misc_feature (1)..(25): SEQ ID NO: 1356; WAN024ETM_at; Start 603; Stop 627
atttgcccgtgaggtggcagatcgt

SEQ ID NO: 181959 - DNA, 25 bp, Artificial
  probe
  misc_feature (1)..(25): SEQ ID NO: 1356; WAN024ETM_at; Start 280; Stop 304
cctaatatgactgtgatggaaaata

SEQ ID NO: 181960 - DNA, 25 bp, Artificial
  probe
  misc_feature (1)..(25): SEQ ID NO: 1356; WAN024ETM_at; Start 131; Stop 155
aatctaccttgcttcgctctatgaa

SEQ ID NO: 181961 - DNA, 25 bp, Artificial
  probe
  misc_feature (1)..(25): SEQ ID NO: 1356; WAN024ETM_at; Start 127; Stop 151
gggaaatctaccttgcttcgctcta

SEQ ID NO: 181962 - DNA, 25 bp, Artificial
  probe
  misc_feature (1)..(25): SEQ ID NO: 1356; WAN024ETM_at; Start 186; Stop 210
tatctttgagggagtcgatattacg

SEQ ID NO: 181963 - DNA, 25 bp, Artificial
  probe
  misc_feature (1)..(25): SEQ ID NO: 1356; WAN024ETM_at; Start 216; Stop 240
gaagaatgacctgtttgccatgcgt

SEQ ID NO: 181964 - DNA, 25 bp, Artificial
  probe
  misc_feature (1)..(25): SEQ ID NO: 1356; WAN024ETM_at; Start 54; Stop 78
tgaagtattgaagggcatcaacctc

SEQ ID NO: 181965 - DNA, 25 bp, Artificial
  probe
  misc_feature (1)..(25): SEQ ID NO: 1356; WAN024ETM_at; Start 223; Stop 247
gacctgtttgccatgcgtgagaaga

SEQ ID NO: 181966 - DNA, 25 bp, Artificial
  probe
  misc_feature (1)..(25): SEQ ID NO: 1356; WAN024ETM_at; Start 189; Stop 213
ctttgagggagtcgatattacggac

SEQ ID NO: 181967 - DNA, 25 bp, Artificial
  probe
  misc_feature (1)..(25): SEQ ID NO: 1356; WAN024ETM_at; Start 140; Stop 164
tgcttcgctctatgaatttgttgga

SEQ ID NO: 181968 - DNA, 25 bp, Artificial
  probe
  misc_feature (1)..(25): SEQ ID NO: 1356; WAN024ETM_at; Start 463; Stop 487
ttggctatggaaccagatgttttgc

SEQ ID NO: 181969 - DNA, 25 bp, Artificial
  probe
  misc_feature (1)..(25): SEQ ID NO: 1356; WAN024ETM_at; Start 459; Stop 483
tgggttggctatggaaccagatgtt

SEQ ID NO: 181970 - DNA, 25 bp, Artificial
  probe
  misc_feature (1)..(25): SEQ ID NO: 1356; WAN024ETM_at; Start 68; Stop 92
gcatcaacctcgagattaaaagagg

SEQ ID NO: 181971 - DNA, 25 bp, Artificial
  probe
  misc_feature (1)..(25): SEQ ID NO: 1356; WAN024ETM_at; Start 63; Stop 87
gaagggcatcaacctcgagattaaa

SEQ ID NO: 181972 - DNA, 25 bp, Artificial
  probe
  misc_feature (1)..(25): SEQ ID NO: 1356; WAN024ETM_at; Start 204; Stop 228
tattacggacaagaagaatgacctg

SEQ ID NO: 181973 - DNA, 25 bp, Artificial
  probe
  misc_feature (1)..(25): SEQ ID NO: 1356; WAN024ETM_at; Start 225; Stop 249
cctgtttgccatgcgtgagaagatg

SEQ ID NO: 181974 - DNA, 25 bp, Artificial
  probe
  misc_feature (1)..(25): SEQ ID NO: 1356; WAN024ETM_at; Start 45; Stop 69
tggaaagaatgaagtattgaagggc

SEQ ID NO: 181975 - DNA, 25 bp, Artificial
  probe
  misc_feature (1)..(25): SEQ ID NO: 1356; WAN024ETM_at; Start 632; Stop 656
tctttatggcagacggtgtggttgt

SEQ ID NO: 181976 - DNA, 25 bp, Artificial
  probe
  misc_feature (1)..(25): SEQ ID NO: 851; WAN024ETN_at; Start 427; Stop 451
cgcacggttccgctggactttttgt

SEQ ID NO: 181977 - DNA, 25 bp, Artificial
  probe
  misc_feature (1)..(25): SEQ ID NO: 851; WAN024ETN_at; Start 1007; Stop 1031
tcttccacatctttgagaatatcgg

SEQ ID NO: 181978 - DNA, 25 bp, Artificial
  probe
  misc_feature (1)..(25): SEQ ID NO: 851; WAN024ETN_at; Start 1127; Stop 1151
tgcttttatcgatgagttaccagac

SEQ ID NO: 181979 - DNA, 25 bp, Artificial
  probe
  misc_feature (1)..(25): SEQ ID NO: 851; WAN024ETN_at; Start 736; Stop 760
gcccaaacaacgacttaccagcagg

SEQ ID NO: 181980 - DNA, 25 bp, Artificial
  probe
  misc_feature (1)..(25): SEQ ID NO: 851; WAN024ETN_at; Start 652; Stop 676
gacggacgagcttttcttcaccaga

SEQ ID NO: 181981 - DNA, 25 bp, Artificial
  probe
  misc_feature (1)..(25): SEQ ID NO: 851; WAN024ETN_at; Start 669; Stop 693
tcaccagattggaatgccgacctac

SEQ ID NO: 181982 - DNA, 25 bp, Artificial
  probe
  misc_feature (1)..(25): SEQ ID NO: 851; WAN024ETN_at; Start 364; Stop 388
tcctatatcctcatgttggctcgtg

SEQ ID NO: 181983 - DNA, 25 bp, Artificial
  probe
  misc_feature (1)..(25): SEQ ID NO: 851; WAN024ETN_at; Start 720; Stop 744
caatccctttgagtttgcccaaaca

SEQ ID NO: 181984 - DNA, 25 bp, Artificial
  probe
  misc_feature (1)..(25): SEQ ID NO: 851; WAN024ETN_at; Start 965; Stop 989
agttctacacttatatttccacagg

SEQ ID NO: 181985 - DNA, 25 bp, Artificial
  probe
  misc_feature (1)..(25): SEQ ID NO: 851; WAN024ETN_at; Start 824; Stop 848
tgcttatcccagttcgagagtcaga

SEQ ID NO: 181986 - DNA, 25 bp, Artificial
  probe
  misc_feature (1)..(25): SEQ ID NO: 851; WAN024ETN_at; Start 126; Stop 150
cattttagggcagcaggtcgcctgg

SEQ ID NO: 181987 - DNA, 25 bp, Artificial
  probe
  misc_feature (1)..(25): SEQ ID NO: 851; WAN024ETN_at; Start 810; Stop 834
taatgcttcgaatctgcttatccca

SEQ ID NO: 181988 - DNA, 25 bp, Artificial
  probe
  misc_feature (1)..(25): SEQ ID NO: 851; WAN024ETN_at; Start 707; Stop 731
ttttggcttggctcaatccctttga

SEQ ID NO: 181989 - DNA, 25 bp, Artificial
  probe
  misc_feature (1)..(25): SEQ ID NO: 851; WAN024ETN_at; Start 289; Stop 313
gcatcaacgggtgccaaaaactggg

SEQ ID NO: 181990 - DNA, 25 bp, Artificial
  probe
  misc_feature (1)..(25): SEQ ID NO: 851; WAN024ETN_at; Start 1037; Stop 1061
tgactggactacttcctttgacggg

SEQ ID NO: 181991 - DNA, 25 bp, Artificial
  probe
  misc_feature (1)..(25): SEQ ID NO: 851; WAN024ETN_at; Start 381; Stop 405
ggctcgtgtcattgtccaatttaca

SEQ ID NO: 181992 - DNA, 25 bp, Artificial
  probe
  misc_feature (1)..(25): SEQ ID NO: 851; WAN024ETN_at; Start 66; Stop 90
catcggtgtggtggctatctatata

SEQ ID NO: 181993 - DNA, 25 bp, Artificial
  probe
  misc_feature (1)..(25): SEQ ID NO: 851; WAN024ETN_at; Start 239; Stop 263
gcttgggacttatgatcttgccgat

SEQ ID NO: 181994 - DNA, 25 bp, Artificial
  probe
  misc_feature (1)..(25): SEQ ID NO: 851; WAN024ETN_at; Start 546; Stop 570
ctcaggaatcgttttattatcaggg

SEQ ID NO: 181995 - DNA, 25 bp, Artificial
  probe
  misc_feature (1)..(25): SEQ ID NO: 851; WAN024ETN_at; Start 1023; Stop 1047
gaatatcggtgctgtgactggacta

SEQ ID NO: 181996 - DNA, 25 bp, Artificial
  probe
  misc_feature (1)..(25): SEQ ID NO: 851; WAN024ETN_at; Start 638; Stop 662
tctttattagcaaggacggacgagc

SEQ ID NO: 181997 - DNA, 25 bp, Artificial
  probe
  misc_feature (1)..(25): SEQ ID NO: 851; WAN024ETN_at; Start 195; Stop 219
tacagaatttctttggaaggtgacc

SEQ ID NO: 181998 - DNA, 25 bp, Artificial
  probe
  misc_feature (1)..(25): SEQ ID NO: 851; WAN024ETN_at; Start 111; Stop 135
caataatattctgcccattttaggg

SEQ ID NO: 181999 - DNA, 25 bp, Artificial
  probe
  misc_feature (1)..(25): SEQ ID NO: 851; WAN024ETN_at; Start 532; Stop 556
tttgtagccattttctcaggaatcg

SEQ ID NO: 182000 - DNA, 25 bp, Artificial
  probe
  misc_feature (1)..(25): SEQ ID NO: 851; WAN024ETN_at; Start 593; Stop 617
cagtatttgtgactgctgtaacagg

SEQ ID NO: 182001 - DNA, 25 bp, Artificial
  probe
  misc_feature (1)..(25): SEQ ID NO: 851; WAN024ETN_at; Start 52; Stop 76
ttttttctactggtcatcggtgtgg

SEQ ID NO: 182002 - DNA, 25 bp, Artificial
  probe
  misc_feature (1)..(25): SEQ ID NO: 851; WAN024ETN_at; Start 880; Stop 904
ggctttattggctctgtcctggtta

SEQ ID NO: 182003 - DNA, 25 bp, Artificial
  probe
  misc_feature (1)..(25): SEQ ID NO: 851; WAN024ETN_at; Start 900; Stop 924
ggttattgccctctatctcatgttg

SEQ ID NO: 182004 - DNA, 25 bp, Artificial
  probe
  misc_feature (1)..(25): SEQ ID NO: 851; WAN024ETN_at; Start 1061; Stop 1085
ggattcccttgcctttcatttcgca

SEQ ID NO: 182005 - DNA, 25 bp, Artificial
  probe
  misc_feature (1)..(25): SEQ ID NO: 851; WAN024ETN_at; Start 412; Stop 436
cataaggaatggagacgcacggttc

SEQ ID NO: 182006 - DNA, 25 bp, Artificial
  probe
  misc_feature (1)..(25): SEQ ID NO: 851; WAN024ETN_at; Start 274; Stop 298
aatccaagcttagttgcatcaacgg

SEQ ID NO: 182007 - DNA, 25 bp, Artificial
  probe
  misc_feature (1)..(25): SEQ ID NO: 851; WAN024ETN_at; Start 751; Stop 775
taccagcaggctcaagggcagattg

SEQ ID NO: 182008 - DNA, 25 bp, Artificial
  probe
  misc_feature (1)..(25): SEQ ID NO: 851; WAN024ETN_at; Start 461; Stop 485
ggatgattctctttaccattccagt

SEQ ID NO: 182009 - DNA, 25 bp, Artificial
  probe
  misc_feature (1)..(25): SEQ ID NO: 851; WAN024ETN_at; Start 611; Stop 635
taacaggagttgctggtttcttagc

SEQ ID NO: 182010 - DNA, 25 bp, Artificial
  probe
  misc_feature (1)..(25): SEQ ID NO: 3064; WAN024ETO_at; Start 82; Stop 106
gataccgtgctctttttgagcagca

SEQ ID NO: 182011 - DNA, 25 bp, Artificial
  probe
  misc_feature (1)..(25): SEQ ID NO: 3064; WAN024ETO_at; Start 86; Stop 110
ccgtgctctttttgagcagcaaaga

SEQ ID NO: 182012 - DNA, 25 bp, Artificial
  probe
  misc_feature (1)..(25): SEQ ID NO: 3064; WAN024ETO_at; Start 12; Stop 36
caaagtagatagcagagaagaaagg

SEQ ID NO: 182013 - DNA, 25 bp, Artificial
  probe
  misc_feature (1)..(25): SEQ ID NO: 3064; WAN024ETO_at; Start 39; Stop 63
tttgaaggaggatagggaaacatcc

SEQ ID NO: 182014 - DNA, 25 bp, Artificial
  probe
  misc_feature (1)..(25): SEQ ID NO: 3064; WAN024ETO_at; Start 176; Stop 200
tcaaggacgtgcttgagggcgttca

SEQ ID NO: 182015 - DNA, 25 bp, Artificial
  probe
  misc_feature (1)..(25): SEQ ID NO: 3064; WAN024ETO_at; Start 64; Stop 88
tacaccgccaaacatgctgataccg

SEQ ID NO: 182016 - DNA, 25 bp, Artificial
  probe
  misc_feature (1)..(25): SEQ ID NO: 3064; WAN024ETO_at; Start 207; Stop 231
cagagtgaagcgttgccttccatga

SEQ ID NO: 182017 - DNA, 25 bp, Artificial
  probe
  misc_feature (1)..(25): SEQ ID NO: 3064; WAN024ETO_at; Start 190; Stop 214
gagggcgttcatcttttcagagtga

SEQ ID NO: 182018 - DNA, 25 bp, Artificial
  probe
  misc_feature (1)..(25): SEQ ID NO: 3064; WAN024ETO_at; Start 134; Stop 158
tcttcttgagtagtcgcttctttga

SEQ ID NO: 182019 - DNA, 25 bp, Artificial
  probe
  misc_feature (1)..(25): SEQ ID NO: 3064; WAN024ETO_at; Start 28; Stop 52
gaagaaaggcatttgaaggaggata

SEQ ID NO: 182020 - DNA, 25 bp, Artificial
  probe
  misc_feature (1)..(25): SEQ ID NO: 3064; WAN024ETO_at; Start 199; Stop 223
catcttttcagagtgaagcgttgcc

SEQ ID NO: 182021 - DNA, 25 bp, Artificial
  probe
  misc_feature (1)..(25): SEQ ID NO: 3064; WAN024ETO_at; Start 119; Stop 143
tgggcttcgagtttttcttcttgag

SEQ ID NO: 182022 - DNA, 25 bp, Artificial
  probe
  misc_feature (1)..(25): SEQ ID NO: 3064; WAN024ETO_at; Start 105; Stop 129
caaagagagcttgttgggcttcgag

SEQ ID NO: 182023 - DNA, 25 bp, Artificial
  probe
  misc_feature (1)..(25): SEQ ID NO: 3064; WAN024ETO_at; Start 127; Stop 151
gagtttttcttcttgagtagtcgct

SEQ ID NO: 182024 - DNA, 25 bp, Artificial
  probe
  misc_feature (1)..(25): SEQ ID NO: 3064; WAN024ETO_at; Start 70; Stop 94
gccaaacatgctgataccgtgctct

SEQ ID NO: 182025 - DNA, 25 bp, Artificial
  probe
  misc_feature (1)..(25): SEQ ID NO: 3064; WAN024ETO_at; Start 55; Stop 79
gaaacatcctacaccgccaaacatg

SEQ ID NO: 182026 - DNA, 25 bp, Artificial
  probe
  misc_feature (1)..(25): SEQ ID NO: 3064; WAN024ETO_at; Start 76; Stop 100
catgctgataccgtgctctttttga

SEQ ID NO: 182027 - DNA, 25 bp, Artificial
  probe
  misc_feature (1)..(25): SEQ ID NO: 3064; WAN024ETO_at; Start 186; Stop 210
gcttgagggcgttcatcttttcaga

SEQ ID NO: 182028 - DNA, 25 bp, Artificial
  probe
  misc_feature (1)..(25): SEQ ID NO: 3064; WAN024ETO_at; Start 152; Stop 176
tctttgagacgcgtttggtgtggct

SEQ ID NO: 182029 - DNA, 25 bp, Artificial
  probe
  misc_feature (1)..(25): SEQ ID NO: 3064; WAN024ETO_at; Start 96; Stop 120
tttgagcagcaaagagagcttgttg

SEQ ID NO: 182030 - DNA, 25 bp, Artificial
  probe
  misc_feature (1)..(25): SEQ ID NO: 3064; WAN024ETO_at; Start 23; Stop 47
gcagagaagaaaggcatttgaagga

SEQ ID NO: 182031 - DNA, 25 bp, Artificial
  probe
  misc_feature (1)..(25): SEQ ID NO: 3064; WAN024ETO_at; Start 144; Stop 168
tagtcgcttctttgagacgcgtttg

SEQ ID NO: 182032 - DNA, 25 bp, Artificial
  probe
  misc_feature (1)..(25): SEQ ID NO: 3064; WAN024ETO_at; Start 49; Stop 73
gatagggaaacatcctacaccgcca

SEQ ID NO: 182033 - DNA, 25 bp, Artificial
  probe
  misc_feature (1)..(25): SEQ ID NO: 3064; WAN024ETO_at; Start 203; Stop 227
ttttcagagtgaagcgttgccttcc

SEQ ID NO: 182034 - DNA, 25 bp, Artificial
  probe
  misc_feature (1)..(25): SEQ ID NO: 3064; WAN024ETO_at; Start 178; Stop 202
aaggacgtgcttgagggcgttcatc

SEQ ID NO: 182035 - DNA, 25 bp, Artificial
  probe
  misc_feature (1)..(25): SEQ ID NO: 3064; WAN024ETO_at; Start 17; Stop 41
tagatagcagagaagaaaggcattt

SEQ ID NO: 182036 - DNA, 25 bp, Artificial
  probe
  misc_feature (1)..(25): SEQ ID NO: 3064; WAN024ETO_at; Start 5; Stop 29
tgggcagcaaagtagatagcagaga

SEQ ID NO: 182037 - DNA, 25 bp, Artificial
  probe
  misc_feature (1)..(25): SEQ ID NO: 3064; WAN024ETO_at; Start 2; Stop 26
tgttgggcagcaaagtagatagcag

SEQ ID NO: 182038 - DNA, 25 bp, Artificial
  probe
  misc_feature (1)..(25): SEQ ID NO: 3064; WAN024ETO_at; Start 93; Stop 117
ctttttgagcagcaaagagagcttg

SEQ ID NO: 182039 - DNA, 25 bp, Artificial
  probe
  misc_feature (1)..(25): SEQ ID NO: 3064; WAN024ETO_at; Start 161; Stop 185
cgcgtttggtgtggctcaaggacgt

SEQ ID NO: 182040 - DNA, 25 bp, Artificial
  probe
  misc_feature (1)..(25): SEQ ID NO: 3064; WAN024ETO_at; Start 155; Stop 179
ttgagacgcgtttggtgtggctcaa

SEQ ID NO: 182041 - DNA, 25 bp, Artificial
  probe
  misc_feature (1)..(25): SEQ ID NO: 3064; WAN024ETO_at; Start 36; Stop 60
gcatttgaaggaggatagggaaaca

SEQ ID NO: 182042 - DNA, 25 bp, Artificial
  probe
  misc_feature (1)..(25): SEQ ID NO: 3064; WAN024ETO_at; Start 140; Stop 164
tgagtagtcgcttctttgagacgcg

SEQ ID NO: 182043 - DNA, 25 bp, Artificial
  probe
  misc_feature (1)..(25): SEQ ID NO: 3064; WAN024ETO_at; Start 102; Stop 126
cagcaaagagagcttgttgggcttc

SEQ ID NO: 182044 - DNA, 25 bp, Artificial
  probe
  misc_feature (1)..(25): SEQ ID NO: 3871; WAN024ETP_at; Start 571; Stop 595
caatcgctcctttcacttcacggag

SEQ ID NO: 182045 - DNA, 25 bp, Artificial
  probe
  misc_feature (1)..(25): SEQ ID NO: 3871; WAN024ETP_at; Start 750; Stop 774
tatcgttcgtccaaaacttcgcaaa

SEQ ID NO: 182046 - DNA, 25 bp, Artificial
  probe
  misc_feature (1)..(25): SEQ ID NO: 3871; WAN024ETP_at; Start 508; Stop 532
ggcattcctctaggttctccaagta

SEQ ID NO: 182047 - DNA, 25 bp, Artificial
  probe
  misc_feature (1)..(25): SEQ ID NO: 3871; WAN024ETP_at; Start 69; Stop 93
tgtcaatgtcgataaaaccacaggt

SEQ ID NO: 182048 - DNA, 25 bp, Artificial
  probe
  misc_feature (1)..(25): SEQ ID NO: 3871; WAN024ETP_at; Start 248; Stop 272
catggaaggcaacgcttcactctga

SEQ ID NO: 182049 - DNA, 25 bp, Artificial
  probe
  misc_feature (1)..(25): SEQ ID NO: 3871; WAN024ETP_at; Start 627; Stop 651
gaaaatgatttacatgagcccactc

SEQ ID NO: 182050 - DNA, 25 bp, Artificial
  probe
  misc_feature (1)..(25): SEQ ID NO: 3871; WAN024ETP_at; Start 527; Stop 551
caagtatgattttggttgcctgtgc

SEQ ID NO: 182051 - DNA, 25 bp, Artificial
  probe
  misc_feature (1)..(25): SEQ ID NO: 3871; WAN024ETP_at; Start 234; Stop 258
tggtatctaccaatcatggaaggca

SEQ ID NO: 182052 - DNA, 25 bp, Artificial
  probe
  misc_feature (1)..(25): SEQ ID NO: 3871; WAN024ETP_at; Start 884; Stop 908
aaaaacacaaaaatcgcaacgctgg

SEQ ID NO: 182053 - DNA, 25 bp, Artificial
  probe
  misc_feature (1)..(25): SEQ ID NO: 3871; WAN024ETP_at; Start 893; Stop 917
aaaatcgcaacgctggaaaacaacg

SEQ ID NO: 182054 - DNA, 25 bp, Artificial
  probe
  misc_feature (1)..(25): SEQ ID NO: 3871; WAN024ETP_at; Start 540; Stop 564
ggttgcctgtgctggtgtcctttac

SEQ ID NO: 182055 - DNA, 25 bp, Artificial
  probe
  misc_feature (1)..(25): SEQ ID NO: 3871; WAN024ETP_at; Start 671; Stop 695
tcttctcaccagctagtgtcacact

SEQ ID NO: 182056 - DNA, 25 bp, Artificial
  probe
  misc_feature (1)..(25): SEQ ID NO: 3871; WAN024ETP_at; Start 486; Stop 510
ggttgctcaagcaagctacctaggc

SEQ ID NO: 182057 - DNA, 25 bp, Artificial
  probe
  misc_feature (1)..(25): SEQ ID NO: 3871; WAN024ETP_at; Start 260; Stop 284
cgcttcactctgaaaagatgaacgc

SEQ ID NO: 182058 - DNA, 25 bp, Artificial
  probe
  misc_feature (1)..(25): SEQ ID NO: 3871; WAN024ETP_at; Start 496; Stop 520
gcaagctacctaggcattcctctag

SEQ ID NO: 182059 - DNA, 25 bp, Artificial
  probe
  misc_feature (1)..(25): SEQ ID NO: 3871; WAN024ETP_at; Start 146; Stop 170
tcaagtacttcgctactgataaagg

SEQ ID NO: 182060 - DNA, 25 bp, Artificial
  probe
  misc_feature (1)..(25): SEQ ID NO: 3871; WAN024ETP_at; Start 462; Stop 486
ctttgctgcccaacatactgaaggg

SEQ ID NO: 182061 - DNA, 25 bp, Artificial
  probe
  misc_feature (1)..(25): SEQ ID NO: 3871; WAN024ETP_at; Start 650; Stop 674
tcatgatcgtcgtcttctccctctt

SEQ ID NO: 182062 - DNA, 25 bp, Artificial
  probe
  misc_feature (1)..(25): SEQ ID NO: 3871; WAN024ETP_at; Start 604; Stop 628
gaaatgcaaagagaacaaatcaaga

SEQ ID NO: 182063 - DNA, 25 bp, Artificial
  probe
  misc_feature (1)..(25): SEQ ID NO: 3871; WAN024ETP_at; Start 436; Stop 460
caaatgcctttcttctctgctatct

SEQ ID NO: 182064 - DNA, 25 bp, Artificial
  probe
  misc_feature (1)..(25): SEQ ID NO: 3871; WAN024ETP_at; Start 707; Stop 731
tcggtggtttcatgatgattctcca

SEQ ID NO: 182065 - DNA, 25 bp, Artificial
  probe
  misc_feature (1)..(25): SEQ ID NO: 3871; WAN024ETP_at; Start 86; Stop 110
ccacaggtcagccaacaggatttat

SEQ ID NO: 182066 - DNA, 25 bp, Artificial
  probe
  misc_feature (1)..(25): SEQ ID NO: 3871; WAN024ETP_at; Start 698; Stop 722
actgggttgtcggtggtttcatgat

SEQ ID NO: 182067 - DNA, 25 bp, Artificial
  probe
  misc_feature (1)..(25): SEQ ID NO: 3871; WAN024ETP_at; Start 589; Stop 613
cacggagtagaagatgaaatgcaaa

SEQ ID NO: 182068 - DNA, 25 bp, Artificial
  probe
  misc_feature (1)..(25): SEQ ID NO: 3871; WAN024ETP_at; Start 553; Stop 577
ggtgtcctttactatcttcaatcgc

SEQ ID NO: 182069 - DNA, 25 bp, Artificial
  probe
  misc_feature (1)..(25): SEQ ID NO: 3871; WAN024ETP_at; Start 906; Stop 930
tggaaaacaacgttcgagataacta

SEQ ID NO: 182070 - DNA, 25 bp, Artificial
  probe
  misc_feature (1)..(25): SEQ ID NO: 3871; WAN024ETP_at; Start 847; Stop 871
gttacccctgaacaaccaactgcta

SEQ ID NO: 182071 - DNA, 25 bp, Artificial
  probe
  misc_feature (1)..(25): SEQ ID NO: 3871; WAN024ETP_at; Start 449; Stop 473
tctctgctatctactttgctgccca

SEQ ID NO: 182072 - DNA, 25 bp, Artificial
  probe
  misc_feature (1)..(25): SEQ ID NO: 3871; WAN024ETP_at; Start 333; Stop 357
tactcaagaagaaaaactcgaagcc

SEQ ID NO: 182073 - DNA, 25 bp, Artificial
  probe
  misc_feature (1)..(25): SEQ ID NO: 3871; WAN024ETP_at; Start 155; Stop 179
tcgctactgataaaggtctaggctt

SEQ ID NO: 182074 - DNA, 25 bp, Artificial
  probe
  misc_feature (1)..(25): SEQ ID NO: 3871; WAN024ETP_at; Start 169; Stop 193
ggtctaggctttggtgtcgctatca

SEQ ID NO: 182075 - DNA, 25 bp, Artificial
  probe
  misc_feature (1)..(25): SEQ ID NO: 3871; WAN024ETP_at; Start 641; Stop 665
tgagcccactcatgatcgtcgtctt

SEQ ID NO: 182076 - DNA, 25 bp, Artificial
  probe
  misc_feature (1)..(25): SEQ ID NO: 3871; WAN024ETP_at; Start 738; Stop 762
tatcgtcaactatatcgttcgtcca

SEQ ID NO: 182077 - DNA, 25 bp, Artificial
  probe
  misc_feature (1)..(25): SEQ ID NO: 3871; WAN024ETP_at; Start 684; Stop 708
tagtgtcacactttactgggttgtc

SEQ ID NO: 182078 - DNA, 25 bp, Artificial
  probe
  misc_feature (1)..(25): SEQ ID NO: 1669; WAN024ETQ_at; Start 554; Stop 578
caacgatttcggttgtcgaagtcta

SEQ ID NO: 182079 - DNA, 25 bp, Artificial
  probe
  misc_feature (1)..(25): SEQ ID NO: 1669; WAN024ETQ_at; Start 335; Stop 359
ttcaggcccttctcaaacgttcagg

SEQ ID NO: 182080 - DNA, 25 bp, Artificial
  probe
  misc_feature (1)..(25): SEQ ID NO: 1669; WAN024ETQ_at; Start 571; Stop 595
gaagtctatgtttcaaaagtccgta

SEQ ID NO: 182081 - DNA, 25 bp, Artificial
  probe
  misc_feature (1)..(25): SEQ ID NO: 1669; WAN024ETQ_at; Start 493; Stop 517
caaaatgtgattttgcctaagacgc

SEQ ID NO: 182082 - DNA, 25 bp, Artificial
  probe
  misc_feature (1)..(25): SEQ ID NO: 1669; WAN024ETQ_at; Start 127; Stop 151
ggtgtctatgacttgattttgctgg

SEQ ID NO: 182083 - DNA, 25 bp, Artificial
  probe
  misc_feature (1)..(25): SEQ ID NO: 1669; WAN024ETQ_at; Start 608; Stop 632
gaaccacttttgcagagaatttgca

SEQ ID NO: 182084 - DNA, 25 bp, Artificial
  probe
  misc_feature (1)..(25): SEQ ID NO: 1669; WAN024ETQ_at; Start 240; Stop 264
caaggaaagtttggatgacaaggga

SEQ ID NO: 182085 - DNA, 25 bp, Artificial
  probe
  misc_feature (1)..(25): SEQ ID NO: 1669; WAN024ETQ_at; Start 281; Stop 305
gagcggatgattatctgaccaaacc

SEQ ID NO: 182086 - DNA, 25 bp, Artificial
  probe
  misc_feature (1)..(25): SEQ ID NO: 1669; WAN024ETQ_at; Start 418; Stop 442
accgttaaagttgaagatactcctg

SEQ ID NO: 182087 - DNA, 25 bp, Artificial
  probe
  misc_feature (1)..(25): SEQ ID NO: 1669; WAN024ETQ_at; Start 66; Stop 90
cgattttgcggatgttatgcaggta

SEQ ID NO: 182088 - DNA, 25 bp, Artificial
  probe
  misc_feature (1)..(25): SEQ ID NO: 1669; WAN024ETQ_at; Start 112; Stop 136
tacgaagctgagagtggtgtctatg

SEQ ID NO: 182089 - DNA, 25 bp, Artificial
  probe
  misc_feature (1)..(25): SEQ ID NO: 1669; WAN024ETQ_at; Start 81; Stop 105
tatgcaggtatttgatggagaagaa

SEQ ID NO: 182090 - DNA, 25 bp, Artificial
  probe
  misc_feature (1)..(25): SEQ ID NO: 1669; WAN024ETQ_at; Start 637; Stop 661
ttgcgtagtgttgggtatcttttaa

SEQ ID NO: 182091 - DNA, 25 bp, Artificial
  probe
  misc_feature (1)..(25): SEQ ID NO: 1669; WAN024ETQ_at; Start 213; Stop 237
tacgacaccagttctgattatgact

SEQ ID NO: 182092 - DNA, 25 bp, Artificial
  probe
  misc_feature (1)..(25): SEQ ID NO: 1669; WAN024ETQ_at; Start 541; Stop 565
tttgatagtgatacaacgatttcgg

SEQ ID NO: 182093 - DNA, 25 bp, Artificial
  probe
  misc_feature (1)..(25): SEQ ID NO: 1669; WAN024ETQ_at; Start 478; Stop 502
tatttccttcaaaatcaaaatgtga

SEQ ID NO: 182094 - DNA, 25 bp, Artificial
  probe
  misc_feature (1)..(25): SEQ ID NO: 1669; WAN024ETQ_at; Start 514; Stop 538
acgcagatttttgaccgtctatggg

SEQ ID NO: 182095 - DNA, 25 bp, Artificial
  probe
  misc_feature (1)..(25): SEQ ID NO: 1669; WAN024ETQ_at; Start 180; Stop 204
ccaagtcttaaaagaattgcgtgaa

SEQ ID NO: 182096 - DNA, 25 bp, Artificial
  probe
  misc_feature (1)..(25): SEQ ID NO: 1669; WAN024ETQ_at; Start 346; Stop 370
ctcaaacgttcagggaagtttaatg

SEQ ID NO: 182097 - DNA, 25 bp, Artificial
  probe
  misc_feature (1)..(25): SEQ ID NO: 1669; WAN024ETQ_at; Start 225; Stop 249
tctgattatgactgccaaggaaagt

SEQ ID NO: 182098 - DNA, 25 bp, Artificial
  probe
  misc_feature (1)..(25): SEQ ID NO: 1669; WAN024ETQ_at; Start 366; Stop 390
taatgaaaacaccttgacttatggg

SEQ ID NO: 182099 - DNA, 25 bp, Artificial
  probe
  misc_feature (1)..(25): SEQ ID NO: 1669; WAN024ETQ_at; Start 376; Stop 400
accttgacttatgggaatatcgtgg

SEQ ID NO: 182100 - DNA, 25 bp, Artificial
  probe
  misc_feature (1)..(25): SEQ ID NO: 1669; WAN024ETQ_at; Start 296; Stop 320
tgaccaaacctttctacctagaaga

SEQ ID NO: 182101 - DNA, 25 bp, Artificial
  probe
  misc_feature (1)..(25): SEQ ID NO: 1669; WAN024ETQ_at; Start 390; Stop 414
gaatatcgtggttaatttatcaacc

SEQ ID NO: 182102 - DNA, 25 bp, Artificial
  probe
  misc_feature (1)..(25): SEQ ID NO: 1669; WAN024ETQ_at; Start 28; Stop 52
gacctaggtctgtcaaattcagtat

SEQ ID NO: 182103 - DNA, 25 bp, Artificial
  probe
  misc_feature (1)..(25): SEQ ID NO: 1669; WAN024ETQ_at; Start 602; Stop 626
taaagggaaccacttttgcagagaa

SEQ ID NO: 182104 - DNA, 25 bp, Artificial
  probe
  misc_feature (1)..(25): SEQ ID NO: 1669; WAN024ETQ_at; Start 198; Stop 222
gcgtgaaaagggaattacgacacca

SEQ ID NO: 182105 - DNA, 25 bp, Artificial
  probe
  misc_feature (1)..(25): SEQ ID NO: 1669; WAN024ETQ_at; Start 256; Stop 280
gacaagggacatggatttgaactgg

SEQ ID NO: 182106 - DNA, 25 bp, Artificial
  probe
  misc_feature (1)..(25): SEQ ID NO: 1669; WAN024ETQ_at; Start 431; Stop 455
aagatactcctgtcgaattgctggg

SEQ ID NO: 182107 - DNA, 25 bp, Artificial
  probe
  misc_feature (1)..(25): SEQ ID NO: 1669; WAN024ETQ_at; Start 271; Stop 295
tttgaactgggagcggatgattatc

SEQ ID NO: 182108 - DNA, 25 bp, Artificial
  probe
  misc_feature (1)..(25): SEQ ID NO: 1669; WAN024ETQ_at; Start 506; Stop 530
tgcctaagacgcagatttttgaccg

SEQ ID NO: 182109 - DNA, 25 bp, Artificial
  probe
  misc_feature (1)..(25): SEQ ID NO: 1669; WAN024ETQ_at; Start 308; Stop 332
tctacctagaagaacttaaaatgcg

SEQ ID NO: 182110 - DNA, 25 bp, Artificial
  probe
  misc_feature (1)..(25): SEQ ID NO: 1669; WAN024ETQ_at; Start 55; Stop 79
gactttttagacgattttgcggatg

SEQ ID NO: 182111 - DNA, 25 bp, Artificial
  probe
  misc_feature (1)..(25): SEQ ID NO: 1669; WAN024ETQ_at; Start 141; Stop 165
gattttgctggatttgatgttgcca

SEQ ID NO: 182112 - DNA, 25 bp, Artificial
  probe
  misc_feature (1)..(25): SEQ ID NO: 1045; WAN024ETR_at; Start 192; Stop 216
tattaaattcaaagatatgtaccat

SEQ ID NO: 182113 - DNA, 25 bp, Artificial
  probe
  misc_feature (1)..(25): SEQ ID NO: 1045; WAN024ETR_at; Start 395; Stop 419
tggtcaaacgaaaaggcaaacgtga

SEQ ID NO: 182114 - DNA, 25 bp, Artificial
  probe
  misc_feature (1)..(25): SEQ ID NO: 1045; WAN024ETR_at; Start 389; Stop 413
tctgggtggtcaaacgaaaaggcaa

SEQ ID NO: 182115 - DNA, 25 bp, Artificial
  probe
  misc_feature (1)..(25): SEQ ID NO: 1045; WAN024ETR_at; Start 286; Stop 310
gatggtgaattttactatcacgaga

SEQ ID NO: 182116 - DNA, 25 bp, Artificial
  probe
  misc_feature (1)..(25): SEQ ID NO: 1045; WAN024ETR_at; Start 124; Stop 148
gatgaaaaagatcagtttgtccaaa

SEQ ID NO: 182117 - DNA, 25 bp, Artificial
  probe
  misc_feature (1)..(25): SEQ ID NO: 1045; WAN024ETR_at; Start 138; Stop 162
gtttgtccaaacagtgaccatcgct

SEQ ID NO: 182118 - DNA, 25 bp, Artificial
  probe
  misc_feature (1)..(25): SEQ ID NO: 1045; WAN024ETR_at; Start 298; Stop 322
tactatcacgagattatcggtttgg

SEQ ID NO: 182119 - DNA, 25 bp, Artificial
  probe
  misc_feature (1)..(25): SEQ ID NO: 1045; WAN024ETR_at; Start 168; Stop 192
ccgtaaacagaagaactttgacatt

SEQ ID NO: 182120 - DNA, 25 bp, Artificial
  probe
  misc_feature (1)..(25): SEQ ID NO: 1045; WAN024ETR_at; Start 379; Stop 403
gctaatgatgtctgggtggtcaaac

SEQ ID NO: 182121 - DNA, 25 bp, Artificial
  probe
  misc_feature (1)..(25): SEQ ID NO: 1045; WAN024ETR_at; Start 356; Stop 380
tcaaggaaatcctgcaaccaggtgc

SEQ ID NO: 182122 - DNA, 25 bp, Artificial
  probe
  misc_feature (1)..(25): SEQ ID NO: 1045; WAN024ETR_at; Start 318; Stop 342
tttggaagtctatgagggtgatagc

SEQ ID NO: 182123 - DNA, 25 bp, Artificial
  probe
  misc_feature (1)..(25): SEQ ID NO: 1045; WAN024ETR_at; Start 71; Stop 95
tgacggattttgcagaagaacggtt

SEQ ID NO: 182124 - DNA, 25 bp, Artificial
  probe
  misc_feature (1)..(25): SEQ ID NO: 1045; WAN024ETR_at; Start 439; Stop 463
ccaccagtggttctcaatgttgata

SEQ ID NO: 182125 - DNA, 25 bp, Artificial
  probe
  misc_feature (1)..(25): SEQ ID NO: 1045; WAN024ETR_at; Start 309; Stop 333
gattatcggtttggaagtctatgag

SEQ ID NO: 182126 - DNA, 25 bp, Artificial
  probe
  misc_feature (1)..(25): SEQ ID NO: 1045; WAN024ETR_at; Start 492; Stop 516
cttagaagggttagacgatgaagat

SEQ ID NO: 182127 - DNA, 25 bp, Artificial
  probe
  misc_feature (1)..(25): SEQ ID NO: 1045; WAN024ETR_at; Start 410; Stop 434
gcaaacgtgatttgcttttacctta

SEQ ID NO: 182128 - DNA, 25 bp, Artificial
  probe
  misc_feature (1)..(25): SEQ ID NO: 1045; WAN024ETR_at; Start 207; Stop 231
tatgtaccatatcaatactatcgaa

SEQ ID NO: 182129 - DNA, 25 bp, Artificial
  probe
  misc_feature (1)..(25): SEQ ID NO: 1045; WAN024ETR_at; Start 471; Stop 495
taaacgggtcgatgtggaaatctta

SEQ ID NO: 182130 - DNA, 25 bp, Artificial
  probe
  misc_feature (1)..(25): SEQ ID NO: 1045; WAN024ETR_at; Start 222; Stop 246
tactatcgaaaagtacaagggatac

SEQ ID NO: 182131 - DNA, 25 bp, Artificial
  probe
  misc_feature (1)..(25): SEQ ID NO: 1045; WAN024ETR_at; Start 150; Stop 174
agtgaccatcgctagccaccgtaaa

SEQ ID NO: 182132 - DNA, 25 bp, Artificial
  probe
  misc_feature (1)..(25): SEQ ID NO: 1045; WAN024ETR_at; Start 265; Stop 289
gaagatttgaatgacctagacgatg

SEQ ID NO: 182133 - DNA, 25 bp, Artificial
  probe
  misc_feature (1)..(25): SEQ ID NO: 1045; WAN024ETR_at; Start 26; Stop 50
tcgttaatacgcagggattacaggg

SEQ ID NO: 182134 - DNA, 25 bp, Artificial
  probe
  misc_feature (1)..(25): SEQ ID NO: 1045; WAN024ETR_at; Start 160; Stop 184
gctagccaccgtaaacagaagaact

SEQ ID NO: 182135 - DNA, 25 bp, Artificial
  probe
  misc_feature (1)..(25): SEQ ID NO: 1045; WAN024ETR_at; Start 252; Stop 276
caaggtcgctgaggaagatttgaat

SEQ ID NO: 182136 - DNA, 25 bp, Artificial
  probe
  misc_feature (1)..(25): SEQ ID NO: 1045; WAN024ETR_at; Start 333; Stop 357
gggtgatagcttggttggaaccatc

SEQ ID NO: 182137 - DNA, 25 bp, Artificial
  probe
  misc_feature (1)..(25): SEQ ID NO: 1045; WAN024ETR_at; Start 368; Stop 392
tgcaaccaggtgctaatgatgtctg

SEQ ID NO: 182138 - DNA, 25 bp, Artificial
  probe
  misc_feature (1)..(25): SEQ ID NO: 1045; WAN024ETR_at; Start 53; Stop 77
agatgcgagtcttgtctgtgacgga

SEQ ID NO: 182139 - DNA, 25 bp, Artificial
  probe
  misc_feature (1)..(25): SEQ ID NO: 1045; WAN024ETR_at; Start 483; Stop 507
tgtggaaatcttagaagggttagac

SEQ ID NO: 182140 - DNA, 25 bp, Artificial
  probe
  misc_feature (1)..(25): SEQ ID NO: 1045; WAN024ETR_at; Start 424; Stop 448
cttttaccttatatcccaccagtgg

SEQ ID NO: 182141 - DNA, 25 bp, Artificial
  probe
  misc_feature (1)..(25): SEQ ID NO: 1045; WAN024ETR_at; Start 91; Stop 115
cggtttaaaaaaggagctgagctgg

SEQ ID NO: 182142 - DNA, 25 bp, Artificial
  probe
  misc_feature (1)..(25): SEQ ID NO: 1045; WAN024ETR_at; Start 237; Stop 261
caagggatacagtctcaaggtcgct

SEQ ID NO: 182143 - DNA, 25 bp, Artificial
  probe
  misc_feature (1)..(25): SEQ ID NO: 1045; WAN024ETR_at; Start 345; Stop 369
ggttggaaccatcaaggaaatcctg

SEQ ID NO: 182144 - DNA, 25 bp, Artificial
  probe
  misc_feature (1)..(25): SEQ ID NO: 1045; WAN024ETR_at; Start 15; Stop 39
tgttgggaaaatcgttaatacgcag

SEQ ID NO: 182145 - DNA, 25 bp, Artificial
  probe
  misc_feature (1)..(25): SEQ ID NO: 1045; WAN024ETR_at; Start 276; Stop 300
tgacctagacgatggtgaattttac

SEQ ID NO: 182146 - DNA, 25 bp, Artificial
  probe
  misc_feature (1)..(25): SEQ ID NO: 3844; WAN024ETS_at; Start 486; Stop 510
tccaatagtagtaacaggtgaagtg

SEQ ID NO: 182147 - DNA, 25 bp, Artificial
  probe
  misc_feature (1)..(25): SEQ ID NO: 3844; WAN024ETS_at; Start 401; Stop 425
tagatgtggcatctaaaggagtaga

SEQ ID NO: 182148 - DNA, 25 bp, Artificial
  probe
  misc_feature (1)..(25): SEQ ID NO: 3844; WAN024ETS_at; Start 230; Stop 254
tataccaagctgctctgaaaattgc

SEQ ID NO: 182149 - DNA, 25 bp, Artificial
  probe
  misc_feature (1)..(25): SEQ ID NO: 3844; WAN024ETS_at; Start 158; Stop 182
tagaggatttgttaaagtatgctgg

SEQ ID NO: 182150 - DNA, 25 bp, Artificial
  probe
  misc_feature (1)..(25): SEQ ID NO: 3844; WAN024ETS_at; Start 212; Stop 236
cagatgaaaattggaaattatacca

SEQ ID NO: 182151 - DNA, 25 bp, Artificial
  probe
  misc_feature (1)..(25): SEQ ID NO: 3844; WAN024ETS_at; Start 52; Stop 76
gcaccattggtcatttgtataacca

SEQ ID NO: 182152 - DNA, 25 bp, Artificial
  probe
  misc_feature (1)..(25): SEQ ID NO: 3844; WAN024ETS_at; Start 751; Stop 775
gccttatacgagattacagatgaag

SEQ ID NO: 182153 - DNA, 25 bp, Artificial
  probe
  misc_feature (1)..(25): SEQ ID NO: 3844; WAN024ETS_at; Start 765; Stop 789
tacagatgaagatgtaaaggaattc

SEQ ID NO: 182154 - DNA, 25 bp, Artificial
  probe
  misc_feature (1)..(25): SEQ ID NO: 3844; WAN024ETS_at; Start 389; Stop 413
ctttagtaggaatagatgtggcatc

SEQ ID NO: 182155 - DNA, 25 bp, Artificial
  probe
  misc_feature (1)..(25): SEQ ID NO: 3844; WAN024ETS_at; Start 783; Stop 807
ggaattcaaaagagtgaagtaacta

SEQ ID NO: 182156 - DNA, 25 bp, Artificial
  probe
  misc_feature (1)..(25): SEQ ID NO: 3844; WAN024ETS_at; Start 457; Stop 481
gctctagcagcaaatgagaagttca

SEQ ID NO: 182157 - DNA, 25 bp, Artificial
  probe
  misc_feature (1)..(25): SEQ ID NO: 3844; WAN024ETS_at; Start 194; Stop 218
taaacataggaacattgacagatga

SEQ ID NO: 182158 - DNA, 25 bp, Artificial
  probe
  misc_feature (1)..(25): SEQ ID NO: 3844; WAN024ETS_at; Start 410; Stop 434
catctaaaggagtagatagtgcggg

SEQ ID NO: 182159 - DNA, 25 bp, Artificial
  probe
  misc_feature (1)..(25): SEQ ID NO: 3844; WAN024ETS_at; Start 119; Stop 143
tgggcgcctcaccagccatgagtga

SEQ ID NO: 182160 - DNA, 25 bp, Artificial
  probe
  misc_feature (1)..(25): SEQ ID NO: 3844; WAN024ETS_at; Start 293; Stop 317
cctgtggagcaggagaatatagaaa

SEQ ID NO: 182161 - DNA, 25 bp, Artificial
  probe
  misc_feature (1)..(25): SEQ ID NO: 3844; WAN024ETS_at; Start 694; Stop 718
gcagaaaaacgtccaaatggacatc

SEQ ID NO: 182162 - DNA, 25 bp, Artificial
  probe
  misc_feature (1)..(25): SEQ ID NO: 3844; WAN024ETS_at; Start 224; Stop 248
ggaaattataccaagctgctctgaa

SEQ ID NO: 182163 - DNA, 25 bp, Artificial
  probe
  misc_feature (1)..(25): SEQ ID NO: 3844; WAN024ETS_at; Start 705; Stop 729
tccaaatggacatcttcctgggaca

SEQ ID NO: 182164 - DNA, 25 bp, Artificial
  probe
  misc_feature (1)..(25): SEQ ID NO: 3844; WAN024ETS_at; Start 8; Stop 32
ggaaggatttcaatatgacaagttt

SEQ ID NO: 182165 - DNA, 25 bp, Artificial
  probe
  misc_feature (1)..(25): SEQ ID NO: 3844; WAN024ETS_at; Start 138; Stop 162
gagtgagtttccagcagatttagag

SEQ ID NO: 182166 - DNA, 25 bp, Artificial
  probe
  misc_feature (1)..(25): SEQ ID NO: 3844; WAN024ETS_at; Start 491; Stop 515
tagtagtaacaggtgaagtggatgc

SEQ ID NO: 182167 - DNA, 25 bp, Artificial
  probe
  misc_feature (1)..(25): SEQ ID NO: 3844; WAN024ETS_at; Start 63; Stop 87
catttgtataaccaatgatgtagta

SEQ ID NO: 182168 - DNA, 25 bp, Artificial
  probe
  misc_feature (1)..(25): SEQ ID NO: 3844; WAN024ETS_at; Start 148; Stop 172
ccagcagatttagaggatttgttaa

SEQ ID NO: 182169 - DNA, 25 bp, Artificial
  probe
  misc_feature (1)..(25): SEQ ID NO: 3844; WAN024ETS_at; Start 746; Stop 770
taaatgccttatacgagattacaga

SEQ ID NO: 182170 - DNA, 25 bp, Artificial
  probe
  misc_feature (1)..(25): SEQ ID NO: 3844; WAN024ETS_at; Start 472; Stop 496
gagaagttcaatattccaatagtag

SEQ ID NO: 182171 - DNA, 25 bp, Artificial
  probe
  misc_feature (1)..(25): SEQ ID NO: 3844; WAN024ETS_at; Start 105; Stop 129
tggattagtagcactgggcgcctca

SEQ ID NO: 182172 - DNA, 25 bp, Artificial
  probe
  misc_feature (1)..(25): SEQ ID NO: 3844; WAN024ETS_at; Start 379; Stop 403
gagattgcctctttagtaggaatag

SEQ ID NO: 182173 - DNA, 25 bp, Artificial
  probe
  misc_feature (1)..(25): SEQ ID NO: 3844; WAN024ETS_at; Start 276; Stop 300
agttttagatcctgtagcctgtgga

SEQ ID NO: 182174 - DNA, 25 bp, Artificial
  probe
  misc_feature (1)..(25): SEQ ID NO: 3844; WAN024ETS_at; Start 79; Stop 103
gatgtagtaaaaaatttcacagcaa

SEQ ID NO: 182175 - DNA, 25 bp, Artificial
  probe
  misc_feature (1)..(25): SEQ ID NO: 3844; WAN024ETS_at; Start 94; Stop 118
ttcacagcaaatggattagtagcac

SEQ ID NO: 182176 - DNA, 25 bp, Artificial
  probe
  misc_feature (1)..(25): SEQ ID NO: 3844; WAN024ETS_at; Start 286; Stop 310
cctgtagcctgtggagcaggagaat

SEQ ID NO: 182177 - DNA, 25 bp, Artificial
  probe
  misc_feature (1)..(25): SEQ ID NO: 3844; WAN024ETS_at; Start 717; Stop 741
tcttcctgggacatttaaagttgaa

SEQ ID NO: 182178 - DNA, 25 bp, Artificial
  probe
  misc_feature (1)..(25): SEQ ID NO: 3844; WAN024ETS_at; Start 131; Stop 155
cagccatgagtgagtttccagcaga

SEQ ID NO: 182179 - DNA, 25 bp, Artificial
  probe
  misc_feature (1)..(25): SEQ ID NO: 3844; WAN024ETS_at; Start 172; Stop 196
aagtatgctggtggtttattaataa

SEQ ID NO: 182180 - DNA, 25 bp, Artificial
  probe
  misc_feature (1)..(25): SEQ ID NO: 2820; WAN024ETT_at; Start 936; Stop 960
acgtattgagcaactgaatttgtct

SEQ ID NO: 182181 - DNA, 25 bp, Artificial
  probe
  misc_feature (1)..(25): SEQ ID NO: 2820; WAN024ETT_at; Start 520; Stop 544
cattcaggtgttatcattaatggtc

SEQ ID NO: 182182 - DNA, 25 bp, Artificial
  probe
  misc_feature (1)..(25): SEQ ID NO: 2820; WAN024ETT_at; Start 609; Stop 633
catgcttaatgaattggacaaggaa

SEQ ID NO: 182183 - DNA, 25 bp, Artificial
  probe
  misc_feature (1)..(25): SEQ ID NO: 2820; WAN024ETT_at; Start 155; Stop 179
tgataaaacagagaaaatataagcc

SEQ ID NO: 182184 - DNA, 25 bp, Artificial
  probe
  misc_feature (1)..(25): SEQ ID NO: 2820; WAN024ETT_at; Start 140; Stop 164
gcttgactaaggaactgataaaaca

SEQ ID NO: 182185 - DNA, 25 bp, Artificial
  probe
  misc_feature (1)..(25): SEQ ID NO: 2820; WAN024ETT_at; Start 117; Stop 141
taattatctcagacaaaactggcgc

SEQ ID NO: 182186 - DNA, 25 bp, Artificial
  probe
  misc_feature (1)..(25): SEQ ID NO: 2820; WAN024ETT_at; Start 299; Stop 323
gtgaaccccatttctcagatacgag

SEQ ID NO: 182187 - DNA, 25 bp, Artificial
  probe
  misc_feature (1)..(25): SEQ ID NO: 2820; WAN024ETT_at; Start 72; Stop 96
taaaggctcagctgggattgatgga

SEQ ID NO: 182188 - DNA, 25 bp, Artificial
  probe
  misc_feature (1)..(25): SEQ ID NO: 2820; WAN024ETT_at; Start 571; Stop 595
ccacagggaggaaatttatctcctc

SEQ ID NO: 182189 - DNA, 25 bp, Artificial
  probe
  misc_feature (1)..(25): SEQ ID NO: 2820; WAN024ETT_at; Start 1185; Stop 1209
taaacgtgctatatcaaaaccagtc

SEQ ID NO: 182190 - DNA, 25 bp, Artificial
  probe
  misc_feature (1)..(25): SEQ ID NO: 2820; WAN024ETT_at; Start 666; Stop 690
cgcagatgattgtgtgattacggtc

SEQ ID NO: 182191 - DNA, 25 bp, Artificial
  probe
  misc_feature (1)..(25): SEQ ID NO: 2820; WAN024ETT_at; Start 130; Stop 154
caaaactggcgcttgactaaggaac

SEQ ID NO: 182192 - DNA, 25 bp, Artificial
  probe
  misc_feature (1)..(25): SEQ ID NO: 2820; WAN024ETT_at; Start 504; Stop 528
gattcgtaagtatcttcattcaggt

SEQ ID NO: 182193 - DNA, 25 bp, Artificial
  probe
  misc_feature (1)..(25): SEQ ID NO: 2820; WAN024ETT_at; Start 645; Stop 669
gggacttcgatttgtgcgctacgca

SEQ ID NO: 182194 - DNA, 25 bp, Artificial
  probe
  misc_feature (1)..(25): SEQ ID NO: 2820; WAN024ETT_at; Start 167; Stop 191
gaaaatataagcctcaaccagttct

SEQ ID NO: 182195 - DNA, 25 bp, Artificial
  probe
  misc_feature (1)..(25): SEQ ID NO: 2820; WAN024ETT_at; Start 42; Stop 66
gctggaagcctacaatcaagtaaaa

SEQ ID NO: 182196 - DNA, 25 bp, Artificial
  probe
  misc_feature (1)..(25): SEQ ID NO: 2820; WAN024ETT_at; Start 439; Stop 463
gttcctcaagatagattgatgtcct

SEQ ID NO: 182197 - DNA, 25 bp, Artificial
  probe
  misc_feature (1)..(25): SEQ ID NO: 2820; WAN024ETT_at; Start 1111; Stop 1135
gttcctaaatggatagcagataagg

SEQ ID NO: 182198 - DNA, 25 bp, Artificial
  probe
  misc_feature (1)..(25): SEQ ID NO: 2820; WAN024ETT_at; Start 1055; Stop 1079
tctggaagcaatggaagaagaaatc

SEQ ID NO: 182199 - DNA, 25 bp, Artificial
  probe
  misc_feature (1)..(25): SEQ ID NO: 2820; WAN024ETT_at; Start 467; Stop 491
tacataacattatcgaagacggaga

SEQ ID NO: 182200 - DNA, 25 bp, Artificial
  probe
  misc_feature (1)..(25): SEQ ID NO: 2820; WAN024ETT_at; Start 1176; Stop 1200
gtcggtacttaaacgtgctatatca

SEQ ID NO: 182201 - DNA, 25 bp, Artificial
  probe
  misc_feature (1)..(25): SEQ ID NO: 2820; WAN024ETT_at; Start 381; Stop 405
cttaaatgacggctatgagtggata

SEQ ID NO: 182202 - DNA, 25 bp, Artificial
  probe
  misc_feature (1)..(25): SEQ ID NO: 2820; WAN024ETT_at; Start 224; Stop 248
tccgtcaactaggaattccaacagt

SEQ ID NO: 182203 - DNA, 25 bp, Artificial
  probe
  misc_feature (1)..(25): SEQ ID NO: 2820; WAN024ETT_at; Start 1122; Stop 1146
gatagcagataaggtatctggctgg

SEQ ID NO: 182204 - DNA, 25 bp, Artificial
  probe
  misc_feature (1)..(25): SEQ ID NO: 2820; WAN024ETT_at; Start 621; Stop 645
attggacaaggaattagaaaagagg

SEQ ID NO: 182205 - DNA, 25 bp, Artificial
  probe
  misc_feature (1)..(25): SEQ ID NO: 2820; WAN024ETT_at; Start 337; Stop 361
ccaaataggtcatgtgaaaaagcca

SEQ ID NO: 182206 - DNA, 25 bp, Artificial
  probe
  misc_feature (1)..(25): SEQ ID NO: 2820; WAN024ETT_at; Start 29; Stop 53
cacgcgaaaatatgctggaagccta

SEQ ID NO: 182207 - DNA, 25 bp, Artificial
  probe
  misc_feature (1)..(25): SEQ ID NO: 2820; WAN024ETT_at; Start 83; Stop 107
ctgggattgatggaatgactatcga

SEQ ID NO: 182208 - DNA, 25 bp, Artificial
  probe
  misc_feature (1)..(25): SEQ ID NO: 2820; WAN024ETT_at; Start 245; Stop 269
cagttatggatagaatgattcaaca

SEQ ID NO: 182209 - DNA, 25 bp, Artificial
  probe
  misc_feature (1)..(25): SEQ ID NO: 2820; WAN024ETT_at; Start 23; Stop 47
tattatcacgcgaaaatatgctgga

SEQ ID NO: 182210 - DNA, 25 bp, Artificial
  probe
  misc_feature (1)..(25): SEQ ID NO: 2820; WAN024ETT_at; Start 1219; Stop 1243
cgtggactggtttcgtgtttggatt

SEQ ID NO: 182211 - DNA, 25 bp, Artificial
  probe
  misc_feature (1)..(25): SEQ ID NO: 2820; WAN024ETT_at; Start 477; Stop 501
tatcgaagacggagatacggaatcc

SEQ ID NO: 182212 - DNA, 25 bp, Artificial
  probe
  misc_feature (1)..(25): SEQ ID NO: 2820; WAN024ETT_at; Start 345; Stop 369
gtcatgtgaaaaagccatcatgaag

SEQ ID NO: 182213 - DNA, 25 bp, Artificial
  probe
  misc_feature (1)..(25): SEQ ID NO: 2820; WAN024ETT_at; Start 657; Stop 681
tgtgcgctacgcagatgattgtgtg

SEQ ID NO: 182214 - DNA, 25 bp, Artificial
  probe
  misc_feature (1)..(25): SEQ ID NO: 7296; WAN024ETU_at; Start 112; Stop 136
tcgtcactccagcttggacagcttc

SEQ ID NO: 182215 - DNA, 25 bp, Artificial
  probe
  misc_feature (1)..(25): SEQ ID NO: 7296; WAN024ETU_at; Start 4; Stop 28
gagtctgagaatccgccaaatctag

SEQ ID NO: 182216 - DNA, 25 bp, Artificial
  probe
  misc_feature (1)..(25): SEQ ID NO: 7296; WAN024ETU_at; Start 90; Stop 114
tctagggcaaagattttctcaatcg

SEQ ID NO: 182217 - DNA, 25 bp, Artificial
  probe
  misc_feature (1)..(25): SEQ ID NO: 7296; WAN024ETU_at; Start 42; Stop 66
gaaatccagacagtttgcggaaaag

SEQ ID NO: 182218 - DNA, 25 bp, Artificial
  probe
  misc_feature (1)..(25): SEQ ID NO: 7296; WAN024ETU_at; Start 2; Stop 26
tggagtctgagaatccgccaaatct

SEQ ID NO: 182219 - DNA, 25 bp, Artificial
  probe
  misc_feature (1)..(25): SEQ ID NO: 7296; WAN024ETU_at; Start 58; Stop 82
gcggaaaagcagctaactgatctcg

SEQ ID NO: 182220 - DNA, 25 bp, Artificial
  probe
  misc_feature (1)..(25): SEQ ID NO: 7296; WAN024ETU_at; Start 155; Stop 179
ttcaatcaaataggcagacttgcgg

SEQ ID NO: 182221 - DNA, 25 bp, Artificial
  probe
  misc_feature (1)..(25): SEQ ID NO: 7296; WAN024ETU_at; Start 36; Stop 60
tcctctgaaatccagacagtttgcg

SEQ ID NO: 182222 - DNA, 25 bp, Artificial
  probe
  misc_feature (1)..(25): SEQ ID NO: 7296; WAN024ETU_at; Start 135; Stop 159
tcttcaaacaagtgccagccttcaa

SEQ ID NO: 182223 - DNA, 25 bp, Artificial
  probe
  misc_feature (1)..(25): SEQ ID NO: 7296; WAN024ETU_at; Start 157; Stop 181
caatcaaataggcagacttgcggta

SEQ ID NO: 182224 - DNA, 25 bp, Artificial
  probe
  misc_feature (1)..(25): SEQ ID NO: 7296; WAN024ETU_at; Start 61; Stop 85
gaaaagcagctaactgatctcgata

SEQ ID NO: 182225 - DNA, 25 bp, Artificial
  probe
  misc_feature (1)..(25): SEQ ID NO: 7296; WAN024ETU_at; Start 73; Stop 97
actgatctcgataattttctagggc

SEQ ID NO: 182226 - DNA, 25 bp, Artificial
  probe
  misc_feature (1)..(25): SEQ ID NO: 7296; WAN024ETU_at; Start 139; Stop 163
caaacaagtgccagccttcaatcaa

SEQ ID NO: 182227 - DNA, 25 bp, Artificial
  probe
  misc_feature (1)..(25): SEQ ID NO: 7296; WAN024ETU_at; Start 108; Stop 132
tcaatcgtcactccagcttggacag

SEQ ID NO: 182228 - DNA, 25 bp, Artificial
  probe
  misc_feature (1)..(25): SEQ ID NO: 7296; WAN024ETU_at; Start 46; Stop 70
tccagacagtttgcggaaaagcagc

SEQ ID NO: 182229 - DNA, 25 bp, Artificial
  probe
  misc_feature (1)..(25): SEQ ID NO: 7296; WAN024ETU_at; Start 132; Stop 156
gcttcttcaaacaagtgccagcctt

SEQ ID NO: 182230 - DNA, 25 bp, Artificial
  probe
  misc_feature (1)..(25): SEQ ID NO: 7296; WAN024ETU_at; Start 55; Stop 79
tttgcggaaaagcagctaactgatc

SEQ ID NO: 182231 - DNA, 25 bp, Artificial
  probe
  misc_feature (1)..(25): SEQ ID NO: 7296; WAN024ETU_at; Start 94; Stop 118
gggcaaagattttctcaatcgtcac

SEQ ID NO: 182232 - DNA, 25 bp, Artificial
  probe
  misc_feature (1)..(25): SEQ ID NO: 7296; WAN024ETU_at; Start 163; Stop 187
aataggcagacttgcggtatttttt

SEQ ID NO: 182233 - DNA, 25 bp, Artificial
  probe
  misc_feature (1)..(25): SEQ ID NO: 7296; WAN024ETU_at; Start 18; Stop 42
gccaaatctagcaaaatatcctctg

SEQ ID NO: 182234 - DNA, 25 bp, Artificial
  probe
  misc_feature (1)..(25): SEQ ID NO: 7296; WAN024ETU_at; Start 50; Stop 74
gacagtttgcggaaaagcagctaac

SEQ ID NO: 182235 - DNA, 25 bp, Artificial
  probe
  misc_feature (1)..(25): SEQ ID NO: 7296; WAN024ETU_at; Start 210; Stop 234
tttaccacagaattggcttttgagg

SEQ ID NO: 182236 - DNA, 25 bp, Artificial
  probe
  misc_feature (1)..(25): SEQ ID NO: 7296; WAN024ETU_at; Start 195; Stop 219
aatttcttggcattttttaccacag

SEQ ID NO: 182237 - DNA, 25 bp, Artificial
  probe
  misc_feature (1)..(25): SEQ ID NO: 7296; WAN024ETU_at; Start 117; Stop 141
actccagcttggacagcttcttcaa

SEQ ID NO: 182238 - DNA, 25 bp, Artificial
  probe
  misc_feature (1)..(25): SEQ ID NO: 7296; WAN024ETU_at; Start 215; Stop 239
cacagaattggcttttgaggttata

SEQ ID NO: 182239 - DNA, 25 bp, Artificial
  probe
  misc_feature (1)..(25): SEQ ID NO: 7296; WAN024ETU_at; Start 128; Stop 152
gacagcttcttcaaacaagtgccag

SEQ ID NO: 182240 - DNA, 25 bp, Artificial
  probe
  misc_feature (1)..(25): SEQ ID NO: 7296; WAN024ETU_at; Start 144; Stop 168
aagtgccagccttcaatcaaatagg

SEQ ID NO: 182241 - DNA, 25 bp, Artificial
  probe
  misc_feature (1)..(25): SEQ ID NO: 7296; WAN024ETU_at; Start 10; Stop 34
gagaatccgccaaatctagcaaaat

SEQ ID NO: 182242 - DNA, 25 bp, Artificial
  probe
  misc_feature (1)..(25): SEQ ID NO: 7296; WAN024ETU_at; Start 101; Stop 125
gattttctcaatcgtcactccagct

SEQ ID NO: 182243 - DNA, 25 bp, Artificial
  probe
  misc_feature (1)..(25): SEQ ID NO: 7296; WAN024ETU_at; Start 202; Stop 226
tggcattttttaccacagaattggc

SEQ ID NO: 182244 - DNA, 25 bp, Artificial
  probe
  misc_feature (1)..(25): SEQ ID NO: 7296; WAN024ETU_at; Start 26; Stop 50
tagcaaaatatcctctgaaatccag

SEQ ID NO: 182245 - DNA, 25 bp, Artificial
  probe
  misc_feature (1)..(25): SEQ ID NO: 7296; WAN024ETU_at; Start 148; Stop 172
gccagccttcaatcaaataggcaga

SEQ ID NO: 182246 - DNA, 25 bp, Artificial
  probe
  misc_feature (1)..(25): SEQ ID NO: 7296; WAN024ETU_at; Start 79; Stop 103
ctcgataattttctagggcaaagat

SEQ ID NO: 182247 - DNA, 25 bp, Artificial
  probe
  misc_feature (1)..(25): SEQ ID NO: 7296; WAN024ETU_at; Start 39; Stop 63
tctgaaatccagacagtttgcggaa

SEQ ID NO: 182248 - DNA, 25 bp, Artificial
  probe
  misc_feature (1)..(25): SEQ ID NO: 5775; WAN024ETV_at; Start 363; Stop 387
tgtaggaactatcattcgaactgcg

SEQ ID NO: 182249 - DNA, 25 bp, Artificial
  probe
  misc_feature (1)..(25): SEQ ID NO: 5775; WAN024ETV_at; Start 285; Stop 309
tcaaaaagaagaagtaggacaagct

SEQ ID NO: 182250 - DNA, 25 bp, Artificial
  probe
  misc_feature (1)..(25): SEQ ID NO: 5775; WAN024ETV_at; Start 319; Stop 343
cagggcaagttcttgtttttggaag

SEQ ID NO: 182251 - DNA, 25 bp, Artificial
  probe
  misc_feature (1)..(25): SEQ ID NO: 5775; WAN024ETV_at; Start 32; Stop 56
cctcaaaagccaattctgtggtaaa

SEQ ID NO: 182252 - DNA, 25 bp, Artificial
  probe
  misc_feature (1)..(25): SEQ ID NO: 5775; WAN024ETV_at; Start 626; Stop 650
gaaatgagggtcaaggaattagtcc

SEQ ID NO: 182253 - DNA, 25 bp, Artificial
  probe
  misc_feature (1)..(25): SEQ ID NO: 5775; WAN024ETV_at; Start 224; Stop 248
cagaggatattttgctagatttggc

SEQ ID NO: 182254 - DNA, 25 bp, Artificial
  probe
  misc_feature (1)..(25): SEQ ID NO: 5775; WAN024ETV_at; Start 372; Stop 396
tatcattcgaactgcggatgcagca

SEQ ID NO: 182255 - DNA, 25 bp, Artificial
  probe
  misc_feature (1)..(25): SEQ ID NO: 5775; WAN024ETV_at; Start 437; Stop 461
tctacagtctcaaaaccctacgttc

SEQ ID NO: 182256 - DNA, 25 bp, Artificial
  probe
  misc_feature (1)..(25): SEQ ID NO: 5775; WAN024ETV_at; Start 395; Stop 419
caggttttacaggagtgattgtttc

SEQ ID NO: 182257 - DNA, 25 bp, Artificial
  probe
  misc_feature (1)..(25): SEQ ID NO: 5775; WAN024ETV_at; Start 525; Stop 549
aactaaaaaggtagctatcccagtg

SEQ ID NO: 182258 - DNA, 25 bp, Artificial
  probe
  misc_feature (1)..(25): SEQ ID NO: 5775; WAN024ETV_at; Start 386; Stop 410
cggatgcagcaggttttacaggagt

SEQ ID NO: 182259 - DNA, 25 bp, Artificial
  probe
  misc_feature (1)..(25): SEQ ID NO: 5775; WAN024ETV_at; Start 170; Stop 194
ccctagaaaattatcgagatcagtt

SEQ ID NO: 182260 - DNA, 25 bp, Artificial
  probe
  misc_feature (1)..(25): SEQ ID NO: 5775; WAN024ETV_at; Start 466; Stop 490
caaggtagtcatttccatctgccca

SEQ ID NO: 182261 - DNA, 25 bp, Artificial
  probe
  misc_feature (1)..(25): SEQ ID NO: 5775; WAN024ETV_at; Start 18; Stop 42
tatgactattataacctcaaaagcc

SEQ ID NO: 182262 - DNA, 25 bp, Artificial
  probe
  misc_feature (1)..(25): SEQ ID NO: 5775; WAN024ETV_at; Start 302; Stop 326
gacaagctgatttgagtcagggcaa

SEQ ID NO: 182263 - DNA, 25 bp, Artificial
  probe
  misc_feature (1)..(25): SEQ ID NO: 5775; WAN024ETV_at; Start 411; Stop 435
gattgtttcagataagtcggcagac

SEQ ID NO: 182264 - DNA, 25 bp, Artificial
  probe
  misc_feature (1)..(25): SEQ ID NO: 5775; WAN024ETV_at; Start 446; Stop 470
tcaaaaccctacgttccatgcaagg

SEQ ID NO: 182265 - DNA, 25 bp, Artificial
  probe
  misc_feature (1)..(25): SEQ ID NO: 5775; WAN024ETV_at; Start 641; Stop 665
gaattagtccccttatggctgaaag

SEQ ID NO: 182266 - DNA, 25 bp, Artificial
  probe
  misc_feature (1)..(25): SEQ ID NO: 5775; WAN024ETV_at; Start 673; Stop 697
cagttggtccatattagcatgaagg

SEQ ID NO: 182267 - DNA, 25 bp, Artificial
  probe
  misc_feature (1)..(25): SEQ ID NO: 5775; WAN024ETV_at; Start 658; Stop 682
gctgaaagtgcagaccagttggtcc

SEQ ID NO: 182268 - DNA, 25 bp, Artificial
  probe
  misc_feature (1)..(25): SEQ ID NO: 5775; WAN024ETV_at; Start 139; Stop 163
caagctggagtgacgattgagaaaa

SEQ ID NO: 182269 - DNA, 25 bp, Artificial
  probe
  misc_feature (1)..(25): SEQ ID NO: 5775; WAN024ETV_at; Start 553; Stop 577
gcaacaaccctatctaaagattctg

SEQ ID NO: 182270 - DNA, 25 bp, Artificial
  probe
  misc_feature (1)..(25): SEQ ID NO: 5775; WAN024ETV_at; Start 483; Stop 507
tctgcccatttaccggatgactagt

SEQ ID NO: 182271 - DNA, 25 bp, Artificial
  probe
  misc_feature (1)..(25): SEQ ID NO: 5775; WAN024ETV_at; Start 332; Stop 356
tgtttttggaagatgtgcaagatcc

SEQ ID NO: 182272 - DNA, 25 bp, Artificial
  probe
  misc_feature (1)..(25): SEQ ID NO: 5775; WAN024ETV_at; Start 650; Stop 674
cccttatggctgaaagtgcagacca

SEQ ID NO: 182273 - DNA, 25 bp, Artificial
  probe
  misc_feature (1)..(25): SEQ ID NO: 5775; WAN024ETV_at; Start 250; Stop 274
gattctcagactccacagggaattg

SEQ ID NO: 182274 - DNA, 25 bp, Artificial
  probe
  misc_feature (1)..(25): SEQ ID NO: 5775; WAN024ETV_at; Start 457; Stop 481
cgttccatgcaaggtagtcatttcc

SEQ ID NO: 182275 - DNA, 25 bp, Artificial
  probe
  misc_feature (1)..(25): SEQ ID NO: 5775; WAN024ETV_at; Start 614; Stop 638
tactagttatgggaaatgagggtca

SEQ ID NO: 182276 - DNA, 25 bp, Artificial
  probe
  misc_feature (1)..(25): SEQ ID NO: 5775; WAN024ETV_at; Start 239; Stop 263
tagatttggcggattctcagactcc

SEQ ID NO: 182277 - DNA, 25 bp, Artificial
  probe
  misc_feature (1)..(25): SEQ ID NO: 5775; WAN024ETV_at; Start 519; Stop 543
tgacgaaactaaaaaggtagctatc

SEQ ID NO: 182278 - DNA, 25 bp, Artificial
  probe
  misc_feature (1)..(25): SEQ ID NO: 5775; WAN024ETV_at; Start 423; Stop 447
taagtcggcagacatctacagtctc

SEQ ID NO: 182279 - DNA, 25 bp, Artificial
  probe
  misc_feature (1)..(25): SEQ ID NO: 5775; WAN024ETV_at; Start 576; Stop 600
tgttgattacagagaactgccttct

SEQ ID NO: 182280 - DNA, 25 bp, Artificial
  probe
  misc_feature (1)..(25): SEQ ID NO: 5775; WAN024ETV_at; Start 104; Stop 128
tgattgaaggctggcacttgtttga

SEQ ID NO: 182281 - DNA, 25 bp, Artificial
  probe
  misc_feature (1)..(25): SEQ ID NO: 5775; WAN024ETV_at; Start 589; Stop 613
gaactgccttctatagaaaattttg

SEQ ID NO: 182282 - DNA, 25 bp, Artificial
  probe
  misc_feature (1)..(25): SEQ ID NO: 2800; WAN024ETW_at; Start 490; Stop 514
caagttcttgctcttttaccaggga

SEQ ID NO: 182283 - DNA, 25 bp, Artificial
  probe
  misc_feature (1)..(25): SEQ ID NO: 2800; WAN024ETW_at; Start 716; Stop 740
cggtcagcatggtggctattcgctt

SEQ ID NO: 182284 - DNA, 25 bp, Artificial
  probe
  misc_feature (1)..(25): SEQ ID NO: 2800; WAN024ETW_at; Start 326; Stop 350
ttgatacccacttccataacatggt

SEQ ID NO: 182285 - DNA, 25 bp, Artificial
  probe
  misc_feature (1)..(25): SEQ ID NO: 2800; WAN024ETW_at; Start 411; Stop 435
taaagcgcgtgctatcgagccaagt

SEQ ID NO: 182286 - DNA, 25 bp, Artificial
  probe
  misc_feature (1)..(25): SEQ ID NO: 2800; WAN024ETW_at; Start 639; Stop 663
caaatttgtgaaagccggagaactc

SEQ ID NO: 182287 - DNA, 25 bp, Artificial
  probe
  misc_feature (1)..(25): SEQ ID NO: 2800; WAN024ETW_at; Start 357; Stop 381
tgctctcatgttgattatctacggg

SEQ ID NO: 182288 - DNA, 25 bp, Artificial
  probe
  misc_feature (1)..(25): SEQ ID NO: 2800; WAN024ETW_at; Start 506; Stop 530
taccagggactagccgttcaggtgc

SEQ ID NO: 182289 - DNA, 25 bp, Artificial
  probe
  misc_feature (1)..(25): SEQ ID NO: 2800; WAN024ETW_at; Start 396; Stop 420
tttggaaaagcgcaataaagcgcgt

SEQ ID NO: 182290 - DNA, 25 bp, Artificial
  probe
  misc_feature (1)..(25): SEQ ID NO: 2800; WAN024ETW_at; Start 557; Stop 581
gaaccagtcgttcagttgtgacaga

SEQ ID NO: 182291 - DNA, 25 bp, Artificial
  probe
  misc_feature (1)..(25): SEQ ID NO: 2800; WAN024ETW_at; Start 143; Stop 167
ccatgtttaatgtcgtgattcagct

SEQ ID NO: 182292 - DNA, 25 bp, Artificial
  probe
  misc_feature (1)..(25): SEQ ID NO: 2800; WAN024ETW_at; Start 234; Stop 258
caaacaggaagttcgtaagacttgg

SEQ ID NO: 182293 - DNA, 25 bp, Artificial
  probe
  misc_feature (1)..(25): SEQ ID NO: 2800; WAN024ETW_at; Start 435; Stop 459
tgtaacagagttggacaagcttcct

SEQ ID NO: 182294 - DNA, 25 bp, Artificial
  probe
  misc_feature (1)..(25): SEQ ID NO: 2800; WAN024ETW_at; Start 794; Stop 818
tcgtgcttggtagtgttttgctact

SEQ ID NO: 182295 - DNA, 25 bp, Artificial
  probe
  misc_feature (1)..(25): SEQ ID NO: 2800; WAN024ETW_at; Start 44; Stop 68
ttgaaggaattacggaatggttgcc

SEQ ID NO: 182296 - DNA, 25 bp, Artificial
  probe
  misc_feature (1)..(25): SEQ ID NO: 2800; WAN024ETW_at; Start 654; Stop 678
cggagaactcttgagctttgggcaa

SEQ ID NO: 182297 - DNA, 25 bp, Artificial
  probe
  misc_feature (1)..(25): SEQ ID NO: 2800; WAN024ETW_at; Start 310; Stop 334
aaatttgatgattggtttgataccc

SEQ ID NO: 182298 - DNA, 25 bp, Artificial
  probe
  misc_feature (1)..(25): SEQ ID NO: 2800; WAN024ETW_at; Start 420; Stop 444
tgctatcgagccaagtgtaacagag

SEQ ID NO: 182299 - DNA, 25 bp, Artificial
  probe
  misc_feature (1)..(25): SEQ ID NO: 2800; WAN024ETW_at; Start 159; Stop 183
gattcagcttggtgctattttagca

SEQ ID NO: 182300 - DNA, 25 bp, Artificial
  probe
  misc_feature (1)..(25): SEQ ID NO: 2800; WAN024ETW_at; Start 576; Stop 600
gacagaatttaccttctatcttggg

SEQ ID NO: 182301 - DNA, 25 bp, Artificial
  probe
  misc_feature (1)..(25): SEQ ID NO: 2800; WAN024ETW_at; Start 381; Stop 405
ggttgccttcatctatttggaaaag

SEQ ID NO: 182302 - DNA, 25 bp, Artificial
  probe
  misc_feature (1)..(25): SEQ ID NO: 2800; WAN024ETW_at; Start 260; Stop 284
gactatggttgaaggtcttgattgc

SEQ ID NO: 182303 - DNA, 25 bp, Artificial
  probe
  misc_feature (1)..(25): SEQ ID NO: 2800; WAN024ETW_at; Start 609; Stop 633
tatgtttggagctagtgccttaaag

SEQ ID NO: 182304 - DNA, 25 bp, Artificial
  probe
  misc_feature (1)..(25): SEQ ID NO: 2800; WAN024ETW_at; Start 124; Stop 148
caaaatgaagcctttatgtccatgt

SEQ ID NO: 182305 - DNA, 25 bp, Artificial
  probe
  misc_feature (1)..(25): SEQ ID NO: 2800; WAN024ETW_at; Start 475; Stop 499
tatatcggactcttccaagttcttg

SEQ ID NO: 182306 - DNA, 25 bp, Artificial
  probe
  misc_feature (1)..(25): SEQ ID NO: 2800; WAN024ETW_at; Start 446; Stop 470
tggacaagcttccttatacgaccgc

SEQ ID NO: 182307 - DNA, 25 bp, Artificial
  probe
  misc_feature (1)..(25): SEQ ID NO: 2800; WAN024ETW_at; Start 340; Stop 364
cataacatggtttcagttgctctca

SEQ ID NO: 182308 - DNA, 25 bp, Artificial
  probe
  misc_feature (1)..(25): SEQ ID NO: 2800; WAN024ETW_at; Start 62; Stop 86
ggttgccgatttccagtacaggtca

SEQ ID NO: 182309 - DNA, 25 bp, Artificial
  probe
  misc_feature (1)..(25): SEQ ID NO: 2800; WAN024ETW_at; Start 247; Stop 271
cgtaagacttggagactatggttga

SEQ ID NO: 182310 - DNA, 25 bp, Artificial
  probe
  misc_feature (1)..(25): SEQ ID NO: 2800; WAN024ETW_at; Start 460; Stop 484
tatacgaccgctttctatatcggac

SEQ ID NO: 182311 - DNA, 25 bp, Artificial
  probe
  misc_feature (1)..(25): SEQ ID NO: 2800; WAN024ETW_at; Start 523; Stop 547
tcaggtgcaacgattgtcggtggtt

SEQ ID NO: 182312 - DNA, 25 bp, Artificial
  probe
  misc_feature (1)..(25): SEQ ID NO: 2800; WAN024ETW_at; Start 676; Stop 700
caattgtttttgctcttggtcgcga

SEQ ID NO: 182313 - DNA, 25 bp, Artificial
  probe
  misc_feature (1)..(25): SEQ ID NO: 2800; WAN024ETW_at; Start 110; Stop 134
tccaataccaaaatcaaaatgaagc

SEQ ID NO: 182314 - DNA, 25 bp, Artificial
  probe
  misc_feature (1)..(25): SEQ ID NO: 2800; WAN024ETW_at; Start 689; Stop 713
tcttggtcgcgatgggagtagcttt

SEQ ID NO: 182315 - DNA, 25 bp, Artificial
  probe
  misc_feature (1)..(25): SEQ ID NO: 2800; WAN024ETW_at; Start 707; Stop 731
tagcttttgcggtcagcatggtggc

SEQ ID NO: 182316 - DNA, 25 bp, Artificial
  probe
  misc_feature (1)..(25): SEQ ID NO: 5444; WAN024ETX_at; Start 335; Stop 359
gggcacgctatgctcatttgattaa

SEQ ID NO: 182317 - DNA, 25 bp, Artificial
  probe
  misc_feature (1)..(25): SEQ ID NO: 5444; WAN024ETX_at; Start 266; Stop 290
gctggaactggtcatttgtcttcta

SEQ ID NO: 182318 - DNA, 25 bp, Artificial
  probe
  misc_feature (1)..(25): SEQ ID NO: 5444; WAN024ETX_at; Start 275; Stop 299
ggtcatttgtcttctacttatttgc

SEQ ID NO: 182319 - DNA, 25 bp, Artificial
  probe
  misc_feature (1)..(25): SEQ ID NO: 5444; WAN024ETX_at; Start 369; Stop 393
tattcatgatgagtattttaccgtg

SEQ ID NO: 182320 - DNA, 25 bp, Artificial
  probe
  misc_feature (1)..(25): SEQ ID NO: 5444; WAN024ETX_at; Start 152; Stop 176
ggttaggagctgatgtctattctct

SEQ ID NO: 182321 - DNA, 25 bp, Artificial
  probe
  misc_feature (1)..(25): SEQ ID NO: 5444; WAN024ETX_at; Start 261; Stop 285
aaagagctggaactggtcatttgtc

SEQ ID NO: 182322 - DNA, 25 bp, Artificial
  probe
  misc_feature (1)..(25): SEQ ID NO: 5444; WAN024ETX_at; Start 254; Stop 278
ttgagaaaaagagctggaactggtc

SEQ ID NO: 182323 - DNA, 25 bp, Artificial
  probe
  misc_feature (1)..(25): SEQ ID NO: 5444; WAN024ETX_at; Start 144; Stop 168
cattttagggttaggagctgatgtc

SEQ ID NO: 182324 - DNA, 25 bp, Artificial
  probe
  misc_feature (1)..(25): SEQ ID NO: 5444; WAN024ETX_at; Start 234; Stop 258
gaaaaagatgctctttatctttgag

SEQ ID NO: 182325 - DNA, 25 bp, Artificial
  probe
  misc_feature (1)..(25): SEQ ID NO: 5444; WAN024ETX_at; Start 323; Stop 347
tcggtaatttttgggcacgctatgc

SEQ ID NO: 182326 - DNA, 25 bp, Artificial
  probe
  misc_feature (1)..(25): SEQ ID NO: 5444; WAN024ETX_at; Start 104; Stop 128
ctacctatttaccacaaacaattgg

SEQ ID NO: 182327 - DNA, 25 bp, Artificial
  probe
  misc_feature (1)..(25): SEQ ID NO: 5444; WAN024ETX_at; Start 357; Stop 381
taatcataggaatattcatgatgag

SEQ ID NO: 182328 - DNA, 25 bp, Artificial
  probe
  misc_feature (1)..(25): SEQ ID NO: 5444; WAN024ETX_at; Start 343; Stop 367
tatgctcatttgattaatcatagga

SEQ ID NO: 182329 - DNA, 25 bp, Artificial
  probe
  misc_feature (1)..(25): SEQ ID NO: 5444; WAN024ETX_at; Start 434; Stop 458
tatcttttgtcctgcctgtaatcat

SEQ ID NO: 182330 - DNA, 25 bp, Artificial
  probe
  misc_feature (1)..(25): SEQ ID NO: 5444; WAN024ETX_at; Start 426; Stop 450
gactatcttatcttttgtcctgcct

SEQ ID NO: 182331 - DNA, 25 bp, Artificial
  probe
  misc_feature (1)..(25): SEQ ID NO: 5444; WAN024ETX_at; Start 65; Stop 89
taagacaatttggaatatttttgct

SEQ ID NO: 182332 - DNA, 25 bp, Artificial
  probe
  misc_feature (1)..(25): SEQ ID NO: 5444; WAN024ETX_at; Start 327; Stop 351
taatttttgggcacgctatgctcat

SEQ ID NO: 182333 - DNA, 25 bp, Artificial
  probe
  misc_feature (1)..(25): SEQ ID NO: 5444; WAN024ETX_at; Start 185; Stop 209
caatgggattagtgggaagtttcct

SEQ ID NO: 182334 - DNA, 25 bp, Artificial
  probe
  misc_feature (1)..(25): SEQ ID NO: 5444; WAN024ETX_at; Start 463; Stop 487
cctgtttttgaggagactcttgata

SEQ ID NO: 182335 - DNA, 25 bp, Artificial
  probe
  misc_feature (1)..(25): SEQ ID NO: 5444; WAN024ETX_at; Start 120; Stop 144
aacaattggattgtatgtgacgatc

SEQ ID NO: 182336 - DNA, 25 bp, Artificial
  probe
  misc_feature (1)..(25): SEQ ID NO: 5444; WAN024ETX_at; Start 33; Stop 57
tcaaaaaagtacgatgagaaacaca

SEQ ID NO: 182337 - DNA, 25 bp, Artificial
  probe
  misc_feature (1)..(25): SEQ ID NO: 5444; WAN024ETX_at; Start 87; Stop 111
gcttattattttactatctacctat

SEQ ID NO: 182338 - DNA, 25 bp, Artificial
  probe
  misc_feature (1)..(25): SEQ ID NO: 5444; WAN024ETX_at; Start 301; Stop 325
acttatgtggtttatcagattctcg

SEQ ID NO: 182339 - DNA, 25 bp, Artificial
  probe
  misc_feature (1)..(25): SEQ ID NO: 5444; WAN024ETX_at; Start 409; Stop 433
caaccaacctttttatcgactatct

SEQ ID NO: 182340 - DNA, 25 bp, Artificial
  probe
  misc_feature (1)..(25): SEQ ID NO: 5444; WAN024ETX_at; Start 316; Stop 340
cagattctcggtaatttttgggcac

SEQ ID NO: 182341 - DNA, 25 bp, Artificial
  probe
  misc_feature (1)..(25): SEQ ID NO: 5444; WAN024ETX_at; Start 287; Stop 311
tctacttatttgcaacttatgtggt

SEQ ID NO: 182342 - DNA, 25 bp, Artificial
  probe
  misc_feature (1)..(25): SEQ ID NO: 5444; WAN024ETX_at; Start 249; Stop 273
tatctttgagaaaaagagctggaac

SEQ ID NO: 182343 - DNA, 25 bp, Artificial
  probe
  misc_feature (1)..(25): SEQ ID NO: 5444; WAN024ETX_at; Start 17; Stop 41
cgagcagggtaatctttcaaaaaag

SEQ ID NO: 182344 - DNA, 25 bp, Artificial
  probe
  misc_feature (1)..(25): SEQ ID NO: 5444; WAN024ETX_at; Start 486; Stop 510
tagagggtattttatgaataccttc

SEQ ID NO: 182345 - DNA, 25 bp, Artificial
  probe
  misc_feature (1)..(25): SEQ ID NO: 5444; WAN024ETX_at; Start 177; Stop 201
tattttaacaatgggattagtggga

SEQ ID NO: 182346 - DNA, 25 bp, Artificial
  probe
  misc_feature (1)..(25): SEQ ID NO: 5444; WAN024ETX_at; Start 137; Stop 161
tgacgatcattttagggttaggagc

SEQ ID NO: 182347 - DNA, 25 bp, Artificial
  probe
  misc_feature (1)..(25): SEQ ID NO: 5444; WAN024ETX_at; Start 167; Stop 191
tctattctcttattttaacaatggg

SEQ ID NO: 182348 - DNA, 25 bp, Artificial
  probe
  misc_feature (1)..(25): SEQ ID NO: 5444; WAN024ETX_at; Start 471; Stop 495
tgaggagactcttgatagagggtat

SEQ ID NO: 182349 - DNA, 25 bp, Artificial
  probe
  misc_feature (1)..(25): SEQ ID NO: 5444; WAN024ETX_at; Start 11; Stop 35
ggcttccgagcagggtaatctttca

SEQ ID NO: 182350 - DNA, 25 bp, Artificial
  probe
  misc_feature (1)..(25): SEQ ID NO: 1375; WAN024ETY_at; Start 147; Stop 171
ttatatagatgcttggaagtacggc

SEQ ID NO: 182351 - DNA, 25 bp, Artificial
  probe
  misc_feature (1)..(25): SEQ ID NO: 1375; WAN024ETY_at; Start 33; Stop 57
aactgaggacttggagcaaacttca

SEQ ID NO: 182352 - DNA, 25 bp, Artificial
  probe
  misc_feature (1)..(25): SEQ ID NO: 1375; WAN024ETY_at; Start 54; Stop 78
ttcaggtggtcttgctgtttgggaa

SEQ ID NO: 182353 - DNA, 25 bp, Artificial
  probe
  misc_feature (1)..(25): SEQ ID NO: 1375; WAN024ETY_at; Start 32; Stop 56
caactgaggacttggagcaaacttc

SEQ ID NO: 182354 - DNA, 25 bp, Artificial
  probe
  misc_feature (1)..(25): SEQ ID NO: 1375; WAN024ETY_at; Start 41; Stop 65
acttggagcaaacttcaggtggtct

SEQ ID NO: 182355 - DNA, 25 bp, Artificial
  probe
  misc_feature (1)..(25): SEQ ID NO: 1375; WAN024ETY_at; Start 31; Stop 55
tcaactgaggacttggagcaaactt

SEQ ID NO: 182356 - DNA, 25 bp, Artificial
  probe
  misc_feature (1)..(25): SEQ ID NO: 1375; WAN024ETY_at; Start 149; Stop 173
atatagatgcttggaagtacggctt

SEQ ID NO: 182357 - DNA, 25 bp, Artificial
  probe
  misc_feature (1)..(25): SEQ ID NO: 1375; WAN024ETY_at; Start 105; Stop 129
tagagaatttgctccctatatgagg

SEQ ID NO: 182358 - DNA, 25 bp, Artificial
  probe
  misc_feature (1)..(25): SEQ ID NO: 1375; WAN024ETY_at; Start 106; Stop 130
agagaatttgctccctatatgaggc

SEQ ID NO: 182359 - DNA, 25 bp, Artificial
  probe
  misc_feature (1)..(25): SEQ ID NO: 1375; WAN024ETY_at; Start 110; Stop 134
aatttgctccctatatgaggcaagg

SEQ ID NO: 182360 - DNA, 25 bp, Artificial
  probe
  misc_feature (1)..(25): SEQ ID NO: 1375; WAN024ETY_at; Start 30; Stop 54
ttcaactgaggacttggagcaaact

SEQ ID NO: 182361 - DNA, 25 bp, Artificial
  probe
  misc_feature (1)..(25): SEQ ID NO: 1375; WAN024ETY_at; Start 42; Stop 66
cttggagcaaacttcaggtggtctt

SEQ ID NO: 182362 - DNA, 25 bp, Artificial
  probe
  misc_feature (1)..(25): SEQ ID NO: 1375; WAN024ETY_at; Start 46; Stop 70
gagcaaacttcaggtggtcttgctg

SEQ ID NO: 182363 - DNA, 25 bp, Artificial
  probe
  misc_feature (1)..(25): SEQ ID NO: 1375; WAN024ETY_at; Start 64; Stop 88
cttgctgtttgggaagatggatata

SEQ ID NO: 182364 - DNA, 25 bp, Artificial
  probe
  misc_feature (1)..(25): SEQ ID NO: 1375; WAN024ETY_at; Start 40; Stop 64
gacttggagcaaacttcaggtggtc

SEQ ID NO: 182365 - DNA, 25 bp, Artificial
  probe
  misc_feature (1)..(25): SEQ ID NO: 1375; WAN024ETY_at; Start 44; Stop 68
tggagcaaacttcaggtggtcttgc

SEQ ID NO: 182366 - DNA, 25 bp, Artificial
  probe
  misc_feature (1)..(25): SEQ ID NO: 1375; WAN024ETY_at; Start 111; Stop 135
atttgctccctatatgaggcaaggg

SEQ ID NO: 182367 - DNA, 25 bp, Artificial
  probe
  misc_feature (1)..(25): SEQ ID NO: 1375; WAN024ETY_at; Start 134; Stop 158
gggcacttaattcttatatagatgc

SEQ ID NO: 182368 - DNA, 25 bp, Artificial
  probe
  misc_feature (1)..(25): SEQ ID NO: 1375; WAN024ETY_at; Start 87; Stop 111
tagtagatggttatattatagagaa

SEQ ID NO: 182369 - DNA, 25 bp, Artificial
  probe
  misc_feature (1)..(25): SEQ ID NO: 1375; WAN024ETY_at; Start 49; Stop 73
caaacttcaggtggtcttgctgttt

SEQ ID NO: 182370 - DNA, 25 bp, Artificial
  probe
  misc_feature (1)..(25): SEQ ID NO: 1375; WAN024ETY_at; Start 119; Stop 143
cctatatgaggcaaggggcacttaa

SEQ ID NO: 182371 - DNA, 25 bp, Artificial
  probe
  misc_feature (1)..(25): SEQ ID NO: 1375; WAN024ETY_at; Start 75; Stop 99
ggaagatggatatagtagatggtta

SEQ ID NO: 182372 - DNA, 25 bp, Artificial
  probe
  misc_feature (1)..(25): SEQ ID NO: 1375; WAN024ETY_at; Start 67; Stop 91
gctgtttgggaagatggatatagta

SEQ ID NO: 182373 - DNA, 25 bp, Artificial
  probe
  misc_feature (1)..(25): SEQ ID NO: 1375; WAN024ETY_at; Start 53; Stop 77
cttcaggtggtcttgctgtttggga

SEQ ID NO: 182374 - DNA, 25 bp, Artificial
  probe
  misc_feature (1)..(25): SEQ ID NO: 1375; WAN024ETY_at; Start 148; Stop 172
tatatagatgcttggaagtacggct

SEQ ID NO: 182375 - DNA, 25 bp, Artificial
  probe
  misc_feature (1)..(25): SEQ ID NO: 1375; WAN024ETY_at; Start 36; Stop 60
tgaggacttggagcaaacttcaggt

SEQ ID NO: 182376 - DNA, 25 bp, Artificial
  probe
  misc_feature (1)..(25): SEQ ID NO: 1375; WAN024ETY_at; Start 109; Stop 133
gaatttgctccctatatgaggcaag

SEQ ID NO: 182377 - DNA, 25 bp, Artificial
  probe
  misc_feature (1)..(25): SEQ ID NO: 1375; WAN024ETY_at; Start 51; Stop 75
aacttcaggtggtcttgctgtttgg

SEQ ID NO: 182378 - DNA, 25 bp, Artificial
  probe
  misc_feature (1)..(25): SEQ ID NO: 1375; WAN024ETY_at; Start 29; Stop 53
tttcaactgaggacttggagcaaac

SEQ ID NO: 182379 - DNA, 25 bp, Artificial
  probe
  misc_feature (1)..(25): SEQ ID NO: 1375; WAN024ETY_at; Start 62; Stop 86
gtcttgctgtttgggaagatggata

SEQ ID NO: 182380 - DNA, 25 bp, Artificial
  probe
  misc_feature (1)..(25): SEQ ID NO: 1375; WAN024ETY_at; Start 71; Stop 95
tttgggaagatggatatagtagatg

SEQ ID NO: 182381 - DNA, 25 bp, Artificial
  probe
  misc_feature (1)..(25): SEQ ID NO: 1375; WAN024ETY_at; Start 39; Stop 63
ggacttggagcaaacttcaggtggt

SEQ ID NO: 182382 - DNA, 25 bp, Artificial
  probe
  misc_feature (1)..(25): SEQ ID NO: 1375; WAN024ETY_at; Start 38; Stop 62
aggacttggagcaaacttcaggtgg

SEQ ID NO: 182383 - DNA, 25 bp, Artificial
  probe
  misc_feature (1)..(25): SEQ ID NO: 1375; WAN024ETY_at; Start 34; Stop 58
actgaggacttggagcaaacttcag

SEQ ID NO: 182384 - DNA, 25 bp, Artificial
  probe
  misc_feature (1)..(25): SEQ ID NO: 2185; WAN024ETZ_at; Start 536; Stop 560
tggtttaccgcgtttctgaagctga

SEQ ID NO: 182385 - DNA, 25 bp, Artificial
  probe
  misc_feature (1)..(25): SEQ ID NO: 2185; WAN024ETZ_at; Start 212; Stop 236
cagtggatgaggatgatattccatc

SEQ ID NO: 182386 - DNA, 25 bp, Artificial
  probe
  misc_feature (1)..(25): SEQ ID NO: 2185; WAN024ETZ_at; Start 645; Stop 669
ttgggagagccaatttaaagactgg

SEQ ID NO: 182387 - DNA, 25 bp, Artificial
  probe
  misc_feature (1)..(25): SEQ ID NO: 2185; WAN024ETZ_at; Start 679; Stop 703
gctactttagaactgaacctacaga

SEQ ID NO: 182388 - DNA, 25 bp, Artificial
  probe
  misc_feature (1)..(25): SEQ ID NO: 2185; WAN024ETZ_at; Start 358; Stop 382
gcagatttctgtttggcgacggata

SEQ ID NO: 182389 - DNA, 25 bp, Artificial
  probe
  misc_feature (1)..(25): SEQ ID NO: 2185; WAN024ETZ_at; Start 370; Stop 394
ttggcgacggataaggctaagttta

SEQ ID NO: 182390 - DNA, 25 bp, Artificial
  probe
  misc_feature (1)..(25): SEQ ID NO: 2185; WAN024ETZ_at; Start 39; Stop 63
aatccttaccttgaaccgtcctgag

SEQ ID NO: 182391 - DNA, 25 bp, Artificial
  probe
  misc_feature (1)..(25): SEQ ID NO: 2185; WAN024ETZ_at; Start 745; Stop 769
gctcattcggagagaagaagaccta

SEQ ID NO: 182392 - DNA, 25 bp, Artificial
  probe
  misc_feature (1)..(25): SEQ ID NO: 2185; WAN024ETZ_at; Start 24; Stop 48
tgaagaggacttggcaatccttacc

SEQ ID NO: 182393 - DNA, 25 bp, Artificial
  probe
  misc_feature (1)..(25): SEQ ID NO: 2185; WAN024ETZ_at; Start 475; Stop 499
gctgctcaattagctatgacaggag

SEQ ID NO: 182394 - DNA, 25 bp, Artificial
  probe
  misc_feature (1)..(25): SEQ ID NO: 2185; WAN024ETZ_at; Start 235; Stop 259
tcattgacaaaaatcgcagagttgg

SEQ ID NO: 182395 - DNA, 25 bp, Artificial
  probe
  misc_feature (1)..(25): SEQ ID NO: 2185; WAN024ETZ_at; Start 282; Stop 306
caagcaaatagccaaacctgtttta

SEQ ID NO: 182396 - DNA, 25 bp, Artificial
  probe
  misc_feature (1)..(25): SEQ ID NO: 2185; WAN024ETZ_at; Start 440; Stop 464
ttcatctcttgagccgcagtatcgg

SEQ ID NO: 182397 - DNA, 25 bp, Artificial
  probe
  misc_feature (1)..(25): SEQ ID NO: 2185; WAN024ETZ_at; Start 86; Stop 110
ccatgtgtgaggagattttagaagc

SEQ ID NO: 182398 - DNA, 25 bp, Artificial
  probe
  misc_feature (1)..(25): SEQ ID NO: 2185; WAN024ETZ_at; Start 728; Stop 752
tcaaagaaggagtgcgagctcattc

SEQ ID NO: 182399 - DNA, 25 bp, Artificial
  probe
  misc_feature (1)..(25): SEQ ID NO: 2185; WAN024ETZ_at; Start 54; Stop 78
ccgtcctgaggtcgcaaatggtttt

SEQ ID NO: 182400 - DNA, 25 bp, Artificial
  probe
  misc_feature (1)..(25): SEQ ID NO: 2185; WAN024ETZ_at; Start 457; Stop 481
agtatcggtgtgacgcgtgctgctc

SEQ ID NO: 182401 - DNA, 25 bp, Artificial
  probe
  misc_feature (1)..(25): SEQ ID NO: 2185; WAN024ETZ_at; Start 602; Stop 626
gacgtgcttcaagtaattcctatgc

SEQ ID NO: 182402 - DNA, 25 bp, Artificial
  probe
  misc_feature (1)..(25): SEQ ID NO: 2185; WAN024ETZ_at; Start 552; Stop 576
tgaagctgaaaaacttgaaaagacg

SEQ ID NO: 182403 - DNA, 25 bp, Artificial
  probe
  misc_feature (1)..(25): SEQ ID NO: 2185; WAN024ETZ_at; Start 619; Stop 643
tcctatgctgccattaagaagttgg

SEQ ID NO: 182404 - DNA, 25 bp, Artificial
  probe
  misc_feature (1)..(25): SEQ ID NO: 2185; WAN024ETZ_at; Start 104; Stop 128
tagaagctctgactttggcagaaga

SEQ ID NO: 182405 - DNA, 25 bp, Artificial
  probe
  misc_feature (1)..(25): SEQ ID NO: 2185; WAN024ETZ_at; Start 73; Stop 97
ggttttcatattcccatgtgtgagg

SEQ ID NO: 182406 - DNA, 25 bp, Artificial
  probe
  misc_feature (1)..(25): SEQ ID NO: 2185; WAN024ETZ_at; Start 385; Stop 409
gctaagtttatccaagcctttgttg

SEQ ID NO: 182407 - DNA, 25 bp, Artificial
  probe
  misc_feature (1)..(25): SEQ ID NO: 2185; WAN024ETZ_at; Start 249; Stop 273
cgcagagttggtcaatacgatttct

SEQ ID NO: 182408 - DNA, 25 bp, Artificial
  probe
  misc_feature (1)..(25): SEQ ID NO: 2185; WAN024ETZ_at; Start 118; Stop 142
ttggcagaagaaaatccagctgtgc

SEQ ID NO: 182409 - DNA, 25 bp, Artificial
  probe
  misc_feature (1)..(25): SEQ ID NO: 2185; WAN024ETZ_at; Start 566; Stop 590
ttgaaaagacgagagaacagcttct

SEQ ID NO: 182410 - DNA, 25 bp, Artificial
  probe
  misc_feature (1)..(25): SEQ ID NO: 2185; WAN024ETZ_at; Start 341; Stop 365
cgaatatggctgttgcggcagattt

SEQ ID NO: 182411 - DNA, 25 bp, Artificial
  probe
  misc_feature (1)..(25): SEQ ID NO: 2185; WAN024ETZ_at; Start 506; Stop 530
taacggcagaaaaagccctagaatg

SEQ ID NO: 182412 - DNA, 25 bp, Artificial
  probe
  misc_feature (1)..(25): SEQ ID NO: 2185; WAN024ETZ_at; Start 700; Stop 724
cagaaatccttagctcaaacagagg

SEQ ID NO: 182413 - DNA, 25 bp, Artificial
  probe
  misc_feature (1)..(25): SEQ ID NO: 2185; WAN024ETZ_at; Start 305; Stop 329
taatggaagttgacggtgctgttgc

SEQ ID NO: 182414 - DNA, 25 bp, Artificial
  probe
  misc_feature (1)..(25): SEQ ID NO: 2185; WAN024ETZ_at; Start 489; Stop 513
tatgacaggagaggctttaacggca

SEQ ID NO: 182415 - DNA, 25 bp, Artificial
  probe
  misc_feature (1)..(25): SEQ ID NO: 2185; WAN024ETZ_at; Start 660; Stop 684
taaagactggcagggttacgctact

SEQ ID NO: 182416 - DNA, 25 bp, Artificial
  probe
  misc_feature (1)..(25): SEQ ID NO: 2185; WAN024ETZ_at; Start 155; Stop 179
tcaatgccaatggaaaggtcttctc

SEQ ID NO: 182417 - DNA, 25 bp, Artificial
  probe
  misc_feature (1)..(25): SEQ ID NO: 2185; WAN024ETZ_at; Start 327; Stop 351
tgcaggtgccgcagcgaatatggct

SEQ ID NO: 182418 - DNA, 25 bp, Artificial
  probe
  misc_feature (1)..(25): SEQ ID NO: 5145; WAN024EU2_at; Start 139; Stop 163
tttatcaataaagccattggctgga

SEQ ID NO: 182419 - DNA, 25 bp, Artificial
  probe
  misc_feature (1)..(25): SEQ ID NO: 5145; WAN024EU2_at; Start 131; Stop 155
cagaattttttatcaataaagccat

SEQ ID NO: 182420 - DNA, 25 bp, Artificial
  probe
  misc_feature (1)..(25): SEQ ID NO: 5145; WAN024EU2_at; Start 114; Stop 138
tcataacttgaaccaaacagaattt

SEQ ID NO: 182421 - DNA, 25 bp, Artificial
  probe
  misc_feature (1)..(25): SEQ ID NO: 5145; WAN024EU2_at; Start 237; Stop 261
tgaacttagtatcaaagaagcaagc

SEQ ID NO: 182422 - DNA, 25 bp, Artificial
  probe
  misc_feature (1)..(25): SEQ ID NO: 5145; WAN024EU2_at; Start 229; Stop 253
agaatggctgaacttagtatcaaag

SEQ ID NO: 182423 - DNA, 25 bp, Artificial
  probe
  misc_feature (1)..(25): SEQ ID NO: 5145; WAN024EU2_at; Start 30; Stop 54
tatctggctgagacgtgtcgctatt

SEQ ID NO: 182424 - DNA, 25 bp, Artificial
  probe
  misc_feature (1)..(25): SEQ ID NO: 5145; WAN024EU2_at; Start 72; Stop 96
aaaagagaagaccaatactcaatta

SEQ ID NO: 182425 - DNA, 25 bp, Artificial
  probe
  misc_feature (1)..(25): SEQ ID NO: 5145; WAN024EU2_at; Start 78; Stop 102
gaagaccaatactcaattaatggaa

SEQ ID NO: 182426 - DNA, 25 bp, Artificial
  probe
  misc_feature (1)..(25): SEQ ID NO: 5145; WAN024EU2_at; Start 80; Stop 104
agaccaatactcaattaatggaaaa

SEQ ID NO: 182427 - DNA, 25 bp, Artificial
  probe
  misc_feature (1)..(25): SEQ ID NO: 5145; WAN024EU2_at; Start 77; Stop 101
agaagaccaatactcaattaatgga

SEQ ID NO: 182428 - DNA, 25 bp, Artificial
  probe
  misc_feature (1)..(25): SEQ ID NO: 5145; WAN024EU2_at; Start 112; Stop 136
cttcataacttgaaccaaacagaat

SEQ ID NO: 182429 - DNA, 25 bp, Artificial
  probe
  misc_feature (1)..(25): SEQ ID NO: 5145; WAN024EU2_at; Start 115; Stop 139
cataacttgaaccaaacagaatttt

SEQ ID NO: 182430 - DNA, 25 bp, Artificial
  probe
  misc_feature (1)..(25): SEQ ID NO: 5145; WAN024EU2_at; Start 228; Stop 252
aagaatggctgaacttagtatcaaa

SEQ ID NO: 182431 - DNA, 25 bp, Artificial
  probe
  misc_feature (1)..(25): SEQ ID NO: 5145; WAN024EU2_at; Start 236; Stop 260
ctgaacttagtatcaaagaagcaag

SEQ ID NO: 182432 - DNA, 25 bp, Artificial
  probe
  misc_feature (1)..(25): SEQ ID NO: 5145; WAN024EU2_at; Start 235; Stop 259
gctgaacttagtatcaaagaagcaa

SEQ ID NO: 182433 - DNA, 25 bp, Artificial
  probe
  misc_feature (1)..(25): SEQ ID NO: 5145; WAN024EU2_at; Start 29; Stop 53
atatctggctgagacgtgtcgctat

SEQ ID NO: 182434 - DNA, 25 bp, Artificial
  probe
  misc_feature (1)..(25): SEQ ID NO: 5145; WAN024EU2_at; Start 226; Stop 250
gaaagaatggctgaacttagtatca

SEQ ID NO: 182435 - DNA, 25 bp, Artificial
  probe
  misc_feature (1)..(25): SEQ ID NO: 5145; WAN024EU2_at; Start 27; Stop 51
taatatctggctgagacgtgtcgct

SEQ ID NO: 182436 - DNA, 25 bp, Artificial
  probe
  misc_feature (1)..(25): SEQ ID NO: 5145; WAN024EU2_at; Start 238; Stop 262
gaacttagtatcaaagaagcaagca

SEQ ID NO: 182437 - DNA, 25 bp, Artificial
  probe
  misc_feature (1)..(25): SEQ ID NO: 5145; WAN024EU2_at; Start 127; Stop 151
caaacagaattttttatcaataaag

SEQ ID NO: 182438 - DNA, 25 bp, Artificial
  probe
  misc_feature (1)..(25): SEQ ID NO: 5145; WAN024EU2_at; Start 26; Stop 50
ataatatctggctgagacgtgtcgc

SEQ ID NO: 182439 - DNA, 25 bp, Artificial
  probe
  misc_feature (1)..(25): SEQ ID NO: 5145; WAN024EU2_at; Start 227; Stop 251
aaagaatggctgaacttagtatcaa

SEQ ID NO: 182440 - DNA, 25 bp, Artificial
  probe
  misc_feature (1)..(25): SEQ ID NO: 5145; WAN024EU2_at; Start 76; Stop 100
gagaagaccaatactcaattaatgg

SEQ ID NO: 182441 - DNA, 25 bp, Artificial
  probe
  misc_feature (1)..(25): SEQ ID NO: 5145; WAN024EU2_at; Start 122; Stop 146
tgaaccaaacagaattttttatcaa

SEQ ID NO: 182442 - DNA, 25 bp, Artificial
  probe
  misc_feature (1)..(25): SEQ ID NO: 5145; WAN024EU2_at; Start 138; Stop 162
ttttatcaataaagccattggctgg

SEQ ID NO: 182443 - DNA, 25 bp, Artificial
  probe
  misc_feature (1)..(25): SEQ ID NO: 5145; WAN024EU2_at; Start 225; Stop 249
ggaaagaatggctgaacttagtatc

SEQ ID NO: 182444 - DNA, 25 bp, Artificial
  probe
  misc_feature (1)..(25): SEQ ID NO: 5145; WAN024EU2_at; Start 137; Stop 161
tttttatcaataaagccattggctg

SEQ ID NO: 182445 - DNA, 25 bp, Artificial
  probe
  misc_feature (1)..(25): SEQ ID NO: 5145; WAN024EU2_at; Start 113; Stop 137
ttcataacttgaaccaaacagaatt

SEQ ID NO: 182446 - DNA, 25 bp, Artificial
  probe
  misc_feature (1)..(25): SEQ ID NO: 5145; WAN024EU2_at; Start 231; Stop 255
aatggctgaacttagtatcaaagaa

SEQ ID NO: 182447 - DNA, 25 bp, Artificial
  probe
  misc_feature (1)..(25): SEQ ID NO: 5145; WAN024EU2_at; Start 234; Stop 258
ggctgaacttagtatcaaagaagca

SEQ ID NO: 182448 - DNA, 25 bp, Artificial
  probe
  misc_feature (1)..(25): SEQ ID NO: 5145; WAN024EU2_at; Start 233; Stop 257
tggctgaacttagtatcaaagaagc

SEQ ID NO: 182449 - DNA, 25 bp, Artificial
  probe
  misc_feature (1)..(25): SEQ ID NO: 5145; WAN024EU2_at; Start 25; Stop 49
gataatatctggctgagacgtgtcg

SEQ ID NO: 182450 - DNA, 25 bp, Artificial
  probe
  misc_feature (1)..(25): SEQ ID NO: 5145; WAN024EU2_at; Start 230; Stop 254
gaatggctgaacttagtatcaaaga

SEQ ID NO: 182451 - DNA, 25 bp, Artificial
  probe
  misc_feature (1)..(25): SEQ ID NO: 5145; WAN024EU2_at; Start 28; Stop 52
aatatctggctgagacgtgtcgcta

SEQ ID NO: 182452 - DNA, 25 bp, Artificial
  probe
  misc_feature (1)..(25): SEQ ID NO: 7056; WAN024EU3_at; Start 60; Stop 84
tagcaaggtagaagttgatgagttt

SEQ ID NO: 182453 - DNA, 25 bp, Artificial
  probe
  misc_feature (1)..(25): SEQ ID NO: 7056; WAN024EU3_at; Start 56; Stop 80
ggtatagcaaggtagaagttgatga

SEQ ID NO: 182454 - DNA, 25 bp, Artificial
  probe
  misc_feature (1)..(25): SEQ ID NO: 7056; WAN024EU3_at; Start 53; Stop 77
gtgggtatagcaaggtagaagttga

SEQ ID NO: 182455 - DNA, 25 bp, Artificial
  probe
  misc_feature (1)..(25): SEQ ID NO: 7056; WAN024EU3_at; Start 49; Stop 73
gttcgtgggtatagcaaggtagaag

SEQ ID NO: 182456 - DNA, 25 bp, Artificial
  probe
  misc_feature (1)..(25): SEQ ID NO: 7056; WAN024EU3_at; Start 45; Stop 69
tgaagttcgtgggtatagcaaggta

SEQ ID NO: 182457 - DNA, 25 bp, Artificial
  probe
  misc_feature (1)..(25): SEQ ID NO: 7056; WAN024EU3_at; Start 54; Stop 78
tgggtatagcaaggtagaagttgat

SEQ ID NO: 182458 - DNA, 25 bp, Artificial
  probe
  misc_feature (1)..(25): SEQ ID NO: 7056; WAN024EU3_at; Start 52; Stop 76
cgtgggtatagcaaggtagaagttg

SEQ ID NO: 182459 - DNA, 25 bp, Artificial
  probe
  misc_feature (1)..(25): SEQ ID NO: 7056; WAN024EU3_at; Start 58; Stop 82
tatagcaaggtagaagttgatgagt

SEQ ID NO: 182460 - DNA, 25 bp, Artificial
  probe
  misc_feature (1)..(25): SEQ ID NO: 7056; WAN024EU3_at; Start 46; Stop 70
gaagttcgtgggtatagcaaggtag

SEQ ID NO: 182461 - DNA, 25 bp, Artificial
  probe
  misc_feature (1)..(25): SEQ ID NO: 7056; WAN024EU3_at; Start 63; Stop 87
caaggtagaagttgatgagttttta

SEQ ID NO: 182462 - DNA, 25 bp, Artificial
  probe
  misc_feature (1)..(25): SEQ ID NO: 7056; WAN024EU3_at; Start 40; Stop 64
ggacgtgaagttcgtgggtatagca

SEQ ID NO: 182463 - DNA, 25 bp, Artificial
  probe
  misc_feature (1)..(25): SEQ ID NO: 7056; WAN024EU3_at; Start 38; Stop 62
ttggacgtgaagttcgtgggtatag

SEQ ID NO: 182464 - DNA, 25 bp, Artificial
  probe
  misc_feature (1)..(25): SEQ ID NO: 7056; WAN024EU3_at; Start 41; Stop 65
gacgtgaagttcgtgggtatagcaa

SEQ ID NO: 182465 - DNA, 25 bp, Artificial
  probe
  misc_feature (1)..(25): SEQ ID NO: 7056; WAN024EU3_at; Start 59; Stop 83
atagcaaggtagaagttgatgagtt

SEQ ID NO: 182466 - DNA, 25 bp, Artificial
  probe
  misc_feature (1)..(25): SEQ ID NO: 7056; WAN024EU3_at; Start 48; Stop 72
agttcgtgggtatagcaaggtagaa

SEQ ID NO: 182467 - DNA, 25 bp, Artificial
  probe
  misc_feature (1)..(25): SEQ ID NO: 7056; WAN024EU3_at; Start 43; Stop 67
cgtgaagttcgtgggtatagcaagg

SEQ ID NO: 182468 - DNA, 25 bp, Artificial
  probe
  misc_feature (1)..(25): SEQ ID NO: 7056; WAN024EU3_at; Start 39; Stop 63
tggacgtgaagttcgtgggtatagc

SEQ ID NO: 182469 - DNA, 25 bp, Artificial
  probe
  misc_feature (1)..(25): SEQ ID NO: 7056; WAN024EU3_at; Start 42; Stop 66
acgtgaagttcgtgggtatagcaag

SEQ ID NO: 182470 - DNA, 25 bp, Artificial
  probe
  misc_feature (1)..(25): SEQ ID NO: 7056; WAN024EU3_at; Start 51; Stop 75
tcgtgggtatagcaaggtagaagtt

SEQ ID NO: 182471 - DNA, 25 bp, Artificial
  probe
  misc_feature (1)..(25): SEQ ID NO: 7056; WAN024EU3_at; Start 44; Stop 68
gtgaagttcgtgggtatagcaaggt

SEQ ID NO: 182472 - DNA, 25 bp, Artificial
  probe
  misc_feature (1)..(25): SEQ ID NO: 7056; WAN024EU3_at; Start 55; Stop 79
gggtatagcaaggtagaagttgatg

SEQ ID NO: 182473 - DNA, 25 bp, Artificial
  probe
  misc_feature (1)..(25): SEQ ID NO: 7056; WAN024EU3_at; Start 33; Stop 57
agagtttggacgtgaagttcgtggg

SEQ ID NO: 182474 - DNA, 25 bp, Artificial
  probe
  misc_feature (1)..(25): SEQ ID NO: 7056; WAN024EU3_at; Start 47; Stop 71
aagttcgtgggtatagcaaggtaga

SEQ ID NO: 182475 - DNA, 25 bp, Artificial
  probe
  misc_feature (1)..(25): SEQ ID NO: 7056; WAN024EU3_at; Start 37; Stop 61
tttggacgtgaagttcgtgggtata

SEQ ID NO: 182476 - DNA, 25 bp, Artificial
  probe
  misc_feature (1)..(25): SEQ ID NO: 7056; WAN024EU3_at; Start 62; Stop 86
gcaaggtagaagttgatgagttttt

SEQ ID NO: 182477 - DNA, 25 bp, Artificial
  probe
  misc_feature (1)..(25): SEQ ID NO: 7056; WAN024EU3_at; Start 61; Stop 85
agcaaggtagaagttgatgagtttt

SEQ ID NO: 182478 - DNA, 25 bp, Artificial
  probe
  misc_feature (1)..(25): SEQ ID NO: 7056; WAN024EU3_at; Start 57; Stop 81
gtatagcaaggtagaagttgatgag

SEQ ID NO: 182479 - DNA, 25 bp, Artificial
  probe
  misc_feature (1)..(25): SEQ ID NO: 7056; WAN024EU3_at; Start 50; Stop 74
ttcgtgggtatagcaaggtagaagt

SEQ ID NO: 182480 - DNA, 25 bp, Artificial
  probe
  misc_feature (1)..(25): SEQ ID NO: 2405; WAN024EU4_at; Start 300; Stop 324
taaacaaattttagataactcagat

SEQ ID NO: 182481 - DNA, 25 bp, Artificial
  probe
  misc_feature (1)..(25): SEQ ID NO: 2405; WAN024EU4_at; Start 194; Stop 218
aaccttcaccagttcaagcagaacc

SEQ ID NO: 182482 - DNA, 25 bp, Artificial
  probe
  misc_feature (1)..(25): SEQ ID NO: 2405; WAN024EU4_at; Start 60; Stop 84
ccgtggctataataaagtagaagtt

SEQ ID NO: 182483 - DNA, 25 bp, Artificial
  probe
  misc_feature (1)..(25): SEQ ID NO: 2405; WAN024EU4_at; Start 200; Stop 224
caccagttcaagcagaaccccttga

SEQ ID NO: 182484 - DNA, 25 bp, Artificial
  probe
  misc_feature (1)..(25): SEQ ID NO: 2405; WAN024EU4_at; Start 268; Stop 292
cgcctgaatagattggaaaaagaag

SEQ ID NO: 182485 - DNA, 25 bp, Artificial
  probe
  misc_feature (1)..(25): SEQ ID NO: 2405; WAN024EU4_at; Start 270; Stop 294
cctgaatagattggaaaaagaagtt

SEQ ID NO: 182486 - DNA, 25 bp, Artificial
  probe
  misc_feature (1)..(25): SEQ ID NO: 2405; WAN024EU4_at; Start 256; Stop 280
gatattttgaaacgcctgaatagat

SEQ ID NO: 182487 - DNA, 25 bp, Artificial
  probe
  misc_feature (1)..(25): SEQ ID NO: 2405; WAN024EU4_at; Start 266; Stop 290
aacgcctgaatagattggaaaaaga

SEQ ID NO: 182488 - DNA, 25 bp, Artificial
  probe
  misc_feature (1)..(25): SEQ ID NO: 2405; WAN024EU4_at; Start 214; Stop 238
gaaccccttgaagcggcaattacaa

SEQ ID NO: 182489 - DNA, 25 bp, Artificial
  probe
  misc_feature (1)..(25): SEQ ID NO: 2405; WAN024EU4_at; Start 189; Stop 213
accgaaaccttcaccagttcaagca

SEQ ID NO: 182490 - DNA, 25 bp, Artificial
  probe
  misc_feature (1)..(25): SEQ ID NO: 2405; WAN024EU4_at; Start 208; Stop 232
caagcagaaccccttgaagcggcaa

SEQ ID NO: 182491 - DNA, 25 bp, Artificial
  probe
  misc_feature (1)..(25): SEQ ID NO: 2405; WAN024EU4_at; Start 205; Stop 229
gttcaagcagaaccccttgaagcgg

SEQ ID NO: 182492 - DNA, 25 bp, Artificial
  probe
  misc_feature (1)..(25): SEQ ID NO: 2405; WAN024EU4_at; Start 228; Stop 252
ggcaattacaagttctatgacgaat

SEQ ID NO: 182493 - DNA, 25 bp, Artificial
  probe
  misc_feature (1)..(25): SEQ ID NO: 2405; WAN024EU4_at; Start 220; Stop 244
cttgaagcggcaattacaagttcta

SEQ ID NO: 182494 - DNA, 25 bp, Artificial
  probe
  misc_feature (1)..(25): SEQ ID NO: 2405; WAN024EU4_at; Start 198; Stop 222
ttcaccagttcaagcagaacccctt

SEQ ID NO: 182495 - DNA, 25 bp, Artificial
  probe
  misc_feature (1)..(25): SEQ ID NO: 2405; WAN024EU4_at; Start 230; Stop 254
caattacaagttctatgacgaattt

SEQ ID NO: 182496 - DNA, 25 bp, Artificial
  probe
  misc_feature (1)..(25): SEQ ID NO: 2405; WAN024EU4_at; Start 5; Stop 29
caagtattattttttcagcgaaaga

SEQ ID NO: 182497 - DNA, 25 bp, Artificial
  probe
  misc_feature (1)..(25): SEQ ID NO: 2405; WAN024EU4_at; Start 260; Stop 284
ttttgaaacgcctgaatagattgga

SEQ ID NO: 182498 - DNA, 25 bp, Artificial
  probe
  misc_feature (1)..(25): SEQ ID NO: 2405; WAN024EU4_at; Start 209; Stop 233
aagcagaaccccttgaagcggcaat

SEQ ID NO: 182499 - DNA, 25 bp, Artificial
  probe
  misc_feature (1)..(25): SEQ ID NO: 2405; WAN024EU4_at; Start 226; Stop 250
gcggcaattacaagttctatgacga

SEQ ID NO: 182500 - DNA, 25 bp, Artificial
  probe
  misc_feature (1)..(25): SEQ ID NO: 2405; WAN024EU4_at; Start 67; Stop 91
tataataaagtagaagttgacgagt

SEQ ID NO: 182501 - DNA, 25 bp, Artificial
  probe
  misc_feature (1)..(25): SEQ ID NO: 2405; WAN024EU4_at; Start 309; Stop 333
tttagataactcagatttttaacta

SEQ ID NO: 182502 - DNA, 25 bp, Artificial
  probe
  misc_feature (1)..(25): SEQ ID NO: 2405; WAN024EU4_at; Start 218; Stop 242
cccttgaagcggcaattacaagttc

SEQ ID NO: 182503 - DNA, 25 bp, Artificial
  probe
  misc_feature (1)..(25): SEQ ID NO: 2405; WAN024EU4_at; Start 192; Stop 216
gaaaccttcaccagttcaagcagaa

SEQ ID NO: 182504 - DNA, 25 bp, Artificial
  probe
  misc_feature (1)..(25): SEQ ID NO: 2405; WAN024EU4_at; Start 58; Stop 82
gtccgtggctataataaagtagaag

SEQ ID NO: 182505 - DNA, 25 bp, Artificial
  probe
  misc_feature (1)..(25): SEQ ID NO: 2405; WAN024EU4_at; Start 222; Stop 246
tgaagcggcaattacaagttctatg

SEQ ID NO: 182506 - DNA, 25 bp, Artificial
  probe
  misc_feature (1)..(25): SEQ ID NO: 2405; WAN024EU4_at; Start 262; Stop 286
ttgaaacgcctgaatagattggaaa

SEQ ID NO: 182507 - DNA, 25 bp, Artificial
  probe
  misc_feature (1)..(25): SEQ ID NO: 2405; WAN024EU4_at; Start 2; Stop 26
tggcaagtattattttttcagcgaa

SEQ ID NO: 182508 - DNA, 25 bp, Artificial
  probe
  misc_feature (1)..(25): SEQ ID NO: 2405; WAN024EU4_at; Start 64; Stop 88
ggctataataaagtagaagttgacg

SEQ ID NO: 182509 - DNA, 25 bp, Artificial
  probe
  misc_feature (1)..(25): SEQ ID NO: 2405; WAN024EU4_at; Start 224; Stop 248
aagcggcaattacaagttctatgac

SEQ ID NO: 182510 - DNA, 25 bp, Artificial
  probe
  misc_feature (1)..(25): SEQ ID NO: 2405; WAN024EU4_at; Start 211; Stop 235
gcagaaccccttgaagcggcaatta

SEQ ID NO: 182511 - DNA, 25 bp, Artificial
  probe
  misc_feature (1)..(25): SEQ ID NO: 2405; WAN024EU4_at; Start 212; Stop 236
cagaaccccttgaagcggcaattac

SEQ ID NO: 182512 - DNA, 25 bp, Artificial
  probe
  misc_feature (1)..(25): SEQ ID NO: 2405; WAN024EU4_at; Start 264; Stop 288
gaaacgcctgaatagattggaaaaa

SEQ ID NO: 182513 - DNA, 25 bp, Artificial
  probe
  misc_feature (1)..(25): SEQ ID NO: 2405; WAN024EU4_at; Start 202; Stop 226
ccagttcaagcagaaccccttgaag

SEQ ID NO: 182514 - DNA, 25 bp, Artificial
  probe
  misc_feature (1)..(25): SEQ ID NO: 2652; WAN024EU5_at; Start 415; Stop 439
caagaaacctacttattgccggcat

SEQ ID NO: 182515 - DNA, 25 bp, Artificial
  probe
  misc_feature (1)..(25): SEQ ID NO: 2652; WAN024EU5_at; Start 187; Stop 211
tatccacaacgaagtcgtgccaaga

SEQ ID NO: 182516 - DNA, 25 bp, Artificial
  probe
  misc_feature (1)..(25): SEQ ID NO: 2652; WAN024EU5_at; Start 563; Stop 587
tcaaagaacatttattaggtggtaa

SEQ ID NO: 182517 - DNA, 25 bp, Artificial
  probe
  misc_feature (1)..(25): SEQ ID NO: 2652; WAN024EU5_at; Start 299; Stop 323
caaaacaaaaacgtgcgattccgat

SEQ ID NO: 182518 - DNA, 25 bp, Artificial
  probe
  misc_feature (1)..(25): SEQ ID NO: 2652; WAN024EU5_at; Start 367; Stop 391
cttgcccaacaaggaatctgctttg

SEQ ID NO: 182519 - DNA, 25 bp, Artificial
  probe
  misc_feature (1)..(25): SEQ ID NO: 2652; WAN024EU5_at; Start 396; Stop 420
tcttcacttttcttctcagcaagaa

SEQ ID NO: 182520 - DNA, 25 bp, Artificial
  probe
  misc_feature (1)..(25): SEQ ID NO: 2652; WAN024EU5_at; Start 310; Stop 334
cgtgcgattccgatgaaaaattttc

SEQ ID NO: 182521 - DNA, 25 bp, Artificial
  probe
  misc_feature (1)..(25): SEQ ID NO: 2652; WAN024EU5_at; Start 48; Stop 72
tctttctcaacccaaaaatttcgca

SEQ ID NO: 182522 - DNA, 25 bp, Artificial
  probe
  misc_feature (1)..(25): SEQ ID NO: 2652; WAN024EU5_at; Start 111; Stop 135
caacgactactatttgtctcagggc

SEQ ID NO: 182523 - DNA, 25 bp, Artificial
  probe
  misc_feature (1)..(25): SEQ ID NO: 2652; WAN024EU5_at; Start 181; Stop 205
gtggactatccacaacgaagtcgtg

SEQ ID NO: 182524 - DNA, 25 bp, Artificial
  probe
  misc_feature (1)..(25): SEQ ID NO: 2652; WAN024EU5_at; Start 59; Stop 83
ccaaaaatttcgcaaatcgaggaat

SEQ ID NO: 182525 - DNA, 25 bp, Artificial
  probe
  misc_feature (1)..(25): SEQ ID NO: 2652; WAN024EU5_at; Start 213; Stop 237
tgttgaagcctattttcgacaagct

SEQ ID NO: 182526 - DNA, 25 bp, Artificial
  probe
  misc_feature (1)..(25): SEQ ID NO: 2652; WAN024EU5_at; Start 442; Stop 466
gatttgattcgcttctatcatcaag

SEQ ID NO: 182527 - DNA, 25 bp, Artificial
  probe
  misc_feature (1)..(25): SEQ ID NO: 2652; WAN024EU5_at; Start 118; Stop 142
tactatttgtctcagggcttggctg

SEQ ID NO: 182528 - DNA, 25 bp, Artificial
  probe
  misc_feature (1)..(25): SEQ ID NO: 2652; WAN024EU5_at; Start 91; Stop 115
gaaaagatgatcaatgctaccaacg

SEQ ID NO: 182529 - DNA, 25 bp, Artificial
  probe
  misc_feature (1)..(25): SEQ ID NO: 2652; WAN024EU5_at; Start 198; Stop 222
aagtcgtgccaagattgttgaagcc

SEQ ID NO: 182530 - DNA, 25 bp, Artificial
  probe
  misc_feature (1)..(25): SEQ ID NO: 2652; WAN024EU5_at; Start 153; Stop 177
gaaaccaactcctattcaaatcgta

SEQ ID NO: 182531 - DNA, 25 bp, Artificial
  probe
  misc_feature (1)..(25): SEQ ID NO: 2652; WAN024EU5_at; Start 428; Stop 452
tattgccggcattcgatttgattcg

SEQ ID NO: 182532 - DNA, 25 bp, Artificial
  probe
  misc_feature (1)..(25): SEQ ID NO: 2652; WAN024EU5_at; Start 379; Stop 403
ggaatctgctttgtccttcttcact

SEQ ID NO: 182533 - DNA, 25 bp, Artificial
  probe
  misc_feature (1)..(25): SEQ ID NO: 2652; WAN024EU5_at; Start 547; Stop 571
ccttatctcaatgttatcaaagaac

SEQ ID NO: 182534 - DNA, 25 bp, Artificial
  probe
  misc_feature (1)..(25): SEQ ID NO: 2652; WAN024EU5_at; Start 512; Stop 536
gatatgaaatcaaggctggtgcctt

SEQ ID NO: 182535 - DNA, 25 bp, Artificial
  probe
  misc_feature (1)..(25): SEQ ID NO: 2652; WAN024EU5_at; Start 69; Stop 93
cgcaaatcgaggaatgtcttttgaa

SEQ ID NO: 182536 - DNA, 25 bp, Artificial
  probe
  misc_feature (1)..(25): SEQ ID NO: 2652; WAN024EU5_at; Start 247; Stop 271
gactattctggcgtttataatggat

SEQ ID NO: 182537 - DNA, 25 bp, Artificial
  probe
  misc_feature (1)..(25): SEQ ID NO: 2652; WAN024EU5_at; Start 96; Stop 120
gatgatcaatgctaccaacgactac

SEQ ID NO: 182538 - DNA, 25 bp, Artificial
  probe
  misc_feature (1)..(25): SEQ ID NO: 2652; WAN024EU5_at; Start 498; Stop 522
tattcgagaatatggatatgaaatc

SEQ ID NO: 182539 - DNA, 25 bp, Artificial
  probe
  misc_feature (1)..(25): SEQ ID NO: 2652; WAN024EU5_at; Start 265; Stop 289
aatggatattacatcgactttgaag

SEQ ID NO: 182540 - DNA, 25 bp, Artificial
  probe
  misc_feature (1)..(25): SEQ ID NO: 2652; WAN024EU5_at; Start 356; Stop 380
tggaacaagtccttgcccaacaagg

SEQ ID NO: 182541 - DNA, 25 bp, Artificial
  probe
  misc_feature (1)..(25): SEQ ID NO: 2652; WAN024EU5_at; Start 466; Stop 490
gataagggacaaaaatcaatgccac

SEQ ID NO: 182542 - DNA, 25 bp, Artificial
  probe
  misc_feature (1)..(25): SEQ ID NO: 2652; WAN024EU5_at; Start 343; Stop 367
cagattcagcatatggaacaagtcc

SEQ ID NO: 182543 - DNA, 25 bp, Artificial
  probe
  misc_feature (1)..(25): SEQ ID NO: 2652; WAN024EU5_at; Start 525; Stop 549
ggctggtgccttccctcaaattcct

SEQ ID NO: 182544 - DNA, 25 bp, Artificial
  probe
  misc_feature (1)..(25): SEQ ID NO: 2652; WAN024EU5_at; Start 452; Stop 476
gcttctatcatcaagataagggaca

SEQ ID NO: 182545 - DNA, 25 bp, Artificial
  probe
  misc_feature (1)..(25): SEQ ID NO: 2652; WAN024EU5_at; Start 223; Stop 247
tattttcgacaagcttcaacgacgg

SEQ ID NO: 182546 - DNA, 25 bp, Artificial
  probe
  misc_feature (1)..(25): SEQ ID NO: 2652; WAN024EU5_at; Start 235; Stop 259
gcttcaacgacggactattctggcg

SEQ ID NO: 182547 - DNA, 25 bp, Artificial
  probe
  misc_feature (1)..(25): SEQ ID NO: 2652; WAN024EU5_at; Start 328; Stop 352
aattttcatccacatcagattcagc

SEQ ID NO: 182548 - DNA, 25 bp, Artificial
  probe
  misc_feature (1)..(25): SEQ ID NO: 2323; WAN024EU6_at; Start 35; Stop 59
tcttggcagtgagtccccttttact

SEQ ID NO: 182549 - DNA, 25 bp, Artificial
  probe
  misc_feature (1)..(25): SEQ ID NO: 2323; WAN024EU6_at; Start 209; Stop 233
tctccttgcagattgcaaaaggtgt

SEQ ID NO: 182550 - DNA, 25 bp, Artificial
  probe
  misc_feature (1)..(25): SEQ ID NO: 2323; WAN024EU6_at; Start 65; Stop 89
gctttcattctattcgtcagcaaaa

SEQ ID NO: 182551 - DNA, 25 bp, Artificial
  probe
  misc_feature (1)..(25): SEQ ID NO: 2323; WAN024EU6_at; Start 99; Stop 123
caaacagatggagcaacgacaagag

SEQ ID NO: 182552 - DNA, 25 bp, Artificial
  probe
  misc_feature (1)..(25): SEQ ID NO: 2323; WAN024EU6_at; Start 88; Stop 112
aagttgcttcgcaaacagatggagc

SEQ ID NO: 182553 - DNA, 25 bp, Artificial
  probe
  misc_feature (1)..(25): SEQ ID NO: 2323; WAN024EU6_at; Start 169; Stop 193
ggaattcatggaaaaatcatttcta

SEQ ID NO: 182554 - DNA, 25 bp, Artificial
  probe
  misc_feature (1)..(25): SEQ ID NO: 2323; WAN024EU6_at; Start 216; Stop 240
gcagattgcaaaaggtgtggtcatc

SEQ ID NO: 182555 - DNA, 25 bp, Artificial
  probe
  misc_feature (1)..(25): SEQ ID NO: 2323; WAN024EU6_at; Start 103; Stop 127
cagatggagcaacgacaagagtatt

SEQ ID NO: 182556 - DNA, 25 bp, Artificial
  probe
  misc_feature (1)..(25): SEQ ID NO: 2323; WAN024EU6_at; Start 93; Stop 117
gcttcgcaaacagatggagcaacga

SEQ ID NO: 182557 - DNA, 25 bp, Artificial
  probe
  misc_feature (1)..(25): SEQ ID NO: 2323; WAN024EU6_at; Start 158; Stop 182
tgttattgtctggaattcatggaaa

SEQ ID NO: 182558 - DNA, 25 bp, Artificial
  probe
  misc_feature (1)..(25): SEQ ID NO: 2323; WAN024EU6_at; Start 85; Stop 109
caaaagttgcttcgcaaacagatgg

SEQ ID NO: 182559 - DNA, 25 bp, Artificial
  probe
  misc_feature (1)..(25): SEQ ID NO: 2323; WAN024EU6_at; Start 47; Stop 71
gtccccttttactgtcaagctttca

SEQ ID NO: 182560 - DNA, 25 bp, Artificial
  probe
  misc_feature (1)..(25): SEQ ID NO: 2323; WAN024EU6_at; Start 75; Stop 99
tattcgtcagcaaaagttgcttcgc

SEQ ID NO: 182561 - DNA, 25 bp, Artificial
  probe
  misc_feature (1)..(25): SEQ ID NO: 2323; WAN024EU6_at; Start 96; Stop 120
tcgcaaacagatggagcaacgacaa

SEQ ID NO: 182562 - DNA, 25 bp, Artificial
  probe
  misc_feature (1)..(25): SEQ ID NO: 2323; WAN024EU6_at; Start 259; Stop 283
gtaatgggaaagacaaaagaactgc

SEQ ID NO: 182563 - DNA, 25 bp, Artificial
  probe
  misc_feature (1)..(25): SEQ ID NO: 2323; WAN024EU6_at; Start 82; Stop 106
cagcaaaagttgcttcgcaaacaga

SEQ ID NO: 182564 - DNA, 25 bp, Artificial
  probe
  misc_feature (1)..(25): SEQ ID NO: 2323; WAN024EU6_at; Start 60; Stop 84
gtcaagctttcattctattcgtcag

SEQ ID NO: 182565 - DNA, 25 bp, Artificial
  probe
  misc_feature (1)..(25): SEQ ID NO: 2323; WAN024EU6_at; Start 116; Stop 140
gacaagagtatttagcttctttaac

SEQ ID NO: 182566 - DNA, 25 bp, Artificial
  probe
  misc_feature (1)..(25): SEQ ID NO: 2323; WAN024EU6_at; Start 43; Stop 67
gtgagtccccttttactgtcaagct

SEQ ID NO: 182567 - DNA, 25 bp, Artificial
  probe
  misc_feature (1)..(25): SEQ ID NO: 2323; WAN024EU6_at; Start 148; Stop 172
gatgaagtgttgttattgtctggaa

SEQ ID NO: 182568 - DNA, 25 bp, Artificial
  probe
  misc_feature (1)..(25): SEQ ID NO: 2323; WAN024EU6_at; Start 213; Stop 237
cttgcagattgcaaaaggtgtggtc

SEQ ID NO: 182569 - DNA, 25 bp, Artificial
  probe
  misc_feature (1)..(25): SEQ ID NO: 2323; WAN024EU6_at; Start 262; Stop 286
atgggaaagacaaaagaactgcttt

SEQ ID NO: 182570 - DNA, 25 bp, Artificial
  probe
  misc_feature (1)..(25): SEQ ID NO: 2323; WAN024EU6_at; Start 33; Stop 57
tgtcttggcagtgagtcccctttta

SEQ ID NO: 182571 - DNA, 25 bp, Artificial
  probe
  misc_feature (1)..(25): SEQ ID NO: 2323; WAN024EU6_at; Start 19; Stop 43
tatggaatagtgattgtcttggcag

SEQ ID NO: 182572 - DNA, 25 bp, Artificial
  probe
  misc_feature (1)..(25): SEQ ID NO: 2323; WAN024EU6_at; Start 41; Stop 65
cagtgagtccccttttactgtcaag

SEQ ID NO: 182573 - DNA, 25 bp, Artificial
  probe
  misc_feature (1)..(25): SEQ ID NO: 2323; WAN024EU6_at; Start 30; Stop 54
gattgtcttggcagtgagtcccctt

SEQ ID NO: 182574 - DNA, 25 bp, Artificial
  probe
  misc_feature (1)..(25): SEQ ID NO: 2323; WAN024EU6_at; Start 111; Stop 135
gcaacgacaagagtatttagcttct

SEQ ID NO: 182575 - DNA, 25 bp, Artificial
  probe
  misc_feature (1)..(25): SEQ ID NO: 2323; WAN024EU6_at; Start 107; Stop 131
tggagcaacgacaagagtatttagc

SEQ ID NO: 182576 - DNA, 25 bp, Artificial
  probe
  misc_feature (1)..(25): SEQ ID NO: 2323; WAN024EU6_at; Start 243; Stop 267
tgtagaaaaggaaagtgtaatggga

SEQ ID NO: 182577 - DNA, 25 bp, Artificial
  probe
  misc_feature (1)..(25): SEQ ID NO: 2323; WAN024EU6_at; Start 56; Stop 80
tactgtcaagctttcattctattcg

SEQ ID NO: 182578 - DNA, 25 bp, Artificial
  probe
  misc_feature (1)..(25): SEQ ID NO: 2323; WAN024EU6_at; Start 26; Stop 50
tagtgattgtcttggcagtgagtcc

SEQ ID NO: 182579 - DNA, 25 bp, Artificial
  probe
  misc_feature (1)..(25): SEQ ID NO: 2323; WAN024EU6_at; Start 164; Stop 188
tgtctggaattcatggaaaaatcat

SEQ ID NO: 182580 - DNA, 25 bp, Artificial
  probe
  misc_feature (1)..(25): SEQ ID NO: 2323; WAN024EU6_at; Start 70; Stop 94
cattctattcgtcagcaaaagttgc

SEQ ID NO: 182581 - DNA, 25 bp, Artificial
  probe
  misc_feature (1)..(25): SEQ ID NO: 2323; WAN024EU6_at; Start 4; Stop 28
gatacaacattgttttatggaatag

SEQ ID NO: 182582 - DNA, 25 bp, Artificial
  probe
  misc_feature (1)..(25): SEQ ID NO: 5828; WAN024EU7_at; Start 140; Stop 164
tagtcattgcgaccaaagatacgta

SEQ ID NO: 182583 - DNA, 25 bp, Artificial
  probe
  misc_feature (1)..(25): SEQ ID NO: 5828; WAN024EU7_at; Start 6; Stop 30
gatggataaaacttttcttcataga

SEQ ID NO: 182584 - DNA, 25 bp, Artificial
  probe
  misc_feature (1)..(25): SEQ ID NO: 5828; WAN024EU7_at; Start 128; Stop 152
tcatagaccttttagtcattgcgac

SEQ ID NO: 182585 - DNA, 25 bp, Artificial
  probe
  misc_feature (1)..(25): SEQ ID NO: 5828; WAN024EU7_at; Start 120; Stop 144
cactgatttcatagaccttttagtc

SEQ ID NO: 182586 - DNA, 25 bp, Artificial
  probe
  misc_feature (1)..(25): SEQ ID NO: 5828; WAN024EU7_at; Start 12; Stop 36
taaaacttttcttcatagacaactc

SEQ ID NO: 182587 - DNA, 25 bp, Artificial
  probe
  misc_feature (1)..(25): SEQ ID NO: 5828; WAN024EU7_at; Start 109; Stop 133
gtcactcaaaacactgatttcatag

SEQ ID NO: 182588 - DNA, 25 bp, Artificial
  probe
  misc_feature (1)..(25): SEQ ID NO: 5828; WAN024EU7_at; Start 100; Stop 124
aaaatcagtgtcactcaaaacactg

SEQ ID NO: 182589 - DNA, 25 bp, Artificial
  probe
  misc_feature (1)..(25): SEQ ID NO: 5828; WAN024EU7_at; Start 57; Stop 81
attatacacctatttccaagaaaag

SEQ ID NO: 182590 - DNA, 25 bp, Artificial
  probe
  misc_feature (1)..(25): SEQ ID NO: 5828; WAN024EU7_at; Start 9; Stop 33
ggataaaacttttcttcatagacaa

SEQ ID NO: 182591 - DNA, 25 bp, Artificial
  probe
  misc_feature (1)..(25): SEQ ID NO: 5828; WAN024EU7_at; Start 124; Stop 148
gatttcatagaccttttagtcattg

SEQ ID NO: 182592 - DNA, 25 bp, Artificial
  probe
  misc_feature (1)..(25): SEQ ID NO: 5828; WAN024EU7_at; Start 2; Stop 26
tgttgatggataaaacttttcttca

SEQ ID NO: 182593 - DNA, 25 bp, Artificial
  probe
  misc_feature (1)..(25): SEQ ID NO: 5828; WAN024EU7_at; Start 132; Stop 156
agaccttttagtcattgcgaccaaa

SEQ ID NO: 182594 - DNA, 25 bp, Artificial
  probe
  misc_feature (1)..(25): SEQ ID NO: 5828; WAN024EU7_at; Start 130; Stop 154
atagaccttttagtcattgcgacca

SEQ ID NO: 182595 - DNA, 25 bp, Artificial
  probe
  misc_feature (1)..(25): SEQ ID NO: 5828; WAN024EU7_at; Start 129; Stop 153
catagaccttttagtcattgcgacc

SEQ ID NO: 182596 - DNA, 25 bp, Artificial
  probe
  misc_feature (1)..(25): SEQ ID NO: 5828; WAN024EU7_at; Start 126; Stop 150
tttcatagaccttttagtcattgcg

SEQ ID NO: 182597 - DNA, 25 bp, Artificial
  probe
  misc_feature (1)..(25): SEQ ID NO: 5828; WAN024EU7_at; Start 136; Stop 160
cttttagtcattgcgaccaaagata

SEQ ID NO: 182598 - DNA, 25 bp, Artificial
  probe
  misc_feature (1)..(25): SEQ ID NO: 5828; WAN024EU7_at; Start 133; Stop 157
gaccttttagtcattgcgaccaaag

SEQ ID NO: 182599 - DNA, 25 bp, Artificial
  probe
  misc_feature (1)..(25): SEQ ID NO: 5828; WAN024EU7_at; Start 138; Stop 162
tttagtcattgcgaccaaagatacg

SEQ ID NO: 182600 - DNA, 25 bp, Artificial
  probe
  misc_feature (1)..(25): SEQ ID NO: 5828; WAN024EU7_at; Start 59; Stop 83
tatacacctatttccaagaaaagaa

SEQ ID NO: 182601 - DNA, 25 bp, Artificial
  probe
  misc_feature (1)..(25): SEQ ID NO: 5828; WAN024EU7_at; Start 98; Stop 122
aaaaaatcagtgtcactcaaaacac

SEQ ID NO: 182602 - DNA, 25 bp, Artificial
  probe
  misc_feature (1)..(25): SEQ ID NO: 5828; WAN024EU7_at; Start 17; Stop 41
cttttcttcatagacaactcctcaa

SEQ ID NO: 182603 - DNA, 25 bp, Artificial
  probe
  misc_feature (1)..(25): SEQ ID NO: 5828; WAN024EU7_at; Start 21; Stop 45
tcttcatagacaactcctcaaaaat

SEQ ID NO: 182604 - DNA, 25 bp, Artificial
  probe
  misc_feature (1)..(25): SEQ ID NO: 5828; WAN024EU7_at; Start 135; Stop 159
ccttttagtcattgcgaccaaagat

SEQ ID NO: 182605 - DNA, 25 bp, Artificial
  probe
  misc_feature (1)..(25): SEQ ID NO: 5828; WAN024EU7_at; Start 114; Stop 138
tcaaaacactgatttcatagacctt

SEQ ID NO: 182606 - DNA, 25 bp, Artificial
  probe
  misc_feature (1)..(25): SEQ ID NO: 5828; WAN024EU7_at; Start 134; Stop 158
accttttagtcattgcgaccaaaga

SEQ ID NO: 182607 - DNA, 25 bp, Artificial
  probe
  misc_feature (1)..(25): SEQ ID NO: 5828; WAN024EU7_at; Start 19; Stop 43
tttcttcatagacaactcctcaaaa

SEQ ID NO: 182608 - DNA, 25 bp, Artificial
  probe
  misc_feature (1)..(25): SEQ ID NO: 5828; WAN024EU7_at; Start 131; Stop 155
tagaccttttagtcattgcgaccaa

SEQ ID NO: 182609 - DNA, 25 bp, Artificial
  probe
  misc_feature (1)..(25): SEQ ID NO: 5828; WAN024EU7_at; Start 25; Stop 49
catagacaactcctcaaaaatttaa

SEQ ID NO: 182610 - DNA, 25 bp, Artificial
  probe
  misc_feature (1)..(25): SEQ ID NO: 5828; WAN024EU7_at; Start 27; Stop 51
tagacaactcctcaaaaatttaata

SEQ ID NO: 182611 - DNA, 25 bp, Artificial
  probe
  misc_feature (1)..(25): SEQ ID NO: 5828; WAN024EU7_at; Start 139; Stop 163
ttagtcattgcgaccaaagatacgt

SEQ ID NO: 182612 - DNA, 25 bp, Artificial
  probe
  misc_feature (1)..(25): SEQ ID NO: 5828; WAN024EU7_at; Start 115; Stop 139
caaaacactgatttcatagaccttt

SEQ ID NO: 182613 - DNA, 25 bp, Artificial
  probe
  misc_feature (1)..(25): SEQ ID NO: 5828; WAN024EU7_at; Start 106; Stop 130
agtgtcactcaaaacactgatttca

SEQ ID NO: 182614 - DNA, 25 bp, Artificial
  probe
  misc_feature (1)..(25): SEQ ID NO: 5828; WAN024EU7_at; Start 118; Stop 142
aacactgatttcatagaccttttag

SEQ ID NO: 182615 - DNA, 25 bp, Artificial
  probe
  misc_feature (1)..(25): SEQ ID NO: 5828; WAN024EU7_at; Start 111; Stop 135
cactcaaaacactgatttcatagac

SEQ ID NO: 182616 - DNA, 25 bp, Artificial
  probe
  misc_feature (1)..(25): SEQ ID NO: 5736; WAN024EU8_at; Start 272; Stop 296
gagagggtctctttgtccacatgaa

SEQ ID NO: 182617 - DNA, 25 bp, Artificial
  probe
  misc_feature (1)..(25): SEQ ID NO: 5736; WAN024EU8_at; Start 242; Stop 266
acaccttggctcgttttggctttgg

SEQ ID NO: 182618 - DNA, 25 bp, Artificial
  probe
  misc_feature (1)..(25): SEQ ID NO: 5736; WAN024EU8_at; Start 293; Stop 317
tgaaagcccttcgtccagatgagga

SEQ ID NO: 182619 - DNA, 25 bp, Artificial
  probe
  misc_feature (1)..(25): SEQ ID NO: 5736; WAN024EU8_at; Start 946; Stop 970
caaacaagtgtttggcctcaagaag

SEQ ID NO: 182620 - DNA, 25 bp, Artificial
  probe
  misc_feature (1)..(25): SEQ ID NO: 5736; WAN024EU8_at; Start 917; Stop 941
tacttcgcaagagacacatcggaga

SEQ ID NO: 182621 - DNA, 25 bp, Artificial
  probe
  misc_feature (1)..(25): SEQ ID NO: 5736; WAN024EU8_at; Start 374; Stop 398
tcccaaatggtaagcgtaacatcgt

SEQ ID NO: 182622 - DNA, 25 bp, Artificial
  probe
  misc_feature (1)..(25): SEQ ID NO: 5736; WAN024EU8_at; Start 21; Stop 45
tatccatcaacaagaagaaatttcc

SEQ ID NO: 182623 - DNA, 25 bp, Artificial
  probe
  misc_feature (1)..(25): SEQ ID NO: 5736; WAN024EU8_at; Start 742; Stop 766
gcctttgagttgtcttctatgggaa

SEQ ID NO: 182624 - DNA, 25 bp, Artificial
  probe
  misc_feature (1)..(25): SEQ ID NO: 5736; WAN024EU8_at; Start 165; Stop 189
tccagtatcggtcaaggttctccaa

SEQ ID NO: 182625 - DNA, 25 bp, Artificial
  probe
  misc_feature (1)..(25): SEQ ID NO: 5736; WAN024EU8_at; Start 802; Stop 826
gaaattacaggtgatgaagaccgct

SEQ ID NO: 182626 - DNA, 25 bp, Artificial
  probe
  misc_feature (1)..(25): SEQ ID NO: 5736; WAN024EU8_at; Start 313; Stop 337
gaggattccttggatgcaacccact

SEQ ID NO: 182627 - DNA, 25 bp, Artificial
  probe
  misc_feature (1)..(25): SEQ ID NO: 5736; WAN024EU8_at; Start 684; Stop 708
gaatggctacaagggtctaaatggt

SEQ ID NO: 182628 - DNA, 25 bp, Artificial
  probe
  misc_feature (1)..(25): SEQ ID NO: 5736; WAN024EU8_at; Start 593; Stop 617
tctttttgattggtatcggtggcga

SEQ ID NO: 182629 - DNA, 25 bp, Artificial
  probe
  misc_feature (1)..(25): SEQ ID NO: 5736; WAN024EU8_at; Start 933; Stop 957
catcggagaagtgcaaacaagtgtt

SEQ ID NO: 182630 - DNA, 25 bp, Artificial
  probe
  misc_feature (1)..(25): SEQ ID NO: 5736; WAN024EU8_at; Start 720; Stop 744
ctggaatgagtctttaggtggagcc

SEQ ID NO: 182631 - DNA, 25 bp, Artificial
  probe
  misc_feature (1)..(25): SEQ ID NO: 5736; WAN024EU8_at; Start 109; Stop 133
cctatcttgagtaaggtcggtgacg

SEQ ID NO: 182632 - DNA, 25 bp, Artificial
  probe
  misc_feature (1)..(25): SEQ ID NO: 5736; WAN024EU8_at; Start 226; Stop 250
gctaaatggaaacgccacaccttgg

SEQ ID NO: 182633 - DNA, 25 bp, Artificial
  probe
  misc_feature (1)..(25): SEQ ID NO: 5736; WAN024EU8_at; Start 86; Stop 110
tagaagttgtcgaagttcaaggtcc

SEQ ID NO: 182634 - DNA, 25 bp, Artificial
  probe
  misc_feature (1)..(25): SEQ ID NO: 5736; WAN024EU8_at; Start 144; Stop 168
caacctgtctggtgtggaaaatcca

SEQ ID NO: 182635 - DNA, 25 bp, Artificial
  probe
  misc_feature (1)..(25): SEQ ID NO: 5736; WAN024EU8_at; Start 472; Stop 496
gacatcgagtctatcttgccaaaac

SEQ ID NO: 182636 - DNA, 25 bp, Artificial
  probe
  misc_feature (1)..(25): SEQ ID NO: 5736; WAN024EU8_at; Start 125; Stop 149
tcggtgacggaatgcaggacaacct

SEQ ID NO: 182637 - DNA, 25 bp, Artificial
  probe
  misc_feature (1)..(25): SEQ ID NO: 5736; WAN024EU8_at; Start 903; Stop 927
tatggccatgttcctacttcgcaag

SEQ ID NO: 182638 - DNA, 25 bp, Artificial
  probe
  misc_feature (1)..(25): SEQ ID NO: 5736; WAN024EU8_at; Start 511; Stop 535
catacagaagaattggtagaacgct

SEQ ID NO: 182639 - DNA, 25 bp, Artificial
  probe
  misc_feature (1)..(25): SEQ ID NO: 5736; WAN024EU8_at; Start 655; Stop 679
gactatgatgactggacaagcgagt

SEQ ID NO: 182640 - DNA, 25 bp, Artificial
  probe
  misc_feature (1)..(25): SEQ ID NO: 5736; WAN024EU8_at; Start 866; Stop 890
tcccattgacaatcggtggaggaat

SEQ ID NO: 182641 - DNA, 25 bp, Artificial
  probe
  misc_feature (1)..(25): SEQ ID NO: 5736; WAN024EU8_at; Start 820; Stop 844
gaccgcttggaattggaatggcaca

SEQ ID NO: 182642 - DNA, 25 bp, Artificial
  probe
  misc_feature (1)..(25): SEQ ID NO: 5736; WAN024EU8_at; Start 671; Stop 695
caagcgagtctgagaatggctacaa

SEQ ID NO: 182643 - DNA, 25 bp, Artificial
  probe
  misc_feature (1)..(25): SEQ ID NO: 5736; WAN024EU8_at; Start 612; Stop 636
tggcgagttgccagatggtaaaccg

SEQ ID NO: 182644 - DNA, 25 bp, Artificial
  probe
  misc_feature (1)..(25): SEQ ID NO: 5736; WAN024EU8_at; Start 187; Stop 211
caaatccctgatgctacttatgaag

SEQ ID NO: 182645 - DNA, 25 bp, Artificial
  probe
  misc_feature (1)..(25): SEQ ID NO: 5736; WAN024EU8_at; Start 781; Stop 805
gaaactcttagacgtcaggtggaaa

SEQ ID NO: 182646 - DNA, 25 bp, Artificial
  probe
  misc_feature (1)..(25): SEQ ID NO: 5736; WAN024EU8_at; Start 886; Stop 910
ggaattggacaatctcgtatggcca

SEQ ID NO: 182647 - DNA, 25 bp, Artificial
  probe
  misc_feature (1)..(25): SEQ ID NO: 5736; WAN024EU8_at; Start 211; Stop 235
gtggtgcactcacttgctaaatgga

SEQ ID NO: 182648 - DNA, 25 bp, Artificial
  probe
  misc_feature (1)..(25): SEQ ID NO: 5736; WAN024EU8_at; Start 336; Stop 360
ctctgtttatgttgaccagtgggac

SEQ ID NO: 182649 - DNA, 25 bp, Artificial
  probe
  misc_feature (1)..(25): SEQ ID NO: 5736; WAN024EU8_at; Start 640; Stop 664
gatggacgtgcaccagactatgatg

SEQ ID NO: 182650 - DNA, 25 bp, Artificial
  probe
  misc_feature (1)..(25): SEQ ID NO: 3027; WAN024EU9_at; Start 137; Stop 161
tgacggtctttcagtctcagttggt

SEQ ID NO: 182651 - DNA, 25 bp, Artificial
  probe
  misc_feature (1)..(25): SEQ ID NO: 3027; WAN024EU9_at; Start 93; Stop 117
tggtctgggaatcggactatctgct

SEQ ID NO: 182652 - DNA, 25 bp, Artificial
  probe
  misc_feature (1)..(25): SEQ ID NO: 3027; WAN024EU9_at; Start 429; Stop 453
gattggtcgagcaatgatggcagct

SEQ ID NO: 182653 - DNA, 25 bp, Artificial
  probe
  misc_feature (1)..(25): SEQ ID NO: 3027; WAN024EU9_at; Start 318; Stop 342
tgtggtggctttctatactccgggt

SEQ ID NO: 182654 - DNA, 25 bp, Artificial
  probe
  misc_feature (1)..(25): SEQ ID NO: 3027; WAN024EU9_at; Start 411; Stop 435
caagaaagacttgagtgggattggt

SEQ ID NO: 182655 - DNA, 25 bp, Artificial
  probe
  misc_feature (1)..(25): SEQ ID NO: 3027; WAN024EU9_at; Start 48; Stop 72
ccgtgcaggtctcaatcaattttac

SEQ ID NO: 182656 - DNA, 25 bp, Artificial
  probe
  misc_feature (1)..(25): SEQ ID NO: 3027; WAN024EU9_at; Start 460; Stop 484
ggtttactgattgctatggtagtca

SEQ ID NO: 182657 - DNA, 25 bp, Artificial
  probe
  misc_feature (1)..(25): SEQ ID NO: 3027; WAN024EU9_at; Start 192; Stop 216
gaccattgctacttttgcggagttg

SEQ ID NO: 182658 - DNA, 25 bp, Artificial
  probe
  misc_feature (1)..(25): SEQ ID NO: 3027; WAN024EU9_at; Start 107; Stop 131
gactatctgctttggtatcaggcct

SEQ ID NO: 182659 - DNA, 25 bp, Artificial
  probe
  misc_feature (1)..(25): SEQ ID NO: 3027; WAN024EU9_at; Start 676; Stop 700
agtattctacgtatctttggtcgca

SEQ ID NO: 182660 - DNA, 25 bp, Artificial
  probe
  misc_feature (1)..(25): SEQ ID NO: 3027; WAN024EU9_at; Start 586; Stop 610
gcctatgaacaatcacaaggtcgtg

SEQ ID NO: 182661 - DNA, 25 bp, Artificial
  probe
  misc_feature (1)..(25): SEQ ID NO: 3027; WAN024EU9_at; Start 547; Stop 571
tcagggttgattgcttgggataacc

SEQ ID NO: 182662 - DNA, 25 bp, Artificial
  probe
  misc_feature (1)..(25): SEQ ID NO: 3027; WAN024EU9_at; Start 333; Stop 357
tactccgggtacagttttatctgcc

SEQ ID NO: 182663 - DNA, 25 bp, Artificial
  probe
  misc_feature (1)..(25): SEQ ID NO: 3027; WAN024EU9_at; Start 242; Stop 266
tggcttcaagaaatagtccagctgc

SEQ ID NO: 182664 - DNA, 25 bp, Artificial
  probe
  misc_feature (1)..(25): SEQ ID NO: 3027; WAN024EU9_at; Start 483; Stop 507
caatattttcttggctagtggcttc

SEQ ID NO: 182665 - DNA, 25 bp, Artificial
  probe
  misc_feature (1)..(25): SEQ ID NO: 3027; WAN024EU9_at; Start 78; Stop 102
ggtttatgcctttgttggtctggga

SEQ ID NO: 182666 - DNA, 25 bp, Artificial
  probe
  misc_feature (1)..(25): SEQ ID NO: 3027; WAN024EU9_at; Start 622; Stop 646
tgggtggtgtcaatggctctcagca

SEQ ID NO: 182667 - DNA, 25 bp, Artificial
  probe
  misc_feature (1)..(25): SEQ ID NO: 3027; WAN024EU9_at; Start 689; Stop 713
tctttggtcgcaatgactaactaat

SEQ ID NO: 182668 - DNA, 25 bp, Artificial
  probe
  misc_feature (1)..(25): SEQ ID NO: 3027; WAN024EU9_at; Start 211; Stop 235
gagttggctttggttttcgttgcca

SEQ ID NO: 182669 - DNA, 25 bp, Artificial
  probe
  misc_feature (1)..(25): SEQ ID NO: 3027; WAN024EU9_at; Start 178; Stop 202
gggcgtctctggttgaccattgcta

SEQ ID NO: 182670 - DNA, 25 bp, Artificial
  probe
  misc_feature (1)..(25): SEQ ID NO: 3027; WAN024EU9_at; Start 350; Stop 374
tatctgcctttgtatcgagcgccct

SEQ ID NO: 182671 - DNA, 25 bp, Artificial
  probe
  misc_feature (1)..(25): SEQ ID NO: 3027; WAN024EU9_at; Start 122; Stop 146
tatcaggccttatgttgacggtctt

SEQ ID NO: 182672 - DNA, 25 bp, Artificial
  probe
  misc_feature (1)..(25): SEQ ID NO: 3027; WAN024EU9_at; Start 33; Stop 57
cactattatacatgaccgtgcaggt

SEQ ID NO: 182673 - DNA, 25 bp, Artificial
  probe
  misc_feature (1)..(25): SEQ ID NO: 3027; WAN024EU9_at; Start 443; Stop 467
tgatggcagctctcattggtttact

SEQ ID NO: 182674 - DNA, 25 bp, Artificial
  probe
  misc_feature (1)..(25): SEQ ID NO: 3027; WAN024EU9_at; Start 154; Stop 178
cagttggtttacttgttgatgcagg

SEQ ID NO: 182675 - DNA, 25 bp, Artificial
  probe
  misc_feature (1)..(25): SEQ ID NO: 3027; WAN024EU9_at; Start 372; Stop 396
ccttctcttctttgtcatggcggca

SEQ ID NO: 182676 - DNA, 25 bp, Artificial
  probe
  misc_feature (1)..(25): SEQ ID NO: 3027; WAN024EU9_at; Start 63; Stop 87
tcaattttacgctaaggtttatgcc

SEQ ID NO: 182677 - DNA, 25 bp, Artificial
  probe
  misc_feature (1)..(25): SEQ ID NO: 3027; WAN024EU9_at; Start 387; Stop 411
catggcggcagttggtatctttacc

SEQ ID NO: 182678 - DNA, 25 bp, Artificial
  probe
  misc_feature (1)..(25): SEQ ID NO: 3027; WAN024EU9_at; Start 251; Stop 275
gaaatagtccagctgctcttccagt

SEQ ID NO: 182679 - DNA, 25 bp, Artificial
  probe
  misc_feature (1)..(25): SEQ ID NO: 3027; WAN024EU9_at; Start 511; Stop 535
gattatatgattagcgtagccatgg

SEQ ID NO: 182680 - DNA, 25 bp, Artificial
  probe
  misc_feature (1)..(25): SEQ ID NO: 3027; WAN024EU9_at; Start 562; Stop 586
tgggataaccaaaagattcgcctcg

SEQ ID NO: 182681 - DNA, 25 bp, Artificial
  probe
  misc_feature (1)..(25): SEQ ID NO: 3027; WAN024EU9_at; Start 572; Stop 596
aaaagattcgcctcgcctatgaaca

SEQ ID NO: 182682 - DNA, 25 bp, Artificial
  probe
  misc_feature (1)..(25): SEQ ID NO: 3027; WAN024EU9_at; Start 632; Stop 656
caatggctctcagcatctatcttga

SEQ ID NO: 182683 - DNA, 25 bp, Artificial
  probe
  misc_feature (1)..(25): SEQ ID NO: 3027; WAN024EU9_at; Start 598; Stop 622
tcacaaggtcgtgtagcgacaggct

SEQ ID NO: 182684 - DNA, 25 bp, Artificial
  probe
  misc_feature (1)..(25): SEQ ID NO: 1199; WAN024EUA_at; Start 261; Stop 285
tcctcagtaccagtgggaattgaaa

SEQ ID NO: 182685 - DNA, 25 bp, Artificial
  probe
  misc_feature (1)..(25): SEQ ID NO: 1199; WAN024EUA_at; Start 69; Stop 93
tctgacgatcatccgagaccttggt

SEQ ID NO: 182686 - DNA, 25 bp, Artificial
  probe
  misc_feature (1)..(25): SEQ ID NO: 1199; WAN024EUA_at; Start 446; Stop 470
tgaattttcaagttcgtccaactcc

SEQ ID NO: 182687 - DNA, 25 bp, Artificial
  probe
  misc_feature (1)..(25): SEQ ID NO: 1199; WAN024EUA_at; Start 103; Stop 127
tcgtggttggcagcaggttctgtca

SEQ ID NO: 182688 - DNA, 25 bp, Artificial
  probe
  misc_feature (1)..(25): SEQ ID NO: 1199; WAN024EUA_at; Start 297; Stop 321
tatgcatcagcacagtcctcacact

SEQ ID NO: 182689 - DNA, 25 bp, Artificial
  probe
  misc_feature (1)..(25): SEQ ID NO: 1199; WAN024EUA_at; Start 345; Stop 369
tgctatgagtaagtatccagaacgg

SEQ ID NO: 182690 - DNA, 25 bp, Artificial
  probe
  misc_feature (1)..(25): SEQ ID NO: 1199; WAN024EUA_at; Start 351; Stop 375
gagtaagtatccagaacggtgtacg

SEQ ID NO: 182691 - DNA, 25 bp, Artificial
  probe
  misc_feature (1)..(25): SEQ ID NO: 1199; WAN024EUA_at; Start 14; Stop 38
aaaataagcaagaaatcttagaggc

SEQ ID NO: 182692 - DNA, 25 bp, Artificial
  probe
  misc_feature (1)..(25): SEQ ID NO: 1199; WAN024EUA_at; Start 3; Stop 27
gaatacagtgaaaaataagcaagaa

SEQ ID NO: 182693 - DNA, 25 bp, Artificial
  probe
  misc_feature (1)..(25): SEQ ID NO: 1199; WAN024EUA_at; Start 62; Stop 86
tggccattctgacgatcatccgaga

SEQ ID NO: 182694 - DNA, 25 bp, Artificial
  probe
  misc_feature (1)..(25): SEQ ID NO: 1199; WAN024EUA_at; Start 55; Stop 79
gatatgatggccattctgacgatca

SEQ ID NO: 182695 - DNA, 25 bp, Artificial
  probe
  misc_feature (1)..(25): SEQ ID NO: 1199; WAN024EUA_at; Start 424; Stop 448
ccttatggtttggaggatattttga

SEQ ID NO: 182696 - DNA, 25 bp, Artificial
  probe
  misc_feature (1)..(25): SEQ ID NO: 1199; WAN024EUA_at; Start 265; Stop 289
cagtaccagtgggaattgaaaaatc

SEQ ID NO: 182697 - DNA, 25 bp, Artificial
  probe
  misc_feature (1)..(25): SEQ ID NO: 1199; WAN024EUA_at; Start 476; Stop 500
tcttagaaaatgaagaccgaatgga

SEQ ID NO: 182698 - DNA, 25 bp, Artificial
  probe
  misc_feature (1)..(25): SEQ ID NO: 1199; WAN024EUA_at; Start 461; Stop 485
gtccaactcctcatttcttagaaaa

SEQ ID NO: 182699 - DNA, 25 bp, Artificial
  probe
  misc_feature (1)..(25): SEQ ID NO: 1199; WAN024EUA_at; Start 533; Stop 557
ggcaggagaaatggaaaaatttgat

SEQ ID NO: 182700 - DNA, 25 bp, Artificial
  probe
  misc_feature (1)..(25): SEQ ID NO: 1199; WAN024EUA_at; Start 253; Stop 277
gaggattttcctcagtaccagtggg

SEQ ID NO: 182701 - DNA, 25 bp, Artificial
  probe
  misc_feature (1)..(25): SEQ ID NO: 1199; WAN024EUA_at; Start 288; Stop 312
tcaggtctatatgcatcagcacagt

SEQ ID NO: 182702 - DNA, 25 bp, Artificial
  probe
  misc_feature (1)..(25): SEQ ID NO: 1199; WAN024EUA_at; Start 112; Stop 136
gcagcaggttctgtcagaaatttca

SEQ ID NO: 182703 - DNA, 25 bp, Artificial
  probe
  misc_feature (1)..(25): SEQ ID NO: 1199; WAN024EUA_at; Start 107; Stop 131
ggttggcagcaggttctgtcagaaa

SEQ ID NO: 182704 - DNA, 25 bp, Artificial
  probe
  misc_feature (1)..(25): SEQ ID NO: 1199; WAN024EUA_at; Start 525; Stop 549
gaaaaattggcaggagaaatggaaa

SEQ ID NO: 182705 - DNA, 25 bp, Artificial
  probe
  misc_feature (1)..(25): SEQ ID NO: 1199; WAN024EUA_at; Start 490; Stop 514
gaccgaatggaactctatcaaacac

SEQ ID NO: 182706 - DNA, 25 bp, Artificial
  probe
  misc_feature (1)..(25): SEQ ID NO: 1199; WAN024EUA_at; Start 213; Stop 237
ttcttatgaggaaaccttattactg

SEQ ID NO: 182707 - DNA, 25 bp, Artificial
  probe
  misc_feature (1)..(25): SEQ ID NO: 1199; WAN024EUA_at; Start 293; Stop 317
tctatatgcatcagcacagtcctca

SEQ ID NO: 182708 - DNA, 25 bp, Artificial
  probe
  misc_feature (1)..(25): SEQ ID NO: 1199; WAN024EUA_at; Start 97; Stop 121
aaagactcgtggttggcagcaggtt

SEQ ID NO: 182709 - DNA, 25 bp, Artificial
  probe
  misc_feature (1)..(25): SEQ ID NO: 1199; WAN024EUA_at; Start 457; Stop 481
gttcgtccaactcctcatttcttag

SEQ ID NO: 182710 - DNA, 25 bp, Artificial
  probe
  misc_feature (1)..(25): SEQ ID NO: 1199; WAN024EUA_at; Start 283; Stop 307
aaaaatcaggtctatatgcatcagc

SEQ ID NO: 182711 - DNA, 25 bp, Artificial
  probe
  misc_feature (1)..(25): SEQ ID NO: 1199; WAN024EUA_at; Start 22; Stop 46
caagaaatcttagaggcttttagag

SEQ ID NO: 182712 - DNA, 25 bp, Artificial
  probe
  misc_feature (1)..(25): SEQ ID NO: 1199; WAN024EUA_at; Start 378; Stop 402
agttggactgcgcttgaatgaagaa

SEQ ID NO: 182713 - DNA, 25 bp, Artificial
  probe
  misc_feature (1)..(25): SEQ ID NO: 1199; WAN024EUA_at; Start 484; Stop 508
aatgaagaccgaatggaactctatc

SEQ ID NO: 182714 - DNA, 25 bp, Artificial
  probe
  misc_feature (1)..(25): SEQ ID NO: 1199; WAN024EUA_at; Start 270; Stop 294
ccagtgggaattgaaaaatcaggtc

SEQ ID NO: 182715 - DNA, 25 bp, Artificial
  probe
  misc_feature (1)..(25): SEQ ID NO: 1199; WAN024EUA_at; Start 51; Stop 75
tccagatatgatggccattctgacg

SEQ ID NO: 182716 - DNA, 25 bp, Artificial
  probe
  misc_feature (1)..(25): SEQ ID NO: 1199; WAN024EUA_at; Start 338; Stop 362
ctcgtgatgctatgagtaagtatcc

SEQ ID NO: 182717 - DNA, 25 bp, Artificial
  probe
  misc_feature (1)..(25): SEQ ID NO: 1199; WAN024EUA_at; Start 494; Stop 518
gaatggaactctatcaaacacgttt

SEQ ID NO: 182718 - DNA, 25 bp, Artificial
  probe
  misc_feature (1)..(25): SEQ ID NO: 1610; WAN024EUB_at; Start 854; Stop 878
tgaatatcgccgaagagcgtgagac

SEQ ID NO: 182719 - DNA, 25 bp, Artificial
  probe
  misc_feature (1)..(25): SEQ ID NO: 1610; WAN024EUB_at; Start 842; Stop 866
gaactctttctgtgaatatcgccga

SEQ ID NO: 182720 - DNA, 25 bp, Artificial
  probe
  misc_feature (1)..(25): SEQ ID NO: 1610; WAN024EUB_at; Start 966; Stop 990
tgagcacttaggttatgaatacagt

SEQ ID NO: 182721 - DNA, 25 bp, Artificial
  probe
  misc_feature (1)..(25): SEQ ID NO: 1610; WAN024EUB_at; Start 678; Stop 702
cgtgcgcgattttgcccagataatg

SEQ ID NO: 182722 - DNA, 25 bp, Artificial
  probe
  misc_feature (1)..(25): SEQ ID NO: 1610; WAN024EUB_at; Start 668; Stop 692
tcctcaagcgcgtgcgcgattttgc

SEQ ID NO: 182723 - DNA, 25 bp, Artificial
  probe
  misc_feature (1)..(25): SEQ ID NO: 1610; WAN024EUB_at; Start 34; Stop 58
gatgaggagttagtagaacgcacgc

SEQ ID NO: 182724 - DNA, 25 bp, Artificial
  probe
  misc_feature (1)..(25): SEQ ID NO: 1610; WAN024EUB_at; Start 57; Stop 81
gctccgtcctcagtatttacgtgaa

SEQ ID NO: 182725 - DNA, 25 bp, Artificial
  probe
  misc_feature (1)..(25): SEQ ID NO: 1610; WAN024EUB_at; Start 827; Stop 851
gacctgttggtctaggaactctttc

SEQ ID NO: 182726 - DNA, 25 bp, Artificial
  probe
  misc_feature (1)..(25): SEQ ID NO: 1610; WAN024EUB_at; Start 136; Stop 160
aaaatgcgggatgaagcgctggatc

SEQ ID NO: 182727 - DNA, 25 bp, Artificial
  probe
  misc_feature (1)..(25): SEQ ID NO: 1610; WAN024EUB_at; Start 145; Stop 169
gatgaagcgctggatcatgtgctct

SEQ ID NO: 182728 - DNA, 25 bp, Artificial
  probe
  misc_feature (1)..(25): SEQ ID NO: 1610; WAN024EUB_at; Start 152; Stop 176
cgctggatcatgtgctcttatttgg

SEQ ID NO: 182729 - DNA, 25 bp, Artificial
  probe
  misc_feature (1)..(25): SEQ ID NO: 1610; WAN024EUB_at; Start 451; Stop 475
ccttttaccttgattggtgcgacga

SEQ ID NO: 182730 - DNA, 25 bp, Artificial
  probe
  misc_feature (1)..(25): SEQ ID NO: 1610; WAN024EUB_at; Start 654; Stop 678
tattgccaatcgtctcctcaagcgc

SEQ ID NO: 182731 - DNA, 25 bp, Artificial
  probe
  misc_feature (1)..(25): SEQ ID NO: 1610; WAN024EUB_at; Start 776; Stop 800
actatgtggatcaaaaaatccttcg

SEQ ID NO: 182732 - DNA, 25 bp, Artificial
  probe
  misc_feature (1)..(25): SEQ ID NO: 1610; WAN024EUB_at; Start 42; Stop 66
gttagtagaacgcacgctccgtcct

SEQ ID NO: 182733 - DNA, 25 bp, Artificial
  probe
  misc_feature (1)..(25): SEQ ID NO: 1610; WAN024EUB_at; Start 806; Stop 830
tgattgagatgtacagtggaggacc

SEQ ID NO: 182734 - DNA, 25 bp, Artificial
  probe
  misc_feature (1)..(25): SEQ ID NO: 1610; WAN024EUB_at; Start 502; Stop 526
ctacgggcacgttttgggattacag

SEQ ID NO: 182735 - DNA, 25 bp, Artificial
  probe
  misc_feature (1)..(25): SEQ ID NO: 1610; WAN024EUB_at; Start 942; Stop 966
acgggtggcgactgctaaggcatat

SEQ ID NO: 182736 - DNA, 25 bp, Artificial
  probe
  misc_feature (1)..(25): SEQ ID NO: 1610; WAN024EUB_at; Start 619; Stop 643
tctgagttggccctacgtagtcgtg

SEQ ID NO: 182737 - DNA, 25 bp, Artificial
  probe
  misc_feature (1)..(25): SEQ ID NO: 1610; WAN024EUB_at; Start 557; Stop 581
tgacagaaattgtcgagcggacggc

SEQ ID NO: 182738 - DNA, 25 bp, Artificial
  probe
  misc_feature (1)..(25): SEQ ID NO: 1610; WAN024EUB_at; Start 815; Stop 839
tgtacagtggaggacctgttggtct

SEQ ID NO: 182739 - DNA, 25 bp, Artificial
  probe
  misc_feature (1)..(25): SEQ ID NO: 1610; WAN024EUB_at; Start 607; Stop 631
catgaggcagcatctgagttggccc

SEQ ID NO: 182740 - DNA, 25 bp, Artificial
  probe
  misc_feature (1)..(25): SEQ ID NO: 1610; WAN024EUB_at; Start 892; Stop 916
tatgagccttacttgattcaaaaag

SEQ ID NO: 182741 - DNA, 25 bp, Artificial
  probe
  misc_feature (1)..(25): SEQ ID NO: 1610; WAN024EUB_at; Start 910; Stop 934
caaaaaggttttatcatgcggacac

SEQ ID NO: 182742 - DNA, 25 bp, Artificial
  probe
  misc_feature (1)..(25): SEQ ID NO: 1610; WAN024EUB_at; Start 863; Stop 887
ccgaagagcgtgagacagttgaaga

SEQ ID NO: 182743 - DNA, 25 bp, Artificial
  probe
  misc_feature (1)..(25): SEQ ID NO: 1610; WAN024EUB_at; Start 951; Stop 975
gactgctaaggcatatgagcactta

SEQ ID NO: 182744 - DNA, 25 bp, Artificial
  probe
  misc_feature (1)..(25): SEQ ID NO: 1610; WAN024EUB_at; Start 921; Stop 945
tatcatgcggacacggtctggacgg

SEQ ID NO: 182745 - DNA, 25 bp, Artificial
  probe
  misc_feature (1)..(25): SEQ ID NO: 1610; WAN024EUB_at; Start 753; Stop 777
ggatgttgaccatgaaggtttggac

SEQ ID NO: 182746 - DNA, 25 bp, Artificial
  probe
  misc_feature (1)..(25): SEQ ID NO: 1610; WAN024EUB_at; Start 763; Stop 787
catgaaggtttggactatgtggatc

SEQ ID NO: 182747 - DNA, 25 bp, Artificial
  probe
  misc_feature (1)..(25): SEQ ID NO: 1610; WAN024EUB_at; Start 729; Stop 753
taccgataaggctttgactatgctg

SEQ ID NO: 182748 - DNA, 25 bp, Artificial
  probe
  misc_feature (1)..(25): SEQ ID NO: 1610; WAN024EUB_at; Start 571; Stop 595
gagcggacggcagatatttttgaga

SEQ ID NO: 182749 - DNA, 25 bp, Artificial
  probe
  misc_feature (1)..(25): SEQ ID NO: 1610; WAN024EUB_at; Start 739; Stop 763
gctttgactatgctggatgttgacc

SEQ ID NO: 182750 - DNA, 25 bp, Artificial
  probe
  misc_feature (1)..(25): SEQ ID NO: 1610; WAN024EUB_at; Start 581; Stop 605
cagatatttttgagatggaaatcac

SEQ ID NO: 182751 - DNA, 25 bp, Artificial
  probe
  misc_feature (1)..(25): SEQ ID NO: 1610; WAN024EUB_at; Start 459; Stop 483
cttgattggtgcgacgactcgggct

SEQ ID NO: 182752 - DNA, 25 bp, Artificial
  probe
  misc_feature (1)..(25): SEQ ID NO: 7673; WAN024EUC_at; Start 45; Stop 69
tcttctagctttgctccgtagcttg

SEQ ID NO: 182753 - DNA, 25 bp, Artificial
  probe
  misc_feature (1)..(25): SEQ ID NO: 7673; WAN024EUC_at; Start 80; Stop 104
acgcgcggtccacttgtattgttca

SEQ ID NO: 182754 - DNA, 25 bp, Artificial
  probe
  misc_feature (1)..(25): SEQ ID NO: 7673; WAN024EUC_at; Start 35; Stop 59
accaaaaaactcttctagctttgct

SEQ ID NO: 182755 - DNA, 25 bp, Artificial
  probe
  misc_feature (1)..(25): SEQ ID NO: 7673; WAN024EUC_at; Start 165; Stop 189
cgcggtcaaaaccaaattggccttg

SEQ ID NO: 182756 - DNA, 25 bp, Artificial
  probe
  misc_feature (1)..(25): SEQ ID NO: 7673; WAN024EUC_at; Start 195; Stop 219
catttatctggatgatttcaagccc

SEQ ID NO: 182757 - DNA, 25 bp, Artificial
  probe
  misc_feature (1)..(25): SEQ ID NO: 7673; WAN024EUC_at; Start 113; Stop 137
ggcaagcccactacaaatcgttcca

SEQ ID NO: 182758 - DNA, 25 bp, Artificial
  probe
  misc_feature (1)..(25): SEQ ID NO: 7673; WAN024EUC_at; Start 132; Stop 156
gttccaccttgtaagtatcaaccaa

SEQ ID NO: 182759 - DNA, 25 bp, Artificial
  probe
  misc_feature (1)..(25): SEQ ID NO: 7673; WAN024EUC_at; Start 7; Stop 31
agcgttcatcctgatagtctactgg

SEQ ID NO: 182760 - DNA, 25 bp, Artificial
  probe
  misc_feature (1)..(25): SEQ ID NO: 7673; WAN024EUC_at; Start 221; Stop 245
tgagctgtaaaaccaagcggatcgc

SEQ ID NO: 182761 - DNA, 25 bp, Artificial
  probe
  misc_feature (1)..(25): SEQ ID NO: 7673; WAN024EUC_at; Start 182; Stop 206
tggccttgttcttcatttatctgga

SEQ ID NO: 182762 - DNA, 25 bp, Artificial
  probe
  misc_feature (1)..(25): SEQ ID NO: 7673; WAN024EUC_at; Start 126; Stop 150
caaatcgttccaccttgtaagtatc

SEQ ID NO: 182763 - DNA, 25 bp, Artificial
  probe
  misc_feature (1)..(25): SEQ ID NO: 7673; WAN024EUC_at; Start 228; Stop 252
taaaaccaagcggatcgctaatcgc

SEQ ID NO: 182764 - DNA, 25 bp, Artificial
  probe
  misc_feature (1)..(25): SEQ ID NO: 7673; WAN024EUC_at; Start 63; Stop 87
tagcttgactagcttctacgcgcgg

SEQ ID NO: 182765 - DNA, 25 bp, Artificial
  probe
  misc_feature (1)..(25): SEQ ID NO: 7673; WAN024EUC_at; Start 224; Stop 248
gctgtaaaaccaagcggatcgctaa

SEQ ID NO: 182766 - DNA, 25 bp, Artificial
  probe
  misc_feature (1)..(25): SEQ ID NO: 7673; WAN024EUC_at; Start 212; Stop 236
tcaagcccttgagctgtaaaaccaa

SEQ ID NO: 182767 - DNA, 25 bp, Artificial
  probe
  misc_feature (1)..(25): SEQ ID NO: 7673; WAN024EUC_at; Start 241; Stop 265
atcgctaatcgccacccctaccgtt

SEQ ID NO: 182768 - DNA, 25 bp, Artificial
  probe
  misc_feature (1)..(25): SEQ ID NO: 7673; WAN024EUC_at; Start 149; Stop 173
tcaaccaattccttaacgcggtcaa

SEQ ID NO: 182769 - DNA, 25 bp, Artificial
  probe
  misc_feature (1)..(25): SEQ ID NO: 7673; WAN024EUC_at; Start 231; Stop 255
aaccaagcggatcgctaatcgccac

SEQ ID NO: 182770 - DNA, 25 bp, Artificial
  probe
  misc_feature (1)..(25): SEQ ID NO: 7673; WAN024EUC_at; Start 216; Stop 240
gcccttgagctgtaaaaccaagcgg

SEQ ID NO: 182771 - DNA, 25 bp, Artificial
  probe
  misc_feature (1)..(25): SEQ ID NO: 7673; WAN024EUC_at; Start 204; Stop 228
ggatgatttcaagcccttgagctgt

SEQ ID NO: 182772 - DNA, 25 bp, Artificial
  probe
  misc_feature (1)..(25): SEQ ID NO: 7673; WAN024EUC_at; Start 103; Stop 127
catgtttttaggcaagcccactaca

SEQ ID NO: 182773 - DNA, 25 bp, Artificial
  probe
  misc_feature (1)..(25): SEQ ID NO: 7673; WAN024EUC_at; Start 16; Stop 40
cctgatagtctactggtaaaccaaa

SEQ ID NO: 182774 - DNA, 25 bp, Artificial
  probe
  misc_feature (1)..(25): SEQ ID NO: 7673; WAN024EUC_at; Start 99; Stop 123
tgttcatgtttttaggcaagcccac

SEQ ID NO: 182775 - DNA, 25 bp, Artificial
  probe
  misc_feature (1)..(25): SEQ ID NO: 7673; WAN024EUC_at; Start 50; Stop 74
tagctttgctccgtagcttgactag

SEQ ID NO: 182776 - DNA, 25 bp, Artificial
  probe
  misc_feature (1)..(25): SEQ ID NO: 7673; WAN024EUC_at; Start 13; Stop 37
catcctgatagtctactggtaaacc

SEQ ID NO: 182777 - DNA, 25 bp, Artificial
  probe
  misc_feature (1)..(25): SEQ ID NO: 7673; WAN024EUC_at; Start 110; Stop 134
ttaggcaagcccactacaaatcgtt

SEQ ID NO: 182778 - DNA, 25 bp, Artificial
  probe
  misc_feature (1)..(25): SEQ ID NO: 7673; WAN024EUC_at; Start 201; Stop 225
tctggatgatttcaagcccttgagc

SEQ ID NO: 182779 - DNA, 25 bp, Artificial
  probe
  misc_feature (1)..(25): SEQ ID NO: 7673; WAN024EUC_at; Start 84; Stop 108
gcggtccacttgtattgttcatgtt

SEQ ID NO: 182780 - DNA, 25 bp, Artificial
  probe
  misc_feature (1)..(25): SEQ ID NO: 7673; WAN024EUC_at; Start 56; Stop 80
tgctccgtagcttgactagcttcta

SEQ ID NO: 182781 - DNA, 25 bp, Artificial
  probe
  misc_feature (1)..(25): SEQ ID NO: 7673; WAN024EUC_at; Start 76; Stop 100
ttctacgcgcggtccacttgtattg

SEQ ID NO: 182782 - DNA, 25 bp, Artificial
  probe
  misc_feature (1)..(25): SEQ ID NO: 7673; WAN024EUC_at; Start 145; Stop 169
agtatcaaccaattccttaacgcgg

SEQ ID NO: 182783 - DNA, 25 bp, Artificial
  probe
  misc_feature (1)..(25): SEQ ID NO: 7673; WAN024EUC_at; Start 67; Stop 91
ttgactagcttctacgcgcggtcca

SEQ ID NO: 182784 - DNA, 25 bp, Artificial
  probe
  misc_feature (1)..(25): SEQ ID NO: 7673; WAN024EUC_at; Start 1; Stop 25
ttgtcaagcgttcatcctgatagtc

SEQ ID NO: 182785 - DNA, 25 bp, Artificial
  probe
  misc_feature (1)..(25): SEQ ID NO: 7673; WAN024EUC_at; Start 174; Stop 198
aaccaaattggccttgttcttcatt

SEQ ID NO: 182786 - DNA, 25 bp, Artificial
  probe
  misc_feature (1)..(25): SEQ ID NO: 1520; WAN024EUD_at; Start 9; Stop 33
tatgggattggacgtcggttcaaaa

SEQ ID NO: 182787 - DNA, 25 bp, Artificial
  probe
  misc_feature (1)..(25): SEQ ID NO: 1520; WAN024EUD_at; Start 376; Stop 400
gcagctcagctgattttacaaaatt

SEQ ID NO: 182788 - DNA, 25 bp, Artificial
  probe
  misc_feature (1)..(25): SEQ ID NO: 1520; WAN024EUD_at; Start 321; Stop 345
gattgaacaagcagatatcagtcgc

SEQ ID NO: 182789 - DNA, 25 bp, Artificial
  probe
  misc_feature (1)..(25): SEQ ID NO: 1520; WAN024EUD_at; Start 279; Stop 303
tcaggatgaacgcttgacaacagtg

SEQ ID NO: 182790 - DNA, 25 bp, Artificial
  probe
  misc_feature (1)..(25): SEQ ID NO: 1520; WAN024EUD_at; Start 205; Stop 229
agtggaccgcgcgtagaagctagtc

SEQ ID NO: 182791 - DNA, 25 bp, Artificial
  probe
  misc_feature (1)..(25): SEQ ID NO: 1520; WAN024EUD_at; Start 179; Stop 203
gcttgcctaaaaacatgaacaatac

SEQ ID NO: 182792 - DNA, 25 bp, Artificial
  probe
  misc_feature (1)..(25): SEQ ID NO: 1520; WAN024EUD_at; Start 348; Stop 372
taagcgcaagaaagtcattgataag

SEQ ID NO: 182793 - DNA, 25 bp, Artificial
  probe
  misc_feature (1)..(25): SEQ ID NO: 1520; WAN024EUD_at; Start 309; Stop 333
tgagcgcatgttgattgaacaagca

SEQ ID NO: 182794 - DNA, 25 bp, Artificial
  probe
  misc_feature (1)..(25): SEQ ID NO: 1520; WAN024EUD_at; Start 287; Stop 311
aacgcttgacaacagtggctgctga

SEQ ID NO: 182795 - DNA, 25 bp, Artificial
  probe
  misc_feature (1)..(25): SEQ ID NO: 1520; WAN024EUD_at; Start 92; Stop 116
tccagataaatgaagaacaaggcca

SEQ ID NO: 182796 - DNA, 25 bp, Artificial
  probe
  misc_feature (1)..(25): SEQ ID NO: 1520; WAN024EUD_at; Start 163; Stop 187
gaacgatttgtagtgggcttgccta

SEQ ID NO: 182797 - DNA, 25 bp, Artificial
  probe
  misc_feature (1)..(25): SEQ ID NO: 1520; WAN024EUD_at; Start 362; Stop 386
tcattgataagttagcagctcagct

SEQ ID NO: 182798 - DNA, 25 bp, Artificial
  probe
  misc_feature (1)..(25): SEQ ID NO: 1520; WAN024EUD_at; Start 283; Stop 307
gatgaacgcttgacaacagtggctg

SEQ ID NO: 182799 - DNA, 25 bp, Artificial
  probe
  misc_feature (1)..(25): SEQ ID NO: 1520; WAN024EUD_at; Start 171; Stop 195
tgtagtgggcttgcctaaaaacatg

SEQ ID NO: 182800 - DNA, 25 bp, Artificial
  probe
  misc_feature (1)..(25): SEQ ID NO: 1520; WAN024EUD_at; Start 293; Stop 317
tgacaacagtggctgctgagcgcat

SEQ ID NO: 182801 - DNA, 25 bp, Artificial
  probe
  misc_feature (1)..(25): SEQ ID NO: 1520; WAN024EUD_at; Start 328; Stop 352
caagcagatatcagtcgcaataagc

SEQ ID NO: 182802 - DNA, 25 bp, Artificial
  probe
  misc_feature (1)..(25): SEQ ID NO: 1520; WAN024EUD_at; Start 342; Stop 366
tcgcaataagcgcaagaaagtcatt

SEQ ID NO: 182803 - DNA, 25 bp, Artificial
  probe
  misc_feature (1)..(25): SEQ ID NO: 1520; WAN024EUD_at; Start 129; Stop 153
ccgcgttaaggaattggttgatact

SEQ ID NO: 182804 - DNA, 25 bp, Artificial
  probe
  misc_feature (1)..(25): SEQ ID NO: 1520; WAN024EUD_at; Start 175; Stop 199
gtgggcttgcctaaaaacatgaaca

SEQ ID NO: 182805 - DNA, 25 bp, Artificial
  probe
  misc_feature (1)..(25): SEQ ID NO: 1520; WAN024EUD_at; Start 143; Stop 167
tggttgatacttacaaggtggaacg

SEQ ID NO: 182806 - DNA, 25 bp, Artificial
  probe
  misc_feature (1)..(25): SEQ ID NO: 1520; WAN024EUD_at; Start 83; Stop 107
ttgaaatcatccagataaatgaaga

SEQ ID NO: 182807 - DNA, 25 bp, Artificial
  probe
  misc_feature (1)..(25): SEQ ID NO: 1520; WAN024EUD_at; Start 259; Stop 283
tttggtttaccagtagactatcagg

SEQ ID NO: 182808 - DNA, 25 bp, Artificial
  probe
  misc_feature (1)..(25): SEQ ID NO: 1520; WAN024EUD_at; Start 6; Stop 30
aattatgggattggacgtcggttca

SEQ ID NO: 182809 - DNA, 25 bp, Artificial
  probe
  misc_feature (1)..(25): SEQ ID NO: 1520; WAN024EUD_at; Start 334; Stop 358
gatatcagtcgcaataagcgcaaga

SEQ ID NO: 182810 - DNA, 25 bp, Artificial
  probe
  misc_feature (1)..(25): SEQ ID NO: 1520; WAN024EUD_at; Start 299; Stop 323
cagtggctgctgagcgcatgttgat

SEQ ID NO: 182811 - DNA, 25 bp, Artificial
  probe
  misc_feature (1)..(25): SEQ ID NO: 1520; WAN024EUD_at; Start 43; Stop 67
gtggcgattagcgatccgcttggtt

SEQ ID NO: 182812 - DNA, 25 bp, Artificial
  probe
  misc_feature (1)..(25): SEQ ID NO: 1520; WAN024EUD_at; Start 304; Stop 328
gctgctgagcgcatgttgattgaac

SEQ ID NO: 182813 - DNA, 25 bp, Artificial
  probe
  misc_feature (1)..(25): SEQ ID NO: 1520; WAN024EUD_at; Start 148; Stop 172
gatacttacaaggtggaacgatttg

SEQ ID NO: 182814 - DNA, 25 bp, Artificial
  probe
  misc_feature (1)..(25): SEQ ID NO: 1520; WAN024EUD_at; Start 274; Stop 298
gactatcaggatgaacgcttgacaa

SEQ ID NO: 182815 - DNA, 25 bp, Artificial
  probe
  misc_feature (1)..(25): SEQ ID NO: 1520; WAN024EUD_at; Start 126; Stop 150
tgaccgcgttaaggaattggttgat

SEQ ID NO: 182816 - DNA, 25 bp, Artificial
  probe
  misc_feature (1)..(25): SEQ ID NO: 1520; WAN024EUD_at; Start 209; Stop 233
gaccgcgcgtagaagctagtcaagc

SEQ ID NO: 182817 - DNA, 25 bp, Artificial
  probe
  misc_feature (1)..(25): SEQ ID NO: 1520; WAN024EUD_at; Start 100; Stop 124
aatgaagaacaaggccaatttggtt

SEQ ID NO: 182818 - DNA, 25 bp, Artificial
  probe
  misc_feature (1)..(25): SEQ ID NO: 1520; WAN024EUD_at; Start 268; Stop 292
ccagtagactatcaggatgaacgct

SEQ ID NO: 182819 - DNA, 25 bp, Artificial
  probe
  misc_feature (1)..(25): SEQ ID NO: 1520; WAN024EUD_at; Start 46; Stop 70
gcgattagcgatccgcttggtttta

SEQ ID NO: 182820 - DNA, 25 bp, Artificial
  probe
  misc_feature (1)..(25): SEQ ID NO: 7524; WAN024EUE_at; Start 25; Stop 49
ttttttcaatctaattatgaacaag

SEQ ID NO: 182821 - DNA, 25 bp, Artificial
  probe
  misc_feature (1)..(25): SEQ ID NO: 7524; WAN024EUE_at; Start 30; Stop 54
tcaatctaattatgaacaagaccca

SEQ ID NO: 182822 - DNA, 25 bp, Artificial
  probe
  misc_feature (1)..(25): SEQ ID NO: 7524; WAN024EUE_at; Start 9; Stop 33
ttcatctttcatgttcttttttcaa

SEQ ID NO: 182823 - DNA, 25 bp, Artificial
  probe
  misc_feature (1)..(25): SEQ ID NO: 7524; WAN024EUE_at; Start 18; Stop 42
catgttcttttttcaatctaattat

SEQ ID NO: 182824 - DNA, 25 bp, Artificial
  probe
  misc_feature (1)..(25): SEQ ID NO: 7524; WAN024EUE_at; Start 28; Stop 52
tttcaatctaattatgaacaagacc

SEQ ID NO: 182825 - DNA, 25 bp, Artificial
  probe
  misc_feature (1)..(25): SEQ ID NO: 7524; WAN024EUE_at; Start 11; Stop 35
catctttcatgttcttttttcaatc

SEQ ID NO: 182826 - DNA, 25 bp, Artificial
  probe
  misc_feature (1)..(25): SEQ ID NO: 7524; WAN024EUE_at; Start 23; Stop 47
tcttttttcaatctaattatgaaca

SEQ ID NO: 182827 - DNA, 25 bp, Artificial
  probe
  misc_feature (1)..(25): SEQ ID NO: 7524; WAN024EUE_at; Start 27; Stop 51
ttttcaatctaattatgaacaagac

SEQ ID NO: 182828 - DNA, 25 bp, Artificial
  probe
  misc_feature (1)..(25): SEQ ID NO: 7524; WAN024EUE_at; Start 8; Stop 32
cttcatctttcatgttcttttttca

SEQ ID NO: 182829 - DNA, 25 bp, Artificial
  probe
  misc_feature (1)..(25): SEQ ID NO: 7524; WAN024EUE_at; Start 7; Stop 31
gcttcatctttcatgttcttttttc

SEQ ID NO: 182830 - DNA, 25 bp, Artificial
  probe
  misc_feature (1)..(25): SEQ ID NO: 7524; WAN024EUE_at; Start 21; Stop 45
gttcttttttcaatctaattatgaa

SEQ ID NO: 182831 - DNA, 25 bp, Artificial
  probe
  misc_feature (1)..(25): SEQ ID NO: 7524; WAN024EUE_at; Start 22; Stop 46
ttcttttttcaatctaattatgaac

SEQ ID NO: 182832 - DNA, 25 bp, Artificial
  probe
  misc_feature (1)..(25): SEQ ID NO: 7524; WAN024EUE_at; Start 29; Stop 53
ttcaatctaattatgaacaagaccc

SEQ ID NO: 182833 - DNA, 25 bp, Artificial
  probe
  misc_feature (1)..(25): SEQ ID NO: 7524; WAN024EUE_at; Start 33; Stop 57
atctaattatgaacaagacccagaa

SEQ ID NO: 182834 - DNA, 25 bp, Artificial
  probe
  misc_feature (1)..(25): SEQ ID NO: 7524; WAN024EUE_at; Start 12; Stop 36
atctttcatgttcttttttcaatct

SEQ ID NO: 182835 - DNA, 25 bp, Artificial
  probe
  misc_feature (1)..(25): SEQ ID NO: 7524; WAN024EUE_at; Start 10; Stop 34
tcatctttcatgttcttttttcaat

SEQ ID NO: 182836 - DNA, 25 bp, Artificial
  probe
  misc_feature (1)..(25): SEQ ID NO: 7524; WAN024EUE_at; Start 32; Stop 56
aatctaattatgaacaagacccaga

SEQ ID NO: 182837 - DNA, 25 bp, Artificial
  probe
  misc_feature (1)..(25): SEQ ID NO: 7524; WAN024EUE_at; Start 14; Stop 38
ctttcatgttcttttttcaatctaa

SEQ ID NO: 182838 - DNA, 25 bp, Artificial
  probe
  misc_feature (1)..(25): SEQ ID NO: 7524; WAN024EUE_at; Start 16; Stop 40
ttcatgttcttttttcaatctaatt

SEQ ID NO: 182839 - DNA, 25 bp, Artificial
  probe
  misc_feature (1)..(25): SEQ ID NO: 7524; WAN024EUE_at; Start 20; Stop 44
tgttcttttttcaatctaattatga

SEQ ID NO: 182840 - DNA, 25 bp, Artificial
  probe
  misc_feature (1)..(25): SEQ ID NO: 7524; WAN024EUE_at; Start 31; Stop 55
caatctaattatgaacaagacccag

SEQ ID NO: 182841 - DNA, 25 bp, Artificial
  probe
  misc_feature (1)..(25): SEQ ID NO: 7524; WAN024EUE_at; Start 19; Stop 43
atgttcttttttcaatctaattatg

SEQ ID NO: 182842 - DNA, 25 bp, Artificial
  probe
  misc_feature (1)..(25): SEQ ID NO: 7524; WAN024EUE_at; Start 17; Stop 41
tcatgttcttttttcaatctaatta

SEQ ID NO: 182843 - DNA, 25 bp, Artificial
  probe
  misc_feature (1)..(25): SEQ ID NO: 7524; WAN024EUE_at; Start 24; Stop 48
cttttttcaatctaattatgaacaa

SEQ ID NO: 182844 - DNA, 25 bp, Artificial
  probe
  misc_feature (1)..(25): SEQ ID NO: 7524; WAN024EUE_at; Start 15; Stop 39
tttcatgttcttttttcaatctaat

SEQ ID NO: 182845 - DNA, 25 bp, Artificial
  probe
  misc_feature (1)..(25): SEQ ID NO: 7524; WAN024EUE_at; Start 6; Stop 30
tgcttcatctttcatgttctttttt

SEQ ID NO: 182846 - DNA, 25 bp, Artificial
  probe
  misc_feature (1)..(25): SEQ ID NO: 7524; WAN024EUE_at; Start 13; Stop 37
tctttcatgttcttttttcaatcta

SEQ ID NO: 182847 - DNA, 25 bp, Artificial
  probe
  misc_feature (1)..(25): SEQ ID NO: 7524; WAN024EUE_at; Start 26; Stop 50
tttttcaatctaattatgaacaaga

SEQ ID NO: 182848 - DNA, 25 bp, Artificial
  probe
  misc_feature (1)..(25): SEQ ID NO: 5069; WAN024EUF_at; Start 82; Stop 106
aagagccgtacctactgcgaacaag

SEQ ID NO: 182849 - DNA, 25 bp, Artificial
  probe
  misc_feature (1)..(25): SEQ ID NO: 5069; WAN024EUF_at; Start 84; Stop 108
gagccgtacctactgcgaacaagac

SEQ ID NO: 182850 - DNA, 25 bp, Artificial
  probe
  misc_feature (1)..(25): SEQ ID NO: 5069; WAN024EUF_at; Start 90; Stop 114
tacctactgcgaacaagacccagaa

SEQ ID NO: 182851 - DNA, 25 bp, Artificial
  probe
  misc_feature (1)..(25): SEQ ID NO: 5069; WAN024EUF_at; Start 50; Stop 74
acgctctaaaggctatgggatatag

SEQ ID NO: 182852 - DNA, 25 bp, Artificial
  probe
  misc_feature (1)..(25): SEQ ID NO: 5069; WAN024EUF_at; Start 240; Stop 264
ctctctggaagaagatataattatt

SEQ ID NO: 182853 - DNA, 25 bp, Artificial
  probe
  misc_feature (1)..(25): SEQ ID NO: 5069; WAN024EUF_at; Start 77; Stop 101
taaaaaagagccgtacctactgcga

SEQ ID NO: 182854 - DNA, 25 bp, Artificial
  probe
  misc_feature (1)..(25): SEQ ID NO: 5069; WAN024EUF_at; Start 46; Stop 70
cattacgctctaaaggctatgggat

SEQ ID NO: 182855 - DNA, 25 bp, Artificial
  probe
  misc_feature (1)..(25): SEQ ID NO: 5069; WAN024EUF_at; Start 225; Stop 249
gagcaggcagttagtctctctggaa

SEQ ID NO: 182856 - DNA, 25 bp, Artificial
  probe
  misc_feature (1)..(25): SEQ ID NO: 5069; WAN024EUF_at; Start 19; Stop 43
gaattcaactgtcctccaacaacta

SEQ ID NO: 182857 - DNA, 25 bp, Artificial
  probe
  misc_feature (1)..(25): SEQ ID NO: 5069; WAN024EUF_at; Start 60; Stop 84
ggctatgggatatagtctaaaaaag

SEQ ID NO: 182858 - DNA, 25 bp, Artificial
  probe
  misc_feature (1)..(25): SEQ ID NO: 5069; WAN024EUF_at; Start 141; Stop 165
gaatcacttaagctacctgactcct

SEQ ID NO: 182859 - DNA, 25 bp, Artificial
  probe
  misc_feature (1)..(25): SEQ ID NO: 5069; WAN024EUF_at; Start 15; Stop 39
tgctgaattcaactgtcctccaaca

SEQ ID NO: 182860 - DNA, 25 bp, Artificial
  probe
  misc_feature (1)..(25): SEQ ID NO: 5069; WAN024EUF_at; Start 123; Stop 147
tcggttccttaaagaattgaatcac

SEQ ID NO: 182861 - DNA, 25 bp, Artificial
  probe
  misc_feature (1)..(25): SEQ ID NO: 5069; WAN024EUF_at; Start 1; Stop 25
ttgactgaaatagctgctgaattca

SEQ ID NO: 182862 - DNA, 25 bp, Artificial
  probe
  misc_feature (1)..(25): SEQ ID NO: 5069; WAN024EUF_at; Start 154; Stop 178
tacctgactcctatttatatttatg

SEQ ID NO: 182863 - DNA, 25 bp, Artificial
  probe
  misc_feature (1)..(25): SEQ ID NO: 5069; WAN024EUF_at; Start 232; Stop 256
cagttagtctctctggaagaagata

SEQ ID NO: 182864 - DNA, 25 bp, Artificial
  probe
  misc_feature (1)..(25): SEQ ID NO: 5069; WAN024EUF_at; Start 44; Stop 68
ttcattacgctctaaaggctatggg

SEQ ID NO: 182865 - DNA, 25 bp, Artificial
  probe
  misc_feature (1)..(25): SEQ ID NO: 5069; WAN024EUF_at; Start 236; Stop 260
tagtctctctggaagaagatataat

SEQ ID NO: 182866 - DNA, 25 bp, Artificial
  probe
  misc_feature (1)..(25): SEQ ID NO: 5069; WAN024EUF_at; Start 149; Stop 173
taagctacctgactcctatttatat

SEQ ID NO: 182867 - DNA, 25 bp, Artificial
  probe
  misc_feature (1)..(25): SEQ ID NO: 5069; WAN024EUF_at; Start 211; Stop 235
tatgatcgagccttgagcaggcagt

SEQ ID NO: 182868 - DNA, 25 bp, Artificial
  probe
  misc_feature (1)..(25): SEQ ID NO: 5069; WAN024EUF_at; Start 171; Stop 195
tatttatgagacaggggttgagacc

SEQ ID NO: 182869 - DNA, 25 bp, Artificial
  probe
  misc_feature (1)..(25): SEQ ID NO: 5069; WAN024EUF_at; Start 53; Stop 77
ctctaaaggctatgggatatagtct

SEQ ID NO: 182870 - DNA, 25 bp, Artificial
  probe
  misc_feature (1)..(25): SEQ ID NO: 5069; WAN024EUF_at; Start 136; Stop 160
gaattgaatcacttaagctacctga

SEQ ID NO: 182871 - DNA, 25 bp, Artificial
  probe
  misc_feature (1)..(25): SEQ ID NO: 5069; WAN024EUF_at; Start 182; Stop 206
caggggttgagacctatttttatct

SEQ ID NO: 182872 - DNA, 25 bp, Artificial
  probe
  misc_feature (1)..(25): SEQ ID NO: 5069; WAN024EUF_at; Start 28; Stop 52
tgtcctccaacaactattcattacg

SEQ ID NO: 182873 - DNA, 25 bp, Artificial
  probe
  misc_feature (1)..(25): SEQ ID NO: 5069; WAN024EUF_at; Start 214; Stop 238
gatcgagccttgagcaggcagttag

SEQ ID NO: 182874 - DNA, 25 bp, Artificial
  probe
  misc_feature (1)..(25): SEQ ID NO: 5069; WAN024EUF_at; Start 7; Stop 31
gaaatagctgctgaattcaactgtc

SEQ ID NO: 182875 - DNA, 25 bp, Artificial
  probe
  misc_feature (1)..(25): SEQ ID NO: 5069; WAN024EUF_at; Start 228; Stop 252
caggcagttagtctctctggaagaa

SEQ ID NO: 182876 - DNA, 25 bp, Artificial
  probe
  misc_feature (1)..(25): SEQ ID NO: 5069; WAN024EUF_at; Start 89; Stop 113
gtacctactgcgaacaagacccaga

SEQ ID NO: 182877 - DNA, 25 bp, Artificial
  probe
  misc_feature (1)..(25): SEQ ID NO: 5069; WAN024EUF_at; Start 80; Stop 104
aaaagagccgtacctactgcgaaca

SEQ ID NO: 182878 - DNA, 25 bp, Artificial
  probe
  misc_feature (1)..(25): SEQ ID NO: 5069; WAN024EUF_at; Start 38; Stop 62
caactattcattacgctctaaaggc

SEQ ID NO: 182879 - DNA, 25 bp, Artificial
  probe
  misc_feature (1)..(25): SEQ ID NO: 5069; WAN024EUF_at; Start 11; Stop 35
tagctgctgaattcaactgtcctcc

SEQ ID NO: 182880 - DNA, 25 bp, Artificial
  probe
  misc_feature (1)..(25): SEQ ID NO: 5069; WAN024EUF_at; Start 216; Stop 240
tcgagccttgagcaggcagttagtc

SEQ ID NO: 182881 - DNA, 25 bp, Artificial
  probe
  misc_feature (1)..(25): SEQ ID NO: 5069; WAN024EUF_at; Start 220; Stop 244
gccttgagcaggcagttagtctctc

SEQ ID NO: 182882 - DNA, 25 bp, Artificial
  probe
  misc_feature (1)..(25): SEQ ID NO: 7625; WAN024EUG_at; Start 130; Stop 154
cttcccgatgggttaagtgcattcg

SEQ ID NO: 182883 - DNA, 25 bp, Artificial
  probe
  misc_feature (1)..(25): SEQ ID NO: 7625; WAN024EUG_at; Start 98; Stop 122
tccctcagagtaagaaagcagctta

SEQ ID NO: 182884 - DNA, 25 bp, Artificial
  probe
  misc_feature (1)..(25): SEQ ID NO: 7625; WAN024EUG_at; Start 140; Stop 164
ggttaagtgcattcgaaacgtgggc

SEQ ID NO: 182885 - DNA, 25 bp, Artificial
  probe
  misc_feature (1)..(25): SEQ ID NO: 7625; WAN024EUG_at; Start 115; Stop 139
gcagcttatctcgtacttcccgatg

SEQ ID NO: 182886 - DNA, 25 bp, Artificial
  probe
  misc_feature (1)..(25): SEQ ID NO: 7625; WAN024EUG_at; Start 16; Stop 40
caatcaatccaaagaaatggtcggc

SEQ ID NO: 182887 - DNA, 25 bp, Artificial
  probe
  misc_feature (1)..(25): SEQ ID NO: 7625; WAN024EUG_at; Start 118; Stop 142
gcttatctcgtacttcccgatgggt

SEQ ID NO: 182888 - DNA, 25 bp, Artificial
  probe
  misc_feature (1)..(25): SEQ ID NO: 7625; WAN024EUG_at; Start 20; Stop 44
caatccaaagaaatggtcggcattc

SEQ ID NO: 182889 - DNA, 25 bp, Artificial
  probe
  misc_feature (1)..(25): SEQ ID NO: 7625; WAN024EUG_at; Start 59; Stop 83
aaagagcaggagttgatagagttcg

SEQ ID NO: 182890 - DNA, 25 bp, Artificial
  probe
  misc_feature (1)..(25): SEQ ID NO: 7625; WAN024EUG_at; Start 165; Stop 189
tgatagaatcgtttctgacagagct

SEQ ID NO: 182891 - DNA, 25 bp, Artificial
  probe
  misc_feature (1)..(25): SEQ ID NO: 7625; WAN024EUG_at; Start 65; Stop 89
caggagttgatagagttcgtagtga

SEQ ID NO: 182892 - DNA, 25 bp, Artificial
  probe
  misc_feature (1)..(25): SEQ ID NO: 7625; WAN024EUG_at; Start 148; Stop 172
gcattcgaaacgtgggctgatagaa

SEQ ID NO: 182893 - DNA, 25 bp, Artificial
  probe
  misc_feature (1)..(25): SEQ ID NO: 7625; WAN024EUG_at; Start 5; Stop 29
cagttcttgctcaatcaatccaaag

SEQ ID NO: 182894 - DNA, 25 bp, Artificial
  probe
  misc_feature (1)..(25): SEQ ID NO: 7625; WAN024EUG_at; Start 29; Stop 53
gaaatggtcggcattcttctcttga

SEQ ID NO: 182895 - DNA, 25 bp, Artificial
  probe
  misc_feature (1)..(25): SEQ ID NO: 7625; WAN024EUG_at; Start 23; Stop 47
tccaaagaaatggtcggcattcttc

SEQ ID NO: 182896 - DNA, 25 bp, Artificial
  probe
  misc_feature (1)..(25): SEQ ID NO: 7625; WAN024EUG_at; Start 121; Stop 145
tatctcgtacttcccgatgggttaa

SEQ ID NO: 182897 - DNA, 25 bp, Artificial
  probe
  misc_feature (1)..(25): SEQ ID NO: 7625; WAN024EUG_at; Start 79; Stop 103
gttcgtagtgaacctgtaatccctc

SEQ ID NO: 182898 - DNA, 25 bp, Artificial
  probe
  misc_feature (1)..(25): SEQ ID NO: 7625; WAN024EUG_at; Start 49; Stop 73
cttgaaaatgaaagagcaggagttg

SEQ ID NO: 182899 - DNA, 25 bp, Artificial
  probe
  misc_feature (1)..(25): SEQ ID NO: 7625; WAN024EUG_at; Start 73; Stop 97
gatagagttcgtagtgaacctgtaa

SEQ ID NO: 182900 - DNA, 25 bp, Artificial
  probe
  misc_feature (1)..(25): SEQ ID NO: 7625; WAN024EUG_at; Start 111; Stop 135
gaaagcagcttatctcgtacttccc

SEQ ID NO: 182901 - DNA, 25 bp, Artificial
  probe
  misc_feature (1)..(25): SEQ ID NO: 7625; WAN024EUG_at; Start 133; Stop 157
cccgatgggttaagtgcattcgaaa

SEQ ID NO: 182902 - DNA, 25 bp, Artificial
  probe
  misc_feature (1)..(25): SEQ ID NO: 7625; WAN024EUG_at; Start 87; Stop 111
tgaacctgtaatccctcagagtaag

SEQ ID NO: 182903 - DNA, 25 bp, Artificial
  probe
  misc_feature (1)..(25): SEQ ID NO: 7625; WAN024EUG_at; Start 43; Stop 67
tcttctcttgaaaatgaaagagcag

SEQ ID NO: 182904 - DNA, 25 bp, Artificial
  probe
  misc_feature (1)..(25): SEQ ID NO: 7625; WAN024EUG_at; Start 103; Stop 127
cagagtaagaaagcagcttatctcg

SEQ ID NO: 182905 - DNA, 25 bp, Artificial
  probe
  misc_feature (1)..(25): SEQ ID NO: 7625; WAN024EUG_at; Start 153; Stop 177
cgaaacgtgggctgatagaatcgtt

SEQ ID NO: 182906 - DNA, 25 bp, Artificial
  probe
  misc_feature (1)..(25): SEQ ID NO: 7625; WAN024EUG_at; Start 83; Stop 107
gtagtgaacctgtaatccctcagag

SEQ ID NO: 182907 - DNA, 25 bp, Artificial
  probe
  misc_feature (1)..(25): SEQ ID NO: 7625; WAN024EUG_at; Start 33; Stop 57
tggtcggcattcttctcttgaaaat

SEQ ID NO: 182908 - DNA, 25 bp, Artificial
  probe
  misc_feature (1)..(25): SEQ ID NO: 7625; WAN024EUG_at; Start 37; Stop 61
cggcattcttctcttgaaaatgaaa

SEQ ID NO: 182909 - DNA, 25 bp, Artificial
  probe
  misc_feature (1)..(25): SEQ ID NO: 7625; WAN024EUG_at; Start 11; Stop 35
ttgctcaatcaatccaaagaaatgg

SEQ ID NO: 182910 - DNA, 25 bp, Artificial
  probe
  misc_feature (1)..(25): SEQ ID NO: 7625; WAN024EUG_at; Start 95; Stop 119
taatccctcagagtaagaaagcagc

SEQ ID NO: 182911 - DNA, 25 bp, Artificial
  probe
  misc_feature (1)..(25): SEQ ID NO: 7625; WAN024EUG_at; Start 126; Stop 150
cgtacttcccgatgggttaagtgca

SEQ ID NO: 182912 - DNA, 25 bp, Artificial
  probe
  misc_feature (1)..(25): SEQ ID NO: 7625; WAN024EUG_at; Start 100; Stop 124
cctcagagtaagaaagcagcttatc

SEQ ID NO: 182913 - DNA, 25 bp, Artificial
  probe
  misc_feature (1)..(25): SEQ ID NO: 7625; WAN024EUG_at; Start 158; Stop 182
cgtgggctgatagaatcgtttctga

SEQ ID NO: 182914 - DNA, 25 bp, Artificial
  probe
  misc_feature (1)..(25): SEQ ID NO: 7625; WAN024EUG_at; Start 1; Stop 25
ttggcagttcttgctcaatcaatcc

SEQ ID NO: 182915 - DNA, 25 bp, Artificial
  probe
  misc_feature (1)..(25): SEQ ID NO: 7625; WAN024EUG_at; Start 143; Stop 167
taagtgcattcgaaacgtgggctga

SEQ ID NO: 182916 - DNA, 25 bp, Artificial
  probe
  misc_feature (1)..(25): SEQ ID NO: 1942; WAN024EUH_at; Start 147; Stop 171
gccaacggttcatccgctttttcaa

SEQ ID NO: 182917 - DNA, 25 bp, Artificial
  probe
  misc_feature (1)..(25): SEQ ID NO: 1942; WAN024EUH_at; Start 79; Stop 103
caactcctgctctttcattttcaag

SEQ ID NO: 182918 - DNA, 25 bp, Artificial
  probe
  misc_feature (1)..(25): SEQ ID NO: 1942; WAN024EUH_at; Start 530; Stop 554
gcattgtctccgcagagtcgcagag

SEQ ID NO: 182919 - DNA, 25 bp, Artificial
  probe
  misc_feature (1)..(25): SEQ ID NO: 1942; WAN024EUH_at; Start 67; Stop 91
tacgaactctatcaactcctgctct

SEQ ID NO: 182920 - DNA, 25 bp, Artificial
  probe
  misc_feature (1)..(25): SEQ ID NO: 1942; WAN024EUH_at; Start 428; Stop 452
tattccatggtatcaaaggcaagac

SEQ ID NO: 182921 - DNA, 25 bp, Artificial
  probe
  misc_feature (1)..(25): SEQ ID NO: 1942; WAN024EUH_at; Start 360; Stop 384
tacgaatttcgtactctccagattg

SEQ ID NO: 182922 - DNA, 25 bp, Artificial
  probe
  misc_feature (1)..(25): SEQ ID NO: 1942; WAN024EUH_at; Start 394; Stop 418
gcctacccactacacttgacaaaga

SEQ ID NO: 182923 - DNA, 25 bp, Artificial
  probe
  misc_feature (1)..(25): SEQ ID NO: 1942; WAN024EUH_at; Start 96; Stop 120
ttttcaagagaagaatgccgaccat

SEQ ID NO: 182924 - DNA, 25 bp, Artificial
  probe
  misc_feature (1)..(25): SEQ ID NO: 1942; WAN024EUH_at; Start 135; Stop 159
tgagcaagaactgccaacggttcat

SEQ ID NO: 182925 - DNA, 25 bp, Artificial
  probe
  misc_feature (1)..(25): SEQ ID NO: 1942; WAN024EUH_at; Start 243; Stop 267
taaacttgaagcgaccaataatttg

SEQ ID NO: 182926 - DNA, 25 bp, Artificial
  probe
  misc_feature (1)..(25): SEQ ID NO: 1942; WAN024EUH_at; Start 128; Stop 152
gattgattgagcaagaactgccaac

SEQ ID NO: 182927 - DNA, 25 bp, Artificial
  probe
  misc_feature (1)..(25): SEQ ID NO: 1942; WAN024EUH_at; Start 15; Stop 39
tcgggaagtacgagataagctgctt

SEQ ID NO: 182928 - DNA, 25 bp, Artificial
  probe
  misc_feature (1)..(25): SEQ ID NO: 1942; WAN024EUH_at; Start 492; Stop 516
tgttccactcgctgacgctggcata

SEQ ID NO: 182929 - DNA, 25 bp, Artificial
  probe
  misc_feature (1)..(25): SEQ ID NO: 1942; WAN024EUH_at; Start 481; Stop 505
gaagttttctttgttccactcgctg

SEQ ID NO: 182930 - DNA, 25 bp, Artificial
  probe
  misc_feature (1)..(25): SEQ ID NO: 1942; WAN024EUH_at; Start 235; Stop 259
tccaacgctaaacttgaagcgacca

SEQ ID NO: 182931 - DNA, 25 bp, Artificial
  probe
  misc_feature (1)..(25): SEQ ID NO: 1942; WAN024EUH_at; Start 39; Stop 63
ttcttactctgagggattacaggtt

SEQ ID NO: 182932 - DNA, 25 bp, Artificial
  probe
  misc_feature (1)..(25): SEQ ID NO: 1942; WAN024EUH_at; Start 520; Stop 544
aatcatacctgcattgtctccgcag

SEQ ID NO: 182933 - DNA, 25 bp, Artificial
  probe
  misc_feature (1)..(25): SEQ ID NO: 1942; WAN024EUH_at; Start 508; Stop 532
gctggcataggcaatcatacctgca

SEQ ID NO: 182934 - DNA, 25 bp, Artificial
  probe
  misc_feature (1)..(25): SEQ ID NO: 1942; WAN024EUH_at; Start 276; Stop 300
tatcaagcgcaaagcctttggtttc

SEQ ID NO: 182935 - DNA, 25 bp, Artificial
  probe
  misc_feature (1)..(25): SEQ ID NO: 1942; WAN024EUH_at; Start 113; Stop 137
ccgaccatttctttggattgattga

SEQ ID NO: 182936 - DNA, 25 bp, Artificial
  probe
  misc_feature (1)..(25): SEQ ID NO: 1942; WAN024EUH_at; Start 502; Stop 526
gctgacgctggcataggcaatcata

SEQ ID NO: 182937 - DNA, 25 bp, Artificial
  probe
  misc_feature (1)..(25): SEQ ID NO: 1942; WAN024EUH_at; Start 222; Stop 246
taagctgccttattccaacgctaaa

SEQ ID NO: 182938 - DNA, 25 bp, Artificial
  probe
  misc_feature (1)..(25): SEQ ID NO: 1942; WAN024EUH_at; Start 415; Stop 439
aagagccactctttattccatggta

SEQ ID NO: 182939 - DNA, 25 bp, Artificial
  probe
  misc_feature (1)..(25): SEQ ID NO: 1942; WAN024EUH_at; Start 30; Stop 54
taagctgctttcttactctgaggga

SEQ ID NO: 182940 - DNA, 25 bp, Artificial
  probe
  misc_feature (1)..(25): SEQ ID NO: 1942; WAN024EUH_at; Start 450; Stop 474
gacttggtttggcattgaggtccca

SEQ ID NO: 182941 - DNA, 25 bp, Artificial
  probe
  misc_feature (1)..(25): SEQ ID NO: 1942; WAN024EUH_at; Start 550; Stop 574
cagaggggggatgataaccttgaca

SEQ ID NO: 182942 - DNA, 25 bp, Artificial
  probe
  misc_feature (1)..(25): SEQ ID NO: 1942; WAN024EUH_at; Start 345; Stop 369
catcaaaaaagagagtacgaatttc

SEQ ID NO: 182943 - DNA, 25 bp, Artificial
  probe
  misc_feature (1)..(25): SEQ ID NO: 1942; WAN024EUH_at; Start 438; Stop 462
tatcaaaggcaagacttggtttggc

SEQ ID NO: 182944 - DNA, 25 bp, Artificial
  probe
  misc_feature (1)..(25): SEQ ID NO: 1942; WAN024EUH_at; Start 207; Stop 231
gattatcaacgcacttaagctgcct

SEQ ID NO: 182945 - DNA, 25 bp, Artificial
  probe
  misc_feature (1)..(25): SEQ ID NO: 1942; WAN024EUH_at; Start 466; Stop 490
gaggtcccagcctgcgaagttttct

SEQ ID NO: 182946 - DNA, 25 bp, Artificial
  probe
  misc_feature (1)..(25): SEQ ID NO: 1942; WAN024EUH_at; Start 404; Stop 428
tacacttgacaaagagccactcttt

SEQ ID NO: 182947 - DNA, 25 bp, Artificial
  probe
  misc_feature (1)..(25): SEQ ID NO: 1942; WAN024EUH_at; Start 457; Stop 481
tttggcattgaggtcccagcctgcg

SEQ ID NO: 182948 - DNA, 25 bp, Artificial
  probe
  misc_feature (1)..(25): SEQ ID NO: 1942; WAN024EUH_at; Start 2; Stop 26
tgcacttaacccatcgggaagtacg

SEQ ID NO: 182949 - DNA, 25 bp, Artificial
  probe
  misc_feature (1)..(25): SEQ ID NO: 1942; WAN024EUH_at; Start 196; Stop 220
gatagagataagattatcaacgcac

SEQ ID NO: 182950 - DNA, 25 bp, Artificial
  probe
  misc_feature (1)..(25): SEQ ID NO: 5155; WAN024EUI_at; Start 245; Stop 269
tgtatcatttgtggcaagaagcgct

SEQ ID NO: 182951 - DNA, 25 bp, Artificial
  probe
  misc_feature (1)..(25): SEQ ID NO: 5155; WAN024EUI_at; Start 222; Stop 246
cctgagttctttctttattagcctg

SEQ ID NO: 182952 - DNA, 25 bp, Artificial
  probe
  misc_feature (1)..(25): SEQ ID NO: 5155; WAN024EUI_at; Start 1; Stop 25
ttgagtgaagtttccaaactagcgc

SEQ ID NO: 182953 - DNA, 25 bp, Artificial
  probe
  misc_feature (1)..(25): SEQ ID NO: 5155; WAN024EUI_at; Start 204; Stop 228
cattgtcataggctacatcctgagt

SEQ ID NO: 182954 - DNA, 25 bp, Artificial
  probe
  misc_feature (1)..(25): SEQ ID NO: 5155; WAN024EUI_at; Start 61; Stop 85
caattattattcactctaagtagtc

SEQ ID NO: 182955 - DNA, 25 bp, Artificial
  probe
  misc_feature (1)..(25): SEQ ID NO: 5155; WAN024EUI_at; Start 19; Stop 43
ctagcgcacaaacagagaagatggt

SEQ ID NO: 182956 - DNA, 25 bp, Artificial
  probe
  misc_feature (1)..(25): SEQ ID NO: 5155; WAN024EUI_at; Start 207; Stop 231
tgtcataggctacatcctgagttct

SEQ ID NO: 182957 - DNA, 25 bp, Artificial
  probe
  misc_feature (1)..(25): SEQ ID NO: 5155; WAN024EUI_at; Start 22; Stop 46
gcgcacaaacagagaagatggtata

SEQ ID NO: 182958 - DNA, 25 bp, Artificial
  probe
  misc_feature (1)..(25): SEQ ID NO: 5155; WAN024EUI_at; Start 201; Stop 225
tagcattgtcataggctacatcctg

SEQ ID NO: 182959 - DNA, 25 bp, Artificial
  probe
  misc_feature (1)..(25): SEQ ID NO: 5155; WAN024EUI_at; Start 160; Stop 184
gatgataatacaagaaaagttcgtt

SEQ ID NO: 182960 - DNA, 25 bp, Artificial
  probe
  misc_feature (1)..(25): SEQ ID NO: 5155; WAN024EUI_at; Start 7; Stop 31
gaagtttccaaactagcgcacaaac

SEQ ID NO: 182961 - DNA, 25 bp, Artificial
  probe
  misc_feature (1)..(25): SEQ ID NO: 5155; WAN024EUI_at; Start 139; Stop 163
gagaaggttttaaaagtgacagatg

SEQ ID NO: 182962 - DNA, 25 bp, Artificial
  probe
  misc_feature (1)..(25): SEQ ID NO: 5155; WAN024EUI_at; Start 119; Stop 143
taaaggatcttgttagatgggagaa

SEQ ID NO: 182963 - DNA, 25 bp, Artificial
  probe
  misc_feature (1)..(25): SEQ ID NO: 5155; WAN024EUI_at; Start 52; Stop 76
caaatggttcaattattattcactc

SEQ ID NO: 182964 - DNA, 25 bp, Artificial
  probe
  misc_feature (1)..(25): SEQ ID NO: 5155; WAN024EUI_at; Start 3; Stop 27
gagtgaagtttccaaactagcgcac

SEQ ID NO: 182965 - DNA, 25 bp, Artificial
  probe
  misc_feature (1)..(25): SEQ ID NO: 5155; WAN024EUI_at; Start 236; Stop 260
ttattagcctgtatcatttgtggca

SEQ ID NO: 182966 - DNA, 25 bp, Artificial
  probe
  misc_feature (1)..(25): SEQ ID NO: 5155; WAN024EUI_at; Start 214; Stop 238
ggctacatcctgagttctttcttta

SEQ ID NO: 182967 - DNA, 25 bp, Artificial
  probe
  misc_feature (1)..(25): SEQ ID NO: 5155; WAN024EUI_at; Start 250; Stop 274
catttgtggcaagaagcgcttagag

SEQ ID NO: 182968 - DNA, 25 bp, Artificial
  probe
  misc_feature (1)..(25): SEQ ID NO: 5155; WAN024EUI_at; Start 124; Stop 148
gatcttgttagatgggagaaggttt

SEQ ID NO: 182969 - DNA, 25 bp, Artificial
  probe
  misc_feature (1)..(25): SEQ ID NO: 5155; WAN024EUI_at; Start 38; Stop 62
gatggtataatagtcaaatggttca

SEQ ID NO: 182970 - DNA, 25 bp, Artificial
  probe
  misc_feature (1)..(25): SEQ ID NO: 5155; WAN024EUI_at; Start 252; Stop 276
tttgtggcaagaagcgcttagagga

SEQ ID NO: 182971 - DNA, 25 bp, Artificial
  probe
  misc_feature (1)..(25): SEQ ID NO: 5155; WAN024EUI_at; Start 158; Stop 182
cagatgataatacaagaaaagttcg

SEQ ID NO: 182972 - DNA, 25 bp, Artificial
  probe
  misc_feature (1)..(25): SEQ ID NO: 5155; WAN024EUI_at; Start 240; Stop 264
tagcctgtatcatttgtggcaagaa

SEQ ID NO: 182973 - DNA, 25 bp, Artificial
  probe
  misc_feature (1)..(25): SEQ ID NO: 5155; WAN024EUI_at; Start 113; Stop 137
accttttaaaggatcttgttagatg

SEQ ID NO: 182974 - DNA, 25 bp, Artificial
  probe
  misc_feature (1)..(25): SEQ ID NO: 5155; WAN024EUI_at; Start 15; Stop 39
caaactagcgcacaaacagagaaga

SEQ ID NO: 182975 - DNA, 25 bp, Artificial
  probe
  misc_feature (1)..(25): SEQ ID NO: 5155; WAN024EUI_at; Start 261; Stop 285
agaagcgcttagaggattattatga

SEQ ID NO: 182976 - DNA, 25 bp, Artificial
  probe
  misc_feature (1)..(25): SEQ ID NO: 5155; WAN024EUI_at; Start 191; Stop 215
tagccttttttagcattgtcatagg

SEQ ID NO: 182977 - DNA, 25 bp, Artificial
  probe
  misc_feature (1)..(25): SEQ ID NO: 5155; WAN024EUI_at; Start 187; Stop 211
ttagtagccttttttagcattgtca

SEQ ID NO: 182978 - DNA, 25 bp, Artificial
  probe
  misc_feature (1)..(25): SEQ ID NO: 5155; WAN024EUI_at; Start 13; Stop 37
tccaaactagcgcacaaacagagaa

SEQ ID NO: 182979 - DNA, 25 bp, Artificial
  probe
  misc_feature (1)..(25): SEQ ID NO: 5155; WAN024EUI_at; Start 149; Stop 173
taaaagtgacagatgataatacaag

SEQ ID NO: 182980 - DNA, 25 bp, Artificial
  probe
  misc_feature (1)..(25): SEQ ID NO: 5155; WAN024EUI_at; Start 210; Stop 234
cataggctacatcctgagttctttc

SEQ ID NO: 182981 - DNA, 25 bp, Artificial
  probe
  misc_feature (1)..(25): SEQ ID NO: 5155; WAN024EUI_at; Start 256; Stop 280
tggcaagaagcgcttagaggattat

SEQ ID NO: 182982 - DNA, 25 bp, Artificial
  probe
  misc_feature (1)..(25): SEQ ID NO: 5155; WAN024EUI_at; Start 66; Stop 90
attattcactctaagtagtcatatg

SEQ ID NO: 182983 - DNA, 25 bp, Artificial
  probe
  misc_feature (1)..(25): SEQ ID NO: 5155; WAN024EUI_at; Start 24; Stop 48
gcacaaacagagaagatggtataat

SEQ ID NO: 182984 - DNA, 25 bp, Artificial
  probe
  misc_feature (1)..(25): SEQ ID NO: 1855; WAN024EUJ_at; Start 124; Stop 148
cttgtcgaagaaaatcgcccagagt

SEQ ID NO: 182985 - DNA, 25 bp, Artificial
  probe
  misc_feature (1)..(25): SEQ ID NO: 1855; WAN024EUJ_at; Start 133; Stop 157
gaaaatcgcccagagtacaatatcg

SEQ ID NO: 182986 - DNA, 25 bp, Artificial
  probe
  misc_feature (1)..(25): SEQ ID NO: 1855; WAN024EUJ_at; Start 38; Stop 62
gtagcccacgccgtgaaacaacacg

SEQ ID NO: 182987 - DNA, 25 bp, Artificial
  probe
  misc_feature (1)..(25): SEQ ID NO: 1855; WAN024EUJ_at; Start 160; Stop 184
tatatcgaactcttgtctgacaaat

SEQ ID NO: 182988 - DNA, 25 bp, Artificial
  probe
  misc_feature (1)..(25): SEQ ID NO: 1855; WAN024EUJ_at; Start 114; Stop 138
tgctcgccaacttgtcgaagaaaat

SEQ ID NO: 182989 - DNA, 25 bp, Artificial
  probe
  misc_feature (1)..(25): SEQ ID NO: 1855; WAN024EUJ_at; Start 86; Stop 110
ccagctcagaacttgagggccgtat

SEQ ID NO: 182990 - DNA, 25 bp, Artificial
  probe
  misc_feature (1)..(25): SEQ ID NO: 1855; WAN024EUJ_at; Start 117; Stop 141
tcgccaacttgtcgaagaaaatcgc

SEQ ID NO: 182991 - DNA, 25 bp, Artificial
  probe
  misc_feature (1)..(25): SEQ ID NO: 1855; WAN024EUJ_at; Start 122; Stop 146
aacttgtcgaagaaaatcgcccaga

SEQ ID NO: 182992 - DNA, 25 bp, Artificial
  probe
  misc_feature (1)..(25): SEQ ID NO: 1855; WAN024EUJ_at; Start 100; Stop 124
gagggccgtatcactgctcgccaac

SEQ ID NO: 182993 - DNA, 25 bp, Artificial
  probe
  misc_feature (1)..(25): SEQ ID NO: 1855; WAN024EUJ_at; Start 166; Stop 190
gaactcttgtctgacaaattgctcg

SEQ ID NO: 182994 - DNA, 25 bp, Artificial
  probe
  misc_feature (1)..(25): SEQ ID NO: 1855; WAN024EUJ_at; Start 88; Stop 112
agctcagaacttgagggccgtatca

SEQ ID NO: 182995 - DNA, 25 bp, Artificial
  probe
  misc_feature (1)..(25): SEQ ID NO: 1855; WAN024EUJ_at; Start 175; Stop 199
tctgacaaattgctcgattacgaaa

SEQ ID NO: 182996 - DNA, 25 bp, Artificial
  probe
  misc_feature (1)..(25): SEQ ID NO: 1855; WAN024EUJ_at; Start 111; Stop 135
cactgctcgccaacttgtcgaagaa

SEQ ID NO: 182997 - DNA, 25 bp, Artificial
  probe
  misc_feature (1)..(25): SEQ ID NO: 1855; WAN024EUJ_at; Start 28; Stop 52
acaaaagaacgtagcccacgccgtg

SEQ ID NO: 182998 - DNA, 25 bp, Artificial
  probe
  misc_feature (1)..(25): SEQ ID NO: 1855; WAN024EUJ_at; Start 104; Stop 128
gccgtatcactgctcgccaacttgt

SEQ ID NO: 182999 - DNA, 25 bp, Artificial
  probe
  misc_feature (1)..(25): SEQ ID NO: 1855; WAN024EUJ_at; Start 170; Stop 194
tcttgtctgacaaattgctcgatta

SEQ ID NO: 183000 - DNA, 25 bp, Artificial
  probe
  misc_feature (1)..(25): SEQ ID NO: 1855; WAN024EUJ_at; Start 2; Stop 26
tgatttacaaagttttttatcaaga

SEQ ID NO: 183001 - DNA, 25 bp, Artificial
  probe
  misc_feature (1)..(25): SEQ ID NO: 1855; WAN024EUJ_at; Start 98; Stop 122
ttgagggccgtatcactgctcgcca

SEQ ID NO: 183002 - DNA, 25 bp, Artificial
  probe
  misc_feature (1)..(25): SEQ ID NO: 1855; WAN024EUJ_at; Start 33; Stop 57
agaacgtagcccacgccgtgaaaca

SEQ ID NO: 183003 - DNA, 25 bp, Artificial
  probe
  misc_feature (1)..(25): SEQ ID NO: 1855; WAN024EUJ_at; Start 34; Stop 58
gaacgtagcccacgccgtgaaacaa

SEQ ID NO: 183004 - DNA, 25 bp, Artificial
  probe
  misc_feature (1)..(25): SEQ ID NO: 1855; WAN024EUJ_at; Start 90; Stop 114
ctcagaacttgagggccgtatcact

SEQ ID NO: 183005 - DNA, 25 bp, Artificial
  probe
  misc_feature (1)..(25): SEQ ID NO: 1855; WAN024EUJ_at; Start 96; Stop 120
acttgagggccgtatcactgctcgc

SEQ ID NO: 183006 - DNA, 25 bp, Artificial
  probe
  misc_feature (1)..(25): SEQ ID NO: 1855; WAN024EUJ_at; Start 186; Stop 210
gctcgattacgaaaaagaaactggc

SEQ ID NO: 183007 - DNA, 25 bp, Artificial
  probe
  misc_feature (1)..(25): SEQ ID NO: 1855; WAN024EUJ_at; Start 127; Stop 151
gtcgaagaaaatcgcccagagtaca

SEQ ID NO: 183008 - DNA, 25 bp, Artificial
  probe
  misc_feature (1)..(25): SEQ ID NO: 1855; WAN024EUJ_at; Start 188; Stop 212
tcgattacgaaaaagaaactggcgc

SEQ ID NO: 183009 - DNA, 25 bp, Artificial
  probe
  misc_feature (1)..(25): SEQ ID NO: 1855; WAN024EUJ_at; Start 95; Stop 119
aacttgagggccgtatcactgctcg

SEQ ID NO: 183010 - DNA, 25 bp, Artificial
  probe
  misc_feature (1)..(25): SEQ ID NO: 1855; WAN024EUJ_at; Start 173; Stop 197
tgtctgacaaattgctcgattacga

SEQ ID NO: 183011 - DNA, 25 bp, Artificial
  probe
  misc_feature (1)..(25): SEQ ID NO: 1855; WAN024EUJ_at; Start 121; Stop 145
caacttgtcgaagaaaatcgcccag

SEQ ID NO: 183012 - DNA, 25 bp, Artificial
  probe
  misc_feature (1)..(25): SEQ ID NO: 1855; WAN024EUJ_at; Start 109; Stop 133
atcactgctcgccaacttgtcgaag

SEQ ID NO: 183013 - DNA, 25 bp, Artificial
  probe
  misc_feature (1)..(25): SEQ ID NO: 1855; WAN024EUJ_at; Start 178; Stop 202
gacaaattgctcgattacgaaaaag

SEQ ID NO: 183014 - DNA, 25 bp, Artificial
  probe
  misc_feature (1)..(25): SEQ ID NO: 1855; WAN024EUJ_at; Start 126; Stop 150
tgtcgaagaaaatcgcccagagtac

SEQ ID NO: 183015 - DNA, 25 bp, Artificial
  probe
  misc_feature (1)..(25): SEQ ID NO: 1855; WAN024EUJ_at; Start 119; Stop 143
gccaacttgtcgaagaaaatcgccc

SEQ ID NO: 183016 - DNA, 25 bp, Artificial
  probe
  misc_feature (1)..(25): SEQ ID NO: 1855; WAN024EUJ_at; Start 134; Stop 158
aaaatcgcccagagtacaatatcga

SEQ ID NO: 183017 - DNA, 25 bp, Artificial
  probe
  misc_feature (1)..(25): SEQ ID NO: 1855; WAN024EUJ_at; Start 106; Stop 130
cgtatcactgctcgccaacttgtcg

SEQ ID NO: 183018 - DNA, 25 bp, Artificial
  probe
  misc_feature (1)..(25): SEQ ID NO: 5186; WAN024EUK_at; Start 7; Stop 31
gatgtgactataggtcaaaaaagca

SEQ ID NO: 183019 - DNA, 25 bp, Artificial
  probe
  misc_feature (1)..(25): SEQ ID NO: 5186; WAN024EUK_at; Start 17; Stop 41
taggtcaaaaaagcaagacaggagc

SEQ ID NO: 183020 - DNA, 25 bp, Artificial
  probe
  misc_feature (1)..(25): SEQ ID NO: 5186; WAN024EUK_at; Start 28; Stop 52
agcaagacaggagcttttaacgcca

SEQ ID NO: 183021 - DNA, 25 bp, Artificial
  probe
  misc_feature (1)..(25): SEQ ID NO: 5186; WAN024EUK_at; Start 56; Stop 80
actctatatgcttttcaggagaaaa

SEQ ID NO: 183022 - DNA, 25 bp, Artificial
  probe
  misc_feature (1)..(25): SEQ ID NO: 5186; WAN024EUK_at; Start 43; Stop 67
tttaacgccagctactctatatgct

SEQ ID NO: 183023 - DNA, 25 bp, Artificial
  probe
  misc_feature (1)..(25): SEQ ID NO: 5186; WAN024EUK_at; Start 27; Stop 51
aagcaagacaggagcttttaacgcc

SEQ ID NO: 183024 - DNA, 25 bp, Artificial
  probe
  misc_feature (1)..(25): SEQ ID NO: 5186; WAN024EUK_at; Start 22; Stop 46
caaaaaagcaagacaggagctttta

SEQ ID NO: 183025 - DNA, 25 bp, Artificial
  probe
  misc_feature (1)..(25): SEQ ID NO: 5186; WAN024EUK_at; Start 2; Stop 26
tgatagatgtgactataggtcaaaa

SEQ ID NO: 183026 - DNA, 25 bp, Artificial
  probe
  misc_feature (1)..(25): SEQ ID NO: 5186; WAN024EUK_at; Start 14; Stop 38
ctataggtcaaaaaagcaagacagg

SEQ ID NO: 183027 - DNA, 25 bp, Artificial
  probe
  misc_feature (1)..(25): SEQ ID NO: 5186; WAN024EUK_at; Start 20; Stop 44
gtcaaaaaagcaagacaggagcttt

SEQ ID NO: 183028 - DNA, 25 bp, Artificial
  probe
  misc_feature (1)..(25): SEQ ID NO: 5186; WAN024EUK_at; Start 55; Stop 79
tactctatatgcttttcaggagaaa

SEQ ID NO: 183029 - DNA, 25 bp, Artificial
  probe
  misc_feature (1)..(25): SEQ ID NO: 5186; WAN024EUK_at; Start 35; Stop 59
caggagcttttaacgccagctactc

SEQ ID NO: 183030 - DNA, 25 bp, Artificial
  probe
  misc_feature (1)..(25): SEQ ID NO: 5186; WAN024EUK_at; Start 9; Stop 33
tgtgactataggtcaaaaaagcaag

SEQ ID NO: 183031 - DNA, 25 bp, Artificial
  probe
  misc_feature (1)..(25): SEQ ID NO: 5186; WAN024EUK_at; Start 49; Stop 73
gccagctactctatatgcttttcag

SEQ ID NO: 183032 - DNA, 25 bp, Artificial
  probe
  misc_feature (1)..(25): SEQ ID NO: 5186; WAN024EUK_at; Start 36; Stop 60
aggagcttttaacgccagctactct

SEQ ID NO: 183033 - DNA, 25 bp, Artificial
  probe
  misc_feature (1)..(25): SEQ ID NO: 5186; WAN024EUK_at; Start 40; Stop 64
gcttttaacgccagctactctatat

SEQ ID NO: 183034 - DNA, 25 bp, Artificial
  probe
  misc_feature (1)..(25): SEQ ID NO: 5186; WAN024EUK_at; Start 33; Stop 57
gacaggagcttttaacgccagctac

SEQ ID NO: 183035 - DNA, 25 bp, Artificial
  probe
  misc_feature (1)..(25): SEQ ID NO: 5186; WAN024EUK_at; Start 15; Stop 39
tataggtcaaaaaagcaagacagga

SEQ ID NO: 183036 - DNA, 25 bp, Artificial
  probe
  misc_feature (1)..(25): SEQ ID NO: 5186; WAN024EUK_at; Start 29; Stop 53
gcaagacaggagcttttaacgccag

SEQ ID NO: 183037 - DNA, 25 bp, Artificial
  probe
  misc_feature (1)..(25): SEQ ID NO: 5186; WAN024EUK_at; Start 5; Stop 29
tagatgtgactataggtcaaaaaag

SEQ ID NO: 183038 - DNA, 25 bp, Artificial
  probe
  misc_feature (1)..(25): SEQ ID NO: 5186; WAN024EUK_at; Start 53; Stop 77
gctactctatatgcttttcaggaga

SEQ ID NO: 183039 - DNA, 25 bp, Artificial
  probe
  misc_feature (1)..(25): SEQ ID NO: 5186; WAN024EUK_at; Start 31; Stop 55
aagacaggagcttttaacgccagct

SEQ ID NO: 183040 - DNA, 25 bp, Artificial
  probe
  misc_feature (1)..(25): SEQ ID NO: 5186; WAN024EUK_at; Start 26; Stop 50
aaagcaagacaggagcttttaacgc

SEQ ID NO: 183041 - DNA, 25 bp, Artificial
  probe
  misc_feature (1)..(25): SEQ ID NO: 5186; WAN024EUK_at; Start 32; Stop 56
agacaggagcttttaacgccagcta

SEQ ID NO: 183042 - DNA, 25 bp, Artificial
  probe
  misc_feature (1)..(25): SEQ ID NO: 5186; WAN024EUK_at; Start 42; Stop 66
ttttaacgccagctactctatatgc

SEQ ID NO: 183043 - DNA, 25 bp, Artificial
  probe
  misc_feature (1)..(25): SEQ ID NO: 5186; WAN024EUK_at; Start 51; Stop 75
cagctactctatatgcttttcagga

SEQ ID NO: 183044 - DNA, 25 bp, Artificial
  probe
  misc_feature (1)..(25): SEQ ID NO: 5186; WAN024EUK_at; Start 11; Stop 35
tgactataggtcaaaaaagcaagac

SEQ ID NO: 183045 - DNA, 25 bp, Artificial
  probe
  misc_feature (1)..(25): SEQ ID NO: 5186; WAN024EUK_at; Start 30; Stop 54
caagacaggagcttttaacgccagc

SEQ ID NO: 183046 - DNA, 25 bp, Artificial
  probe
  misc_feature (1)..(25): SEQ ID NO: 5186; WAN024EUK_at; Start 57; Stop 81
ctctatatgcttttcaggagaaaat

SEQ ID NO: 183047 - DNA, 25 bp, Artificial
  probe
  misc_feature (1)..(25): SEQ ID NO: 5186; WAN024EUK_at; Start 39; Stop 63
agcttttaacgccagctactctata

SEQ ID NO: 183048 - DNA, 25 bp, Artificial
  probe
  misc_feature (1)..(25): SEQ ID NO: 5186; WAN024EUK_at; Start 45; Stop 69
taacgccagctactctatatgcttt

SEQ ID NO: 183049 - DNA, 25 bp, Artificial
  probe
  misc_feature (1)..(25): SEQ ID NO: 5186; WAN024EUK_at; Start 12; Stop 36
gactataggtcaaaaaagcaagaca

SEQ ID NO: 183050 - DNA, 25 bp, Artificial
  probe
  misc_feature (1)..(25): SEQ ID NO: 5186; WAN024EUK_at; Start 19; Stop 43
ggtcaaaaaagcaagacaggagctt

SEQ ID NO: 183051 - DNA, 25 bp, Artificial
  probe
  misc_feature (1)..(25): SEQ ID NO: 5186; WAN024EUK_at; Start 34; Stop 58
acaggagcttttaacgccagctact

SEQ ID NO: 183052 - DNA, 25 bp, Artificial
  probe
  misc_feature (1)..(25): SEQ ID NO: 5043; WAN024EUL_at; Start 42; Stop 66
gctatcaataaaaaggtggcatttt

SEQ ID NO: 183053 - DNA, 25 bp, Artificial
  probe
  misc_feature (1)..(25): SEQ ID NO: 5043; WAN024EUL_at; Start 91; Stop 115
gccttatcctatctaagtcatttcg

SEQ ID NO: 183054 - DNA, 25 bp, Artificial
  probe
  misc_feature (1)..(25): SEQ ID NO: 5043; WAN024EUL_at; Start 23; Stop 47
aagtattgttcttgcctaagctatc

SEQ ID NO: 183055 - DNA, 25 bp, Artificial
  probe
  misc_feature (1)..(25): SEQ ID NO: 5043; WAN024EUL_at; Start 15; Stop 39
catctatcaagtattgttcttgcct

SEQ ID NO: 183056 - DNA, 25 bp, Artificial
  probe
  misc_feature (1)..(25): SEQ ID NO: 5043; WAN024EUL_at; Start 43; Stop 67
ctatcaataaaaaggtggcattttt

SEQ ID NO: 183057 - DNA, 25 bp, Artificial
  probe
  misc_feature (1)..(25): SEQ ID NO: 5043; WAN024EUL_at; Start 36; Stop 60
gcctaagctatcaataaaaaggtgg

SEQ ID NO: 183058 - DNA, 25 bp, Artificial
  probe
  misc_feature (1)..(25): SEQ ID NO: 5043; WAN024EUL_at; Start 39; Stop 63
taagctatcaataaaaaggtggcat

SEQ ID NO: 183059 - DNA, 25 bp, Artificial
  probe
  misc_feature (1)..(25): SEQ ID NO: 5043; WAN024EUL_at; Start 123; Stop 147
tatggtacaatggaaacatgttatt

SEQ ID NO: 183060 - DNA, 25 bp, Artificial
  probe
  misc_feature (1)..(25): SEQ ID NO: 5043; WAN024EUL_at; Start 3; Stop 27
gacctatagtcacatctatcaagta

SEQ ID NO: 183061 - DNA, 25 bp, Artificial
  probe
  misc_feature (1)..(25): SEQ ID NO: 5043; WAN024EUL_at; Start 54; Stop 78
aaggtggcattttttaggcttggtg

SEQ ID NO: 183062 - DNA, 25 bp, Artificial
  probe
  misc_feature (1)..(25): SEQ ID NO: 5043; WAN024EUL_at; Start 21; Stop 45
tcaagtattgttcttgcctaagcta

SEQ ID NO: 183063 - DNA, 25 bp, Artificial
  probe
  misc_feature (1)..(25): SEQ ID NO: 5043; WAN024EUL_at; Start 55; Stop 79
aggtggcattttttaggcttggtgt

SEQ ID NO: 183064 - DNA, 25 bp, Artificial
  probe
  misc_feature (1)..(25): SEQ ID NO: 5043; WAN024EUL_at; Start 92; Stop 116
ccttatcctatctaagtcatttcga

SEQ ID NO: 183065 - DNA, 25 bp, Artificial
  probe
  misc_feature (1)..(25): SEQ ID NO: 5043; WAN024EUL_at; Start 32; Stop 56
tcttgcctaagctatcaataaaaag

SEQ ID NO: 183066 - DNA, 25 bp, Artificial
  probe
  misc_feature (1)..(25): SEQ ID NO: 5043; WAN024EUL_at; Start 26; Stop 50
tattgttcttgcctaagctatcaat

SEQ ID NO: 183067 - DNA, 25 bp, Artificial
  probe
  misc_feature (1)..(25): SEQ ID NO: 5043; WAN024EUL_at; Start 6; Stop 30
ctatagtcacatctatcaagtattg

SEQ ID NO: 183068 - DNA, 25 bp, Artificial
  probe
  misc_feature (1)..(25): SEQ ID NO: 5043; WAN024EUL_at; Start 130; Stop 154
caatggaaacatgttattcaaatta

SEQ ID NO: 183069 - DNA, 25 bp, Artificial
  probe
  misc_feature (1)..(25): SEQ ID NO: 5043; WAN024EUL_at; Start 37; Stop 61
cctaagctatcaataaaaaggtggc

SEQ ID NO: 183070 - DNA, 25 bp, Artificial
  probe
  misc_feature (1)..(25): SEQ ID NO: 5043; WAN024EUL_at; Start 118; Stop 142
ctttttatggtacaatggaaacatg

SEQ ID NO: 183071 - DNA, 25 bp, Artificial
  probe
  misc_feature (1)..(25): SEQ ID NO: 5043; WAN024EUL_at; Start 41; Stop 65
agctatcaataaaaaggtggcattt

SEQ ID NO: 183072 - DNA, 25 bp, Artificial
  probe
  misc_feature (1)..(25): SEQ ID NO: 5043; WAN024EUL_at; Start 2; Stop 26
tgacctatagtcacatctatcaagt

SEQ ID NO: 183073 - DNA, 25 bp, Artificial
  probe
  misc_feature (1)..(25): SEQ ID NO: 5043; WAN024EUL_at; Start 58; Stop 82
tggcattttttaggcttggtgttag

SEQ ID NO: 183074 - DNA, 25 bp, Artificial
  probe
  misc_feature (1)..(25): SEQ ID NO: 5043; WAN024EUL_at; Start 121; Stop 145
tttatggtacaatggaaacatgtta

SEQ ID NO: 183075 - DNA, 25 bp, Artificial
  probe
  misc_feature (1)..(25): SEQ ID NO: 5043; WAN024EUL_at; Start 86; Stop 110
attttgccttatcctatctaagtca

SEQ ID NO: 183076 - DNA, 25 bp, Artificial
  probe
  misc_feature (1)..(25): SEQ ID NO: 5043; WAN024EUL_at; Start 9; Stop 33
tagtcacatctatcaagtattgttc

SEQ ID NO: 183077 - DNA, 25 bp, Artificial
  probe
  misc_feature (1)..(25): SEQ ID NO: 5043; WAN024EUL_at; Start 33; Stop 57
cttgcctaagctatcaataaaaagg

SEQ ID NO: 183078 - DNA, 25 bp, Artificial
  probe
  misc_feature (1)..(25): SEQ ID NO: 5043; WAN024EUL_at; Start 19; Stop 43
tatcaagtattgttcttgcctaagc

SEQ ID NO: 183079 - DNA, 25 bp, Artificial
  probe
  misc_feature (1)..(25): SEQ ID NO: 5043; WAN024EUL_at; Start 126; Stop 150
ggtacaatggaaacatgttattcaa

SEQ ID NO: 183080 - DNA, 25 bp, Artificial
  probe
  misc_feature (1)..(25): SEQ ID NO: 5043; WAN024EUL_at; Start 30; Stop 54
gttcttgcctaagctatcaataaaa

SEQ ID NO: 183081 - DNA, 25 bp, Artificial
  probe
  misc_feature (1)..(25): SEQ ID NO: 5043; WAN024EUL_at; Start 14; Stop 38
acatctatcaagtattgttcttgcc

SEQ ID NO: 183082 - DNA, 25 bp, Artificial
  probe
  misc_feature (1)..(25): SEQ ID NO: 5043; WAN024EUL_at; Start 29; Stop 53
tgttcttgcctaagctatcaataaa

SEQ ID NO: 183083 - DNA, 25 bp, Artificial
  probe
  misc_feature (1)..(25): SEQ ID NO: 5043; WAN024EUL_at; Start 128; Stop 152
tacaatggaaacatgttattcaaat

SEQ ID NO: 183084 - DNA, 25 bp, Artificial
  probe
  misc_feature (1)..(25): SEQ ID NO: 5043; WAN024EUL_at; Start 35; Stop 59
tgcctaagctatcaataaaaaggtg

SEQ ID NO: 183085 - DNA, 25 bp, Artificial
  probe
  misc_feature (1)..(25): SEQ ID NO: 5043; WAN024EUL_at; Start 24; Stop 48
agtattgttcttgcctaagctatca

SEQ ID NO: 183086 - DNA, 25 bp, Artificial
  probe
  misc_feature (1)..(25): SEQ ID NO: 7461; WAN024EUM_at; Start 112; Stop 136
gatgagtttgttagtggcctcaagt

SEQ ID NO: 183087 - DNA, 25 bp, Artificial
  probe
  misc_feature (1)..(25): SEQ ID NO: 7461; WAN024EUM_at; Start 115; Stop 139
gagtttgttagtggcctcaagttta

SEQ ID NO: 183088 - DNA, 25 bp, Artificial
  probe
  misc_feature (1)..(25): SEQ ID NO: 7461; WAN024EUM_at; Start 98; Stop 122
cgcttgatgtctttgatgagtttgt

SEQ ID NO: 183089 - DNA, 25 bp, Artificial
  probe
  misc_feature (1)..(25): SEQ ID NO: 7461; WAN024EUM_at; Start 188; Stop 212
caaataaatgtgctcaaagtggttt

SEQ ID NO: 183090 - DNA, 25 bp, Artificial
  probe
  misc_feature (1)..(25): SEQ ID NO: 7461; WAN024EUM_at; Start 132; Stop 156
caagtttagcgttagaataaggcaa

SEQ ID NO: 183091 - DNA, 25 bp, Artificial
  probe
  misc_feature (1)..(25): SEQ ID NO: 7461; WAN024EUM_at; Start 91; Stop 115
ggcattgcgcttgatgtctttgatg

SEQ ID NO: 183092 - DNA, 25 bp, Artificial
  probe
  misc_feature (1)..(25): SEQ ID NO: 7461; WAN024EUM_at; Start 146; Stop 170
gaataaggcaattcaatggcgttag

SEQ ID NO: 183093 - DNA, 25 bp, Artificial
  probe
  misc_feature (1)..(25): SEQ ID NO: 7461; WAN024EUM_at; Start 144; Stop 168
tagaataaggcaattcaatggcgtt

SEQ ID NO: 183094 - DNA, 25 bp, Artificial
  probe
  misc_feature (1)..(25): SEQ ID NO: 7461; WAN024EUM_at; Start 130; Stop 154
ctcaagtttagcgttagaataaggc

SEQ ID NO: 183095 - DNA, 25 bp, Artificial
  probe
  misc_feature (1)..(25): SEQ ID NO: 7461; WAN024EUM_at; Start 126; Stop 150
tggcctcaagtttagcgttagaata

SEQ ID NO: 183096 - DNA, 25 bp, Artificial
  probe
  misc_feature (1)..(25): SEQ ID NO: 7461; WAN024EUM_at; Start 135; Stop 159
gtttagcgttagaataaggcaattc

SEQ ID NO: 183097 - DNA, 25 bp, Artificial
  probe
  misc_feature (1)..(25): SEQ ID NO: 7461; WAN024EUM_at; Start 111; Stop 135
tgatgagtttgttagtggcctcaag

SEQ ID NO: 183098 - DNA, 25 bp, Artificial
  probe
  misc_feature (1)..(25): SEQ ID NO: 7461; WAN024EUM_at; Start 159; Stop 183
caatggcgttagtgatgtagttttt

SEQ ID NO: 183099 - DNA, 25 bp, Artificial
  probe
  misc_feature (1)..(25): SEQ ID NO: 7461; WAN024EUM_at; Start 140; Stop 164
gcgttagaataaggcaattcaatgg

SEQ ID NO: 183100 - DNA, 25 bp, Artificial
  probe
  misc_feature (1)..(25): SEQ ID NO: 7461; WAN024EUM_at; Start 198; Stop 222
tgctcaaagtggttttaaaggtgcg

SEQ ID NO: 183101 - DNA, 25 bp, Artificial
  probe
  misc_feature (1)..(25): SEQ ID NO: 7461; WAN024EUM_at; Start 124; Stop 148
agtggcctcaagtttagcgttagaa

SEQ ID NO: 183102 - DNA, 25 bp, Artificial
  probe
  misc_feature (1)..(25): SEQ ID NO: 7461; WAN024EUM_at; Start 213; Stop 237
taaaggtgcggttgagatgaggtaa

SEQ ID NO: 183103 - DNA, 25 bp, Artificial
  probe
  misc_feature (1)..(25): SEQ ID NO: 7461; WAN024EUM_at; Start 178; Stop 202
gtttttatagcaaataaatgtgctc

SEQ ID NO: 183104 - DNA, 25 bp, Artificial
  probe
  misc_feature (1)..(25): SEQ ID NO: 7461; WAN024EUM_at; Start 165; Stop 189
cgttagtgatgtagtttttatagca

SEQ ID NO: 183105 - DNA, 25 bp, Artificial
  probe
  misc_feature (1)..(25): SEQ ID NO: 7461; WAN024EUM_at; Start 194; Stop 218
aatgtgctcaaagtggttttaaagg

SEQ ID NO: 183106 - DNA, 25 bp, Artificial
  probe
  misc_feature (1)..(25): SEQ ID NO: 7461; WAN024EUM_at; Start 185; Stop 209
tagcaaataaatgtgctcaaagtgg

SEQ ID NO: 183107 - DNA, 25 bp, Artificial
  probe
  misc_feature (1)..(25): SEQ ID NO: 7461; WAN024EUM_at; Start 128; Stop 152
gcctcaagtttagcgttagaataag

SEQ ID NO: 183108 - DNA, 25 bp, Artificial
  probe
  misc_feature (1)..(25): SEQ ID NO: 7461; WAN024EUM_at; Start 154; Stop 178
caattcaatggcgttagtgatgtag

SEQ ID NO: 183109 - DNA, 25 bp, Artificial
  probe
  misc_feature (1)..(25): SEQ ID NO: 7461; WAN024EUM_at; Start 107; Stop 131
tctttgatgagtttgttagtggcct

SEQ ID NO: 183110 - DNA, 25 bp, Artificial
  probe
  misc_feature (1)..(25): SEQ ID NO: 7461; WAN024EUM_at; Start 118; Stop 142
tttgttagtggcctcaagtttagcg

SEQ ID NO: 183111 - DNA, 25 bp, Artificial
  probe
  misc_feature (1)..(25): SEQ ID NO: 7461; WAN024EUM_at; Start 151; Stop 175
aggcaattcaatggcgttagtgatg

SEQ ID NO: 183112 - DNA, 25 bp, Artificial
  probe
  misc_feature (1)..(25): SEQ ID NO: 7461; WAN024EUM_at; Start 95; Stop 119
ttgcgcttgatgtctttgatgagtt

SEQ ID NO: 183113 - DNA, 25 bp, Artificial
  probe
  misc_feature (1)..(25): SEQ ID NO: 7461; WAN024EUM_at; Start 123; Stop 147
tagtggcctcaagtttagcgttaga

SEQ ID NO: 183114 - DNA, 25 bp, Artificial
  probe
  misc_feature (1)..(25): SEQ ID NO: 7461; WAN024EUM_at; Start 142; Stop 166
gttagaataaggcaattcaatggcg

SEQ ID NO: 183115 - DNA, 25 bp, Artificial
  probe
  misc_feature (1)..(25): SEQ ID NO: 7461; WAN024EUM_at; Start 120; Stop 144
tgttagtggcctcaagtttagcgtt

SEQ ID NO: 183116 - DNA, 25 bp, Artificial
  probe
  misc_feature (1)..(25): SEQ ID NO: 7461; WAN024EUM_at; Start 108; Stop 132
ctttgatgagtttgttagtggcctc

SEQ ID NO: 183117 - DNA, 25 bp, Artificial
  probe
  misc_feature (1)..(25): SEQ ID NO: 7461; WAN024EUM_at; Start 137; Stop 161
ttagcgttagaataaggcaattcaa

SEQ ID NO: 183118 - DNA, 25 bp, Artificial
  probe
  misc_feature (1)..(25): SEQ ID NO: 7461; WAN024EUM_at; Start 121; Stop 145
gttagtggcctcaagtttagcgtta

SEQ ID NO: 183119 - DNA, 25 bp, Artificial
  probe
  misc_feature (1)..(25): SEQ ID NO: 7461; WAN024EUM_at; Start 149; Stop 173
taaggcaattcaatggcgttagtga

SEQ ID NO: 183120 - DNA, 25 bp, Artificial
  probe
  misc_feature (1)..(25): SEQ ID NO: 7460; WAN024EUN_at; Start 99; Stop 123
gcttgataagtgtaagcgcgtcata

SEQ ID NO: 183121 - DNA, 25 bp, Artificial
  probe
  misc_feature (1)..(25): SEQ ID NO: 7460; WAN024EUN_at; Start 100; Stop 124
cttgataagtgtaagcgcgtcataa

SEQ ID NO: 183122 - DNA, 25 bp, Artificial
  probe
  misc_feature (1)..(25): SEQ ID NO: 7460; WAN024EUN_at; Start 98; Stop 122
cgcttgataagtgtaagcgcgtcat

SEQ ID NO: 183123 - DNA, 25 bp, Artificial
  probe
  misc_feature (1)..(25): SEQ ID NO: 7460; WAN024EUN_at; Start 92; Stop 116
gcattgcgcttgataagtgtaagcg

SEQ ID NO: 183124 - DNA, 25 bp, Artificial
  probe
  misc_feature (1)..(25): SEQ ID NO: 7460; WAN024EUN_at; Start 94; Stop 118
attgcgcttgataagtgtaagcgcg

SEQ ID NO: 183125 - DNA, 25 bp, Artificial
  probe
  misc_feature (1)..(25): SEQ ID NO: 7460; WAN024EUN_at; Start 96; Stop 120
tgcgcttgataagtgtaagcgcgtc

SEQ ID NO: 183126 - DNA, 25 bp, Artificial
  probe
  misc_feature (1)..(25): SEQ ID NO: 7460; WAN024EUN_at; Start 93; Stop 117
cattgcgcttgataagtgtaagcgc

SEQ ID NO: 183127 - DNA, 25 bp, Artificial
  probe
  misc_feature (1)..(25): SEQ ID NO: 7460; WAN024EUN_at; Start 91; Stop 115
ggcattgcgcttgataagtgtaagc

SEQ ID NO: 183128 - DNA, 25 bp, Artificial
  probe
  misc_feature (1)..(25): SEQ ID NO: 7460; WAN024EUN_at; Start 95; Stop 119
ttgcgcttgataagtgtaagcgcgt

SEQ ID NO: 183129 - DNA, 25 bp, Artificial
  probe
  misc_feature (1)..(25): SEQ ID NO: 7460; WAN024EUN_at; Start 97; Stop 121
gcgcttgataagtgtaagcgcgtca

SEQ ID NO: 183130 - DNA, 25 bp, Artificial
  probe
  misc_feature (1)..(25): SEQ ID NO: 6775; WAN024EUO_s_at; Start 532; Stop 556
ccaaaagaatttgaactcttgctct

SEQ ID NO: 183131 - DNA, 25 bp, Artificial
  probe
  misc_feature (1)..(25): SEQ ID NO: 6775; WAN024EUO_s_at; Start 651; Stop 675
cgttcatattggtaagttgagggaa

SEQ ID NO: 183132 - DNA, 25 bp, Artificial
  probe
  misc_feature (1)..(25): SEQ ID NO: 6775; WAN024EUO_s_at; Start 306; Stop 330
tgataaggttttggccttggaatta

SEQ ID NO: 183133 - DNA, 25 bp, Artificial
  probe
  misc_feature (1)..(25): SEQ ID NO: 6775; WAN024EUO_s_at; Start 621; Stop 645
tgactttgggcaggaaacacgtttg

SEQ ID NO: 183134 - DNA, 25 bp, Artificial
  probe
  misc_feature (1)..(25): SEQ ID NO: 6775; WAN024EUO_s_at; Start 228; Stop 252
catggaagtttgtaagcggctgaga

SEQ ID NO: 183135 - DNA, 25 bp, Artificial
  probe
  misc_feature (1)..(25): SEQ ID NO: 6775; WAN024EUO_s_at; Start 573; Stop 597
caacatgacactgactagagagcgt

SEQ ID NO: 183136 - DNA, 25 bp, Artificial
  probe
  misc_feature (1)..(25): SEQ ID NO: 6775; WAN024EUO_s_at; Start 194; Stop 218
tcttgcttgatatcatgttaccaca

SEQ ID NO: 183137 - DNA, 25 bp, Artificial
  probe
  misc_feature (1)..(25): SEQ ID NO: 6775; WAN024EUO_s_at; Start 286; Stop 310
tctgcgaaaagtgatgaatttgata

SEQ ID NO: 183138 - DNA, 25 bp, Artificial
  probe
  misc_feature (1)..(25): SEQ ID NO: 6775; WAN024EUO_s_at; Start 163; Stop 187
gctttggcagaaacagaaccctttg

SEQ ID NO: 183139 - DNA, 25 bp, Artificial
  probe
  misc_feature (1)..(25): SEQ ID NO: 6775; WAN024EUO_s_at; Start 251; Stop 275
gagccaaaggcgtcaaaactccaat

SEQ ID NO: 183140 - DNA, 25 bp, Artificial
  probe
  misc_feature (1)..(25): SEQ ID NO: 6775; WAN024EUO_s_at; Start 544; Stop 568
gaactcttgctctatcttatgaaac

SEQ ID NO: 183141 - DNA, 25 bp, Artificial
  probe
  misc_feature (1)..(25): SEQ ID NO: 6775; WAN024EUO_s_at; Start 209; Stop 233
tgttaccacaattagatggcatgga

SEQ ID NO: 183142 - DNA, 25 bp, Artificial
  probe
  misc_feature (1)..(25): SEQ ID NO: 6775; WAN024EUO_s_at; Start 561; Stop 585
tatgaaacatcccaacatgacactg

SEQ ID NO: 183143 - DNA, 25 bp, Artificial
  probe
  misc_feature (1)..(25): SEQ ID NO: 6775; WAN024EUO_s_at; Start 359; Stop 383
ttagccctagagaattgctggcgcg

SEQ ID NO: 183144 - DNA, 25 bp, Artificial
  probe
  misc_feature (1)..(25): SEQ ID NO: 6775; WAN024EUO_s_at; Start 366; Stop 390
tagagaattgctggcgcgtgtcaag

SEQ ID NO: 183145 - DNA, 25 bp, Artificial
  probe
  misc_feature (1)..(25): SEQ ID NO: 6775; WAN024EUO_s_at; Start 153; Stop 177
gaaggccttagctttggcagaaaca

SEQ ID NO: 183146 - DNA, 25 bp, Artificial
  probe
  misc_feature (1)..(25): SEQ ID NO: 6775; WAN024EUO_s_at; Start 616; Stop 640
gggtatgactttgggcaggaaacac

SEQ ID NO: 183147 - DNA, 25 bp, Artificial
  probe
  misc_feature (1)..(25): SEQ ID NO: 6775; WAN024EUO_s_at; Start 178; Stop 202
gaaccctttgattttatcttgcttg

SEQ ID NO: 183148 - DNA, 25 bp, Artificial
  probe
  misc_feature (1)..(25): SEQ ID NO: 6775; WAN024EUO_s_at; Start 700; Stop 724
cctcaatttattcgaaccattcggg

SEQ ID NO: 183149 - DNA, 25 bp, Artificial
  probe
  misc_feature (1)..(25): SEQ ID NO: 6775; WAN024EUO_s_at; Start 259; Stop 283
ggcgtcaaaactccaattatgatgg

SEQ ID NO: 183150 - DNA, 25 bp, Artificial
  probe
  misc_feature (1)..(25): SEQ ID NO: 6775; WAN024EUO_s_at; Start 667; Stop 691
ttgagggaaaaaattgaagacaatc

SEQ ID NO: 183151 - DNA, 25 bp, Artificial
  probe
  misc_feature (1)..(25): SEQ ID NO: 6775; WAN024EUO_s_at; Start 682; Stop 706
gaagacaatcctaaagcccctcaat

SEQ ID NO: 183152 - DNA, 25 bp, Artificial
  probe
  misc_feature (1)..(25): SEQ ID NO: 6775; WAN024EUO_s_at; Start 272; Stop 296
caattatgatggtttctgcgaaaag

SEQ ID NO: 183153 - DNA, 25 bp, Artificial
  probe
  misc_feature (1)..(25): SEQ ID NO: 6775; WAN024EUO_s_at; Start 114; Stop 138
taaggaaggcttttctactcaattg

SEQ ID NO: 183154 - DNA, 25 bp, Artificial
  probe
  misc_feature (1)..(25): SEQ ID NO: 6775; WAN024EUO_s_at; Start 142; Stop 166
acaaatggacggaaggccttagctt

SEQ ID NO: 183155 - DNA, 25 bp, Artificial
  probe
  misc_feature (1)..(25): SEQ ID NO: 6775; WAN024EUO_s_at; Start 634; Stop 658
gaaacacgtttggtggacgttcata

SEQ ID NO: 183156 - DNA, 25 bp, Artificial
  probe
  misc_feature (1)..(25): SEQ ID NO: 6775; WAN024EUO_s_at; Start 221; Stop 245
tagatggcatggaagtttgtaagcg

SEQ ID NO: 183157 - DNA, 25 bp, Artificial
  probe
  misc_feature (1)..(25): SEQ ID NO: 6775; WAN024EUO_s_at; Start 99; Stop 123
tgactaccatttaagtaaggaaggc

SEQ ID NO: 183158 - DNA, 25 bp, Artificial
  probe
  misc_feature (1)..(25): SEQ ID NO: 6775; WAN024EUO_s_at; Start 726; Stop 750
ttatggttataagttcaaggagtta

SEQ ID NO: 183159 - DNA, 25 bp, Artificial
  probe
  misc_feature (1)..(25): SEQ ID NO: 6775; WAN024EUO_s_at; Start 240; Stop 264
taagcggctgagagccaaaggcgtc

SEQ ID NO: 183160 - DNA, 25 bp, Artificial
  probe
  misc_feature (1)..(25): SEQ ID NO: 6775; WAN024EUO_s_at; Start 348; Stop 372
gaccaagccttttagccctagagaa

SEQ ID NO: 183161 - DNA, 25 bp, Artificial
  probe
  misc_feature (1)..(25): SEQ ID NO: 6775; WAN024EUO_s_at; Start 334; Stop 358
gctgatgactacctgaccaagcctt

SEQ ID NO: 183162 - DNA, 25 bp, Artificial
  probe
  misc_feature (1)..(25): SEQ ID NO: 6775; WAN024EUO_s_at; Start 592; Stop 616
gagcgtcttttggaacgtatctggg

SEQ ID NO: 183163 - DNA, 25 bp, Artificial
  probe
  misc_feature (1)..(25): SEQ ID NO: 6775; WAN024EUO_s_at; Start 581; Stop 605
cactgactagagagcgtcttttgga

SEQ ID NO: 183164 - DNA, 25 bp, Artificial
  probe
  misc_feature (1)..(25): SEQ ID NO: 7399; WAN024EUP_at; Start 186; Stop 210
ttcccttagtgaaggcatactcatc

SEQ ID NO: 183165 - DNA, 25 bp, Artificial
  probe
  misc_feature (1)..(25): SEQ ID NO: 7399; WAN024EUP_at; Start 211; Stop 235
ccaagacataatctttggaagccga

SEQ ID NO: 183166 - DNA, 25 bp, Artificial
  probe
  misc_feature (1)..(25): SEQ ID NO: 7399; WAN024EUP_at; Start 181; Stop 205
catctttcccttagtgaaggcatac

SEQ ID NO: 183167 - DNA, 25 bp, Artificial
  probe
  misc_feature (1)..(25): SEQ ID NO: 7399; WAN024EUP_at; Start 218; Stop 242
ataatctttggaagccgagaaaaat

SEQ ID NO: 183168 - DNA, 25 bp, Artificial
  probe
  misc_feature (1)..(25): SEQ ID NO: 7399; WAN024EUP_at; Start 135; Stop 159
gaacagtgataatattaagattatc

SEQ ID NO: 183169 - DNA, 25 bp, Artificial
  probe
  misc_feature (1)..(25): SEQ ID NO: 7399; WAN024EUP_at; Start 183; Stop 207
tctttcccttagtgaaggcatactc

SEQ ID NO: 183170 - DNA, 25 bp, Artificial
  probe
  misc_feature (1)..(25): SEQ ID NO: 7399; WAN024EUP_at; Start 180; Stop 204
tcatctttcccttagtgaaggcata

SEQ ID NO: 183171 - DNA, 25 bp, Artificial
  probe
  misc_feature (1)..(25): SEQ ID NO: 7399; WAN024EUP_at; Start 187; Stop 211
tcccttagtgaaggcatactcatcc

SEQ ID NO: 183172 - DNA, 25 bp, Artificial
  probe
  misc_feature (1)..(25): SEQ ID NO: 7399; WAN024EUP_at; Start 215; Stop 239
gacataatctttggaagccgagaaa

SEQ ID NO: 183173 - DNA, 25 bp, Artificial
  probe
  misc_feature (1)..(25): SEQ ID NO: 7399; WAN024EUP_at; Start 219; Stop 243
taatctttggaagccgagaaaaatc

SEQ ID NO: 183174 - DNA, 25 bp, Artificial
  probe
  misc_feature (1)..(25): SEQ ID NO: 7399; WAN024EUP_at; Start 179; Stop 203
ctcatctttcccttagtgaaggcat

SEQ ID NO: 183175 - DNA, 25 bp, Artificial
  probe
  misc_feature (1)..(25): SEQ ID NO: 7399; WAN024EUP_at; Start 185; Stop 209
tttcccttagtgaaggcatactcat

SEQ ID NO: 183176 - DNA, 25 bp, Artificial
  probe
  misc_feature (1)..(25): SEQ ID NO: 7399; WAN024EUP_at; Start 182; Stop 206
atctttcccttagtgaaggcatact

SEQ ID NO: 183177 - DNA, 25 bp, Artificial
  probe
  misc_feature (1)..(25): SEQ ID NO: 7399; WAN024EUP_at; Start 189; Stop 213
ccttagtgaaggcatactcatccca

SEQ ID NO: 183178 - DNA, 25 bp, Artificial
  probe
  misc_feature (1)..(25): SEQ ID NO: 7399; WAN024EUP_at; Start 224; Stop 248
tttggaagccgagaaaaatcatgct

SEQ ID NO: 183179 - DNA, 25 bp, Artificial
  probe
  misc_feature (1)..(25): SEQ ID NO: 7399; WAN024EUP_at; Start 217; Stop 241
cataatctttggaagccgagaaaaa

SEQ ID NO: 183180 - DNA, 25 bp, Artificial
  probe
  misc_feature (1)..(25): SEQ ID NO: 7399; WAN024EUP_at; Start 223; Stop 247
ctttggaagccgagaaaaatcatgc

SEQ ID NO: 183181 - DNA, 25 bp, Artificial
  probe
  misc_feature (1)..(25): SEQ ID NO: 7399; WAN024EUP_at; Start 214; Stop 238
agacataatctttggaagccgagaa

SEQ ID NO: 183182 - DNA, 25 bp, Artificial
  probe
  misc_feature (1)..(25): SEQ ID NO: 7399; WAN024EUP_at; Start 178; Stop 202
actcatctttcccttagtgaaggca

SEQ ID NO: 183183 - DNA, 25 bp, Artificial
  probe
  misc_feature (1)..(25): SEQ ID NO: 7399; WAN024EUP_at; Start 173; Stop 197
atgaaactcatctttcccttagtga

SEQ ID NO: 183184 - DNA, 25 bp, Artificial
  probe
  misc_feature (1)..(25): SEQ ID NO: 7399; WAN024EUP_at; Start 175; Stop 199
gaaactcatctttcccttagtgaag

SEQ ID NO: 183185 - DNA, 25 bp, Artificial
  probe
  misc_feature (1)..(25): SEQ ID NO: 7399; WAN024EUP_at; Start 184; Stop 208
ctttcccttagtgaaggcatactca

SEQ ID NO: 183186 - DNA, 25 bp, Artificial
  probe
  misc_feature (1)..(25): SEQ ID NO: 7399; WAN024EUP_at; Start 216; Stop 240
acataatctttggaagccgagaaaa

SEQ ID NO: 183187 - DNA, 25 bp, Artificial
  probe
  misc_feature (1)..(25): SEQ ID NO: 7399; WAN024EUP_at; Start 190; Stop 214
cttagtgaaggcatactcatcccaa

SEQ ID NO: 183188 - DNA, 25 bp, Artificial
  probe
  misc_feature (1)..(25): SEQ ID NO: 7399; WAN024EUP_at; Start 148; Stop 172
attaagattatcaaaatcttgcgca

SEQ ID NO: 183189 - DNA, 25 bp, Artificial
  probe
  misc_feature (1)..(25): SEQ ID NO: 7399; WAN024EUP_at; Start 225; Stop 249
ttggaagccgagaaaaatcatgctc

SEQ ID NO: 183190 - DNA, 25 bp, Artificial
  probe
  misc_feature (1)..(25): SEQ ID NO: 7399; WAN024EUP_at; Start 176; Stop 200
aaactcatctttcccttagtgaagg

SEQ ID NO: 183191 - DNA, 25 bp, Artificial
  probe
  misc_feature (1)..(25): SEQ ID NO: 7399; WAN024EUP_at; Start 213; Stop 237
aagacataatctttggaagccgaga

SEQ ID NO: 183192 - DNA, 25 bp, Artificial
  probe
  misc_feature (1)..(25): SEQ ID NO: 7399; WAN024EUP_at; Start 212; Stop 236
caagacataatctttggaagccgag

SEQ ID NO: 183193 - DNA, 25 bp, Artificial
  probe
  misc_feature (1)..(25): SEQ ID NO: 7399; WAN024EUP_at; Start 147; Stop 171
tattaagattatcaaaatcttgcgc

SEQ ID NO: 183194 - DNA, 25 bp, Artificial
  probe
  misc_feature (1)..(25): SEQ ID NO: 7399; WAN024EUP_at; Start 174; Stop 198
tgaaactcatctttcccttagtgaa

SEQ ID NO: 183195 - DNA, 25 bp, Artificial
  probe
  misc_feature (1)..(25): SEQ ID NO: 7399; WAN024EUP_at; Start 172; Stop 196
aatgaaactcatctttcccttagtg

SEQ ID NO: 183196 - DNA, 25 bp, Artificial
  probe
  misc_feature (1)..(25): SEQ ID NO: 7399; WAN024EUP_at; Start 226; Stop 250
tggaagccgagaaaaatcatgctca

SEQ ID NO: 183197 - DNA, 25 bp, Artificial
  probe
  misc_feature (1)..(25): SEQ ID NO: 7399; WAN024EUP_at; Start 222; Stop 246
tctttggaagccgagaaaaatcatg

SEQ ID NO: 183198 - DNA, 25 bp, Artificial
  probe
  misc_feature (1)..(25): SEQ ID NO: 6616; WAN024EUQ_at; Start 74; Stop 98
tcattaaattcctcaaacgcaacgc

SEQ ID NO: 183199 - DNA, 25 bp, Artificial
  probe
  misc_feature (1)..(25): SEQ ID NO: 6616; WAN024EUQ_at; Start 52; Stop 76
acattagaagcgactaataatctca

SEQ ID NO: 183200 - DNA, 25 bp, Artificial
  probe
  misc_feature (1)..(25): SEQ ID NO: 6616; WAN024EUQ_at; Start 54; Stop 78
attagaagcgactaataatctcatt

SEQ ID NO: 183201 - DNA, 25 bp, Artificial
  probe
  misc_feature (1)..(25): SEQ ID NO: 6616; WAN024EUQ_at; Start 76; Stop 100
attaaattcctcaaacgcaacgcct

SEQ ID NO: 183202 - DNA, 25 bp, Artificial
  probe
  misc_feature (1)..(25): SEQ ID NO: 6616; WAN024EUQ_at; Start 60; Stop 84
agcgactaataatctcattaaattc

SEQ ID NO: 183203 - DNA, 25 bp, Artificial
  probe
  misc_feature (1)..(25): SEQ ID NO: 6616; WAN024EUQ_at; Start 56; Stop 80
tagaagcgactaataatctcattaa

SEQ ID NO: 183204 - DNA, 25 bp, Artificial
  probe
  misc_feature (1)..(25): SEQ ID NO: 6616; WAN024EUQ_at; Start 42; Stop 66
ttgggcggttacattagaagcgact

SEQ ID NO: 183205 - DNA, 25 bp, Artificial
  probe
  misc_feature (1)..(25): SEQ ID NO: 6616; WAN024EUQ_at; Start 47; Stop 71
cggttacattagaagcgactaataa

SEQ ID NO: 183206 - DNA, 25 bp, Artificial
  probe
  misc_feature (1)..(25): SEQ ID NO: 6616; WAN024EUQ_at; Start 81; Stop 105
attcctcaaacgcaacgcctttggt

SEQ ID NO: 183207 - DNA, 25 bp, Artificial
  probe
  misc_feature (1)..(25): SEQ ID NO: 6616; WAN024EUQ_at; Start 71; Stop 95
atctcattaaattcctcaaacgcaa

SEQ ID NO: 183208 - DNA, 25 bp, Artificial
  probe
  misc_feature (1)..(25): SEQ ID NO: 6616; WAN024EUQ_at; Start 73; Stop 97
ctcattaaattcctcaaacgcaacg

SEQ ID NO: 183209 - DNA, 25 bp, Artificial
  probe
  misc_feature (1)..(25): SEQ ID NO: 6616; WAN024EUQ_at; Start 62; Stop 86
cgactaataatctcattaaattcct

SEQ ID NO: 183210 - DNA, 25 bp, Artificial
  probe
  misc_feature (1)..(25): SEQ ID NO: 6616; WAN024EUQ_at; Start 46; Stop 70
gcggttacattagaagcgactaata

SEQ ID NO: 183211 - DNA, 25 bp, Artificial
  probe
  misc_feature (1)..(25): SEQ ID NO: 6616; WAN024EUQ_at; Start 72; Stop 96
tctcattaaattcctcaaacgcaac

SEQ ID NO: 183212 - DNA, 25 bp, Artificial
  probe
  misc_feature (1)..(25): SEQ ID NO: 6616; WAN024EUQ_at; Start 39; Stop 63
ttattgggcggttacattagaagcg

SEQ ID NO: 183213 - DNA, 25 bp, Artificial
  probe
  misc_feature (1)..(25): SEQ ID NO: 6616; WAN024EUQ_at; Start 63; Stop 87
gactaataatctcattaaattcctc

SEQ ID NO: 183214 - DNA, 25 bp, Artificial
  probe
  misc_feature (1)..(25): SEQ ID NO: 6616; WAN024EUQ_at; Start 69; Stop 93
taatctcattaaattcctcaaacgc

SEQ ID NO: 183215 - DNA, 25 bp, Artificial
  probe
  misc_feature (1)..(25): SEQ ID NO: 6616; WAN024EUQ_at; Start 48; Stop 72
ggttacattagaagcgactaataat

SEQ ID NO: 183216 - DNA, 25 bp, Artificial
  probe
  misc_feature (1)..(25): SEQ ID NO: 6616; WAN024EUQ_at; Start 55; Stop 79
ttagaagcgactaataatctcatta

SEQ ID NO: 183217 - DNA, 25 bp, Artificial
  probe
  misc_feature (1)..(25): SEQ ID NO: 6616; WAN024EUQ_at; Start 75; Stop 99
cattaaattcctcaaacgcaacgcc

SEQ ID NO: 183218 - DNA, 25 bp, Artificial
  probe
  misc_feature (1)..(25): SEQ ID NO: 6616; WAN024EUQ_at; Start 53; Stop 77
cattagaagcgactaataatctcat

SEQ ID NO: 183219 - DNA, 25 bp, Artificial
  probe
  misc_feature (1)..(25): SEQ ID NO: 6616; WAN024EUQ_at; Start 57; Stop 81
agaagcgactaataatctcattaaa

SEQ ID NO: 183220 - DNA, 25 bp, Artificial
  probe
  misc_feature (1)..(25): SEQ ID NO: 6616; WAN024EUQ_at; Start 49; Stop 73
gttacattagaagcgactaataatc

SEQ ID NO: 183221 - DNA, 25 bp, Artificial
  probe
  misc_feature (1)..(25): SEQ ID NO: 6616; WAN024EUQ_at; Start 51; Stop 75
tacattagaagcgactaataatctc

SEQ ID NO: 183222 - DNA, 25 bp, Artificial
  probe
  misc_feature (1)..(25): SEQ ID NO: 6616; WAN024EUQ_at; Start 58; Stop 82
gaagcgactaataatctcattaaat

SEQ ID NO: 183223 - DNA, 25 bp, Artificial
  probe
  misc_feature (1)..(25): SEQ ID NO: 6616; WAN024EUQ_at; Start 44; Stop 68
gggcggttacattagaagcgactaa

SEQ ID NO: 183224 - DNA, 25 bp, Artificial
  probe
  misc_feature (1)..(25): SEQ ID NO: 6616; WAN024EUQ_at; Start 70; Stop 94
aatctcattaaattcctcaaacgca

SEQ ID NO: 183225 - DNA, 25 bp, Artificial
  probe
  misc_feature (1)..(25): SEQ ID NO: 6616; WAN024EUQ_at; Start 59; Stop 83
aagcgactaataatctcattaaatt

SEQ ID NO: 183226 - DNA, 25 bp, Artificial
  probe
  misc_feature (1)..(25): SEQ ID NO: 6616; WAN024EUQ_at; Start 43; Stop 67
tgggcggttacattagaagcgacta

SEQ ID NO: 183227 - DNA, 25 bp, Artificial
  probe
  misc_feature (1)..(25): SEQ ID NO: 6616; WAN024EUQ_at; Start 41; Stop 65
attgggcggttacattagaagcgac

SEQ ID NO: 183228 - DNA, 25 bp, Artificial
  probe
  misc_feature (1)..(25): SEQ ID NO: 6616; WAN024EUQ_at; Start 61; Stop 85
gcgactaataatctcattaaattcc

SEQ ID NO: 183229 - DNA, 25 bp, Artificial
  probe
  misc_feature (1)..(25): SEQ ID NO: 6616; WAN024EUQ_at; Start 79; Stop 103
aaattcctcaaacgcaacgcctttg

SEQ ID NO: 183230 - DNA, 25 bp, Artificial
  probe
  misc_feature (1)..(25): SEQ ID NO: 6616; WAN024EUQ_at; Start 40; Stop 64
tattgggcggttacattagaagcga

SEQ ID NO: 183231 - DNA, 25 bp, Artificial
  probe
  misc_feature (1)..(25): SEQ ID NO: 6616; WAN024EUQ_at; Start 45; Stop 69
ggcggttacattagaagcgactaat

SEQ ID NO: 183232 - DNA, 25 bp, Artificial
  probe
  misc_feature (1)..(25): SEQ ID NO: 7142; WAN024EUR_s_at; Start 98; Stop 122
tgaaagtataccctgagcgtcatga

SEQ ID NO: 183233 - DNA, 25 bp, Artificial
  probe
  misc_feature (1)..(25): SEQ ID NO: 7142; WAN024EUR_s_at; Start 124; Stop 148
gtctacaaggcgaataagttactga

SEQ ID NO: 183234 - DNA, 25 bp, Artificial
  probe
  misc_feature (1)..(25): SEQ ID NO: 7142; WAN024EUR_s_at; Start 46; Stop 70
gaaggagatgattcagataatatcg

SEQ ID NO: 183235 - DNA, 25 bp, Artificial
  probe
  misc_feature (1)..(25): SEQ ID NO: 7142; WAN024EUR_s_at; Start 79; Stop 103
tcttggctatttgggaccttgaaag

SEQ ID NO: 183236 - DNA, 25 bp, Artificial
  probe
  misc_feature (1)..(25): SEQ ID NO: 7142; WAN024EUR_s_at; Start 146; Stop 170
tgagtttgaccccaaaagaatttga

SEQ ID NO: 183237 - DNA, 25 bp, Artificial
  probe
  misc_feature (1)..(25): SEQ ID NO: 7142; WAN024EUR_s_at; Start 73; Stop 97
gacgattcttggctatttgggacct

SEQ ID NO: 183238 - DNA, 25 bp, Artificial
  probe
  misc_feature (1)..(25): SEQ ID NO: 7142; WAN024EUR_s_at; Start 127; Stop 151
tacaaggcgaataagttactgagtt

SEQ ID NO: 183239 - DNA, 25 bp, Artificial
  probe
  misc_feature (1)..(25): SEQ ID NO: 7142; WAN024EUR_s_at; Start 95; Stop 119
ccttgaaagtataccctgagcgtca

SEQ ID NO: 183240 - DNA, 25 bp, Artificial
  probe
  misc_feature (1)..(25): SEQ ID NO: 7142; WAN024EUR_s_at; Start 83; Stop 107
ggctatttgggaccttgaaagtata

SEQ ID NO: 183241 - DNA, 25 bp, Artificial
  probe
  misc_feature (1)..(25): SEQ ID NO: 7142; WAN024EUR_s_at; Start 28; Stop 52
cgaactaaaggagaacaagaaggag

SEQ ID NO: 183242 - DNA, 25 bp, Artificial
  probe
  misc_feature (1)..(25): SEQ ID NO: 7142; WAN024EUR_s_at; Start 1; Stop 25
ctggcgcgtgtcaaggctgtcctca

SEQ ID NO: 183243 - DNA, 25 bp, Artificial
  probe
  misc_feature (1)..(25): SEQ ID NO: 7142; WAN024EUR_s_at; Start 6; Stop 30
gcgtgtcaaggctgtcctcaggcga

SEQ ID NO: 183244 - DNA, 25 bp, Artificial
  probe
  misc_feature (1)..(25): SEQ ID NO: 7142; WAN024EUR_s_at; Start 61; Stop 85
gataatatcgctgacgattcttggc

SEQ ID NO: 183245 - DNA, 25 bp, Artificial
  probe
  misc_feature (1)..(25): SEQ ID NO: 7142; WAN024EUR_s_at; Start 111; Stop 135
tgagcgtcatgaagtctacaaggcg

SEQ ID NO: 183246 - DNA, 25 bp, Artificial
  probe
  misc_feature (1)..(25): SEQ ID NO: 7142; WAN024EUR_s_at; Start 114; Stop 138
gcgtcatgaagtctacaaggcgaat

SEQ ID NO: 183247 - DNA, 25 bp, Artificial
  probe
  misc_feature (1)..(25): SEQ ID NO: 7142; WAN024EUR_s_at; Start 52; Stop 76
gatgattcagataatatcgctgacg

SEQ ID NO: 183248 - DNA, 25 bp, Artificial
  probe
  misc_feature (1)..(25): SEQ ID NO: 7142; WAN024EUR_s_at; Start 100; Stop 124
aaagtataccctgagcgtcatgaag

SEQ ID NO: 183249 - DNA, 25 bp, Artificial
  probe
  misc_feature (1)..(25): SEQ ID NO: 7142; WAN024EUR_s_at; Start 70; Stop 94
gctgacgattcttggctatttggga

SEQ ID NO: 183250 - DNA, 25 bp, Artificial
  probe
  misc_feature (1)..(25): SEQ ID NO: 7142; WAN024EUR_s_at; Start 38; Stop 62
gagaacaagaaggagatgattcaga

SEQ ID NO: 183251 - DNA, 25 bp, Artificial
  probe
  misc_feature (1)..(25): SEQ ID NO: 7142; WAN024EUR_s_at; Start 20; Stop 44
tcctcaggcgaactaaaggagaaca

SEQ ID NO: 183252 - DNA, 25 bp, Artificial
  probe
  misc_feature (1)..(25): SEQ ID NO: 7142; WAN024EUR_s_at; Start 92; Stop 116
ggaccttgaaagtataccctgagcg

SEQ ID NO: 183253 - DNA, 25 bp, Artificial
  probe
  misc_feature (1)..(25): SEQ ID NO: 7142; WAN024EUR_s_at; Start 117; Stop 141
tcatgaagtctacaaggcgaataag

SEQ ID NO: 183254 - DNA, 25 bp, Artificial
  probe
  misc_feature (1)..(25): SEQ ID NO: 7142; WAN024EUR_s_at; Start 106; Stop 130
taccctgagcgtcatgaagtctaca

SEQ ID NO: 183255 - DNA, 25 bp, Artificial
  probe
  misc_feature (1)..(25): SEQ ID NO: 7142; WAN024EUR_s_at; Start 63; Stop 87
taatatcgctgacgattcttggcta

SEQ ID NO: 183256 - DNA, 25 bp, Artificial
  probe
  misc_feature (1)..(25): SEQ ID NO: 7142; WAN024EUR_s_at; Start 76; Stop 100
gattcttggctatttgggaccttga

SEQ ID NO: 183257 - DNA, 25 bp, Artificial
  probe
  misc_feature (1)..(25): SEQ ID NO: 7142; WAN024EUR_s_at; Start 12; Stop 36
caaggctgtcctcaggcgaactaaa

SEQ ID NO: 183258 - DNA, 25 bp, Artificial
  probe
  misc_feature (1)..(25): SEQ ID NO: 7142; WAN024EUR_s_at; Start 135; Stop 159
gaataagttactgagtttgacccca

SEQ ID NO: 183259 - DNA, 25 bp, Artificial
  probe
  misc_feature (1)..(25): SEQ ID NO: 7142; WAN024EUR_s_at; Start 108; Stop 132
ccctgagcgtcatgaagtctacaag

SEQ ID NO: 183260 - DNA, 25 bp, Artificial
  probe
  misc_feature (1)..(25): SEQ ID NO: 7142; WAN024EUR_s_at; Start 14; Stop 38
aggctgtcctcaggcgaactaaagg

SEQ ID NO: 183261 - DNA, 25 bp, Artificial
  probe
  misc_feature (1)..(25): SEQ ID NO: 7142; WAN024EUR_s_at; Start 32; Stop 56
ctaaaggagaacaagaaggagatga

SEQ ID NO: 183262 - DNA, 25 bp, Artificial
  probe
  misc_feature (1)..(25): SEQ ID NO: 7142; WAN024EUR_s_at; Start 104; Stop 128
tataccctgagcgtcatgaagtcta

SEQ ID NO: 183263 - DNA, 25 bp, Artificial
  probe
  misc_feature (1)..(25): SEQ ID NO: 7142; WAN024EUR_s_at; Start 23; Stop 47
tcaggcgaactaaaggagaacaaga

SEQ ID NO: 183264 - DNA, 25 bp, Artificial
  probe
  misc_feature (1)..(25): SEQ ID NO: 7142; WAN024EUR_s_at; Start 17; Stop 41
ctgtcctcaggcgaactaaaggaga

SEQ ID NO: 183265 - DNA, 25 bp, Artificial
  probe
  misc_feature (1)..(25): SEQ ID NO: 7142; WAN024EUR_s_at; Start 9; Stop 33
tgtcaaggctgtcctcaggcgaact

SEQ ID NO: 183266 - DNA, 25 bp, Artificial
  probe
  misc_feature (1)..(25): SEQ ID NO: 6790; WAN024EUS_at; Start 325; Stop 349
cttatcaaacgaaacgcctttggat

SEQ ID NO: 183267 - DNA, 25 bp, Artificial
  probe
  misc_feature (1)..(25): SEQ ID NO: 6790; WAN024EUS_at; Start 318; Stop 342
catcaaacttatcaaacgaaacgcc

SEQ ID NO: 183268 - DNA, 25 bp, Artificial
  probe
  misc_feature (1)..(25): SEQ ID NO: 6790; WAN024EUS_at; Start 142; Stop 166
agtctaatgaagaataaggaaccag

SEQ ID NO: 183269 - DNA, 25 bp, Artificial
  probe
  misc_feature (1)..(25): SEQ ID NO: 6790; WAN024EUS_at; Start 143; Stop 167
gtctaatgaagaataaggaaccaga

SEQ ID NO: 183270 - DNA, 25 bp, Artificial
  probe
  misc_feature (1)..(25): SEQ ID NO: 6790; WAN024EUS_at; Start 141; Stop 165
aagtctaatgaagaataaggaacca

SEQ ID NO: 183271 - DNA, 25 bp, Artificial
  probe
  misc_feature (1)..(25): SEQ ID NO: 6790; WAN024EUS_at; Start 319; Stop 343
atcaaacttatcaaacgaaacgcct

SEQ ID NO: 183272 - DNA, 25 bp, Artificial
  probe
  misc_feature (1)..(25): SEQ ID NO: 6790; WAN024EUS_at; Start 144; Stop 168
tctaatgaagaataaggaaccagag

SEQ ID NO: 183273 - DNA, 25 bp, Artificial
  probe
  misc_feature (1)..(25): SEQ ID NO: 2911; WAN024EUT_at; Start 813; Stop 837
aaagttccttgctgctaaatgggaa

SEQ ID NO: 183274 - DNA, 25 bp, Artificial
  probe
  misc_feature (1)..(25): SEQ ID NO: 2911; WAN024EUT_at; Start 817; Stop 841
ttccttgctgctaaatgggaacccc

SEQ ID NO: 183275 - DNA, 25 bp, Artificial
  probe
  misc_feature (1)..(25): SEQ ID NO: 2911; WAN024EUT_at; Start 822; Stop 846
tgctgctaaatgggaaccccaatta

SEQ ID NO: 183276 - DNA, 25 bp, Artificial
  probe
  misc_feature (1)..(25): SEQ ID NO: 2911; WAN024EUT_at; Start 820; Stop 844
cttgctgctaaatgggaaccccaat

SEQ ID NO: 183277 - DNA, 25 bp, Artificial
  probe
  misc_feature (1)..(25): SEQ ID NO: 2911; WAN024EUT_at; Start 811; Stop 835
gaaaagttccttgctgctaaatggg

SEQ ID NO: 183278 - DNA, 25 bp, Artificial
  probe
  misc_feature (1)..(25): SEQ ID NO: 2911; WAN024EUT_at; Start 821; Stop 845
ttgctgctaaatgggaaccccaatt

SEQ ID NO: 183279 - DNA, 25 bp, Artificial
  probe
  misc_feature (1)..(25): SEQ ID NO: 2911; WAN024EUT_at; Start 823; Stop 847
gctgctaaatgggaaccccaattat

SEQ ID NO: 183280 - DNA, 25 bp, Artificial
  probe
  misc_feature (1)..(25): SEQ ID NO: 2911; WAN024EUT_at; Start 824; Stop 848
ctgctaaatgggaaccccaattatt

SEQ ID NO: 183281 - DNA, 25 bp, Artificial
  probe
  misc_feature (1)..(25): SEQ ID NO: 2911; WAN024EUT_at; Start 809; Stop 833
ctgaaaagttccttgctgctaaatg

SEQ ID NO: 183282 - DNA, 25 bp, Artificial
  probe
  misc_feature (1)..(25): SEQ ID NO: 2911; WAN024EUT_at; Start 825; Stop 849
tgctaaatgggaaccccaattattc

SEQ ID NO: 183283 - DNA, 25 bp, Artificial
  probe
  misc_feature (1)..(25): SEQ ID NO: 2911; WAN024EUT_at; Start 810; Stop 834
tgaaaagttccttgctgctaaatgg

SEQ ID NO: 183284 - DNA, 25 bp, Artificial
  probe
  misc_feature (1)..(25): SEQ ID NO: 2911; WAN024EUT_at; Start 812; Stop 836
aaaagttccttgctgctaaatggga

SEQ ID NO: 183285 - DNA, 25 bp, Artificial
  probe
  misc_feature (1)..(25): SEQ ID NO: 2911; WAN024EUT_at; Start 826; Stop 850
gctaaatgggaaccccaattattca

SEQ ID NO: 183286 - DNA, 25 bp, Artificial
  probe
  misc_feature (1)..(25): SEQ ID NO: 2911; WAN024EUT_at; Start 819; Stop 843
ccttgctgctaaatgggaaccccaa

SEQ ID NO: 183287 - DNA, 25 bp, Artificial
  probe
  misc_feature (1)..(25): SEQ ID NO: 2911; WAN024EUT_at; Start 814; Stop 838
aagttccttgctgctaaatgggaac

SEQ ID NO: 183288 - DNA, 25 bp, Artificial
  probe
  misc_feature (1)..(25): SEQ ID NO: 2911; WAN024EUT_at; Start 816; Stop 840
gttccttgctgctaaatgggaaccc

SEQ ID NO: 183289 - DNA, 25 bp, Artificial
  probe
  misc_feature (1)..(25): SEQ ID NO: 2911; WAN024EUT_at; Start 815; Stop 839
agttccttgctgctaaatgggaacc

SEQ ID NO: 183290 - DNA, 25 bp, Artificial
  probe
  misc_feature (1)..(25): SEQ ID NO: 2911; WAN024EUT_at; Start 818; Stop 842
tccttgctgctaaatgggaacccca

SEQ ID NO: 183291 - DNA, 25 bp, Artificial
  probe
  misc_feature (1)..(25): SEQ ID NO: 2279; WAN024EUU_at; Start 53; Stop 77
ttcttgagagcagaacacaagccat

SEQ ID NO: 183292 - DNA, 25 bp, Artificial
  probe
  misc_feature (1)..(25): SEQ ID NO: 2279; WAN024EUU_at; Start 80; Stop 104
tccgaaatcccatgaatacaaggct

SEQ ID NO: 183293 - DNA, 25 bp, Artificial
  probe
  misc_feature (1)..(25): SEQ ID NO: 2279; WAN024EUU_at; Start 116; Stop 140
ctggaagctcattcaacaagatagt

SEQ ID NO: 183294 - DNA, 25 bp, Artificial
  probe
  misc_feature (1)..(25): SEQ ID NO: 2279; WAN024EUU_at; Start 78; Stop 102
catccgaaatcccatgaatacaagg

SEQ ID NO: 183295 - DNA, 25 bp, Artificial
  probe
  misc_feature (1)..(25): SEQ ID NO: 2279; WAN024EUU_at; Start 110; Stop 134
gcgctactggaagctcattcaacaa

SEQ ID NO: 183296 - DNA, 25 bp, Artificial
  probe
  misc_feature (1)..(25): SEQ ID NO: 2279; WAN024EUU_at; Start 114; Stop 138
tactggaagctcattcaacaagata

SEQ ID NO: 183297 - DNA, 25 bp, Artificial
  probe
  misc_feature (1)..(25): SEQ ID NO: 2279; WAN024EUU_at; Start 17; Stop 41
ttgctcaggactttgataaactcaa

SEQ ID NO: 183298 - DNA, 25 bp, Artificial
  probe
  misc_feature (1)..(25): SEQ ID NO: 2279; WAN024EUU_at; Start 57; Stop 81
tgagagcagaacacaagccatcatc

SEQ ID NO: 183299 - DNA, 25 bp, Artificial
  probe
  misc_feature (1)..(25): SEQ ID NO: 2279; WAN024EUU_at; Start 120; Stop 144
aagctcattcaacaagatagtcaga

SEQ ID NO: 183300 - DNA, 25 bp, Artificial
  probe
  misc_feature (1)..(25): SEQ ID NO: 2279; WAN024EUU_at; Start 59; Stop 83
agagcagaacacaagccatcatccg

SEQ ID NO: 183301 - DNA, 25 bp, Artificial
  probe
  misc_feature (1)..(25): SEQ ID NO: 2279; WAN024EUU_at; Start 15; Stop 39
tattgctcaggactttgataaactc

SEQ ID NO: 183302 - DNA, 25 bp, Artificial
  probe
  misc_feature (1)..(25): SEQ ID NO: 2279; WAN024EUU_at; Start 122; Stop 146
gctcattcaacaagatagtcagaaa

SEQ ID NO: 183303 - DNA, 25 bp, Artificial
  probe
  misc_feature (1)..(25): SEQ ID NO: 2279; WAN024EUU_at; Start 22; Stop 46
caggactttgataaactcaatatca

SEQ ID NO: 183304 - DNA, 25 bp, Artificial
  probe
  misc_feature (1)..(25): SEQ ID NO: 2279; WAN024EUU_at; Start 73; Stop 97
gccatcatccgaaatcccatgaata

SEQ ID NO: 183305 - DNA, 25 bp, Artificial
  probe
  misc_feature (1)..(25): SEQ ID NO: 2279; WAN024EUU_at; Start 19; Stop 43
gctcaggactttgataaactcaata

SEQ ID NO: 183306 - DNA, 25 bp, Artificial
  probe
  misc_feature (1)..(25): SEQ ID NO: 2279; WAN024EUU_at; Start 118; Stop 142
ggaagctcattcaacaagatagtca

SEQ ID NO: 183307 - DNA, 25 bp, Artificial
  probe
  misc_feature (1)..(25): SEQ ID NO: 2279; WAN024EUU_at; Start 119; Stop 143
gaagctcattcaacaagatagtcag

SEQ ID NO: 183308 - DNA, 25 bp, Artificial
  probe
  misc_feature (1)..(25): SEQ ID NO: 2279; WAN024EUU_at; Start 11; Stop 35
gctttattgctcaggactttgataa

SEQ ID NO: 183309 - DNA, 25 bp, Artificial
  probe
  misc_feature (1)..(25): SEQ ID NO: 2279; WAN024EUU_at; Start 8; Stop 32
tgagctttattgctcaggactttga

SEQ ID NO: 183310 - DNA, 25 bp, Artificial
  probe
  misc_feature (1)..(25): SEQ ID NO: 2279; WAN024EUU_at; Start 42; Stop 66
tatcataactgttcttgagagcaga

SEQ ID NO: 183311 - DNA, 25 bp, Artificial
  probe
  misc_feature (1)..(25): SEQ ID NO: 2279; WAN024EUU_at; Start 58; Stop 82
gagagcagaacacaagccatcatcc

SEQ ID NO: 183312 - DNA, 25 bp, Artificial
  probe
  misc_feature (1)..(25): SEQ ID NO: 2279; WAN024EUU_at; Start 31; Stop 55
gataaactcaatatcataactgttc

SEQ ID NO: 183313 - DNA, 25 bp, Artificial
  probe
  misc_feature (1)..(25): SEQ ID NO: 2279; WAN024EUU_at; Start 69; Stop 93
acaagccatcatccgaaatcccatg

SEQ ID NO: 183314 - DNA, 25 bp, Artificial
  probe
  misc_feature (1)..(25): SEQ ID NO: 2279; WAN024EUU_at; Start 71; Stop 95
aagccatcatccgaaatcccatgaa

SEQ ID NO: 183315 - DNA, 25 bp, Artificial
  probe
  misc_feature (1)..(25): SEQ ID NO: 2279; WAN024EUU_at; Start 45; Stop 69
cataactgttcttgagagcagaaca

SEQ ID NO: 183316 - DNA, 25 bp, Artificial
  probe
  misc_feature (1)..(25): SEQ ID NO: 2279; WAN024EUU_at; Start 10; Stop 34
agctttattgctcaggactttgata

SEQ ID NO: 183317 - DNA, 25 bp, Artificial
  probe
  misc_feature (1)..(25): SEQ ID NO: 2279; WAN024EUU_at; Start 56; Stop 80
ttgagagcagaacacaagccatcat

SEQ ID NO: 183318 - DNA, 25 bp, Artificial
  probe
  misc_feature (1)..(25): SEQ ID NO: 2279; WAN024EUU_at; Start 44; Stop 68
tcataactgttcttgagagcagaac

SEQ ID NO: 183319 - DNA, 25 bp, Artificial
  probe
  misc_feature (1)..(25): SEQ ID NO: 2279; WAN024EUU_at; Start 123; Stop 147
ctcattcaacaagatagtcagaaac

SEQ ID NO: 183320 - DNA, 25 bp, Artificial
  probe
  misc_feature (1)..(25): SEQ ID NO: 2279; WAN024EUU_at; Start 112; Stop 136
gctactggaagctcattcaacaaga

SEQ ID NO: 183321 - DNA, 25 bp, Artificial
  probe
  misc_feature (1)..(25): SEQ ID NO: 2279; WAN024EUU_at; Start 46; Stop 70
ataactgttcttgagagcagaacac

SEQ ID NO: 183322 - DNA, 25 bp, Artificial
  probe
  misc_feature (1)..(25): SEQ ID NO: 2279; WAN024EUU_at; Start 54; Stop 78
tcttgagagcagaacacaagccatc

SEQ ID NO: 183323 - DNA, 25 bp, Artificial
  probe
  misc_feature (1)..(25): SEQ ID NO: 2279; WAN024EUU_at; Start 117; Stop 141
tggaagctcattcaacaagatagtc

SEQ ID NO: 183324 - DNA, 25 bp, Artificial
  probe
  misc_feature (1)..(25): SEQ ID NO: 2279; WAN024EUU_at; Start 6; Stop 30
gatgagctttattgctcaggacttt

SEQ ID NO: 183325 - DNA, 25 bp, Artificial
  probe
  misc_feature (1)..(25): SEQ ID NO: 5116; WAN024EUV_at; Start 71; Stop 95
aggagcctgacaaatttttcggact

SEQ ID NO: 183326 - DNA, 25 bp, Artificial
  probe
  misc_feature (1)..(25): SEQ ID NO: 5116; WAN024EUV_at; Start 76; Stop 100
cctgacaaatttttcggactcattg

SEQ ID NO: 183327 - DNA, 25 bp, Artificial
  probe
  misc_feature (1)..(25): SEQ ID NO: 5116; WAN024EUV_at; Start 66; Stop 90
gaataaggagcctgacaaatttttc

SEQ ID NO: 183328 - DNA, 25 bp, Artificial
  probe
  misc_feature (1)..(25): SEQ ID NO: 5116; WAN024EUV_at; Start 114; Stop 138
tcaagttcatcctctaaaaccttcc

SEQ ID NO: 183329 - DNA, 25 bp, Artificial
  probe
  misc_feature (1)..(25): SEQ ID NO: 5116; WAN024EUV_at; Start 105; Stop 129
caatctgaatcaagttcatcctcta

SEQ ID NO: 183330 - DNA, 25 bp, Artificial
  probe
  misc_feature (1)..(25): SEQ ID NO: 5116; WAN024EUV_at; Start 69; Stop 93
taaggagcctgacaaatttttcgga

SEQ ID NO: 183331 - DNA, 25 bp, Artificial
  probe
  misc_feature (1)..(25): SEQ ID NO: 5116; WAN024EUV_at; Start 110; Stop 134
tgaatcaagttcatcctctaaaacc

SEQ ID NO: 183332 - DNA, 25 bp, Artificial
  probe
  misc_feature (1)..(25): SEQ ID NO: 5116; WAN024EUV_at; Start 55; Stop 79
tttcactttcagaataaggagcctg

SEQ ID NO: 183333 - DNA, 25 bp, Artificial
  probe
  misc_feature (1)..(25): SEQ ID NO: 5116; WAN024EUV_at; Start 57; Stop 81
tcactttcagaataaggagcctgac

SEQ ID NO: 183334 - DNA, 25 bp, Artificial
  probe
  misc_feature (1)..(25): SEQ ID NO: 5116; WAN024EUV_at; Start 54; Stop 78
ttttcactttcagaataaggagcct

SEQ ID NO: 183335 - DNA, 25 bp, Artificial
  probe
  misc_feature (1)..(25): SEQ ID NO: 5116; WAN024EUV_at; Start 56; Stop 80
ttcactttcagaataaggagcctga

SEQ ID NO: 183336 - DNA, 25 bp, Artificial
  probe
  misc_feature (1)..(25): SEQ ID NO: 5116; WAN024EUV_at; Start 73; Stop 97
gagcctgacaaatttttcggactca

SEQ ID NO: 183337 - DNA, 25 bp, Artificial
  probe
  misc_feature (1)..(25): SEQ ID NO: 5116; WAN024EUV_at; Start 53; Stop 77
tttttcactttcagaataaggagcc

SEQ ID NO: 183338 - DNA, 25 bp, Artificial
  probe
  misc_feature (1)..(25): SEQ ID NO: 5116; WAN024EUV_at; Start 72; Stop 96
ggagcctgacaaatttttcggactc

SEQ ID NO: 183339 - DNA, 25 bp, Artificial
  probe
  misc_feature (1)..(25): SEQ ID NO: 5116; WAN024EUV_at; Start 78; Stop 102
tgacaaatttttcggactcattgag

SEQ ID NO: 183340 - DNA, 25 bp, Artificial
  probe
  misc_feature (1)..(25): SEQ ID NO: 5116; WAN024EUV_at; Start 118; Stop 142
gttcatcctctaaaaccttcctcaa

SEQ ID NO: 183341 - DNA, 25 bp, Artificial
  probe
  misc_feature (1)..(25): SEQ ID NO: 5116; WAN024EUV_at; Start 117; Stop 141
agttcatcctctaaaaccttcctca

SEQ ID NO: 183342 - DNA, 25 bp, Artificial
  probe
  misc_feature (1)..(25): SEQ ID NO: 5116; WAN024EUV_at; Start 59; Stop 83
actttcagaataaggagcctgacaa

SEQ ID NO: 183343 - DNA, 25 bp, Artificial
  probe
  misc_feature (1)..(25): SEQ ID NO: 5116; WAN024EUV_at; Start 60; Stop 84
ctttcagaataaggagcctgacaaa

SEQ ID NO: 183344 - DNA, 25 bp, Artificial
  probe
  misc_feature (1)..(25): SEQ ID NO: 5116; WAN024EUV_at; Start 103; Stop 127
gacaatctgaatcaagttcatcctc

SEQ ID NO: 183345 - DNA, 25 bp, Artificial
  probe
  misc_feature (1)..(25): SEQ ID NO: 5116; WAN024EUV_at; Start 44; Stop 68
aactcttgctttttcactttcagaa

SEQ ID NO: 183346 - DNA, 25 bp, Artificial
  probe
  misc_feature (1)..(25): SEQ ID NO: 5116; WAN024EUV_at; Start 48; Stop 72
cttgctttttcactttcagaataag

SEQ ID NO: 183347 - DNA, 25 bp, Artificial
  probe
  misc_feature (1)..(25): SEQ ID NO: 5116; WAN024EUV_at; Start 68; Stop 92
ataaggagcctgacaaatttttcgg

SEQ ID NO: 183348 - DNA, 25 bp, Artificial
  probe
  misc_feature (1)..(25): SEQ ID NO: 5116; WAN024EUV_at; Start 42; Stop 66
tcaactcttgctttttcactttcag

SEQ ID NO: 183349 - DNA, 25 bp, Artificial
  probe
  misc_feature (1)..(25): SEQ ID NO: 5116; WAN024EUV_at; Start 58; Stop 82
cactttcagaataaggagcctgaca

SEQ ID NO: 183350 - DNA, 25 bp, Artificial
  probe
  misc_feature (1)..(25): SEQ ID NO: 5116; WAN024EUV_at; Start 62; Stop 86
ttcagaataaggagcctgacaaatt

SEQ ID NO: 183351 - DNA, 25 bp, Artificial
  probe
  misc_feature (1)..(25): SEQ ID NO: 5116; WAN024EUV_at; Start 281; Stop 305
tatcgctctgatattctttaaaatc

SEQ ID NO: 183352 - DNA, 25 bp, Artificial
  probe
  misc_feature (1)..(25): SEQ ID NO: 5116; WAN024EUV_at; Start 43; Stop 67
caactcttgctttttcactttcaga

SEQ ID NO: 183353 - DNA, 25 bp, Artificial
  probe
  misc_feature (1)..(25): SEQ ID NO: 5116; WAN024EUV_at; Start 51; Stop 75
gctttttcactttcagaataaggag

SEQ ID NO: 183354 - DNA, 25 bp, Artificial
  probe
  misc_feature (1)..(25): SEQ ID NO: 5116; WAN024EUV_at; Start 75; Stop 99
gcctgacaaatttttcggactcatt

SEQ ID NO: 183355 - DNA, 25 bp, Artificial
  probe
  misc_feature (1)..(25): SEQ ID NO: 5116; WAN024EUV_at; Start 63; Stop 87
tcagaataaggagcctgacaaattt

SEQ ID NO: 183356 - DNA, 25 bp, Artificial
  probe
  misc_feature (1)..(25): SEQ ID NO: 5116; WAN024EUV_at; Start 111; Stop 135
gaatcaagttcatcctctaaaacct

SEQ ID NO: 183357 - DNA, 25 bp, Artificial
  probe
  misc_feature (1)..(25): SEQ ID NO: 5116; WAN024EUV_at; Start 284; Stop 308
cgctctgatattctttaaaatctgg

SEQ ID NO: 183358 - DNA, 25 bp, Artificial
  probe
  misc_feature (1)..(25): SEQ ID NO: 5116; WAN024EUV_at; Start 67; Stop 91
aataaggagcctgacaaatttttcg

SEQ ID NO: 183359 - DNA, 25 bp, Artificial
  probe
  misc_feature (1)..(25): SEQ ID NO: 2284; WAN024EUW_at; Start 98; Stop 122
tgaccgacattgatcatcagttgtc

SEQ ID NO: 183360 - DNA, 25 bp, Artificial
  probe
  misc_feature (1)..(25): SEQ ID NO: 2284; WAN024EUW_at; Start 1; Stop 25
atggagctcgctgagacttctatcg

SEQ ID NO: 183361 - DNA, 25 bp, Artificial
  probe
  misc_feature (1)..(25): SEQ ID NO: 2284; WAN024EUW_at; Start 101; Stop 125
ccgacattgatcatcagttgtctat

SEQ ID NO: 183362 - DNA, 25 bp, Artificial
  probe
  misc_feature (1)..(25): SEQ ID NO: 2284; WAN024EUW_at; Start 107; Stop 131
ttgatcatcagttgtctatttcaac

SEQ ID NO: 183363 - DNA, 25 bp, Artificial
  probe
  misc_feature (1)..(25): SEQ ID NO: 2284; WAN024EUW_at; Start 86; Stop 110
aaaagacttctatgaccgacattga

SEQ ID NO: 183364 - DNA, 25 bp, Artificial
  probe
  misc_feature (1)..(25): SEQ ID NO: 2284; WAN024EUW_at; Start 105; Stop 129
cattgatcatcagttgtctatttca

SEQ ID NO: 183365 - DNA, 25 bp, Artificial
  probe
  misc_feature (1)..(25): SEQ ID NO: 2284; WAN024EUW_at; Start 108; Stop 132
tgatcatcagttgtctatttcaact

SEQ ID NO: 183366 - DNA, 25 bp, Artificial
  probe
  misc_feature (1)..(25): SEQ ID NO: 2284; WAN024EUW_at; Start 100; Stop 124
accgacattgatcatcagttgtcta

SEQ ID NO: 183367 - DNA, 25 bp, Artificial
  probe
  misc_feature (1)..(25): SEQ ID NO: 2284; WAN024EUW_at; Start 60; Stop 84
ccaaaagattgctcagaagctaatt

SEQ ID NO: 183368 - DNA, 25 bp, Artificial
  probe
  misc_feature (1)..(25): SEQ ID NO: 2284; WAN024EUW_at; Start 110; Stop 134
atcatcagttgtctatttcaacttc

SEQ ID NO: 183369 - DNA, 25 bp, Artificial
  probe
  misc_feature (1)..(25): SEQ ID NO: 2284; WAN024EUW_at; Start 2; Stop 26
tggagctcgctgagacttctatcgt

SEQ ID NO: 183370 - DNA, 25 bp, Artificial
  probe
  misc_feature (1)..(25): SEQ ID NO: 2284; WAN024EUW_at; Start 103; Stop 127
gacattgatcatcagttgtctattt

SEQ ID NO: 183371 - DNA, 25 bp, Artificial
  probe
  misc_feature (1)..(25): SEQ ID NO: 2284; WAN024EUW_at; Start 4; Stop 28
gagctcgctgagacttctatcgtca

SEQ ID NO: 183372 - DNA, 25 bp, Artificial
  probe
  misc_feature (1)..(25): SEQ ID NO: 2284; WAN024EUW_at; Start 88; Stop 112
aagacttctatgaccgacattgatc

SEQ ID NO: 183373 - DNA, 25 bp, Artificial
  probe
  misc_feature (1)..(25): SEQ ID NO: 2284; WAN024EUW_at; Start 104; Stop 128
acattgatcatcagttgtctatttc

SEQ ID NO: 183374 - DNA, 25 bp, Artificial
  probe
  misc_feature (1)..(25): SEQ ID NO: 2284; WAN024EUW_at; Start 97; Stop 121
atgaccgacattgatcatcagttgt

SEQ ID NO: 183375 - DNA, 25 bp, Artificial
  probe
  misc_feature (1)..(25): SEQ ID NO: 2284; WAN024EUW_at; Start 99; Stop 123
gaccgacattgatcatcagttgtct

SEQ ID NO: 183376 - DNA, 25 bp, Artificial
  probe
  misc_feature (1)..(25): SEQ ID NO: 2284; WAN024EUW_at; Start 111; Stop 135
tcatcagttgtctatttcaacttca

SEQ ID NO: 183377 - DNA, 25 bp, Artificial
  probe
  misc_feature (1)..(25): SEQ ID NO: 2284; WAN024EUW_at; Start 106; Stop 130
attgatcatcagttgtctatttcaa

SEQ ID NO: 183378 - DNA, 25 bp, Artificial
  probe
  misc_feature (1)..(25): SEQ ID NO: 2284; WAN024EUW_at; Start 96; Stop 120
tatgaccgacattgatcatcagttg

SEQ ID NO: 183379 - DNA, 25 bp, Artificial
  probe
  misc_feature (1)..(25): SEQ ID NO: 2284; WAN024EUW_at; Start 92; Stop 116
cttctatgaccgacattgatcatca

SEQ ID NO: 183380 - DNA, 25 bp, Artificial
  probe
  misc_feature (1)..(25): SEQ ID NO: 2284; WAN024EUW_at; Start 5; Stop 29
agctcgctgagacttctatcgtcaa

SEQ ID NO: 183381 - DNA, 25 bp, Artificial
  probe
  misc_feature (1)..(25): SEQ ID NO: 2284; WAN024EUW_at; Start 90; Stop 114
gacttctatgaccgacattgatcat

SEQ ID NO: 183382 - DNA, 25 bp, Artificial
  probe
  misc_feature (1)..(25): SEQ ID NO: 2284; WAN024EUW_at; Start 3; Stop 27
ggagctcgctgagacttctatcgtc

SEQ ID NO: 183383 - DNA, 25 bp, Artificial
  probe
  misc_feature (1)..(25): SEQ ID NO: 2284; WAN024EUW_at; Start 95; Stop 119
ctatgaccgacattgatcatcagtt

SEQ ID NO: 183384 - DNA, 25 bp, Artificial
  probe
  misc_feature (1)..(25): SEQ ID NO: 2284; WAN024EUW_at; Start 94; Stop 118
tctatgaccgacattgatcatcagt

SEQ ID NO: 183385 - DNA, 25 bp, Artificial
  probe
  misc_feature (1)..(25): SEQ ID NO: 2284; WAN024EUW_at; Start 109; Stop 133
gatcatcagttgtctatttcaactt

SEQ ID NO: 183386 - DNA, 25 bp, Artificial
  probe
  misc_feature (1)..(25): SEQ ID NO: 2284; WAN024EUW_at; Start 91; Stop 115
acttctatgaccgacattgatcatc

SEQ ID NO: 183387 - DNA, 25 bp, Artificial
  probe
  misc_feature (1)..(25): SEQ ID NO: 2284; WAN024EUW_at; Start 89; Stop 113
agacttctatgaccgacattgatca

SEQ ID NO: 183388 - DNA, 25 bp, Artificial
  probe
  misc_feature (1)..(25): SEQ ID NO: 2284; WAN024EUW_at; Start 112; Stop 136
catcagttgtctatttcaacttcaa

SEQ ID NO: 183389 - DNA, 25 bp, Artificial
  probe
  misc_feature (1)..(25): SEQ ID NO: 2284; WAN024EUW_at; Start 87; Stop 111
aaagacttctatgaccgacattgat

SEQ ID NO: 183390 - DNA, 25 bp, Artificial
  probe
  misc_feature (1)..(25): SEQ ID NO: 2284; WAN024EUW_at; Start 102; Stop 126
cgacattgatcatcagttgtctatt

SEQ ID NO: 183391 - DNA, 25 bp, Artificial
  probe
  misc_feature (1)..(25): SEQ ID NO: 1630; WAN024EUX_at; Start 342; Stop 366
actaccctattcaaacgccaaattg

SEQ ID NO: 183392 - DNA, 25 bp, Artificial
  probe
  misc_feature (1)..(25): SEQ ID NO: 1630; WAN024EUX_at; Start 207; Stop 231
ctatcagctctataataaggaacca

SEQ ID NO: 183393 - DNA, 25 bp, Artificial
  probe
  misc_feature (1)..(25): SEQ ID NO: 1630; WAN024EUX_at; Start 340; Stop 364
caactaccctattcaaacgccaaat

SEQ ID NO: 183394 - DNA, 25 bp, Artificial
  probe
  misc_feature (1)..(25): SEQ ID NO: 1630; WAN024EUX_at; Start 163; Stop 187
attttaaacaagcttttgagctatt

SEQ ID NO: 183395 - DNA, 25 bp, Artificial
  probe
  misc_feature (1)..(25): SEQ ID NO: 1630; WAN024EUX_at; Start 206; Stop 230
actatcagctctataataaggaacc

SEQ ID NO: 183396 - DNA, 25 bp, Artificial
  probe
  misc_feature (1)..(25): SEQ ID NO: 1630; WAN024EUX_at; Start 201; Stop 225
acaccactatcagctctataataag

SEQ ID NO: 183397 - DNA, 25 bp, Artificial
  probe
  misc_feature (1)..(25): SEQ ID NO: 1630; WAN024EUX_at; Start 343; Stop 367
ctaccctattcaaacgccaaattgg

SEQ ID NO: 183398 - DNA, 25 bp, Artificial
  probe
  misc_feature (1)..(25): SEQ ID NO: 1630; WAN024EUX_at; Start 344; Stop 368
taccctattcaaacgccaaattgga

SEQ ID NO: 183399 - DNA, 25 bp, Artificial
  probe
  misc_feature (1)..(25): SEQ ID NO: 1630; WAN024EUX_at; Start 204; Stop 228
ccactatcagctctataataaggaa

SEQ ID NO: 183400 - DNA, 25 bp, Artificial
  probe
  misc_feature (1)..(25): SEQ ID NO: 1630; WAN024EUX_at; Start 346; Stop 370
ccctattcaaacgccaaattggaag

SEQ ID NO: 183401 - DNA, 25 bp, Artificial
  probe
  misc_feature (1)..(25): SEQ ID NO: 1630; WAN024EUX_at; Start 202; Stop 226
caccactatcagctctataataagg

SEQ ID NO: 183402 - DNA, 25 bp, Artificial
  probe
  misc_feature (1)..(25): SEQ ID NO: 1630; WAN024EUX_at; Start 199; Stop 223
aaacaccactatcagctctataata

SEQ ID NO: 183403 - DNA, 25 bp, Artificial
  probe
  misc_feature (1)..(25): SEQ ID NO: 1630; WAN024EUX_at; Start 165; Stop 189
tttaaacaagcttttgagctattca

SEQ ID NO: 183404 - DNA, 25 bp, Artificial
  probe
  misc_feature (1)..(25): SEQ ID NO: 1630; WAN024EUX_at; Start 210; Stop 234
tcagctctataataaggaaccagag

SEQ ID NO: 183405 - DNA, 25 bp, Artificial
  probe
  misc_feature (1)..(25): SEQ ID NO: 1630; WAN024EUX_at; Start 166; Stop 190
ttaaacaagcttttgagctattcag

SEQ ID NO: 183406 - DNA, 25 bp, Artificial
  probe
  misc_feature (1)..(25): SEQ ID NO: 1630; WAN024EUX_at; Start 164; Stop 188
ttttaaacaagcttttgagctattc

SEQ ID NO: 183407 - DNA, 25 bp, Artificial
  probe
  misc_feature (1)..(25): SEQ ID NO: 1630; WAN024EUX_at; Start 200; Stop 224
aacaccactatcagctctataataa

SEQ ID NO: 183408 - DNA, 25 bp, Artificial
  probe
  misc_feature (1)..(25): SEQ ID NO: 1630; WAN024EUX_at; Start 347; Stop 371
cctattcaaacgccaaattggaagc

SEQ ID NO: 183409 - DNA, 25 bp, Artificial
  probe
  misc_feature (1)..(25): SEQ ID NO: 1630; WAN024EUX_at; Start 168; Stop 192
aaacaagcttttgagctattcagaa

SEQ ID NO: 183410 - DNA, 25 bp, Artificial
  probe
  misc_feature (1)..(25): SEQ ID NO: 1630; WAN024EUX_at; Start 160; Stop 184
gagattttaaacaagcttttgagct

SEQ ID NO: 183411 - DNA, 25 bp, Artificial
  probe
  misc_feature (1)..(25): SEQ ID NO: 1630; WAN024EUX_at; Start 159; Stop 183
agagattttaaacaagcttttgagc

SEQ ID NO: 183412 - DNA, 25 bp, Artificial
  probe
  misc_feature (1)..(25): SEQ ID NO: 1630; WAN024EUX_at; Start 161; Stop 185
agattttaaacaagcttttgagcta

SEQ ID NO: 183413 - DNA, 25 bp, Artificial
  probe
  misc_feature (1)..(25): SEQ ID NO: 1630; WAN024EUX_at; Start 203; Stop 227
accactatcagctctataataagga

SEQ ID NO: 183414 - DNA, 25 bp, Artificial
  probe
  misc_feature (1)..(25): SEQ ID NO: 1630; WAN024EUX_at; Start 208; Stop 232
tatcagctctataataaggaaccag

SEQ ID NO: 183415 - DNA, 25 bp, Artificial
  probe
  misc_feature (1)..(25): SEQ ID NO: 1630; WAN024EUX_at; Start 198; Stop 222
gaaacaccactatcagctctataat

SEQ ID NO: 183416 - DNA, 25 bp, Artificial
  probe
  misc_feature (1)..(25): SEQ ID NO: 1630; WAN024EUX_at; Start 167; Stop 191
taaacaagcttttgagctattcaga

SEQ ID NO: 183417 - DNA, 25 bp, Artificial
  probe
  misc_feature (1)..(25): SEQ ID NO: 1630; WAN024EUX_at; Start 205; Stop 229
cactatcagctctataataaggaac

SEQ ID NO: 183418 - DNA, 25 bp, Artificial
  probe
  misc_feature (1)..(25): SEQ ID NO: 1630; WAN024EUX_at; Start 162; Stop 186
gattttaaacaagcttttgagctat

SEQ ID NO: 183419 - DNA, 25 bp, Artificial
  probe
  misc_feature (1)..(25): SEQ ID NO: 1630; WAN024EUX_at; Start 209; Stop 233
atcagctctataataaggaaccaga

SEQ ID NO: 183420 - DNA, 25 bp, Artificial
  probe
  misc_feature (1)..(25): SEQ ID NO: 2181; WAN024EUY_at; Start 110; Stop 134
ttttaagtgctatcattgctctaac

SEQ ID NO: 183421 - DNA, 25 bp, Artificial
  probe
  misc_feature (1)..(25): SEQ ID NO: 2181; WAN024EUY_at; Start 111; Stop 135
tttaagtgctatcattgctctaact

SEQ ID NO: 183422 - DNA, 25 bp, Artificial
  probe
  misc_feature (1)..(25): SEQ ID NO: 2181; WAN024EUY_at; Start 114; Stop 138
aagtgctatcattgctctaactaat

SEQ ID NO: 183423 - DNA, 25 bp, Artificial
  probe
  misc_feature (1)..(25): SEQ ID NO: 2181; WAN024EUY_at; Start 113; Stop 137
taagtgctatcattgctctaactaa

SEQ ID NO: 183424 - DNA, 25 bp, Artificial
  probe
  misc_feature (1)..(25): SEQ ID NO: 2181; WAN024EUY_at; Start 112; Stop 136
ttaagtgctatcattgctctaacta

SEQ ID NO: 183425 - DNA, 25 bp, Artificial
  probe
  misc_feature (1)..(25): SEQ ID NO: 2057; WAN024EUZ_at; Start 475; Stop 499
gagctcccctttatgattttgccga

SEQ ID NO: 183426 - DNA, 25 bp, Artificial
  probe
  misc_feature (1)..(25): SEQ ID NO: 2057; WAN024EUZ_at; Start 495; Stop 519
gccgattttcaatgtcttagacgat

SEQ ID NO: 183427 - DNA, 25 bp, Artificial
  probe
  misc_feature (1)..(25): SEQ ID NO: 2057; WAN024EUZ_at; Start 510; Stop 534
cttagacgatatggataataatctc

SEQ ID NO: 183428 - DNA, 25 bp, Artificial
  probe
  misc_feature (1)..(25): SEQ ID NO: 2057; WAN024EUZ_at; Start 663; Stop 687
gctgacccgtttgattggtgggaac

SEQ ID NO: 183429 - DNA, 25 bp, Artificial
  probe
  misc_feature (1)..(25): SEQ ID NO: 2057; WAN024EUZ_at; Start 732; Stop 756
caatgacaactatggtatgggttca

SEQ ID NO: 183430 - DNA, 25 bp, Artificial
  probe
  misc_feature (1)..(25): SEQ ID NO: 2057; WAN024EUZ_at; Start 594; Stop 618
ccctctatctatgaacggtgtgcga

SEQ ID NO: 183431 - DNA, 25 bp, Artificial
  probe
  misc_feature (1)..(25): SEQ ID NO: 2057; WAN024EUZ_at; Start 86; Stop 110
tggcacccttggtcttgattttcgg

SEQ ID NO: 183432 - DNA, 25 bp, Artificial
  probe
  misc_feature (1)..(25): SEQ ID NO: 2057; WAN024EUZ_at; Start 703; Stop 727
gggacggctattgagcagaattttc

SEQ ID NO: 183433 - DNA, 25 bp, Artificial
  probe
  misc_feature (1)..(25): SEQ ID NO: 2057; WAN024EUZ_at; Start 442; Stop 466
gatttttcctttatctttgtcgcaa

SEQ ID NO: 183434 - DNA, 25 bp, Artificial
  probe
  misc_feature (1)..(25): SEQ ID NO: 2057; WAN024EUZ_at; Start 763; Stop 787
ggtgtgattctcatcctgaccatgt

SEQ ID NO: 183435 - DNA, 25 bp, Artificial
  probe
  misc_feature (1)..(25): SEQ ID NO: 2057; WAN024EUZ_at; Start 329; Stop 353
ggatcaatttgctccttaaagccta

SEQ ID NO: 183436 - DNA, 25 bp, Artificial
  probe
  misc_feature (1)..(25): SEQ ID NO: 2057; WAN024EUZ_at; Start 675; Stop 699
gattggtgggaaccgcgttatcacc

SEQ ID NO: 183437 - DNA, 25 bp, Artificial
  probe
  misc_feature (1)..(25): SEQ ID NO: 2057; WAN024EUZ_at; Start 580; Stop 604
cgtcatgtcatcttccctctatcta

SEQ ID NO: 183438 - DNA, 25 bp, Artificial
  probe
  misc_feature (1)..(25): SEQ ID NO: 2057; WAN024EUZ_at; Start 780; Stop 804
gaccatgttcatcaccatgtgggtg

SEQ ID NO: 183439 - DNA, 25 bp, Artificial
  probe
  misc_feature (1)..(25): SEQ ID NO: 2057; WAN024EUZ_at; Start 77; Stop 101
tctttgtattggcacccttggtctt

SEQ ID NO: 183440 - DNA, 25 bp, Artificial
  probe
  misc_feature (1)..(25): SEQ ID NO: 2057; WAN024EUZ_at; Start 27; Stop 51
gaaaacaagctctaaactctttgta

SEQ ID NO: 183441 - DNA, 25 bp, Artificial
  probe
  misc_feature (1)..(25): SEQ ID NO: 2057; WAN024EUZ_at; Start 628; Stop 652
cagtcggtctttatcccaagtttga

SEQ ID NO: 183442 - DNA, 25 bp, Artificial
  probe
  misc_feature (1)..(25): SEQ ID NO: 2057; WAN024EUZ_at; Start 467; Stop 491
gctacatcgagctcccctttatgat

SEQ ID NO: 183443 - DNA, 25 bp, Artificial
  probe
  misc_feature (1)..(25): SEQ ID NO: 2057; WAN024EUZ_at; Start 550; Stop 574
gaccttggtgcaactaagtgggaga

SEQ ID NO: 183444 - DNA, 25 bp, Artificial
  probe
  misc_feature (1)..(25): SEQ ID NO: 2057; WAN024EUZ_at; Start 567; Stop 591
gtgggagaccttccgtcatgtcatc

SEQ ID NO: 183445 - DNA, 25 bp, Artificial
  probe
  misc_feature (1)..(25): SEQ ID NO: 2057; WAN024EUZ_at; Start 522; Stop 546
ggataataatctcatcaatgctagt

SEQ ID NO: 183446 - DNA, 25 bp, Artificial
  probe
  misc_feature (1)..(25): SEQ ID NO: 2057; WAN024EUZ_at; Start 306; Stop 330
catgctgattatccttcctacctgg

SEQ ID NO: 183447 - DNA, 25 bp, Artificial
  probe
  misc_feature (1)..(25): SEQ ID NO: 2057; WAN024EUZ_at; Start 453; Stop 477
tatctttgtcgcaagctacatcgag

SEQ ID NO: 183448 - DNA, 25 bp, Artificial
  probe
  misc_feature (1)..(25): SEQ ID NO: 2057; WAN024EUZ_at; Start 343; Stop 367
cttaaagcctatgcttttatcggga

SEQ ID NO: 183449 - DNA, 25 bp, Artificial
  probe
  misc_feature (1)..(25): SEQ ID NO: 2057; WAN024EUZ_at; Start 560; Stop 584
caactaagtgggagaccttccgtca

SEQ ID NO: 183450 - DNA, 25 bp, Artificial
  probe
  misc_feature (1)..(25): SEQ ID NO: 2057; WAN024EUZ_at; Start 643; Stop 667
ccaagtttgagtctcttcatgctga

SEQ ID NO: 183451 - DNA, 25 bp, Artificial
  probe
  misc_feature (1)..(25): SEQ ID NO: 2057; WAN024EUZ_at; Start 200; Stop 224
gtttcaactcagtgctttatgcagg

SEQ ID NO: 183452 - DNA, 25 bp, Artificial
  probe
  misc_feature (1)..(25): SEQ ID NO: 2057; WAN024EUZ_at; Start 651; Stop 675
gagtctcttcatgctgacccgtttg

SEQ ID NO: 183453 - DNA, 25 bp, Artificial
  probe
  misc_feature (1)..(25): SEQ ID NO: 2057; WAN024EUZ_at; Start 317; Stop 341
tccttcctacctggatcaatttgct

SEQ ID NO: 183454 - DNA, 25 bp, Artificial
  probe
  misc_feature (1)..(25): SEQ ID NO: 2057; WAN024EUZ_at; Start 717; Stop 741
gcagaattttctaaccaatgacaac

SEQ ID NO: 183455 - DNA, 25 bp, Artificial
  probe
  misc_feature (1)..(25): SEQ ID NO: 2057; WAN024EUZ_at; Start 421; Stop 445
tcacaacagttgctttttaccgatt

SEQ ID NO: 183456 - DNA, 25 bp, Artificial
  probe
  misc_feature (1)..(25): SEQ ID NO: 2057; WAN024EUZ_at; Start 289; Stop 313
caccgtcaactctggctcatgctga

SEQ ID NO: 183457 - DNA, 25 bp, Artificial
  probe
  misc_feature (1)..(25): SEQ ID NO: 2057; WAN024EUZ_at; Start 599; Stop 623
tatctatgaacggtgtgcgaagtgg

SEQ ID NO: 183458 - DNA, 25 bp, Artificial
  probe
  misc_feature (1)..(25): SEQ ID NO: 2057; WAN024EUZ_at; Start 163; Stop 187
tactttgcgtcacaaaacttgacct

SEQ ID NO: 183459 - DNA, 25 bp, Artificial
  probe
  misc_feature (1)..(25): SEQ ID NO: 2278; WAN024EV2_s_at; Start 100; Stop 124
tatgatagagccgtccgatgtcgcg

SEQ ID NO: 183460 - DNA, 25 bp, Artificial
  probe
  misc_feature (1)..(25): SEQ ID NO: 2278; WAN024EV2_s_at; Start 102; Stop 126
tgatagagccgtccgatgtcgcgtc

SEQ ID NO: 183461 - DNA, 25 bp, Artificial
  probe
  misc_feature (1)..(25): SEQ ID NO: 2278; WAN024EV2_s_at; Start 101; Stop 125
atgatagagccgtccgatgtcgcgt

SEQ ID NO: 183462 - DNA, 25 bp, Artificial
  probe
  misc_feature (1)..(25): SEQ ID NO: 724; WAN024EV3_at; Start 695; Stop 719
ctaaacagctttttccgtgtgctaa

SEQ ID NO: 183463 - DNA, 25 bp, Artificial
  probe
  misc_feature (1)..(25): SEQ ID NO: 724; WAN024EV3_at; Start 744; Stop 768
tatccaacatctcagccgtgccatg

SEQ ID NO: 183464 - DNA, 25 bp, Artificial
  probe
  misc_feature (1)..(25): SEQ ID NO: 724; WAN024EV3_at; Start 708; Stop 732
tccgtgtgctaaaatcgttctagat

SEQ ID NO: 183465 - DNA, 25 bp, Artificial
  probe
  misc_feature (1)..(25): SEQ ID NO: 724; WAN024EV3_at; Start 693; Stop 717
ggctaaacagctttttccgtgtgct

SEQ ID NO: 183466 - DNA, 25 bp, Artificial
  probe
  misc_feature (1)..(25): SEQ ID NO: 724; WAN024EV3_at; Start 707; Stop 731
ttccgtgtgctaaaatcgttctaga

SEQ ID NO: 183467 - DNA, 25 bp, Artificial
  probe
  misc_feature (1)..(25): SEQ ID NO: 724; WAN024EV3_at; Start 743; Stop 767
ttatccaacatctcagccgtgccat

SEQ ID NO: 183468 - DNA, 25 bp, Artificial
  probe
  misc_feature (1)..(25): SEQ ID NO: 724; WAN024EV3_at; Start 694; Stop 718
gctaaacagctttttccgtgtgcta

SEQ ID NO: 183469 - DNA, 25 bp, Artificial
  probe
  misc_feature (1)..(25): SEQ ID NO: 724; WAN024EV3_at; Start 915; Stop 939
aacaaataaagaaattcttgacaag

SEQ ID NO: 183470 - DNA, 25 bp, Artificial
  probe
  misc_feature (1)..(25): SEQ ID NO: 724; WAN024EV3_at; Start 741; Stop 765
tattatccaacatctcagccgtgcc

SEQ ID NO: 183471 - DNA, 25 bp, Artificial
  probe
  misc_feature (1)..(25): SEQ ID NO: 724; WAN024EV3_at; Start 742; Stop 766
attatccaacatctcagccgtgcca

SEQ ID NO: 183472 - DNA, 25 bp, Artificial
  probe
  misc_feature (1)..(25): SEQ ID NO: 724; WAN024EV3_at; Start 692; Stop 716
tggctaaacagctttttccgtgtgc

SEQ ID NO: 183473 - DNA, 25 bp, Artificial
  probe
  misc_feature (1)..(25): SEQ ID NO: 724; WAN024EV3_at; Start 746; Stop 770
tccaacatctcagccgtgccatgag

SEQ ID NO: 183474 - DNA, 25 bp, Artificial
  probe
  misc_feature (1)..(25): SEQ ID NO: 724; WAN024EV3_at; Start 739; Stop 763
catattatccaacatctcagccgtg

SEQ ID NO: 183475 - DNA, 25 bp, Artificial
  probe
  misc_feature (1)..(25): SEQ ID NO: 724; WAN024EV3_at; Start 913; Stop 937
ttaacaaataaagaaattcttgaca

SEQ ID NO: 183476 - DNA, 25 bp, Artificial
  probe
  misc_feature (1)..(25): SEQ ID NO: 724; WAN024EV3_at; Start 747; Stop 771
ccaacatctcagccgtgccatgagt

SEQ ID NO: 183477 - DNA, 25 bp, Artificial
  probe
  misc_feature (1)..(25): SEQ ID NO: 724; WAN024EV3_at; Start 735; Stop 759
tttccatattatccaacatctcagc

SEQ ID NO: 183478 - DNA, 25 bp, Artificial
  probe
  misc_feature (1)..(25): SEQ ID NO: 724; WAN024EV3_at; Start 699; Stop 723
acagctttttccgtgtgctaaaatc

SEQ ID NO: 183479 - DNA, 25 bp, Artificial
  probe
  misc_feature (1)..(25): SEQ ID NO: 724; WAN024EV3_at; Start 734; Stop 758
gtttccatattatccaacatctcag

SEQ ID NO: 183480 - DNA, 25 bp, Artificial
  probe
  misc_feature (1)..(25): SEQ ID NO: 724; WAN024EV3_at; Start 910; Stop 934
cacttaacaaataaagaaattcttg

SEQ ID NO: 183481 - DNA, 25 bp, Artificial
  probe
  misc_feature (1)..(25): SEQ ID NO: 724; WAN024EV3_at; Start 700; Stop 724
cagctttttccgtgtgctaaaatcg

SEQ ID NO: 183482 - DNA, 25 bp, Artificial
  probe
  misc_feature (1)..(25): SEQ ID NO: 724; WAN024EV3_at; Start 738; Stop 762
ccatattatccaacatctcagccgt

SEQ ID NO: 183483 - DNA, 25 bp, Artificial
  probe
  misc_feature (1)..(25): SEQ ID NO: 724; WAN024EV3_at; Start 745; Stop 769
atccaacatctcagccgtgccatga

SEQ ID NO: 183484 - DNA, 25 bp, Artificial
  probe
  misc_feature (1)..(25): SEQ ID NO: 724; WAN024EV3_at; Start 737; Stop 761
tccatattatccaacatctcagccg

SEQ ID NO: 183485 - DNA, 25 bp, Artificial
  probe
  misc_feature (1)..(25): SEQ ID NO: 724; WAN024EV3_at; Start 691; Stop 715
ttggctaaacagctttttccgtgtg

SEQ ID NO: 183486 - DNA, 25 bp, Artificial
  probe
  misc_feature (1)..(25): SEQ ID NO: 724; WAN024EV3_at; Start 740; Stop 764
atattatccaacatctcagccgtgc

SEQ ID NO: 183487 - DNA, 25 bp, Artificial
  probe
  misc_feature (1)..(25): SEQ ID NO: 724; WAN024EV3_at; Start 705; Stop 729
ttttccgtgtgctaaaatcgttcta

SEQ ID NO: 183488 - DNA, 25 bp, Artificial
  probe
  misc_feature (1)..(25): SEQ ID NO: 724; WAN024EV3_at; Start 914; Stop 938
taacaaataaagaaattcttgacaa

SEQ ID NO: 183489 - DNA, 25 bp, Artificial
  probe
  misc_feature (1)..(25): SEQ ID NO: 724; WAN024EV3_at; Start 696; Stop 720
taaacagctttttccgtgtgctaaa

SEQ ID NO: 183490 - DNA, 25 bp, Artificial
  probe
  misc_feature (1)..(25): SEQ ID NO: 724; WAN024EV3_at; Start 701; Stop 725
agctttttccgtgtgctaaaatcgt

SEQ ID NO: 183491 - DNA, 25 bp, Artificial
  probe
  misc_feature (1)..(25): SEQ ID NO: 724; WAN024EV3_at; Start 698; Stop 722
aacagctttttccgtgtgctaaaat

SEQ ID NO: 183492 - DNA, 25 bp, Artificial
  probe
  misc_feature (1)..(25): SEQ ID NO: 724; WAN024EV3_at; Start 706; Stop 730
tttccgtgtgctaaaatcgttctag

SEQ ID NO: 183493 - DNA, 25 bp, Artificial
  probe
  misc_feature (1)..(25): SEQ ID NO: 724; WAN024EV3_at; Start 736; Stop 760
ttccatattatccaacatctcagcc

SEQ ID NO: 183494 - DNA, 25 bp, Artificial
  probe
  misc_feature (1)..(25): SEQ ID NO: 1905; WAN024EV4_at; Start 645; Stop 669
tttacagtttcaccagctaaaccaa

SEQ ID NO: 183495 - DNA, 25 bp, Artificial
  probe
  misc_feature (1)..(25): SEQ ID NO: 1905; WAN024EV4_at; Start 641; Stop 665
tctttttacagtttcaccagctaaa

SEQ ID NO: 183496 - DNA, 25 bp, Artificial
  probe
  misc_feature (1)..(25): SEQ ID NO: 1905; WAN024EV4_at; Start 639; Stop 663
attctttttacagtttcaccagcta

SEQ ID NO: 183497 - DNA, 25 bp, Artificial
  probe
  misc_feature (1)..(25): SEQ ID NO: 1905; WAN024EV4_at; Start 649; Stop 673
cagtttcaccagctaaaccaactca

SEQ ID NO: 183498 - DNA, 25 bp, Artificial
  probe
  misc_feature (1)..(25): SEQ ID NO: 1905; WAN024EV4_at; Start 650; Stop 674
agtttcaccagctaaaccaactcat

SEQ ID NO: 183499 - DNA, 25 bp, Artificial
  probe
  misc_feature (1)..(25): SEQ ID NO: 1905; WAN024EV4_at; Start 651; Stop 675
gtttcaccagctaaaccaactcatt

SEQ ID NO: 183500 - DNA, 25 bp, Artificial
  probe
  misc_feature (1)..(25): SEQ ID NO: 1905; WAN024EV4_at; Start 640; Stop 664
ttctttttacagtttcaccagctaa

SEQ ID NO: 183501 - DNA, 25 bp, Artificial
  probe
  misc_feature (1)..(25): SEQ ID NO: 1905; WAN024EV4_at; Start 638; Stop 662
aattctttttacagtttcaccagct

SEQ ID NO: 183502 - DNA, 25 bp, Artificial
  probe
  misc_feature (1)..(25): SEQ ID NO: 1905; WAN024EV4_at; Start 644; Stop 668
ttttacagtttcaccagctaaacca

SEQ ID NO: 183503 - DNA, 25 bp, Artificial
  probe
  misc_feature (1)..(25): SEQ ID NO: 1905; WAN024EV4_at; Start 646; Stop 670
ttacagtttcaccagctaaaccaac

SEQ ID NO: 183504 - DNA, 25 bp, Artificial
  probe
  misc_feature (1)..(25): SEQ ID NO: 1905; WAN024EV4_at; Start 647; Stop 671
tacagtttcaccagctaaaccaact

SEQ ID NO: 183505 - DNA, 25 bp, Artificial
  probe
  misc_feature (1)..(25): SEQ ID NO: 1905; WAN024EV4_at; Start 648; Stop 672
acagtttcaccagctaaaccaactc

SEQ ID NO: 183506 - DNA, 25 bp, Artificial
  probe
  misc_feature (1)..(25): SEQ ID NO: 1905; WAN024EV4_at; Start 637; Stop 661
gaattctttttacagtttcaccagc

SEQ ID NO: 183507 - DNA, 25 bp, Artificial
  probe
  misc_feature (1)..(25): SEQ ID NO: 2246; WAN024EV5_x_at; Start 111; Stop 135
ctacgacgccccatcttgccctgag

SEQ ID NO: 183508 - DNA, 25 bp, Artificial
  probe
  misc_feature (1)..(25): SEQ ID NO: 2246; WAN024EV5_x_at; Start 384; Stop 408
catctcaacttcaactgttattcgt

SEQ ID NO: 183509 - DNA, 25 bp, Artificial
  probe
  misc_feature (1)..(25): SEQ ID NO: 2246; WAN024EV5_x_at; Start 387; Stop 411
ctcaacttcaactgttattcgtaag

SEQ ID NO: 183510 - DNA, 25 bp, Artificial
  probe
  misc_feature (1)..(25): SEQ ID NO: 2246; WAN024EV5_x_at; Start 712; Stop 736
caacatcttagccgtgctatgagtc

SEQ ID NO: 183511 - DNA, 25 bp, Artificial
  probe
  misc_feature (1)..(25): SEQ ID NO: 2246; WAN024EV5_x_at; Start 385; Stop 409
atctcaacttcaactgttattcgta

SEQ ID NO: 183512 - DNA, 25 bp, Artificial
  probe
  misc_feature (1)..(25): SEQ ID NO: 2246; WAN024EV5_x_at; Start 1122; Stop 1146
agcgaccaataatctcatcaaactt

SEQ ID NO: 183513 - DNA, 25 bp, Artificial
  probe
  misc_feature (1)..(25): SEQ ID NO: 2246; WAN024EV5_x_at; Start 368; Stop 392
ttgcccatcagctttccatctcaac

SEQ ID NO: 183514 - DNA, 25 bp, Artificial
  probe
  misc_feature (1)..(25): SEQ ID NO: 2246; WAN024EV5_x_at; Start 185; Stop 209
cttatcttgaaacgactggtatgcc

SEQ ID NO: 183515 - DNA, 25 bp, Artificial
  probe
  misc_feature (1)..(25): SEQ ID NO: 2246; WAN024EV5_x_at; Start 382; Stop 406
tccatctcaacttcaactgttattc

SEQ ID NO: 183516 - DNA, 25 bp, Artificial
  probe
  misc_feature (1)..(25): SEQ ID NO: 2246; WAN024EV5_x_at; Start 376; Stop 400
cagctttccatctcaacttcaactg

SEQ ID NO: 183517 - DNA, 25 bp, Artificial
  probe
  misc_feature (1)..(25): SEQ ID NO: 2246; WAN024EV5_x_at; Start 374; Stop 398
atcagctttccatctcaacttcaac

SEQ ID NO: 183518 - DNA, 25 bp, Artificial
  probe
  misc_feature (1)..(25): SEQ ID NO: 2246; WAN024EV5_x_at; Start 375; Stop 399
tcagctttccatctcaacttcaact

SEQ ID NO: 183519 - DNA, 25 bp, Artificial
  probe
  misc_feature (1)..(25): SEQ ID NO: 2246; WAN024EV5_x_at; Start 183; Stop 207
tccttatcttgaaacgactggtatg

SEQ ID NO: 183520 - DNA, 25 bp, Artificial
  probe
  misc_feature (1)..(25): SEQ ID NO: 2246; WAN024EV5_x_at; Start 104; Stop 128
aactggactacgacgccccatcttg

SEQ ID NO: 183521 - DNA, 25 bp, Artificial
  probe
  misc_feature (1)..(25): SEQ ID NO: 2246; WAN024EV5_x_at; Start 184; Stop 208
ccttatcttgaaacgactggtatgc

SEQ ID NO: 183522 - DNA, 25 bp, Artificial
  probe
  misc_feature (1)..(25): SEQ ID NO: 2246; WAN024EV5_x_at; Start 180; Stop 204
aattccttatcttgaaacgactggt

SEQ ID NO: 183523 - DNA, 25 bp, Artificial
  probe
  misc_feature (1)..(25): SEQ ID NO: 2246; WAN024EV5_x_at; Start 178; Stop 202
aaaattccttatcttgaaacgactg

SEQ ID NO: 183524 - DNA, 25 bp, Artificial
  probe
  misc_feature (1)..(25): SEQ ID NO: 2246; WAN024EV5_x_at; Start 1124; Stop 1148
cgaccaataatctcatcaaacttat

SEQ ID NO: 183525 - DNA, 25 bp, Artificial
  probe
  misc_feature (1)..(25): SEQ ID NO: 2246; WAN024EV5_x_at; Start 381; Stop 405
ttccatctcaacttcaactgttatt

SEQ ID NO: 183526 - DNA, 25 bp, Artificial
  probe
  misc_feature (1)..(25): SEQ ID NO: 2246; WAN024EV5_x_at; Start 378; Stop 402
gctttccatctcaacttcaactgtt

SEQ ID NO: 183527 - DNA, 25 bp, Artificial
  probe
  misc_feature (1)..(25): SEQ ID NO: 2246; WAN024EV5_x_at; Start 367; Stop 391
attgcccatcagctttccatctcaa

SEQ ID NO: 183528 - DNA, 25 bp, Artificial
  probe
  misc_feature (1)..(25): SEQ ID NO: 2246; WAN024EV5_x_at; Start 373; Stop 397
catcagctttccatctcaacttcaa

SEQ ID NO: 183529 - DNA, 25 bp, Artificial
  probe
  misc_feature (1)..(25): SEQ ID NO: 2246; WAN024EV5_x_at; Start 379; Stop 403
ctttccatctcaacttcaactgtta

SEQ ID NO: 183530 - DNA, 25 bp, Artificial
  probe
  misc_feature (1)..(25): SEQ ID NO: 2246; WAN024EV5_x_at; Start 779; Stop 803
atgaatacaaggctatcaagcgcta

SEQ ID NO: 183531 - DNA, 25 bp, Artificial
  probe
  misc_feature (1)..(25): SEQ ID NO: 2246; WAN024EV5_x_at; Start 380; Stop 404
tttccatctcaacttcaactgttat

SEQ ID NO: 183532 - DNA, 25 bp, Artificial
  probe
  misc_feature (1)..(25): SEQ ID NO: 2246; WAN024EV5_x_at; Start 369; Stop 393
tgcccatcagctttccatctcaact

SEQ ID NO: 183533 - DNA, 25 bp, Artificial
  probe
  misc_feature (1)..(25): SEQ ID NO: 2246; WAN024EV5_x_at; Start 377; Stop 401
agctttccatctcaacttcaactgt

SEQ ID NO: 183534 - DNA, 25 bp, Artificial
  probe
  misc_feature (1)..(25): SEQ ID NO: 2246; WAN024EV5_x_at; Start 461; Stop 485
tgtcttgggatgagtatgcttttac

SEQ ID NO: 183535 - DNA, 25 bp, Artificial
  probe
  misc_feature (1)..(25): SEQ ID NO: 2246; WAN024EV5_x_at; Start 386; Stop 410
tctcaacttcaactgttattcgtaa

SEQ ID NO: 183536 - DNA, 25 bp, Artificial
  probe
  misc_feature (1)..(25): SEQ ID NO: 2246; WAN024EV5_x_at; Start 179; Stop 203
aaattccttatcttgaaacgactgg

SEQ ID NO: 183537 - DNA, 25 bp, Artificial
  probe
  misc_feature (1)..(25): SEQ ID NO: 2246; WAN024EV5_x_at; Start 116; Stop 140
acgccccatcttgccctgagtgcgg

SEQ ID NO: 183538 - DNA, 25 bp, Artificial
  probe
  misc_feature (1)..(25): SEQ ID NO: 2246; WAN024EV5_x_at; Start 464; Stop 488
cttgggatgagtatgcttttacaaa

SEQ ID NO: 183539 - DNA, 25 bp, Artificial
  probe
  misc_feature (1)..(25): SEQ ID NO: 2246; WAN024EV5_x_at; Start 1123; Stop 1147
gcgaccaataatctcatcaaactta

SEQ ID NO: 183540 - DNA, 25 bp, Artificial
  probe
  misc_feature (1)..(25): SEQ ID NO: 2246; WAN024EV5_x_at; Start 370; Stop 394
gcccatcagctttccatctcaactt

SEQ ID NO: 183541 - DNA, 25 bp, Artificial
  probe
  misc_feature (1)..(25): SEQ ID NO: 3003; WAN024EV6_at; Start 292; Stop 316
gtagaagatatcattgatacaggtc

SEQ ID NO: 183542 - DNA, 25 bp, Artificial
  probe
  misc_feature (1)..(25): SEQ ID NO: 3003; WAN024EV6_at; Start 303; Stop 327
cattgatacaggtcaaactttgaag

SEQ ID NO: 183543 - DNA, 25 bp, Artificial
  probe
  misc_feature (1)..(25): SEQ ID NO: 3003; WAN024EV6_at; Start 129; Stop 153
aggatctattccttttatggctgaa

SEQ ID NO: 183544 - DNA, 25 bp, Artificial
  probe
  misc_feature (1)..(25): SEQ ID NO: 3003; WAN024EV6_at; Start 168; Stop 192
tgatacacatattgaaatggacttc

SEQ ID NO: 183545 - DNA, 25 bp, Artificial
  probe
  misc_feature (1)..(25): SEQ ID NO: 3003; WAN024EV6_at; Start 253; Stop 277
gatgtgactcaagatatcaaaggaa

SEQ ID NO: 183546 - DNA, 25 bp, Artificial
  probe
  misc_feature (1)..(25): SEQ ID NO: 3003; WAN024EV6_at; Start 35; Stop 59
cacacgatgaaattacagaagcagc

SEQ ID NO: 183547 - DNA, 25 bp, Artificial
  probe
  misc_feature (1)..(25): SEQ ID NO: 3003; WAN024EV6_at; Start 434; Stop 458
gctttactatcccaaatgagtttgt

SEQ ID NO: 183548 - DNA, 25 bp, Artificial
  probe
  misc_feature (1)..(25): SEQ ID NO: 3003; WAN024EV6_at; Start 262; Stop 286
caagatatcaaaggaagacatgttc

SEQ ID NO: 183549 - DNA, 25 bp, Artificial
  probe
  misc_feature (1)..(25): SEQ ID NO: 3003; WAN024EV6_at; Start 221; Stop 245
cagcaagtagtggtgttatcaatat

SEQ ID NO: 183550 - DNA, 25 bp, Artificial
  probe
  misc_feature (1)..(25): SEQ ID NO: 3003; WAN024EV6_at; Start 364; Stop 388
tctgttaaaattgcaaccttgttgg

SEQ ID NO: 183551 - DNA, 25 bp, Artificial
  probe
  misc_feature (1)..(25): SEQ ID NO: 3003; WAN024EV6_at; Start 446; Stop 470
caaatgagtttgtagtaggttatgg

SEQ ID NO: 183552 - DNA, 25 bp, Artificial
  probe
  misc_feature (1)..(25): SEQ ID NO: 3003; WAN024EV6_at; Start 55; Stop 79
gcagctaaaaaactaggtgctcaat

SEQ ID NO: 183553 - DNA, 25 bp, Artificial
  probe
  misc_feature (1)..(25): SEQ ID NO: 3003; WAN024EV6_at; Start 19; Stop 43
aaaaaagtcctcgtttcacacgatg

SEQ ID NO: 183554 - DNA, 25 bp, Artificial
  probe
  misc_feature (1)..(25): SEQ ID NO: 3003; WAN024EV6_at; Start 91; Stop 115
tatgcaggaaaaaatccaatcttag

SEQ ID NO: 183555 - DNA, 25 bp, Artificial
  probe
  misc_feature (1)..(25): SEQ ID NO: 3003; WAN024EV6_at; Start 502; Stop 526
ccttatattggagtattgaaagagg

SEQ ID NO: 183556 - DNA, 25 bp, Artificial
  probe
  misc_feature (1)..(25): SEQ ID NO: 3003; WAN024EV6_at; Start 375; Stop 399
tgcaaccttgttggataaaccagaa

SEQ ID NO: 183557 - DNA, 25 bp, Artificial
  probe
  misc_feature (1)..(25): SEQ ID NO: 3003; WAN024EV6_at; Start 385; Stop 409
ttggataaaccagaaggacgtgttg

SEQ ID NO: 183558 - DNA, 25 bp, Artificial
  probe
  misc_feature (1)..(25): SEQ ID NO: 3003; WAN024EV6_at; Start 239; Stop 263
tcaatattaaacaagatgtgactca

SEQ ID NO: 183559 - DNA, 25 bp, Artificial
  probe
  misc_feature (1)..(25): SEQ ID NO: 3003; WAN024EV6_at; Start 490; Stop 514
tatcgtaatcttccttatattggag

SEQ ID NO: 183560 - DNA, 25 bp, Artificial
  probe
  misc_feature (1)..(25): SEQ ID NO: 3003; WAN024EV6_at; Start 139; Stop 163
ccttttatggctgaattggtcaaac

SEQ ID NO: 183561 - DNA, 25 bp, Artificial
  probe
  misc_feature (1)..(25): SEQ ID NO: 3003; WAN024EV6_at; Start 407; Stop 431
ttgtagaaattgaggcagactatac

SEQ ID NO: 183562 - DNA, 25 bp, Artificial
  probe
  misc_feature (1)..(25): SEQ ID NO: 3003; WAN024EV6_at; Start 275; Stop 299
gaagacatgttctatttgtagaaga

SEQ ID NO: 183563 - DNA, 25 bp, Artificial
  probe
  misc_feature (1)..(25): SEQ ID NO: 3003; WAN024EV6_at; Start 318; Stop 342
aactttgaagaatttgcgagatatg

SEQ ID NO: 183564 - DNA, 25 bp, Artificial
  probe
  misc_feature (1)..(25): SEQ ID NO: 3003; WAN024EV6_at; Start 183; Stop 207
aatggacttcatgatggtttctagc

SEQ ID NO: 183565 - DNA, 25 bp, Artificial
  probe
  misc_feature (1)..(25): SEQ ID NO: 3003; WAN024EV6_at; Start 65; Stop 89
aactaggtgctcaattaactaaaga

SEQ ID NO: 183566 - DNA, 25 bp, Artificial
  probe
  misc_feature (1)..(25): SEQ ID NO: 3003; WAN024EV6_at; Start 394; Stop 418
ccagaaggacgtgttgtagaaattg

SEQ ID NO: 183567 - DNA, 25 bp, Artificial
  probe
  misc_feature (1)..(25): SEQ ID NO: 3003; WAN024EV6_at; Start 475; Stop 499
gactacaaagaaaattatcgtaatc

SEQ ID NO: 183568 - DNA, 25 bp, Artificial
  probe
  misc_feature (1)..(25): SEQ ID NO: 3003; WAN024EV6_at; Start 512; Stop 536
gagtattgaaagaggaagtgtattc

SEQ ID NO: 183569 - DNA, 25 bp, Artificial
  probe
  misc_feature (1)..(25): SEQ ID NO: 3003; WAN024EV6_at; Start 151; Stop 175
gaattggtcaaacatattgatacac

SEQ ID NO: 183570 - DNA, 25 bp, Artificial
  probe
  misc_feature (1)..(25): SEQ ID NO: 3003; WAN024EV6_at; Start 50; Stop 74
cagaagcagctaaaaaactaggtgc

SEQ ID NO: 183571 - DNA, 25 bp, Artificial
  probe
  misc_feature (1)..(25): SEQ ID NO: 3003; WAN024EV6_at; Start 461; Stop 485
taggttatggtttagactacaaaga

SEQ ID NO: 183572 - DNA, 25 bp, Artificial
  probe
  misc_feature (1)..(25): SEQ ID NO: 3003; WAN024EV6_at; Start 198; Stop 222
ggtttctagctaccatggtggaaca

SEQ ID NO: 183573 - DNA, 25 bp, Artificial
  probe
  misc_feature (1)..(25): SEQ ID NO: 3003; WAN024EV6_at; Start 208; Stop 232
taccatggtggaacagcaagtagtg

SEQ ID NO: 183574 - DNA, 25 bp, Artificial
  probe
  misc_feature (1)..(25): SEQ ID NO: 3003; WAN024EV6_at; Start 353; Stop 377
gagaagcagcttctgttaaaattgc

SEQ ID NO: 183575 - DNA, 25 bp, Artificial
  probe
  misc_feature (1)..(25): SEQ ID NO: 1394; WAN024EV7_at; Start 340; Stop 364
aatggtatcaagtctattattcaac

SEQ ID NO: 183576 - DNA, 25 bp, Artificial
  probe
  misc_feature (1)..(25): SEQ ID NO: 1394; WAN024EV7_at; Start 425; Stop 449
tgtcagttgttcatcatgttttgag

SEQ ID NO: 183577 - DNA, 25 bp, Artificial
  probe
  misc_feature (1)..(25): SEQ ID NO: 1394; WAN024EV7_at; Start 44; Stop 68
attttgaaacaaaacacaatgttgg

SEQ ID NO: 183578 - DNA, 25 bp, Artificial
  probe
  misc_feature (1)..(25): SEQ ID NO: 1394; WAN024EV7_at; Start 492; Stop 516
tgacaaagttgacgattctgtaaac

SEQ ID NO: 183579 - DNA, 25 bp, Artificial
  probe
  misc_feature (1)..(25): SEQ ID NO: 1394; WAN024EV7_at; Start 88; Stop 112
ctagcgaagaaacagaatgtcactt

SEQ ID NO: 183580 - DNA, 25 bp, Artificial
  probe
  misc_feature (1)..(25): SEQ ID NO: 1394; WAN024EV7_at; Start 183; Stop 207
taaaccaacgacctttatgaatgaa

SEQ ID NO: 183581 - DNA, 25 bp, Artificial
  probe
  misc_feature (1)..(25): SEQ ID NO: 1394; WAN024EV7_at; Start 324; Stop 348
ctcagcaggtggtcataatggtatc

SEQ ID NO: 183582 - DNA, 25 bp, Artificial
  probe
  misc_feature (1)..(25): SEQ ID NO: 1394; WAN024EV7_at; Start 216; Stop 240
agcagttcatgctttattaacttac

SEQ ID NO: 183583 - DNA, 25 bp, Artificial
  probe
  misc_feature (1)..(25): SEQ ID NO: 1394; WAN024EV7_at; Start 283; Stop 307
cttgacatggaagttgggaaaattc

SEQ ID NO: 183584 - DNA, 25 bp, Artificial
  probe
  misc_feature (1)..(25): SEQ ID NO: 1394; WAN024EV7_at; Start 384; Stop 408
taaccgtgttaagattggaattgga

SEQ ID NO: 183585 - DNA, 25 bp, Artificial
  probe
  misc_feature (1)..(25): SEQ ID NO: 1394; WAN024EV7_at; Start 236; Stop 260
cttactatggtttggatattgacga

SEQ ID NO: 183586 - DNA, 25 bp, Artificial
  probe
  misc_feature (1)..(25): SEQ ID NO: 1394; WAN024EV7_at; Start 305; Stop 329
ttcgtttaagagcaaaaggctcagc

SEQ ID NO: 183587 - DNA, 25 bp, Artificial
  probe
  misc_feature (1)..(25): SEQ ID NO: 1394; WAN024EV7_at; Start 439; Stop 463
catgttttgagtaagtttgacaggg

SEQ ID NO: 183588 - DNA, 25 bp, Artificial
  probe
  misc_feature (1)..(25): SEQ ID NO: 1394; WAN024EV7_at; Start 367; Stop 391
ataggaactcaggtctttaaccgtg

SEQ ID NO: 183589 - DNA, 25 bp, Artificial
  probe
  misc_feature (1)..(25): SEQ ID NO: 1394; WAN024EV7_at; Start 145; Stop 169
gcatcctttttcctaaatggagaaa

SEQ ID NO: 183590 - DNA, 25 bp, Artificial
  probe
  misc_feature (1)..(25): SEQ ID NO: 1394; WAN024EV7_at; Start 78; Stop 102
gattgatcaactagcgaagaaacag

SEQ ID NO: 183591 - DNA, 25 bp, Artificial
  probe
  misc_feature (1)..(25): SEQ ID NO: 1394; WAN024EV7_at; Start 548; Stop 572
caatgcagaggtataacggataact

SEQ ID NO: 183592 - DNA, 25 bp, Artificial
  probe
  misc_feature (1)..(25): SEQ ID NO: 1394; WAN024EV7_at; Start 540; Stop 564
tgagaaaacaatgcagaggtataac

SEQ ID NO: 183593 - DNA, 25 bp, Artificial
  probe
  misc_feature (1)..(25): SEQ ID NO: 1394; WAN024EV7_at; Start 256; Stop 280
gacgatttacttatcatttacgatg

SEQ ID NO: 183594 - DNA, 25 bp, Artificial
  probe
  misc_feature (1)..(25): SEQ ID NO: 1394; WAN024EV7_at; Start 502; Stop 526
gacgattctgtaaactactatttac

SEQ ID NO: 183595 - DNA, 25 bp, Artificial
  probe
  misc_feature (1)..(25): SEQ ID NO: 1394; WAN024EV7_at; Start 412; Stop 436
cctaaaaatggtatgtcagttgttc

SEQ ID NO: 183596 - DNA, 25 bp, Artificial
  probe
  misc_feature (1)..(25): SEQ ID NO: 1394; WAN024EV7_at; Start 404; Stop 428
ttggaagacctaaaaatggtatgtc

SEQ ID NO: 183597 - DNA, 25 bp, Artificial
  probe
  misc_feature (1)..(25): SEQ ID NO: 1394; WAN024EV7_at; Start 194; Stop 218
cctttatgaatgaaagtggaaaagc

SEQ ID NO: 183598 - DNA, 25 bp, Artificial
  probe
  misc_feature (1)..(25): SEQ ID NO: 1394; WAN024EV7_at; Start 118; Stop 142
cacgataagatatttcaagctgacc

SEQ ID NO: 183599 - DNA, 25 bp, Artificial
  probe
  misc_feature (1)..(25): SEQ ID NO: 1394; WAN024EV7_at; Start 316; Stop 340
gcaaaaggctcagcaggtggtcata

SEQ ID NO: 183600 - DNA, 25 bp, Artificial
  probe
  misc_feature (1)..(25): SEQ ID NO: 1394; WAN024EV7_at; Start 136; Stop 160
gctgacctagcatcctttttcctaa

SEQ ID NO: 183601 - DNA, 25 bp, Artificial
  probe
  misc_feature (1)..(25): SEQ ID NO: 1394; WAN024EV7_at; Start 102; Stop 126
gaatgtcacttttacacacgataag

SEQ ID NO: 183602 - DNA, 25 bp, Artificial
  probe
  misc_feature (1)..(25): SEQ ID NO: 1394; WAN024EV7_at; Start 393; Stop 417
taagattggaattggaagacctaaa

SEQ ID NO: 183603 - DNA, 25 bp, Artificial
  probe
  misc_feature (1)..(25): SEQ ID NO: 1394; WAN024EV7_at; Start 126; Stop 150
gatatttcaagctgacctagcatcc

SEQ ID NO: 183604 - DNA, 25 bp, Artificial
  probe
  misc_feature (1)..(25): SEQ ID NO: 1394; WAN024EV7_at; Start 58; Stop 82
cacaatgttggttttatgttgattg

SEQ ID NO: 183605 - DNA, 25 bp, Artificial
  probe
  misc_feature (1)..(25): SEQ ID NO: 1394; WAN024EV7_at; Start 329; Stop 353
caggtggtcataatggtatcaagtc

SEQ ID NO: 183606 - DNA, 25 bp, Artificial
  probe
  misc_feature (1)..(25): SEQ ID NO: 1394; WAN024EV7_at; Start 204; Stop 228
tgaaagtggaaaagcagttcatgct

SEQ ID NO: 183607 - DNA, 25 bp, Artificial
  probe
  misc_feature (1)..(25): SEQ ID NO: 1394; WAN024EV7_at; Start 357; Stop 381
tattcaacatataggaactcaggtc

SEQ ID NO: 183608 - DNA, 25 bp, Artificial
  probe
  misc_feature (1)..(25): SEQ ID NO: 1394; WAN024EV7_at; Start 270; Stop 294
catttacgatgatcttgacatggaa

SEQ ID NO: 183609 - DNA, 25 bp, Artificial
  probe
  misc_feature (1)..(25): SEQ ID NO: 1507; WAN024EV8_at; Start 903; Stop 927
tcgcgcttggactttcaaacgtggt

SEQ ID NO: 183610 - DNA, 25 bp, Artificial
  probe
  misc_feature (1)..(25): SEQ ID NO: 1507; WAN024EV8_at; Start 888; Stop 912
tggtgaaaaagaagttcgcgcttgg

SEQ ID NO: 183611 - DNA, 25 bp, Artificial
  probe
  misc_feature (1)..(25): SEQ ID NO: 1507; WAN024EV8_at; Start 802; Stop 826
gaagccattggtttgacagaatcag

SEQ ID NO: 183612 - DNA, 25 bp, Artificial
  probe
  misc_feature (1)..(25): SEQ ID NO: 1507; WAN024EV8_at; Start 936; Stop 960
tcctcaagcagctggtattatccac

SEQ ID NO: 183613 - DNA, 25 bp, Artificial
  probe
  misc_feature (1)..(25): SEQ ID NO: 1507; WAN024EV8_at; Start 470; Stop 494
tggcacgtacgcaaaaagataaaga

SEQ ID NO: 183614 - DNA, 25 bp, Artificial
  probe
  misc_feature (1)..(25): SEQ ID NO: 1507; WAN024EV8_at; Start 828; Stop 852
tgtagataagttgacgcgtgcagct

SEQ ID NO: 183615 - DNA, 25 bp, Artificial
  probe
  misc_feature (1)..(25): SEQ ID NO: 1507; WAN024EV8_at; Start 20; Stop 44
cagcaggtatcgttggtttgccaaa

SEQ ID NO: 183616 - DNA, 25 bp, Artificial
  probe
  misc_feature (1)..(25): SEQ ID NO: 1507; WAN024EV8_at; Start 843; Stop 867
gcgtgcagcttaccacttgcttgga

SEQ ID NO: 183617 - DNA, 25 bp, Artificial
  probe
  misc_feature (1)..(25): SEQ ID NO: 1507; WAN024EV8_at; Start 350; Stop 374
gcgagcaaggacgtgaagacgcctt

SEQ ID NO: 183618 - DNA, 25 bp, Artificial
  probe
  misc_feature (1)..(25): SEQ ID NO: 1507; WAN024EV8_at; Start 630; Stop 654
tctttatgtagctaatgtggacgag

SEQ ID NO: 183619 - DNA, 25 bp, Artificial
  probe
  misc_feature (1)..(25): SEQ ID NO: 1507; WAN024EV8_at; Start 370; Stop 394
gcctttgtagatccacttgcagata

SEQ ID NO: 183620 - DNA, 25 bp, Artificial
  probe
  misc_feature (1)..(25): SEQ ID NO: 1507; WAN024EV8_at; Start 918; Stop 942
caaacgtggtatgaaggctcctcaa

SEQ ID NO: 183621 - DNA, 25 bp, Artificial
  probe
  misc_feature (1)..(25): SEQ ID NO: 1507; WAN024EV8_at; Start 451; Stop 475
tatgcgcgtgtagaaaagatggcac

SEQ ID NO: 183622 - DNA, 25 bp, Artificial
  probe
  misc_feature (1)..(25): SEQ ID NO: 1507; WAN024EV8_at; Start 151; Stop 175
gatgaacgcctacaaaaactaactg

SEQ ID NO: 183623 - DNA, 25 bp, Artificial
  probe
  misc_feature (1)..(25): SEQ ID NO: 1507; WAN024EV8_at; Start 3; Stop 27
gagaaatatggctttgacagcaggt

SEQ ID NO: 183624 - DNA, 25 bp, Artificial
  probe
  misc_feature (1)..(25): SEQ ID NO: 1507; WAN024EV8_at; Start 299; Stop 323
tagatgcgattgttcacgtagttcg

SEQ ID NO: 183625 - DNA, 25 bp, Artificial
  probe
  misc_feature (1)..(25): SEQ ID NO: 1507; WAN024EV8_at; Start 1087; Stop 1111
caagatggcgatatcatggaattcc

SEQ ID NO: 183626 - DNA, 25 bp, Artificial
  probe
  misc_feature (1)..(25): SEQ ID NO: 1507; WAN024EV8_at; Start 544; Stop 568
gacgggaaatcagctcgtaccattg

SEQ ID NO: 183627 - DNA, 25 bp, Artificial
  probe
  misc_feature (1)..(25): SEQ ID NO: 1507; WAN024EV8_at; Start 647; Stop 671
tggacgaggatgtggtttcagaacc

SEQ ID NO: 183628 - DNA, 25 bp, Artificial
  probe
  misc_feature (1)..(25): SEQ ID NO: 1507; WAN024EV8_at; Start 282; Stop 306
ggccaatattcgtgaagtagatgcg

SEQ ID NO: 183629 - DNA, 25 bp, Artificial
  probe
  misc_feature (1)..(25): SEQ ID NO: 1507; WAN024EV8_at; Start 970; Stop 994
gaaaaaggctttattcgtgcagtaa

SEQ ID NO: 183630 - DNA, 25 bp, Artificial
  probe
  misc_feature (1)..(25): SEQ ID NO: 1507; WAN024EV8_at; Start 524; Stop 548
agattaaaccagtcctagaagacgg

SEQ ID NO: 183631 - DNA, 25 bp, Artificial
  probe
  misc_feature (1)..(25): SEQ ID NO: 1507; WAN024EV8_at; Start 744; Stop 768
tgcgcgtgctgaggaagaaatttct

SEQ ID NO: 183632 - DNA, 25 bp, Artificial
  probe
  misc_feature (1)..(25): SEQ ID NO: 1507; WAN024EV8_at; Start 436; Stop 460
tcagtgaacaaacgatatgcgcgtg

SEQ ID NO: 183633 - DNA, 25 bp, Artificial
  probe
  misc_feature (1)..(25): SEQ ID NO: 1507; WAN024EV8_at; Start 954; Stop 978
tatccactcagactttgaaaaaggc

SEQ ID NO: 183634 - DNA, 25 bp, Artificial
  probe
  misc_feature (1)..(25): SEQ ID NO: 1507; WAN024EV8_at; Start 728; Stop 752
aagtagtcgttatttctgcgcgtgc

SEQ ID NO: 183635 - DNA, 25 bp, Artificial
  probe
  misc_feature (1)..(25): SEQ ID NO: 1507; WAN024EV8_at; Start 664; Stop 688
tcagaacctgactctatcgactatg

SEQ ID NO: 183636 - DNA, 25 bp, Artificial
  probe
  misc_feature (1)..(25): SEQ ID NO: 1507; WAN024EV8_at; Start 856; Stop 880
cacttgcttggattgggaacttact

SEQ ID NO: 183637 - DNA, 25 bp, Artificial
  probe
  misc_feature (1)..(25): SEQ ID NO: 1507; WAN024EV8_at; Start 86; Stop 110
gagcagaggcagcaaactacccatt

SEQ ID NO: 183638 - DNA, 25 bp, Artificial
  probe
  misc_feature (1)..(25): SEQ ID NO: 1507; WAN024EV8_at; Start 702; Stop 726
tgaatttgcagcgacagaaaatgct

SEQ ID NO: 183639 - DNA, 25 bp, Artificial
  probe
  misc_feature (1)..(25): SEQ ID NO: 1507; WAN024EV8_at; Start 71; Stop 95
caattacaaaagcaggagcagaggc

SEQ ID NO: 183640 - DNA, 25 bp, Artificial
  probe
  misc_feature (1)..(25): SEQ ID NO: 1507; WAN024EV8_at; Start 228; Stop 252
tgcagggattgtaaaaggagcttca

SEQ ID NO: 183641 - DNA, 25 bp, Artificial
  probe
  misc_feature (1)..(25): SEQ ID NO: 1507; WAN024EV8_at; Start 1040; Stop 1064
taaaagaagctggacgcttgcgtga

SEQ ID NO: 183642 - DNA, 25 bp, Artificial
  probe
  misc_feature (1)..(25): SEQ ID NO: 1507; WAN024EV8_at; Start 869; Stop 893
tgggaacttacttcacagctggtga

SEQ ID NO: 183643 - DNA, 25 bp, Artificial
  probe
  misc_feature (1)..(25): SEQ ID NO: 4047; WAN024EV9_at; Start 29; Stop 53
aagctcatctcaaagattcagatga

SEQ ID NO: 183644 - DNA, 25 bp, Artificial
  probe
  misc_feature (1)..(25): SEQ ID NO: 4047; WAN024EV9_at; Start 28; Stop 52
aaagctcatctcaaagattcagatg

SEQ ID NO: 183645 - DNA, 25 bp, Artificial
  probe
  misc_feature (1)..(25): SEQ ID NO: 4047; WAN024EV9_at; Start 91; Stop 115
agctgtttgaagctttgtccttgct

SEQ ID NO: 183646 - DNA, 25 bp, Artificial
  probe
  misc_feature (1)..(25): SEQ ID NO: 4047; WAN024EV9_at; Start 89; Stop 113
aaagctgtttgaagctttgtccttg

SEQ ID NO: 183647 - DNA, 25 bp, Artificial
  probe
  misc_feature (1)..(25): SEQ ID NO: 4047; WAN024EV9_at; Start 99; Stop 123
gaagctttgtccttgctttcttagt

SEQ ID NO: 183648 - DNA, 25 bp, Artificial
  probe
  misc_feature (1)..(25): SEQ ID NO: 4047; WAN024EV9_at; Start 34; Stop 58
catctcaaagattcagatgacttta

SEQ ID NO: 183649 - DNA, 25 bp, Artificial
  probe
  misc_feature (1)..(25): SEQ ID NO: 4047; WAN024EV9_at; Start 62; Stop 86
cagaaacatccacaccaaatctttt

SEQ ID NO: 183650 - DNA, 25 bp, Artificial
  probe
  misc_feature (1)..(25): SEQ ID NO: 4047; WAN024EV9_at; Start 77; Stop 101
caaatctttttgaaagctgtttgaa

SEQ ID NO: 183651 - DNA, 25 bp, Artificial
  probe
  misc_feature (1)..(25): SEQ ID NO: 4047; WAN024EV9_at; Start 23; Stop 47
tttataaagctcatctcaaagattc

SEQ ID NO: 183652 - DNA, 25 bp, Artificial
  probe
  misc_feature (1)..(25): SEQ ID NO: 4047; WAN024EV9_at; Start 102; Stop 126
gctttgtccttgctttcttagttca

SEQ ID NO: 183653 - DNA, 25 bp, Artificial
  probe
  misc_feature (1)..(25): SEQ ID NO: 4047; WAN024EV9_at; Start 72; Stop 96
cacaccaaatctttttgaaagctgt

SEQ ID NO: 183654 - DNA, 25 bp, Artificial
  probe
  misc_feature (1)..(25): SEQ ID NO: 4047; WAN024EV9_at; Start 30; Stop 54
agctcatctcaaagattcagatgac

SEQ ID NO: 183655 - DNA, 25 bp, Artificial
  probe
  misc_feature (1)..(25): SEQ ID NO: 4047; WAN024EV9_at; Start 81; Stop 105
tctttttgaaagctgtttgaagctt

SEQ ID NO: 183656 - DNA, 25 bp, Artificial
  probe
  misc_feature (1)..(25): SEQ ID NO: 4047; WAN024EV9_at; Start 70; Stop 94
tccacaccaaatctttttgaaagct

SEQ ID NO: 183657 - DNA, 25 bp, Artificial
  probe
  misc_feature (1)..(25): SEQ ID NO: 4047; WAN024EV9_at; Start 87; Stop 111
tgaaagctgtttgaagctttgtcct

SEQ ID NO: 183658 - DNA, 25 bp, Artificial
  probe
  misc_feature (1)..(25): SEQ ID NO: 4047; WAN024EV9_at; Start 71; Stop 95
ccacaccaaatctttttgaaagctg

SEQ ID NO: 183659 - DNA, 25 bp, Artificial
  probe
  misc_feature (1)..(25): SEQ ID NO: 4047; WAN024EV9_at; Start 79; Stop 103
aatctttttgaaagctgtttgaagc

SEQ ID NO: 183660 - DNA, 25 bp, Artificial
  probe
  misc_feature (1)..(25): SEQ ID NO: 4047; WAN024EV9_at; Start 64; Stop 88
gaaacatccacaccaaatctttttg

SEQ ID NO: 183661 - DNA, 25 bp, Artificial
  probe
  misc_feature (1)..(25): SEQ ID NO: 4047; WAN024EV9_at; Start 61; Stop 85
ccagaaacatccacaccaaatcttt

SEQ ID NO: 183662 - DNA, 25 bp, Artificial
  probe
  misc_feature (1)..(25): SEQ ID NO: 4047; WAN024EV9_at; Start 31; Stop 55
gctcatctcaaagattcagatgact

SEQ ID NO: 183663 - DNA, 25 bp, Artificial
  probe
  misc_feature (1)..(25): SEQ ID NO: 4047; WAN024EV9_at; Start 90; Stop 114
aagctgtttgaagctttgtccttgc

SEQ ID NO: 183664 - DNA, 25 bp, Artificial
  probe
  misc_feature (1)..(25): SEQ ID NO: 4047; WAN024EV9_at; Start 88; Stop 112
gaaagctgtttgaagctttgtcctt

SEQ ID NO: 183665 - DNA, 25 bp, Artificial
  probe
  misc_feature (1)..(25): SEQ ID NO: 4047; WAN024EV9_at; Start 26; Stop 50
ataaagctcatctcaaagattcaga

SEQ ID NO: 183666 - DNA, 25 bp, Artificial
  probe
  misc_feature (1)..(25): SEQ ID NO: 4047; WAN024EV9_at; Start 27; Stop 51
taaagctcatctcaaagattcagat

SEQ ID NO: 183667 - DNA, 25 bp, Artificial
  probe
  misc_feature (1)..(25): SEQ ID NO: 4047; WAN024EV9_at; Start 94; Stop 118
tgtttgaagctttgtccttgctttc

SEQ ID NO: 183668 - DNA, 25 bp, Artificial
  probe
  misc_feature (1)..(25): SEQ ID NO: 4047; WAN024EV9_at; Start 95; Stop 119
gtttgaagctttgtccttgctttct

SEQ ID NO: 183669 - DNA, 25 bp, Artificial
  probe
  misc_feature (1)..(25): SEQ ID NO: 4047; WAN024EV9_at; Start 98; Stop 122
tgaagctttgtccttgctttcttag

SEQ ID NO: 183670 - DNA, 25 bp, Artificial
  probe
  misc_feature (1)..(25): SEQ ID NO: 4047; WAN024EV9_at; Start 74; Stop 98
caccaaatctttttgaaagctgttt

SEQ ID NO: 183671 - DNA, 25 bp, Artificial
  probe
  misc_feature (1)..(25): SEQ ID NO: 4047; WAN024EV9_at; Start 76; Stop 100
ccaaatctttttgaaagctgtttga

SEQ ID NO: 183672 - DNA, 25 bp, Artificial
  probe
  misc_feature (1)..(25): SEQ ID NO: 4047; WAN024EV9_at; Start 86; Stop 110
ttgaaagctgtttgaagctttgtcc

SEQ ID NO: 183673 - DNA, 25 bp, Artificial
  probe
  misc_feature (1)..(25): SEQ ID NO: 4047; WAN024EV9_at; Start 68; Stop 92
catccacaccaaatctttttgaaag

SEQ ID NO: 183674 - DNA, 25 bp, Artificial
  probe
  misc_feature (1)..(25): SEQ ID NO: 4047; WAN024EV9_at; Start 25; Stop 49
tataaagctcatctcaaagattcag

SEQ ID NO: 183675 - DNA, 25 bp, Artificial
  probe
  misc_feature (1)..(25): SEQ ID NO: 4047; WAN024EV9_at; Start 92; Stop 116
gctgtttgaagctttgtccttgctt

SEQ ID NO: 183676 - DNA, 25 bp, Artificial
  probe
  misc_feature (1)..(25): SEQ ID NO: 4047; WAN024EV9_at; Start 65; Stop 89
aaacatccacaccaaatctttttga

SEQ ID NO: 183677 - DNA, 25 bp, Artificial
  probe
  misc_feature (1)..(25): SEQ ID NO: 3383; WAN024EVA_at; Start 55; Stop 79
agattcaccagtagacttgaccgca

SEQ ID NO: 183678 - DNA, 25 bp, Artificial
  probe
  misc_feature (1)..(25): SEQ ID NO: 3383; WAN024EVA_at; Start 52; Stop 76
catagattcaccagtagacttgacc

SEQ ID NO: 183679 - DNA, 25 bp, Artificial
  probe
  misc_feature (1)..(25): SEQ ID NO: 3383; WAN024EVA_at; Start 5; Stop 29
aaggcaagactgacgtggttgatga

SEQ ID NO: 183680 - DNA, 25 bp, Artificial
  probe
  misc_feature (1)..(25): SEQ ID NO: 3383; WAN024EVA_at; Start 59; Stop 83
tcaccagtagacttgaccgcagatt

SEQ ID NO: 183681 - DNA, 25 bp, Artificial
  probe
  misc_feature (1)..(25): SEQ ID NO: 3383; WAN024EVA_at; Start 17; Stop 41
acgtggttgatgagattttggaaga

SEQ ID NO: 183682 - DNA, 25 bp, Artificial
  probe
  misc_feature (1)..(25): SEQ ID NO: 3383; WAN024EVA_at; Start 42; Stop 66
gtattacaatcatagattcaccagt

SEQ ID NO: 183683 - DNA, 25 bp, Artificial
  probe
  misc_feature (1)..(25): SEQ ID NO: 3383; WAN024EVA_at; Start 72; Stop 96
tgaccgcagatttaactatagtaga

SEQ ID NO: 183684 - DNA, 25 bp, Artificial
  probe
  misc_feature (1)..(25): SEQ ID NO: 3383; WAN024EVA_at; Start 8; Stop 32
gcaagactgacgtggttgatgagat

SEQ ID NO: 183685 - DNA, 25 bp, Artificial
  probe
  misc_feature (1)..(25): SEQ ID NO: 3383; WAN024EVA_at; Start 4; Stop 28
caaggcaagactgacgtggttgatg

SEQ ID NO: 183686 - DNA, 25 bp, Artificial
  probe
  misc_feature (1)..(25): SEQ ID NO: 3383; WAN024EVA_at; Start 58; Stop 82
ttcaccagtagacttgaccgcagat

SEQ ID NO: 183687 - DNA, 25 bp, Artificial
  probe
  misc_feature (1)..(25): SEQ ID NO: 3383; WAN024EVA_at; Start 70; Stop 94
cttgaccgcagatttaactatagta

SEQ ID NO: 183688 - DNA, 25 bp, Artificial
  probe
  misc_feature (1)..(25): SEQ ID NO: 3383; WAN024EVA_at; Start 62; Stop 86
ccagtagacttgaccgcagatttaa

SEQ ID NO: 183689 - DNA, 25 bp, Artificial
  probe
  misc_feature (1)..(25): SEQ ID NO: 3383; WAN024EVA_at; Start 9; Stop 33
caagactgacgtggttgatgagatt

SEQ ID NO: 183690 - DNA, 25 bp, Artificial
  probe
  misc_feature (1)..(25): SEQ ID NO: 3383; WAN024EVA_at; Start 54; Stop 78
tagattcaccagtagacttgaccgc

SEQ ID NO: 183691 - DNA, 25 bp, Artificial
  probe
  misc_feature (1)..(25): SEQ ID NO: 3383; WAN024EVA_at; Start 48; Stop 72
caatcatagattcaccagtagactt

SEQ ID NO: 183692 - DNA, 25 bp, Artificial
  probe
  misc_feature (1)..(25): SEQ ID NO: 3383; WAN024EVA_at; Start 56; Stop 80
gattcaccagtagacttgaccgcag

SEQ ID NO: 183693 - DNA, 25 bp, Artificial
  probe
  misc_feature (1)..(25): SEQ ID NO: 3383; WAN024EVA_at; Start 61; Stop 85
accagtagacttgaccgcagattta

SEQ ID NO: 183694 - DNA, 25 bp, Artificial
  probe
  misc_feature (1)..(25): SEQ ID NO: 3383; WAN024EVA_at; Start 57; Stop 81
attcaccagtagacttgaccgcaga

SEQ ID NO: 183695 - DNA, 25 bp, Artificial
  probe
  misc_feature (1)..(25): SEQ ID NO: 3383; WAN024EVA_at; Start 28; Stop 52
gagattttggaagagtattacaatc

SEQ ID NO: 183696 - DNA, 25 bp, Artificial
  probe
  misc_feature (1)..(25): SEQ ID NO: 3383; WAN024EVA_at; Start 68; Stop 92
gacttgaccgcagatttaactatag

SEQ ID NO: 183697 - DNA, 25 bp, Artificial
  probe
  misc_feature (1)..(25): SEQ ID NO: 3383; WAN024EVA_at; Start 76; Stop 100
cgcagatttaactatagtagattga

SEQ ID NO: 183698 - DNA, 25 bp, Artificial
  probe
  misc_feature (1)..(25): SEQ ID NO: 3383; WAN024EVA_at; Start 33; Stop 57
tttggaagagtattacaatcataga

SEQ ID NO: 183699 - DNA, 25 bp, Artificial
  probe
  misc_feature (1)..(25): SEQ ID NO: 3383; WAN024EVA_at; Start 60; Stop 84
caccagtagacttgaccgcagattt

SEQ ID NO: 183700 - DNA, 25 bp, Artificial
  probe
  misc_feature (1)..(25): SEQ ID NO: 3383; WAN024EVA_at; Start 36; Stop 60
ggaagagtattacaatcatagattc

SEQ ID NO: 183701 - DNA, 25 bp, Artificial
  probe
  misc_feature (1)..(25): SEQ ID NO: 3383; WAN024EVA_at; Start 3; Stop 27
gcaaggcaagactgacgtggttgat

SEQ ID NO: 183702 - DNA, 25 bp, Artificial
  probe
  misc_feature (1)..(25): SEQ ID NO: 3383; WAN024EVA_at; Start 14; Stop 38
ctgacgtggttgatgagattttgga

SEQ ID NO: 183703 - DNA, 25 bp, Artificial
  probe
  misc_feature (1)..(25): SEQ ID NO: 3383; WAN024EVA_at; Start 63; Stop 87
cagtagacttgaccgcagatttaac

SEQ ID NO: 183704 - DNA, 25 bp, Artificial
  probe
  misc_feature (1)..(25): SEQ ID NO: 3383; WAN024EVA_at; Start 73; Stop 97
gaccgcagatttaactatagtagat

SEQ ID NO: 183705 - DNA, 25 bp, Artificial
  probe
  misc_feature (1)..(25): SEQ ID NO: 3383; WAN024EVA_at; Start 66; Stop 90
tagacttgaccgcagatttaactat

SEQ ID NO: 183706 - DNA, 25 bp, Artificial
  probe
  misc_feature (1)..(25): SEQ ID NO: 3383; WAN024EVA_at; Start 40; Stop 64
gagtattacaatcatagattcacca

SEQ ID NO: 183707 - DNA, 25 bp, Artificial
  probe
  misc_feature (1)..(25): SEQ ID NO: 3383; WAN024EVA_at; Start 1; Stop 25
ctgcaaggcaagactgacgtggttg

SEQ ID NO: 183708 - DNA, 25 bp, Artificial
  probe
  misc_feature (1)..(25): SEQ ID NO: 3383; WAN024EVA_at; Start 46; Stop 70
tacaatcatagattcaccagtagac

SEQ ID NO: 183709 - DNA, 25 bp, Artificial
  probe
  misc_feature (1)..(25): SEQ ID NO: 3383; WAN024EVA_at; Start 49; Stop 73
aatcatagattcaccagtagacttg

SEQ ID NO: 183710 - DNA, 25 bp, Artificial
  probe
  misc_feature (1)..(25): SEQ ID NO: 3383; WAN024EVA_at; Start 24; Stop 48
tgatgagattttggaagagtattac

SEQ ID NO: 183711 - DNA, 25 bp, Artificial
  probe
  misc_feature (1)..(25): SEQ ID NO: 5090; WAN024EVB_at; Start 47; Stop 71
cagctttctctgcttgttttcagca

SEQ ID NO: 183712 - DNA, 25 bp, Artificial
  probe
  misc_feature (1)..(25): SEQ ID NO: 5090; WAN024EVB_at; Start 61; Stop 85
tgttttcagcaaccacaagctctct

SEQ ID NO: 183713 - DNA, 25 bp, Artificial
  probe
  misc_feature (1)..(25): SEQ ID NO: 5090; WAN024EVB_at; Start 92; Stop 116
gaaagaactgtaatttttccatcta

SEQ ID NO: 183714 - DNA, 25 bp, Artificial
  probe
  misc_feature (1)..(25): SEQ ID NO: 5090; WAN024EVB_at; Start 1; Stop 25
ttgagaatgatgttttcttctctcg

SEQ ID NO: 183715 - DNA, 25 bp, Artificial
  probe
  misc_feature (1)..(25): SEQ ID NO: 5090; WAN024EVB_at; Start 82; Stop 106
ctctgtgagagaaagaactgtaatt

SEQ ID NO: 183716 - DNA, 25 bp, Artificial
  probe
  misc_feature (1)..(25): SEQ ID NO: 5090; WAN024EVB_at; Start 130; Stop 154
tctagtagtctgcaatcgcagctag

SEQ ID NO: 183717 - DNA, 25 bp, Artificial
  probe
  misc_feature (1)..(25): SEQ ID NO: 5090; WAN024EVB_at; Start 28; Stop 52
tcagatgaacccaactttacagctt

SEQ ID NO: 183718 - DNA, 25 bp, Artificial
  probe
  misc_feature (1)..(25): SEQ ID NO: 5090; WAN024EVB_at; Start 63; Stop 87
ttttcagcaaccacaagctctctgt

SEQ ID NO: 183719 - DNA, 25 bp, Artificial
  probe
  misc_feature (1)..(25): SEQ ID NO: 5090; WAN024EVB_at; Start 19; Stop 43
tctctcgtttcagatgaacccaact

SEQ ID NO: 183720 - DNA, 25 bp, Artificial
  probe
  misc_feature (1)..(25): SEQ ID NO: 5090; WAN024EVB_at; Start 53; Stop 77
tctctgcttgttttcagcaaccaca

SEQ ID NO: 183721 - DNA, 25 bp, Artificial
  probe
  misc_feature (1)..(25): SEQ ID NO: 5090; WAN024EVB_at; Start 80; Stop 104
ctctctgtgagagaaagaactgtaa

SEQ ID NO: 183722 - DNA, 25 bp, Artificial
  probe
  misc_feature (1)..(25): SEQ ID NO: 5090; WAN024EVB_at; Start 76; Stop 100
caagctctctgtgagagaaagaact

SEQ ID NO: 183723 - DNA, 25 bp, Artificial
  probe
  misc_feature (1)..(25): SEQ ID NO: 5090; WAN024EVB_at; Start 127; Stop 151
gcttctagtagtctgcaatcgcagc

SEQ ID NO: 183724 - DNA, 25 bp, Artificial
  probe
  misc_feature (1)..(25): SEQ ID NO: 5090; WAN024EVB_at; Start 153; Stop 177
aggtccttgcctccacgaccagaga

SEQ ID NO: 183725 - DNA, 25 bp, Artificial
  probe
  misc_feature (1)..(25): SEQ ID NO: 5090; WAN024EVB_at; Start 88; Stop 112
gagagaaagaactgtaatttttcca

SEQ ID NO: 183726 - DNA, 25 bp, Artificial
  probe
  misc_feature (1)..(25): SEQ ID NO: 5090; WAN024EVB_at; Start 132; Stop 156
tagtagtctgcaatcgcagctaggt

SEQ ID NO: 183727 - DNA, 25 bp, Artificial
  probe
  misc_feature (1)..(25): SEQ ID NO: 5090; WAN024EVB_at; Start 118; Stop 142
tattttttagcttctagtagtctgc

SEQ ID NO: 183728 - DNA, 25 bp, Artificial
  probe
  misc_feature (1)..(25): SEQ ID NO: 5090; WAN024EVB_at; Start 141; Stop 165
gcaatcgcagctaggtccttgcctc

SEQ ID NO: 183729 - DNA, 25 bp, Artificial
  probe
  misc_feature (1)..(25): SEQ ID NO: 5090; WAN024EVB_at; Start 55; Stop 79
tctgcttgttttcagcaaccacaag

SEQ ID NO: 183730 - DNA, 25 bp, Artificial
  probe
  misc_feature (1)..(25): SEQ ID NO: 5090; WAN024EVB_at; Start 69; Stop 93
gcaaccacaagctctctgtgagaga

SEQ ID NO: 183731 - DNA, 25 bp, Artificial
  probe
  misc_feature (1)..(25): SEQ ID NO: 5090; WAN024EVB_at; Start 31; Stop 55
gatgaacccaactttacagctttct

SEQ ID NO: 183732 - DNA, 25 bp, Artificial
  probe
  misc_feature (1)..(25): SEQ ID NO: 5090; WAN024EVB_at; Start 16; Stop 40
tcttctctcgtttcagatgaaccca

SEQ ID NO: 183733 - DNA, 25 bp, Artificial
  probe
  misc_feature (1)..(25): SEQ ID NO: 5090; WAN024EVB_at; Start 73; Stop 97
ccacaagctctctgtgagagaaaga

SEQ ID NO: 183734 - DNA, 25 bp, Artificial
  probe
  misc_feature (1)..(25): SEQ ID NO: 5090; WAN024EVB_at; Start 123; Stop 147
tttagcttctagtagtctgcaatcg

SEQ ID NO: 183735 - DNA, 25 bp, Artificial
  probe
  misc_feature (1)..(25): SEQ ID NO: 5090; WAN024EVB_at; Start 34; Stop 58
gaacccaactttacagctttctctg

SEQ ID NO: 183736 - DNA, 25 bp, Artificial
  probe
  misc_feature (1)..(25): SEQ ID NO: 5090; WAN024EVB_at; Start 66; Stop 90
tcagcaaccacaagctctctgtgag

SEQ ID NO: 183737 - DNA, 25 bp, Artificial
  probe
  misc_feature (1)..(25): SEQ ID NO: 5090; WAN024EVB_at; Start 138; Stop 162
tctgcaatcgcagctaggtccttgc

SEQ ID NO: 183738 - DNA, 25 bp, Artificial
  probe
  misc_feature (1)..(25): SEQ ID NO: 5090; WAN024EVB_at; Start 134; Stop 158
gtagtctgcaatcgcagctaggtcc

SEQ ID NO: 183739 - DNA, 25 bp, Artificial
  probe
  misc_feature (1)..(25): SEQ ID NO: 5090; WAN024EVB_at; Start 8; Stop 32
tgatgttttcttctctcgtttcaga

SEQ ID NO: 183740 - DNA, 25 bp, Artificial
  probe
  misc_feature (1)..(25): SEQ ID NO: 5090; WAN024EVB_at; Start 39; Stop 63
caactttacagctttctctgcttgt

SEQ ID NO: 183741 - DNA, 25 bp, Artificial
  probe
  misc_feature (1)..(25): SEQ ID NO: 5090; WAN024EVB_at; Start 125; Stop 149
tagcttctagtagtctgcaatcgca

SEQ ID NO: 183742 - DNA, 25 bp, Artificial
  probe
  misc_feature (1)..(25): SEQ ID NO: 5090; WAN024EVB_at; Start 96; Stop 120
gaactgtaatttttccatctattat

SEQ ID NO: 183743 - DNA, 25 bp, Artificial
  probe
  misc_feature (1)..(25): SEQ ID NO: 5090; WAN024EVB_at; Start 140; Stop 164
tgcaatcgcagctaggtccttgcct

SEQ ID NO: 183744 - DNA, 25 bp, Artificial
  probe
  misc_feature (1)..(25): SEQ ID NO: 5090; WAN024EVB_at; Start 25; Stop 49
gtttcagatgaacccaactttacag

SEQ ID NO: 183745 - DNA, 25 bp, Artificial
  probe
  misc_feature (1)..(25): SEQ ID NO: 4245; WAN024EVC_at; Start 36; Stop 60
tggtcgtggaggcaaggacctagct

SEQ ID NO: 183746 - DNA, 25 bp, Artificial
  probe
  misc_feature (1)..(25): SEQ ID NO: 4245; WAN024EVC_at; Start 4; Stop 28
taccgagatgaacatctcttcatca

SEQ ID NO: 183747 - DNA, 25 bp, Artificial
  probe
  misc_feature (1)..(25): SEQ ID NO: 4245; WAN024EVC_at; Start 14; Stop 38
aacatctcttcatcaatgtctctgg

SEQ ID NO: 183748 - DNA, 25 bp, Artificial
  probe
  misc_feature (1)..(25): SEQ ID NO: 4245; WAN024EVC_at; Start 7; Stop 31
cgagatgaacatctcttcatcaatg

SEQ ID NO: 183749 - DNA, 25 bp, Artificial
  probe
  misc_feature (1)..(25): SEQ ID NO: 4245; WAN024EVC_at; Start 22; Stop 46
ttcatcaatgtctctggtcgtggag

SEQ ID NO: 183750 - DNA, 25 bp, Artificial
  probe
  misc_feature (1)..(25): SEQ ID NO: 4245; WAN024EVC_at; Start 16; Stop 40
catctcttcatcaatgtctctggtc

SEQ ID NO: 183751 - DNA, 25 bp, Artificial
  probe
  misc_feature (1)..(25): SEQ ID NO: 4245; WAN024EVC_at; Start 5; Stop 29
accgagatgaacatctcttcatcaa

SEQ ID NO: 183752 - DNA, 25 bp, Artificial
  probe
  misc_feature (1)..(25): SEQ ID NO: 4245; WAN024EVC_at; Start 3; Stop 27
gtaccgagatgaacatctcttcatc

SEQ ID NO: 183753 - DNA, 25 bp, Artificial
  probe
  misc_feature (1)..(25): SEQ ID NO: 4245; WAN024EVC_at; Start 21; Stop 45
cttcatcaatgtctctggtcgtgga

SEQ ID NO: 183754 - DNA, 25 bp, Artificial
  probe
  misc_feature (1)..(25): SEQ ID NO: 4245; WAN024EVC_at; Start 47; Stop 71
gcaaggacctagctgcgattgcaga

SEQ ID NO: 183755 - DNA, 25 bp, Artificial
  probe
  misc_feature (1)..(25): SEQ ID NO: 4245; WAN024EVC_at; Start 44; Stop 68
gaggcaaggacctagctgcgattgc

SEQ ID NO: 183756 - DNA, 25 bp, Artificial
  probe
  misc_feature (1)..(25): SEQ ID NO: 4245; WAN024EVC_at; Start 18; Stop 42
tctcttcatcaatgtctctggtcgt

SEQ ID NO: 183757 - DNA, 25 bp, Artificial
  probe
  misc_feature (1)..(25): SEQ ID NO: 4245; WAN024EVC_at; Start 15; Stop 39
acatctcttcatcaatgtctctggt

SEQ ID NO: 183758 - DNA, 25 bp, Artificial
  probe
  misc_feature (1)..(25): SEQ ID NO: 4245; WAN024EVC_at; Start 46; Stop 70
ggcaaggacctagctgcgattgcag

SEQ ID NO: 183759 - DNA, 25 bp, Artificial
  probe
  misc_feature (1)..(25): SEQ ID NO: 4245; WAN024EVC_at; Start 26; Stop 50
tcaatgtctctggtcgtggaggcaa

SEQ ID NO: 183760 - DNA, 25 bp, Artificial
  probe
  misc_feature (1)..(25): SEQ ID NO: 4245; WAN024EVC_at; Start 20; Stop 44
tcttcatcaatgtctctggtcgtgg

SEQ ID NO: 183761 - DNA, 25 bp, Artificial
  probe
  misc_feature (1)..(25): SEQ ID NO: 4245; WAN024EVC_at; Start 48; Stop 72
caaggacctagctgcgattgcagac

SEQ ID NO: 183762 - DNA, 25 bp, Artificial
  probe
  misc_feature (1)..(25): SEQ ID NO: 4245; WAN024EVC_at; Start 10; Stop 34
gatgaacatctcttcatcaatgtct

SEQ ID NO: 183763 - DNA, 25 bp, Artificial
  probe
  misc_feature (1)..(25): SEQ ID NO: 4245; WAN024EVC_at; Start 2; Stop 26
tgtaccgagatgaacatctcttcat

SEQ ID NO: 183764 - DNA, 25 bp, Artificial
  probe
  misc_feature (1)..(25): SEQ ID NO: 4245; WAN024EVC_at; Start 1; Stop 25
gtgtaccgagatgaacatctcttca

SEQ ID NO: 183765 - DNA, 25 bp, Artificial
  probe
  misc_feature (1)..(25): SEQ ID NO: 4245; WAN024EVC_at; Start 17; Stop 41
atctcttcatcaatgtctctggtcg

SEQ ID NO: 183766 - DNA, 25 bp, Artificial
  probe
  misc_feature (1)..(25): SEQ ID NO: 4245; WAN024EVC_at; Start 32; Stop 56
tctctggtcgtggaggcaaggacct

SEQ ID NO: 183767 - DNA, 25 bp, Artificial
  probe
  misc_feature (1)..(25): SEQ ID NO: 4245; WAN024EVC_at; Start 23; Stop 47
tcatcaatgtctctggtcgtggagg

SEQ ID NO: 183768 - DNA, 25 bp, Artificial
  probe
  misc_feature (1)..(25): SEQ ID NO: 4245; WAN024EVC_at; Start 19; Stop 43
ctcttcatcaatgtctctggtcgtg

SEQ ID NO: 183769 - DNA, 25 bp, Artificial
  probe
  misc_feature (1)..(25): SEQ ID NO: 4245; WAN024EVC_at; Start 8; Stop 32
gagatgaacatctcttcatcaatgt

SEQ ID NO: 183770 - DNA, 25 bp, Artificial
  probe
  misc_feature (1)..(25): SEQ ID NO: 4245; WAN024EVC_at; Start 49; Stop 73
aaggacctagctgcgattgcagact

SEQ ID NO: 183771 - DNA, 25 bp, Artificial
  probe
  misc_feature (1)..(25): SEQ ID NO: 4245; WAN024EVC_at; Start 34; Stop 58
tctggtcgtggaggcaaggacctag

SEQ ID NO: 183772 - DNA, 25 bp, Artificial
  probe
  misc_feature (1)..(25): SEQ ID NO: 4245; WAN024EVC_at; Start 51; Stop 75
ggacctagctgcgattgcagactac

SEQ ID NO: 183773 - DNA, 25 bp, Artificial
  probe
  misc_feature (1)..(25): SEQ ID NO: 4245; WAN024EVC_at; Start 27; Stop 51
caatgtctctggtcgtggaggcaag

SEQ ID NO: 183774 - DNA, 25 bp, Artificial
  probe
  misc_feature (1)..(25): SEQ ID NO: 4245; WAN024EVC_at; Start 45; Stop 69
aggcaaggacctagctgcgattgca

SEQ ID NO: 183775 - DNA, 25 bp, Artificial
  probe
  misc_feature (1)..(25): SEQ ID NO: 4245; WAN024EVC_at; Start 24; Stop 48
catcaatgtctctggtcgtggaggc

SEQ ID NO: 183776 - DNA, 25 bp, Artificial
  probe
  misc_feature (1)..(25): SEQ ID NO: 4245; WAN024EVC_at; Start 13; Stop 37
gaacatctcttcatcaatgtctctg

SEQ ID NO: 183777 - DNA, 25 bp, Artificial
  probe
  misc_feature (1)..(25): SEQ ID NO: 4245; WAN024EVC_at; Start 25; Stop 49
atcaatgtctctggtcgtggaggca

SEQ ID NO: 183778 - DNA, 25 bp, Artificial
  probe
  misc_feature (1)..(25): SEQ ID NO: 4245; WAN024EVC_at; Start 33; Stop 57
ctctggtcgtggaggcaaggaccta

SEQ ID NO: 183779 - DNA, 25 bp, Artificial
  probe
  misc_feature (1)..(25): SEQ ID NO: 2135; WAN024EVD_at; Start 17; Stop 41
tctttctctcacagagagcttgtgg

SEQ ID NO: 183780 - DNA, 25 bp, Artificial
  probe
  misc_feature (1)..(25): SEQ ID NO: 2135; WAN024EVD_at; Start 11; Stop 35
tacagttctttctctcacagagagc

SEQ ID NO: 183781 - DNA, 25 bp, Artificial
  probe
  misc_feature (1)..(25): SEQ ID NO: 2135; WAN024EVD_at; Start 99; Stop 123
aaacatcattctcaagggagtgccc

SEQ ID NO: 183782 - DNA, 25 bp, Artificial
  probe
  misc_feature (1)..(25): SEQ ID NO: 2135; WAN024EVD_at; Start 75; Stop 99
gggttcatctgaaacgagagaagaa

SEQ ID NO: 183783 - DNA, 25 bp, Artificial
  probe
  misc_feature (1)..(25): SEQ ID NO: 2135; WAN024EVD_at; Start 116; Stop 140
gagtgccctttatcgcacagcctgt

SEQ ID NO: 183784 - DNA, 25 bp, Artificial
  probe
  misc_feature (1)..(25): SEQ ID NO: 2135; WAN024EVD_at; Start 97; Stop 121
gaaaacatcattctcaagggagtgc

SEQ ID NO: 183785 - DNA, 25 bp, Artificial
  probe
  misc_feature (1)..(25): SEQ ID NO: 2135; WAN024EVD_at; Start 23; Stop 47
tctcacagagagcttgtggttgctg

SEQ ID NO: 183786 - DNA, 25 bp, Artificial
  probe
  misc_feature (1)..(25): SEQ ID NO: 2135; WAN024EVD_at; Start 26; Stop 50
cacagagagcttgtggttgctggaa

SEQ ID NO: 183787 - DNA, 25 bp, Artificial
  probe
  misc_feature (1)..(25): SEQ ID NO: 2135; WAN024EVD_at; Start 102; Stop 126
catcattctcaagggagtgcccttt

SEQ ID NO: 183788 - DNA, 25 bp, Artificial
  probe
  misc_feature (1)..(25): SEQ ID NO: 2135; WAN024EVD_at; Start 68; Stop 92
taaagttgggttcatctgaaacgag

SEQ ID NO: 183789 - DNA, 25 bp, Artificial
  probe
  misc_feature (1)..(25): SEQ ID NO: 2135; WAN024EVD_at; Start 37; Stop 61
tgtggttgctggaaacaagcagaga

SEQ ID NO: 183790 - DNA, 25 bp, Artificial
  probe
  misc_feature (1)..(25): SEQ ID NO: 2135; WAN024EVD_at; Start 114; Stop 138
gggagtgccctttatcgcacagcct

SEQ ID NO: 183791 - DNA, 25 bp, Artificial
  probe
  misc_feature (1)..(25): SEQ ID NO: 2135; WAN024EVD_at; Start 60; Stop 84
gaaagctgtaaagttgggttcatct

SEQ ID NO: 183792 - DNA, 25 bp, Artificial
  probe
  misc_feature (1)..(25): SEQ ID NO: 2135; WAN024EVD_at; Start 85; Stop 109
gaaacgagagaagaaaacatcattc

SEQ ID NO: 183793 - DNA, 25 bp, Artificial
  probe
  misc_feature (1)..(25): SEQ ID NO: 2135; WAN024EVD_at; Start 44; Stop 68
gctggaaacaagcagagaaagctgt

SEQ ID NO: 183794 - DNA, 25 bp, Artificial
  probe
  misc_feature (1)..(25): SEQ ID NO: 2135; WAN024EVD_at; Start 94; Stop 118
gaagaaaacatcattctcaagggag

SEQ ID NO: 183795 - DNA, 25 bp, Artificial
  probe
  misc_feature (1)..(25): SEQ ID NO: 2135; WAN024EVD_at; Start 120; Stop 144
gccctttatcgcacagcctgttaca

SEQ ID NO: 183796 - DNA, 25 bp, Artificial
  probe
  misc_feature (1)..(25): SEQ ID NO: 2135; WAN024EVD_at; Start 48; Stop 72
gaaacaagcagagaaagctgtaaag

SEQ ID NO: 183797 - DNA, 25 bp, Artificial
  probe
  misc_feature (1)..(25): SEQ ID NO: 2135; WAN024EVD_at; Start 30; Stop 54
gagagcttgtggttgctggaaacaa

SEQ ID NO: 183798 - DNA, 25 bp, Artificial
  probe
  misc_feature (1)..(25): SEQ ID NO: 2135; WAN024EVD_at; Start 108; Stop 132
tctcaagggagtgccctttatcgca

SEQ ID NO: 183799 - DNA, 25 bp, Artificial
  probe
  misc_feature (1)..(25): SEQ ID NO: 2135; WAN024EVD_at; Start 66; Stop 90
tgtaaagttgggttcatctgaaacg

SEQ ID NO: 183800 - DNA, 25 bp, Artificial
  probe
  misc_feature (1)..(25): SEQ ID NO: 2135; WAN024EVD_at; Start 52; Stop 76
caagcagagaaagctgtaaagttgg

SEQ ID NO: 183801 - DNA, 25 bp, Artificial
  probe
  misc_feature (1)..(25): SEQ ID NO: 2135; WAN024EVD_at; Start 56; Stop 80
cagagaaagctgtaaagttgggttc

SEQ ID NO: 183802 - DNA, 25 bp, Artificial
  probe
  misc_feature (1)..(25): SEQ ID NO: 2135; WAN024EVD_at; Start 63; Stop 87
agctgtaaagttgggttcatctgaa

SEQ ID NO: 183803 - DNA, 25 bp, Artificial
  probe
  misc_feature (1)..(25): SEQ ID NO: 2135; WAN024EVD_at; Start 28; Stop 52
cagagagcttgtggttgctggaaac

SEQ ID NO: 183804 - DNA, 25 bp, Artificial
  probe
  misc_feature (1)..(25): SEQ ID NO: 2135; WAN024EVD_at; Start 39; Stop 63
tggttgctggaaacaagcagagaaa

SEQ ID NO: 183805 - DNA, 25 bp, Artificial
  probe
  misc_feature (1)..(25): SEQ ID NO: 2135; WAN024EVD_at; Start 79; Stop 103
tcatctgaaacgagagaagaaaaca

SEQ ID NO: 183806 - DNA, 25 bp, Artificial
  probe
  misc_feature (1)..(25): SEQ ID NO: 2135; WAN024EVD_at; Start 123; Stop 147
ctttatcgcacagcctgttacagga

SEQ ID NO: 183807 - DNA, 25 bp, Artificial
  probe
  misc_feature (1)..(25): SEQ ID NO: 2135; WAN024EVD_at; Start 82; Stop 106
tctgaaacgagagaagaaaacatca

SEQ ID NO: 183808 - DNA, 25 bp, Artificial
  probe
  misc_feature (1)..(25): SEQ ID NO: 2135; WAN024EVD_at; Start 21; Stop 45
tctctcacagagagcttgtggttgc

SEQ ID NO: 183809 - DNA, 25 bp, Artificial
  probe
  misc_feature (1)..(25): SEQ ID NO: 2135; WAN024EVD_at; Start 35; Stop 59
cttgtggttgctggaaacaagcaga

SEQ ID NO: 183810 - DNA, 25 bp, Artificial
  probe
  misc_feature (1)..(25): SEQ ID NO: 2135; WAN024EVD_at; Start 112; Stop 136
aagggagtgccctttatcgcacagc

SEQ ID NO: 183811 - DNA, 25 bp, Artificial
  probe
  misc_feature (1)..(25): SEQ ID NO: 2135; WAN024EVD_at; Start 72; Stop 96
gttgggttcatctgaaacgagagaa

SEQ ID NO: 183812 - DNA, 25 bp, Artificial
  probe
  misc_feature (1)..(25): SEQ ID NO: 2135; WAN024EVD_at; Start 8; Stop 32
aattacagttctttctctcacagag

SEQ ID NO: 183813 - DNA, 25 bp, Artificial
  probe
  misc_feature (1)..(25): SEQ ID NO: 1982; WAN024EVE_at; Start 1; Stop 25
atgccaatctcacgagctcttttta

SEQ ID NO: 183814 - DNA, 25 bp, Artificial
  probe
  misc_feature (1)..(25): SEQ ID NO: 1982; WAN024EVE_at; Start 9; Stop 33
ctcacgagctctttttatcattttc

SEQ ID NO: 183815 - DNA, 25 bp, Artificial
  probe
  misc_feature (1)..(25): SEQ ID NO: 1982; WAN024EVE_at; Start 48; Stop 72
tcaaatgtctactgatatctctcat

SEQ ID NO: 183816 - DNA, 25 bp, Artificial
  probe
  misc_feature (1)..(25): SEQ ID NO: 1982; WAN024EVE_at; Start 39; Stop 63
tatcctgactcaaatgtctactgat

SEQ ID NO: 183817 - DNA, 25 bp, Artificial
  probe
  misc_feature (1)..(25): SEQ ID NO: 1982; WAN024EVE_at; Start 11; Stop 35
cacgagctctttttatcattttcca

SEQ ID NO: 183818 - DNA, 25 bp, Artificial
  probe
  misc_feature (1)..(25): SEQ ID NO: 1982; WAN024EVE_at; Start 26; Stop 50
tcattttccataatatcctgactca

SEQ ID NO: 183819 - DNA, 25 bp, Artificial
  probe
  misc_feature (1)..(25): SEQ ID NO: 1982; WAN024EVE_at; Start 14; Stop 38
gagctctttttatcattttccataa

SEQ ID NO: 183820 - DNA, 25 bp, Artificial
  probe
  misc_feature (1)..(25): SEQ ID NO: 1982; WAN024EVE_at; Start 3; Stop 27
gccaatctcacgagctctttttatc

SEQ ID NO: 183821 - DNA, 25 bp, Artificial
  probe
  misc_feature (1)..(25): SEQ ID NO: 1982; WAN024EVE_at; Start 4; Stop 28
ccaatctcacgagctctttttatca

SEQ ID NO: 183822 - DNA, 25 bp, Artificial
  probe
  misc_feature (1)..(25): SEQ ID NO: 1982; WAN024EVE_at; Start 37; Stop 61
aatatcctgactcaaatgtctactg

SEQ ID NO: 183823 - DNA, 25 bp, Artificial
  probe
  misc_feature (1)..(25): SEQ ID NO: 1982; WAN024EVE_at; Start 38; Stop 62
atatcctgactcaaatgtctactga

SEQ ID NO: 183824 - DNA, 25 bp, Artificial
  probe
  misc_feature (1)..(25): SEQ ID NO: 1982; WAN024EVE_at; Start 33; Stop 57
ccataatatcctgactcaaatgtct

SEQ ID NO: 183825 - DNA, 25 bp, Artificial
  probe
  misc_feature (1)..(25): SEQ ID NO: 1982; WAN024EVE_at; Start 44; Stop 68
tgactcaaatgtctactgatatctc

SEQ ID NO: 183826 - DNA, 25 bp, Artificial
  probe
  misc_feature (1)..(25): SEQ ID NO: 1982; WAN024EVE_at; Start 45; Stop 69
gactcaaatgtctactgatatctct

SEQ ID NO: 183827 - DNA, 25 bp, Artificial
  probe
  misc_feature (1)..(25): SEQ ID NO: 1982; WAN024EVE_at; Start 36; Stop 60
taatatcctgactcaaatgtctact

SEQ ID NO: 183828 - DNA, 25 bp, Artificial
  probe
  misc_feature (1)..(25): SEQ ID NO: 1982; WAN024EVE_at; Start 50; Stop 74
aaatgtctactgatatctctcatca

SEQ ID NO: 183829 - DNA, 25 bp, Artificial
  probe
  misc_feature (1)..(25): SEQ ID NO: 1982; WAN024EVE_at; Start 49; Stop 73
caaatgtctactgatatctctcatc

SEQ ID NO: 183830 - DNA, 25 bp, Artificial
  probe
  misc_feature (1)..(25): SEQ ID NO: 1982; WAN024EVE_at; Start 51; Stop 75
aatgtctactgatatctctcatcag

SEQ ID NO: 183831 - DNA, 25 bp, Artificial
  probe
  misc_feature (1)..(25): SEQ ID NO: 1982; WAN024EVE_at; Start 46; Stop 70
actcaaatgtctactgatatctctc

SEQ ID NO: 183832 - DNA, 25 bp, Artificial
  probe
  misc_feature (1)..(25): SEQ ID NO: 1982; WAN024EVE_at; Start 42; Stop 66
cctgactcaaatgtctactgatatc

SEQ ID NO: 183833 - DNA, 25 bp, Artificial
  probe
  misc_feature (1)..(25): SEQ ID NO: 1982; WAN024EVE_at; Start 32; Stop 56
tccataatatcctgactcaaatgtc

SEQ ID NO: 183834 - DNA, 25 bp, Artificial
  probe
  misc_feature (1)..(25): SEQ ID NO: 1982; WAN024EVE_at; Start 27; Stop 51
cattttccataatatcctgactcaa

SEQ ID NO: 183835 - DNA, 25 bp, Artificial
  probe
  misc_feature (1)..(25): SEQ ID NO: 1982; WAN024EVE_at; Start 53; Stop 77
tgtctactgatatctctcatcagtt

SEQ ID NO: 183836 - DNA, 25 bp, Artificial
  probe
  misc_feature (1)..(25): SEQ ID NO: 1982; WAN024EVE_at; Start 43; Stop 67
ctgactcaaatgtctactgatatct

SEQ ID NO: 183837 - DNA, 25 bp, Artificial
  probe
  misc_feature (1)..(25): SEQ ID NO: 1982; WAN024EVE_at; Start 30; Stop 54
tttccataatatcctgactcaaatg

SEQ ID NO: 183838 - DNA, 25 bp, Artificial
  probe
  misc_feature (1)..(25): SEQ ID NO: 1982; WAN024EVE_at; Start 34; Stop 58
cataatatcctgactcaaatgtcta

SEQ ID NO: 183839 - DNA, 25 bp, Artificial
  probe
  misc_feature (1)..(25): SEQ ID NO: 1982; WAN024EVE_at; Start 10; Stop 34
tcacgagctctttttatcattttcc

SEQ ID NO: 183840 - DNA, 25 bp, Artificial
  probe
  misc_feature (1)..(25): SEQ ID NO: 1982; WAN024EVE_at; Start 5; Stop 29
caatctcacgagctctttttatcat

SEQ ID NO: 183841 - DNA, 25 bp, Artificial
  probe
  misc_feature (1)..(25): SEQ ID NO: 1982; WAN024EVE_at; Start 41; Stop 65
tcctgactcaaatgtctactgatat

SEQ ID NO: 183842 - DNA, 25 bp, Artificial
  probe
  misc_feature (1)..(25): SEQ ID NO: 1982; WAN024EVE_at; Start 23; Stop 47
ttatcattttccataatatcctgac

SEQ ID NO: 183843 - DNA, 25 bp, Artificial
  probe
  misc_feature (1)..(25): SEQ ID NO: 1982; WAN024EVE_at; Start 47; Stop 71
ctcaaatgtctactgatatctctca

SEQ ID NO: 183844 - DNA, 25 bp, Artificial
  probe
  misc_feature (1)..(25): SEQ ID NO: 1982; WAN024EVE_at; Start 2; Stop 26
tgccaatctcacgagctctttttat

SEQ ID NO: 183845 - DNA, 25 bp, Artificial
  probe
  misc_feature (1)..(25): SEQ ID NO: 1982; WAN024EVE_at; Start 12; Stop 36
acgagctctttttatcattttccat

SEQ ID NO: 183846 - DNA, 25 bp, Artificial
  probe
  misc_feature (1)..(25): SEQ ID NO: 1982; WAN024EVE_at; Start 6; Stop 30
aatctcacgagctctttttatcatt

SEQ ID NO: 183847 - DNA, 25 bp, Artificial
  probe
  misc_feature (1)..(25): SEQ ID NO: 5542; WAN024EVF_at; Start 144; Stop 168
cttgaacaatgtaggtatcctcgcc

SEQ ID NO: 183848 - DNA, 25 bp, Artificial
  probe
  misc_feature (1)..(25): SEQ ID NO: 5542; WAN024EVF_at; Start 126; Stop 150
cattgagggtcatagttccttgaac

SEQ ID NO: 183849 - DNA, 25 bp, Artificial
  probe
  misc_feature (1)..(25): SEQ ID NO: 5542; WAN024EVF_at; Start 17; Stop 41
tagctgagtttctcagtcgttggaa

SEQ ID NO: 183850 - DNA, 25 bp, Artificial
  probe
  misc_feature (1)..(25): SEQ ID NO: 5542; WAN024EVF_at; Start 120; Stop 144
tgaaatcattgagggtcatagttcc

SEQ ID NO: 183851 - DNA, 25 bp, Artificial
  probe
  misc_feature (1)..(25): SEQ ID NO: 5542; WAN024EVF_at; Start 153; Stop 177
tgtaggtatcctcgccaatctgatg

SEQ ID NO: 183852 - DNA, 25 bp, Artificial
  probe
  misc_feature (1)..(25): SEQ ID NO: 5542; WAN024EVF_at; Start 77; Stop 101
gtatcaacgtcatcactttccagtt

SEQ ID NO: 183853 - DNA, 25 bp, Artificial
  probe
  misc_feature (1)..(25): SEQ ID NO: 5542; WAN024EVF_at; Start 172; Stop 196
ctgatgaacatctattgctgctttg

SEQ ID NO: 183854 - DNA, 25 bp, Artificial
  probe
  misc_feature (1)..(25): SEQ ID NO: 5542; WAN024EVF_at; Start 147; Stop 171
gaacaatgtaggtatcctcgccaat

SEQ ID NO: 183855 - DNA, 25 bp, Artificial
  probe
  misc_feature (1)..(25): SEQ ID NO: 5542; WAN024EVF_at; Start 96; Stop 120
ccagttcaacatcaaagtaattatt

SEQ ID NO: 183856 - DNA, 25 bp, Artificial
  probe
  misc_feature (1)..(25): SEQ ID NO: 5542; WAN024EVF_at; Start 49; Stop 73
cactcctgtcaaataataaccagcg

SEQ ID NO: 183857 - DNA, 25 bp, Artificial
  probe
  misc_feature (1)..(25): SEQ ID NO: 5542; WAN024EVF_at; Start 29; Stop 53
tcagtcgttggaatagttcccactc

SEQ ID NO: 183858 - DNA, 25 bp, Artificial
  probe
  misc_feature (1)..(25): SEQ ID NO: 5542; WAN024EVF_at; Start 39; Stop 63
gaatagttcccactcctgtcaaata

SEQ ID NO: 183859 - DNA, 25 bp, Artificial
  probe
  misc_feature (1)..(25): SEQ ID NO: 5542; WAN024EVF_at; Start 157; Stop 181
ggtatcctcgccaatctgatgaaca

SEQ ID NO: 183860 - DNA, 25 bp, Artificial
  probe
  misc_feature (1)..(25): SEQ ID NO: 5542; WAN024EVF_at; Start 42; Stop 66
tagttcccactcctgtcaaataata

SEQ ID NO: 183861 - DNA, 25 bp, Artificial
  probe
  misc_feature (1)..(25): SEQ ID NO: 5542; WAN024EVF_at; Start 184; Stop 208
tattgctgctttgtccgtttcatca

SEQ ID NO: 183862 - DNA, 25 bp, Artificial
  probe
  misc_feature (1)..(25): SEQ ID NO: 5542; WAN024EVF_at; Start 113; Stop 137
taattattgaaatcattgagggtca

SEQ ID NO: 183863 - DNA, 25 bp, Artificial
  probe
  misc_feature (1)..(25): SEQ ID NO: 5542; WAN024EVF_at; Start 162; Stop 186
cctcgccaatctgatgaacatctat

SEQ ID NO: 183864 - DNA, 25 bp, Artificial
  probe
  misc_feature (1)..(25): SEQ ID NO: 5542; WAN024EVF_at; Start 32; Stop 56
gtcgttggaatagttcccactcctg

SEQ ID NO: 183865 - DNA, 25 bp, Artificial
  probe
  misc_feature (1)..(25): SEQ ID NO: 5542; WAN024EVF_at; Start 26; Stop 50
ttctcagtcgttggaatagttccca

SEQ ID NO: 183866 - DNA, 25 bp, Artificial
  probe
  misc_feature (1)..(25): SEQ ID NO: 5542; WAN024EVF_at; Start 3; Stop 27
ggctgaccaattcatagctgagttt

SEQ ID NO: 183867 - DNA, 25 bp, Artificial
  probe
  misc_feature (1)..(25): SEQ ID NO: 5542; WAN024EVF_at; Start 11; Stop 35
aattcatagctgagtttctcagtcg

SEQ ID NO: 183868 - DNA, 25 bp, Artificial
  probe
  misc_feature (1)..(25): SEQ ID NO: 5542; WAN024EVF_at; Start 142; Stop 166
tccttgaacaatgtaggtatcctcg

SEQ ID NO: 183869 - DNA, 25 bp, Artificial
  probe
  misc_feature (1)..(25): SEQ ID NO: 5542; WAN024EVF_at; Start 1; Stop 25
ttggctgaccaattcatagctgagt

SEQ ID NO: 183870 - DNA, 25 bp, Artificial
  probe
  misc_feature (1)..(25): SEQ ID NO: 5542; WAN024EVF_at; Start 130; Stop 154
gagggtcatagttccttgaacaatg

SEQ ID NO: 183871 - DNA, 25 bp, Artificial
  probe
  misc_feature (1)..(25): SEQ ID NO: 5542; WAN024EVF_at; Start 168; Stop 192
caatctgatgaacatctattgctgc

SEQ ID NO: 183872 - DNA, 25 bp, Artificial
  probe
  misc_feature (1)..(25): SEQ ID NO: 5542; WAN024EVF_at; Start 150; Stop 174
caatgtaggtatcctcgccaatctg

SEQ ID NO: 183873 - DNA, 25 bp, Artificial
  probe
  misc_feature (1)..(25): SEQ ID NO: 5542; WAN024EVF_at; Start 136; Stop 160
catagttccttgaacaatgtaggta

SEQ ID NO: 183874 - DNA, 25 bp, Artificial
  probe
  misc_feature (1)..(25): SEQ ID NO: 5542; WAN024EVF_at; Start 85; Stop 109
gtcatcactttccagttcaacatca

SEQ ID NO: 183875 - DNA, 25 bp, Artificial
  probe
  misc_feature (1)..(25): SEQ ID NO: 5542; WAN024EVF_at; Start 51; Stop 75
ctcctgtcaaataataaccagcgat

SEQ ID NO: 183876 - DNA, 25 bp, Artificial
  probe
  misc_feature (1)..(25): SEQ ID NO: 5542; WAN024EVF_at; Start 7; Stop 31
gaccaattcatagctgagtttctca

SEQ ID NO: 183877 - DNA, 25 bp, Artificial
  probe
  misc_feature (1)..(25): SEQ ID NO: 5542; WAN024EVF_at; Start 159; Stop 183
tatcctcgccaatctgatgaacatc

SEQ ID NO: 183878 - DNA, 25 bp, Artificial
  probe
  misc_feature (1)..(25): SEQ ID NO: 5542; WAN024EVF_at; Start 177; Stop 201
gaacatctattgctgctttgtccgt

SEQ ID NO: 183879 - DNA, 25 bp, Artificial
  probe
  misc_feature (1)..(25): SEQ ID NO: 5542; WAN024EVF_at; Start 81; Stop 105
caacgtcatcactttccagttcaac

SEQ ID NO: 183880 - DNA, 25 bp, Artificial
  probe
  misc_feature (1)..(25): SEQ ID NO: 5542; WAN024EVF_at; Start 35; Stop 59
gttggaatagttcccactcctgtca

SEQ ID NO: 183881 - DNA, 25 bp, Artificial
  probe
  misc_feature (1)..(25): SEQ ID NO: 5721; WAN024EVG_at; Start 42; Stop 66
gaggtcttccaaagtcaccaaacca

SEQ ID NO: 183882 - DNA, 25 bp, Artificial
  probe
  misc_feature (1)..(25): SEQ ID NO: 5721; WAN024EVG_at; Start 219; Stop 243
gcctgccttaaggagactcttggtg

SEQ ID NO: 183883 - DNA, 25 bp, Artificial
  probe
  misc_feature (1)..(25): SEQ ID NO: 5721; WAN024EVG_at; Start 98; Stop 122
ccatttgtctttgggtatttcgcag

SEQ ID NO: 183884 - DNA, 25 bp, Artificial
  probe
  misc_feature (1)..(25): SEQ ID NO: 5721; WAN024EVG_at; Start 152; Stop 176
tttcaggtacaaaaagtggatcttg

SEQ ID NO: 183885 - DNA, 25 bp, Artificial
  probe
  misc_feature (1)..(25): SEQ ID NO: 5721; WAN024EVG_at; Start 209; Stop 233
cgtccacaaagcctgccttaaggag

SEQ ID NO: 183886 - DNA, 25 bp, Artificial
  probe
  misc_feature (1)..(25): SEQ ID NO: 5721; WAN024EVG_at; Start 200; Stop 224
tgtcaaaaccgtccacaaagcctgc

SEQ ID NO: 183887 - DNA, 25 bp, Artificial
  probe
  misc_feature (1)..(25): SEQ ID NO: 5721; WAN024EVG_at; Start 82; Stop 106
tcatccagcaagattgccatttgtc

SEQ ID NO: 183888 - DNA, 25 bp, Artificial
  probe
  misc_feature (1)..(25): SEQ ID NO: 5721; WAN024EVG_at; Start 39; Stop 63
taagaggtcttccaaagtcaccaaa

SEQ ID NO: 183889 - DNA, 25 bp, Artificial
  probe
  misc_feature (1)..(25): SEQ ID NO: 5721; WAN024EVG_at; Start 61; Stop 85
aaaccagccataccaccgtattcat

SEQ ID NO: 183890 - DNA, 25 bp, Artificial
  probe
  misc_feature (1)..(25): SEQ ID NO: 5721; WAN024EVG_at; Start 71; Stop 95
taccaccgtattcatccagcaagat

SEQ ID NO: 183891 - DNA, 25 bp, Artificial
  probe
  misc_feature (1)..(25): SEQ ID NO: 5721; WAN024EVG_at; Start 139; Stop 163
tccacaaaaatagtttcaggtacaa

SEQ ID NO: 183892 - DNA, 25 bp, Artificial
  probe
  misc_feature (1)..(25): SEQ ID NO: 5721; WAN024EVG_at; Start 122; Stop 146
gttcttttagcaagtcatccacaaa

SEQ ID NO: 183893 - DNA, 25 bp, Artificial
  probe
  misc_feature (1)..(25): SEQ ID NO: 5721; WAN024EVG_at; Start 222; Stop 246
tgccttaaggagactcttggtgtga

SEQ ID NO: 183894 - DNA, 25 bp, Artificial
  probe
  misc_feature (1)..(25): SEQ ID NO: 5721; WAN024EVG_at; Start 76; Stop 100
ccgtattcatccagcaagattgcca

SEQ ID NO: 183895 - DNA, 25 bp, Artificial
  probe
  misc_feature (1)..(25): SEQ ID NO: 5721; WAN024EVG_at; Start 37; Stop 61
tctaagaggtcttccaaagtcacca

SEQ ID NO: 183896 - DNA, 25 bp, Artificial
  probe
  misc_feature (1)..(25): SEQ ID NO: 5721; WAN024EVG_at; Start 119; Stop 143
gcagttcttttagcaagtcatccac

SEQ ID NO: 183897 - DNA, 25 bp, Artificial
  probe
  misc_feature (1)..(25): SEQ ID NO: 5721; WAN024EVG_at; Start 29; Stop 53
caatttcctctaagaggtcttccaa

SEQ ID NO: 183898 - DNA, 25 bp, Artificial
  probe
  misc_feature (1)..(25): SEQ ID NO: 5721; WAN024EVG_at; Start 117; Stop 141
tcgcagttcttttagcaagtcatcc

SEQ ID NO: 183899 - DNA, 25 bp, Artificial
  probe
  misc_feature (1)..(25): SEQ ID NO: 5721; WAN024EVG_at; Start 103; Stop 127
tgtctttgggtatttcgcagttctt

SEQ ID NO: 183900 - DNA, 25 bp, Artificial
  probe
  misc_feature (1)..(25): SEQ ID NO: 5721; WAN024EVG_at; Start 206; Stop 230
aaccgtccacaaagcctgccttaag

SEQ ID NO: 183901 - DNA, 25 bp, Artificial
  probe
  misc_feature (1)..(25): SEQ ID NO: 5721; WAN024EVG_at; Start 149; Stop 173
tagtttcaggtacaaaaagtggatc

SEQ ID NO: 183902 - DNA, 25 bp, Artificial
  probe
  misc_feature (1)..(25): SEQ ID NO: 5721; WAN024EVG_at; Start 129; Stop 153
tagcaagtcatccacaaaaatagtt

SEQ ID NO: 183903 - DNA, 25 bp, Artificial
  probe
  misc_feature (1)..(25): SEQ ID NO: 5721; WAN024EVG_at; Start 166; Stop 190
agtggatcttgtaaaattctcttcc

SEQ ID NO: 183904 - DNA, 25 bp, Artificial
  probe
  misc_feature (1)..(25): SEQ ID NO: 5721; WAN024EVG_at; Start 69; Stop 93
cataccaccgtattcatccagcaag

SEQ ID NO: 183905 - DNA, 25 bp, Artificial
  probe
  misc_feature (1)..(25): SEQ ID NO: 5721; WAN024EVG_at; Start 111; Stop 135
ggtatttcgcagttcttttagcaag

SEQ ID NO: 183906 - DNA, 25 bp, Artificial
  probe
  misc_feature (1)..(25): SEQ ID NO: 5721; WAN024EVG_at; Start 44; Stop 68
ggtcttccaaagtcaccaaaccagc

SEQ ID NO: 183907 - DNA, 25 bp, Artificial
  probe
  misc_feature (1)..(25): SEQ ID NO: 5721; WAN024EVG_at; Start 213; Stop 237
cacaaagcctgccttaaggagactc

SEQ ID NO: 183908 - DNA, 25 bp, Artificial
  probe
  misc_feature (1)..(25): SEQ ID NO: 5721; WAN024EVG_at; Start 175; Stop 199
tgtaaaattctcttccaaacaatat

SEQ ID NO: 183909 - DNA, 25 bp, Artificial
  probe
  misc_feature (1)..(25): SEQ ID NO: 5721; WAN024EVG_at; Start 48; Stop 72
ttccaaagtcaccaaaccagccata

SEQ ID NO: 183910 - DNA, 25 bp, Artificial
  probe
  misc_feature (1)..(25): SEQ ID NO: 5721; WAN024EVG_at; Start 217; Stop 241
aagcctgccttaaggagactcttgg

SEQ ID NO: 183911 - DNA, 25 bp, Artificial
  probe
  misc_feature (1)..(25): SEQ ID NO: 5721; WAN024EVG_at; Start 134; Stop 158
agtcatccacaaaaatagtttcagg

SEQ ID NO: 183912 - DNA, 25 bp, Artificial
  probe
  misc_feature (1)..(25): SEQ ID NO: 5721; WAN024EVG_at; Start 90; Stop 114
caagattgccatttgtctttgggta

SEQ ID NO: 183913 - DNA, 25 bp, Artificial
  probe
  misc_feature (1)..(25): SEQ ID NO: 5721; WAN024EVG_at; Start 190; Stop 214
caaacaatattgtcaaaaccgtcca

SEQ ID NO: 183914 - DNA, 25 bp, Artificial
  probe
  misc_feature (1)..(25): SEQ ID NO: 5721; WAN024EVG_at; Start 169; Stop 193
ggatcttgtaaaattctcttccaaa

SEQ ID NO: 183915 - DNA, 25 bp, Artificial
  probe
  misc_feature (1)..(25): SEQ ID NO: 2208; WAN024EVH_at; Start 981; Stop 1005
gactttggaagacctcttagaggaa

SEQ ID NO: 183916 - DNA, 25 bp, Artificial
  probe
  misc_feature (1)..(25): SEQ ID NO: 2208; WAN024EVH_at; Start 134; Stop 158
cggaagaaggagacagacgctacat

SEQ ID NO: 183917 - DNA, 25 bp, Artificial
  probe
  misc_feature (1)..(25): SEQ ID NO: 2208; WAN024EVH_at; Start 312; Stop 336
cgtggcaacttttctatccttggca

SEQ ID NO: 183918 - DNA, 25 bp, Artificial
  probe
  misc_feature (1)..(25): SEQ ID NO: 2208; WAN024EVH_at; Start 896; Stop 920
tggatgacttgctaaaagaactgcg

SEQ ID NO: 183919 - DNA, 25 bp, Artificial
  probe
  misc_feature (1)..(25): SEQ ID NO: 2208; WAN024EVH_at; Start 3; Stop 27
ggaagacccaagtagtcagaatttg

SEQ ID NO: 183920 - DNA, 25 bp, Artificial
  probe
  misc_feature (1)..(25): SEQ ID NO: 2208; WAN024EVH_at; Start 64; Stop 88
ttaaatgcctttttctcagccacag

SEQ ID NO: 183921 - DNA, 25 bp, Artificial
  probe
  misc_feature (1)..(25): SEQ ID NO: 2208; WAN024EVH_at; Start 96; Stop 120
catggtttctcttaatcgtgcccga

SEQ ID NO: 183922 - DNA, 25 bp, Artificial
  probe
  misc_feature (1)..(25): SEQ ID NO: 2208; WAN024EVH_at; Start 664; Stop 688
cctcgaacggatgcctttatggtgg

SEQ ID NO: 183923 - DNA, 25 bp, Artificial
  probe
  misc_feature (1)..(25): SEQ ID NO: 2208; WAN024EVH_at; Start 438; Stop 462
tgggatcggaaaactagtcagtcct

SEQ ID NO: 183924 - DNA, 25 bp, Artificial
  probe
  misc_feature (1)..(25): SEQ ID NO: 2208; WAN024EVH_at; Start 796; Stop 820
accaagagtctccttaaggcaggct

SEQ ID NO: 183925 - DNA, 25 bp, Artificial
  probe
  misc_feature (1)..(25): SEQ ID NO: 2208; WAN024EVH_at; Start 154; Stop 178
tacatccgcctgctgaaggtactag

SEQ ID NO: 183926 - DNA, 25 bp, Artificial
  probe
  misc_feature (1)..(25): SEQ ID NO: 2208; WAN024EVH_at; Start 403; Stop 427
gatgccttggcaattcgtacagcgc

SEQ ID NO: 183927 - DNA, 25 bp, Artificial
  probe
  misc_feature (1)..(25): SEQ ID NO: 2208; WAN024EVH_at; Start 1080; Stop 1104
tgttcaaggaactatgaccctcaat

SEQ ID NO: 183928 - DNA, 25 bp, Artificial
  probe
  misc_feature (1)..(25): SEQ ID NO: 2208; WAN024EVH_at; Start 611; Stop 635
tgctacaaggtgtcttttcgctcga

SEQ ID NO: 183929 - DNA, 25 bp, Artificial
  probe
  misc_feature (1)..(25): SEQ ID NO: 2208; WAN024EVH_at; Start 917; Stop 941
tgcgaaatacccaaagacaaatggc

SEQ ID NO: 183930 - DNA, 25 bp, Artificial
  probe
  misc_feature (1)..(25): SEQ ID NO: 2208; WAN024EVH_at; Start 592; Stop 616
gatgctgatgagattgagatgctac

SEQ ID NO: 183931 - DNA, 25 bp, Artificial
  probe
  misc_feature (1)..(25): SEQ ID NO: 2208; WAN024EVH_at; Start 941; Stop 965
caatcttgctggatgaatacggtgg

SEQ ID NO: 183932 - DNA, 25 bp, Artificial
  probe
  misc_feature (1)..(25): SEQ ID NO: 2208; WAN024EVH_at; Start 258; Stop 282
tactctaggacgtgtgattgcctct

SEQ ID NO: 183933 - DNA, 25 bp, Artificial
  probe
  misc_feature (1)..(25): SEQ ID NO: 2208; WAN024EVH_at; Start 294; Stop 318
tggcgaaacagcacaagccgtggca

SEQ ID NO: 183934 - DNA, 25 bp, Artificial
  probe
  misc_feature (1)..(25): SEQ ID NO: 2208; WAN024EVH_at; Start 367; Stop 391
gaattatatcctaagagaatcgctc

SEQ ID NO: 183935 - DNA, 25 bp, Artificial
  probe
  misc_feature (1)..(25): SEQ ID NO: 2208; WAN024EVH_at; Start 279; Stop 303
ctcttggcttgggaatggcgaaaca

SEQ ID NO: 183936 - DNA, 25 bp, Artificial
  probe
  misc_feature (1)..(25): SEQ ID NO: 2208; WAN024EVH_at; Start 688; Stop 712
gatattcaggatgatagtcaagcca

SEQ ID NO: 183937 - DNA, 25 bp, Artificial
  probe
  misc_feature (1)..(25): SEQ ID NO: 2208; WAN024EVH_at; Start 1257; Stop 1281
taaagtgaagaatggacgtgttacc

SEQ ID NO: 183938 - DNA, 25 bp, Artificial
  probe
  misc_feature (1)..(25): SEQ ID NO: 2208; WAN024EVH_at; Start 111; Stop 135
tcgtgcccgagttgaacaaaaggcg

SEQ ID NO: 183939 - DNA, 25 bp, Artificial
  probe
  misc_feature (1)..(25): SEQ ID NO: 2208; WAN024EVH_at; Start 543; Stop 567
gacccgtgatgaaattgcctatatg

SEQ ID NO: 183940 - DNA, 25 bp, Artificial
  probe
  misc_feature (1)..(25): SEQ ID NO: 2208; WAN024EVH_at; Start 1019; Stop 1043
ttgatgatgaaacggacaaagcagc

SEQ ID NO: 183941 - DNA, 25 bp, Artificial
  probe
  misc_feature (1)..(25): SEQ ID NO: 2208; WAN024EVH_at; Start 814; Stop 838
gcaggctttgtggacggttttgaca

SEQ ID NO: 183942 - DNA, 25 bp, Artificial
  probe
  misc_feature (1)..(25): SEQ ID NO: 2208; WAN024EVH_at; Start 388; Stop 412
gctcttaatctaaaggatgccttgg

SEQ ID NO: 183943 - DNA, 25 bp, Artificial
  probe
  misc_feature (1)..(25): SEQ ID NO: 2208; WAN024EVH_at; Start 507; Stop 531
gactcctatgtcattcgatgatgcg

SEQ ID NO: 183944 - DNA, 25 bp, Artificial
  probe
  misc_feature (1)..(25): SEQ ID NO: 2208; WAN024EVH_at; Start 476; Stop 500
tagctgcttcgaccaatttcttgag

SEQ ID NO: 183945 - DNA, 25 bp, Artificial
  probe
  misc_feature (1)..(25): SEQ ID NO: 2208; WAN024EVH_at; Start 208; Stop 232
caggtaggaatcaccctgattacaa

SEQ ID NO: 183946 - DNA, 25 bp, Artificial
  probe
  misc_feature (1)..(25): SEQ ID NO: 2208; WAN024EVH_at; Start 1056; Stop 1080
tcagattggcgaggatacctacatt

SEQ ID NO: 183947 - DNA, 25 bp, Artificial
  probe
  misc_feature (1)..(25): SEQ ID NO: 2208; WAN024EVH_at; Start 626; Stop 650
tttcgctcgatgaactgatggcacg

SEQ ID NO: 183948 - DNA, 25 bp, Artificial
  probe
  misc_feature (1)..(25): SEQ ID NO: 2208; WAN024EVH_at; Start 79; Stop 103
tcagccacagaaatggccatggttt

SEQ ID NO: 183949 - DNA, 25 bp, Artificial
  probe
  misc_feature (1)..(25): SEQ ID NO: 5292; WAN024EVI_at; Start 25; Stop 49
tcacaagaatacttacctatcatgg

SEQ ID NO: 183950 - DNA, 25 bp, Artificial
  probe
  misc_feature (1)..(25): SEQ ID NO: 5292; WAN024EVI_at; Start 30; Stop 54
agaatacttacctatcatgggagga

SEQ ID NO: 183951 - DNA, 25 bp, Artificial
  probe
  misc_feature (1)..(25): SEQ ID NO: 5292; WAN024EVI_at; Start 8; Stop 32
cacaaaaaagcaagcattcacaaga

SEQ ID NO: 183952 - DNA, 25 bp, Artificial
  probe
  misc_feature (1)..(25): SEQ ID NO: 5292; WAN024EVI_at; Start 44; Stop 68
tcatgggaggaacaaccgttcctct

SEQ ID NO: 183953 - DNA, 25 bp, Artificial
  probe
  misc_feature (1)..(25): SEQ ID NO: 5292; WAN024EVI_at; Start 17; Stop 41
gcaagcattcacaagaatacttacc

SEQ ID NO: 183954 - DNA, 25 bp, Artificial
  probe
  misc_feature (1)..(25): SEQ ID NO: 5292; WAN024EVI_at; Start 26; Stop 50
cacaagaatacttacctatcatggg

SEQ ID NO: 183955 - DNA, 25 bp, Artificial
  probe
  misc_feature (1)..(25): SEQ ID NO: 5292; WAN024EVI_at; Start 27; Stop 51
acaagaatacttacctatcatggga

SEQ ID NO: 183956 - DNA, 25 bp, Artificial
  probe
  misc_feature (1)..(25): SEQ ID NO: 5292; WAN024EVI_at; Start 4; Stop 28
caaccacaaaaaagcaagcattcac

SEQ ID NO: 183957 - DNA, 25 bp, Artificial
  probe
  misc_feature (1)..(25): SEQ ID NO: 5292; WAN024EVI_at; Start 15; Stop 39
aagcaagcattcacaagaatactta

SEQ ID NO: 183958 - DNA, 25 bp, Artificial
  probe
  misc_feature (1)..(25): SEQ ID NO: 5292; WAN024EVI_at; Start 43; Stop 67
atcatgggaggaacaaccgttcctc

SEQ ID NO: 183959 - DNA, 25 bp, Artificial
  probe
  misc_feature (1)..(25): SEQ ID NO: 5292; WAN024EVI_at; Start 3; Stop 27
gcaaccacaaaaaagcaagcattca

SEQ ID NO: 183960 - DNA, 25 bp, Artificial
  probe
  misc_feature (1)..(25): SEQ ID NO: 5292; WAN024EVI_at; Start 29; Stop 53
aagaatacttacctatcatgggagg

SEQ ID NO: 183961 - DNA, 25 bp, Artificial
  probe
  misc_feature (1)..(25): SEQ ID NO: 5292; WAN024EVI_at; Start 1; Stop 25
ttgcaaccacaaaaaagcaagcatt

SEQ ID NO: 183962 - DNA, 25 bp, Artificial
  probe
  misc_feature (1)..(25): SEQ ID NO: 5292; WAN024EVI_at; Start 33; Stop 57
atacttacctatcatgggaggaaca

SEQ ID NO: 183963 - DNA, 25 bp, Artificial
  probe
  misc_feature (1)..(25): SEQ ID NO: 5292; WAN024EVI_at; Start 13; Stop 37
aaaagcaagcattcacaagaatact

SEQ ID NO: 183964 - DNA, 25 bp, Artificial
  probe
  misc_feature (1)..(25): SEQ ID NO: 5292; WAN024EVI_at; Start 35; Stop 59
acttacctatcatgggaggaacaac

SEQ ID NO: 183965 - DNA, 25 bp, Artificial
  probe
  misc_feature (1)..(25): SEQ ID NO: 5292; WAN024EVI_at; Start 11; Stop 35
aaaaaagcaagcattcacaagaata

SEQ ID NO: 183966 - DNA, 25 bp, Artificial
  probe
  misc_feature (1)..(25): SEQ ID NO: 5292; WAN024EVI_at; Start 18; Stop 42
caagcattcacaagaatacttacct

SEQ ID NO: 183967 - DNA, 25 bp, Artificial
  probe
  misc_feature (1)..(25): SEQ ID NO: 5292; WAN024EVI_at; Start 2; Stop 26
tgcaaccacaaaaaagcaagcattc

SEQ ID NO: 183968 - DNA, 25 bp, Artificial
  probe
  misc_feature (1)..(25): SEQ ID NO: 5292; WAN024EVI_at; Start 7; Stop 31
ccacaaaaaagcaagcattcacaag

SEQ ID NO: 183969 - DNA, 25 bp, Artificial
  probe
  misc_feature (1)..(25): SEQ ID NO: 5292; WAN024EVI_at; Start 21; Stop 45
gcattcacaagaatacttacctatc

SEQ ID NO: 183970 - DNA, 25 bp, Artificial
  probe
  misc_feature (1)..(25): SEQ ID NO: 5292; WAN024EVI_at; Start 41; Stop 65
ctatcatgggaggaacaaccgttcc

SEQ ID NO: 183971 - DNA, 25 bp, Artificial
  probe
  misc_feature (1)..(25): SEQ ID NO: 5292; WAN024EVI_at; Start 36; Stop 60
cttacctatcatgggaggaacaacc

SEQ ID NO: 183972 - DNA, 25 bp, Artificial
  probe
  misc_feature (1)..(25): SEQ ID NO: 5292; WAN024EVI_at; Start 45; Stop 69
catgggaggaacaaccgttcctctt

SEQ ID NO: 183973 - DNA, 25 bp, Artificial
  probe
  misc_feature (1)..(25): SEQ ID NO: 5292; WAN024EVI_at; Start 38; Stop 62
tacctatcatgggaggaacaaccgt

SEQ ID NO: 183974 - DNA, 25 bp, Artificial
  probe
  misc_feature (1)..(25): SEQ ID NO: 5292; WAN024EVI_at; Start 32; Stop 56
aatacttacctatcatgggaggaac

SEQ ID NO: 183975 - DNA, 25 bp, Artificial
  probe
  misc_feature (1)..(25): SEQ ID NO: 5292; WAN024EVI_at; Start 34; Stop 58
tacttacctatcatgggaggaacaa

SEQ ID NO: 183976 - DNA, 25 bp, Artificial
  probe
  misc_feature (1)..(25): SEQ ID NO: 5292; WAN024EVI_at; Start 31; Stop 55
gaatacttacctatcatgggaggaa

SEQ ID NO: 183977 - DNA, 25 bp, Artificial
  probe
  misc_feature (1)..(25): SEQ ID NO: 5292; WAN024EVI_at; Start 42; Stop 66
tatcatgggaggaacaaccgttcct

SEQ ID NO: 183978 - DNA, 25 bp, Artificial
  probe
  misc_feature (1)..(25): SEQ ID NO: 5292; WAN024EVI_at; Start 5; Stop 29
aaccacaaaaaagcaagcattcaca

SEQ ID NO: 183979 - DNA, 25 bp, Artificial
  probe
  misc_feature (1)..(25): SEQ ID NO: 5292; WAN024EVI_at; Start 28; Stop 52
caagaatacttacctatcatgggag

SEQ ID NO: 183980 - DNA, 25 bp, Artificial
  probe
  misc_feature (1)..(25): SEQ ID NO: 5292; WAN024EVI_at; Start 10; Stop 34
caaaaaagcaagcattcacaagaat

SEQ ID NO: 183981 - DNA, 25 bp, Artificial
  probe
  misc_feature (1)..(25): SEQ ID NO: 5292; WAN024EVI_at; Start 40; Stop 64
cctatcatgggaggaacaaccgttc

SEQ ID NO: 183982 - DNA, 25 bp, Artificial
  probe
  misc_feature (1)..(25): SEQ ID NO: 5292; WAN024EVI_at; Start 39; Stop 63
acctatcatgggaggaacaaccgtt

SEQ ID NO: 183983 - DNA, 25 bp, Artificial
  probe
  misc_feature (1)..(25): SEQ ID NO: 5885; WAN024EVJ_at; Start 123; Stop 147
tctagttcagaaggctaggctacta

SEQ ID NO: 183984 - DNA, 25 bp, Artificial
  probe
  misc_feature (1)..(25): SEQ ID NO: 5885; WAN024EVJ_at; Start 10; Stop 34
aatcctgttgagaagacacgtgttc

SEQ ID NO: 183985 - DNA, 25 bp, Artificial
  probe
  misc_feature (1)..(25): SEQ ID NO: 5885; WAN024EVJ_at; Start 119; Stop 143
tggttctagttcagaaggctaggct

SEQ ID NO: 183986 - DNA, 25 bp, Artificial
  probe
  misc_feature (1)..(25): SEQ ID NO: 5885; WAN024EVJ_at; Start 100; Stop 124
caactgactatatctcctatggttc

SEQ ID NO: 183987 - DNA, 25 bp, Artificial
  probe
  misc_feature (1)..(25): SEQ ID NO: 5885; WAN024EVJ_at; Start 5; Stop 29
tctacaatcctgttgagaagacacg

SEQ ID NO: 183988 - DNA, 25 bp, Artificial
  probe
  misc_feature (1)..(25): SEQ ID NO: 5885; WAN024EVJ_at; Start 96; Stop 120
gtttcaactgactatatctcctatg

SEQ ID NO: 183989 - DNA, 25 bp, Artificial
  probe
  misc_feature (1)..(25): SEQ ID NO: 5885; WAN024EVJ_at; Start 125; Stop 149
tagttcagaaggctaggctactaac

SEQ ID NO: 183990 - DNA, 25 bp, Artificial
  probe
  misc_feature (1)..(25): SEQ ID NO: 5885; WAN024EVJ_at; Start 110; Stop 134
tatctcctatggttctagttcagaa

SEQ ID NO: 183991 - DNA, 25 bp, Artificial
  probe
  misc_feature (1)..(25): SEQ ID NO: 5885; WAN024EVJ_at; Start 35; Stop 59
atatcaaaaaggtattggcaagttg

SEQ ID NO: 183992 - DNA, 25 bp, Artificial
  probe
  misc_feature (1)..(25): SEQ ID NO: 5885; WAN024EVJ_at; Start 9; Stop 33
caatcctgttgagaagacacgtgtt

SEQ ID NO: 183993 - DNA, 25 bp, Artificial
  probe
  misc_feature (1)..(25): SEQ ID NO: 5885; WAN024EVJ_at; Start 24; Stop 48
gacacgtgttcatatcaaaaaggta

SEQ ID NO: 183994 - DNA, 25 bp, Artificial
  probe
  misc_feature (1)..(25): SEQ ID NO: 5885; WAN024EVJ_at; Start 92; Stop 116
ttttgtttcaactgactatatctcc

SEQ ID NO: 183995 - DNA, 25 bp, Artificial
  probe
  misc_feature (1)..(25): SEQ ID NO: 5885; WAN024EVJ_at; Start 115; Stop 139
cctatggttctagttcagaaggcta

SEQ ID NO: 183996 - DNA, 25 bp, Artificial
  probe
  misc_feature (1)..(25): SEQ ID NO: 5885; WAN024EVJ_at; Start 28; Stop 52
cgtgttcatatcaaaaaggtattgg

SEQ ID NO: 183997 - DNA, 25 bp, Artificial
  probe
  misc_feature (1)..(25): SEQ ID NO: 5885; WAN024EVJ_at; Start 15; Stop 39
tgttgagaagacacgtgttcatatc

SEQ ID NO: 183998 - DNA, 25 bp, Artificial
  probe
  misc_feature (1)..(25): SEQ ID NO: 5885; WAN024EVJ_at; Start 127; Stop 151
gttcagaaggctaggctactaacta

SEQ ID NO: 183999 - DNA, 25 bp, Artificial
  probe
  misc_feature (1)..(25): SEQ ID NO: 5885; WAN024EVJ_at; Start 108; Stop 132
tatatctcctatggttctagttcag

SEQ ID NO: 184000 - DNA, 25 bp, Artificial
  probe
  misc_feature (1)..(25): SEQ ID NO: 5885; WAN024EVJ_at; Start 13; Stop 37
cctgttgagaagacacgtgttcata

SEQ ID NO: 184001 - DNA, 25 bp, Artificial
  probe
  misc_feature (1)..(25): SEQ ID NO: 5885; WAN024EVJ_at; Start 33; Stop 57
tcatatcaaaaaggtattggcaagt

SEQ ID NO: 184002 - DNA, 25 bp, Artificial
  probe
  misc_feature (1)..(25): SEQ ID NO: 5885; WAN024EVJ_at; Start 112; Stop 136
tctcctatggttctagttcagaagg

SEQ ID NO: 184003 - DNA, 25 bp, Artificial
  probe
  misc_feature (1)..(25): SEQ ID NO: 5885; WAN024EVJ_at; Start 30; Stop 54
tgttcatatcaaaaaggtattggca

SEQ ID NO: 184004 - DNA, 25 bp, Artificial
  probe
  misc_feature (1)..(25): SEQ ID NO: 5885; WAN024EVJ_at; Start 128; Stop 152
ttcagaaggctaggctactaactaa

SEQ ID NO: 184005 - DNA, 25 bp, Artificial
  probe
  misc_feature (1)..(25): SEQ ID NO: 5885; WAN024EVJ_at; Start 16; Stop 40
gttgagaagacacgtgttcatatca

SEQ ID NO: 184006 - DNA, 25 bp, Artificial
  probe
  misc_feature (1)..(25): SEQ ID NO: 5885; WAN024EVJ_at; Start 102; Stop 126
actgactatatctcctatggttcta

SEQ ID NO: 184007 - DNA, 25 bp, Artificial
  probe
  misc_feature (1)..(25): SEQ ID NO: 5885; WAN024EVJ_at; Start 114; Stop 138
tcctatggttctagttcagaaggct

SEQ ID NO: 184008 - DNA, 25 bp, Artificial
  probe
  misc_feature (1)..(25): SEQ ID NO: 5885; WAN024EVJ_at; Start 98; Stop 122
ttcaactgactatatctcctatggt

SEQ ID NO: 184009 - DNA, 25 bp, Artificial
  probe
  misc_feature (1)..(25): SEQ ID NO: 5885; WAN024EVJ_at; Start 117; Stop 141
tatggttctagttcagaaggctagg

SEQ ID NO: 184010 - DNA, 25 bp, Artificial
  probe
  misc_feature (1)..(25): SEQ ID NO: 5885; WAN024EVJ_at; Start 121; Stop 145
gttctagttcagaaggctaggctac

SEQ ID NO: 184011 - DNA, 25 bp, Artificial
  probe
  misc_feature (1)..(25): SEQ ID NO: 5885; WAN024EVJ_at; Start 12; Stop 36
tcctgttgagaagacacgtgttcat

SEQ ID NO: 184012 - DNA, 25 bp, Artificial
  probe
  misc_feature (1)..(25): SEQ ID NO: 5885; WAN024EVJ_at; Start 22; Stop 46
aagacacgtgttcatatcaaaaagg

SEQ ID NO: 184013 - DNA, 25 bp, Artificial
  probe
  misc_feature (1)..(25): SEQ ID NO: 5885; WAN024EVJ_at; Start 26; Stop 50
cacgtgttcatatcaaaaaggtatt

SEQ ID NO: 184014 - DNA, 25 bp, Artificial
  probe
  misc_feature (1)..(25): SEQ ID NO: 5885; WAN024EVJ_at; Start 7; Stop 31
tacaatcctgttgagaagacacgtg

SEQ ID NO: 184015 - DNA, 25 bp, Artificial
  probe
  misc_feature (1)..(25): SEQ ID NO: 5885; WAN024EVJ_at; Start 104; Stop 128
tgactatatctcctatggttctagt

SEQ ID NO: 184016 - DNA, 25 bp, Artificial
  probe
  misc_feature (1)..(25): SEQ ID NO: 5885; WAN024EVJ_at; Start 19; Stop 43
gagaagacacgtgttcatatcaaaa

SEQ ID NO: 184017 - DNA, 25 bp, Artificial
  probe
  misc_feature (1)..(25): SEQ ID NO: 6896; WAN024EVK_x_at; Start 112; Stop 136
ttactttcatttggtgggagaatat

SEQ ID NO: 184018 - DNA, 25 bp, Artificial
  probe
  misc_feature (1)..(25): SEQ ID NO: 6896; WAN024EVK_x_at; Start 111; Stop 135
tttactttcatttggtgggagaata

SEQ ID NO: 184019 - DNA, 25 bp, Artificial
  probe
  misc_feature (1)..(25): SEQ ID NO: 6896; WAN024EVK_x_at; Start 81; Stop 105
attttcagggttttatttctatcat

SEQ ID NO: 184020 - DNA, 25 bp, Artificial
  probe
  misc_feature (1)..(25): SEQ ID NO: 6896; WAN024EVK_x_at; Start 65; Stop 89
atattatagaacctttattttcagg

SEQ ID NO: 184021 - DNA, 25 bp, Artificial
  probe
  misc_feature (1)..(25): SEQ ID NO: 6896; WAN024EVK_x_at; Start 12; Stop 36
tttctacaataaaataggctccata

SEQ ID NO: 184022 - DNA, 25 bp, Artificial
  probe
  misc_feature (1)..(25): SEQ ID NO: 6896; WAN024EVK_x_at; Start 35; Stop 59
taatatctatagtggatttacccac

SEQ ID NO: 184023 - DNA, 25 bp, Artificial
  probe
  misc_feature (1)..(25): SEQ ID NO: 6896; WAN024EVK_x_at; Start 46; Stop 70
gtggatttacccactacaaatatta

SEQ ID NO: 184024 - DNA, 25 bp, Artificial
  probe
  misc_feature (1)..(25): SEQ ID NO: 6896; WAN024EVK_x_at; Start 47; Stop 71
tggatttacccactacaaatattat

SEQ ID NO: 184025 - DNA, 25 bp, Artificial
  probe
  misc_feature (1)..(25): SEQ ID NO: 6896; WAN024EVK_x_at; Start 41; Stop 65
ctatagtggatttacccactacaaa

SEQ ID NO: 184026 - DNA, 25 bp, Artificial
  probe
  misc_feature (1)..(25): SEQ ID NO: 6896; WAN024EVK_x_at; Start 14; Stop 38
tctacaataaaataggctccataat

SEQ ID NO: 184027 - DNA, 25 bp, Artificial
  probe
  misc_feature (1)..(25): SEQ ID NO: 6896; WAN024EVK_x_at; Start 34; Stop 58
ataatatctatagtggatttaccca

SEQ ID NO: 184028 - DNA, 25 bp, Artificial
  probe
  misc_feature (1)..(25): SEQ ID NO: 6896; WAN024EVK_x_at; Start 32; Stop 56
ccataatatctatagtggatttacc

SEQ ID NO: 184029 - DNA, 25 bp, Artificial
  probe
  misc_feature (1)..(25): SEQ ID NO: 6896; WAN024EVK_x_at; Start 39; Stop 63
atctatagtggatttacccactaca

SEQ ID NO: 184030 - DNA, 25 bp, Artificial
  probe
  misc_feature (1)..(25): SEQ ID NO: 6896; WAN024EVK_x_at; Start 85; Stop 109
tcagggttttatttctatcatttta

SEQ ID NO: 184031 - DNA, 25 bp, Artificial
  probe
  misc_feature (1)..(25): SEQ ID NO: 6896; WAN024EVK_x_at; Start 36; Stop 60
aatatctatagtggatttacccact

SEQ ID NO: 184032 - DNA, 25 bp, Artificial
  probe
  misc_feature (1)..(25): SEQ ID NO: 6896; WAN024EVK_x_at; Start 38; Stop 62
tatctatagtggatttacccactac

SEQ ID NO: 184033 - DNA, 25 bp, Artificial
  probe
  misc_feature (1)..(25): SEQ ID NO: 6896; WAN024EVK_x_at; Start 42; Stop 66
tatagtggatttacccactacaaat

SEQ ID NO: 184034 - DNA, 25 bp, Artificial
  probe
  misc_feature (1)..(25): SEQ ID NO: 6896; WAN024EVK_x_at; Start 171; Stop 195
aatcactaaaaatttttgctacatc

SEQ ID NO: 184035 - DNA, 25 bp, Artificial
  probe
  misc_feature (1)..(25): SEQ ID NO: 6896; WAN024EVK_x_at; Start 115; Stop 139
ctttcatttggtgggagaatatttg

SEQ ID NO: 184036 - DNA, 25 bp, Artificial
  probe
  misc_feature (1)..(25): SEQ ID NO: 6896; WAN024EVK_x_at; Start 114; Stop 138
actttcatttggtgggagaatattt

SEQ ID NO: 184037 - DNA, 25 bp, Artificial
  probe
  misc_feature (1)..(25): SEQ ID NO: 6896; WAN024EVK_x_at; Start 16; Stop 40
tacaataaaataggctccataatat

SEQ ID NO: 184038 - DNA, 25 bp, Artificial
  probe
  misc_feature (1)..(25): SEQ ID NO: 6896; WAN024EVK_x_at; Start 37; Stop 61
atatctatagtggatttacccacta

SEQ ID NO: 184039 - DNA, 25 bp, Artificial
  probe
  misc_feature (1)..(25): SEQ ID NO: 6896; WAN024EVK_x_at; Start 86; Stop 110
cagggttttatttctatcattttat

SEQ ID NO: 184040 - DNA, 25 bp, Artificial
  probe
  misc_feature (1)..(25): SEQ ID NO: 6896; WAN024EVK_x_at; Start 10; Stop 34
tttttctacaataaaataggctcca

SEQ ID NO: 184041 - DNA, 25 bp, Artificial
  probe
  misc_feature (1)..(25): SEQ ID NO: 6896; WAN024EVK_x_at; Start 108; Stop 132
tattttactttcatttggtgggaga

SEQ ID NO: 184042 - DNA, 25 bp, Artificial
  probe
  misc_feature (1)..(25): SEQ ID NO: 6896; WAN024EVK_x_at; Start 113; Stop 137
tactttcatttggtgggagaatatt

SEQ ID NO: 184043 - DNA, 25 bp, Artificial
  probe
  misc_feature (1)..(25): SEQ ID NO: 6896; WAN024EVK_x_at; Start 170; Stop 194
aaatcactaaaaatttttgctacat

SEQ ID NO: 184044 - DNA, 25 bp, Artificial
  probe
  misc_feature (1)..(25): SEQ ID NO: 6896; WAN024EVK_x_at; Start 33; Stop 57
cataatatctatagtggatttaccc

SEQ ID NO: 184045 - DNA, 25 bp, Artificial
  probe
  misc_feature (1)..(25): SEQ ID NO: 6896; WAN024EVK_x_at; Start 117; Stop 141
ttcatttggtgggagaatatttgaa

SEQ ID NO: 184046 - DNA, 25 bp, Artificial
  probe
  misc_feature (1)..(25): SEQ ID NO: 6896; WAN024EVK_x_at; Start 119; Stop 143
catttggtgggagaatatttgaaaa

SEQ ID NO: 184047 - DNA, 25 bp, Artificial
  probe
  misc_feature (1)..(25): SEQ ID NO: 6896; WAN024EVK_x_at; Start 49; Stop 73
gatttacccactacaaatattatag

SEQ ID NO: 184048 - DNA, 25 bp, Artificial
  probe
  misc_feature (1)..(25): SEQ ID NO: 6896; WAN024EVK_x_at; Start 40; Stop 64
tctatagtggatttacccactacaa

SEQ ID NO: 184049 - DNA, 25 bp, Artificial
  probe
  misc_feature (1)..(25): SEQ ID NO: 6896; WAN024EVK_x_at; Start 80; Stop 104
tattttcagggttttatttctatca

SEQ ID NO: 184050 - DNA, 25 bp, Artificial
  probe
  misc_feature (1)..(25): SEQ ID NO: 6896; WAN024EVK_x_at; Start 118; Stop 142
tcatttggtgggagaatatttgaaa

SEQ ID NO: 184051 - DNA, 25 bp, Artificial
  probe
  misc_feature (1)..(25): SEQ ID NO: 6974; WAN024EVL_at; Start 106; Stop 130
atatttgaaaaaaatgggagagtat

SEQ ID NO: 184052 - DNA, 25 bp, Artificial
  probe
  misc_feature (1)..(25): SEQ ID NO: 6974; WAN024EVL_at; Start 111; Stop 135
tgaaaaaaatgggagagtatttgaa

SEQ ID NO: 184053 - DNA, 25 bp, Artificial
  probe
  misc_feature (1)..(25): SEQ ID NO: 6974; WAN024EVL_at; Start 110; Stop 134
ttgaaaaaaatgggagagtatttga

SEQ ID NO: 184054 - DNA, 25 bp, Artificial
  probe
  misc_feature (1)..(25): SEQ ID NO: 6744; WAN024EVM_x_at; Start 46; Stop 70
tcccctatggatattatggagctta

SEQ ID NO: 184055 - DNA, 25 bp, Artificial
  probe
  misc_feature (1)..(25): SEQ ID NO: 6744; WAN024EVM_x_at; Start 23; Stop 47
ctataatatttgtagtgggtaaatc

SEQ ID NO: 184056 - DNA, 25 bp, Artificial
  probe
  misc_feature (1)..(25): SEQ ID NO: 6744; WAN024EVM_x_at; Start 14; Stop 38
ttttaggctctataatatttgtagt

SEQ ID NO: 184057 - DNA, 25 bp, Artificial
  probe
  misc_feature (1)..(25): SEQ ID NO: 6744; WAN024EVM_x_at; Start 13; Stop 37
tttttaggctctataatatttgtag

SEQ ID NO: 184058 - DNA, 25 bp, Artificial
  probe
  misc_feature (1)..(25): SEQ ID NO: 6744; WAN024EVM_x_at; Start 48; Stop 72
ccctatggatattatggagcttatt

SEQ ID NO: 184059 - DNA, 25 bp, Artificial
  probe
  misc_feature (1)..(25): SEQ ID NO: 6744; WAN024EVM_x_at; Start 20; Stop 44
gctctataatatttgtagtgggtaa

SEQ ID NO: 184060 - DNA, 25 bp, Artificial
  probe
  misc_feature (1)..(25): SEQ ID NO: 6744; WAN024EVM_x_at; Start 35; Stop 59
tagtgggtaaatcccctatggatat

SEQ ID NO: 184061 - DNA, 25 bp, Artificial
  probe
  misc_feature (1)..(25): SEQ ID NO: 6744; WAN024EVM_x_at; Start 51; Stop 75
tatggatattatggagcttattttt

SEQ ID NO: 184062 - DNA, 25 bp, Artificial
  probe
  misc_feature (1)..(25): SEQ ID NO: 6744; WAN024EVM_x_at; Start 15; Stop 39
tttaggctctataatatttgtagtg

SEQ ID NO: 184063 - DNA, 25 bp, Artificial
  probe
  misc_feature (1)..(25): SEQ ID NO: 6744; WAN024EVM_x_at; Start 52; Stop 76
atggatattatggagcttatttttg

SEQ ID NO: 184064 - DNA, 25 bp, Artificial
  probe
  misc_feature (1)..(25): SEQ ID NO: 6744; WAN024EVM_x_at; Start 33; Stop 57
tgtagtgggtaaatcccctatggat

SEQ ID NO: 184065 - DNA, 25 bp, Artificial
  probe
  misc_feature (1)..(25): SEQ ID NO: 6744; WAN024EVM_x_at; Start 49; Stop 73
cctatggatattatggagcttattt

SEQ ID NO: 184066 - DNA, 25 bp, Artificial
  probe
  misc_feature (1)..(25): SEQ ID NO: 6744; WAN024EVM_x_at; Start 16; Stop 40
ttaggctctataatatttgtagtgg

SEQ ID NO: 184067 - DNA, 25 bp, Artificial
  probe
  misc_feature (1)..(25): SEQ ID NO: 6744; WAN024EVM_x_at; Start 12; Stop 36
ttttttaggctctataatatttgta

SEQ ID NO: 184068 - DNA, 25 bp, Artificial
  probe
  misc_feature (1)..(25): SEQ ID NO: 6744; WAN024EVM_x_at; Start 17; Stop 41
taggctctataatatttgtagtggg

SEQ ID NO: 184069 - DNA, 25 bp, Artificial
  probe
  misc_feature (1)..(25): SEQ ID NO: 6744; WAN024EVM_x_at; Start 19; Stop 43
ggctctataatatttgtagtgggta

SEQ ID NO: 184070 - DNA, 25 bp, Artificial
  probe
  misc_feature (1)..(25): SEQ ID NO: 6744; WAN024EVM_x_at; Start 30; Stop 54
atttgtagtgggtaaatcccctatg

SEQ ID NO: 184071 - DNA, 25 bp, Artificial
  probe
  misc_feature (1)..(25): SEQ ID NO: 6744; WAN024EVM_x_at; Start 32; Stop 56
ttgtagtgggtaaatcccctatgga

SEQ ID NO: 184072 - DNA, 25 bp, Artificial
  probe
  misc_feature (1)..(25): SEQ ID NO: 6744; WAN024EVM_x_at; Start 11; Stop 35
cttttttaggctctataatatttgt

SEQ ID NO: 184073 - DNA, 25 bp, Artificial
  probe
  misc_feature (1)..(25): SEQ ID NO: 6744; WAN024EVM_x_at; Start 44; Stop 68
aatcccctatggatattatggagct

SEQ ID NO: 184074 - DNA, 25 bp, Artificial
  probe
  misc_feature (1)..(25): SEQ ID NO: 6744; WAN024EVM_x_at; Start 47; Stop 71
cccctatggatattatggagcttat

SEQ ID NO: 184075 - DNA, 25 bp, Artificial
  probe
  misc_feature (1)..(25): SEQ ID NO: 6744; WAN024EVM_x_at; Start 18; Stop 42
aggctctataatatttgtagtgggt

SEQ ID NO: 184076 - DNA, 25 bp, Artificial
  probe
  misc_feature (1)..(25): SEQ ID NO: 6744; WAN024EVM_x_at; Start 21; Stop 45
ctctataatatttgtagtgggtaaa

SEQ ID NO: 184077 - DNA, 25 bp, Artificial
  probe
  misc_feature (1)..(25): SEQ ID NO: 6744; WAN024EVM_x_at; Start 24; Stop 48
tataatatttgtagtgggtaaatcc

SEQ ID NO: 184078 - DNA, 25 bp, Artificial
  probe
  misc_feature (1)..(25): SEQ ID NO: 6744; WAN024EVM_x_at; Start 22; Stop 46
tctataatatttgtagtgggtaaat

SEQ ID NO: 184079 - DNA, 25 bp, Artificial
  probe
  misc_feature (1)..(25): SEQ ID NO: 6744; WAN024EVM_x_at; Start 10; Stop 34
tcttttttaggctctataatatttg

SEQ ID NO: 184080 - DNA, 25 bp, Artificial
  probe
  misc_feature (1)..(25): SEQ ID NO: 6744; WAN024EVM_x_at; Start 45; Stop 69
atcccctatggatattatggagctt

SEQ ID NO: 184081 - DNA, 25 bp, Artificial
  probe
  misc_feature (1)..(25): SEQ ID NO: 6744; WAN024EVM_x_at; Start 34; Stop 58
gtagtgggtaaatcccctatggata

SEQ ID NO: 184082 - DNA, 25 bp, Artificial
  probe
  misc_feature (1)..(25): SEQ ID NO: 7339; WAN024EVN_at; Start 80; Stop 104
atccagataggttttgcatgattga

SEQ ID NO: 184083 - DNA, 25 bp, Artificial
  probe
  misc_feature (1)..(25): SEQ ID NO: 7339; WAN024EVN_at; Start 51; Stop 75
aatgataatagatataattgtaaac

SEQ ID NO: 184084 - DNA, 25 bp, Artificial
  probe
  misc_feature (1)..(25): SEQ ID NO: 7339; WAN024EVN_at; Start 95; Stop 119
gcatgattgagaaagttaaaaaaac

SEQ ID NO: 184085 - DNA, 25 bp, Artificial
  probe
  misc_feature (1)..(25): SEQ ID NO: 7339; WAN024EVN_at; Start 30; Stop 54
ttgcctcccactatctaaaaaaatg

SEQ ID NO: 184086 - DNA, 25 bp, Artificial
  probe
  misc_feature (1)..(25): SEQ ID NO: 7339; WAN024EVN_at; Start 26; Stop 50
ttctttgcctcccactatctaaaaa

SEQ ID NO: 184087 - DNA, 25 bp, Artificial
  probe
  misc_feature (1)..(25): SEQ ID NO: 7339; WAN024EVN_at; Start 93; Stop 117
ttgcatgattgagaaagttaaaaaa

SEQ ID NO: 184088 - DNA, 25 bp, Artificial
  probe
  misc_feature (1)..(25): SEQ ID NO: 7339; WAN024EVN_at; Start 22; Stop 46
ctttttctttgcctcccactatcta

SEQ ID NO: 184089 - DNA, 25 bp, Artificial
  probe
  misc_feature (1)..(25): SEQ ID NO: 7339; WAN024EVN_at; Start 37; Stop 61
ccactatctaaaaaaatgataatag

SEQ ID NO: 184090 - DNA, 25 bp, Artificial
  probe
  misc_feature (1)..(25): SEQ ID NO: 7339; WAN024EVN_at; Start 23; Stop 47
tttttctttgcctcccactatctaa

SEQ ID NO: 184091 - DNA, 25 bp, Artificial
  probe
  misc_feature (1)..(25): SEQ ID NO: 7339; WAN024EVN_at; Start 75; Stop 99
caaaaatccagataggttttgcatg

SEQ ID NO: 184092 - DNA, 25 bp, Artificial
  probe
  misc_feature (1)..(25): SEQ ID NO: 7339; WAN024EVN_at; Start 87; Stop 111
taggttttgcatgattgagaaagtt

SEQ ID NO: 184093 - DNA, 25 bp, Artificial
  probe
  misc_feature (1)..(25): SEQ ID NO: 7339; WAN024EVN_at; Start 84; Stop 108
agataggttttgcatgattgagaaa

SEQ ID NO: 184094 - DNA, 25 bp, Artificial
  probe
  misc_feature (1)..(25): SEQ ID NO: 7339; WAN024EVN_at; Start 92; Stop 116
tttgcatgattgagaaagttaaaaa

SEQ ID NO: 184095 - DNA, 25 bp, Artificial
  probe
  misc_feature (1)..(25): SEQ ID NO: 7339; WAN024EVN_at; Start 78; Stop 102
aaatccagataggttttgcatgatt

SEQ ID NO: 184096 - DNA, 25 bp, Artificial
  probe
  misc_feature (1)..(25): SEQ ID NO: 7339; WAN024EVN_at; Start 65; Stop 89
taattgtaaacaaaaatccagatag

SEQ ID NO: 184097 - DNA, 25 bp, Artificial
  probe
  misc_feature (1)..(25): SEQ ID NO: 7339; WAN024EVN_at; Start 27; Stop 51
tctttgcctcccactatctaaaaaa

SEQ ID NO: 184098 - DNA, 25 bp, Artificial
  probe
  misc_feature (1)..(25): SEQ ID NO: 7339; WAN024EVN_at; Start 19; Stop 43
acactttttctttgcctcccactat

SEQ ID NO: 184099 - DNA, 25 bp, Artificial
  probe
  misc_feature (1)..(25): SEQ ID NO: 7339; WAN024EVN_at; Start 77; Stop 101
aaaatccagataggttttgcatgat

SEQ ID NO: 184100 - DNA, 25 bp, Artificial
  probe
  misc_feature (1)..(25): SEQ ID NO: 7339; WAN024EVN_at; Start 32; Stop 56
gcctcccactatctaaaaaaatgat

SEQ ID NO: 184101 - DNA, 25 bp, Artificial
  probe
  misc_feature (1)..(25): SEQ ID NO: 7339; WAN024EVN_at; Start 83; Stop 107
cagataggttttgcatgattgagaa

SEQ ID NO: 184102 - DNA, 25 bp, Artificial
  probe
  misc_feature (1)..(25): SEQ ID NO: 7339; WAN024EVN_at; Start 90; Stop 114
gttttgcatgattgagaaagttaaa

SEQ ID NO: 184103 - DNA, 25 bp, Artificial
  probe
  misc_feature (1)..(25): SEQ ID NO: 7339; WAN024EVN_at; Start 111; Stop 135
taaaaaaactatggcagagaatcgt

SEQ ID NO: 184104 - DNA, 25 bp, Artificial
  probe
  misc_feature (1)..(25): SEQ ID NO: 7339; WAN024EVN_at; Start 24; Stop 48
ttttctttgcctcccactatctaaa

SEQ ID NO: 184105 - DNA, 25 bp, Artificial
  probe
  misc_feature (1)..(25): SEQ ID NO: 7339; WAN024EVN_at; Start 110; Stop 134
ttaaaaaaactatggcagagaatcg

SEQ ID NO: 184106 - DNA, 25 bp, Artificial
  probe
  misc_feature (1)..(25): SEQ ID NO: 7339; WAN024EVN_at; Start 82; Stop 106
ccagataggttttgcatgattgaga

SEQ ID NO: 184107 - DNA, 25 bp, Artificial
  probe
  misc_feature (1)..(25): SEQ ID NO: 7339; WAN024EVN_at; Start 76; Stop 100
aaaaatccagataggttttgcatga

SEQ ID NO: 184108 - DNA, 25 bp, Artificial
  probe
  misc_feature (1)..(25): SEQ ID NO: 7339; WAN024EVN_at; Start 66; Stop 90
aattgtaaacaaaaatccagatagg

SEQ ID NO: 184109 - DNA, 25 bp, Artificial
  probe
  misc_feature (1)..(25): SEQ ID NO: 7339; WAN024EVN_at; Start 85; Stop 109
gataggttttgcatgattgagaaag

SEQ ID NO: 184110 - DNA, 25 bp, Artificial
  probe
  misc_feature (1)..(25): SEQ ID NO: 7339; WAN024EVN_at; Start 79; Stop 103
aatccagataggttttgcatgattg

SEQ ID NO: 184111 - DNA, 25 bp, Artificial
  probe
  misc_feature (1)..(25): SEQ ID NO: 7339; WAN024EVN_at; Start 61; Stop 85
gatataattgtaaacaaaaatccag

SEQ ID NO: 184112 - DNA, 25 bp, Artificial
  probe
  misc_feature (1)..(25): SEQ ID NO: 7339; WAN024EVN_at; Start 73; Stop 97
aacaaaaatccagataggttttgca

SEQ ID NO: 184113 - DNA, 25 bp, Artificial
  probe
  misc_feature (1)..(25): SEQ ID NO: 7339; WAN024EVN_at; Start 81; Stop 105
tccagataggttttgcatgattgag

SEQ ID NO: 184114 - DNA, 25 bp, Artificial
  probe
  misc_feature (1)..(25): SEQ ID NO: 7339; WAN024EVN_at; Start 67; Stop 91
attgtaaacaaaaatccagataggt

SEQ ID NO: 184115 - DNA, 25 bp, Artificial
  probe
  misc_feature (1)..(25): SEQ ID NO: 7339; WAN024EVN_at; Start 89; Stop 113
ggttttgcatgattgagaaagttaa

SEQ ID NO: 184116 - DNA, 25 bp, Artificial
  probe
  misc_feature (1)..(25): SEQ ID NO: 4329; WAN024EVO_at; Start 28; Stop 52
ctttttattgttggctctataatat

SEQ ID NO: 184117 - DNA, 25 bp, Artificial
  probe
  misc_feature (1)..(25): SEQ ID NO: 4329; WAN024EVO_at; Start 25; Stop 49
tttctttttattgttggctctataa

SEQ ID NO: 184118 - DNA, 25 bp, Artificial
  probe
  misc_feature (1)..(25): SEQ ID NO: 4329; WAN024EVO_at; Start 27; Stop 51
tctttttattgttggctctataata

SEQ ID NO: 184119 - DNA, 25 bp, Artificial
  probe
  misc_feature (1)..(25): SEQ ID NO: 4329; WAN024EVO_at; Start 26; Stop 50
ttctttttattgttggctctataat

SEQ ID NO: 184120 - DNA, 25 bp, Artificial
  probe
  misc_feature (1)..(25): SEQ ID NO: 2805; WAN024EVP_at; Start 11; Stop 35
tgtgcttttcacaagattttccatc

SEQ ID NO: 184121 - DNA, 25 bp, Artificial
  probe
  misc_feature (1)..(25): SEQ ID NO: 2805; WAN024EVP_at; Start 34; Stop 58
tctaccattgtagcgctttttgcac

SEQ ID NO: 184122 - DNA, 25 bp, Artificial
  probe
  misc_feature (1)..(25): SEQ ID NO: 2805; WAN024EVP_at; Start 16; Stop 40
ttttcacaagattttccatctacca

SEQ ID NO: 184123 - DNA, 25 bp, Artificial
  probe
  misc_feature (1)..(25): SEQ ID NO: 2805; WAN024EVP_at; Start 51; Stop 75
ttttgcactatttttcaatcaaaaa

SEQ ID NO: 184124 - DNA, 25 bp, Artificial
  probe
  misc_feature (1)..(25): SEQ ID NO: 2805; WAN024EVP_at; Start 30; Stop 54
tccatctaccattgtagcgcttttt

SEQ ID NO: 184125 - DNA, 25 bp, Artificial
  probe
  misc_feature (1)..(25): SEQ ID NO: 2805; WAN024EVP_at; Start 39; Stop 63
cattgtagcgctttttgcactattt

SEQ ID NO: 184126 - DNA, 25 bp, Artificial
  probe
  misc_feature (1)..(25): SEQ ID NO: 2805; WAN024EVP_at; Start 21; Stop 45
acaagattttccatctaccattgta

SEQ ID NO: 184127 - DNA, 25 bp, Artificial
  probe
  misc_feature (1)..(25): SEQ ID NO: 2805; WAN024EVP_at; Start 47; Stop 71
cgctttttgcactatttttcaatca

SEQ ID NO: 184128 - DNA, 25 bp, Artificial
  probe
  misc_feature (1)..(25): SEQ ID NO: 2805; WAN024EVP_at; Start 14; Stop 38
gcttttcacaagattttccatctac

SEQ ID NO: 184129 - DNA, 25 bp, Artificial
  probe
  misc_feature (1)..(25): SEQ ID NO: 2805; WAN024EVP_at; Start 44; Stop 68
tagcgctttttgcactatttttcaa

SEQ ID NO: 184130 - DNA, 25 bp, Artificial
  probe
  misc_feature (1)..(25): SEQ ID NO: 2805; WAN024EVP_at; Start 32; Stop 56
catctaccattgtagcgctttttgc

SEQ ID NO: 184131 - DNA, 25 bp, Artificial
  probe
  misc_feature (1)..(25): SEQ ID NO: 2805; WAN024EVP_at; Start 17; Stop 41
tttcacaagattttccatctaccat

SEQ ID NO: 184132 - DNA, 25 bp, Artificial
  probe
  misc_feature (1)..(25): SEQ ID NO: 2805; WAN024EVP_at; Start 29; Stop 53
ttccatctaccattgtagcgctttt

SEQ ID NO: 184133 - DNA, 25 bp, Artificial
  probe
  misc_feature (1)..(25): SEQ ID NO: 2805; WAN024EVP_at; Start 46; Stop 70
gcgctttttgcactatttttcaatc

SEQ ID NO: 184134 - DNA, 25 bp, Artificial
  probe
  misc_feature (1)..(25): SEQ ID NO: 2805; WAN024EVP_at; Start 33; Stop 57
atctaccattgtagcgctttttgca

SEQ ID NO: 184135 - DNA, 25 bp, Artificial
  probe
  misc_feature (1)..(25): SEQ ID NO: 2805; WAN024EVP_at; Start 38; Stop 62
ccattgtagcgctttttgcactatt

SEQ ID NO: 184136 - DNA, 25 bp, Artificial
  probe
  misc_feature (1)..(25): SEQ ID NO: 2805; WAN024EVP_at; Start 31; Stop 55
ccatctaccattgtagcgctttttg

SEQ ID NO: 184137 - DNA, 25 bp, Artificial
  probe
  misc_feature (1)..(25): SEQ ID NO: 2805; WAN024EVP_at; Start 42; Stop 66
tgtagcgctttttgcactatttttc

SEQ ID NO: 184138 - DNA, 25 bp, Artificial
  probe
  misc_feature (1)..(25): SEQ ID NO: 2805; WAN024EVP_at; Start 40; Stop 64
attgtagcgctttttgcactatttt

SEQ ID NO: 184139 - DNA, 25 bp, Artificial
  probe
  misc_feature (1)..(25): SEQ ID NO: 2805; WAN024EVP_at; Start 25; Stop 49
gattttccatctaccattgtagcgc

SEQ ID NO: 184140 - DNA, 25 bp, Artificial
  probe
  misc_feature (1)..(25): SEQ ID NO: 2805; WAN024EVP_at; Start 19; Stop 43
tcacaagattttccatctaccattg

SEQ ID NO: 184141 - DNA, 25 bp, Artificial
  probe
  misc_feature (1)..(25): SEQ ID NO: 2805; WAN024EVP_at; Start 37; Stop 61
accattgtagcgctttttgcactat

SEQ ID NO: 184142 - DNA, 25 bp, Artificial
  probe
  misc_feature (1)..(25): SEQ ID NO: 2805; WAN024EVP_at; Start 23; Stop 47
aagattttccatctaccattgtagc

SEQ ID NO: 184143 - DNA, 25 bp, Artificial
  probe
  misc_feature (1)..(25): SEQ ID NO: 2805; WAN024EVP_at; Start 26; Stop 50
attttccatctaccattgtagcgct

SEQ ID NO: 184144 - DNA, 25 bp, Artificial
  probe
  misc_feature (1)..(25): SEQ ID NO: 2805; WAN024EVP_at; Start 22; Stop 46
caagattttccatctaccattgtag

SEQ ID NO: 184145 - DNA, 25 bp, Artificial
  probe
  misc_feature (1)..(25): SEQ ID NO: 2805; WAN024EVP_at; Start 15; Stop 39
cttttcacaagattttccatctacc

SEQ ID NO: 184146 - DNA, 25 bp, Artificial
  probe
  misc_feature (1)..(25): SEQ ID NO: 2805; WAN024EVP_at; Start 45; Stop 69
agcgctttttgcactatttttcaat

SEQ ID NO: 184147 - DNA, 25 bp, Artificial
  probe
  misc_feature (1)..(25): SEQ ID NO: 2805; WAN024EVP_at; Start 20; Stop 44
cacaagattttccatctaccattgt

SEQ ID NO: 184148 - DNA, 25 bp, Artificial
  probe
  misc_feature (1)..(25): SEQ ID NO: 2805; WAN024EVP_at; Start 13; Stop 37
tgcttttcacaagattttccatcta

SEQ ID NO: 184149 - DNA, 25 bp, Artificial
  probe
  misc_feature (1)..(25): SEQ ID NO: 2805; WAN024EVP_at; Start 28; Stop 52
tttccatctaccattgtagcgcttt

SEQ ID NO: 184150 - DNA, 25 bp, Artificial
  probe
  misc_feature (1)..(25): SEQ ID NO: 2805; WAN024EVP_at; Start 43; Stop 67
gtagcgctttttgcactatttttca

SEQ ID NO: 184151 - DNA, 25 bp, Artificial
  probe
  misc_feature (1)..(25): SEQ ID NO: 2805; WAN024EVP_at; Start 24; Stop 48
agattttccatctaccattgtagcg

SEQ ID NO: 184152 - DNA, 25 bp, Artificial
  probe
  misc_feature (1)..(25): SEQ ID NO: 2805; WAN024EVP_at; Start 12; Stop 36
gtgcttttcacaagattttccatct

SEQ ID NO: 184153 - DNA, 25 bp, Artificial
  probe
  misc_feature (1)..(25): SEQ ID NO: 2805; WAN024EVP_at; Start 27; Stop 51
ttttccatctaccattgtagcgctt

SEQ ID NO: 184154 - DNA, 25 bp, Artificial
  probe
  misc_feature (1)..(25): SEQ ID NO: 2056; WAN024EVQ_at; Start 76; Stop 100
gcagtcgcacctagattcgatgtca

SEQ ID NO: 184155 - DNA, 25 bp, Artificial
  probe
  misc_feature (1)..(25): SEQ ID NO: 2056; WAN024EVQ_at; Start 59; Stop 83
tcttatcatcacgaagggcagtcgc

SEQ ID NO: 184156 - DNA, 25 bp, Artificial
  probe
  misc_feature (1)..(25): SEQ ID NO: 2056; WAN024EVQ_at; Start 120; Stop 144
aaaatcgaccttgcgtcccttgcta

SEQ ID NO: 184157 - DNA, 25 bp, Artificial
  probe
  misc_feature (1)..(25): SEQ ID NO: 2056; WAN024EVQ_at; Start 170; Stop 194
cctgcaagagaacattaaagatatc

SEQ ID NO: 184158 - DNA, 25 bp, Artificial
  probe
  misc_feature (1)..(25): SEQ ID NO: 2056; WAN024EVQ_at; Start 94; Stop 118
gatgtcataatgataatggtatttg

SEQ ID NO: 184159 - DNA, 25 bp, Artificial
  probe
  misc_feature (1)..(25): SEQ ID NO: 2056; WAN024EVQ_at; Start 117; Stop 141
tgaaaaatcgaccttgcgtcccttg

SEQ ID NO: 184160 - DNA, 25 bp, Artificial
  probe
  misc_feature (1)..(25): SEQ ID NO: 2056; WAN024EVQ_at; Start 72; Stop 96
aagggcagtcgcacctagattcgat

SEQ ID NO: 184161 - DNA, 25 bp, Artificial
  probe
  misc_feature (1)..(25): SEQ ID NO: 2056; WAN024EVQ_at; Start 10; Stop 34
tccatattttcctggtcaaaacgaa

SEQ ID NO: 184162 - DNA, 25 bp, Artificial
  probe
  misc_feature (1)..(25): SEQ ID NO: 2056; WAN024EVQ_at; Start 56; Stop 80
cagtcttatcatcacgaagggcagt

SEQ ID NO: 184163 - DNA, 25 bp, Artificial
  probe
  misc_feature (1)..(25): SEQ ID NO: 2056; WAN024EVQ_at; Start 3; Stop 27
gcgtttttccatattttcctggtca

SEQ ID NO: 184164 - DNA, 25 bp, Artificial
  probe
  misc_feature (1)..(25): SEQ ID NO: 2056; WAN024EVQ_at; Start 41; Stop 65
tagccccaaaaccaacagtcttatc

SEQ ID NO: 184165 - DNA, 25 bp, Artificial
  probe
  misc_feature (1)..(25): SEQ ID NO: 2056; WAN024EVQ_at; Start 213; Stop 237
ctcatcaaagaggagaacggaatag

SEQ ID NO: 184166 - DNA, 25 bp, Artificial
  probe
  misc_feature (1)..(25): SEQ ID NO: 2056; WAN024EVQ_at; Start 153; Stop 177
gacaccgtcatccagaacctgcaag

SEQ ID NO: 184167 - DNA, 25 bp, Artificial
  probe
  misc_feature (1)..(25): SEQ ID NO: 2056; WAN024EVQ_at; Start 82; Stop 106
gcacctagattcgatgtcataatga

SEQ ID NO: 184168 - DNA, 25 bp, Artificial
  probe
  misc_feature (1)..(25): SEQ ID NO: 2056; WAN024EVQ_at; Start 22; Stop 46
tggtcaaaacgaatatccttagccc

SEQ ID NO: 184169 - DNA, 25 bp, Artificial
  probe
  misc_feature (1)..(25): SEQ ID NO: 2056; WAN024EVQ_at; Start 163; Stop 187
tccagaacctgcaagagaacattaa

SEQ ID NO: 184170 - DNA, 25 bp, Artificial
  probe
  misc_feature (1)..(25): SEQ ID NO: 2056; WAN024EVQ_at; Start 68; Stop 92
cacgaagggcagtcgcacctagatt

SEQ ID NO: 184171 - DNA, 25 bp, Artificial
  probe
  misc_feature (1)..(25): SEQ ID NO: 2056; WAN024EVQ_at; Start 19; Stop 43
tcctggtcaaaacgaatatccttag

SEQ ID NO: 184172 - DNA, 25 bp, Artificial
  probe
  misc_feature (1)..(25): SEQ ID NO: 2056; WAN024EVQ_at; Start 180; Stop 204
aacattaaagatatctgggtgggcc

SEQ ID NO: 184173 - DNA, 25 bp, Artificial
  probe
  misc_feature (1)..(25): SEQ ID NO: 2056; WAN024EVQ_at; Start 132; Stop 156
gcgtcccttgctatctgtcaagaca

SEQ ID NO: 184174 - DNA, 25 bp, Artificial
  probe
  misc_feature (1)..(25): SEQ ID NO: 2056; WAN024EVQ_at; Start 143; Stop 167
tatctgtcaagacaccgtcatccag

SEQ ID NO: 184175 - DNA, 25 bp, Artificial
  probe
  misc_feature (1)..(25): SEQ ID NO: 2056; WAN024EVQ_at; Start 127; Stop 151
accttgcgtcccttgctatctgtca

SEQ ID NO: 184176 - DNA, 25 bp, Artificial
  probe
  misc_feature (1)..(25): SEQ ID NO: 2056; WAN024EVQ_at; Start 61; Stop 85
ttatcatcacgaagggcagtcgcac

SEQ ID NO: 184177 - DNA, 25 bp, Artificial
  probe
  misc_feature (1)..(25): SEQ ID NO: 2056; WAN024EVQ_at; Start 184; Stop 208
ttaaagatatctgggtgggccttct

SEQ ID NO: 184178 - DNA, 25 bp, Artificial
  probe
  misc_feature (1)..(25): SEQ ID NO: 2056; WAN024EVQ_at; Start 149; Stop 173
tcaagacaccgtcatccagaacctg

SEQ ID NO: 184179 - DNA, 25 bp, Artificial
  probe
  misc_feature (1)..(25): SEQ ID NO: 2056; WAN024EVQ_at; Start 113; Stop 137
tatttgaaaaatcgaccttgcgtcc

SEQ ID NO: 184180 - DNA, 25 bp, Artificial
  probe
  misc_feature (1)..(25): SEQ ID NO: 2056; WAN024EVQ_at; Start 53; Stop 77
caacagtcttatcatcacgaagggc

SEQ ID NO: 184181 - DNA, 25 bp, Artificial
  probe
  misc_feature (1)..(25): SEQ ID NO: 2056; WAN024EVQ_at; Start 188; Stop 212
agatatctgggtgggccttctctac

SEQ ID NO: 184182 - DNA, 25 bp, Artificial
  probe
  misc_feature (1)..(25): SEQ ID NO: 2056; WAN024EVQ_at; Start 25; Stop 49
tcaaaacgaatatccttagccccaa

SEQ ID NO: 184183 - DNA, 25 bp, Artificial
  probe
  misc_feature (1)..(25): SEQ ID NO: 2056; WAN024EVQ_at; Start 199; Stop 223
tgggccttctctacctcatcaaaga

SEQ ID NO: 184184 - DNA, 25 bp, Artificial
  probe
  misc_feature (1)..(25): SEQ ID NO: 2056; WAN024EVQ_at; Start 157; Stop 181
ccgtcatccagaacctgcaagagaa

SEQ ID NO: 184185 - DNA, 25 bp, Artificial
  probe
  misc_feature (1)..(25): SEQ ID NO: 2056; WAN024EVQ_at; Start 137; Stop 161
ccttgctatctgtcaagacaccgtc

SEQ ID NO: 184186 - DNA, 25 bp, Artificial
  probe
  misc_feature (1)..(25): SEQ ID NO: 2056; WAN024EVQ_at; Start 208; Stop 232
tctacctcatcaaagaggagaacgg

SEQ ID NO: 184187 - DNA, 25 bp, Artificial
  probe
  misc_feature (1)..(25): SEQ ID NO: 2056; WAN024EVQ_at; Start 196; Stop 220
gggtgggccttctctacctcatcaa

SEQ ID NO: 184188 - DNA, 25 bp, Artificial
  probe
  misc_feature (1)..(25): SEQ ID NO: 5270; WAN024EVR_at; Start 113; Stop 137
tgctgcctgccactaaatctccctt

SEQ ID NO: 184189 - DNA, 25 bp, Artificial
  probe
  misc_feature (1)..(25): SEQ ID NO: 5270; WAN024EVR_at; Start 163; Stop 187
tccacttctgtttgcagggttctgc

SEQ ID NO: 184190 - DNA, 25 bp, Artificial
  probe
  misc_feature (1)..(25): SEQ ID NO: 5270; WAN024EVR_at; Start 46; Stop 70
ctgatacttttattcttttatgcaa

SEQ ID NO: 184191 - DNA, 25 bp, Artificial
  probe
  misc_feature (1)..(25): SEQ ID NO: 5270; WAN024EVR_at; Start 165; Stop 189
cacttctgtttgcagggttctgcga

SEQ ID NO: 184192 - DNA, 25 bp, Artificial
  probe
  misc_feature (1)..(25): SEQ ID NO: 5270; WAN024EVR_at; Start 64; Stop 88
tatgcaatatcaaattttaactggc

SEQ ID NO: 184193 - DNA, 25 bp, Artificial
  probe
  misc_feature (1)..(25): SEQ ID NO: 5270; WAN024EVR_at; Start 87; Stop 111
gcctgctttgacaccaatcttaagt

SEQ ID NO: 184194 - DNA, 25 bp, Artificial
  probe
  misc_feature (1)..(25): SEQ ID NO: 5270; WAN024EVR_at; Start 145; Stop 169
agttctgccaacttgtcctccactt

SEQ ID NO: 184195 - DNA, 25 bp, Artificial
  probe
  misc_feature (1)..(25): SEQ ID NO: 5270; WAN024EVR_at; Start 77; Stop 101
attttaactggcctgctttgacacc

SEQ ID NO: 184196 - DNA, 25 bp, Artificial
  probe
  misc_feature (1)..(25): SEQ ID NO: 5270; WAN024EVR_at; Start 71; Stop 95
tatcaaattttaactggcctgcttt

SEQ ID NO: 184197 - DNA, 25 bp, Artificial
  probe
  misc_feature (1)..(25): SEQ ID NO: 5270; WAN024EVR_at; Start 154; Stop 178
aacttgtcctccacttctgtttgca

SEQ ID NO: 184198 - DNA, 25 bp, Artificial
  probe
  misc_feature (1)..(25): SEQ ID NO: 5270; WAN024EVR_at; Start 19; Stop 43
cactccactgtgacttatggtcaga

SEQ ID NO: 184199 - DNA, 25 bp, Artificial
  probe
  misc_feature (1)..(25): SEQ ID NO: 5270; WAN024EVR_at; Start 79; Stop 103
tttaactggcctgctttgacaccaa

SEQ ID NO: 184200 - DNA, 25 bp, Artificial
  probe
  misc_feature (1)..(25): SEQ ID NO: 5270; WAN024EVR_at; Start 81; Stop 105
taactggcctgctttgacaccaatc

SEQ ID NO: 184201 - DNA, 25 bp, Artificial
  probe
  misc_feature (1)..(25): SEQ ID NO: 5270; WAN024EVR_at; Start 158; Stop 182
tgtcctccacttctgtttgcagggt

SEQ ID NO: 184202 - DNA, 25 bp, Artificial
  probe
  misc_feature (1)..(25): SEQ ID NO: 5270; WAN024EVR_at; Start 69; Stop 93
aatatcaaattttaactggcctgct

SEQ ID NO: 184203 - DNA, 25 bp, Artificial
  probe
  misc_feature (1)..(25): SEQ ID NO: 5270; WAN024EVR_at; Start 166; Stop 190
acttctgtttgcagggttctgcgaa

SEQ ID NO: 184204 - DNA, 25 bp, Artificial
  probe
  misc_feature (1)..(25): SEQ ID NO: 5270; WAN024EVR_at; Start 74; Stop 98
caaattttaactggcctgctttgac

SEQ ID NO: 184205 - DNA, 25 bp, Artificial
  probe
  misc_feature (1)..(25): SEQ ID NO: 5270; WAN024EVR_at; Start 24; Stop 48
cactgtgacttatggtcagatgctg

SEQ ID NO: 184206 - DNA, 25 bp, Artificial
  probe
  misc_feature (1)..(25): SEQ ID NO: 5270; WAN024EVR_at; Start 22; Stop 46
tccactgtgacttatggtcagatgc

SEQ ID NO: 184207 - DNA, 25 bp, Artificial
  probe
  misc_feature (1)..(25): SEQ ID NO: 5270; WAN024EVR_at; Start 26; Stop 50
ctgtgacttatggtcagatgctgat

SEQ ID NO: 184208 - DNA, 25 bp, Artificial
  probe
  misc_feature (1)..(25): SEQ ID NO: 5270; WAN024EVR_at; Start 169; Stop 193
tctgtttgcagggttctgcgaagtg

SEQ ID NO: 184209 - DNA, 25 bp, Artificial
  probe
  misc_feature (1)..(25): SEQ ID NO: 5270; WAN024EVR_at; Start 160; Stop 184
tcctccacttctgtttgcagggttc

SEQ ID NO: 184210 - DNA, 25 bp, Artificial
  probe
  misc_feature (1)..(25): SEQ ID NO: 5270; WAN024EVR_at; Start 183; Stop 207
tctgcgaagtgggcgagctcccatc

SEQ ID NO: 184211 - DNA, 25 bp, Artificial
  probe
  misc_feature (1)..(25): SEQ ID NO: 5270; WAN024EVR_at; Start 150; Stop 174
tgccaacttgtcctccacttctgtt

SEQ ID NO: 184212 - DNA, 25 bp, Artificial
  probe
  misc_feature (1)..(25): SEQ ID NO: 5270; WAN024EVR_at; Start 84; Stop 108
ctggcctgctttgacaccaatctta

SEQ ID NO: 184213 - DNA, 25 bp, Artificial
  probe
  misc_feature (1)..(25): SEQ ID NO: 5270; WAN024EVR_at; Start 29; Stop 53
tgacttatggtcagatgctgatact

SEQ ID NO: 184214 - DNA, 25 bp, Artificial
  probe
  misc_feature (1)..(25): SEQ ID NO: 5270; WAN024EVR_at; Start 86; Stop 110
ggcctgctttgacaccaatcttaag

SEQ ID NO: 184215 - DNA, 25 bp, Artificial
  probe
  misc_feature (1)..(25): SEQ ID NO: 5270; WAN024EVR_at; Start 143; Stop 167
gaagttctgccaacttgtcctccac

SEQ ID NO: 184216 - DNA, 25 bp, Artificial
  probe
  misc_feature (1)..(25): SEQ ID NO: 5270; WAN024EVR_at; Start 139; Stop 163
agaagaagttctgccaacttgtcct

SEQ ID NO: 184217 - DNA, 25 bp, Artificial
  probe
  misc_feature (1)..(25): SEQ ID NO: 5270; WAN024EVR_at; Start 16; Stop 40
tttcactccactgtgacttatggtc

SEQ ID NO: 184218 - DNA, 25 bp, Artificial
  probe
  misc_feature (1)..(25): SEQ ID NO: 5270; WAN024EVR_at; Start 32; Stop 56
cttatggtcagatgctgatactttt

SEQ ID NO: 184219 - DNA, 25 bp, Artificial
  probe
  misc_feature (1)..(25): SEQ ID NO: 5270; WAN024EVR_at; Start 37; Stop 61
ggtcagatgctgatacttttattct

SEQ ID NO: 184220 - DNA, 25 bp, Artificial
  probe
  misc_feature (1)..(25): SEQ ID NO: 5270; WAN024EVR_at; Start 181; Stop 205
gttctgcgaagtgggcgagctccca

SEQ ID NO: 184221 - DNA, 25 bp, Artificial
  probe
  misc_feature (1)..(25): SEQ ID NO: 5270; WAN024EVR_at; Start 67; Stop 91
gcaatatcaaattttaactggcctg

SEQ ID NO: 184222 - DNA, 25 bp, Artificial
  probe
  misc_feature (1)..(25): SEQ ID NO: 3111; WAN024EVS_at; Start 147; Stop 171
ggatgacttggccatcttcttcaat

SEQ ID NO: 184223 - DNA, 25 bp, Artificial
  probe
  misc_feature (1)..(25): SEQ ID NO: 3111; WAN024EVS_at; Start 264; Stop 288
tcttagccatttccgcaggcacgtc

SEQ ID NO: 184224 - DNA, 25 bp, Artificial
  probe
  misc_feature (1)..(25): SEQ ID NO: 3111; WAN024EVS_at; Start 254; Stop 278
aacacgcgcatcttagccatttccg

SEQ ID NO: 184225 - DNA, 25 bp, Artificial
  probe
  misc_feature (1)..(25): SEQ ID NO: 3111; WAN024EVS_at; Start 350; Stop 374
ccaaccaagacagggttgttcttag

SEQ ID NO: 184226 - DNA, 25 bp, Artificial
  probe
  misc_feature (1)..(25): SEQ ID NO: 3111; WAN024EVS_at; Start 138; Stop 162
cgataaagaggatgacttggccatc

SEQ ID NO: 184227 - DNA, 25 bp, Artificial
  probe
  misc_feature (1)..(25): SEQ ID NO: 3111; WAN024EVS_at; Start 213; Stop 237
ggaagcgtgtccctgcaacgacatt

SEQ ID NO: 184228 - DNA, 25 bp, Artificial
  probe
  misc_feature (1)..(25): SEQ ID NO: 3111; WAN024EVS_at; Start 84; Stop 108
catccagagtcgaatcaatcccgct

SEQ ID NO: 184229 - DNA, 25 bp, Artificial
  probe
  misc_feature (1)..(25): SEQ ID NO: 3111; WAN024EVS_at; Start 91; Stop 115
agtcgaatcaatcccgctaccagaa

SEQ ID NO: 184230 - DNA, 25 bp, Artificial
  probe
  misc_feature (1)..(25): SEQ ID NO: 3111; WAN024EVS_at; Start 226; Stop 250
tgcaacgacattcatcaaatcaagt

SEQ ID NO: 184231 - DNA, 25 bp, Artificial
  probe
  misc_feature (1)..(25): SEQ ID NO: 3111; WAN024EVS_at; Start 171; Stop 195
tatccttgatgatattattcatgcg

SEQ ID NO: 184232 - DNA, 25 bp, Artificial
  probe
  misc_feature (1)..(25): SEQ ID NO: 3111; WAN024EVS_at; Start 154; Stop 178
ttggccatcttcttcaatatccttg

SEQ ID NO: 184233 - DNA, 25 bp, Artificial
  probe
  misc_feature (1)..(25): SEQ ID NO: 3111; WAN024EVS_at; Start 122; Stop 146
atggtgtggagttcatcgataaaga

SEQ ID NO: 184234 - DNA, 25 bp, Artificial
  probe
  misc_feature (1)..(25): SEQ ID NO: 3111; WAN024EVS_at; Start 78; Stop 102
tggccgcatccagagtcgaatcaat

SEQ ID NO: 184235 - DNA, 25 bp, Artificial
  probe
  misc_feature (1)..(25): SEQ ID NO: 3111; WAN024EVS_at; Start 181; Stop 205
gatattattcatgcgttcttcaaag

SEQ ID NO: 184236 - DNA, 25 bp, Artificial
  probe
  misc_feature (1)..(25): SEQ ID NO: 3111; WAN024EVS_at; Start 366; Stop 390
tgttcttagtcttccggctcaagat

SEQ ID NO: 184237 - DNA, 25 bp, Artificial
  probe
  misc_feature (1)..(25): SEQ ID NO: 3111; WAN024EVS_at; Start 38; Stop 62
gttctcaaagttccacgcgccaagg

SEQ ID NO: 184238 - DNA, 25 bp, Artificial
  probe
  misc_feature (1)..(25): SEQ ID NO: 3111; WAN024EVS_at; Start 73; Stop 97
gatattggccgcatccagagtcgaa

SEQ ID NO: 184239 - DNA, 25 bp, Artificial
  probe
  misc_feature (1)..(25): SEQ ID NO: 3111; WAN024EVS_at; Start 65; Stop 89
ggtttcaagatattggccgcatcca

SEQ ID NO: 184240 - DNA, 25 bp, Artificial
  probe
  misc_feature (1)..(25): SEQ ID NO: 3111; WAN024EVS_at; Start 106; Stop 130
gctaccagaacccatgatggtgtgg

SEQ ID NO: 184241 - DNA, 25 bp, Artificial
  probe
  misc_feature (1)..(25): SEQ ID NO: 3111; WAN024EVS_at; Start 197; Stop 221
tcttcaaagtcaccacggaagcgtg

SEQ ID NO: 184242 - DNA, 25 bp, Artificial
  probe
  misc_feature (1)..(25): SEQ ID NO: 3111; WAN024EVS_at; Start 58; Stop 82
caaggctggtttcaagatattggcc

SEQ ID NO: 184243 - DNA, 25 bp, Artificial
  probe
  misc_feature (1)..(25): SEQ ID NO: 3111; WAN024EVS_at; Start 322; Stop 346
cagagctgttttcccgacaccagca

SEQ ID NO: 184244 - DNA, 25 bp, Artificial
  probe
  misc_feature (1)..(25): SEQ ID NO: 3111; WAN024EVS_at; Start 26; Stop 50
gtggcaccaaccgttctcaaagttc

SEQ ID NO: 184245 - DNA, 25 bp, Artificial
  probe
  misc_feature (1)..(25): SEQ ID NO: 3111; WAN024EVS_at; Start 116; Stop 140
cccatgatggtgtggagttcatcga

SEQ ID NO: 184246 - DNA, 25 bp, Artificial
  probe
  misc_feature (1)..(25): SEQ ID NO: 3111; WAN024EVS_at; Start 342; Stop 366
cagcatccccaaccaagacagggtt

SEQ ID NO: 184247 - DNA, 25 bp, Artificial
  probe
  misc_feature (1)..(25): SEQ ID NO: 3111; WAN024EVS_at; Start 237; Stop 261
tcatcaaatcaagttctaacacgcg

SEQ ID NO: 184248 - DNA, 25 bp, Artificial
  probe
  misc_feature (1)..(25): SEQ ID NO: 3111; WAN024EVS_at; Start 100; Stop 124
aatcccgctaccagaacccatgatg

SEQ ID NO: 184249 - DNA, 25 bp, Artificial
  probe
  misc_feature (1)..(25): SEQ ID NO: 3111; WAN024EVS_at; Start 49; Stop 73
tccacgcgccaaggctggtttcaag

SEQ ID NO: 184250 - DNA, 25 bp, Artificial
  probe
  misc_feature (1)..(25): SEQ ID NO: 3111; WAN024EVS_at; Start 310; Stop 334
aagaccaagcgccagagctgttttc

SEQ ID NO: 184251 - DNA, 25 bp, Artificial
  probe
  misc_feature (1)..(25): SEQ ID NO: 3111; WAN024EVS_at; Start 203; Stop 227
aagtcaccacggaagcgtgtccctg

SEQ ID NO: 184252 - DNA, 25 bp, Artificial
  probe
  misc_feature (1)..(25): SEQ ID NO: 3111; WAN024EVS_at; Start 316; Stop 340
aagcgccagagctgttttcccgaca

SEQ ID NO: 184253 - DNA, 25 bp, Artificial
  probe
  misc_feature (1)..(25): SEQ ID NO: 3111; WAN024EVS_at; Start 362; Stop 386
gggttgttcttagtcttccggctca

SEQ ID NO: 184254 - DNA, 25 bp, Artificial
  probe
  misc_feature (1)..(25): SEQ ID NO: 3111; WAN024EVS_at; Start 190; Stop 214
catgcgttcttcaaagtcaccacgg

SEQ ID NO: 184255 - DNA, 25 bp, Artificial
  probe
  misc_feature (1)..(25): SEQ ID NO: 3111; WAN024EVS_at; Start 245; Stop 269
tcaagttctaacacgcgcatcttag

SEQ ID NO: 184256 - DNA, 25 bp, Artificial
  probe
  misc_feature (1)..(25): SEQ ID NO: 1047; WAN024EVT_at; Start 810; Stop 834
gatgaatgtcgttgcagggacacgc

SEQ ID NO: 184257 - DNA, 25 bp, Artificial
  probe
  misc_feature (1)..(25): SEQ ID NO: 1047; WAN024EVT_at; Start 452; Stop 476
caggctggactcgtgaagatctcaa

SEQ ID NO: 184258 - DNA, 25 bp, Artificial
  probe
  misc_feature (1)..(25): SEQ ID NO: 1047; WAN024EVT_at; Start 1354; Stop 1378
gatggcaagtggaaacaggcagccc

SEQ ID NO: 184259 - DNA, 25 bp, Artificial
  probe
  misc_feature (1)..(25): SEQ ID NO: 1047; WAN024EVT_at; Start 2105; Stop 2129
gaccggaattcatcaaccgtattga

SEQ ID NO: 184260 - DNA, 25 bp, Artificial
  probe
  misc_feature (1)..(25): SEQ ID NO: 1047; WAN024EVT_at; Start 229; Stop 253
gaattgccgttctcccgtcgtttgc

SEQ ID NO: 184261 - DNA, 25 bp, Artificial
  probe
  misc_feature (1)..(25): SEQ ID NO: 1047; WAN024EVT_at; Start 187; Stop 211
gaactgactgaaacggactatagcc

SEQ ID NO: 184262 - DNA, 25 bp, Artificial
  probe
  misc_feature (1)..(25): SEQ ID NO: 1047; WAN024EVT_at; Start 433; Stop 457
cgaaatttagaagaacgggcaggct

SEQ ID NO: 184263 - DNA, 25 bp, Artificial
  probe
  misc_feature (1)..(25): SEQ ID NO: 1047; WAN024EVT_at; Start 1938; Stop 1962
caagggacgcaaggtcgatttttca

SEQ ID NO: 184264 - DNA, 25 bp, Artificial
  probe
  misc_feature (1)..(25): SEQ ID NO: 1047; WAN024EVT_at; Start 949; Stop 973
attgattcgactctggatgcggcca

SEQ ID NO: 184265 - DNA, 25 bp, Artificial
  probe
  misc_feature (1)..(25): SEQ ID NO: 1047; WAN024EVT_at; Start 624; Stop 648
catcggtcgggacaaggaaatctca

SEQ ID NO: 184266 - DNA, 25 bp, Artificial
  probe
  misc_feature (1)..(25): SEQ ID NO: 1047; WAN024EVT_at; Start 1372; Stop 1396
gcagcccagctaatcgcaaaagaag

SEQ ID NO: 184267 - DNA, 25 bp, Artificial
  probe
  misc_feature (1)..(25): SEQ ID NO: 1047; WAN024EVT_at; Start 1452; Stop 1476
gagtcgcttgtcaggaatcccagtt

SEQ ID NO: 184268 - DNA, 25 bp, Artificial
  probe
  misc_feature (1)..(25): SEQ ID NO: 1047; WAN024EVT_at; Start 487; Stop 511
caacgccatcgtacagtagctgaca

SEQ ID NO: 184269 - DNA, 25 bp, Artificial
  probe
  misc_feature (1)..(25): SEQ ID NO: 1047; WAN024EVT_at; Start 580; Stop 604
catgatttgacagagcaagcgcgtt

SEQ ID NO: 184270 - DNA, 25 bp, Artificial
  probe
  misc_feature (1)..(25): SEQ ID NO: 1047; WAN024EVT_at; Start 609; Stop 633
caagttagaaccagtcatcggtcgg

SEQ ID NO: 184271 - DNA, 25 bp, Artificial
  probe
  misc_feature (1)..(25): SEQ ID NO: 1047; WAN024EVT_at; Start 1995; Stop 2019
tgcgactgcccttcgtgatgataag

SEQ ID NO: 184272 - DNA, 25 bp, Artificial
  probe
  misc_feature (1)..(25): SEQ ID NO: 1047; WAN024EVT_at; Start 973; Stop 997
aatatcttgaaaccagccttggcgc

SEQ ID NO: 184273 - DNA, 25 bp, Artificial
  probe
  misc_feature (1)..(25): SEQ ID NO: 1047; WAN024EVT_at; Start 144; Stop 168
tgattatccgtatgagatggaccgt

SEQ ID NO: 184274 - DNA, 25 bp, Artificial
  probe
  misc_feature (1)..(25): SEQ ID NO: 1047; WAN024EVT_at; Start 522; Stop 546
tatggccaatatgatgggcatgccg

SEQ ID NO: 184275 - DNA, 25 bp, Artificial
  probe
  misc_feature (1)..(25): SEQ ID NO: 1047; WAN024EVT_at; Start 1326; Stop 1350
tttgagtccagctgacaaggccctg

SEQ ID NO: 184276 - DNA, 25 bp, Artificial
  probe
  misc_feature (1)..(25): SEQ ID NO: 1047; WAN024EVT_at; Start 911; Stop 935
tcgatgaactccacaccatcatggg

SEQ ID NO: 184277 - DNA, 25 bp, Artificial
  probe
  misc_feature (1)..(25): SEQ ID NO: 1047; WAN024EVT_at; Start 56; Stop 80
gacattttggagctcgttatctaga

SEQ ID NO: 184278 - DNA, 25 bp, Artificial
  probe
  misc_feature (1)..(25): SEQ ID NO: 1047; WAN024EVT_at; Start 1974; Stop 1998
cattatgacatcgaatctaggtgcg

SEQ ID NO: 184279 - DNA, 25 bp, Artificial
  probe
  misc_feature (1)..(25): SEQ ID NO: 1047; WAN024EVT_at; Start 1196; Stop 1220
aaacagcggttaagatggctcatcg

SEQ ID NO: 184280 - DNA, 25 bp, Artificial
  probe
  misc_feature (1)..(25): SEQ ID NO: 1047; WAN024EVT_at; Start 1859; Stop 1883
ttgatgaggtagagaaggcccaccc

SEQ ID NO: 184281 - DNA, 25 bp, Artificial
  probe
  misc_feature (1)..(25): SEQ ID NO: 1047; WAN024EVT_at; Start 989; Stop 1013
ccttggcgcgtggaactttgagaac

SEQ ID NO: 184282 - DNA, 25 bp, Artificial
  probe
  misc_feature (1)..(25): SEQ ID NO: 1047; WAN024EVT_at; Start 271; Stop 295
gcagagtatgtagcgtcagtggtcc

SEQ ID NO: 184283 - DNA, 25 bp, Artificial
  probe
  misc_feature (1)..(25): SEQ ID NO: 1047; WAN024EVT_at; Start 1147; Stop 1171
gcgacttatgagaaacatcaccgtg

SEQ ID NO: 184284 - DNA, 25 bp, Artificial
  probe
  misc_feature (1)..(25): SEQ ID NO: 1047; WAN024EVT_at; Start 2309; Stop 2333
gcagaaccctgcaaacagaagtgga

SEQ ID NO: 184285 - DNA, 25 bp, Artificial
  probe
  misc_feature (1)..(25): SEQ ID NO: 1047; WAN024EVT_at; Start 1222; Stop 1246
tatttaaccagtcgtcacttgccag

SEQ ID NO: 184286 - DNA, 25 bp, Artificial
  probe
  misc_feature (1)..(25): SEQ ID NO: 1047; WAN024EVT_at; Start 34; Stop 58
gaaagtgcctacatggttgctggac

SEQ ID NO: 184287 - DNA, 25 bp, Artificial
  probe
  misc_feature (1)..(25): SEQ ID NO: 1047; WAN024EVT_at; Start 2388; Stop 2412
taagattggtgtcaaagcaggccag

SEQ ID NO: 184288 - DNA, 25 bp, Artificial
  probe
  misc_feature (1)..(25): SEQ ID NO: 1047; WAN024EVT_at; Start 711; Stop 735
tgtcgggaaaacagctctggcgctt

SEQ ID NO: 184289 - DNA, 25 bp, Artificial
  probe
  misc_feature (1)..(25): SEQ ID NO: 1047; WAN024EVT_at; Start 540; Stop 564
catgccgcagactcctagtggtggt

SEQ ID NO: 184290 - DNA, 25 bp, Artificial
  probe
  misc_feature (1)..(25): SEQ ID NO: 3996; WAN024EVU_at; Start 144; Stop 168
tcagatactggatattgagcaagcc

SEQ ID NO: 184291 - DNA, 25 bp, Artificial
  probe
  misc_feature (1)..(25): SEQ ID NO: 3996; WAN024EVU_at; Start 285; Stop 309
cgtatcgtaccatattcccagttga

SEQ ID NO: 184292 - DNA, 25 bp, Artificial
  probe
  misc_feature (1)..(25): SEQ ID NO: 3996; WAN024EVU_at; Start 55; Stop 79
gacaaagtcttcaacagccttcttg

SEQ ID NO: 184293 - DNA, 25 bp, Artificial
  probe
  misc_feature (1)..(25): SEQ ID NO: 3996; WAN024EVU_at; Start 164; Stop 188
aagccttgcgccagattgcggttca

SEQ ID NO: 184294 - DNA, 25 bp, Artificial
  probe
  misc_feature (1)..(25): SEQ ID NO: 3996; WAN024EVU_at; Start 267; Stop 291
gaccagatttttcaatcacgtatcg

SEQ ID NO: 184295 - DNA, 25 bp, Artificial
  probe
  misc_feature (1)..(25): SEQ ID NO: 3996; WAN024EVU_at; Start 149; Stop 173
tactggatattgagcaagccttgcg

SEQ ID NO: 184296 - DNA, 25 bp, Artificial
  probe
  misc_feature (1)..(25): SEQ ID NO: 3996; WAN024EVU_at; Start 1; Stop 25
gtgataggtgcaggcctggataact

SEQ ID NO: 184297 - DNA, 25 bp, Artificial
  probe
  misc_feature (1)..(25): SEQ ID NO: 3996; WAN024EVU_at; Start 109; Stop 133
gatagagccacccagactgatgaca

SEQ ID NO: 184298 - DNA, 25 bp, Artificial
  probe
  misc_feature (1)..(25): SEQ ID NO: 3996; WAN024EVU_at; Start 75; Stop 99
tcttgacaccttggataaaatctgg

SEQ ID NO: 184299 - DNA, 25 bp, Artificial
  probe
  misc_feature (1)..(25): SEQ ID NO: 3996; WAN024EVU_at; Start 79; Stop 103
gacaccttggataaaatctggattt

SEQ ID NO: 184300 - DNA, 25 bp, Artificial
  probe
  misc_feature (1)..(25): SEQ ID NO: 3996; WAN024EVU_at; Start 105; Stop 129
gactgatagagccacccagactgat

SEQ ID NO: 184301 - DNA, 25 bp, Artificial
  probe
  misc_feature (1)..(25): SEQ ID NO: 3996; WAN024EVU_at; Start 34; Stop 58
cgtgtattcttcgtaggcatcgaca

SEQ ID NO: 184302 - DNA, 25 bp, Artificial
  probe
  misc_feature (1)..(25): SEQ ID NO: 3996; WAN024EVU_at; Start 239; Stop 263
taaatcttgcgaccgtcccaatcag

SEQ ID NO: 184303 - DNA, 25 bp, Artificial
  probe
  misc_feature (1)..(25): SEQ ID NO: 3996; WAN024EVU_at; Start 31; Stop 55
gaccgtgtattcttcgtaggcatcg

SEQ ID NO: 184304 - DNA, 25 bp, Artificial
  probe
  misc_feature (1)..(25): SEQ ID NO: 3996; WAN024EVU_at; Start 47; Stop 71
taggcatcgacaaagtcttcaacag

SEQ ID NO: 184305 - DNA, 25 bp, Artificial
  probe
  misc_feature (1)..(25): SEQ ID NO: 3996; WAN024EVU_at; Start 272; Stop 296
gatttttcaatcacgtatcgtacca

SEQ ID NO: 184306 - DNA, 25 bp, Artificial
  probe
  misc_feature (1)..(25): SEQ ID NO: 3996; WAN024EVU_at; Start 135; Stop 159
ctggatcgatcagatactggatatt

SEQ ID NO: 184307 - DNA, 25 bp, Artificial
  probe
  misc_feature (1)..(25): SEQ ID NO: 3996; WAN024EVU_at; Start 226; Stop 250
tgcggcctcttggtaaatcttgcga

SEQ ID NO: 184308 - DNA, 25 bp, Artificial
  probe
  misc_feature (1)..(25): SEQ ID NO: 3996; WAN024EVU_at; Start 249; Stop 273
gaccgtcccaatcagtatgaccaga

SEQ ID NO: 184309 - DNA, 25 bp, Artificial
  probe
  misc_feature (1)..(25): SEQ ID NO: 3996; WAN024EVU_at; Start 221; Stop 245
ccagctgcggcctcttggtaaatct

SEQ ID NO: 184310 - DNA, 25 bp, Artificial
  probe
  misc_feature (1)..(25): SEQ ID NO: 3996; WAN024EVU_at; Start 93; Stop 117
aatctggattttgactgatagagcc

SEQ ID NO: 184311 - DNA, 25 bp, Artificial
  probe
  misc_feature (1)..(25): SEQ ID NO: 3996; WAN024EVU_at; Start 21; Stop 45
taactggtgcgaccgtgtattcttc

SEQ ID NO: 184312 - DNA, 25 bp, Artificial
  probe
  misc_feature (1)..(25): SEQ ID NO: 3996; WAN024EVU_at; Start 10; Stop 34
gcaggcctggataactggtgcgacc

SEQ ID NO: 184313 - DNA, 25 bp, Artificial
  probe
  misc_feature (1)..(25): SEQ ID NO: 3996; WAN024EVU_at; Start 42; Stop 66
cttcgtaggcatcgacaaagtcttc

SEQ ID NO: 184314 - DNA, 25 bp, Artificial
  probe
  misc_feature (1)..(25): SEQ ID NO: 3996; WAN024EVU_at; Start 256; Stop 280
ccaatcagtatgaccagatttttca

SEQ ID NO: 184315 - DNA, 25 bp, Artificial
  probe
  misc_feature (1)..(25): SEQ ID NO: 3996; WAN024EVU_at; Start 233; Stop 257
tcttggtaaatcttgcgaccgtccc

SEQ ID NO: 184316 - DNA, 25 bp, Artificial
  probe
  misc_feature (1)..(25): SEQ ID NO: 3996; WAN024EVU_at; Start 173; Stop 197
gccagattgcggttcatgcgctcaa

SEQ ID NO: 184317 - DNA, 25 bp, Artificial
  probe
  misc_feature (1)..(25): SEQ ID NO: 3996; WAN024EVU_at; Start 15; Stop 39
cctggataactggtgcgaccgtgta

SEQ ID NO: 184318 - DNA, 25 bp, Artificial
  probe
  misc_feature (1)..(25): SEQ ID NO: 3996; WAN024EVU_at; Start 69; Stop 93
cagccttcttgacaccttggataaa

SEQ ID NO: 184319 - DNA, 25 bp, Artificial
  probe
  misc_feature (1)..(25): SEQ ID NO: 3996; WAN024EVU_at; Start 99; Stop 123
gattttgactgatagagccacccag

SEQ ID NO: 184320 - DNA, 25 bp, Artificial
  probe
  misc_feature (1)..(25): SEQ ID NO: 3996; WAN024EVU_at; Start 181; Stop 205
gcggttcatgcgctcaatggcttct

SEQ ID NO: 184321 - DNA, 25 bp, Artificial
  probe
  misc_feature (1)..(25): SEQ ID NO: 3996; WAN024EVU_at; Start 189; Stop 213
tgcgctcaatggcttcttgacaaag

SEQ ID NO: 184322 - DNA, 25 bp, Artificial
  probe
  misc_feature (1)..(25): SEQ ID NO: 3996; WAN024EVU_at; Start 245; Stop 269
ttgcgaccgtcccaatcagtatgac

SEQ ID NO: 184323 - DNA, 25 bp, Artificial
  probe
  misc_feature (1)..(25): SEQ ID NO: 3996; WAN024EVU_at; Start 159; Stop 183
tgagcaagccttgcgccagattgcg

SEQ ID NO: 184324 - DNA, 25 bp, Artificial
  probe
  misc_feature (1)..(25): SEQ ID NO: 2616; WAN024EVV_at; Start 573; Stop 597
tcgcaagatttaccaagaggccgca

SEQ ID NO: 184325 - DNA, 25 bp, Artificial
  probe
  misc_feature (1)..(25): SEQ ID NO: 2616; WAN024EVV_at; Start 205; Stop 229
caagagacaggtgtgattgatggct

SEQ ID NO: 184326 - DNA, 25 bp, Artificial
  probe
  misc_feature (1)..(25): SEQ ID NO: 2616; WAN024EVV_at; Start 392; Stop 416
ttggcggagccatgattatcaatgg

SEQ ID NO: 184327 - DNA, 25 bp, Artificial
  probe
  misc_feature (1)..(25): SEQ ID NO: 2616; WAN024EVV_at; Start 851; Stop 875
tcaactggctacaggaggaaaagca

SEQ ID NO: 184328 - DNA, 25 bp, Artificial
  probe
  misc_feature (1)..(25): SEQ ID NO: 2616; WAN024EVV_at; Start 514; Stop 538
tcaactgggaatatggtacgatacg

SEQ ID NO: 184329 - DNA, 25 bp, Artificial
  probe
  misc_feature (1)..(25): SEQ ID NO: 2616; WAN024EVV_at; Start 140; Stop 164
tagatcaacgcttgtcagaacagga

SEQ ID NO: 184330 - DNA, 25 bp, Artificial
  probe
  misc_feature (1)..(25): SEQ ID NO: 2616; WAN024EVV_at; Start 88; Stop 112
gataagacaagtatttcaacgcctg

SEQ ID NO: 184331 - DNA, 25 bp, Artificial
  probe
  misc_feature (1)..(25): SEQ ID NO: 2616; WAN024EVV_at; Start 706; Stop 730
ggctctatcagtcaaaatccagatt

SEQ ID NO: 184332 - DNA, 25 bp, Artificial
  probe
  misc_feature (1)..(25): SEQ ID NO: 2616; WAN024EVV_at; Start 314; Stop 338
ccaactgcgttggactcagtgaact

SEQ ID NO: 184333 - DNA, 25 bp, Artificial
  probe
  misc_feature (1)..(25): SEQ ID NO: 2616; WAN024EVV_at; Start 789; Stop 813
ggtcgcaccagttatccaggcctgc

SEQ ID NO: 184334 - DNA, 25 bp, Artificial
  probe
  misc_feature (1)..(25): SEQ ID NO: 2616; WAN024EVV_at; Start 155; Stop 179
cagaacaggattacagtgggattgc

SEQ ID NO: 184335 - DNA, 25 bp, Artificial
  probe
  misc_feature (1)..(25): SEQ ID NO: 2616; WAN024EVV_at; Start 499; Stop 523
tggtcgcaactagcatcaactggga

SEQ ID NO: 184336 - DNA, 25 bp, Artificial
  probe
  misc_feature (1)..(25): SEQ ID NO: 2616; WAN024EVV_at; Start 355; Stop 379
cttgaaaatgcagcctgtgtcgtga

SEQ ID NO: 184337 - DNA, 25 bp, Artificial
  probe
  misc_feature (1)..(25): SEQ ID NO: 2616; WAN024EVV_at; Start 610; Stop 634
ctttgtcaagaagccattgagcgca

SEQ ID NO: 184338 - DNA, 25 bp, Artificial
  probe
  misc_feature (1)..(25): SEQ ID NO: 2616; WAN024EVV_at; Start 46; Stop 70
gggattaagtttgccagtctgactc

SEQ ID NO: 184339 - DNA, 25 bp, Artificial
  probe
  misc_feature (1)..(25): SEQ ID NO: 2616; WAN024EVV_at; Start 775; Stop 799
tacgaagaatacacggtcgcaccag

SEQ ID NO: 184340 - DNA, 25 bp, Artificial
  probe
  misc_feature (1)..(25): SEQ ID NO: 2616; WAN024EVV_at; Start 218; Stop 242
tgattgatggcttcagtgcggtgcc

SEQ ID NO: 184341 - DNA, 25 bp, Artificial
  probe
  misc_feature (1)..(25): SEQ ID NO: 2616; WAN024EVV_at; Start 117; Stop 141
cttggaggatttactagcgtggcta

SEQ ID NO: 184342 - DNA, 25 bp, Artificial
  probe
  misc_feature (1)..(25): SEQ ID NO: 2616; WAN024EVV_at; Start 820; Stop 844
cacgcagatgccaatctctacggtg

SEQ ID NO: 184343 - DNA, 25 bp, Artificial
  probe
  misc_feature (1)..(25): SEQ ID NO: 2616; WAN024EVV_at; Start 250; Stop 274
catggcttttcttggtatgaggcgc

SEQ ID NO: 184344 - DNA, 25 bp, Artificial
  probe
  misc_feature (1)..(25): SEQ ID NO: 2616; WAN024EVV_at; Start 532; Stop 556
cgatacgtgattgaaaaatctggtc

SEQ ID NO: 184345 - DNA, 25 bp, Artificial
  probe
  misc_feature (1)..(25): SEQ ID NO: 2616; WAN024EVV_at; Start 692; Stop 716
tcatcagtctgggtggctctatcag

SEQ ID NO: 184346 - DNA, 25 bp, Artificial
  probe
  misc_feature (1)..(25): SEQ ID NO: 2616; WAN024EVV_at; Start 329; Stop 353
tcagtgaactactagctcatccaga

SEQ ID NO: 184347 - DNA, 25 bp, Artificial
  probe
  misc_feature (1)..(25): SEQ ID NO: 2616; WAN024EVV_at; Start 63; Stop 87
tctgactcctgatgggaaaatactg

SEQ ID NO: 184348 - DNA, 25 bp, Artificial
  probe
  misc_feature (1)..(25): SEQ ID NO: 2616; WAN024EVV_at; Start 234; Stop 258
tgcggtgccctacatccatggcttt

SEQ ID NO: 184349 - DNA, 25 bp, Artificial
  probe
  misc_feature (1)..(25): SEQ ID NO: 2616; WAN024EVV_at; Start 805; Stop 829
caggcctgcacctatcacgcagatg

SEQ ID NO: 184350 - DNA, 25 bp, Artificial
  probe
  misc_feature (1)..(25): SEQ ID NO: 2616; WAN024EVV_at; Start 23; Stop 47
caacgattgatatcggagggactgg

SEQ ID NO: 184351 - DNA, 25 bp, Artificial
  probe
  misc_feature (1)..(25): SEQ ID NO: 2616; WAN024EVV_at; Start 298; Stop 322
catttagaaaatgatgccaactgcg

SEQ ID NO: 184352 - DNA, 25 bp, Artificial
  probe
  misc_feature (1)..(25): SEQ ID NO: 2616; WAN024EVV_at; Start 554; Stop 578
gtcatactgattgggacggtcgcaa

SEQ ID NO: 184353 - DNA, 25 bp, Artificial
  probe
  misc_feature (1)..(25): SEQ ID NO: 2616; WAN024EVV_at; Start 103; Stop 127
tcaacgcctgaaaacttggaggatt

SEQ ID NO: 184354 - DNA, 25 bp, Artificial
  probe
  misc_feature (1)..(25): SEQ ID NO: 2616; WAN024EVV_at; Start 451; Stop 475
gaatttggctacatgacaacccttg

SEQ ID NO: 184355 - DNA, 25 bp, Artificial
  probe
  misc_feature (1)..(25): SEQ ID NO: 2616; WAN024EVV_at; Start 283; Stop 307
tatcagctacctgtccatttagaaa

SEQ ID NO: 184356 - DNA, 25 bp, Artificial
  probe
  misc_feature (1)..(25): SEQ ID NO: 2616; WAN024EVV_at; Start 481; Stop 505
gctgaaaaacttaataactggtcgc

SEQ ID NO: 184357 - DNA, 25 bp, Artificial
  probe
  misc_feature (1)..(25): SEQ ID NO: 2616; WAN024EVV_at; Start 624; Stop 648
cattgagcgcatgaaccgcaatctg

SEQ ID NO: 184358 - DNA, 25 bp, Artificial
  probe
  misc_feature (1)..(25): SEQ ID NO: 4110; WAN024EVW_at; Start 249; Stop 273
ccttgacaccccatttgacaaaggc

SEQ ID NO: 184359 - DNA, 25 bp, Artificial
  probe
  misc_feature (1)..(25): SEQ ID NO: 4110; WAN024EVW_at; Start 327; Stop 351
gggcataggcttcgatttcctgcaa

SEQ ID NO: 184360 - DNA, 25 bp, Artificial
  probe
  misc_feature (1)..(25): SEQ ID NO: 4110; WAN024EVW_at; Start 161; Stop 185
aacgtggcaaacatgccatcaatca

SEQ ID NO: 184361 - DNA, 25 bp, Artificial
  probe
  misc_feature (1)..(25): SEQ ID NO: 4110; WAN024EVW_at; Start 57; Stop 81
ggagactacgatccacaacaccgtt

SEQ ID NO: 184362 - DNA, 25 bp, Artificial
  probe
  misc_feature (1)..(25): SEQ ID NO: 4110; WAN024EVW_at; Start 219; Stop 243
tgtcctctacatcacggagctcctg

SEQ ID NO: 184363 - DNA, 25 bp, Artificial
  probe
  misc_feature (1)..(25): SEQ ID NO: 4110; WAN024EVW_at; Start 102; Stop 126
aaccaaccaagtgggcttcgtccat

SEQ ID NO: 184364 - DNA, 25 bp, Artificial
  probe
  misc_feature (1)..(25): SEQ ID NO: 4110; WAN024EVW_at; Start 144; Stop 168
gagtcttcagtttagacaacgtggc

SEQ ID NO: 184365 - DNA, 25 bp, Artificial
  probe
  misc_feature (1)..(25): SEQ ID NO: 4110; WAN024EVW_at; Start 130; Stop 154
gatattgaccttgcgagtcttcagt

SEQ ID NO: 184366 - DNA, 25 bp, Artificial
  probe
  misc_feature (1)..(25): SEQ ID NO: 4110; WAN024EVW_at; Start 12; Stop 36
atttgtcagcaatatccagcacgcg

SEQ ID NO: 184367 - DNA, 25 bp, Artificial
  probe
  misc_feature (1)..(25): SEQ ID NO: 4110; WAN024EVW_at; Start 295; Stop 319
gatgcatggtacaaaggtcacgtca

SEQ ID NO: 184368 - DNA, 25 bp, Artificial
  probe
  misc_feature (1)..(25): SEQ ID NO: 4110; WAN024EVW_at; Start 306; Stop 330
caaaggtcacgtcaaactgttgggc

SEQ ID NO: 184369 - DNA, 25 bp, Artificial
  probe
  misc_feature (1)..(25): SEQ ID NO: 4110; WAN024EVW_at; Start 88; Stop 112
caggtagcgtcccaaaccaaccaag

SEQ ID NO: 184370 - DNA, 25 bp, Artificial
  probe
  misc_feature (1)..(25): SEQ ID NO: 4110; WAN024EVW_at; Start 286; Stop 310
caaggtctggatgcatggtacaaag

SEQ ID NO: 184371 - DNA, 25 bp, Artificial
  probe
  misc_feature (1)..(25): SEQ ID NO: 4110; WAN024EVW_at; Start 232; Stop 256
acggagctcctgcacttccttgaca

SEQ ID NO: 184372 - DNA, 25 bp, Artificial
  probe
  misc_feature (1)..(25): SEQ ID NO: 4110; WAN024EVW_at; Start 49; Stop 73
gcacatgaggagactacgatccaca

SEQ ID NO: 184373 - DNA, 25 bp, Artificial
  probe
  misc_feature (1)..(25): SEQ ID NO: 4110; WAN024EVW_at; Start 29; Stop 53
agcacgcgctccaagtgttggcaca

SEQ ID NO: 184374 - DNA, 25 bp, Artificial
  probe
  misc_feature (1)..(25): SEQ ID NO: 4110; WAN024EVW_at; Start 202; Stop 226
ttcgccaatgagaagaatgtcctct

SEQ ID NO: 184375 - DNA, 25 bp, Artificial
  probe
  misc_feature (1)..(25): SEQ ID NO: 4110; WAN024EVW_at; Start 78; Stop 102
cgttcagaatcaggtagcgtcccaa

SEQ ID NO: 184376 - DNA, 25 bp, Artificial
  probe
  misc_feature (1)..(25): SEQ ID NO: 4110; WAN024EVW_at; Start 84; Stop 108
gaatcaggtagcgtcccaaaccaac

SEQ ID NO: 184377 - DNA, 25 bp, Artificial
  probe
  misc_feature (1)..(25): SEQ ID NO: 4110; WAN024EVW_at; Start 15; Stop 39
tgtcagcaatatccagcacgcgctc

SEQ ID NO: 184378 - DNA, 25 bp, Artificial
  probe
  misc_feature (1)..(25): SEQ ID NO: 4110; WAN024EVW_at; Start 1; Stop 25
gtggaaaccatatttgtcagcaata

SEQ ID NO: 184379 - DNA, 25 bp, Artificial
  probe
  misc_feature (1)..(25): SEQ ID NO: 4110; WAN024EVW_at; Start 122; Stop 146
tccatcccgatattgaccttgcgag

SEQ ID NO: 184380 - DNA, 25 bp, Artificial
  probe
  misc_feature (1)..(25): SEQ ID NO: 4110; WAN024EVW_at; Start 39; Stop 63
ccaagtgttggcacatgaggagact

SEQ ID NO: 184381 - DNA, 25 bp, Artificial
  probe
  misc_feature (1)..(25): SEQ ID NO: 4110; WAN024EVW_at; Start 153; Stop 177
gtttagacaacgtggcaaacatgcc

SEQ ID NO: 184382 - DNA, 25 bp, Artificial
  probe
  misc_feature (1)..(25): SEQ ID NO: 4110; WAN024EVW_at; Start 68; Stop 92
tccacaacaccgttcagaatcaggt

SEQ ID NO: 184383 - DNA, 25 bp, Artificial
  probe
  misc_feature (1)..(25): SEQ ID NO: 4110; WAN024EVW_at; Start 291; Stop 315
tctggatgcatggtacaaaggtcac

SEQ ID NO: 184384 - DNA, 25 bp, Artificial
  probe
  misc_feature (1)..(25): SEQ ID NO: 4110; WAN024EVW_at; Start 44; Stop 68
tgttggcacatgaggagactacgat

SEQ ID NO: 184385 - DNA, 25 bp, Artificial
  probe
  misc_feature (1)..(25): SEQ ID NO: 4110; WAN024EVW_at; Start 276; Stop 300
acaagtgggccaaggtctggatgca

SEQ ID NO: 184386 - DNA, 25 bp, Artificial
  probe
  misc_feature (1)..(25): SEQ ID NO: 4110; WAN024EVW_at; Start 109; Stop 133
caagtgggcttcgtccatcccgata

SEQ ID NO: 184387 - DNA, 25 bp, Artificial
  probe
  misc_feature (1)..(25): SEQ ID NO: 4110; WAN024EVW_at; Start 213; Stop 237
gaagaatgtcctctacatcacggag

SEQ ID NO: 184388 - DNA, 25 bp, Artificial
  probe
  misc_feature (1)..(25): SEQ ID NO: 4110; WAN024EVW_at; Start 242; Stop 266
tgcacttccttgacaccccatttga

SEQ ID NO: 184389 - DNA, 25 bp, Artificial
  probe
  misc_feature (1)..(25): SEQ ID NO: 4110; WAN024EVW_at; Start 339; Stop 363
cgatttcctgcaactcctctgctga

SEQ ID NO: 184390 - DNA, 25 bp, Artificial
  probe
  misc_feature (1)..(25): SEQ ID NO: 4110; WAN024EVW_at; Start 313; Stop 337
cacgtcaaactgttgggcataggct

SEQ ID NO: 184391 - DNA, 25 bp, Artificial
  probe
  misc_feature (1)..(25): SEQ ID NO: 4110; WAN024EVW_at; Start 189; Stop 213
cataaaccttttcttcgccaatgag

SEQ ID NO: 184392 - DNA, 25 bp, Artificial
  probe
  misc_feature (1)..(25): SEQ ID NO: 2622; WAN024EVX_at; Start 1552; Stop 1576
gaaagtttacaacaaatcgccagac

SEQ ID NO: 184393 - DNA, 25 bp, Artificial
  probe
  misc_feature (1)..(25): SEQ ID NO: 2622; WAN024EVX_at; Start 67; Stop 91
tctctaccagatgtggaagtggctg

SEQ ID NO: 184394 - DNA, 25 bp, Artificial
  probe
  misc_feature (1)..(25): SEQ ID NO: 2622; WAN024EVX_at; Start 271; Stop 295
gactgttctcgaaatgcggtgctga

SEQ ID NO: 184395 - DNA, 25 bp, Artificial
  probe
  misc_feature (1)..(25): SEQ ID NO: 2622; WAN024EVX_at; Start 1048; Stop 1072
cgtctagtggctatcgaggctaata

SEQ ID NO: 184396 - DNA, 25 bp, Artificial
  probe
  misc_feature (1)..(25): SEQ ID NO: 2622; WAN024EVX_at; Start 82; Stop 106
gaagtggctgtcactcagtctgacc

SEQ ID NO: 184397 - DNA, 25 bp, Artificial
  probe
  misc_feature (1)..(25): SEQ ID NO: 2622; WAN024EVX_at; Start 636; Stop 660
gaagactcgcaaggtcaatatcggg

SEQ ID NO: 184398 - DNA, 25 bp, Artificial
  probe
  misc_feature (1)..(25): SEQ ID NO: 2622; WAN024EVX_at; Start 544; Stop 568
caggagctccgtgatgtagaggaca

SEQ ID NO: 184399 - DNA, 25 bp, Artificial
  probe
  misc_feature (1)..(25): SEQ ID NO: 2622; WAN024EVX_at; Start 734; Stop 758
tgtgccaacacttggagcgcgtgct

SEQ ID NO: 184400 - DNA, 25 bp, Artificial
  probe
  misc_feature (1)..(25): SEQ ID NO: 2622; WAN024EVX_at; Start 862; Stop 886
gaggaaactcgtgtctacctagacc

SEQ ID NO: 184401 - DNA, 25 bp, Artificial
  probe
  misc_feature (1)..(25): SEQ ID NO: 2622; WAN024EVX_at; Start 1121; Stop 1145
gagacaatggtggtgaaactgccca

SEQ ID NO: 184402 - DNA, 25 bp, Artificial
  probe
  misc_feature (1)..(25): SEQ ID NO: 2622; WAN024EVX_at; Start 1157; Stop 1181
taccaagcttgcaaatctgggcaga

SEQ ID NO: 184403 - DNA, 25 bp, Artificial
  probe
  misc_feature (1)..(25): SEQ ID NO: 2622; WAN024EVX_at; Start 813; Stop 837
caaactcatgtcagcggatggccag

SEQ ID NO: 184404 - DNA, 25 bp, Artificial
  probe
  misc_feature (1)..(25): SEQ ID NO: 2622; WAN024EVX_at; Start 751; Stop 775
cgcgtgctggatattgctgacaaat

SEQ ID NO: 184405 - DNA, 25 bp, Artificial
  probe
  misc_feature (1)..(25): SEQ ID NO: 2622; WAN024EVX_at; Start 1011; Stop 1035
gaagtggattggctttacacctcac

SEQ ID NO: 184406 - DNA, 25 bp, Artificial
  probe
  misc_feature (1)..(25): SEQ ID NO: 2622; WAN024EVX_at; Start 531; Stop 555
tgtcaaggaagtgcaggagctccgt

SEQ ID NO: 184407 - DNA, 25 bp, Artificial
  probe
  misc_feature (1)..(25): SEQ ID NO: 2622; WAN024EVX_at; Start 978; Stop 1002
tagccatgaccttgcatttgcaggg

SEQ ID NO: 184408 - DNA, 25 bp, Artificial
  probe
  misc_feature (1)..(25): SEQ ID NO: 2622; WAN024EVX_at; Start 1524; Stop 1548
tcgtcaggcctaccaagcggatgat

SEQ ID NO: 184409 - DNA, 25 bp, Artificial
  probe
  misc_feature (1)..(25): SEQ ID NO: 2622; WAN024EVX_at; Start 927; Stop 951
tcaggatagcgaggaaaaatacaac

SEQ ID NO: 184410 - DNA, 25 bp, Artificial
  probe
  misc_feature (1)..(25): SEQ ID NO: 2622; WAN024EVX_at; Start 1791; Stop 1815
tactgacttctacgcagacaaggat

SEQ ID NO: 184411 - DNA, 25 bp, Artificial
  probe
  misc_feature (1)..(25): SEQ ID NO: 2622; WAN024EVX_at; Start 881; Stop 905
tagaccgtctcaaagaccgtgtgac

SEQ ID NO: 184412 - DNA, 25 bp, Artificial
  probe
  misc_feature (1)..(25): SEQ ID NO: 2622; WAN024EVX_at; Start 1834; Stop 1858
aaccagtggcataccattgcgacag

SEQ ID NO: 184413 - DNA, 25 bp, Artificial
  probe
  misc_feature (1)..(25): SEQ ID NO: 2622; WAN024EVX_at; Start 1456; Stop 1480
tatctctttgaaactcaggcccagt

SEQ ID NO: 184414 - DNA, 25 bp, Artificial
  probe
  misc_feature (1)..(25): SEQ ID NO: 2622; WAN024EVX_at; Start 1229; Stop 1253
ccaatactggtctaacggttgagga

SEQ ID NO: 184415 - DNA, 25 bp, Artificial
  probe
  misc_feature (1)..(25): SEQ ID NO: 2622; WAN024EVX_at; Start 1668; Stop 1692
tacagttgacatccgtatgggcgga

SEQ ID NO: 184416 - DNA, 25 bp, Artificial
  probe
  misc_feature (1)..(25): SEQ ID NO: 2622; WAN024EVX_at; Start 562; Stop 586
gaggacattcttctcattggcgaag

SEQ ID NO: 184417 - DNA, 25 bp, Artificial
  probe
  misc_feature (1)..(25): SEQ ID NO: 2622; WAN024EVX_at; Start 1755; Stop 1779
ccgcatcgacgagctggaagttgaa

SEQ ID NO: 184418 - DNA, 25 bp, Artificial
  probe
  misc_feature (1)..(25): SEQ ID NO: 2622; WAN024EVX_at; Start 1805; Stop 1829
cagacaaggatttcgcagcaactac

SEQ ID NO: 184419 - DNA, 25 bp, Artificial
  probe
  misc_feature (1)..(25): SEQ ID NO: 2622; WAN024EVX_at; Start 1252; Stop 1276
gattttatgcagattgaccttgcca

SEQ ID NO: 184420 - DNA, 25 bp, Artificial
  probe
  misc_feature (1)..(25): SEQ ID NO: 2622; WAN024EVX_at; Start 1071; Stop 1095
taaagcctgccgtgccaatcagatt

SEQ ID NO: 184421 - DNA, 25 bp, Artificial
  probe
  misc_feature (1)..(25): SEQ ID NO: 2622; WAN024EVX_at; Start 651; Stop 675
caatatcgggatggacgaagcccac

SEQ ID NO: 184422 - DNA, 25 bp, Artificial
  probe
  misc_feature (1)..(25): SEQ ID NO: 2622; WAN024EVX_at; Start 718; Stop 742
gatcgtagtctcctcatgtgccaac

SEQ ID NO: 184423 - DNA, 25 bp, Artificial
  probe
  misc_feature (1)..(25): SEQ ID NO: 2622; WAN024EVX_at; Start 1497; Stop 1521
tagcaaagtagatgtgggacgacgc

SEQ ID NO: 184424 - DNA, 25 bp, Artificial
  probe
  misc_feature (1)..(25): SEQ ID NO: 2622; WAN024EVX_at; Start 473; Stop 497
tgacctttgtaccatgcatccagac

SEQ ID NO: 184425 - DNA, 25 bp, Artificial
  probe
  misc_feature (1)..(25): SEQ ID NO: 2622; WAN024EVX_at; Start 769; Stop 793
gacaaatatggtttccactgccaga

SEQ ID NO: 184426 - DNA, 25 bp, Artificial
  probe
  misc_feature (1)..(25): SEQ ID NO: 7103; WAN024EVY_at; Start 16; Stop 40
tggcaaacttttctgatgattttca

SEQ ID NO: 184427 - DNA, 25 bp, Artificial
  probe
  misc_feature (1)..(25): SEQ ID NO: 7103; WAN024EVY_at; Start 31; Stop 55
atgattttcatgaagagcctgcgct

SEQ ID NO: 184428 - DNA, 25 bp, Artificial
  probe
  misc_feature (1)..(25): SEQ ID NO: 7103; WAN024EVY_at; Start 9; Stop 33
taaagactggcaaacttttctgatg

SEQ ID NO: 184429 - DNA, 25 bp, Artificial
  probe
  misc_feature (1)..(25): SEQ ID NO: 7103; WAN024EVY_at; Start 13; Stop 37
gactggcaaacttttctgatgattt

SEQ ID NO: 184430 - DNA, 25 bp, Artificial
  probe
  misc_feature (1)..(25): SEQ ID NO: 7103; WAN024EVY_at; Start 34; Stop 58
attttcatgaagagcctgcgctttt

SEQ ID NO: 184431 - DNA, 25 bp, Artificial
  probe
  misc_feature (1)..(25): SEQ ID NO: 7103; WAN024EVY_at; Start 8; Stop 32
ttaaagactggcaaacttttctgat

SEQ ID NO: 184432 - DNA, 25 bp, Artificial
  probe
  misc_feature (1)..(25): SEQ ID NO: 7103; WAN024EVY_at; Start 1; Stop 25
ctgacttttaaagactggcaaactt

SEQ ID NO: 184433 - DNA, 25 bp, Artificial
  probe
  misc_feature (1)..(25): SEQ ID NO: 7103; WAN024EVY_at; Start 21; Stop 45
aacttttctgatgattttcatgaag

SEQ ID NO: 184434 - DNA, 25 bp, Artificial
  probe
  misc_feature (1)..(25): SEQ ID NO: 7103; WAN024EVY_at; Start 10; Stop 34
aaagactggcaaacttttctgatga

SEQ ID NO: 184435 - DNA, 25 bp, Artificial
  probe
  misc_feature (1)..(25): SEQ ID NO: 7103; WAN024EVY_at; Start 7; Stop 31
tttaaagactggcaaacttttctga

SEQ ID NO: 184436 - DNA, 25 bp, Artificial
  probe
  misc_feature (1)..(25): SEQ ID NO: 7103; WAN024EVY_at; Start 42; Stop 66
gaagagcctgcgcttttatggtaaa

SEQ ID NO: 184437 - DNA, 25 bp, Artificial
  probe
  misc_feature (1)..(25): SEQ ID NO: 7103; WAN024EVY_at; Start 38; Stop 62
tcatgaagagcctgcgcttttatgg

SEQ ID NO: 184438 - DNA, 25 bp, Artificial
  probe
  misc_feature (1)..(25): SEQ ID NO: 7103; WAN024EVY_at; Start 39; Stop 63
catgaagagcctgcgcttttatggt

SEQ ID NO: 184439 - DNA, 25 bp, Artificial
  probe
  misc_feature (1)..(25): SEQ ID NO: 7103; WAN024EVY_at; Start 35; Stop 59
ttttcatgaagagcctgcgctttta

SEQ ID NO: 184440 - DNA, 25 bp, Artificial
  probe
  misc_feature (1)..(25): SEQ ID NO: 7103; WAN024EVY_at; Start 17; Stop 41
ggcaaacttttctgatgattttcat

SEQ ID NO: 184441 - DNA, 25 bp, Artificial
  probe
  misc_feature (1)..(25): SEQ ID NO: 7103; WAN024EVY_at; Start 15; Stop 39
ctggcaaacttttctgatgattttc

SEQ ID NO: 184442 - DNA, 25 bp, Artificial
  probe
  misc_feature (1)..(25): SEQ ID NO: 7103; WAN024EVY_at; Start 14; Stop 38
actggcaaacttttctgatgatttt

SEQ ID NO: 184443 - DNA, 25 bp, Artificial
  probe
  misc_feature (1)..(25): SEQ ID NO: 7103; WAN024EVY_at; Start 28; Stop 52
ctgatgattttcatgaagagcctgc

SEQ ID NO: 184444 - DNA, 25 bp, Artificial
  probe
  misc_feature (1)..(25): SEQ ID NO: 7103; WAN024EVY_at; Start 19; Stop 43
caaacttttctgatgattttcatga

SEQ ID NO: 184445 - DNA, 25 bp, Artificial
  probe
  misc_feature (1)..(25): SEQ ID NO: 7103; WAN024EVY_at; Start 12; Stop 36
agactggcaaacttttctgatgatt

SEQ ID NO: 184446 - DNA, 25 bp, Artificial
  probe
  misc_feature (1)..(25): SEQ ID NO: 7103; WAN024EVY_at; Start 18; Stop 42
gcaaacttttctgatgattttcatg

SEQ ID NO: 184447 - DNA, 25 bp, Artificial
  probe
  misc_feature (1)..(25): SEQ ID NO: 7103; WAN024EVY_at; Start 20; Stop 44
aaacttttctgatgattttcatgaa

SEQ ID NO: 184448 - DNA, 25 bp, Artificial
  probe
  misc_feature (1)..(25): SEQ ID NO: 7103; WAN024EVY_at; Start 29; Stop 53
tgatgattttcatgaagagcctgcg

SEQ ID NO: 184449 - DNA, 25 bp, Artificial
  probe
  misc_feature (1)..(25): SEQ ID NO: 7103; WAN024EVY_at; Start 33; Stop 57
gattttcatgaagagcctgcgcttt

SEQ ID NO: 184450 - DNA, 25 bp, Artificial
  probe
  misc_feature (1)..(25): SEQ ID NO: 7103; WAN024EVY_at; Start 25; Stop 49
tttctgatgattttcatgaagagcc

SEQ ID NO: 184451 - DNA, 25 bp, Artificial
  probe
  misc_feature (1)..(25): SEQ ID NO: 7103; WAN024EVY_at; Start 11; Stop 35
aagactggcaaacttttctgatgat

SEQ ID NO: 184452 - DNA, 25 bp, Artificial
  probe
  misc_feature (1)..(25): SEQ ID NO: 7103; WAN024EVY_at; Start 27; Stop 51
tctgatgattttcatgaagagcctg

SEQ ID NO: 184453 - DNA, 25 bp, Artificial
  probe
  misc_feature (1)..(25): SEQ ID NO: 7103; WAN024EVY_at; Start 22; Stop 46
acttttctgatgattttcatgaaga

SEQ ID NO: 184454 - DNA, 25 bp, Artificial
  probe
  misc_feature (1)..(25): SEQ ID NO: 7103; WAN024EVY_at; Start 23; Stop 47
cttttctgatgattttcatgaagag

SEQ ID NO: 184455 - DNA, 25 bp, Artificial
  probe
  misc_feature (1)..(25): SEQ ID NO: 7103; WAN024EVY_at; Start 37; Stop 61
ttcatgaagagcctgcgcttttatg

SEQ ID NO: 184456 - DNA, 25 bp, Artificial
  probe
  misc_feature (1)..(25): SEQ ID NO: 7103; WAN024EVY_at; Start 30; Stop 54
gatgattttcatgaagagcctgcgc

SEQ ID NO: 184457 - DNA, 25 bp, Artificial
  probe
  misc_feature (1)..(25): SEQ ID NO: 7103; WAN024EVY_at; Start 24; Stop 48
ttttctgatgattttcatgaagagc

SEQ ID NO: 184458 - DNA, 25 bp, Artificial
  probe
  misc_feature (1)..(25): SEQ ID NO: 7103; WAN024EVY_at; Start 32; Stop 56
tgattttcatgaagagcctgcgctt

SEQ ID NO: 184459 - DNA, 25 bp, Artificial
  probe
  misc_feature (1)..(25): SEQ ID NO: 7103; WAN024EVY_at; Start 26; Stop 50
ttctgatgattttcatgaagagcct

SEQ ID NO: 184460 - DNA, 25 bp, Artificial
  probe
  misc_feature (1)..(25): SEQ ID NO: 5391; WAN024EVZ_at; Start 64; Stop 88
tgttgccataacctctgcagatact

SEQ ID NO: 184461 - DNA, 25 bp, Artificial
  probe
  misc_feature (1)..(25): SEQ ID NO: 5391; WAN024EVZ_at; Start 193; Stop 217
tatttcttgtccgatgtgttcctca

SEQ ID NO: 184462 - DNA, 25 bp, Artificial
  probe
  misc_feature (1)..(25): SEQ ID NO: 5391; WAN024EVZ_at; Start 51; Stop 75
gaaggctttcagctgttgccataac

SEQ ID NO: 184463 - DNA, 25 bp, Artificial
  probe
  misc_feature (1)..(25): SEQ ID NO: 5391; WAN024EVZ_at; Start 115; Stop 139
gattccttcacggtcacgaagatcg

SEQ ID NO: 184464 - DNA, 25 bp, Artificial
  probe
  misc_feature (1)..(25): SEQ ID NO: 5391; WAN024EVZ_at; Start 33; Stop 57
caataacaaattcgctacgaaggct

SEQ ID NO: 184465 - DNA, 25 bp, Artificial
  probe
  misc_feature (1)..(25): SEQ ID NO: 5391; WAN024EVZ_at; Start 289; Stop 313
aaagcgcaggctcttcatgaaaatc

SEQ ID NO: 184466 - DNA, 25 bp, Artificial
  probe
  misc_feature (1)..(25): SEQ ID NO: 5391; WAN024EVZ_at; Start 83; Stop 107
gatactttttcagggttgataacca

SEQ ID NO: 184467 - DNA, 25 bp, Artificial
  probe
  misc_feature (1)..(25): SEQ ID NO: 5391; WAN024EVZ_at; Start 47; Stop 71
ctacgaaggctttcagctgttgcca

SEQ ID NO: 184468 - DNA, 25 bp, Artificial
  probe
  misc_feature (1)..(25): SEQ ID NO: 5391; WAN024EVZ_at; Start 111; Stop 135
gcatgattccttcacggtcacgaag

SEQ ID NO: 184469 - DNA, 25 bp, Artificial
  probe
  misc_feature (1)..(25): SEQ ID NO: 5391; WAN024EVZ_at; Start 219; Stop 243
gaacacgaccagcatacatactacg

SEQ ID NO: 184470 - DNA, 25 bp, Artificial
  probe
  misc_feature (1)..(25): SEQ ID NO: 5391; WAN024EVZ_at; Start 60; Stop 84
cagctgttgccataacctctgcaga

SEQ ID NO: 184471 - DNA, 25 bp, Artificial
  probe
  misc_feature (1)..(25): SEQ ID NO: 5391; WAN024EVZ_at; Start 280; Stop 304
tttaccataaaagcgcaggctcttc

SEQ ID NO: 184472 - DNA, 25 bp, Artificial
  probe
  misc_feature (1)..(25): SEQ ID NO: 5391; WAN024EVZ_at; Start 41; Stop 65
aattcgctacgaaggctttcagctg

SEQ ID NO: 184473 - DNA, 25 bp, Artificial
  probe
  misc_feature (1)..(25): SEQ ID NO: 5391; WAN024EVZ_at; Start 197; Stop 221
tcttgtccgatgtgttcctcacgaa

SEQ ID NO: 184474 - DNA, 25 bp, Artificial
  probe
  misc_feature (1)..(25): SEQ ID NO: 5391; WAN024EVZ_at; Start 92; Stop 116
tcagggttgataaccaactgcatga

SEQ ID NO: 184475 - DNA, 25 bp, Artificial
  probe
  misc_feature (1)..(25): SEQ ID NO: 5391; WAN024EVZ_at; Start 225; Stop 249
gaccagcatacatactacgtttcat

SEQ ID NO: 184476 - DNA, 25 bp, Artificial
  probe
  misc_feature (1)..(25): SEQ ID NO: 5391; WAN024EVZ_at; Start 177; Stop 201
cccatcctttcaaggttatttcttg

SEQ ID NO: 184477 - DNA, 25 bp, Artificial
  probe
  misc_feature (1)..(25): SEQ ID NO: 5391; WAN024EVZ_at; Start 24; Stop 48
cagtcacctcaataacaaattcgct

SEQ ID NO: 184478 - DNA, 25 bp, Artificial
  probe
  misc_feature (1)..(25): SEQ ID NO: 5391; WAN024EVZ_at; Start 157; Stop 181
aaggtcacgacgacggccaacccat

SEQ ID NO: 184479 - DNA, 25 bp, Artificial
  probe
  misc_feature (1)..(25): SEQ ID NO: 5391; WAN024EVZ_at; Start 237; Stop 261
tactacgtttcattatttctctcct

SEQ ID NO: 184480 - DNA, 25 bp, Artificial
  probe
  misc_feature (1)..(25): SEQ ID NO: 5391; WAN024EVZ_at; Start 294; Stop 318
gcaggctcttcatgaaaatcatcag

SEQ ID NO: 184481 - DNA, 25 bp, Artificial
  probe
  misc_feature (1)..(25): SEQ ID NO: 5391; WAN024EVZ_at; Start 210; Stop 234
gttcctcacgaacacgaccagcata

SEQ ID NO: 184482 - DNA, 25 bp, Artificial
  probe
  misc_feature (1)..(25): SEQ ID NO: 5391; WAN024EVZ_at; Start 141; Stop 165
taaagatcaaaccaccaaggtcacg

SEQ ID NO: 184483 - DNA, 25 bp, Artificial
  probe
  misc_feature (1)..(25): SEQ ID NO: 5391; WAN024EVZ_at; Start 100; Stop 124
gataaccaactgcatgattccttca

SEQ ID NO: 184484 - DNA, 25 bp, Artificial
  probe
  misc_feature (1)..(25): SEQ ID NO: 5391; WAN024EVZ_at; Start 254; Stop 278
tctctcctcttttattctgttacta

SEQ ID NO: 184485 - DNA, 25 bp, Artificial
  probe
  misc_feature (1)..(25): SEQ ID NO: 5391; WAN024EVZ_at; Start 321; Stop 345
aagtttgccagtctttaaaagtcag

SEQ ID NO: 184486 - DNA, 25 bp, Artificial
  probe
  misc_feature (1)..(25): SEQ ID NO: 5391; WAN024EVZ_at; Start 145; Stop 169
gatcaaaccaccaaggtcacgacga

SEQ ID NO: 184487 - DNA, 25 bp, Artificial
  probe
  misc_feature (1)..(25): SEQ ID NO: 5391; WAN024EVZ_at; Start 106; Stop 130
caactgcatgattccttcacggtca

SEQ ID NO: 184488 - DNA, 25 bp, Artificial
  probe
  misc_feature (1)..(25): SEQ ID NO: 5391; WAN024EVZ_at; Start 72; Stop 96
taacctctgcagatactttttcagg

SEQ ID NO: 184489 - DNA, 25 bp, Artificial
  probe
  misc_feature (1)..(25): SEQ ID NO: 5391; WAN024EVZ_at; Start 327; Stop 351
gccagtctttaaaagtcaggtgaaa

SEQ ID NO: 184490 - DNA, 25 bp, Artificial
  probe
  misc_feature (1)..(25): SEQ ID NO: 5391; WAN024EVZ_at; Start 122; Stop 146
tcacggtcacgaagatcgataaaga

SEQ ID NO: 184491 - DNA, 25 bp, Artificial
  probe
  misc_feature (1)..(25): SEQ ID NO: 5391; WAN024EVZ_at; Start 307; Stop 331
gaaaatcatcagaaaagtttgccag

SEQ ID NO: 184492 - DNA, 25 bp, Artificial
  probe
  misc_feature (1)..(25): SEQ ID NO: 5391; WAN024EVZ_at; Start 137; Stop 161
tcgataaagatcaaaccaccaaggt

SEQ ID NO: 184493 - DNA, 25 bp, Artificial
  probe
  misc_feature (1)..(25): SEQ ID NO: 5391; WAN024EVZ_at; Start 13; Stop 37
agcgacctgaccagtcacctcaata

SEQ ID NO: 184494 - DNA, 25 bp, Artificial
  probe
  misc_feature (1)..(25): SEQ ID NO: 4385; WAN024EW2_at; Start 176; Stop 200
ttagccacttcaagcgtatccgcca

SEQ ID NO: 184495 - DNA, 25 bp, Artificial
  probe
  misc_feature (1)..(25): SEQ ID NO: 4385; WAN024EW2_at; Start 169; Stop 193
tgttgcattagccacttcaagcgta

SEQ ID NO: 184496 - DNA, 25 bp, Artificial
  probe
  misc_feature (1)..(25): SEQ ID NO: 4385; WAN024EW2_at; Start 141; Stop 165
tagcaatacgtccacgaagggcacc

SEQ ID NO: 184497 - DNA, 25 bp, Artificial
  probe
  misc_feature (1)..(25): SEQ ID NO: 4385; WAN024EW2_at; Start 86; Stop 110
cagtcaaccacccaaaggaagttga

SEQ ID NO: 184498 - DNA, 25 bp, Artificial
  probe
  misc_feature (1)..(25): SEQ ID NO: 4385; WAN024EW2_at; Start 37; Stop 61
gtgggcgctcatgtagcggccttct

SEQ ID NO: 184499 - DNA, 25 bp, Artificial
  probe
  misc_feature (1)..(25): SEQ ID NO: 4385; WAN024EW2_at; Start 192; Stop 216
tatccgccacaaagagaaccaagtc

SEQ ID NO: 184500 - DNA, 25 bp, Artificial
  probe
  misc_feature (1)..(25): SEQ ID NO: 4385; WAN024EW2_at; Start 2; Stop 26
tgagcagtctcttcctgtggaagtg

SEQ ID NO: 184501 - DNA, 25 bp, Artificial
  probe
  misc_feature (1)..(25): SEQ ID NO: 4385; WAN024EW2_at; Start 286; Stop 310
gtttaattctccatcaaccaccttg

SEQ ID NO: 184502 - DNA, 25 bp, Artificial
  probe
  misc_feature (1)..(25): SEQ ID NO: 4385; WAN024EW2_at; Start 109; Stop 133
gaacttatcattatcaatcaagcca

SEQ ID NO: 184503 - DNA, 25 bp, Artificial
  probe
  misc_feature (1)..(25): SEQ ID NO: 4385; WAN024EW2_at; Start 343; Stop 367
ggctacttccgtcatcttgtcgatg

SEQ ID NO: 184504 - DNA, 25 bp, Artificial
  probe
  misc_feature (1)..(25): SEQ ID NO: 4385; WAN024EW2_at; Start 116; Stop 140
tcattatcaatcaagccaagctctt

SEQ ID NO: 184505 - DNA, 25 bp, Artificial
  probe
  misc_feature (1)..(25): SEQ ID NO: 4385; WAN024EW2_at; Start 355; Stop 379
catcttgtcgatgtctttacgtgaa

SEQ ID NO: 184506 - DNA, 25 bp, Artificial
  probe
  misc_feature (1)..(25): SEQ ID NO: 4385; WAN024EW2_at; Start 244; Stop 268
caattcttcttggataccagtcaag

SEQ ID NO: 184507 - DNA, 25 bp, Artificial
  probe
  misc_feature (1)..(25): SEQ ID NO: 4385; WAN024EW2_at; Start 183; Stop 207
cttcaagcgtatccgccacaaagag

SEQ ID NO: 184508 - DNA, 25 bp, Artificial
  probe
  misc_feature (1)..(25): SEQ ID NO: 4385; WAN024EW2_at; Start 48; Stop 72
tgtagcggccttcttcttcagacca

SEQ ID NO: 184509 - DNA, 25 bp, Artificial
  probe
  misc_feature (1)..(25): SEQ ID NO: 4385; WAN024EW2_at; Start 94; Stop 118
cacccaaaggaagttgaacttatca

SEQ ID NO: 184510 - DNA, 25 bp, Artificial
  probe
  misc_feature (1)..(25): SEQ ID NO: 4385; WAN024EW2_at; Start 265; Stop 289
caagaacttggcaactggtccgttt

SEQ ID NO: 184511 - DNA, 25 bp, Artificial
  probe
  misc_feature (1)..(25): SEQ ID NO: 4385; WAN024EW2_at; Start 126; Stop 150
tcaagccaagctctttagcaatacg

SEQ ID NO: 184512 - DNA, 25 bp, Artificial
  probe
  misc_feature (1)..(25): SEQ ID NO: 4385; WAN024EW2_at; Start 62; Stop 86
tcttcagaccattcaaacatcggcc

SEQ ID NO: 184513 - DNA, 25 bp, Artificial
  probe
  misc_feature (1)..(25): SEQ ID NO: 4385; WAN024EW2_at; Start 274; Stop 298
ggcaactggtccgtttaattctcca

SEQ ID NO: 184514 - DNA, 25 bp, Artificial
  probe
  misc_feature (1)..(25): SEQ ID NO: 4385; WAN024EW2_at; Start 68; Stop 92
gaccattcaaacatcggccagtcaa

SEQ ID NO: 184515 - DNA, 25 bp, Artificial
  probe
  misc_feature (1)..(25): SEQ ID NO: 4385; WAN024EW2_at; Start 134; Stop 158
agctctttagcaatacgtccacgaa

SEQ ID NO: 184516 - DNA, 25 bp, Artificial
  probe
  misc_feature (1)..(25): SEQ ID NO: 4385; WAN024EW2_at; Start 305; Stop 329
accttgacccaagcaagacctttgg

SEQ ID NO: 184517 - DNA, 25 bp, Artificial
  probe
  misc_feature (1)..(25): SEQ ID NO: 4385; WAN024EW2_at; Start 262; Stop 286
agtcaagaacttggcaactggtccg

SEQ ID NO: 184518 - DNA, 25 bp, Artificial
  probe
  misc_feature (1)..(25): SEQ ID NO: 4385; WAN024EW2_at; Start 6; Stop 30
cagtctcttcctgtggaagtgtgaa

SEQ ID NO: 184519 - DNA, 25 bp, Artificial
  probe
  misc_feature (1)..(25): SEQ ID NO: 4385; WAN024EW2_at; Start 233; Stop 257
agcgctgttgtcaattcttcttgga

SEQ ID NO: 184520 - DNA, 25 bp, Artificial
  probe
  misc_feature (1)..(25): SEQ ID NO: 4385; WAN024EW2_at; Start 80; Stop 104
atcggccagtcaaccacccaaagga

SEQ ID NO: 184521 - DNA, 25 bp, Artificial
  probe
  misc_feature (1)..(25): SEQ ID NO: 4385; WAN024EW2_at; Start 157; Stop 181
aagggcacccagtgttgcattagcc

SEQ ID NO: 184522 - DNA, 25 bp, Artificial
  probe
  misc_feature (1)..(25): SEQ ID NO: 4385; WAN024EW2_at; Start 335; Stop 359
tactgtttggctacttccgtcatct

SEQ ID NO: 184523 - DNA, 25 bp, Artificial
  probe
  misc_feature (1)..(25): SEQ ID NO: 4385; WAN024EW2_at; Start 321; Stop 345
gacctttggcaccatactgtttggc

SEQ ID NO: 184524 - DNA, 25 bp, Artificial
  probe
  misc_feature (1)..(25): SEQ ID NO: 4385; WAN024EW2_at; Start 314; Stop 338
caagcaagacctttggcaccatact

SEQ ID NO: 184525 - DNA, 25 bp, Artificial
  probe
  misc_feature (1)..(25): SEQ ID NO: 4385; WAN024EW2_at; Start 151; Stop 175
tccacgaagggcacccagtgttgca

SEQ ID NO: 184526 - DNA, 25 bp, Artificial
  probe
  misc_feature (1)..(25): SEQ ID NO: 4385; WAN024EW2_at; Start 329; Stop 353
gcaccatactgtttggctacttccg

SEQ ID NO: 184527 - DNA, 25 bp, Artificial
  probe
  misc_feature (1)..(25): SEQ ID NO: 4385; WAN024EW2_at; Start 205; Stop 229
gagaaccaagtccttatcttcaaga

SEQ ID NO: 184528 - DNA, 25 bp, Artificial
  probe
  misc_feature (1)..(25): SEQ ID NO: 3562; WAN024EW3-3_at; Start 47; Stop 71
aagagcttggcttgattgataatga

SEQ ID NO: 184529 - DNA, 25 bp, Artificial
  probe
  misc_feature (1)..(25): SEQ ID NO: 3562; WAN024EW3-3_at; Start 83; Stop 107
tcctttgggtggttgactggccgat

SEQ ID NO: 184530 - DNA, 25 bp, Artificial
  probe
  misc_feature (1)..(25): SEQ ID NO: 3562; WAN024EW3-3_at; Start 236; Stop 260
tcttgaacggttatgagcttggtgg

SEQ ID NO: 184531 - DNA, 25 bp, Artificial
  probe
  misc_feature (1)..(25): SEQ ID NO: 3562; WAN024EW3-3_at; Start 368; Stop 392
tggactatggtttcccaccacacgg

SEQ ID NO: 184532 - DNA, 25 bp, Artificial
  probe
  misc_feature (1)..(25): SEQ ID NO: 3562; WAN024EW3-3_at; Start 354; Stop 378
ccttcttgaagccatggactatggt

SEQ ID NO: 184533 - DNA, 25 bp, Artificial
  probe
  misc_feature (1)..(25): SEQ ID NO: 3562; WAN024EW3-3_at; Start 471; Stop 495
taagaacaacaaggcaactgaccca

SEQ ID NO: 184534 - DNA, 25 bp, Artificial
  probe
  misc_feature (1)..(25): SEQ ID NO: 3562; WAN024EW3-3_at; Start 205; Stop 229
gctaaggttcgtgccattgcttacg

SEQ ID NO: 184535 - DNA, 25 bp, Artificial
  probe
  misc_feature (1)..(25): SEQ ID NO: 3562; WAN024EW3-3_at; Start 33; Stop 57
tggacgtattgctaaagagcttggc

SEQ ID NO: 184536 - DNA, 25 bp, Artificial
  probe
  misc_feature (1)..(25): SEQ ID NO: 3562; WAN024EW3-3_at; Start 98; Stop 122
actggccgatgtttgaatggtctga

SEQ ID NO: 184537 - DNA, 25 bp, Artificial
  probe
  misc_feature (1)..(25): SEQ ID NO: 3562; WAN024EW3-3_at; Start 400; Stop 424
gctatcgggcttgaccgttttgtca

SEQ ID NO: 184538 - DNA, 25 bp, Artificial
  probe
  misc_feature (1)..(25): SEQ ID NO: 3562; WAN024EW3-3_at; Start 442; Stop 466
gaaaatatccgtgaagtcattgcct

SEQ ID NO: 184539 - DNA, 25 bp, Artificial
  probe
  misc_feature (1)..(25): SEQ ID NO: 3562; WAN024EW3-3_at; Start 429; Stop 453
gcttgctggagaagaaaatatccgt

SEQ ID NO: 184540 - DNA, 25 bp, Artificial
  probe
  misc_feature (1)..(25): SEQ ID NO: 3562; WAN024EW3-3_at; Start 386; Stop 410
cacacggtggtttggctatcgggct

SEQ ID NO: 184541 - DNA, 25 bp, Artificial
  probe
  misc_feature (1)..(25): SEQ ID NO: 3562; WAN024EW3-3_at; Start 300; Stop 324
catgttcaaggctcttggtttctca

SEQ ID NO: 184542 - DNA, 25 bp, Artificial
  probe
  misc_feature (1)..(25): SEQ ID NO: 3562; WAN024EW3-3_at; Start 161; Stop 185
cacttccacaggaagagactgctca

SEQ ID NO: 184543 - DNA, 25 bp, Artificial
  probe
  misc_feature (1)..(25): SEQ ID NO: 3562; WAN024EW3-3_at; Start 191; Stop 215
tagaaggtgatttggctaaggttcg

SEQ ID NO: 184544 - DNA, 25 bp, Artificial
  probe
  misc_feature (1)..(25): SEQ ID NO: 3562; WAN024EW3-3_at; Start 112; Stop 136
gaatggtctgaagaagaaggccgct

SEQ ID NO: 184545 - DNA, 25 bp, Artificial
  probe
  misc_feature (1)..(25): SEQ ID NO: 3562; WAN024EW3-3_at; Start 483; Stop 507
ggcaactgacccaatgacacaagct

SEQ ID NO: 184546 - DNA, 25 bp, Artificial
  probe
  misc_feature (1)..(25): SEQ ID NO: 3562; WAN024EW3-3_at; Start 498; Stop 522
gacacaagctccatcaacagtcgct

SEQ ID NO: 184547 - DNA, 25 bp, Artificial
  probe
  misc_feature (1)..(25): SEQ ID NO: 3562; WAN024EW3-3_at; Start 222; Stop 246
tgcttacgatatcgtcttgaacggt

SEQ ID NO: 184548 - DNA, 25 bp, Artificial
  probe
  misc_feature (1)..(25): SEQ ID NO: 3562; WAN024EW3-3_at; Start 17; Stop 41
cactgggtgcccttcgtggacgtat

SEQ ID NO: 184549 - DNA, 25 bp, Artificial
  probe
  misc_feature (1)..(25): SEQ ID NO: 3562; WAN024EW3-3_at; Start 414; Stop 438
ccgttttgtcatgttgcttgctgga

SEQ ID NO: 184550 - DNA, 25 bp, Artificial
  probe
  misc_feature (1)..(25): SEQ ID NO: 3562; WAN024EW3-3_at; Start 247; Stop 271
tatgagcttggtggtggtagccttc

SEQ ID NO: 184551 - DNA, 25 bp, Artificial
  probe
  misc_feature (1)..(25): SEQ ID NO: 3562; WAN024EW3-3_at; Start 271; Stop 295
cgtatcaaccaaaaagaccttcaag

SEQ ID NO: 184552 - DNA, 25 bp, Artificial
  probe
  misc_feature (1)..(25): SEQ ID NO: 3562; WAN024EW3-3_at; Start 533; Stop 557
tagaggaactcagcttacaagtaga

SEQ ID NO: 184553 - DNA, 25 bp, Artificial
  probe
  misc_feature (1)..(25): SEQ ID NO: 3562; WAN024EW3-3_at; Start 286; Stop 310
gaccttcaagaacgcatgttcaagg

SEQ ID NO: 184554 - DNA, 25 bp, Artificial
  probe
  misc_feature (1)..(25): SEQ ID NO: 3562; WAN024EW3-3_at; Start 259; Stop 283
ggtggtagccttcgtatcaaccaaa

SEQ ID NO: 184555 - DNA, 25 bp, Artificial
  probe
  misc_feature (1)..(25): SEQ ID NO: 3562; WAN024EW3-3_at; Start 454; Stop 478
gaagtcattgcctttcctaagaaca

SEQ ID NO: 184556 - DNA, 25 bp, Artificial
  probe
  misc_feature (1)..(25): SEQ ID NO: 3562; WAN024EW3-3_at; Start 69; Stop 93
tgataagttcaacttcctttgggtg

SEQ ID NO: 184557 - DNA, 25 bp, Artificial
  probe
  misc_feature (1)..(25): SEQ ID NO: 3562; WAN024EW3-3_at; Start 337; Stop 361
aatgaccagtttggtttccttcttg

SEQ ID NO: 184558 - DNA, 25 bp, Artificial
  probe
  misc_feature (1)..(25): SEQ ID NO: 3562; WAN024EW3-3_at; Start 545; Stop 569
gcttacaagtagaagaagatgaaac

SEQ ID NO: 184559 - DNA, 25 bp, Artificial
  probe
  misc_feature (1)..(25): SEQ ID NO: 3562; WAN024EW3-3_at; Start 3; Stop 27
agtggctaatgcaacactgggtgcc

SEQ ID NO: 184560 - DNA, 25 bp, Artificial
  probe
  misc_feature (1)..(25): SEQ ID NO: 3562; WAN024EW3-3_at; Start 124; Stop 148
gaagaaggccgctacatgagcgccc

SEQ ID NO: 184561 - DNA, 25 bp, Artificial
  probe
  misc_feature (1)..(25): SEQ ID NO: 3562; WAN024EW3-3_at; Start 515; Stop 539
cagtcgctctcaaacaactagagga

SEQ ID NO: 184562 - DNA, 25 bp, Artificial
  probe
  misc_feature (1)..(25): SEQ ID NO: 848; WAN024EW3-5_at; Start 360; Stop 384
tgacgatacacgtttgcgttaccgt

SEQ ID NO: 184563 - DNA, 25 bp, Artificial
  probe
  misc_feature (1)..(25): SEQ ID NO: 848; WAN024EW3-5_at; Start 252; Stop 276
caatgataagttgccaactggtgcg

SEQ ID NO: 184564 - DNA, 25 bp, Artificial
  probe
  misc_feature (1)..(25): SEQ ID NO: 848; WAN024EW3-5_at; Start 295; Stop 319
gctcttattgtgcttaacacagcta

SEQ ID NO: 184565 - DNA, 25 bp, Artificial
  probe
  misc_feature (1)..(25): SEQ ID NO: 848; WAN024EW3-5_at; Start 486; Stop 510
cgtggagacaccattcctttctaag

SEQ ID NO: 184566 - DNA, 25 bp, Artificial
  probe
  misc_feature (1)..(25): SEQ ID NO: 848; WAN024EW3-5_at; Start 437; Stop 461
aggtgacccactctatccgcaacta

SEQ ID NO: 184567 - DNA, 25 bp, Artificial
  probe
  misc_feature (1)..(25): SEQ ID NO: 848; WAN024EW3-5_at; Start 539; Stop 563
tagtgccgtctcgtgttaataaggg

SEQ ID NO: 184568 - DNA, 25 bp, Artificial
  probe
  misc_feature (1)..(25): SEQ ID NO: 848; WAN024EW3-5_at; Start 265; Stop 289
ccaactggtgcggttgagttaaacg

SEQ ID NO: 184569 - DNA, 25 bp, Artificial
  probe
  misc_feature (1)..(25): SEQ ID NO: 848; WAN024EW3-5_at; Start 347; Stop 371
gcattgaggcaaatgacgatacacg

SEQ ID NO: 184570 - DNA, 25 bp, Artificial
  probe
  misc_feature (1)..(25): SEQ ID NO: 848; WAN024EW3-5_at; Start 31; Stop 55
cgtgaggaacacatcggacaagaaa

SEQ ID NO: 184571 - DNA, 25 bp, Artificial
  probe
  misc_feature (1)..(25): SEQ ID NO: 848; WAN024EW3-5_at; Start 49; Stop 73
caagaaataaccttgaaaggatggg

SEQ ID NO: 184572 - DNA, 25 bp, Artificial
  probe
  misc_feature (1)..(25): SEQ ID NO: 848; WAN024EW3-5_at; Start 190; Stop 214
gaaagccttcgtagcgaatttgtta

SEQ ID NO: 184573 - DNA, 25 bp, Artificial
  probe
  misc_feature (1)..(25): SEQ ID NO: 848; WAN024EW3-5_at; Start 88; Stop 112
gaccttggtggtttgatctttatcg

SEQ ID NO: 184574 - DNA, 25 bp, Artificial
  probe
  misc_feature (1)..(25): SEQ ID NO: 848; WAN024EW3-5_at; Start 391; Stop 415
gaccttcgtcgtccagaaatgttgg

SEQ ID NO: 184575 - DNA, 25 bp, Artificial
  probe
  misc_feature (1)..(25): SEQ ID NO: 848; WAN024EW3-5_at; Start 131; Stop 155
gaatcatgcagttggttatcaaccc

SEQ ID NO: 184576 - DNA, 25 bp, Artificial
  probe
  misc_feature (1)..(25): SEQ ID NO: 848; WAN024EW3-5_at; Start 16; Stop 40
tatgctggtcgtgttcgtgaggaac

SEQ ID NO: 184577 - DNA, 25 bp, Artificial
  probe
  misc_feature (1)..(25): SEQ ID NO: 848; WAN024EW3-5_at; Start 332; Stop 356
ttgagattaaggatggcattgaggc

SEQ ID NO: 184578 - DNA, 25 bp, Artificial
  probe
  misc_feature (1)..(25): SEQ ID NO: 848; WAN024EW3-5_at; Start 104; Stop 128
tctttatcgatcttcgtgaccgtga

SEQ ID NO: 184579 - DNA, 25 bp, Artificial
  probe
  misc_feature (1)..(25): SEQ ID NO: 848; WAN024EW3-5_at; Start 69; Stop 93
atgggttggccgtcgtcgtgacctt

SEQ ID NO: 184580 - DNA, 25 bp, Artificial
  probe
  misc_feature (1)..(25): SEQ ID NO: 848; WAN024EW3-5_at; Start 410; Stop 434
tgttggaaaatcttaaacttcgtgc

SEQ ID NO: 184581 - DNA, 25 bp, Artificial
  probe
  misc_feature (1)..(25): SEQ ID NO: 848; WAN024EW3-5_at; Start 501; Stop 525
cctttctaagtcaacgcctgaaggg

SEQ ID NO: 184582 - DNA, 25 bp, Artificial
  probe
  misc_feature (1)..(25): SEQ ID NO: 848; WAN024EW3-5_at; Start 237; Stop 261
tgcgcgtgagcaagccaatgataag

SEQ ID NO: 184583 - DNA, 25 bp, Artificial
  probe
  misc_feature (1)..(25): SEQ ID NO: 848; WAN024EW3-5_at; Start 450; Stop 474
tatccgcaactacttggatgagttg

SEQ ID NO: 184584 - DNA, 25 bp, Artificial
  probe
  misc_feature (1)..(25): SEQ ID NO: 848; WAN024EW3-5_at; Start 280; Stop 304
gagttaaacgtgacagctcttattg

SEQ ID NO: 184585 - DNA, 25 bp, Artificial
  probe
  misc_feature (1)..(25): SEQ ID NO: 848; WAN024EW3-5_at; Start 423; Stop 447
taaacttcgtgccaaggtgacccac

SEQ ID NO: 184586 - DNA, 25 bp, Artificial
  probe
  misc_feature (1)..(25): SEQ ID NO: 848; WAN024EW3-5_at; Start 176; Stop 200
ttatggcaacagctgaaagccttcg

SEQ ID NO: 184587 - DNA, 25 bp, Artificial
  probe
  misc_feature (1)..(25): SEQ ID NO: 848; WAN024EW3-5_at; Start 164; Stop 188
tatctgcagaggttatggcaacagc

SEQ ID NO: 184588 - DNA, 25 bp, Artificial
  probe
  misc_feature (1)..(25): SEQ ID NO: 848; WAN024EW3-5_at; Start 213; Stop 237
tattgaggtgactggtcaggtcgct

SEQ ID NO: 184589 - DNA, 25 bp, Artificial
  probe
  misc_feature (1)..(25): SEQ ID NO: 848; WAN024EW3-5_at; Start 312; Stop 336
cacagctaagacaacaccatttgag

SEQ ID NO: 184590 - DNA, 25 bp, Artificial
  probe
  misc_feature (1)..(25): SEQ ID NO: 848; WAN024EW3-5_at; Start 2; Stop 26
tgaaacgtagtatgtatgctggtcg

SEQ ID NO: 184591 - DNA, 25 bp, Artificial
  probe
  misc_feature (1)..(25): SEQ ID NO: 848; WAN024EW3-5_at; Start 117; Stop 141
tcgtgaccgtgaaggaatcatgcag

SEQ ID NO: 184592 - DNA, 25 bp, Artificial
  probe
  misc_feature (1)..(25): SEQ ID NO: 848; WAN024EW3-5_at; Start 563; Stop 587
ggcatttttacgctcttcctcaaag

SEQ ID NO: 184593 - DNA, 25 bp, Artificial
  probe
  misc_feature (1)..(25): SEQ ID NO: 848; WAN024EW3-5_at; Start 473; Stop 497
tggagtttatcgacgtggagacacc

SEQ ID NO: 184594 - DNA, 25 bp, Artificial
  probe
  misc_feature (1)..(25): SEQ ID NO: 848; WAN024EW3-5_at; Start 147; Stop 171
tatcaaccctgaaaaagtatctgca

SEQ ID NO: 184595 - DNA, 25 bp, Artificial
  probe
  misc_feature (1)..(25): SEQ ID NO: 848; WAN024EW3-5_at; Start 526; Stop 550
gcgcgtgattatttagtgccgtctc

SEQ ID NO: 184596 - DNA, 25 bp, Artificial
  probe
  misc_feature (1)..(25): SEQ ID NO: 3203; WAN024EW3-M_at; Start 223; Stop 247
tccctcgtatgaaatacgatgatgc

SEQ ID NO: 184597 - DNA, 25 bp, Artificial
  probe
  misc_feature (1)..(25): SEQ ID NO: 3203; WAN024EW3-M_at; Start 63; Stop 87
tgtttccgtgacgaggacttgcgtg

SEQ ID NO: 184598 - DNA, 25 bp, Artificial
  probe
  misc_feature (1)..(25): SEQ ID NO: 3203; WAN024EW3-M_at; Start 273; Stop 297
ccagatactcgttttgacatgttgc

SEQ ID NO: 184599 - DNA, 25 bp, Artificial
  probe
  misc_feature (1)..(25): SEQ ID NO: 3203; WAN024EW3-M_at; Start 438; Stop 462
cagtatggtgccaaaggtcttgctt

SEQ ID NO: 184600 - DNA, 25 bp, Artificial
  probe
  misc_feature (1)..(25): SEQ ID NO: 3203; WAN024EW3-M_at; Start 176; Stop 200
cgcgcgcgtgatgaaggaaacaaaa

SEQ ID NO: 184601 - DNA, 25 bp, Artificial
  probe
  misc_feature (1)..(25): SEQ ID NO: 3203; WAN024EW3-M_at; Start 565; Stop 589
tggttctctttgtggcggatacgct

SEQ ID NO: 184602 - DNA, 25 bp, Artificial
  probe
  misc_feature (1)..(25): SEQ ID NO: 3203; WAN024EW3-M_at; Start 412; Stop 436
tcgacaagatgacggaagtagccaa

SEQ ID NO: 184603 - DNA, 25 bp, Artificial
  probe
  misc_feature (1)..(25): SEQ ID NO: 3203; WAN024EW3-M_at; Start 51; Stop 75
caaatcgttaaatgtttccgtgacg

SEQ ID NO: 184604 - DNA, 25 bp, Artificial
  probe
  misc_feature (1)..(25): SEQ ID NO: 3203; WAN024EW3-M_at; Start 86; Stop 110
tggagaccgccagcctgaatttact

SEQ ID NO: 184605 - DNA, 25 bp, Artificial
  probe
  misc_feature (1)..(25): SEQ ID NO: 3203; WAN024EW3-M_at; Start 426; Stop 450
gaagtagccaaacagtatggtgcca

SEQ ID NO: 184606 - DNA, 25 bp, Artificial
  probe
  misc_feature (1)..(25): SEQ ID NO: 3203; WAN024EW3-M_at; Start 123; Stop 147
gaaacgtccttccttactgagcaag

SEQ ID NO: 184607 - DNA, 25 bp, Artificial
  probe
  misc_feature (1)..(25): SEQ ID NO: 3203; WAN024EW3-M_at; Start 73; Stop 97
acgaggacttgcgtggagaccgcca

SEQ ID NO: 184608 - DNA, 25 bp, Artificial
  probe
  misc_feature (1)..(25): SEQ ID NO: 3203; WAN024EW3-M_at; Start 501; Stop 525
gccaagttcttgactggtatccaag

SEQ ID NO: 184609 - DNA, 25 bp, Artificial
  probe
  misc_feature (1)..(25): SEQ ID NO: 3203; WAN024EW3-M_at; Start 137; Stop 161
tactgagcaagaaatccaagatatt

SEQ ID NO: 184610 - DNA, 25 bp, Artificial
  probe
  misc_feature (1)..(25): SEQ ID NO: 3203; WAN024EW3-M_at; Start 396; Stop 420
tattcacgtaaagacatcgacaaga

SEQ ID NO: 184611 - DNA, 25 bp, Artificial
  probe
  misc_feature (1)..(25): SEQ ID NO: 3203; WAN024EW3-M_at; Start 296; Stop 320
gcttcaggacttgacagaagtggtc

SEQ ID NO: 184612 - DNA, 25 bp, Artificial
  probe
  misc_feature (1)..(25): SEQ ID NO: 3203; WAN024EW3-M_at; Start 489; Stop 513
aacggaccagttgccaagttcttga

SEQ ID NO: 184613 - DNA, 25 bp, Artificial
  probe
  misc_feature (1)..(25): SEQ ID NO: 3203; WAN024EW3-M_at; Start 548; Stop 572
tcttgaagataaggacttggttctc

SEQ ID NO: 184614 - DNA, 25 bp, Artificial
  probe
  misc_feature (1)..(25): SEQ ID NO: 3203; WAN024EW3-M_at; Start 330; Stop 354
gactttaaagtcttttcagaagcac

SEQ ID NO: 184615 - DNA, 25 bp, Artificial
  probe
  misc_feature (1)..(25): SEQ ID NO: 3203; WAN024EW3-M_at; Start 479; Stop 503
tggagaattaaacggaccagttgcc

SEQ ID NO: 184616 - DNA, 25 bp, Artificial
  probe
  misc_feature (1)..(25): SEQ ID NO: 3203; WAN024EW3-M_at; Start 29; Stop 53
tgctggttttgaccgttactaccaa

SEQ ID NO: 184617 - DNA, 25 bp, Artificial
  probe
  misc_feature (1)..(25): SEQ ID NO: 3203; WAN024EW3-M_at; Start 381; Stop 405
ggagctgcggacaactattcacgta

SEQ ID NO: 184618 - DNA, 25 bp, Artificial
  probe
  misc_feature (1)..(25): SEQ ID NO: 3203; WAN024EW3-M_at; Start 107; Stop 131
tactcaggtcgacttggaaacgtcc

SEQ ID NO: 184619 - DNA, 25 bp, Artificial
  probe
  misc_feature (1)..(25): SEQ ID NO: 3203; WAN024EW3-M_at; Start 19; Stop 43
tcttgatgaatgctggttttgaccg

SEQ ID NO: 184620 - DNA, 25 bp, Artificial
  probe
  misc_feature (1)..(25): SEQ ID NO: 3203; WAN024EW3-M_at; Start 7; Stop 31
tcacgaaacagctcttgatgaatgc

SEQ ID NO: 184621 - DNA, 25 bp, Artificial
  probe
  misc_feature (1)..(25): SEQ ID NO: 3203; WAN024EW3-M_at; Start 467; Stop 491
caaggtggttgatggagaattaaac

SEQ ID NO: 184622 - DNA, 25 bp, Artificial
  probe
  misc_feature (1)..(25): SEQ ID NO: 3203; WAN024EW3-M_at; Start 449; Stop 473
caaaggtcttgcttgggtcaaggtg

SEQ ID NO: 184623 - DNA, 25 bp, Artificial
  probe
  misc_feature (1)..(25): SEQ ID NO: 3203; WAN024EW3-M_at; Start 172; Stop 196
tgatcgcgcgcgtgatgaaggaaac

SEQ ID NO: 184624 - DNA, 25 bp, Artificial
  probe
  misc_feature (1)..(25): SEQ ID NO: 3203; WAN024EW3-M_at; Start 288; Stop 312
gacatgttgcttcaggacttgacag

SEQ ID NO: 184625 - DNA, 25 bp, Artificial
  probe
  misc_feature (1)..(25): SEQ ID NO: 3203; WAN024EW3-M_at; Start 267; Stop 291
gacaagccagatactcgttttgaca

SEQ ID NO: 184626 - DNA, 25 bp, Artificial
  probe
  misc_feature (1)..(25): SEQ ID NO: 3203; WAN024EW3-M_at; Start 94; Stop 118
gccagcctgaatttactcaggtcga

SEQ ID NO: 184627 - DNA, 25 bp, Artificial
  probe
  misc_feature (1)..(25): SEQ ID NO: 3203; WAN024EW3-M_at; Start 518; Stop 542
tatccaagaagaattgacaacagcg

SEQ ID NO: 184628 - DNA, 25 bp, Artificial
  probe
  misc_feature (1)..(25): SEQ ID NO: 3203; WAN024EW3-M_at; Start 252; Stop 276
gctctttacggttctgacaagccag

SEQ ID NO: 184629 - DNA, 25 bp, Artificial
  probe
  misc_feature (1)..(25): SEQ ID NO: 3203; WAN024EW3-M_at; Start 237; Stop 261
tacgatgatgctatggctctttacg

SEQ ID NO: 184630 - DNA, 25 bp, Artificial
  probe
  misc_feature (1)..(25): SEQ ID NO: 4939; WAN024EW4_at; Start 181; Stop 205
cgacggattcggcatattatccaga

SEQ ID NO: 184631 - DNA, 25 bp, Artificial
  probe
  misc_feature (1)..(25): SEQ ID NO: 4939; WAN024EW4_at; Start 33; Stop 57
agattttaaggcgattttcaaggag

SEQ ID NO: 184632 - DNA, 25 bp, Artificial
  probe
  misc_feature (1)..(25): SEQ ID NO: 4939; WAN024EW4_at; Start 277; Stop 301
tacgcagagatggagaaaaatctac

SEQ ID NO: 184633 - DNA, 25 bp, Artificial
  probe
  misc_feature (1)..(25): SEQ ID NO: 4939; WAN024EW4_at; Start 177; Stop 201
taagcgacggattcggcatattatc

SEQ ID NO: 184634 - DNA, 25 bp, Artificial
  probe
  misc_feature (1)..(25): SEQ ID NO: 4939; WAN024EW4_at; Start 198; Stop 222
tatccagaatgcaaaagggagtctg

SEQ ID NO: 184635 - DNA, 25 bp, Artificial
  probe
  misc_feature (1)..(25): SEQ ID NO: 4939; WAN024EW4_at; Start 117; Stop 141
ttttcgagtaggtctatcagttagc

SEQ ID NO: 184636 - DNA, 25 bp, Artificial
  probe
  misc_feature (1)..(25): SEQ ID NO: 4939; WAN024EW4_at; Start 246; Stop 270
cattgctcgaaaaggagtcgaaacc

SEQ ID NO: 184637 - DNA, 25 bp, Artificial
  probe
  misc_feature (1)..(25): SEQ ID NO: 4939; WAN024EW4_at; Start 289; Stop 313
gagaaaaatctactccatgtattaa

SEQ ID NO: 184638 - DNA, 25 bp, Artificial
  probe
  misc_feature (1)..(25): SEQ ID NO: 4939; WAN024EW4_at; Start 240; Stop 264
tgttgtcattgctcgaaaaggagtc

SEQ ID NO: 184639 - DNA, 25 bp, Artificial
  probe
  misc_feature (1)..(25): SEQ ID NO: 4939; WAN024EW4_at; Start 234; Stop 258
cgactttgttgtcattgctcgaaaa

SEQ ID NO: 184640 - DNA, 25 bp, Artificial
  probe
  misc_feature (1)..(25): SEQ ID NO: 4939; WAN024EW4_at; Start 209; Stop 233
caaaagggagtctggtagaagatgt

SEQ ID NO: 184641 - DNA, 25 bp, Artificial
  probe
  misc_feature (1)..(25): SEQ ID NO: 4939; WAN024EW4_at; Start 121; Stop 145
cgagtaggtctatcagttagcaaaa

SEQ ID NO: 184642 - DNA, 25 bp, Artificial
  probe
  misc_feature (1)..(25): SEQ ID NO: 4939; WAN024EW4_at; Start 222; Stop 246
ggtagaagatgtcgactttgttgtc

SEQ ID NO: 184643 - DNA, 25 bp, Artificial
  probe
  misc_feature (1)..(25): SEQ ID NO: 4939; WAN024EW4_at; Start 162; Stop 186
cactagaaatcaaattaagcgacgg

SEQ ID NO: 184644 - DNA, 25 bp, Artificial
  probe
  misc_feature (1)..(25): SEQ ID NO: 4939; WAN024EW4_at; Start 128; Stop 152
gtctatcagttagcaaaaaactggg

SEQ ID NO: 184645 - DNA, 25 bp, Artificial
  probe
  misc_feature (1)..(25): SEQ ID NO: 4939; WAN024EW4_at; Start 58; Stop 82
gggacaagttttgctaatcgcaaat

SEQ ID NO: 184646 - DNA, 25 bp, Artificial
  probe
  misc_feature (1)..(25): SEQ ID NO: 4939; WAN024EW4_at; Start 215; Stop 239
ggagtctggtagaagatgtcgactt

SEQ ID NO: 184647 - DNA, 25 bp, Artificial
  probe
  misc_feature (1)..(25): SEQ ID NO: 4939; WAN024EW4_at; Start 171; Stop 195
tcaaattaagcgacggattcggcat

SEQ ID NO: 184648 - DNA, 25 bp, Artificial
  probe
  misc_feature (1)..(25): SEQ ID NO: 4939; WAN024EW4_at; Start 195; Stop 219
tattatccagaatgcaaaagggagt

SEQ ID NO: 184649 - DNA, 25 bp, Artificial
  probe
  misc_feature (1)..(25): SEQ ID NO: 4939; WAN024EW4_at; Start 301; Stop 325
ctccatgtattaaaattatcaaaga

SEQ ID NO: 184650 - DNA, 25 bp, Artificial
  probe
  misc_feature (1)..(25): SEQ ID NO: 4939; WAN024EW4_at; Start 23; Stop 47
aaagagagaaagattttaaggcgat

SEQ ID NO: 184651 - DNA, 25 bp, Artificial
  probe
  misc_feature (1)..(25): SEQ ID NO: 4939; WAN024EW4_at; Start 151; Stop 175
gggaatgccgtcactagaaatcaaa

SEQ ID NO: 184652 - DNA, 25 bp, Artificial
  probe
  misc_feature (1)..(25): SEQ ID NO: 4939; WAN024EW4_at; Start 84; Stop 108
tgtggtctaccaattagaaaaccag

SEQ ID NO: 184653 - DNA, 25 bp, Artificial
  probe
  misc_feature (1)..(25): SEQ ID NO: 4939; WAN024EW4_at; Start 156; Stop 180
tgccgtcactagaaatcaaattaag

SEQ ID NO: 184654 - DNA, 25 bp, Artificial
  probe
  misc_feature (1)..(25): SEQ ID NO: 4939; WAN024EW4_at; Start 249; Stop 273
tgctcgaaaaggagtcgaaaccttg

SEQ ID NO: 184655 - DNA, 25 bp, Artificial
  probe
  misc_feature (1)..(25): SEQ ID NO: 4939; WAN024EW4_at; Start 204; Stop 228
gaatgcaaaagggagtctggtagaa

SEQ ID NO: 184656 - DNA, 25 bp, Artificial
  probe
  misc_feature (1)..(25): SEQ ID NO: 4939; WAN024EW4_at; Start 270; Stop 294
cttgggatacgcagagatggagaaa

SEQ ID NO: 184657 - DNA, 25 bp, Artificial
  probe
  misc_feature (1)..(25): SEQ ID NO: 4939; WAN024EW4_at; Start 12; Stop 36
ctttcgtgtaaaaagagagaaagat

SEQ ID NO: 184658 - DNA, 25 bp, Artificial
  probe
  misc_feature (1)..(25): SEQ ID NO: 4939; WAN024EW4_at; Start 281; Stop 305
cagagatggagaaaaatctactcca

SEQ ID NO: 184659 - DNA, 25 bp, Artificial
  probe
  misc_feature (1)..(25): SEQ ID NO: 4939; WAN024EW4_at; Start 263; Stop 287
tcgaaaccttgggatacgcagagat

SEQ ID NO: 184660 - DNA, 25 bp, Artificial
  probe
  misc_feature (1)..(25): SEQ ID NO: 4939; WAN024EW4_at; Start 138; Stop 162
tagcaaaaaactggggaatgccgtc

SEQ ID NO: 184661 - DNA, 25 bp, Artificial
  probe
  misc_feature (1)..(25): SEQ ID NO: 4939; WAN024EW4_at; Start 72; Stop 96
taatcgcaaatttgtggtctaccaa

SEQ ID NO: 184662 - DNA, 25 bp, Artificial
  probe
  misc_feature (1)..(25): SEQ ID NO: 4939; WAN024EW4_at; Start 260; Stop 284
gagtcgaaaccttgggatacgcaga

SEQ ID NO: 184663 - DNA, 25 bp, Artificial
  probe
  misc_feature (1)..(25): SEQ ID NO: 4939; WAN024EW4_at; Start 266; Stop 290
aaaccttgggatacgcagagatgga

SEQ ID NO: 184664 - DNA, 25 bp, Artificial
  probe
  misc_feature (1)..(25): SEQ ID NO: 2556; WAN024EW5_at; Start 650; Stop 674
tttatgcgccaggtggagtcgccct

SEQ ID NO: 184665 - DNA, 25 bp, Artificial
  probe
  misc_feature (1)..(25): SEQ ID NO: 2556; WAN024EW5_at; Start 187; Stop 211
gggattattctctttacggtcttga

SEQ ID NO: 184666 - DNA, 25 bp, Artificial
  probe
  misc_feature (1)..(25): SEQ ID NO: 2556; WAN024EW5_at; Start 209; Stop 233
tgattcgtacagtcctcttgccagt

SEQ ID NO: 184667 - DNA, 25 bp, Artificial
  probe
  misc_feature (1)..(25): SEQ ID NO: 2556; WAN024EW5_at; Start 400; Stop 424
tggccgattttgattcagatgccgg

SEQ ID NO: 184668 - DNA, 25 bp, Artificial
  probe
  misc_feature (1)..(25): SEQ ID NO: 2556; WAN024EW5_at; Start 36; Stop 60
gctaggactgtctctgttaatcatg

SEQ ID NO: 184669 - DNA, 25 bp, Artificial
  probe
  misc_feature (1)..(25): SEQ ID NO: 2556; WAN024EW5_at; Start 365; Stop 389
ttaaagaaatgggtgtcagacagtc

SEQ ID NO: 184670 - DNA, 25 bp, Artificial
  probe
  misc_feature (1)..(25): SEQ ID NO: 2556; WAN024EW5_at; Start 437; Stop 461
tgttccaagccctatcaagagttga

SEQ ID NO: 184671 - DNA, 25 bp, Artificial
  probe
  misc_feature (1)..(25): SEQ ID NO: 2556; WAN024EW5_at; Start 287; Stop 311
ttaaggcgcttcgagaacaatatcc

SEQ ID NO: 184672 - DNA, 25 bp, Artificial
  probe
  misc_feature (1)..(25): SEQ ID NO: 2556; WAN024EW5_at; Start 256; Stop 280
tctaggaaaatgcaggaagctcagc

SEQ ID NO: 184673 - DNA, 25 bp, Artificial
  probe
  misc_feature (1)..(25): SEQ ID NO: 2556; WAN024EW5_at; Start 588; Stop 612
gcgaaatggcgctacgactgcgatg

SEQ ID NO: 184674 - DNA, 25 bp, Artificial
  probe
  misc_feature (1)..(25): SEQ ID NO: 2556; WAN024EW5_at; Start 452; Stop 476
caagagttgactttttaaagacagg

SEQ ID NO: 184675 - DNA, 25 bp, Artificial
  probe
  misc_feature (1)..(25): SEQ ID NO: 2556; WAN024EW5_at; Start 336; Stop 360
caaactagagcaggaaatgcgtaaa

SEQ ID NO: 184676 - DNA, 25 bp, Artificial
  probe
  misc_feature (1)..(25): SEQ ID NO: 2556; WAN024EW5_at; Start 742; Stop 766
atcgcagagcgcgaggccgtagtac

SEQ ID NO: 184677 - DNA, 25 bp, Artificial
  probe
  misc_feature (1)..(25): SEQ ID NO: 2556; WAN024EW5_at; Start 535; Stop 559
gcagcagtattcacctttttaagta

SEQ ID NO: 184678 - DNA, 25 bp, Artificial
  probe
  misc_feature (1)..(25): SEQ ID NO: 2556; WAN024EW5_at; Start 19; Stop 43
ctaaagttgactagtttgctaggac

SEQ ID NO: 184679 - DNA, 25 bp, Artificial
  probe
  misc_feature (1)..(25): SEQ ID NO: 2556; WAN024EW5_at; Start 233; Stop 257
tctttcaggtgcaaatggtggcttc

SEQ ID NO: 184680 - DNA, 25 bp, Artificial
  probe
  misc_feature (1)..(25): SEQ ID NO: 2556; WAN024EW5_at; Start 81; Stop 105
ggtaactagcgatattacagccgaa

SEQ ID NO: 184681 - DNA, 25 bp, Artificial
  probe
  misc_feature (1)..(25): SEQ ID NO: 2556; WAN024EW5_at; Start 383; Stop 407
gacagtcagactctctttggccgat

SEQ ID NO: 184682 - DNA, 25 bp, Artificial
  probe
  misc_feature (1)..(25): SEQ ID NO: 2556; WAN024EW5_at; Start 309; Stop 333
tccaggtcgagatatggaaagcaga

SEQ ID NO: 184683 - DNA, 25 bp, Artificial
  probe
  misc_feature (1)..(25): SEQ ID NO: 2556; WAN024EW5_at; Start 271; Stop 295
gaagctcagccacgcattaaggcgc

SEQ ID NO: 184684 - DNA, 25 bp, Artificial
  probe
  misc_feature (1)..(25): SEQ ID NO: 2556; WAN024EW5_at; Start 492; Stop 516
taaccttggtagtgtggatacaacc

SEQ ID NO: 184685 - DNA, 25 bp, Artificial
  probe
  misc_feature (1)..(25): SEQ ID NO: 2556; WAN024EW5_at; Start 638; Stop 662
ttatctttgcagtttatgcgccagg

SEQ ID NO: 184686 - DNA, 25 bp, Artificial
  probe
  misc_feature (1)..(25): SEQ ID NO: 2556; WAN024EW5_at; Start 679; Stop 703
tggacagtgtctaatgcttatcaag

SEQ ID NO: 184687 - DNA, 25 bp, Artificial
  probe
  misc_feature (1)..(25): SEQ ID NO: 2556; WAN024EW5_at; Start 101; Stop 125
ccgaatcggctgatttttggagtaa

SEQ ID NO: 184688 - DNA, 25 bp, Artificial
  probe
  misc_feature (1)..(25): SEQ ID NO: 2556; WAN024EW5_at; Start 759; Stop 783
cgtagtacaggcacaaaaagatttg

SEQ ID NO: 184689 - DNA, 25 bp, Artificial
  probe
  misc_feature (1)..(25): SEQ ID NO: 2556; WAN024EW5_at; Start 414; Stop 438
tcagatgccggttattttggccctg

SEQ ID NO: 184690 - DNA, 25 bp, Artificial
  probe
  misc_feature (1)..(25): SEQ ID NO: 2556; WAN024EW5_at; Start 603; Stop 627
gactgcgatgatgtatgggattcca

SEQ ID NO: 184691 - DNA, 25 bp, Artificial
  probe
  misc_feature (1)..(25): SEQ ID NO: 2556; WAN024EW5_at; Start 324; Stop 348
ggaaagcagaaccaaactagagcag

SEQ ID NO: 184692 - DNA, 25 bp, Artificial
  probe
  misc_feature (1)..(25): SEQ ID NO: 2556; WAN024EW5_at; Start 573; Stop 597
caaagctttgtctgagcgaaatggc

SEQ ID NO: 184693 - DNA, 25 bp, Artificial
  probe
  misc_feature (1)..(25): SEQ ID NO: 2556; WAN024EW5_at; Start 471; Stop 495
gacaggtcatttcttatggattaac

SEQ ID NO: 184694 - DNA, 25 bp, Artificial
  probe
  misc_feature (1)..(25): SEQ ID NO: 2556; WAN024EW5_at; Start 519; Stop 543
tgttcttccgattttagcagcagta

SEQ ID NO: 184695 - DNA, 25 bp, Artificial
  probe
  misc_feature (1)..(25): SEQ ID NO: 2556; WAN024EW5_at; Start 664; Stop 688
ggagtcgccctatactggacagtgt

SEQ ID NO: 184696 - DNA, 25 bp, Artificial
  probe
  misc_feature (1)..(25): SEQ ID NO: 2556; WAN024EW5_at; Start 558; Stop 582
tacttggttgtccaacaaagctttg

SEQ ID NO: 184697 - DNA, 25 bp, Artificial
  probe
  misc_feature (1)..(25): SEQ ID NO: 2556; WAN024EW5_at; Start 731; Stop 755
cattcaagattatcgcagagcgcga

SEQ ID NO: 184698 - DNA, 25 bp, Artificial
  probe
  misc_feature (1)..(25): SEQ ID NO: 3429; WAN024EW6_at; Start 451; Stop 475
gaagcaggcgctgatgaccttgaaa

SEQ ID NO: 184699 - DNA, 25 bp, Artificial
  probe
  misc_feature (1)..(25): SEQ ID NO: 3429; WAN024EW6_at; Start 793; Stop 817
gaacaccgtgcagaagtcttgcaga

SEQ ID NO: 184700 - DNA, 25 bp, Artificial
  probe
  misc_feature (1)..(25): SEQ ID NO: 3429; WAN024EW6_at; Start 805; Stop 829
gaagtcttgcagacctatgcgcaaa

SEQ ID NO: 184701 - DNA, 25 bp, Artificial
  probe
  misc_feature (1)..(25): SEQ ID NO: 3429; WAN024EW6_at; Start 667; Stop 691
gaaccaggtcgtattatcggctacc

SEQ ID NO: 184702 - DNA, 25 bp, Artificial
  probe
  misc_feature (1)..(25): SEQ ID NO: 3429; WAN024EW6_at; Start 389; Stop 413
tagaagaaactggtcacattgagat

SEQ ID NO: 184703 - DNA, 25 bp, Artificial
  probe
  misc_feature (1)..(25): SEQ ID NO: 3429; WAN024EW6_at; Start 265; Stop 289
gaagaaaccgttgaccttggtcatg

SEQ ID NO: 184704 - DNA, 25 bp, Artificial
  probe
  misc_feature (1)..(25): SEQ ID NO: 3429; WAN024EW6_at; Start 343; Stop 367
gtcaaggctgaaatcttaaaacatg

SEQ ID NO: 184705 - DNA, 25 bp, Artificial
  probe
  misc_feature (1)..(25): SEQ ID NO: 3429; WAN024EW6_at; Start 713; Stop 737
tgcaactgttggctcaaaattatct

SEQ ID NO: 184706 - DNA, 25 bp, Artificial
  probe
  misc_feature (1)..(25): SEQ ID NO: 3429; WAN024EW6_at; Start 910; Stop 934
cgtattatttcacgtatggatggcg

SEQ ID NO: 184707 - DNA, 25 bp, Artificial
  probe
  misc_feature (1)..(25): SEQ ID NO: 3429; WAN024EW6_at; Start 946; Stop 970
tctgaaggtgatgagccaaatcgct

SEQ ID NO: 184708 - DNA, 25 bp, Artificial
  probe
  misc_feature (1)..(25): SEQ ID NO: 3429; WAN024EW6_at; Start 8; Stop 32
tggtagtatttacaggttcaactgt

SEQ ID NO: 184709 - DNA, 25 bp, Artificial
  probe
  misc_feature (1)..(25): SEQ ID NO: 3429; WAN024EW6_at; Start 159; Stop 183
tattgaagcgattagtgaaacgact

SEQ ID NO: 184710 - DNA, 25 bp, Artificial
  probe
  misc_feature (1)..(25): SEQ ID NO: 3429; WAN024EW6_at; Start 696; Stop 720
taaagtcttgaaggccttgcaactg

SEQ ID NO: 184711 - DNA, 25 bp, Artificial
  probe
  misc_feature (1)..(25): SEQ ID NO: 3429; WAN024EW6_at; Start 681; Stop 705
tatcggctaccatggtaaagtcttg

SEQ ID NO: 184712 - DNA, 25 bp, Artificial
  probe
  misc_feature (1)..(25): SEQ ID NO: 3429; WAN024EW6_at; Start 77; Stop 101
gaatgaaggctcatatcaaagtcat

SEQ ID NO: 184713 - DNA, 25 bp, Artificial
  probe
  misc_feature (1)..(25): SEQ ID NO: 3429; WAN024EW6_at; Start 24; Stop 48
ttcaactgttgaagaagcaatccag

SEQ ID NO: 184714 - DNA, 25 bp, Artificial
  probe
  misc_feature (1)..(25): SEQ ID NO: 3429; WAN024EW6_at; Start 240; Stop 264
gaacgagcctgtgaagacggttagt

SEQ ID NO: 184715 - DNA, 25 bp, Artificial
  probe
  misc_feature (1)..(25): SEQ ID NO: 3429; WAN024EW6_at; Start 145; Stop 169
ccagcccaagtggatattgaagcga

SEQ ID NO: 184716 - DNA, 25 bp, Artificial
  probe
  misc_feature (1)..(25): SEQ ID NO: 3429; WAN024EW6_at; Start 619; Stop 643
tcaaatgattataaccgtcgtagca

SEQ ID NO: 184717 - DNA, 25 bp, Artificial
  probe
  misc_feature (1)..(25): SEQ ID NO: 3429; WAN024EW6_at; Start 194; Stop 218
caaatcaacaggtagtaaaaggcgt

SEQ ID NO: 184718 - DNA, 25 bp, Artificial
  probe
  misc_feature (1)..(25): SEQ ID NO: 3429; WAN024EW6_at; Start 226; Stop 250
aaaatcaatgatttgaacgagcctg

SEQ ID NO: 184719 - DNA, 25 bp, Artificial
  probe
  misc_feature (1)..(25): SEQ ID NO: 3429; WAN024EW6_at; Start 356; Stop 380
tcttaaaacatgaaagacatgccag

SEQ ID NO: 184720 - DNA, 25 bp, Artificial
  probe
  misc_feature (1)..(25): SEQ ID NO: 3429; WAN024EW6_at; Start 814; Stop 838
cagacctatgcgcaaaaattggcga

SEQ ID NO: 184721 - DNA, 25 bp, Artificial
  probe
  misc_feature (1)..(25): SEQ ID NO: 3429; WAN024EW6_at; Start 45; Stop 69
ccagaaaggattgaaagaattagat

SEQ ID NO: 184722 - DNA, 25 bp, Artificial
  probe
  misc_feature (1)..(25): SEQ ID NO: 3429; WAN024EW6_at; Start 64; Stop 88
ttagatattccaagaatgaaggctc

SEQ ID NO: 184723 - DNA, 25 bp, Artificial
  probe
  misc_feature (1)..(25): SEQ ID NO: 3429; WAN024EW6_at; Start 426; Stop 450
tcaaatcgaggaagcgatgagggaa

SEQ ID NO: 184724 - DNA, 25 bp, Artificial
  probe
  misc_feature (1)..(25): SEQ ID NO: 3429; WAN024EW6_at; Start 249; Stop 273
tgtgaagacggttagtgaagaaacc

SEQ ID NO: 184725 - DNA, 25 bp, Artificial
  probe
  misc_feature (1)..(25): SEQ ID NO: 3429; WAN024EW6_at; Start 459; Stop 483
cgctgatgaccttgaaactgagcaa

SEQ ID NO: 184726 - DNA, 25 bp, Artificial
  probe
  misc_feature (1)..(25): SEQ ID NO: 3429; WAN024EW6_at; Start 31; Stop 55
gttgaagaagcaatccagaaaggat

SEQ ID NO: 184727 - DNA, 25 bp, Artificial
  probe
  misc_feature (1)..(25): SEQ ID NO: 3429; WAN024EW6_at; Start 371; Stop 395
gacatgccagcactatcttagaaga

SEQ ID NO: 184728 - DNA, 25 bp, Artificial
  probe
  misc_feature (1)..(25): SEQ ID NO: 3429; WAN024EW6_at; Start 311; Stop 335
tagaggaagaaggtcaaggtatttc

SEQ ID NO: 184729 - DNA, 25 bp, Artificial
  probe
  misc_feature (1)..(25): SEQ ID NO: 3429; WAN024EW6_at; Start 416; Stop 440
taaatgaacttcaaatcgaggaagc

SEQ ID NO: 184730 - DNA, 25 bp, Artificial
  probe
  misc_feature (1)..(25): SEQ ID NO: 3429; WAN024EW6_at; Start 88; Stop 112
catatcaaagtcatttctagggaga

SEQ ID NO: 184731 - DNA, 25 bp, Artificial
  probe
  misc_feature (1)..(25): SEQ ID NO: 3429; WAN024EW6_at; Start 330; Stop 354
tatttctgatgaagtcaaggctgaa

SEQ ID NO: 184732 - DNA, 25 bp, Artificial
  probe
  misc_feature (1)..(25): SEQ ID NO: 6750; WAN024EW7_at; Start 40; Stop 64
gggaacagcttcatctcgcttgaga

SEQ ID NO: 184733 - DNA, 25 bp, Artificial
  probe
  misc_feature (1)..(25): SEQ ID NO: 6750; WAN024EW7_at; Start 71; Stop 95
tgctgaactgttggaatgaccatca

SEQ ID NO: 184734 - DNA, 25 bp, Artificial
  probe
  misc_feature (1)..(25): SEQ ID NO: 6750; WAN024EW7_at; Start 24; Stop 48
ccttggtcttggacttgggaacagc

SEQ ID NO: 184735 - DNA, 25 bp, Artificial
  probe
  misc_feature (1)..(25): SEQ ID NO: 6750; WAN024EW7_at; Start 113; Stop 137
cgttccccattaaaatctgggtctg

SEQ ID NO: 184736 - DNA, 25 bp, Artificial
  probe
  misc_feature (1)..(25): SEQ ID NO: 6750; WAN024EW7_at; Start 276; Stop 300
ccacgataacttgagaaattttctc

SEQ ID NO: 184737 - DNA, 25 bp, Artificial
  probe
  misc_feature (1)..(25): SEQ ID NO: 6750; WAN024EW7_at; Start 323; Stop 347
caaaaattcgttctgcatttgcagt

SEQ ID NO: 184738 - DNA, 25 bp, Artificial
  probe
  misc_feature (1)..(25): SEQ ID NO: 6750; WAN024EW7_at; Start 311; Stop 335
tgctgtccagtccaaaaattcgttc

SEQ ID NO: 184739 - DNA, 25 bp, Artificial
  probe
  misc_feature (1)..(25): SEQ ID NO: 6750; WAN024EW7_at; Start 84; Stop 108
gaatgaccatcatgatcatgcgccg

SEQ ID NO: 184740 - DNA, 25 bp, Artificial
  probe
  misc_feature (1)..(25): SEQ ID NO: 6750; WAN024EW7_at; Start 267; Stop 291
gcccttcaaccacgataacttgaga

SEQ ID NO: 184741 - DNA, 25 bp, Artificial
  probe
  misc_feature (1)..(25): SEQ ID NO: 6750; WAN024EW7_at; Start 30; Stop 54
tcttggacttgggaacagcttcatc

SEQ ID NO: 184742 - DNA, 25 bp, Artificial
  probe
  misc_feature (1)..(25): SEQ ID NO: 6750; WAN024EW7_at; Start 362; Stop 386
gctcttctgtcgtcataccacgcaa

SEQ ID NO: 184743 - DNA, 25 bp, Artificial
  probe
  misc_feature (1)..(25): SEQ ID NO: 6750; WAN024EW7_at; Start 369; Stop 393
tgtcgtcataccacgcaagtcagcg

SEQ ID NO: 184744 - DNA, 25 bp, Artificial
  probe
  misc_feature (1)..(25): SEQ ID NO: 6750; WAN024EW7_at; Start 247; Stop 271
gagattgaccgtatcatcacgccct

SEQ ID NO: 184745 - DNA, 25 bp, Artificial
  probe
  misc_feature (1)..(25): SEQ ID NO: 6750; WAN024EW7_at; Start 63; Stop 87
gaaaggcatgctgaactgttggaat

SEQ ID NO: 184746 - DNA, 25 bp, Artificial
  probe
  misc_feature (1)..(25): SEQ ID NO: 6750; WAN024EW7_at; Start 91; Stop 115
catcatgatcatgcgccgaatccgt

SEQ ID NO: 184747 - DNA, 25 bp, Artificial
  probe
  misc_feature (1)..(25): SEQ ID NO: 6750; WAN024EW7_at; Start 160; Stop 184
ttggtgcaggcgctgaatccgctct

SEQ ID NO: 184748 - DNA, 25 bp, Artificial
  probe
  misc_feature (1)..(25): SEQ ID NO: 6750; WAN024EW7_at; Start 142; Stop 166
gacaatgactccatgacgttggtgc

SEQ ID NO: 184749 - DNA, 25 bp, Artificial
  probe
  misc_feature (1)..(25): SEQ ID NO: 6750; WAN024EW7_at; Start 233; Stop 257
tcgaaataacgtttgagattgaccg

SEQ ID NO: 184750 - DNA, 25 bp, Artificial
  probe
  misc_feature (1)..(25): SEQ ID NO: 6750; WAN024EW7_at; Start 382; Stop 406
cgcaagtcagcgataaagtcgacca

SEQ ID NO: 184751 - DNA, 25 bp, Artificial
  probe
  misc_feature (1)..(25): SEQ ID NO: 6750; WAN024EW7_at; Start 213; Stop 237
gagtctcataggtctccacatcgaa

SEQ ID NO: 184752 - DNA, 25 bp, Artificial
  probe
  misc_feature (1)..(25): SEQ ID NO: 6750; WAN024EW7_at; Start 296; Stop 320
ttctctttcattacttgctgtccag

SEQ ID NO: 184753 - DNA, 25 bp, Artificial
  probe
  misc_feature (1)..(25): SEQ ID NO: 6750; WAN024EW7_at; Start 53; Stop 77
tctcgcttgagaaaggcatgctgaa

SEQ ID NO: 184754 - DNA, 25 bp, Artificial
  probe
  misc_feature (1)..(25): SEQ ID NO: 6750; WAN024EW7_at; Start 223; Stop 247
ggtctccacatcgaaataacgtttg

SEQ ID NO: 184755 - DNA, 25 bp, Artificial
  probe
  misc_feature (1)..(25): SEQ ID NO: 6750; WAN024EW7_at; Start 186; Stop 210
tatcctgagcattgatggcagaacc

SEQ ID NO: 184756 - DNA, 25 bp, Artificial
  probe
  misc_feature (1)..(25): SEQ ID NO: 6750; WAN024EW7_at; Start 349; Stop 373
gttgctaccgccagctcttctgtcg

SEQ ID NO: 184757 - DNA, 25 bp, Artificial
  probe
  misc_feature (1)..(25): SEQ ID NO: 6750; WAN024EW7_at; Start 128; Stop 152
tctgggtctgtaaagacaatgactc

SEQ ID NO: 184758 - DNA, 25 bp, Artificial
  probe
  misc_feature (1)..(25): SEQ ID NO: 6750; WAN024EW7_at; Start 6; Stop 30
caattcccagagaacgccccttggt

SEQ ID NO: 184759 - DNA, 25 bp, Artificial
  probe
  misc_feature (1)..(25): SEQ ID NO: 6750; WAN024EW7_at; Start 338; Stop 362
catttgcagtcgttgctaccgccag

SEQ ID NO: 184760 - DNA, 25 bp, Artificial
  probe
  misc_feature (1)..(25): SEQ ID NO: 6750; WAN024EW7_at; Start 13; Stop 37
cagagaacgccccttggtcttggac

SEQ ID NO: 184761 - DNA, 25 bp, Artificial
  probe
  misc_feature (1)..(25): SEQ ID NO: 6750; WAN024EW7_at; Start 201; Stop 225
tggcagaacctcgagtctcataggt

SEQ ID NO: 184762 - DNA, 25 bp, Artificial
  probe
  misc_feature (1)..(25): SEQ ID NO: 6750; WAN024EW7_at; Start 153; Stop 177
catgacgttggtgcaggcgctgaat

SEQ ID NO: 184763 - DNA, 25 bp, Artificial
  probe
  misc_feature (1)..(25): SEQ ID NO: 6750; WAN024EW7_at; Start 170; Stop 194
cgctgaatccgctctatatcctgag

SEQ ID NO: 184764 - DNA, 25 bp, Artificial
  probe
  misc_feature (1)..(25): SEQ ID NO: 6750; WAN024EW7_at; Start 387; Stop 411
gtcagcgataaagtcgaccacatag

SEQ ID NO: 184765 - DNA, 25 bp, Artificial
  probe
  misc_feature (1)..(25): SEQ ID NO: 6750; WAN024EW7_at; Start 195; Stop 219
cattgatggcagaacctcgagtctc

SEQ ID NO: 184766 - DNA, 25 bp, Artificial
  probe
  misc_feature (1)..(25): SEQ ID NO: 4256; WAN024EW8_at; Start 38; Stop 62
tgcctcacgacctgcaaattcttct

SEQ ID NO: 184767 - DNA, 25 bp, Artificial
  probe
  misc_feature (1)..(25): SEQ ID NO: 4256; WAN024EW8_at; Start 223; Stop 247
tcctattccacagttagagacagaa

SEQ ID NO: 184768 - DNA, 25 bp, Artificial
  probe
  misc_feature (1)..(25): SEQ ID NO: 4256; WAN024EW8_at; Start 16; Stop 40
cagcagccaaggcaatttcttctgc

SEQ ID NO: 184769 - DNA, 25 bp, Artificial
  probe
  misc_feature (1)..(25): SEQ ID NO: 4256; WAN024EW8_at; Start 175; Stop 199
ttcaatagagagctattctgctatc

SEQ ID NO: 184770 - DNA, 25 bp, Artificial
  probe
  misc_feature (1)..(25): SEQ ID NO: 4256; WAN024EW8_at; Start 210; Stop 234
gatattgcccatctcctattccaca

SEQ ID NO: 184771 - DNA, 25 bp, Artificial
  probe
  misc_feature (1)..(25): SEQ ID NO: 4256; WAN024EW8_at; Start 196; Stop 220
tatcttttctatccgatattgccca

SEQ ID NO: 184772 - DNA, 25 bp, Artificial
  probe
  misc_feature (1)..(25): SEQ ID NO: 4256; WAN024EW8_at; Start 245; Stop 269
gaagagattggctacattgatagaa

SEQ ID NO: 184773 - DNA, 25 bp, Artificial
  probe
  misc_feature (1)..(25): SEQ ID NO: 4256; WAN024EW8_at; Start 216; Stop 240
gcccatctcctattccacagttaga

SEQ ID NO: 184774 - DNA, 25 bp, Artificial
  probe
  misc_feature (1)..(25): SEQ ID NO: 4256; WAN024EW8_at; Start 262; Stop 286
tgatagaatattcctattcagctaa

SEQ ID NO: 184775 - DNA, 25 bp, Artificial
  probe
  misc_feature (1)..(25): SEQ ID NO: 4256; WAN024EW8_at; Start 29; Stop 53
aatttcttctgcctcacgacctgca

SEQ ID NO: 184776 - DNA, 25 bp, Artificial
  probe
  misc_feature (1)..(25): SEQ ID NO: 4256; WAN024EW8_at; Start 33; Stop 57
tcttctgcctcacgacctgcaaatt

SEQ ID NO: 184777 - DNA, 25 bp, Artificial
  probe
  misc_feature (1)..(25): SEQ ID NO: 4256; WAN024EW8_at; Start 23; Stop 47
caaggcaatttcttctgcctcacga

SEQ ID NO: 184778 - DNA, 25 bp, Artificial
  probe
  misc_feature (1)..(25): SEQ ID NO: 4256; WAN024EW8_at; Start 226; Stop 250
tattccacagttagagacagaagag

SEQ ID NO: 184779 - DNA, 25 bp, Artificial
  probe
  misc_feature (1)..(25): SEQ ID NO: 4256; WAN024EW8_at; Start 107; Stop 131
cgttttctatccttctattatacca

SEQ ID NO: 184780 - DNA, 25 bp, Artificial
  probe
  misc_feature (1)..(25): SEQ ID NO: 4256; WAN024EW8_at; Start 229; Stop 253
tccacagttagagacagaagagatt

SEQ ID NO: 184781 - DNA, 25 bp, Artificial
  probe
  misc_feature (1)..(25): SEQ ID NO: 4256; WAN024EW8_at; Start 253; Stop 277
tggctacattgatagaatattccta

SEQ ID NO: 184782 - DNA, 25 bp, Artificial
  probe
  misc_feature (1)..(25): SEQ ID NO: 4256; WAN024EW8_at; Start 237; Stop 261
tagagacagaagagattggctacat

SEQ ID NO: 184783 - DNA, 25 bp, Artificial
  probe
  misc_feature (1)..(25): SEQ ID NO: 4256; WAN024EW8_at; Start 76; Stop 100
tatgtgtatcaaaaatcatctcttc

SEQ ID NO: 184784 - DNA, 25 bp, Artificial
  probe
  misc_feature (1)..(25): SEQ ID NO: 4256; WAN024EW8_at; Start 159; Stop 183
ggtttcccctcctctcttcaataga

SEQ ID NO: 184785 - DNA, 25 bp, Artificial
  probe
  misc_feature (1)..(25): SEQ ID NO: 4256; WAN024EW8_at; Start 171; Stop 195
tctcttcaatagagagctattctgc

SEQ ID NO: 184786 - DNA, 25 bp, Artificial
  probe
  misc_feature (1)..(25): SEQ ID NO: 4256; WAN024EW8_at; Start 42; Stop 66
tcacgacctgcaaattcttctacat

SEQ ID NO: 184787 - DNA, 25 bp, Artificial
  probe
  misc_feature (1)..(25): SEQ ID NO: 4256; WAN024EW8_at; Start 64; Stop 88
cattcaagtgtgtatgtgtatcaaa

SEQ ID NO: 184788 - DNA, 25 bp, Artificial
  probe
  misc_feature (1)..(25): SEQ ID NO: 4256; WAN024EW8_at; Start 186; Stop 210
gctattctgctatcttttctatccg

SEQ ID NO: 184789 - DNA, 25 bp, Artificial
  probe
  misc_feature (1)..(25): SEQ ID NO: 4256; WAN024EW8_at; Start 201; Stop 225
tttctatccgatattgcccatctcc

SEQ ID NO: 184790 - DNA, 25 bp, Artificial
  probe
  misc_feature (1)..(25): SEQ ID NO: 4256; WAN024EW8_at; Start 86; Stop 110
aaaaatcatctcttctaacctcgtt

SEQ ID NO: 184791 - DNA, 25 bp, Artificial
  probe
  misc_feature (1)..(25): SEQ ID NO: 4256; WAN024EW8_at; Start 68; Stop 92
caagtgtgtatgtgtatcaaaaatc

SEQ ID NO: 184792 - DNA, 25 bp, Artificial
  probe
  misc_feature (1)..(25): SEQ ID NO: 4256; WAN024EW8_at; Start 8; Stop 32
acccatctcagcagccaaggcaatt

SEQ ID NO: 184793 - DNA, 25 bp, Artificial
  probe
  misc_feature (1)..(25): SEQ ID NO: 4256; WAN024EW8_at; Start 180; Stop 204
tagagagctattctgctatcttttc

SEQ ID NO: 184794 - DNA, 25 bp, Artificial
  probe
  misc_feature (1)..(25): SEQ ID NO: 4256; WAN024EW8_at; Start 233; Stop 257
cagttagagacagaagagattggct

SEQ ID NO: 184795 - DNA, 25 bp, Artificial
  probe
  misc_feature (1)..(25): SEQ ID NO: 4256; WAN024EW8_at; Start 99; Stop 123
tctaacctcgttttctatccttcta

SEQ ID NO: 184796 - DNA, 25 bp, Artificial
  probe
  misc_feature (1)..(25): SEQ ID NO: 4256; WAN024EW8_at; Start 11; Stop 35
catctcagcagccaaggcaatttct

SEQ ID NO: 184797 - DNA, 25 bp, Artificial
  probe
  misc_feature (1)..(25): SEQ ID NO: 4256; WAN024EW8_at; Start 51; Stop 75
gcaaattcttctacattcaagtgtg

SEQ ID NO: 184798 - DNA, 25 bp, Artificial
  probe
  misc_feature (1)..(25): SEQ ID NO: 4256; WAN024EW8_at; Start 241; Stop 265
gacagaagagattggctacattgat

SEQ ID NO: 184799 - DNA, 25 bp, Artificial
  probe
  misc_feature (1)..(25): SEQ ID NO: 4256; WAN024EW8_at; Start 13; Stop 37
tctcagcagccaaggcaatttcttc

SEQ ID NO: 184800 - DNA, 25 bp, Artificial
  probe
  misc_feature (1)..(25): SEQ ID NO: 1881; WAN024EW9_at; Start 35; Stop 59
aagaatttgcaggtcgtgaggcaga

SEQ ID NO: 184801 - DNA, 25 bp, Artificial
  probe
  misc_feature (1)..(25): SEQ ID NO: 1881; WAN024EW9_at; Start 289; Stop 313
taccattggatgacagcgcccaaag

SEQ ID NO: 184802 - DNA, 25 bp, Artificial
  probe
  misc_feature (1)..(25): SEQ ID NO: 1881; WAN024EW9_at; Start 489; Stop 513
gaagtttgtggatcttggtatgacc

SEQ ID NO: 184803 - DNA, 25 bp, Artificial
  probe
  misc_feature (1)..(25): SEQ ID NO: 1881; WAN024EW9_at; Start 149; Stop 173
tagatgagtatgagcagctctatgc

SEQ ID NO: 184804 - DNA, 25 bp, Artificial
  probe
  misc_feature (1)..(25): SEQ ID NO: 1881; WAN024EW9_at; Start 568; Stop 592
gctaaagagttacctttggacaaga

SEQ ID NO: 184805 - DNA, 25 bp, Artificial
  probe
  misc_feature (1)..(25): SEQ ID NO: 1881; WAN024EW9_at; Start 679; Stop 703
gactttatcgctgacttgcgtggta

SEQ ID NO: 184806 - DNA, 25 bp, Artificial
  probe
  misc_feature (1)..(25): SEQ ID NO: 1881; WAN024EW9_at; Start 109; Stop 133
ggttttgataaaccgacgattgagc

SEQ ID NO: 184807 - DNA, 25 bp, Artificial
  probe
  misc_feature (1)..(25): SEQ ID NO: 1881; WAN024EW9_at; Start 180; Stop 204
tggttggcatcctacagaagctggt

SEQ ID NO: 184808 - DNA, 25 bp, Artificial
  probe
  misc_feature (1)..(25): SEQ ID NO: 1881; WAN024EW9_at; Start 20; Stop 44
cacacttgaatgtagaagaatttgc

SEQ ID NO: 184809 - DNA, 25 bp, Artificial
  probe
  misc_feature (1)..(25): SEQ ID NO: 1881; WAN024EW9_at; Start 602; Stop 626
aaacagatgcgccttacttagcacc

SEQ ID NO: 184810 - DNA, 25 bp, Artificial
  probe
  misc_feature (1)..(25): SEQ ID NO: 1881; WAN024EW9_at; Start 48; Stop 72
tcgtgaggcagaagaaattgccttg

SEQ ID NO: 184811 - DNA, 25 bp, Artificial
  probe
  misc_feature (1)..(25): SEQ ID NO: 1881; WAN024EW9_at; Start 543; Stop 567
gaaggcaactgacctccaagaagca

SEQ ID NO: 184812 - DNA, 25 bp, Artificial
  probe
  misc_feature (1)..(25): SEQ ID NO: 1881; WAN024EW9_at; Start 438; Stop 462
tcctcgtggtggtatcatgcattca

SEQ ID NO: 184813 - DNA, 25 bp, Artificial
  probe
  misc_feature (1)..(25): SEQ ID NO: 1881; WAN024EW9_at; Start 163; Stop 187
cagctctatgcgactattggttggc

SEQ ID NO: 184814 - DNA, 25 bp, Artificial
  probe
  misc_feature (1)..(25): SEQ ID NO: 1881; WAN024EW9_at; Start 394; Stop 418
gcgctggaagatacctatgagatta

SEQ ID NO: 184815 - DNA, 25 bp, Artificial
  probe
  misc_feature (1)..(25): SEQ ID NO: 1881; WAN024EW9_at; Start 382; Stop 406
catacccgtgatgcgctggaagata

SEQ ID NO: 184816 - DNA, 25 bp, Artificial
  probe
  misc_feature (1)..(25): SEQ ID NO: 1881; WAN024EW9_at; Start 409; Stop 433
tatgagattatcaagagtgagggcg

SEQ ID NO: 184817 - DNA, 25 bp, Artificial
  probe
  misc_feature (1)..(25): SEQ ID NO: 1881; WAN024EW9_at; Start 505; Stop 529
ggtatgaccatttccttctcaggag

SEQ ID NO: 184818 - DNA, 25 bp, Artificial
  probe
  misc_feature (1)..(25): SEQ ID NO: 1881; WAN024EW9_at; Start 135; Stop 159
tgccttggagttggtagatgagtat

SEQ ID NO: 184819 - DNA, 25 bp, Artificial
  probe
  misc_feature (1)..(25): SEQ ID NO: 1881; WAN024EW9_at; Start 63; Stop 87
aattgccttggctgctgagatgggt

SEQ ID NO: 184820 - DNA, 25 bp, Artificial
  probe
  misc_feature (1)..(25): SEQ ID NO: 1881; WAN024EW9_at; Start 452; Stop 476
tcatgcattcattttcagggacgct

SEQ ID NO: 184821 - DNA, 25 bp, Artificial
  probe
  misc_feature (1)..(25): SEQ ID NO: 1881; WAN024EW9_at; Start 208; Stop 232
tatacagaggaagttgaggcttact

SEQ ID NO: 184822 - DNA, 25 bp, Artificial
  probe
  misc_feature (1)..(25): SEQ ID NO: 1881; WAN024EW9_at; Start 340; Stop 364
cagattcagctatctaaggacttgg

SEQ ID NO: 184823 - DNA, 25 bp, Artificial
  probe
  misc_feature (1)..(25): SEQ ID NO: 1881; WAN024EW9_at; Start 694; Stop 718
ttgcgtggtatgacgacagaagagc

SEQ ID NO: 184824 - DNA, 25 bp, Artificial
  probe
  misc_feature (1)..(25): SEQ ID NO: 1881; WAN024EW9_at; Start 617; Stop 641
acttagcacctgtacccaagcgtgg

SEQ ID NO: 184825 - DNA, 25 bp, Artificial
  probe
  misc_feature (1)..(25): SEQ ID NO: 1881; WAN024EW9_at; Start 512; Stop 536
ccatttccttctcaggagtggtgac

SEQ ID NO: 184826 - DNA, 25 bp, Artificial
  probe
  misc_feature (1)..(25): SEQ ID NO: 1881; WAN024EW9_at; Start 3; Stop 27
gatttttgatacacatacacacttg

SEQ ID NO: 184827 - DNA, 25 bp, Artificial
  probe
  misc_feature (1)..(25): SEQ ID NO: 1881; WAN024EW9_at; Start 460; Stop 484
tcattttcagggacgcttgagtggg

SEQ ID NO: 184828 - DNA, 25 bp, Artificial
  probe
  misc_feature (1)..(25): SEQ ID NO: 1881; WAN024EW9_at; Start 557; Stop 581
tccaagaagcagctaaagagttacc

SEQ ID NO: 184829 - DNA, 25 bp, Artificial
  probe
  misc_feature (1)..(25): SEQ ID NO: 1881; WAN024EW9_at; Start 368; Stop 392
tgccttttgttgtccatacccgtga

SEQ ID NO: 184830 - DNA, 25 bp, Artificial
  probe
  misc_feature (1)..(25): SEQ ID NO: 1881; WAN024EW9_at; Start 308; Stop 332
ccaaagaggtgcaggagcaggtttt

SEQ ID NO: 184831 - DNA, 25 bp, Artificial
  probe
  misc_feature (1)..(25): SEQ ID NO: 1881; WAN024EW9_at; Start 417; Stop 441
tatcaagagtgagggcgttggtcct

SEQ ID NO: 184832 - DNA, 25 bp, Artificial
  probe
  misc_feature (1)..(25): SEQ ID NO: 1881; WAN024EW9_at; Start 194; Stop 218
cagaagctggtacttatacagagga

SEQ ID NO: 184833 - DNA, 25 bp, Artificial
  probe
  misc_feature (1)..(25): SEQ ID NO: 1881; WAN024EW9_at; Start 652; Stop 676
aaaacagcctatactcgctatgtgg

SEQ ID NO: 184834 - DNA, 25 bp, Artificial
  probe
  misc_feature (1)..(25): SEQ ID NO: 884; WAN024EWA_at; Start 344; Stop 368
tgacagaacaatttgaacatgagag

SEQ ID NO: 184835 - DNA, 25 bp, Artificial
  probe
  misc_feature (1)..(25): SEQ ID NO: 884; WAN024EWA_at; Start 253; Stop 277
gatgaagctgttcccaagtccaaga

SEQ ID NO: 184836 - DNA, 25 bp, Artificial
  probe
  misc_feature (1)..(25): SEQ ID NO: 884; WAN024EWA_at; Start 535; Stop 559
gaagaagctatgaaatcttatgagt

SEQ ID NO: 184837 - DNA, 25 bp, Artificial
  probe
  misc_feature (1)..(25): SEQ ID NO: 884; WAN024EWA_at; Start 315; Stop 339
tgaagacctgaaaacggctctagct

SEQ ID NO: 184838 - DNA, 25 bp, Artificial
  probe
  misc_feature (1)..(25): SEQ ID NO: 884; WAN024EWA_at; Start 311; Stop 335
gctatgaagacctgaaaacggctct

SEQ ID NO: 184839 - DNA, 25 bp, Artificial
  probe
  misc_feature (1)..(25): SEQ ID NO: 884; WAN024EWA_at; Start 317; Stop 341
aagacctgaaaacggctctagctca

SEQ ID NO: 184840 - DNA, 25 bp, Artificial
  probe
  misc_feature (1)..(25): SEQ ID NO: 884; WAN024EWA_at; Start 295; Stop 319
ggaattgagcatgccagctatgaag

SEQ ID NO: 184841 - DNA, 25 bp, Artificial
  probe
  misc_feature (1)..(25): SEQ ID NO: 884; WAN024EWA_at; Start 259; Stop 283
gctgttcccaagtccaagaccaagg

SEQ ID NO: 184842 - DNA, 25 bp, Artificial
  probe
  misc_feature (1)..(25): SEQ ID NO: 884; WAN024EWA_at; Start 492; Stop 516
cctcaaacgcctagagttgtttggg

SEQ ID NO: 184843 - DNA, 25 bp, Artificial
  probe
  misc_feature (1)..(25): SEQ ID NO: 884; WAN024EWA_at; Start 150; Stop 174
tcatggagtcattgtctttacagac

SEQ ID NO: 184844 - DNA, 25 bp, Artificial
  probe
  misc_feature (1)..(25): SEQ ID NO: 884; WAN024EWA_at; Start 286; Stop 310
cgttctctgggaattgagcatgcca

SEQ ID NO: 184845 - DNA, 25 bp, Artificial
  probe
  misc_feature (1)..(25): SEQ ID NO: 884; WAN024EWA_at; Start 442; Stop 466
gaatatctcggagagactctccgaa

SEQ ID NO: 184846 - DNA, 25 bp, Artificial
  probe
  misc_feature (1)..(25): SEQ ID NO: 884; WAN024EWA_at; Start 164; Stop 188
tctttacagacccagattttaatgg

SEQ ID NO: 184847 - DNA, 25 bp, Artificial
  probe
  misc_feature (1)..(25): SEQ ID NO: 884; WAN024EWA_at; Start 219; Stop 243
cattccaacagttcagcatgccttt

SEQ ID NO: 184848 - DNA, 25 bp, Artificial
  probe
  misc_feature (1)..(25): SEQ ID NO: 884; WAN024EWA_at; Start 289; Stop 313
tctctgggaattgagcatgccagct

SEQ ID NO: 184849 - DNA, 25 bp, Artificial
  probe
  misc_feature (1)..(25): SEQ ID NO: 884; WAN024EWA_at; Start 522; Stop 546
tttggcagaagtggaagaagctatg

SEQ ID NO: 184850 - DNA, 25 bp, Artificial
  probe
  misc_feature (1)..(25): SEQ ID NO: 884; WAN024EWA_at; Start 349; Stop 373
gaacaatttgaacatgagagtcagt

SEQ ID NO: 184851 - DNA, 25 bp, Artificial
  probe
  misc_feature (1)..(25): SEQ ID NO: 884; WAN024EWA_at; Start 306; Stop 330
tgccagctatgaagacctgaaaacg

SEQ ID NO: 184852 - DNA, 25 bp, Artificial
  probe
  misc_feature (1)..(25): SEQ ID NO: 884; WAN024EWA_at; Start 518; Stop 542
ttactttggcagaagtggaagaagc

SEQ ID NO: 184853 - DNA, 25 bp, Artificial
  probe
  misc_feature (1)..(25): SEQ ID NO: 884; WAN024EWA_at; Start 368; Stop 392
gtcagtttgacattagtcgtagcga

SEQ ID NO: 184854 - DNA, 25 bp, Artificial
  probe
  misc_feature (1)..(25): SEQ ID NO: 884; WAN024EWA_at; Start 225; Stop 249
aacagttcagcatgcctttctcaag

SEQ ID NO: 184855 - DNA, 25 bp, Artificial
  probe
  misc_feature (1)..(25): SEQ ID NO: 884; WAN024EWA_at; Start 452; Stop 476
gagagactctccgaatcggctattc

SEQ ID NO: 184856 - DNA, 25 bp, Artificial
  probe
  misc_feature (1)..(25): SEQ ID NO: 884; WAN024EWA_at; Start 142; Stop 166
caccaacgtcatggagtcattgtct

SEQ ID NO: 184857 - DNA, 25 bp, Artificial
  probe
  misc_feature (1)..(25): SEQ ID NO: 884; WAN024EWA_at; Start 270; Stop 294
gtccaagaccaaggggcgttctctg

SEQ ID NO: 184858 - DNA, 25 bp, Artificial
  probe
  misc_feature (1)..(25): SEQ ID NO: 884; WAN024EWA_at; Start 484; Stop 508
aagcaactcctcaaacgcctagagt

SEQ ID NO: 184859 - DNA, 25 bp, Artificial
  probe
  misc_feature (1)..(25): SEQ ID NO: 884; WAN024EWA_at; Start 231; Stop 255
tcagcatgcctttctcaagcgagat

SEQ ID NO: 184860 - DNA, 25 bp, Artificial
  probe
  misc_feature (1)..(25): SEQ ID NO: 884; WAN024EWA_at; Start 481; Stop 505
ggcaagcaactcctcaaacgcctag

SEQ ID NO: 184861 - DNA, 25 bp, Artificial
  probe
  misc_feature (1)..(25): SEQ ID NO: 884; WAN024EWA_at; Start 243; Stop 267
tctcaagcgagatgaagctgttccc

SEQ ID NO: 184862 - DNA, 25 bp, Artificial
  probe
  misc_feature (1)..(25): SEQ ID NO: 884; WAN024EWA_at; Start 246; Stop 270
caagcgagatgaagctgttcccaag

SEQ ID NO: 184863 - DNA, 25 bp, Artificial
  probe
  misc_feature (1)..(25): SEQ ID NO: 884; WAN024EWA_at; Start 355; Stop 379
tttgaacatgagagtcagtttgaca

SEQ ID NO: 184864 - DNA, 25 bp, Artificial
  probe
  misc_feature (1)..(25): SEQ ID NO: 884; WAN024EWA_at; Start 300; Stop 324
tgagcatgccagctatgaagacctg

SEQ ID NO: 184865 - DNA, 25 bp, Artificial
  probe
  misc_feature (1)..(25): SEQ ID NO: 884; WAN024EWA_at; Start 64; Stop 88
cgttatttcgatgtggagacctatg

SEQ ID NO: 184866 - DNA, 25 bp, Artificial
  probe
  misc_feature (1)..(25): SEQ ID NO: 884; WAN024EWA_at; Start 68; Stop 92
atttcgatgtggagacctatgagac

SEQ ID NO: 184867 - DNA, 25 bp, Artificial
  probe
  misc_feature (1)..(25): SEQ ID NO: 884; WAN024EWA_at; Start 235; Stop 259
catgcctttctcaagcgagatgaag

SEQ ID NO: 184868 - DNA, 25 bp, Artificial
  probe
  misc_feature (1)..(25): SEQ ID NO: 1713; WAN024EWB_at; Start 26; Stop 50
tcggatcaaatgagcctgtgaataa

SEQ ID NO: 184869 - DNA, 25 bp, Artificial
  probe
  misc_feature (1)..(25): SEQ ID NO: 1713; WAN024EWB_at; Start 24; Stop 48
catcggatcaaatgagcctgtgaat

SEQ ID NO: 184870 - DNA, 25 bp, Artificial
  probe
  misc_feature (1)..(25): SEQ ID NO: 1713; WAN024EWB_at; Start 21; Stop 45
tgtcatcggatcaaatgagcctgtg

SEQ ID NO: 184871 - DNA, 25 bp, Artificial
  probe
  misc_feature (1)..(25): SEQ ID NO: 1713; WAN024EWB_at; Start 101; Stop 125
tccttccagatacccagacaggcaa

SEQ ID NO: 184872 - DNA, 25 bp, Artificial
  probe
  misc_feature (1)..(25): SEQ ID NO: 1713; WAN024EWB_at; Start 222; Stop 246
cgatttgttccttggcatagggagg

SEQ ID NO: 184873 - DNA, 25 bp, Artificial
  probe
  misc_feature (1)..(25): SEQ ID NO: 1713; WAN024EWB_at; Start 11; Stop 35
gatgcccatttgtcatcggatcaaa

SEQ ID NO: 184874 - DNA, 25 bp, Artificial
  probe
  misc_feature (1)..(25): SEQ ID NO: 1713; WAN024EWB_at; Start 98; Stop 122
ttttccttccagatacccagacagg

SEQ ID NO: 184875 - DNA, 25 bp, Artificial
  probe
  misc_feature (1)..(25): SEQ ID NO: 1713; WAN024EWB_at; Start 149; Stop 173
ttatccgtctcgcacacaaccataa

SEQ ID NO: 184876 - DNA, 25 bp, Artificial
  probe
  misc_feature (1)..(25): SEQ ID NO: 1713; WAN024EWB_at; Start 33; Stop 57
aaatgagcctgtgaataagccaatc

SEQ ID NO: 184877 - DNA, 25 bp, Artificial
  probe
  misc_feature (1)..(25): SEQ ID NO: 1713; WAN024EWB_at; Start 29; Stop 53
gatcaaatgagcctgtgaataagcc

SEQ ID NO: 184878 - DNA, 25 bp, Artificial
  probe
  misc_feature (1)..(25): SEQ ID NO: 1713; WAN024EWB_at; Start 5; Stop 29
tatccagatgcccatttgtcatcgg

SEQ ID NO: 184879 - DNA, 25 bp, Artificial
  probe
  misc_feature (1)..(25): SEQ ID NO: 1713; WAN024EWB_at; Start 93; Stop 117
aaatcttttccttccagatacccag

SEQ ID NO: 184880 - DNA, 25 bp, Artificial
  probe
  misc_feature (1)..(25): SEQ ID NO: 1713; WAN024EWB_at; Start 59; Stop 83
tatctgacatagactgtcaccttac

SEQ ID NO: 184881 - DNA, 25 bp, Artificial
  probe
  misc_feature (1)..(25): SEQ ID NO: 1713; WAN024EWB_at; Start 155; Stop 179
gtctcgcacacaaccataacatctt

SEQ ID NO: 184882 - DNA, 25 bp, Artificial
  probe
  misc_feature (1)..(25): SEQ ID NO: 1713; WAN024EWB_at; Start 31; Stop 55
tcaaatgagcctgtgaataagccaa

SEQ ID NO: 184883 - DNA, 25 bp, Artificial
  probe
  misc_feature (1)..(25): SEQ ID NO: 1713; WAN024EWB_at; Start 168; Stop 192
ccataacatcttcagaaaaaagctc

SEQ ID NO: 184884 - DNA, 25 bp, Artificial
  probe
  misc_feature (1)..(25): SEQ ID NO: 1713; WAN024EWB_at; Start 85; Stop 109
aattccataaatcttttccttccag

SEQ ID NO: 184885 - DNA, 25 bp, Artificial
  probe
  misc_feature (1)..(25): SEQ ID NO: 1713; WAN024EWB_at; Start 9; Stop 33
cagatgcccatttgtcatcggatca

SEQ ID NO: 184886 - DNA, 25 bp, Artificial
  probe
  misc_feature (1)..(25): SEQ ID NO: 1713; WAN024EWB_at; Start 213; Stop 237
tatctgctacgatttgttccttggc

SEQ ID NO: 184887 - DNA, 25 bp, Artificial
  probe
  misc_feature (1)..(25): SEQ ID NO: 1713; WAN024EWB_at; Start 56; Stop 80
tcttatctgacatagactgtcacct

SEQ ID NO: 184888 - DNA, 25 bp, Artificial
  probe
  misc_feature (1)..(25): SEQ ID NO: 1713; WAN024EWB_at; Start 66; Stop 90
catagactgtcaccttactaattcc

SEQ ID NO: 184889 - DNA, 25 bp, Artificial
  probe
  misc_feature (1)..(25): SEQ ID NO: 1713; WAN024EWB_at; Start 70; Stop 94
gactgtcaccttactaattccataa

SEQ ID NO: 184890 - DNA, 25 bp, Artificial
  probe
  misc_feature (1)..(25): SEQ ID NO: 1713; WAN024EWB_at; Start 48; Stop 72
taagccaatcttatctgacatagac

SEQ ID NO: 184891 - DNA, 25 bp, Artificial
  probe
  misc_feature (1)..(25): SEQ ID NO: 1713; WAN024EWB_at; Start 160; Stop 184
gcacacaaccataacatcttcagaa

SEQ ID NO: 184892 - DNA, 25 bp, Artificial
  probe
  misc_feature (1)..(25): SEQ ID NO: 1713; WAN024EWB_at; Start 51; Stop 75
gccaatcttatctgacatagactgt

SEQ ID NO: 184893 - DNA, 25 bp, Artificial
  probe
  misc_feature (1)..(25): SEQ ID NO: 1713; WAN024EWB_at; Start 228; Stop 252
gttccttggcatagggagggtctaa

SEQ ID NO: 184894 - DNA, 25 bp, Artificial
  probe
  misc_feature (1)..(25): SEQ ID NO: 1713; WAN024EWB_at; Start 36; Stop 60
tgagcctgtgaataagccaatctta

SEQ ID NO: 184895 - DNA, 25 bp, Artificial
  probe
  misc_feature (1)..(25): SEQ ID NO: 1713; WAN024EWB_at; Start 173; Stop 197
acatcttcagaaaaaagctctctct

SEQ ID NO: 184896 - DNA, 25 bp, Artificial
  probe
  misc_feature (1)..(25): SEQ ID NO: 1713; WAN024EWB_at; Start 220; Stop 244
tacgatttgttccttggcataggga

SEQ ID NO: 184897 - DNA, 25 bp, Artificial
  probe
  misc_feature (1)..(25): SEQ ID NO: 1713; WAN024EWB_at; Start 226; Stop 250
ttgttccttggcatagggagggtct

SEQ ID NO: 184898 - DNA, 25 bp, Artificial
  probe
  misc_feature (1)..(25): SEQ ID NO: 1713; WAN024EWB_at; Start 19; Stop 43
tttgtcatcggatcaaatgagcctg

SEQ ID NO: 184899 - DNA, 25 bp, Artificial
  probe
  misc_feature (1)..(25): SEQ ID NO: 1713; WAN024EWB_at; Start 217; Stop 241
tgctacgatttgttccttggcatag

SEQ ID NO: 184900 - DNA, 25 bp, Artificial
  probe
  misc_feature (1)..(25): SEQ ID NO: 1713; WAN024EWB_at; Start 200; Stop 224
gccattttttcaatatctgctacga

SEQ ID NO: 184901 - DNA, 25 bp, Artificial
  probe
  misc_feature (1)..(25): SEQ ID NO: 1713; WAN024EWB_at; Start 39; Stop 63
gcctgtgaataagccaatcttatct

SEQ ID NO: 184902 - DNA, 25 bp, Artificial
  probe
  misc_feature (1)..(25): SEQ ID NO: 767; WAN024EWC_at; Start 100; Stop 124
aacatgattggtccctactttgaag

SEQ ID NO: 184903 - DNA, 25 bp, Artificial
  probe
  misc_feature (1)..(25): SEQ ID NO: 767; WAN024EWC_at; Start 141; Stop 165
cctttatgcaggtagtggtggttta

SEQ ID NO: 184904 - DNA, 25 bp, Artificial
  probe
  misc_feature (1)..(25): SEQ ID NO: 767; WAN024EWC_at; Start 200; Stop 224
ctgttttggtggagcgagaccgtaa

SEQ ID NO: 184905 - DNA, 25 bp, Artificial
  probe
  misc_feature (1)..(25): SEQ ID NO: 767; WAN024EWC_at; Start 419; Stop 443
aagatgttatggttgtgtgcgagac

SEQ ID NO: 184906 - DNA, 25 bp, Artificial
  probe
  misc_feature (1)..(25): SEQ ID NO: 767; WAN024EWC_at; Start 425; Stop 449
ttatggttgtgtgcgagacggataa

SEQ ID NO: 184907 - DNA, 25 bp, Artificial
  probe
  misc_feature (1)..(25): SEQ ID NO: 767; WAN024EWC_at; Start 358; Stop 382
tatgccaaggaacaaatcgtagcag

SEQ ID NO: 184908 - DNA, 25 bp, Artificial
  probe
  misc_feature (1)..(25): SEQ ID NO: 767; WAN024EWC_at; Start 519; Stop 543
ggtgacagtctatgtcagataacta

SEQ ID NO: 184909 - DNA, 25 bp, Artificial
  probe
  misc_feature (1)..(25): SEQ ID NO: 767; WAN024EWC_at; Start 338; Stop 362
tcgttttcttagaccctccctatgc

SEQ ID NO: 184910 - DNA, 25 bp, Artificial
  probe
  misc_feature (1)..(25): SEQ ID NO: 767; WAN024EWC_at; Start 237; Stop 261
cgtggctgaaaatatccagatgacc

SEQ ID NO: 184911 - DNA, 25 bp, Artificial
  probe
  misc_feature (1)..(25): SEQ ID NO: 767; WAN024EWC_at; Start 257; Stop 281
tgaccaaggaagttggaaaatttca

SEQ ID NO: 184912 - DNA, 25 bp, Artificial
  probe
  misc_feature (1)..(25): SEQ ID NO: 767; WAN024EWC_at; Start 313; Stop 337
gaacaggtatctggggaatttgacc

SEQ ID NO: 184913 - DNA, 25 bp, Artificial
  probe
  misc_feature (1)..(25): SEQ ID NO: 767; WAN024EWC_at; Start 249; Stop 273
tatccagatgaccaaggaagttgga

SEQ ID NO: 184914 - DNA, 25 bp, Artificial
  probe
  misc_feature (1)..(25): SEQ ID NO: 767; WAN024EWC_at; Start 505; Stop 529
tatggaattagtaaggtgacagtct

SEQ ID NO: 184915 - DNA, 25 bp, Artificial
  probe
  misc_feature (1)..(25): SEQ ID NO: 767; WAN024EWC_at; Start 130; Stop 154
cgagtcttggacctttatgcaggta

SEQ ID NO: 184916 - DNA, 25 bp, Artificial
  probe
  misc_feature (1)..(25): SEQ ID NO: 767; WAN024EWC_at; Start 154; Stop 178
agtggtggtttatctatcgaagcag

SEQ ID NO: 184917 - DNA, 25 bp, Artificial
  probe
  misc_feature (1)..(25): SEQ ID NO: 767; WAN024EWC_at; Start 126; Stop 150
gggacgagtcttggacctttatgca

SEQ ID NO: 184918 - DNA, 25 bp, Artificial
  probe
  misc_feature (1)..(25): SEQ ID NO: 767; WAN024EWC_at; Start 189; Stop 213
catgtccagtgctgttttggtggag

SEQ ID NO: 184919 - DNA, 25 bp, Artificial
  probe
  misc_feature (1)..(25): SEQ ID NO: 767; WAN024EWC_at; Start 231; Stop 255
gaccatcgtggctgaaaatatccag

SEQ ID NO: 184920 - DNA, 25 bp, Artificial
  probe
  misc_feature (1)..(25): SEQ ID NO: 767; WAN024EWC_at; Start 361; Stop 385
gccaaggaacaaatcgtagcagata

SEQ ID NO: 184921 - DNA, 25 bp, Artificial
  probe
  misc_feature (1)..(25): SEQ ID NO: 767; WAN024EWC_at; Start 87; Stop 111
gggagccatttttaacatgattggt

SEQ ID NO: 184922 - DNA, 25 bp, Artificial
  probe
  misc_feature (1)..(25): SEQ ID NO: 767; WAN024EWC_at; Start 179; Stop 203
tatcgcgtggcatgtccagtgctgt

SEQ ID NO: 184923 - DNA, 25 bp, Artificial
  probe
  misc_feature (1)..(25): SEQ ID NO: 767; WAN024EWC_at; Start 374; Stop 398
tcgtagcagatattgaaaaaatggc

SEQ ID NO: 184924 - DNA, 25 bp, Artificial
  probe
  misc_feature (1)..(25): SEQ ID NO: 767; WAN024EWC_at; Start 265; Stop 289
gaagttggaaaatttcaactcctca

SEQ ID NO: 184925 - DNA, 25 bp, Artificial
  probe
  misc_feature (1)..(25): SEQ ID NO: 767; WAN024EWC_at; Start 222; Stop 246
taaggctcagaccatcgtggctgaa

SEQ ID NO: 184926 - DNA, 25 bp, Artificial
  probe
  misc_feature (1)..(25): SEQ ID NO: 767; WAN024EWC_at; Start 173; Stop 197
aagcagtatcgcgtggcatgtccag

SEQ ID NO: 184927 - DNA, 25 bp, Artificial
  probe
  misc_feature (1)..(25): SEQ ID NO: 767; WAN024EWC_at; Start 475; Stop 499
gcctgtctgggtatctggaaggaaa

SEQ ID NO: 184928 - DNA, 25 bp, Artificial
  probe
  misc_feature (1)..(25): SEQ ID NO: 767; WAN024EWC_at; Start 13; Stop 37
tcaggaatctatgggggacgtcccc

SEQ ID NO: 184929 - DNA, 25 bp, Artificial
  probe
  misc_feature (1)..(25): SEQ ID NO: 767; WAN024EWC_at; Start 164; Stop 188
tatctatcgaagcagtatcgcgtgg

SEQ ID NO: 184930 - DNA, 25 bp, Artificial
  probe
  misc_feature (1)..(25): SEQ ID NO: 767; WAN024EWC_at; Start 62; Stop 86
caagacctacttcggataaggttag

SEQ ID NO: 184931 - DNA, 25 bp, Artificial
  probe
  misc_feature (1)..(25): SEQ ID NO: 767; WAN024EWC_at; Start 209; Stop 233
tggagcgagaccgtaaggctcagac

SEQ ID NO: 184932 - DNA, 25 bp, Artificial
  probe
  misc_feature (1)..(25): SEQ ID NO: 767; WAN024EWC_at; Start 488; Stop 512
tctggaaggaaaagatttatggaat

SEQ ID NO: 184933 - DNA, 25 bp, Artificial
  probe
  misc_feature (1)..(25): SEQ ID NO: 767; WAN024EWC_at; Start 401; Stop 425
agagagagcttttttctgaagatgt

SEQ ID NO: 184934 - DNA, 25 bp, Artificial
  probe
  misc_feature (1)..(25): SEQ ID NO: 767; WAN024EWC_at; Start 217; Stop 241
gaccgtaaggctcagaccatcgtgg

SEQ ID NO: 184935 - DNA, 25 bp, Artificial
  probe
  misc_feature (1)..(25): SEQ ID NO: 767; WAN024EWC_at; Start 346; Stop 370
ttagaccctccctatgccaaggaac

SEQ ID NO: 184936 - DNA, 25 bp, Artificial
  probe
  misc_feature (1)..(25): SEQ ID NO: 2862; WAN024EWD_at; Start 31; Stop 55
tcatttgatccgatgacaaatgggc

SEQ ID NO: 184937 - DNA, 25 bp, Artificial
  probe
  misc_feature (1)..(25): SEQ ID NO: 2862; WAN024EWD_at; Start 374; Stop 398
aacatctctatatcagttcatcagg

SEQ ID NO: 184938 - DNA, 25 bp, Artificial
  probe
  misc_feature (1)..(25): SEQ ID NO: 2862; WAN024EWD_at; Start 325; Stop 349
catcagctgtcttctgatatagaga

SEQ ID NO: 184939 - DNA, 25 bp, Artificial
  probe
  misc_feature (1)..(25): SEQ ID NO: 2862; WAN024EWD_at; Start 7; Stop 31
gataagattggcttattcacaggct

SEQ ID NO: 184940 - DNA, 25 bp, Artificial
  probe
  misc_feature (1)..(25): SEQ ID NO: 2862; WAN024EWD_at; Start 319; Stop 343
tacaatcatcagctgtcttctgata

SEQ ID NO: 184941 - DNA, 25 bp, Artificial
  probe
  misc_feature (1)..(25): SEQ ID NO: 2862; WAN024EWD_at; Start 414; Stop 438
gaagtttggtcaggatattgcctgc

SEQ ID NO: 184942 - DNA, 25 bp, Artificial
  probe
  misc_feature (1)..(25): SEQ ID NO: 2862; WAN024EWD_at; Start 307; Stop 331
agttttgattactacaatcatcagc

SEQ ID NO: 184943 - DNA, 25 bp, Artificial
  probe
  misc_feature (1)..(25): SEQ ID NO: 2862; WAN024EWD_at; Start 39; Stop 63
tccgatgacaaatgggcatctggat

SEQ ID NO: 184944 - DNA, 25 bp, Artificial
  probe
  misc_feature (1)..(25): SEQ ID NO: 2862; WAN024EWD_at; Start 411; Stop 435
tttgaagtttggtcaggatattgcc

SEQ ID NO: 184945 - DNA, 25 bp, Artificial
  probe
  misc_feature (1)..(25): SEQ ID NO: 2862; WAN024EWD_at; Start 19; Stop 43
ttattcacaggctcatttgatccga

SEQ ID NO: 184946 - DNA, 25 bp, Artificial
  probe
  misc_feature (1)..(25): SEQ ID NO: 2862; WAN024EWD_at; Start 310; Stop 334
tttgattactacaatcatcagctgt

SEQ ID NO: 184947 - DNA, 25 bp, Artificial
  probe
  misc_feature (1)..(25): SEQ ID NO: 2862; WAN024EWD_at; Start 14; Stop 38
ttggcttattcacaggctcatttga

SEQ ID NO: 184948 - DNA, 25 bp, Artificial
  probe
  misc_feature (1)..(25): SEQ ID NO: 2862; WAN024EWD_at; Start 328; Stop 352
cagctgtcttctgatatagagacta

SEQ ID NO: 184949 - DNA, 25 bp, Artificial
  probe
  misc_feature (1)..(25): SEQ ID NO: 2862; WAN024EWD_at; Start 406; Stop 430
gagcttttgaagtttggtcaggata

SEQ ID NO: 184950 - DNA, 25 bp, Artificial
  probe
  misc_feature (1)..(25): SEQ ID NO: 2862; WAN024EWD_at; Start 337; Stop 361
tctgatatagagactatttatttac

SEQ ID NO: 184951 - DNA, 25 bp, Artificial
  probe
  misc_feature (1)..(25): SEQ ID NO: 2862; WAN024EWD_at; Start 40; Stop 64
ccgatgacaaatgggcatctggata

SEQ ID NO: 184952 - DNA, 25 bp, Artificial
  probe
  misc_feature (1)..(25): SEQ ID NO: 2862; WAN024EWD_at; Start 36; Stop 60
tgatccgatgacaaatgggcatctg

SEQ ID NO: 184953 - DNA, 25 bp, Artificial
  probe
  misc_feature (1)..(25): SEQ ID NO: 2862; WAN024EWD_at; Start 24; Stop 48
cacaggctcatttgatccgatgaca

SEQ ID NO: 184954 - DNA, 25 bp, Artificial
  probe
  misc_feature (1)..(25): SEQ ID NO: 2862; WAN024EWD_at; Start 21; Stop 45
attcacaggctcatttgatccgatg

SEQ ID NO: 184955 - DNA, 25 bp, Artificial
  probe
  misc_feature (1)..(25): SEQ ID NO: 2862; WAN024EWD_at; Start 404; Stop 428
gagagcttttgaagtttggtcagga

SEQ ID NO: 184956 - DNA, 25 bp, Artificial
  probe
  misc_feature (1)..(25): SEQ ID NO: 2862; WAN024EWD_at; Start 16; Stop 40
ggcttattcacaggctcatttgatc

SEQ ID NO: 184957 - DNA, 25 bp, Artificial
  probe
  misc_feature (1)..(25): SEQ ID NO: 2862; WAN024EWD_at; Start 441; Stop 465
tgttcccgagagtattttggaggaa

SEQ ID NO: 184958 - DNA, 25 bp, Artificial
  probe
  misc_feature (1)..(25): SEQ ID NO: 2862; WAN024EWD_at; Start 2; Stop 26
tgtcagataagattggcttattcac

SEQ ID NO: 184959 - DNA, 25 bp, Artificial
  probe
  misc_feature (1)..(25): SEQ ID NO: 2862; WAN024EWD_at; Start 12; Stop 36
gattggcttattcacaggctcattt

SEQ ID NO: 184960 - DNA, 25 bp, Artificial
  probe
  misc_feature (1)..(25): SEQ ID NO: 2862; WAN024EWD_at; Start 37; Stop 61
gatccgatgacaaatgggcatctgg

SEQ ID NO: 184961 - DNA, 25 bp, Artificial
  probe
  misc_feature (1)..(25): SEQ ID NO: 2862; WAN024EWD_at; Start 26; Stop 50
caggctcatttgatccgatgacaaa

SEQ ID NO: 184962 - DNA, 25 bp, Artificial
  probe
  misc_feature (1)..(25): SEQ ID NO: 2862; WAN024EWD_at; Start 330; Stop 354
gctgtcttctgatatagagactatt

SEQ ID NO: 184963 - DNA, 25 bp, Artificial
  probe
  misc_feature (1)..(25): SEQ ID NO: 2862; WAN024EWD_at; Start 440; Stop 464
atgttcccgagagtattttggagga

SEQ ID NO: 184964 - DNA, 25 bp, Artificial
  probe
  misc_feature (1)..(25): SEQ ID NO: 2862; WAN024EWD_at; Start 9; Stop 33
taagattggcttattcacaggctca

SEQ ID NO: 184965 - DNA, 25 bp, Artificial
  probe
  misc_feature (1)..(25): SEQ ID NO: 2862; WAN024EWD_at; Start 373; Stop 397
gaacatctctatatcagttcatcag

SEQ ID NO: 184966 - DNA, 25 bp, Artificial
  probe
  misc_feature (1)..(25): SEQ ID NO: 2862; WAN024EWD_at; Start 313; Stop 337
gattactacaatcatcagctgtctt

SEQ ID NO: 184967 - DNA, 25 bp, Artificial
  probe
  misc_feature (1)..(25): SEQ ID NO: 2862; WAN024EWD_at; Start 316; Stop 340
tactacaatcatcagctgtcttctg

SEQ ID NO: 184968 - DNA, 25 bp, Artificial
  probe
  misc_feature (1)..(25): SEQ ID NO: 2862; WAN024EWD_at; Start 34; Stop 58
tttgatccgatgacaaatgggcatc

SEQ ID NO: 184969 - DNA, 25 bp, Artificial
  probe
  misc_feature (1)..(25): SEQ ID NO: 2862; WAN024EWD_at; Start 10; Stop 34
aagattggcttattcacaggctcat

SEQ ID NO: 184970 - DNA, 25 bp, Artificial
  probe
  misc_feature (1)..(25): SEQ ID NO: 2914; WAN024EWE_at; Start 604; Stop 628
ttggcgtcacgtactttgggaacac

SEQ ID NO: 184971 - DNA, 25 bp, Artificial
  probe
  misc_feature (1)..(25): SEQ ID NO: 2914; WAN024EWE_at; Start 399; Stop 423
tatttcaaaatcagttgaccgtgtc

SEQ ID NO: 184972 - DNA, 25 bp, Artificial
  probe
  misc_feature (1)..(25): SEQ ID NO: 2914; WAN024EWE_at; Start 531; Stop 555
cgtaacaacatggattggtattgcc

SEQ ID NO: 184973 - DNA, 25 bp, Artificial
  probe
  misc_feature (1)..(25): SEQ ID NO: 2914; WAN024EWE_at; Start 302; Stop 326
acggtgtctggttcggagctcgtaa

SEQ ID NO: 184974 - DNA, 25 bp, Artificial
  probe
  misc_feature (1)..(25): SEQ ID NO: 2914; WAN024EWE_at; Start 816; Stop 840
caatgcttacttgttctggattcca

SEQ ID NO: 184975 - DNA, 25 bp, Artificial
  probe
  misc_feature (1)..(25): SEQ ID NO: 2914; WAN024EWE_at; Start 898; Stop 922
gatgctagtgatccacgtacacata

SEQ ID NO: 184976 - DNA, 25 bp, Artificial
  probe
  misc_feature (1)..(25): SEQ ID NO: 2914; WAN024EWE_at; Start 830; Stop 854
tctggattccattgacaacccttgt

SEQ ID NO: 184977 - DNA, 25 bp, Artificial
  probe
  misc_feature (1)..(25): SEQ ID NO: 2914; WAN024EWE_at; Start 755; Stop 779
taccgattacagtgccaagtttggg

SEQ ID NO: 184978 - DNA, 25 bp, Artificial
  probe
  misc_feature (1)..(25): SEQ ID NO: 2914; WAN024EWE_at; Start 558; Stop 582
catgatccgtgtgcaaatcttgcgc

SEQ ID NO: 184979 - DNA, 25 bp, Artificial
  probe
  misc_feature (1)..(25): SEQ ID NO: 2914; WAN024EWE_at; Start 589; Stop 613
gacttggaatacaacttggcgtcac

SEQ ID NO: 184980 - DNA, 25 bp, Artificial
  probe
  misc_feature (1)..(25): SEQ ID NO: 2914; WAN024EWE_at; Start 348; Stop 372
tgcgacagtgattaacttggttatc

SEQ ID NO: 184981 - DNA, 25 bp, Artificial
  probe
  misc_feature (1)..(25): SEQ ID NO: 2914; WAN024EWE_at; Start 547; Stop 571
ggtattgccttcatgatccgtgtgc

SEQ ID NO: 184982 - DNA, 25 bp, Artificial
  probe
  misc_feature (1)..(25): SEQ ID NO: 2914; WAN024EWE_at; Start 491; Stop 515
caatcggagctggattctggaatct

SEQ ID NO: 184983 - DNA, 25 bp, Artificial
  probe
  misc_feature (1)..(25): SEQ ID NO: 2914; WAN024EWE_at; Start 479; Stop 503
tcttgacttactcaatcggagctgg

SEQ ID NO: 184984 - DNA, 25 bp, Artificial
  probe
  misc_feature (1)..(25): SEQ ID NO: 2914; WAN024EWE_at; Start 288; Stop 312
taaatcgctctttgacggtgtctgg

SEQ ID NO: 184985 - DNA, 25 bp, Artificial
  probe
  misc_feature (1)..(25): SEQ ID NO: 2914; WAN024EWE_at; Start 843; Stop 867
gacaacccttgtcttggtatccttg

SEQ ID NO: 184986 - DNA, 25 bp, Artificial
  probe
  misc_feature (1)..(25): SEQ ID NO: 2914; WAN024EWE_at; Start 330; Stop 354
catcctcatttctgtgattgcgaca

SEQ ID NO: 184987 - DNA, 25 bp, Artificial
  probe
  misc_feature (1)..(25): SEQ ID NO: 2914; WAN024EWE_at; Start 639; Stop 663
gattgttgccaaaaatatcatgcct

SEQ ID NO: 184988 - DNA, 25 bp, Artificial
  probe
  misc_feature (1)..(25): SEQ ID NO: 2914; WAN024EWE_at; Start 256; Stop 280
gcggagcattggttcggtactgaca

SEQ ID NO: 184989 - DNA, 25 bp, Artificial
  probe
  misc_feature (1)..(25): SEQ ID NO: 2914; WAN024EWE_at; Start 510; Stop 534
gaatctgatttttgccatgagcgta

SEQ ID NO: 184990 - DNA, 25 bp, Artificial
  probe
  misc_feature (1)..(25): SEQ ID NO: 2914; WAN024EWE_at; Start 880; Stop 904
gttggtcaaaacttagcggatgcta

SEQ ID NO: 184991 - DNA, 25 bp, Artificial
  probe
  misc_feature (1)..(25): SEQ ID NO: 2914; WAN024EWE_at; Start 67; Stop 91
gatgcgccagcatattcttactgga

SEQ ID NO: 184992 - DNA, 25 bp, Artificial
  probe
  misc_feature (1)..(25): SEQ ID NO: 2914; WAN024EWE_at; Start 799; Stop 823
tcacaaaacgtaacaaccaatgctt

SEQ ID NO: 184993 - DNA, 25 bp, Artificial
  probe
  misc_feature (1)..(25): SEQ ID NO: 2914; WAN024EWE_at; Start 52; Stop 76
gcctctgaaactattgatgcgccag

SEQ ID NO: 184994 - DNA, 25 bp, Artificial
  probe
  misc_feature (1)..(25): SEQ ID NO: 2914; WAN024EWE_at; Start 135; Stop 159
catgttgggaatcttggtagccatc

SEQ ID NO: 184995 - DNA, 25 bp, Artificial
  probe
  misc_feature (1)..(25): SEQ ID NO: 2914; WAN024EWE_at; Start 204; Stop 228
caatgatgtcagcaaggtaaacgac

SEQ ID NO: 184996 - DNA, 25 bp, Artificial
  probe
  misc_feature (1)..(25): SEQ ID NO: 2914; WAN024EWE_at; Start 701; Stop 725
tgcttccaagctttatctcatacga

SEQ ID NO: 184997 - DNA, 25 bp, Artificial
  probe
  misc_feature (1)..(25): SEQ ID NO: 2914; WAN024EWE_at; Start 619; Stop 643
ttgggaacaccaaccttgaagattg

SEQ ID NO: 184998 - DNA, 25 bp, Artificial
  probe
  misc_feature (1)..(25): SEQ ID NO: 2914; WAN024EWE_at; Start 37; Stop 61
aaacgtgacgattttgcctctgaaa

SEQ ID NO: 184999 - DNA, 25 bp, Artificial
  probe
  misc_feature (1)..(25): SEQ ID NO: 2914; WAN024EWE_at; Start 572; Stop 596
aaatcttgcgctatcgtgacttgga

SEQ ID NO: 185000 - DNA, 25 bp, Artificial
  probe
  misc_feature (1)..(25): SEQ ID NO: 2914; WAN024EWE_at; Start 239; Stop 263
gttatatcaagccaaatgcggagca

SEQ ID NO: 185001 - DNA, 25 bp, Artificial
  probe
  misc_feature (1)..(25): SEQ ID NO: 2914; WAN024EWE_at; Start 417; Stop 441
ccgtgtcatgatggaagtttacaac

SEQ ID NO: 185002 - DNA, 25 bp, Artificial
  probe
  misc_feature (1)..(25): SEQ ID NO: 2914; WAN024EWE_at; Start 273; Stop 297
tactgacagtaacggtaaatcgctc

SEQ ID NO: 185003 - DNA, 25 bp, Artificial
  probe
  misc_feature (1)..(25): SEQ ID NO: 2914; WAN024EWE_at; Start 681; Stop 705
tgtgacaaccatgactcaaatgctt

SEQ ID NO: 185004 - DNA, 25 bp, Artificial
  probe
  misc_feature (1)..(25): SEQ ID NO: 6888; WAN024EWF_at; Start 75; Stop 99
tctgggattggtaccgctgaaagca

SEQ ID NO: 185005 - DNA, 25 bp, Artificial
  probe
  misc_feature (1)..(25): SEQ ID NO: 6888; WAN024EWF_at; Start 66; Stop 90
aaaattggatctgggattggtaccg

SEQ ID NO: 185006 - DNA, 25 bp, Artificial
  probe
  misc_feature (1)..(25): SEQ ID NO: 6888; WAN024EWF_at; Start 1; Stop 25
atggcttatcagtctcatagtcgtg

SEQ ID NO: 185007 - DNA, 25 bp, Artificial
  probe
  misc_feature (1)..(25): SEQ ID NO: 6888; WAN024EWF_at; Start 68; Stop 92
aattggatctgggattggtaccgct

SEQ ID NO: 185008 - DNA, 25 bp, Artificial
  probe
  misc_feature (1)..(25): SEQ ID NO: 6888; WAN024EWF_at; Start 80; Stop 104
gattggtaccgctgaaagcaaggct

SEQ ID NO: 185009 - DNA, 25 bp, Artificial
  probe
  misc_feature (1)..(25): SEQ ID NO: 6888; WAN024EWF_at; Start 32; Stop 56
tggatcgtaaaccttcaagaccttc

SEQ ID NO: 185010 - DNA, 25 bp, Artificial
  probe
  misc_feature (1)..(25): SEQ ID NO: 6888; WAN024EWF_at; Start 86; Stop 110
taccgctgaaagcaaggcttgagta

SEQ ID NO: 185011 - DNA, 25 bp, Artificial
  probe
  misc_feature (1)..(25): SEQ ID NO: 6888; WAN024EWF_at; Start 28; Stop 52
gacttggatcgtaaaccttcaagac

SEQ ID NO: 185012 - DNA, 25 bp, Artificial
  probe
  misc_feature (1)..(25): SEQ ID NO: 6888; WAN024EWF_at; Start 55; Stop 79
tcttacgttccaaaattggatctgg

SEQ ID NO: 185013 - DNA, 25 bp, Artificial
  probe
  misc_feature (1)..(25): SEQ ID NO: 6888; WAN024EWF_at; Start 70; Stop 94
ttggatctgggattggtaccgctga

SEQ ID NO: 185014 - DNA, 25 bp, Artificial
  probe
  misc_feature (1)..(25): SEQ ID NO: 6888; WAN024EWF_at; Start 58; Stop 82
tacgttccaaaattggatctgggat

SEQ ID NO: 185015 - DNA, 25 bp, Artificial
  probe
  misc_feature (1)..(25): SEQ ID NO: 6888; WAN024EWF_at; Start 98; Stop 122
caaggcttgagtatatgggtgaatt

SEQ ID NO: 185016 - DNA, 25 bp, Artificial
  probe
  misc_feature (1)..(25): SEQ ID NO: 6888; WAN024EWF_at; Start 105; Stop 129
tgagtatatgggtgaattggattgt

SEQ ID NO: 185017 - DNA, 25 bp, Artificial
  probe
  misc_feature (1)..(25): SEQ ID NO: 6888; WAN024EWF_at; Start 13; Stop 37
tctcatagtcgtgttgacttggatc

SEQ ID NO: 185018 - DNA, 25 bp, Artificial
  probe
  misc_feature (1)..(25): SEQ ID NO: 6888; WAN024EWF_at; Start 89; Stop 113
cgctgaaagcaaggcttgagtatat

SEQ ID NO: 185019 - DNA, 25 bp, Artificial
  probe
  misc_feature (1)..(25): SEQ ID NO: 6888; WAN024EWF_at; Start 83; Stop 107
tggtaccgctgaaagcaaggcttga

SEQ ID NO: 185020 - DNA, 25 bp, Artificial
  probe
  misc_feature (1)..(25): SEQ ID NO: 6888; WAN024EWF_at; Start 82; Stop 106
ttggtaccgctgaaagcaaggcttg

SEQ ID NO: 185021 - DNA, 25 bp, Artificial
  probe
  misc_feature (1)..(25): SEQ ID NO: 6888; WAN024EWF_at; Start 26; Stop 50
ttgacttggatcgtaaaccttcaag

SEQ ID NO: 185022 - DNA, 25 bp, Artificial
  probe
  misc_feature (1)..(25): SEQ ID NO: 6888; WAN024EWF_at; Start 16; Stop 40
catagtcgtgttgacttggatcgta

SEQ ID NO: 185023 - DNA, 25 bp, Artificial
  probe
  misc_feature (1)..(25): SEQ ID NO: 6888; WAN024EWF_at; Start 24; Stop 48
tgttgacttggatcgtaaaccttca

SEQ ID NO: 185024 - DNA, 25 bp, Artificial
  probe
  misc_feature (1)..(25): SEQ ID NO: 6888; WAN024EWF_at; Start 10; Stop 34
cagtctcatagtcgtgttgacttgg

SEQ ID NO: 185025 - DNA, 25 bp, Artificial
  probe
  misc_feature (1)..(25): SEQ ID NO: 6888; WAN024EWF_at; Start 88; Stop 112
ccgctgaaagcaaggcttgagtata

SEQ ID NO: 185026 - DNA, 25 bp, Artificial
  probe
  misc_feature (1)..(25): SEQ ID NO: 6888; WAN024EWF_at; Start 102; Stop 126
gcttgagtatatgggtgaattggat

SEQ ID NO: 185027 - DNA, 25 bp, Artificial
  probe
  misc_feature (1)..(25): SEQ ID NO: 6888; WAN024EWF_at; Start 21; Stop 45
tcgtgttgacttggatcgtaaacct

SEQ ID NO: 185028 - DNA, 25 bp, Artificial
  probe
  misc_feature (1)..(25): SEQ ID NO: 6888; WAN024EWF_at; Start 94; Stop 118
aaagcaaggcttgagtatatgggtg

SEQ ID NO: 185029 - DNA, 25 bp, Artificial
  probe
  misc_feature (1)..(25): SEQ ID NO: 6888; WAN024EWF_at; Start 76; Stop 100
ctgggattggtaccgctgaaagcaa

SEQ ID NO: 185030 - DNA, 25 bp, Artificial
  probe
  misc_feature (1)..(25): SEQ ID NO: 6888; WAN024EWF_at; Start 19; Stop 43
agtcgtgttgacttggatcgtaaac

SEQ ID NO: 185031 - DNA, 25 bp, Artificial
  probe
  misc_feature (1)..(25): SEQ ID NO: 6888; WAN024EWF_at; Start 96; Stop 120
agcaaggcttgagtatatgggtgaa

SEQ ID NO: 185032 - DNA, 25 bp, Artificial
  probe
  misc_feature (1)..(25): SEQ ID NO: 6888; WAN024EWF_at; Start 7; Stop 31
tatcagtctcatagtcgtgttgact

SEQ ID NO: 185033 - DNA, 25 bp, Artificial
  probe
  misc_feature (1)..(25): SEQ ID NO: 6888; WAN024EWF_at; Start 84; Stop 108
ggtaccgctgaaagcaaggcttgag

SEQ ID NO: 185034 - DNA, 25 bp, Artificial
  probe
  misc_feature (1)..(25): SEQ ID NO: 6888; WAN024EWF_at; Start 73; Stop 97
gatctgggattggtaccgctgaaag

SEQ ID NO: 185035 - DNA, 25 bp, Artificial
  probe
  misc_feature (1)..(25): SEQ ID NO: 6888; WAN024EWF_at; Start 4; Stop 28
gcttatcagtctcatagtcgtgttg

SEQ ID NO: 185036 - DNA, 25 bp, Artificial
  probe
  misc_feature (1)..(25): SEQ ID NO: 6888; WAN024EWF_at; Start 65; Stop 89
caaaattggatctgggattggtacc

SEQ ID NO: 185037 - DNA, 25 bp, Artificial
  probe
  misc_feature (1)..(25): SEQ ID NO: 6888; WAN024EWF_at; Start 72; Stop 96
ggatctgggattggtaccgctgaaa

SEQ ID NO: 185038 - DNA, 25 bp, Artificial
  probe
  misc_feature (1)..(25): SEQ ID NO: 1714; WAN024EWG_at; Start 205; Stop 229
ttcctcctagtcagccagatgggca

SEQ ID NO: 185039 - DNA, 25 bp, Artificial
  probe
  misc_feature (1)..(25): SEQ ID NO: 1714; WAN024EWG_at; Start 226; Stop 250
ggcaaatcccattttttcacggatc

SEQ ID NO: 185040 - DNA, 25 bp, Artificial
  probe
  misc_feature (1)..(25): SEQ ID NO: 1714; WAN024EWG_at; Start 155; Stop 179
cgaaggaaatttctaaatctttgat

SEQ ID NO: 185041 - DNA, 25 bp, Artificial
  probe
  misc_feature (1)..(25): SEQ ID NO: 1714; WAN024EWG_at; Start 199; Stop 223
atttccttcctcctagtcagccaga

SEQ ID NO: 185042 - DNA, 25 bp, Artificial
  probe
  misc_feature (1)..(25): SEQ ID NO: 1714; WAN024EWG_at; Start 29; Stop 53
gaccgatgatagcacgaccaatagt

SEQ ID NO: 185043 - DNA, 25 bp, Artificial
  probe
  misc_feature (1)..(25): SEQ ID NO: 1714; WAN024EWG_at; Start 212; Stop 236
tagtcagccagatgggcaaatccca

SEQ ID NO: 185044 - DNA, 25 bp, Artificial
  probe
  misc_feature (1)..(25): SEQ ID NO: 1714; WAN024EWG_at; Start 235; Stop 259
cattttttcacggatcttatcatgg

SEQ ID NO: 185045 - DNA, 25 bp, Artificial
  probe
  misc_feature (1)..(25): SEQ ID NO: 1714; WAN024EWG_at; Start 309; Stop 333
gaagccaagttttagcccaatgtgt

SEQ ID NO: 185046 - DNA, 25 bp, Artificial
  probe
  misc_feature (1)..(25): SEQ ID NO: 1714; WAN024EWG_at; Start 33; Stop 57
gatgatagcacgaccaatagttgtt

SEQ ID NO: 185047 - DNA, 25 bp, Artificial
  probe
  misc_feature (1)..(25): SEQ ID NO: 1714; WAN024EWG_at; Start 41; Stop 65
cacgaccaatagttgttttcccact

SEQ ID NO: 185048 - DNA, 25 bp, Artificial
  probe
  misc_feature (1)..(25): SEQ ID NO: 1714; WAN024EWG_at; Start 85; Stop 109
gagaaagtttctcccttgttgataa

SEQ ID NO: 185049 - DNA, 25 bp, Artificial
  probe
  misc_feature (1)..(25): SEQ ID NO: 1714; WAN024EWG_at; Start 10; Stop 34
ccattacttgtatcatttagaccga

SEQ ID NO: 185050 - DNA, 25 bp, Artificial
  probe
  misc_feature (1)..(25): SEQ ID NO: 1714; WAN024EWG_at; Start 293; Stop 317
ggagcatcctcatgaagaagccaag

SEQ ID NO: 185051 - DNA, 25 bp, Artificial
  probe
  misc_feature (1)..(25): SEQ ID NO: 1714; WAN024EWG_at; Start 261; Stop 285
gatttgcaatcacagctggtttttc

SEQ ID NO: 185052 - DNA, 25 bp, Artificial
  probe
  misc_feature (1)..(25): SEQ ID NO: 1714; WAN024EWG_at; Start 111; Stop 135
gaagttagcatttttaaccgcgaca

SEQ ID NO: 185053 - DNA, 25 bp, Artificial
  probe
  misc_feature (1)..(25): SEQ ID NO: 1714; WAN024EWG_at; Start 194; Stop 218
cagacatttccttcctcctagtcag

SEQ ID NO: 185054 - DNA, 25 bp, Artificial
  probe
  misc_feature (1)..(25): SEQ ID NO: 1714; WAN024EWG_at; Start 315; Stop 339
aagttttagcccaatgtgtctctga

SEQ ID NO: 185055 - DNA, 25 bp, Artificial
  probe
  misc_feature (1)..(25): SEQ ID NO: 1714; WAN024EWG_at; Start 306; Stop 330
gaagaagccaagttttagcccaatg

SEQ ID NO: 185056 - DNA, 25 bp, Artificial
  probe
  misc_feature (1)..(25): SEQ ID NO: 1714; WAN024EWG_at; Start 63; Stop 87
actaccggactcacctacaagcgag

SEQ ID NO: 185057 - DNA, 25 bp, Artificial
  probe
  misc_feature (1)..(25): SEQ ID NO: 1714; WAN024EWG_at; Start 302; Stop 326
tcatgaagaagccaagttttagccc

SEQ ID NO: 185058 - DNA, 25 bp, Artificial
  probe
  misc_feature (1)..(25): SEQ ID NO: 1714; WAN024EWG_at; Start 38; Stop 62
tagcacgaccaatagttgttttccc

SEQ ID NO: 185059 - DNA, 25 bp, Artificial
  probe
  misc_feature (1)..(25): SEQ ID NO: 1714; WAN024EWG_at; Start 73; Stop 97
tcacctacaagcgagaaagtttctc

SEQ ID NO: 185060 - DNA, 25 bp, Artificial
  probe
  misc_feature (1)..(25): SEQ ID NO: 1714; WAN024EWG_at; Start 97; Stop 121
cccttgttgataaagaagttagcat

SEQ ID NO: 185061 - DNA, 25 bp, Artificial
  probe
  misc_feature (1)..(25): SEQ ID NO: 1714; WAN024EWG_at; Start 266; Stop 290
gcaatcacagctggtttttctactt

SEQ ID NO: 185062 - DNA, 25 bp, Artificial
  probe
  misc_feature (1)..(25): SEQ ID NO: 1714; WAN024EWG_at; Start 25; Stop 49
tttagaccgatgatagcacgaccaa

SEQ ID NO: 185063 - DNA, 25 bp, Artificial
  probe
  misc_feature (1)..(25): SEQ ID NO: 1714; WAN024EWG_at; Start 181; Stop 205
tctactaatttttcagacatttcct

SEQ ID NO: 185064 - DNA, 25 bp, Artificial
  probe
  misc_feature (1)..(25): SEQ ID NO: 1714; WAN024EWG_at; Start 209; Stop 233
tcctagtcagccagatgggcaaatc

SEQ ID NO: 185065 - DNA, 25 bp, Artificial
  probe
  misc_feature (1)..(25): SEQ ID NO: 1714; WAN024EWG_at; Start 129; Stop 153
cgcgacaaacttcttacttccttca

SEQ ID NO: 185066 - DNA, 25 bp, Artificial
  probe
  misc_feature (1)..(25): SEQ ID NO: 1714; WAN024EWG_at; Start 243; Stop 267
cacggatcttatcatggagatttgc

SEQ ID NO: 185067 - DNA, 25 bp, Artificial
  probe
  misc_feature (1)..(25): SEQ ID NO: 1714; WAN024EWG_at; Start 67; Stop 91
ccggactcacctacaagcgagaaag

SEQ ID NO: 185068 - DNA, 25 bp, Artificial
  probe
  misc_feature (1)..(25): SEQ ID NO: 1714; WAN024EWG_at; Start 252; Stop 276
tatcatggagatttgcaatcacagc

SEQ ID NO: 185069 - DNA, 25 bp, Artificial
  probe
  misc_feature (1)..(25): SEQ ID NO: 1714; WAN024EWG_at; Start 296; Stop 320
gcatcctcatgaagaagccaagttt

SEQ ID NO: 185070 - DNA, 25 bp, Artificial
  probe
  misc_feature (1)..(25): SEQ ID NO: 1714; WAN024EWG_at; Start 23; Stop 47
catttagaccgatgatagcacgacc

SEQ ID NO: 185071 - DNA, 25 bp, Artificial
  probe
  misc_feature (1)..(25): SEQ ID NO: 1714; WAN024EWG_at; Start 257; Stop 281
tggagatttgcaatcacagctggtt

SEQ ID NO: 185072 - DNA, 25 bp, Artificial
  probe
  misc_feature (1)..(25): SEQ ID NO: 4985; WAN024EWH_at; Start 74; Stop 98
gcaataacgatacgttgacgcattc

SEQ ID NO: 185073 - DNA, 25 bp, Artificial
  probe
  misc_feature (1)..(25): SEQ ID NO: 4985; WAN024EWH_at; Start 25; Stop 49
tgttggctcatcacagatcaagaca

SEQ ID NO: 185074 - DNA, 25 bp, Artificial
  probe
  misc_feature (1)..(25): SEQ ID NO: 4985; WAN024EWH_at; Start 234; Stop 258
tctgactaccaattgttttaatggg

SEQ ID NO: 185075 - DNA, 25 bp, Artificial
  probe
  misc_feature (1)..(25): SEQ ID NO: 4985; WAN024EWH_at; Start 82; Stop 106
gatacgttgacgcattcctccagaa

SEQ ID NO: 185076 - DNA, 25 bp, Artificial
  probe
  misc_feature (1)..(25): SEQ ID NO: 4985; WAN024EWH_at; Start 309; Stop 333
gaatttgttcccaatccttgtgaga

SEQ ID NO: 185077 - DNA, 25 bp, Artificial
  probe
  misc_feature (1)..(25): SEQ ID NO: 4985; WAN024EWH_at; Start 175; Stop 199
ggccaattctttcgcttctttagct

SEQ ID NO: 185078 - DNA, 25 bp, Artificial
  probe
  misc_feature (1)..(25): SEQ ID NO: 4985; WAN024EWH_at; Start 30; Stop 54
gctcatcacagatcaagacatcagg

SEQ ID NO: 185079 - DNA, 25 bp, Artificial
  probe
  misc_feature (1)..(25): SEQ ID NO: 4985; WAN024EWH_at; Start 262; Stop 286
caaactagtcattgggtcctggaag

SEQ ID NO: 185080 - DNA, 25 bp, Artificial
  probe
  misc_feature (1)..(25): SEQ ID NO: 4985; WAN024EWH_at; Start 2; Stop 26
tgaatagttacatccaaggcagttg

SEQ ID NO: 185081 - DNA, 25 bp, Artificial
  probe
  misc_feature (1)..(25): SEQ ID NO: 4985; WAN024EWH_at; Start 219; Stop 243
caataacttctgtaatctgactacc

SEQ ID NO: 185082 - DNA, 25 bp, Artificial
  probe
  misc_feature (1)..(25): SEQ ID NO: 4985; WAN024EWH_at; Start 166; Stop 190
gtagtcaatggccaattctttcgct

SEQ ID NO: 185083 - DNA, 25 bp, Artificial
  probe
  misc_feature (1)..(25): SEQ ID NO: 4985; WAN024EWH_at; Start 48; Stop 72
catcaggtcggcaggcaagggcaat

SEQ ID NO: 185084 - DNA, 25 bp, Artificial
  probe
  misc_feature (1)..(25): SEQ ID NO: 4985; WAN024EWH_at; Start 146; Stop 170
ggaatgccaaccttattcatgtagt

SEQ ID NO: 185085 - DNA, 25 bp, Artificial
  probe
  misc_feature (1)..(25): SEQ ID NO: 4985; WAN024EWH_at; Start 286; Stop 310
gatagtcgcaatcttagcaccacga

SEQ ID NO: 185086 - DNA, 25 bp, Artificial
  probe
  misc_feature (1)..(25): SEQ ID NO: 4985; WAN024EWH_at; Start 156; Stop 180
ccttattcatgtagtcaatggccaa

SEQ ID NO: 185087 - DNA, 25 bp, Artificial
  probe
  misc_feature (1)..(25): SEQ ID NO: 4985; WAN024EWH_at; Start 110; Stop 134
tggaatgggtattcattaaaacgtc

SEQ ID NO: 185088 - DNA, 25 bp, Artificial
  probe
  misc_feature (1)..(25): SEQ ID NO: 4985; WAN024EWH_at; Start 291; Stop 315
tcgcaatcttagcaccacgaatttg

SEQ ID NO: 185089 - DNA, 25 bp, Artificial
  probe
  misc_feature (1)..(25): SEQ ID NO: 4985; WAN024EWH_at; Start 315; Stop 339
gttcccaatccttgtgagaagataa

SEQ ID NO: 185090 - DNA, 25 bp, Artificial
  probe
  misc_feature (1)..(25): SEQ ID NO: 4985; WAN024EWH_at; Start 137; Stop 161
tctgcgtctggaatgccaaccttat

SEQ ID NO: 185091 - DNA, 25 bp, Artificial
  probe
  misc_feature (1)..(25): SEQ ID NO: 4985; WAN024EWH_at; Start 274; Stop 298
tgggtcctggaagatagtcgcaatc

SEQ ID NO: 185092 - DNA, 25 bp, Artificial
  probe
  misc_feature (1)..(25): SEQ ID NO: 4985; WAN024EWH_at; Start 20; Stop 44
gcagttgttggctcatcacagatca

SEQ ID NO: 185093 - DNA, 25 bp, Artificial
  probe
  misc_feature (1)..(25): SEQ ID NO: 4985; WAN024EWH_at; Start 98; Stop 122
cctccagaatattggaatgggtatt

SEQ ID NO: 185094 - DNA, 25 bp, Artificial
  probe
  misc_feature (1)..(25): SEQ ID NO: 4985; WAN024EWH_at; Start 187; Stop 211
cgcttctttagctgtttttccttgg

SEQ ID NO: 185095 - DNA, 25 bp, Artificial
  probe
  misc_feature (1)..(25): SEQ ID NO: 4985; WAN024EWH_at; Start 123; Stop 147
cattaaaacgtctatctgcgtctgg

SEQ ID NO: 185096 - DNA, 25 bp, Artificial
  probe
  misc_feature (1)..(25): SEQ ID NO: 4985; WAN024EWH_at; Start 297; Stop 321
tcttagcaccacgaatttgttccca

SEQ ID NO: 185097 - DNA, 25 bp, Artificial
  probe
  misc_feature (1)..(25): SEQ ID NO: 4985; WAN024EWH_at; Start 90; Stop 114
gacgcattcctccagaatattggaa

SEQ ID NO: 185098 - DNA, 25 bp, Artificial
  probe
  misc_feature (1)..(25): SEQ ID NO: 4985; WAN024EWH_at; Start 258; Stop 282
ggtccaaactagtcattgggtcctg

SEQ ID NO: 185099 - DNA, 25 bp, Artificial
  probe
  misc_feature (1)..(25): SEQ ID NO: 4985; WAN024EWH_at; Start 10; Stop 34
tacatccaaggcagttgttggctca

SEQ ID NO: 185100 - DNA, 25 bp, Artificial
  probe
  misc_feature (1)..(25): SEQ ID NO: 4985; WAN024EWH_at; Start 35; Stop 59
tcacagatcaagacatcaggtcggc

SEQ ID NO: 185101 - DNA, 25 bp, Artificial
  probe
  misc_feature (1)..(25): SEQ ID NO: 4985; WAN024EWH_at; Start 42; Stop 66
tcaagacatcaggtcggcaggcaag

SEQ ID NO: 185102 - DNA, 25 bp, Artificial
  probe
  misc_feature (1)..(25): SEQ ID NO: 4985; WAN024EWH_at; Start 16; Stop 40
caaggcagttgttggctcatcacag

SEQ ID NO: 185103 - DNA, 25 bp, Artificial
  probe
  misc_feature (1)..(25): SEQ ID NO: 4985; WAN024EWH_at; Start 271; Stop 295
cattgggtcctggaagatagtcgca

SEQ ID NO: 185104 - DNA, 25 bp, Artificial
  probe
  misc_feature (1)..(25): SEQ ID NO: 4985; WAN024EWH_at; Start 131; Stop 155
cgtctatctgcgtctggaatgccaa

SEQ ID NO: 185105 - DNA, 25 bp, Artificial
  probe
  misc_feature (1)..(25): SEQ ID NO: 4985; WAN024EWH_at; Start 206; Stop 230
ccttggtgttttacaataacttctg

SEQ ID NO: 185106 - DNA, 25 bp, Artificial
  probe
  misc_feature (1)..(25): SEQ ID NO: 1305; WAN024EWI_at; Start 935; Stop 959
cagtatcagagacacattgggctaa

SEQ ID NO: 185107 - DNA, 25 bp, Artificial
  probe
  misc_feature (1)..(25): SEQ ID NO: 1305; WAN024EWI_at; Start 994; Stop 1018
gaaaaaccagctgtgattgcaaatc

SEQ ID NO: 185108 - DNA, 25 bp, Artificial
  probe
  misc_feature (1)..(25): SEQ ID NO: 1305; WAN024EWI_at; Start 882; Stop 906
gcgttctgactacgcaatgcagatt

SEQ ID NO: 185109 - DNA, 25 bp, Artificial
  probe
  misc_feature (1)..(25): SEQ ID NO: 1305; WAN024EWI_at; Start 307; Stop 331
gacccaatgactagtttggacccca

SEQ ID NO: 185110 - DNA, 25 bp, Artificial
  probe
  misc_feature (1)..(25): SEQ ID NO: 1305; WAN024EWI_at; Start 652; Stop 676
cacgaccttggtgtggtggcaagta

SEQ ID NO: 185111 - DNA, 25 bp, Artificial
  probe
  misc_feature (1)..(25): SEQ ID NO: 1305; WAN024EWI_at; Start 475; Stop 499
caatattctggaggaatgcgtcaac

SEQ ID NO: 185112 - DNA, 25 bp, Artificial
  probe
  misc_feature (1)..(25): SEQ ID NO: 1305; WAN024EWI_at; Start 1012; Stop 1036
gcaaatctccatgataagatccgtg

SEQ ID NO: 185113 - DNA, 25 bp, Artificial
  probe
  misc_feature (1)..(25): SEQ ID NO: 1305; WAN024EWI_at; Start 832; Stop 856
ggaacacctccgtcactttatactg

SEQ ID NO: 185114 - DNA, 25 bp, Artificial
  probe
  misc_feature (1)..(25): SEQ ID NO: 1305; WAN024EWI_at; Start 903; Stop 927
gattgacttcgaacaaaaagctcct

SEQ ID NO: 185115 - DNA, 25 bp, Artificial
  probe
  misc_feature (1)..(25): SEQ ID NO: 1305; WAN024EWI_at; Start 220; Stop 244
gactaccgtggtcaggacttgacag

SEQ ID NO: 185116 - DNA, 25 bp, Artificial
  probe
  misc_feature (1)..(25): SEQ ID NO: 1305; WAN024EWI_at; Start 446; Stop 470
cagatagacgttttaatgaataccc

SEQ ID NO: 185117 - DNA, 25 bp, Artificial
  probe
  misc_feature (1)..(25): SEQ ID NO: 1305; WAN024EWI_at; Start 411; Stop 435
cattgactacatgaataaggttggc

SEQ ID NO: 185118 - DNA, 25 bp, Artificial
  probe
  misc_feature (1)..(25): SEQ ID NO: 1305; WAN024EWI_at; Start 254; Stop 278
ctcacaaggattgggaacaaattcg

SEQ ID NO: 185119 - DNA, 25 bp, Artificial
  probe
  misc_feature (1)..(25): SEQ ID NO: 1305; WAN024EWI_at; Start 867; Stop 891
ggatgcttttgccttgcgttctgac

SEQ ID NO: 185120 - DNA, 25 bp, Artificial
  probe
  misc_feature (1)..(25): SEQ ID NO: 1305; WAN024EWI_at; Start 394; Stop 418
gaagcgaaagaattggccattgact

SEQ ID NO: 185121 - DNA, 25 bp, Artificial
  probe
  misc_feature (1)..(25): SEQ ID NO: 1305; WAN024EWI_at; Start 545; Stop 569
tctgtgatgagccaacaactgcctt

SEQ ID NO: 185122 - DNA, 25 bp, Artificial
  probe
  misc_feature (1)..(25): SEQ ID NO: 1305; WAN024EWI_at; Start 735; Stop 759
ggaagtcttctatgaccctcgccat

SEQ ID NO: 185123 - DNA, 25 bp, Artificial
  probe
  misc_feature (1)..(25): SEQ ID NO: 1305; WAN024EWI_at; Start 431; Stop 455
ttggcattccagacgcagatagacg

SEQ ID NO: 185124 - DNA, 25 bp, Artificial
  probe
  misc_feature (1)..(25): SEQ ID NO: 1305; WAN024EWI_at; Start 86; Stop 110
gcggcgtttcccttgaactagtcga

SEQ ID NO: 185125 - DNA, 25 bp, Artificial
  probe
  misc_feature (1)..(25): SEQ ID NO: 1305; WAN024EWI_at; Start 272; Stop 296
aaattcgtggtgctaagattgcgac

SEQ ID NO: 185126 - DNA, 25 bp, Artificial
  probe
  misc_feature (1)..(25): SEQ ID NO: 1305; WAN024EWI_at; Start 1043; Stop 1067
tgggatttgcccatctggctgacta

SEQ ID NO: 185127 - DNA, 25 bp, Artificial
  probe
  misc_feature (1)..(25): SEQ ID NO: 1305; WAN024EWI_at; Start 14; Stop 38
aaaatgtaattttgactgctcgcga

SEQ ID NO: 185128 - DNA, 25 bp, Artificial
  probe
  misc_feature (1)..(25): SEQ ID NO: 1305; WAN024EWI_at; Start 27; Stop 51
gactgctcgcgatattgtcgtggaa

SEQ ID NO: 185129 - DNA, 25 bp, Artificial
  probe
  misc_feature (1)..(25): SEQ ID NO: 1305; WAN024EWI_at; Start 721; Stop 745
tatggaacggttgaggaagtcttct

SEQ ID NO: 185130 - DNA, 25 bp, Artificial
  probe
  misc_feature (1)..(25): SEQ ID NO: 1305; WAN024EWI_at; Start 239; Stop 263
tgacagctttatcttctcacaagga

SEQ ID NO: 185131 - DNA, 25 bp, Artificial
  probe
  misc_feature (1)..(25): SEQ ID NO: 1305; WAN024EWI_at; Start 122; Stop 146
tagccttggtaggtgagtcaggatc

SEQ ID NO: 185132 - DNA, 25 bp, Artificial
  probe
  misc_feature (1)..(25): SEQ ID NO: 1305; WAN024EWI_at; Start 671; Stop 695
caagtattgcggataaggtagcggt

SEQ ID NO: 185133 - DNA, 25 bp, Artificial
  probe
  misc_feature (1)..(25): SEQ ID NO: 1305; WAN024EWI_at; Start 102; Stop 126
actagtcgaaggagaagtattagcc

SEQ ID NO: 185134 - DNA, 25 bp, Artificial
  probe
  misc_feature (1)..(25): SEQ ID NO: 1305; WAN024EWI_at; Start 67; Stop 91
aaagtattgacagccattcgcggcg

SEQ ID NO: 185135 - DNA, 25 bp, Artificial
  probe
  misc_feature (1)..(25): SEQ ID NO: 1305; WAN024EWI_at; Start 560; Stop 584
caactgccttggatgtaactattca

SEQ ID NO: 185136 - DNA, 25 bp, Artificial
  probe
  misc_feature (1)..(25): SEQ ID NO: 1305; WAN024EWI_at; Start 919; Stop 943
aaagctcctcaattctcagtatcag

SEQ ID NO: 185137 - DNA, 25 bp, Artificial
  probe
  misc_feature (1)..(25): SEQ ID NO: 1305; WAN024EWI_at; Start 691; Stop 715
gcggttatgtatgcaggagaaatcg

SEQ ID NO: 185138 - DNA, 25 bp, Artificial
  probe
  misc_feature (1)..(25): SEQ ID NO: 1305; WAN024EWI_at; Start 959; Stop 983
aaacttggcttcttcatgaggatgc

SEQ ID NO: 185139 - DNA, 25 bp, Artificial
  probe
  misc_feature (1)..(25): SEQ ID NO: 1305; WAN024EWI_at; Start 520; Stop 544
cttgcctgccgacctgatgtcttga

SEQ ID NO: 185140 - DNA, 25 bp, Artificial
  probe
  misc_feature (1)..(25): SEQ ID NO: 2930; WAN024EWJ_at; Start 225; Stop 249
taagaaatcgcgtgaacaagctgcg

SEQ ID NO: 185141 - DNA, 25 bp, Artificial
  probe
  misc_feature (1)..(25): SEQ ID NO: 2930; WAN024EWJ_at; Start 241; Stop 265
caagctgcggaattgattcgtcgaa

SEQ ID NO: 185142 - DNA, 25 bp, Artificial
  probe
  misc_feature (1)..(25): SEQ ID NO: 2930; WAN024EWJ_at; Start 750; Stop 774
gctttcagcggtaccaatcccagat

SEQ ID NO: 185143 - DNA, 25 bp, Artificial
  probe
  misc_feature (1)..(25): SEQ ID NO: 2930; WAN024EWJ_at; Start 849; Stop 873
tatggtagaaatccgtccaggtcac

SEQ ID NO: 185144 - DNA, 25 bp, Artificial
  probe
  misc_feature (1)..(25): SEQ ID NO: 2930; WAN024EWJ_at; Start 472; Stop 496
cgtatcggtattgcccgtgccttgg

SEQ ID NO: 185145 - DNA, 25 bp, Artificial
  probe
  misc_feature (1)..(25): SEQ ID NO: 2930; WAN024EWJ_at; Start 820; Stop 844
caacacgactatgagactgataagc

SEQ ID NO: 185146 - DNA, 25 bp, Artificial
  probe
  misc_feature (1)..(25): SEQ ID NO: 2930; WAN024EWJ_at; Start 457; Stop 481
ggcggtcaacgtcaacgtatcggta

SEQ ID NO: 185147 - DNA, 25 bp, Artificial
  probe
  misc_feature (1)..(25): SEQ ID NO: 2930; WAN024EWJ_at; Start 691; Stop 715
gaggttgcagaaacagaagaattgt

SEQ ID NO: 185148 - DNA, 25 bp, Artificial
  probe
  misc_feature (1)..(25): SEQ ID NO: 2930; WAN024EWJ_at; Start 93; Stop 117
tatcaacaagggagaaactttctcg

SEQ ID NO: 185149 - DNA, 25 bp, Artificial
  probe
  misc_feature (1)..(25): SEQ ID NO: 2930; WAN024EWJ_at; Start 736; Stop 760
tatactcaagccttgctttcagcgg

SEQ ID NO: 185150 - DNA, 25 bp, Artificial
  probe
  misc_feature (1)..(25): SEQ ID NO: 2930; WAN024EWJ_at; Start 283; Stop 307
gaccctgccgcaagtttgaatgaac

SEQ ID NO: 185151 - DNA, 25 bp, Artificial
  probe
  misc_feature (1)..(25): SEQ ID NO: 2930; WAN024EWJ_at; Start 138; Stop 162
tgggaaaacaactattggtcgtgct

SEQ ID NO: 185152 - DNA, 25 bp, Artificial
  probe
  misc_feature (1)..(25): SEQ ID NO: 2930; WAN024EWJ_at; Start 152; Stop 176
ttggtcgtgctatcatcggtctaaa

SEQ ID NO: 185153 - DNA, 25 bp, Artificial
  probe
  misc_feature (1)..(25): SEQ ID NO: 2930; WAN024EWJ_at; Start 296; Stop 320
gtttgaatgaacgtgcgactgttga

SEQ ID NO: 185154 - DNA, 25 bp, Artificial
  probe
  misc_feature (1)..(25): SEQ ID NO: 2930; WAN024EWJ_at; Start 625; Stop 649
catgacttgtcggttgttcgcttta

SEQ ID NO: 185155 - DNA, 25 bp, Artificial
  probe
  misc_feature (1)..(25): SEQ ID NO: 2930; WAN024EWJ_at; Start 506; Stop 530
cagactttgttattgcagatgagcc

SEQ ID NO: 185156 - DNA, 25 bp, Artificial
  probe
  misc_feature (1)..(25): SEQ ID NO: 2930; WAN024EWJ_at; Start 269; Stop 293
agatgattttccaagaccctgccgc

SEQ ID NO: 185157 - DNA, 25 bp, Artificial
  probe
  misc_feature (1)..(25): SEQ ID NO: 2930; WAN024EWJ_at; Start 675; Stop 699
caagggtgttattgtagaggttgca

SEQ ID NO: 185158 - DNA, 25 bp, Artificial
  probe
  misc_feature (1)..(25): SEQ ID NO: 2930; WAN024EWJ_at; Start 331; Stop 355
tctgaaggtctttacaatcaccgtt

SEQ ID NO: 185159 - DNA, 25 bp, Artificial
  probe
  misc_feature (1)..(25): SEQ ID NO: 2930; WAN024EWJ_at; Start 866; Stop 890
caggtcactatgtttgggcgaacca

SEQ ID NO: 185160 - DNA, 25 bp, Artificial
  probe
  misc_feature (1)..(25): SEQ ID NO: 2930; WAN024EWJ_at; Start 110; Stop 134
ctttctcgcttgtaggtgagtccgg

SEQ ID NO: 185161 - DNA, 25 bp, Artificial
  probe
  misc_feature (1)..(25): SEQ ID NO: 2930; WAN024EWJ_at; Start 48; Stop 72
tgaaggaagtaagaagtttgtcgcg

SEQ ID NO: 185162 - DNA, 25 bp, Artificial
  probe
  misc_feature (1)..(25): SEQ ID NO: 2930; WAN024EWJ_at; Start 643; Stop 667
cgctttatttcagatcgtatcgcag

SEQ ID NO: 185163 - DNA, 25 bp, Artificial
  probe
  misc_feature (1)..(25): SEQ ID NO: 2930; WAN024EWJ_at; Start 406; Stop 430
gaagtaggtcttcttgctgagcact

SEQ ID NO: 185164 - DNA, 25 bp, Artificial
  probe
  misc_feature (1)..(25): SEQ ID NO: 2930; WAN024EWJ_at; Start 547; Stop 571
gtttctgtacgtgcccaagtcttga

SEQ ID NO: 185165 - DNA, 25 bp, Artificial
  probe
  misc_feature (1)..(25): SEQ ID NO: 2930; WAN024EWJ_at; Start 490; Stop 514
gccttggtcatgcaaccagactttg

SEQ ID NO: 185166 - DNA, 25 bp, Artificial
  probe
  misc_feature (1)..(25): SEQ ID NO: 2930; WAN024EWJ_at; Start 441; Stop 465
ccctcatgaattctcaggcggtcaa

SEQ ID NO: 185167 - DNA, 25 bp, Artificial
  probe
  misc_feature (1)..(25): SEQ ID NO: 2930; WAN024EWJ_at; Start 66; Stop 90
tgtcgcggttaaaaatgctaacttc

SEQ ID NO: 185168 - DNA, 25 bp, Artificial
  probe
  misc_feature (1)..(25): SEQ ID NO: 2930; WAN024EWJ_at; Start 424; Stop 448
gagcacttgactcgttaccctcatg

SEQ ID NO: 185169 - DNA, 25 bp, Artificial
  probe
  misc_feature (1)..(25): SEQ ID NO: 2930; WAN024EWJ_at; Start 167; Stop 191
tcggtctaaatgatacaagtaatgg

SEQ ID NO: 185170 - DNA, 25 bp, Artificial
  probe
  misc_feature (1)..(25): SEQ ID NO: 2930; WAN024EWJ_at; Start 523; Stop 547
gatgagccaatttcagccttggacg

SEQ ID NO: 185171 - DNA, 25 bp, Artificial
  probe
  misc_feature (1)..(25): SEQ ID NO: 2930; WAN024EWJ_at; Start 349; Stop 373
caccgtttatttaaggatgaagaag

SEQ ID NO: 185172 - DNA, 25 bp, Artificial
  probe
  misc_feature (1)..(25): SEQ ID NO: 2930; WAN024EWJ_at; Start 605; Stop 629
tgacctatctcttcatcgcccatga

SEQ ID NO: 185173 - DNA, 25 bp, Artificial
  probe
  misc_feature (1)..(25): SEQ ID NO: 2930; WAN024EWJ_at; Start 658; Stop 682
cgtatcgcagttatttacaagggtg

SEQ ID NO: 185174 - DNA, 25 bp, Artificial
  probe
  misc_feature (1)..(25): SEQ ID NO: 3904; WAN024EWK_at; Start 27; Stop 51
tttcaaaagcaaagctgtcaatggc

SEQ ID NO: 185175 - DNA, 25 bp, Artificial
  probe
  misc_feature (1)..(25): SEQ ID NO: 3904; WAN024EWK_at; Start 1; Stop 25
gtgaatatccgtcagtgtttcctca

SEQ ID NO: 185176 - DNA, 25 bp, Artificial
  probe
  misc_feature (1)..(25): SEQ ID NO: 3904; WAN024EWK_at; Start 9; Stop 33
ccgtcagtgtttcctcattttcaaa

SEQ ID NO: 185177 - DNA, 25 bp, Artificial
  probe
  misc_feature (1)..(25): SEQ ID NO: 3904; WAN024EWK_at; Start 153; Stop 177
tccctcgctgagtagtattaaagag

SEQ ID NO: 185178 - DNA, 25 bp, Artificial
  probe
  misc_feature (1)..(25): SEQ ID NO: 3904; WAN024EWK_at; Start 63; Stop 87
gcccattttcaataccatccagagg

SEQ ID NO: 185179 - DNA, 25 bp, Artificial
  probe
  misc_feature (1)..(25): SEQ ID NO: 3904; WAN024EWK_at; Start 49; Stop 73
ggcatactccaaacgcccattttca

SEQ ID NO: 185180 - DNA, 25 bp, Artificial
  probe
  misc_feature (1)..(25): SEQ ID NO: 3904; WAN024EWK_at; Start 108; Stop 132
gagattcctgagacaaaagattttc

SEQ ID NO: 185181 - DNA, 25 bp, Artificial
  probe
  misc_feature (1)..(25): SEQ ID NO: 3904; WAN024EWK_at; Start 13; Stop 37
cagtgtttcctcattttcaaaagca

SEQ ID NO: 185182 - DNA, 25 bp, Artificial
  probe
  misc_feature (1)..(25): SEQ ID NO: 3904; WAN024EWK_at; Start 138; Stop 162
gctggtaagaaaccttccctcgctg

SEQ ID NO: 185183 - DNA, 25 bp, Artificial
  probe
  misc_feature (1)..(25): SEQ ID NO: 3904; WAN024EWK_at; Start 195; Stop 219
gaggccagaccagcatatccaaata

SEQ ID NO: 185184 - DNA, 25 bp, Artificial
  probe
  misc_feature (1)..(25): SEQ ID NO: 3904; WAN024EWK_at; Start 105; Stop 129
caggagattcctgagacaaaagatt

SEQ ID NO: 185185 - DNA, 25 bp, Artificial
  probe
  misc_feature (1)..(25): SEQ ID NO: 3904; WAN024EWK_at; Start 121; Stop 145
caaaagattttcaatccgctggtaa

SEQ ID NO: 185186 - DNA, 25 bp, Artificial
  probe
  misc_feature (1)..(25): SEQ ID NO: 3904; WAN024EWK_at; Start 150; Stop 174
ccttccctcgctgagtagtattaaa

SEQ ID NO: 185187 - DNA, 25 bp, Artificial
  probe
  misc_feature (1)..(25): SEQ ID NO: 3904; WAN024EWK_at; Start 20; Stop 44
tcctcattttcaaaagcaaagctgt

SEQ ID NO: 185188 - DNA, 25 bp, Artificial
  probe
  misc_feature (1)..(25): SEQ ID NO: 3904; WAN024EWK_at; Start 193; Stop 217
aagaggccagaccagcatatccaaa

SEQ ID NO: 185189 - DNA, 25 bp, Artificial
  probe
  misc_feature (1)..(25): SEQ ID NO: 3904; WAN024EWK_at; Start 156; Stop 180
ctcgctgagtagtattaaagaggaa

SEQ ID NO: 185190 - DNA, 25 bp, Artificial
  probe
  misc_feature (1)..(25): SEQ ID NO: 3904; WAN024EWK_at; Start 69; Stop 93
tttcaataccatccagaggaaactc

SEQ ID NO: 185191 - DNA, 25 bp, Artificial
  probe
  misc_feature (1)..(25): SEQ ID NO: 3904; WAN024EWK_at; Start 131; Stop 155
tcaatccgctggtaagaaaccttcc

SEQ ID NO: 185192 - DNA, 25 bp, Artificial
  probe
  misc_feature (1)..(25): SEQ ID NO: 3904; WAN024EWK_at; Start 95; Stop 119
gggtcttgtacaggagattcctgag

SEQ ID NO: 185193 - DNA, 25 bp, Artificial
  probe
  misc_feature (1)..(25): SEQ ID NO: 3904; WAN024EWK_at; Start 124; Stop 148
aagattttcaatccgctggtaagaa

SEQ ID NO: 185194 - DNA, 25 bp, Artificial
  probe
  misc_feature (1)..(25): SEQ ID NO: 3904; WAN024EWK_at; Start 213; Stop 237
ccaaatagctgataaaggtgactag

SEQ ID NO: 185195 - DNA, 25 bp, Artificial
  probe
  misc_feature (1)..(25): SEQ ID NO: 3904; WAN024EWK_at; Start 43; Stop 67
gtcaatggcatactccaaacgccca

SEQ ID NO: 185196 - DNA, 25 bp, Artificial
  probe
  misc_feature (1)..(25): SEQ ID NO: 3904; WAN024EWK_at; Start 210; Stop 234
tatccaaatagctgataaaggtgac

SEQ ID NO: 185197 - DNA, 25 bp, Artificial
  probe
  misc_feature (1)..(25): SEQ ID NO: 3904; WAN024EWK_at; Start 117; Stop 141
gagacaaaagattttcaatccgctg

SEQ ID NO: 185198 - DNA, 25 bp, Artificial
  probe
  misc_feature (1)..(25): SEQ ID NO: 3904; WAN024EWK_at; Start 3; Stop 27
gaatatccgtcagtgtttcctcatt

SEQ ID NO: 185199 - DNA, 25 bp, Artificial
  probe
  misc_feature (1)..(25): SEQ ID NO: 3904; WAN024EWK_at; Start 200; Stop 224
cagaccagcatatccaaatagctga

SEQ ID NO: 185200 - DNA, 25 bp, Artificial
  probe
  misc_feature (1)..(25): SEQ ID NO: 3904; WAN024EWK_at; Start 197; Stop 221
ggccagaccagcatatccaaatagc

SEQ ID NO: 185201 - DNA, 25 bp, Artificial
  probe
  misc_feature (1)..(25): SEQ ID NO: 3904; WAN024EWK_at; Start 146; Stop 170
gaaaccttccctcgctgagtagtat

SEQ ID NO: 185202 - DNA, 25 bp, Artificial
  probe
  misc_feature (1)..(25): SEQ ID NO: 3904; WAN024EWK_at; Start 31; Stop 55
aaaagcaaagctgtcaatggcatac

SEQ ID NO: 185203 - DNA, 25 bp, Artificial
  probe
  misc_feature (1)..(25): SEQ ID NO: 3904; WAN024EWK_at; Start 140; Stop 164
tggtaagaaaccttccctcgctgag

SEQ ID NO: 185204 - DNA, 25 bp, Artificial
  probe
  misc_feature (1)..(25): SEQ ID NO: 3904; WAN024EWK_at; Start 35; Stop 59
gcaaagctgtcaatggcatactcca

SEQ ID NO: 185205 - DNA, 25 bp, Artificial
  probe
  misc_feature (1)..(25): SEQ ID NO: 3904; WAN024EWK_at; Start 98; Stop 122
tcttgtacaggagattcctgagaca

SEQ ID NO: 185206 - DNA, 25 bp, Artificial
  probe
  misc_feature (1)..(25): SEQ ID NO: 3904; WAN024EWK_at; Start 39; Stop 63
agctgtcaatggcatactccaaacg

SEQ ID NO: 185207 - DNA, 25 bp, Artificial
  probe
  misc_feature (1)..(25): SEQ ID NO: 3904; WAN024EWK_at; Start 144; Stop 168
aagaaaccttccctcgctgagtagt

SEQ ID NO: 185208 - DNA, 25 bp, Artificial
  probe
  misc_feature (1)..(25): SEQ ID NO: 2887; WAN024EWL_at; Start 1659; Stop 1683
cgaagacttgctagctttggatggc

SEQ ID NO: 185209 - DNA, 25 bp, Artificial
  probe
  misc_feature (1)..(25): SEQ ID NO: 2887; WAN024EWL_at; Start 243; Stop 267
ccttgggacctcttattgcttggga

SEQ ID NO: 185210 - DNA, 25 bp, Artificial
  probe
  misc_feature (1)..(25): SEQ ID NO: 2887; WAN024EWL_at; Start 50; Stop 74
gttatctagtcggaattgtggccct

SEQ ID NO: 185211 - DNA, 25 bp, Artificial
  probe
  misc_feature (1)..(25): SEQ ID NO: 2887; WAN024EWL_at; Start 1073; Stop 1097
tggcaaaagggcaaacactgggctt

SEQ ID NO: 185212 - DNA, 25 bp, Artificial
  probe
  misc_feature (1)..(25): SEQ ID NO: 2887; WAN024EWL_at; Start 1302; Stop 1326
taacttgcccctttcagcggtcgag

SEQ ID NO: 185213 - DNA, 25 bp, Artificial
  probe
  misc_feature (1)..(25): SEQ ID NO: 2887; WAN024EWL_at; Start 382; Stop 406
actcgtttagcaggtggcggtgtca

SEQ ID NO: 185214 - DNA, 25 bp, Artificial
  probe
  misc_feature (1)..(25): SEQ ID NO: 2887; WAN024EWL_at; Start 525; Stop 549
tagtcgcctagggagaaagactcat

SEQ ID NO: 185215 - DNA, 25 bp, Artificial
  probe
  misc_feature (1)..(25): SEQ ID NO: 2887; WAN024EWL_at; Start 1033; Stop 1057
tttgaaaatgaggaaacactgacgg

SEQ ID NO: 185216 - DNA, 25 bp, Artificial
  probe
  misc_feature (1)..(25): SEQ ID NO: 2887; WAN024EWL_at; Start 601; Stop 625
caggagtccgtatcaggtatcaaag

SEQ ID NO: 185217 - DNA, 25 bp, Artificial
  probe
  misc_feature (1)..(25): SEQ ID NO: 2887; WAN024EWL_at; Start 1432; Stop 1456
caacggttggctatgagtcgggcta

SEQ ID NO: 185218 - DNA, 25 bp, Artificial
  probe
  misc_feature (1)..(25): SEQ ID NO: 2887; WAN024EWL_at; Start 1194; Stop 1218
tattcgggactatcgtctgacagac

SEQ ID NO: 185219 - DNA, 25 bp, Artificial
  probe
  misc_feature (1)..(25): SEQ ID NO: 2887; WAN024EWL_at; Start 1315; Stop 1339
tcagcggtcgaggaagctactaagc

SEQ ID NO: 185220 - DNA, 25 bp, Artificial
  probe
  misc_feature (1)..(25): SEQ ID NO: 2887; WAN024EWL_at; Start 1525; Stop 1549
gcgattatcgacaacctcaaggaga

SEQ ID NO: 185221 - DNA, 25 bp, Artificial
  probe
  misc_feature (1)..(25): SEQ ID NO: 2887; WAN024EWL_at; Start 1677; Stop 1701
ggatggctggtatgcccaaacctac

SEQ ID NO: 185222 - DNA, 25 bp, Artificial
  probe
  misc_feature (1)..(25): SEQ ID NO: 2887; WAN024EWL_at; Start 629; Stop 653
ccaagtctttcggttatcaggcaga

SEQ ID NO: 185223 - DNA, 25 bp, Artificial
  probe
  misc_feature (1)..(25): SEQ ID NO: 2887; WAN024EWL_at; Start 847; Stop 871
tatttggatatgctggtctggcctc

SEQ ID NO: 185224 - DNA, 25 bp, Artificial
  probe
  misc_feature (1)..(25): SEQ ID NO: 2887; WAN024EWL_at; Start 405; Stop 429
catgtctgcggtggatgcctctatc

SEQ ID NO: 185225 - DNA, 25 bp, Artificial
  probe
  misc_feature (1)..(25): SEQ ID NO: 2887; WAN024EWL_at; Start 343; Stop 367
gatctgatggcacacgcaaccaatg

SEQ ID NO: 185226 - DNA, 25 bp, Artificial
  probe
  misc_feature (1)..(25): SEQ ID NO: 2887; WAN024EWL_at; Start 325; Stop 349
caaacctatcggacgggtgatctga

SEQ ID NO: 185227 - DNA, 25 bp, Artificial
  probe
  misc_feature (1)..(25): SEQ ID NO: 2887; WAN024EWL_at; Start 587; Stop 611
tcaataacaaggtacaggagtccgt

SEQ ID NO: 185228 - DNA, 25 bp, Artificial
  probe
  misc_feature (1)..(25): SEQ ID NO: 2887; WAN024EWL_at; Start 1502; Stop 1526
ccgtagatgccaagacagagtatgc

SEQ ID NO: 185229 - DNA, 25 bp, Artificial
  probe
  misc_feature (1)..(25): SEQ ID NO: 2887; WAN024EWL_at; Start 1486; Stop 1510
gatgattccttatccgccgtagatg

SEQ ID NO: 185230 - DNA, 25 bp, Artificial
  probe
  misc_feature (1)..(25): SEQ ID NO: 2887; WAN024EWL_at; Start 429; Stop 453
cacggctctggtgactttgttgacc

SEQ ID NO: 185231 - DNA, 25 bp, Artificial
  probe
  misc_feature (1)..(25): SEQ ID NO: 2887; WAN024EWL_at; Start 897; Stop 921
tactactcagcgagggaaggtttct

SEQ ID NO: 185232 - DNA, 25 bp, Artificial
  probe
  misc_feature (1)..(25): SEQ ID NO: 2887; WAN024EWL_at; Start 1351; Stop 1375
taccaagatattgtagacatgcctc

SEQ ID NO: 185233 - DNA, 25 bp, Artificial
  probe
  misc_feature (1)..(25): SEQ ID NO: 2887; WAN024EWL_at; Start 259; Stop 283
tgcttgggacagatcatgcggtctc

SEQ ID NO: 185234 - DNA, 25 bp, Artificial
  probe
  misc_feature (1)..(25): SEQ ID NO: 2887; WAN024EWL_at; Start 1229; Stop 1253
tcatgggctatgttcctcaggacca

SEQ ID NO: 185235 - DNA, 25 bp, Artificial
  probe
  misc_feature (1)..(25): SEQ ID NO: 2887; WAN024EWL_at; Start 1008; Stop 1032
ggagtatgccattgacagctttgct

SEQ ID NO: 185236 - DNA, 25 bp, Artificial
  probe
  misc_feature (1)..(25): SEQ ID NO: 2887; WAN024EWL_at; Start 912; Stop 936
gaaggtttcttaccagcggattgaa

SEQ ID NO: 185237 - DNA, 25 bp, Artificial
  probe
  misc_feature (1)..(25): SEQ ID NO: 2887; WAN024EWL_at; Start 659; Stop 683
tgaagtcttttcaggcagtcaatga

SEQ ID NO: 185238 - DNA, 25 bp, Artificial
  probe
  misc_feature (1)..(25): SEQ ID NO: 2887; WAN024EWL_at; Start 1086; Stop 1110
aacactgggcttggttgggcagaca

SEQ ID NO: 185239 - DNA, 25 bp, Artificial
  probe
  misc_feature (1)..(25): SEQ ID NO: 2887; WAN024EWL_at; Start 1179; Stop 1203
tctaaacggtcacgatattcgggac

SEQ ID NO: 185240 - DNA, 25 bp, Artificial
  probe
  misc_feature (1)..(25): SEQ ID NO: 2887; WAN024EWL_at; Start 547; Stop 571
cataaggcctttggcgaatcccaag

SEQ ID NO: 185241 - DNA, 25 bp, Artificial
  probe
  misc_feature (1)..(25): SEQ ID NO: 2887; WAN024EWL_at; Start 1134; Stop 1158
caagctcctcttgcgtgaatacgat

SEQ ID NO: 185242 - DNA, 25 bp, Artificial
  probe
  misc_feature (1)..(25): SEQ ID NO: 3362; WAN024EWM_at; Start 325; Stop 349
gaattgcccttgatttacgcaggag

SEQ ID NO: 185243 - DNA, 25 bp, Artificial
  probe
  misc_feature (1)..(25): SEQ ID NO: 3362; WAN024EWM_at; Start 218; Stop 242
tggctgggcttggtgaaaaacaact

SEQ ID NO: 185244 - DNA, 25 bp, Artificial
  probe
  misc_feature (1)..(25): SEQ ID NO: 3362; WAN024EWM_at; Start 369; Stop 393
caagttggctgaggaatatttagac

SEQ ID NO: 185245 - DNA, 25 bp, Artificial
  probe
  misc_feature (1)..(25): SEQ ID NO: 3362; WAN024EWM_at; Start 355; Stop 379
tcttcaaaacgtcgcaagttggctg

SEQ ID NO: 185246 - DNA, 25 bp, Artificial
  probe
  misc_feature (1)..(25): SEQ ID NO: 3362; WAN024EWM_at; Start 199; Stop 223
tatcttgaaggtcaagaagtggctg

SEQ ID NO: 185247 - DNA, 25 bp, Artificial
  probe
  misc_feature (1)..(25): SEQ ID NO: 3362; WAN024EWM_at; Start 451; Stop 475
aagcaacgtgtagccattgcgcgtg

SEQ ID NO: 185248 - DNA, 25 bp, Artificial
  probe
  misc_feature (1)..(25): SEQ ID NO: 3362; WAN024EWM_at; Start 279; Stop 303
tcagcagttctttcttctatcgaag

SEQ ID NO: 185249 - DNA, 25 bp, Artificial
  probe
  misc_feature (1)..(25): SEQ ID NO: 3362; WAN024EWM_at; Start 125; Stop 149
gaccatctgggtctggtaagtccac

SEQ ID NO: 185250 - DNA, 25 bp, Artificial
  probe
  misc_feature (1)..(25): SEQ ID NO: 3362; WAN024EWM_at; Start 605; Stop 629
cgcatgagcctgagattgctgccta

SEQ ID NO: 185251 - DNA, 25 bp, Artificial
  probe
  misc_feature (1)..(25): SEQ ID NO: 3362; WAN024EWM_at; Start 84; Stop 108
caatctagaagtgaatgagggtgaa

SEQ ID NO: 185252 - DNA, 25 bp, Artificial
  probe
  misc_feature (1)..(25): SEQ ID NO: 3362; WAN024EWM_at; Start 111; Stop 135
tgtagccatcatgggaccatctggg

SEQ ID NO: 185253 - DNA, 25 bp, Artificial
  probe
  misc_feature (1)..(25): SEQ ID NO: 3362; WAN024EWM_at; Start 159; Stop 183
tacgattggcatgttggatacacca

SEQ ID NO: 185254 - DNA, 25 bp, Artificial
  probe
  misc_feature (1)..(25): SEQ ID NO: 3362; WAN024EWM_at; Start 139; Stop 163
ggtaagtccactctgatgaatacga

SEQ ID NO: 185255 - DNA, 25 bp, Artificial
  probe
  misc_feature (1)..(25): SEQ ID NO: 3362; WAN024EWM_at; Start 405; Stop 429
gacagaacgtagtcaccatttacct

SEQ ID NO: 185256 - DNA, 25 bp, Artificial
  probe
  misc_feature (1)..(25): SEQ ID NO: 3362; WAN024EWM_at; Start 182; Stop 206
caaccagtggagaatattatcttga

SEQ ID NO: 185257 - DNA, 25 bp, Artificial
  probe
  misc_feature (1)..(25): SEQ ID NO: 3362; WAN024EWM_at; Start 660; Stop 684
ggtcatttcgtctgacagtgctcag

SEQ ID NO: 185258 - DNA, 25 bp, Artificial
  probe
  misc_feature (1)..(25): SEQ ID NO: 3362; WAN024EWM_at; Start 518; Stop 542
caggagccttggataccaaaacagg

SEQ ID NO: 185259 - DNA, 25 bp, Artificial
  probe
  misc_feature (1)..(25): SEQ ID NO: 3362; WAN024EWM_at; Start 340; Stop 364
tacgcaggagtttcgtcttcaaaac

SEQ ID NO: 185260 - DNA, 25 bp, Artificial
  probe
  misc_feature (1)..(25): SEQ ID NO: 3362; WAN024EWM_at; Start 96; Stop 120
gaatgagggtgaatttgtagccatc

SEQ ID NO: 185261 - DNA, 25 bp, Artificial
  probe
  misc_feature (1)..(25): SEQ ID NO: 3362; WAN024EWM_at; Start 533; Stop 557
ccaaaacaggtaaccaaattatgca

SEQ ID NO: 185262 - DNA, 25 bp, Artificial
  probe
  misc_feature (1)..(25): SEQ ID NO: 3362; WAN024EWM_at; Start 591; Stop 615
cattatcatggtaacgcatgagcct

SEQ ID NO: 185263 - DNA, 25 bp, Artificial
  probe
  misc_feature (1)..(25): SEQ ID NO: 3362; WAN024EWM_at; Start 675; Stop 699
cagtgctcagttaggaaaggaggaa

SEQ ID NO: 185264 - DNA, 25 bp, Artificial
  probe
  misc_feature (1)..(25): SEQ ID NO: 3362; WAN024EWM_at; Start 172; Stop 196
ttggatacaccaaccagtggagaat

SEQ ID NO: 185265 - DNA, 25 bp, Artificial
  probe
  misc_feature (1)..(25): SEQ ID NO: 3362; WAN024EWM_at; Start 309; Stop 333
tgctctgcaaaatgtagaattgccc

SEQ ID NO: 185266 - DNA, 25 bp, Artificial
  probe
  misc_feature (1)..(25): SEQ ID NO: 3362; WAN024EWM_at; Start 484; Stop 508
aacaatccttctattatcctagcgg

SEQ ID NO: 185267 - DNA, 25 bp, Artificial
  probe
  misc_feature (1)..(25): SEQ ID NO: 3362; WAN024EWM_at; Start 576; Stop 600
taaagaaggaaaaaccattatcatg

SEQ ID NO: 185268 - DNA, 25 bp, Artificial
  probe
  misc_feature (1)..(25): SEQ ID NO: 3362; WAN024EWM_at; Start 468; Stop 492
tgcgcgtgccttggtaaacaatcct

SEQ ID NO: 185269 - DNA, 25 bp, Artificial
  probe
  misc_feature (1)..(25): SEQ ID NO: 3362; WAN024EWM_at; Start 498; Stop 522
tatcctagcggatgaaccgacagga

SEQ ID NO: 185270 - DNA, 25 bp, Artificial
  probe
  misc_feature (1)..(25): SEQ ID NO: 3362; WAN024EWM_at; Start 294; Stop 318
tctatcgaagctcaatgctctgcaa

SEQ ID NO: 185271 - DNA, 25 bp, Artificial
  probe
  misc_feature (1)..(25): SEQ ID NO: 3362; WAN024EWM_at; Start 427; Stop 451
ccttcagaattatctggtggtcaaa

SEQ ID NO: 185272 - DNA, 25 bp, Artificial
  probe
  misc_feature (1)..(25): SEQ ID NO: 3362; WAN024EWM_at; Start 635; Stop 659
aacgtcagattgtcattcgggatgg

SEQ ID NO: 185273 - DNA, 25 bp, Artificial
  probe
  misc_feature (1)..(25): SEQ ID NO: 3362; WAN024EWM_at; Start 510; Stop 534
tgaaccgacaggagccttggatacc

SEQ ID NO: 185274 - DNA, 25 bp, Artificial
  probe
  misc_feature (1)..(25): SEQ ID NO: 3362; WAN024EWM_at; Start 65; Stop 89
tgcaggttctcaaaaatatcaatct

SEQ ID NO: 185275 - DNA, 25 bp, Artificial
  probe
  misc_feature (1)..(25): SEQ ID NO: 3362; WAN024EWM_at; Start 389; Stop 413
tagacaaggttgaattgacagaacg

SEQ ID NO: 185276 - DNA, 25 bp, Artificial
  probe
  misc_feature (1)..(25): SEQ ID NO: 7289; WAN024EWN_at; Start 114; Stop 138
tctacctgcacagcctgaatactgg

SEQ ID NO: 185277 - DNA, 25 bp, Artificial
  probe
  misc_feature (1)..(25): SEQ ID NO: 7289; WAN024EWN_at; Start 96; Stop 120
gggacatgcccatttccatctacct

SEQ ID NO: 185278 - DNA, 25 bp, Artificial
  probe
  misc_feature (1)..(25): SEQ ID NO: 7289; WAN024EWN_at; Start 258; Stop 282
acctttttcacatctgcaggaataa

SEQ ID NO: 185279 - DNA, 25 bp, Artificial
  probe
  misc_feature (1)..(25): SEQ ID NO: 7289; WAN024EWN_at; Start 202; Stop 226
caactttgtcaatcgcttccagcag

SEQ ID NO: 185280 - DNA, 25 bp, Artificial
  probe
  misc_feature (1)..(25): SEQ ID NO: 7289; WAN024EWN_at; Start 107; Stop 131
atttccatctacctgcacagcctga

SEQ ID NO: 185281 - DNA, 25 bp, Artificial
  probe
  misc_feature (1)..(25): SEQ ID NO: 7289; WAN024EWN_at; Start 185; Stop 209
ttgaaccaagtccaagccaactttg

SEQ ID NO: 185282 - DNA, 25 bp, Artificial
  probe
  misc_feature (1)..(25): SEQ ID NO: 7289; WAN024EWN_at; Start 170; Stop 194
cacctgaccgtgaacttgaaccaag

SEQ ID NO: 185283 - DNA, 25 bp, Artificial
  probe
  misc_feature (1)..(25): SEQ ID NO: 7289; WAN024EWN_at; Start 121; Stop 145
gcacagcctgaatactggcacaagg

SEQ ID NO: 185284 - DNA, 25 bp, Artificial
  probe
  misc_feature (1)..(25): SEQ ID NO: 7289; WAN024EWN_at; Start 131; Stop 155
aatactggcacaaggcaaattctca

SEQ ID NO: 185285 - DNA, 25 bp, Artificial
  probe
  misc_feature (1)..(25): SEQ ID NO: 7289; WAN024EWN_at; Start 5; Stop 29
tagtccagtcgtatccagttgaccc

SEQ ID NO: 185286 - DNA, 25 bp, Artificial
  probe
  misc_feature (1)..(25): SEQ ID NO: 7289; WAN024EWN_at; Start 175; Stop 199
gaccgtgaacttgaaccaagtccaa

SEQ ID NO: 185287 - DNA, 25 bp, Artificial
  probe
  misc_feature (1)..(25): SEQ ID NO: 7289; WAN024EWN_at; Start 30; Stop 54
caatcaaagggctggccacttcctg

SEQ ID NO: 185288 - DNA, 25 bp, Artificial
  probe
  misc_feature (1)..(25): SEQ ID NO: 7289; WAN024EWN_at; Start 127; Stop 151
cctgaatactggcacaaggcaaatt

SEQ ID NO: 185289 - DNA, 25 bp, Artificial
  probe
  misc_feature (1)..(25): SEQ ID NO: 7289; WAN024EWN_at; Start 228; Stop 252
tctacccgacttggtgaaacaaata

SEQ ID NO: 185290 - DNA, 25 bp, Artificial
  probe
  misc_feature (1)..(25): SEQ ID NO: 7289; WAN024EWN_at; Start 237; Stop 261
cttggtgaaacaaatactccaacct

SEQ ID NO: 185291 - DNA, 25 bp, Artificial
  probe
  misc_feature (1)..(25): SEQ ID NO: 7289; WAN024EWN_at; Start 71; Stop 95
gagtagataatctgcctgagaattg

SEQ ID NO: 185292 - DNA, 25 bp, Artificial
  probe
  misc_feature (1)..(25): SEQ ID NO: 7289; WAN024EWN_at; Start 208; Stop 232
tgtcaatcgcttccagcagttctac

SEQ ID NO: 185293 - DNA, 25 bp, Artificial
  probe
  misc_feature (1)..(25): SEQ ID NO: 7289; WAN024EWN_at; Start 192; Stop 216
aagtccaagccaactttgtcaatcg

SEQ ID NO: 185294 - DNA, 25 bp, Artificial
  probe
  misc_feature (1)..(25): SEQ ID NO: 7289; WAN024EWN_at; Start 216; Stop 240
gcttccagcagttctacccgacttg

SEQ ID NO: 185295 - DNA, 25 bp, Artificial
  probe
  misc_feature (1)..(25): SEQ ID NO: 7289; WAN024EWN_at; Start 158; Stop 182
taaatcatctgccacctgaccgtga

SEQ ID NO: 185296 - DNA, 25 bp, Artificial
  probe
  misc_feature (1)..(25): SEQ ID NO: 7289; WAN024EWN_at; Start 8; Stop 32
tccagtcgtatccagttgaccccaa

SEQ ID NO: 185297 - DNA, 25 bp, Artificial
  probe
  misc_feature (1)..(25): SEQ ID NO: 7289; WAN024EWN_at; Start 81; Stop 105
tctgcctgagaattggggacatgcc

SEQ ID NO: 185298 - DNA, 25 bp, Artificial
  probe
  misc_feature (1)..(25): SEQ ID NO: 7289; WAN024EWN_at; Start 15; Stop 39
gtatccagttgaccccaatcaaagg

SEQ ID NO: 185299 - DNA, 25 bp, Artificial
  probe
  misc_feature (1)..(25): SEQ ID NO: 7289; WAN024EWN_at; Start 1; Stop 25
gtgctagtccagtcgtatccagttg

SEQ ID NO: 185300 - DNA, 25 bp, Artificial
  probe
  misc_feature (1)..(25): SEQ ID NO: 7289; WAN024EWN_at; Start 38; Stop 62
gggctggccacttcctgccacaggg

SEQ ID NO: 185301 - DNA, 25 bp, Artificial
  probe
  misc_feature (1)..(25): SEQ ID NO: 7289; WAN024EWN_at; Start 137; Stop 161
ggcacaaggcaaattctcaaataaa

SEQ ID NO: 185302 - DNA, 25 bp, Artificial
  probe
  misc_feature (1)..(25): SEQ ID NO: 7289; WAN024EWN_at; Start 151; Stop 175
tctcaaataaatcatctgccacctg

SEQ ID NO: 185303 - DNA, 25 bp, Artificial
  probe
  misc_feature (1)..(25): SEQ ID NO: 7289; WAN024EWN_at; Start 24; Stop 48
tgaccccaatcaaagggctggccac

SEQ ID NO: 185304 - DNA, 25 bp, Artificial
  probe
  misc_feature (1)..(25): SEQ ID NO: 7289; WAN024EWN_at; Start 220; Stop 244
ccagcagttctacccgacttggtga

SEQ ID NO: 185305 - DNA, 25 bp, Artificial
  probe
  misc_feature (1)..(25): SEQ ID NO: 7289; WAN024EWN_at; Start 233; Stop 257
ccgacttggtgaaacaaatactcca

SEQ ID NO: 185306 - DNA, 25 bp, Artificial
  probe
  misc_feature (1)..(25): SEQ ID NO: 7289; WAN024EWN_at; Start 61; Stop 85
gggcatcaaagagtagataatctgc

SEQ ID NO: 185307 - DNA, 25 bp, Artificial
  probe
  misc_feature (1)..(25): SEQ ID NO: 7289; WAN024EWN_at; Start 20; Stop 44
cagttgaccccaatcaaagggctgg

SEQ ID NO: 185308 - DNA, 25 bp, Artificial
  probe
  misc_feature (1)..(25): SEQ ID NO: 7289; WAN024EWN_at; Start 165; Stop 189
tctgccacctgaccgtgaacttgaa

SEQ ID NO: 185309 - DNA, 25 bp, Artificial
  probe
  misc_feature (1)..(25): SEQ ID NO: 7289; WAN024EWN_at; Start 254; Stop 278
tccaacctttttcacatctgcagga

SEQ ID NO: 185310 - DNA, 25 bp, Artificial
  probe
  misc_feature (1)..(25): SEQ ID NO: 2002; WAN024EWO_at; Start 156; Stop 180
cctgatgattcttcaaaaattctgc

SEQ ID NO: 185311 - DNA, 25 bp, Artificial
  probe
  misc_feature (1)..(25): SEQ ID NO: 2002; WAN024EWO_at; Start 40; Stop 64
catcactgctccgttttcttcataa

SEQ ID NO: 185312 - DNA, 25 bp, Artificial
  probe
  misc_feature (1)..(25): SEQ ID NO: 2002; WAN024EWO_at; Start 25; Stop 49
tgtcaacaccgaaatcatcactgct

SEQ ID NO: 185313 - DNA, 25 bp, Artificial
  probe
  misc_feature (1)..(25): SEQ ID NO: 2002; WAN024EWO_at; Start 117; Stop 141
ggctagctttcttgacctcagcgat

SEQ ID NO: 185314 - DNA, 25 bp, Artificial
  probe
  misc_feature (1)..(25): SEQ ID NO: 2002; WAN024EWO_at; Start 114; Stop 138
tagggctagctttcttgacctcagc

SEQ ID NO: 185315 - DNA, 25 bp, Artificial
  probe
  misc_feature (1)..(25): SEQ ID NO: 2002; WAN024EWO_at; Start 169; Stop 193
caaaaattctgccaagcgataggtc

SEQ ID NO: 185316 - DNA, 25 bp, Artificial
  probe
  misc_feature (1)..(25): SEQ ID NO: 2002; WAN024EWO_at; Start 51; Stop 75
cgttttcttcataagtctgggcctg

SEQ ID NO: 185317 - DNA, 25 bp, Artificial
  probe
  misc_feature (1)..(25): SEQ ID NO: 2002; WAN024EWO_at; Start 102; Stop 126
tatctcccaaactagggctagcttt

SEQ ID NO: 185318 - DNA, 25 bp, Artificial
  probe
  misc_feature (1)..(25): SEQ ID NO: 2002; WAN024EWO_at; Start 77; Stop 101
tgcacaatatccacatcgagattga

SEQ ID NO: 185319 - DNA, 25 bp, Artificial
  probe
  misc_feature (1)..(25): SEQ ID NO: 2002; WAN024EWO_at; Start 70; Stop 94
ggcctgttgcacaatatccacatcg

SEQ ID NO: 185320 - DNA, 25 bp, Artificial
  probe
  misc_feature (1)..(25): SEQ ID NO: 2002; WAN024EWO_at; Start 56; Stop 80
tcttcataagtctgggcctgttgca

SEQ ID NO: 185321 - DNA, 25 bp, Artificial
  probe
  misc_feature (1)..(25): SEQ ID NO: 2002; WAN024EWO_at; Start 125; Stop 149
ttcttgacctcagcgattacctgca

SEQ ID NO: 185322 - DNA, 25 bp, Artificial
  probe
  misc_feature (1)..(25): SEQ ID NO: 2002; WAN024EWO_at; Start 206; Stop 230
tggatttgctccagcttcatctgct

SEQ ID NO: 185323 - DNA, 25 bp, Artificial
  probe
  misc_feature (1)..(25): SEQ ID NO: 2002; WAN024EWO_at; Start 74; Stop 98
tgttgcacaatatccacatcgagat

SEQ ID NO: 185324 - DNA, 25 bp, Artificial
  probe
  misc_feature (1)..(25): SEQ ID NO: 2002; WAN024EWO_at; Start 175; Stop 199
ttctgccaagcgataggtctggcgc

SEQ ID NO: 185325 - DNA, 25 bp, Artificial
  probe
  misc_feature (1)..(25): SEQ ID NO: 2002; WAN024EWO_at; Start 66; Stop 90
tctgggcctgttgcacaatatccac

SEQ ID NO: 185326 - DNA, 25 bp, Artificial
  probe
  misc_feature (1)..(25): SEQ ID NO: 2002; WAN024EWO_at; Start 172; Stop 196
aaattctgccaagcgataggtctgg

SEQ ID NO: 185327 - DNA, 25 bp, Artificial
  probe
  misc_feature (1)..(25): SEQ ID NO: 2002; WAN024EWO_at; Start 47; Stop 71
gctccgttttcttcataagtctggg

SEQ ID NO: 185328 - DNA, 25 bp, Artificial
  probe
  misc_feature (1)..(25): SEQ ID NO: 2002; WAN024EWO_at; Start 13; Stop 37
gaaaacctcatctgtcaacaccgaa

SEQ ID NO: 185329 - DNA, 25 bp, Artificial
  probe
  misc_feature (1)..(25): SEQ ID NO: 2002; WAN024EWO_at; Start 2; Stop 26
tgccctttaaagaaaacctcatctg

SEQ ID NO: 185330 - DNA, 25 bp, Artificial
  probe
  misc_feature (1)..(25): SEQ ID NO: 2002; WAN024EWO_at; Start 86; Stop 110
tccacatcgagattgatatctccca

SEQ ID NO: 185331 - DNA, 25 bp, Artificial
  probe
  misc_feature (1)..(25): SEQ ID NO: 2002; WAN024EWO_at; Start 62; Stop 86
taagtctgggcctgttgcacaatat

SEQ ID NO: 185332 - DNA, 25 bp, Artificial
  probe
  misc_feature (1)..(25): SEQ ID NO: 2002; WAN024EWO_at; Start 199; Stop 223
cagaggctggatttgctccagcttc

SEQ ID NO: 185333 - DNA, 25 bp, Artificial
  probe
  misc_feature (1)..(25): SEQ ID NO: 2002; WAN024EWO_at; Start 110; Stop 134
aaactagggctagctttcttgacct

SEQ ID NO: 185334 - DNA, 25 bp, Artificial
  probe
  misc_feature (1)..(25): SEQ ID NO: 2002; WAN024EWO_at; Start 194; Stop 218
tggcgcagaggctggatttgctcca

SEQ ID NO: 185335 - DNA, 25 bp, Artificial
  probe
  misc_feature (1)..(25): SEQ ID NO: 2002; WAN024EWO_at; Start 218; Stop 242
agcttcatctgctccacctcacgcg

SEQ ID NO: 185336 - DNA, 25 bp, Artificial
  probe
  misc_feature (1)..(25): SEQ ID NO: 2002; WAN024EWO_at; Start 178; Stop 202
tgccaagcgataggtctggcgcaga

SEQ ID NO: 185337 - DNA, 25 bp, Artificial
  probe
  misc_feature (1)..(25): SEQ ID NO: 2002; WAN024EWO_at; Start 94; Stop 118
gagattgatatctcccaaactaggg

SEQ ID NO: 185338 - DNA, 25 bp, Artificial
  probe
  misc_feature (1)..(25): SEQ ID NO: 2002; WAN024EWO_at; Start 120; Stop 144
tagctttcttgacctcagcgattac

SEQ ID NO: 185339 - DNA, 25 bp, Artificial
  probe
  misc_feature (1)..(25): SEQ ID NO: 2002; WAN024EWO_at; Start 209; Stop 233
atttgctccagcttcatctgctcca

SEQ ID NO: 185340 - DNA, 25 bp, Artificial
  probe
  misc_feature (1)..(25): SEQ ID NO: 2002; WAN024EWO_at; Start 31; Stop 55
caccgaaatcatcactgctccgttt

SEQ ID NO: 185341 - DNA, 25 bp, Artificial
  probe
  misc_feature (1)..(25): SEQ ID NO: 2002; WAN024EWO_at; Start 128; Stop 152
ttgacctcagcgattacctgcaagc

SEQ ID NO: 185342 - DNA, 25 bp, Artificial
  probe
  misc_feature (1)..(25): SEQ ID NO: 2002; WAN024EWO_at; Start 99; Stop 123
tgatatctcccaaactagggctagc

SEQ ID NO: 185343 - DNA, 25 bp, Artificial
  probe
  misc_feature (1)..(25): SEQ ID NO: 2002; WAN024EWO_at; Start 23; Stop 47
tctgtcaacaccgaaatcatcactg

SEQ ID NO: 185344 - DNA, 25 bp, Artificial
  probe
  misc_feature (1)..(25): SEQ ID NO: 5367; WAN024EWP_at; Start 75; Stop 99
tctgcctgactttcacggtaggcct

SEQ ID NO: 185345 - DNA, 25 bp, Artificial
  probe
  misc_feature (1)..(25): SEQ ID NO: 5367; WAN024EWP_at; Start 62; Stop 86
ttggaaacttgggtctgcctgactt

SEQ ID NO: 185346 - DNA, 25 bp, Artificial
  probe
  misc_feature (1)..(25): SEQ ID NO: 5367; WAN024EWP_at; Start 81; Stop 105
tgactttcacggtaggccttctcca

SEQ ID NO: 185347 - DNA, 25 bp, Artificial
  probe
  misc_feature (1)..(25): SEQ ID NO: 5367; WAN024EWP_at; Start 113; Stop 137
aactgctgtcatcaatgtttctggg

SEQ ID NO: 185348 - DNA, 25 bp, Artificial
  probe
  misc_feature (1)..(25): SEQ ID NO: 5367; WAN024EWP_at; Start 105; Stop 129
aactccaaaactgctgtcatcaatg

SEQ ID NO: 185349 - DNA, 25 bp, Artificial
  probe
  misc_feature (1)..(25): SEQ ID NO: 5367; WAN024EWP_at; Start 68; Stop 92
acttgggtctgcctgactttcacgg

SEQ ID NO: 185350 - DNA, 25 bp, Artificial
  probe
  misc_feature (1)..(25): SEQ ID NO: 5367; WAN024EWP_at; Start 100; Stop 124
tctccaactccaaaactgctgtcat

SEQ ID NO: 185351 - DNA, 25 bp, Artificial
  probe
  misc_feature (1)..(25): SEQ ID NO: 5367; WAN024EWP_at; Start 71; Stop 95
tgggtctgcctgactttcacggtag

SEQ ID NO: 185352 - DNA, 25 bp, Artificial
  probe
  misc_feature (1)..(25): SEQ ID NO: 5367; WAN024EWP_at; Start 82; Stop 106
gactttcacggtaggccttctccaa

SEQ ID NO: 185353 - DNA, 25 bp, Artificial
  probe
  misc_feature (1)..(25): SEQ ID NO: 5367; WAN024EWP_at; Start 117; Stop 141
gctgtcatcaatgtttctgggacaa

SEQ ID NO: 185354 - DNA, 25 bp, Artificial
  probe
  misc_feature (1)..(25): SEQ ID NO: 5367; WAN024EWP_at; Start 73; Stop 97
ggtctgcctgactttcacggtaggc

SEQ ID NO: 185355 - DNA, 25 bp, Artificial
  probe
  misc_feature (1)..(25): SEQ ID NO: 5367; WAN024EWP_at; Start 201; Stop 225
taccctctctataaatcttctaatc

SEQ ID NO: 185356 - DNA, 25 bp, Artificial
  probe
  misc_feature (1)..(25): SEQ ID NO: 5367; WAN024EWP_at; Start 121; Stop 145
tcatcaatgtttctgggacaaaacg

SEQ ID NO: 185357 - DNA, 25 bp, Artificial
  probe
  misc_feature (1)..(25): SEQ ID NO: 5367; WAN024EWP_at; Start 63; Stop 87
tggaaacttgggtctgcctgacttt

SEQ ID NO: 185358 - DNA, 25 bp, Artificial
  probe
  misc_feature (1)..(25): SEQ ID NO: 5367; WAN024EWP_at; Start 107; Stop 131
ctccaaaactgctgtcatcaatgtt

SEQ ID NO: 185359 - DNA, 25 bp, Artificial
  probe
  misc_feature (1)..(25): SEQ ID NO: 5367; WAN024EWP_at; Start 99; Stop 123
ttctccaactccaaaactgctgtca

SEQ ID NO: 185360 - DNA, 25 bp, Artificial
  probe
  misc_feature (1)..(25): SEQ ID NO: 5367; WAN024EWP_at; Start 66; Stop 90
aaacttgggtctgcctgactttcac

SEQ ID NO: 185361 - DNA, 25 bp, Artificial
  probe
  misc_feature (1)..(25): SEQ ID NO: 5367; WAN024EWP_at; Start 65; Stop 89
gaaacttgggtctgcctgactttca

SEQ ID NO: 185362 - DNA, 25 bp, Artificial
  probe
  misc_feature (1)..(25): SEQ ID NO: 5367; WAN024EWP_at; Start 78; Stop 102
gcctgactttcacggtaggccttct

SEQ ID NO: 185363 - DNA, 25 bp, Artificial
  probe
  misc_feature (1)..(25): SEQ ID NO: 5367; WAN024EWP_at; Start 77; Stop 101
tgcctgactttcacggtaggccttc

SEQ ID NO: 185364 - DNA, 25 bp, Artificial
  probe
  misc_feature (1)..(25): SEQ ID NO: 5367; WAN024EWP_at; Start 57; Stop 81
tcctcttggaaacttgggtctgcct

SEQ ID NO: 185365 - DNA, 25 bp, Artificial
  probe
  misc_feature (1)..(25): SEQ ID NO: 5367; WAN024EWP_at; Start 60; Stop 84
tcttggaaacttgggtctgcctgac

SEQ ID NO: 185366 - DNA, 25 bp, Artificial
  probe
  misc_feature (1)..(25): SEQ ID NO: 5367; WAN024EWP_at; Start 54; Stop 78
aattcctcttggaaacttgggtctg

SEQ ID NO: 185367 - DNA, 25 bp, Artificial
  probe
  misc_feature (1)..(25): SEQ ID NO: 5367; WAN024EWP_at; Start 70; Stop 94
ttgggtctgcctgactttcacggta

SEQ ID NO: 185368 - DNA, 25 bp, Artificial
  probe
  misc_feature (1)..(25): SEQ ID NO: 5367; WAN024EWP_at; Start 115; Stop 139
ctgctgtcatcaatgtttctgggac

SEQ ID NO: 185369 - DNA, 25 bp, Artificial
  probe
  misc_feature (1)..(25): SEQ ID NO: 5367; WAN024EWP_at; Start 119; Stop 143
tgtcatcaatgtttctgggacaaaa

SEQ ID NO: 185370 - DNA, 25 bp, Artificial
  probe
  misc_feature (1)..(25): SEQ ID NO: 5367; WAN024EWP_at; Start 125; Stop 149
caatgtttctgggacaaaacgtccg

SEQ ID NO: 185371 - DNA, 25 bp, Artificial
  probe
  misc_feature (1)..(25): SEQ ID NO: 5367; WAN024EWP_at; Start 109; Stop 133
ccaaaactgctgtcatcaatgtttc

SEQ ID NO: 185372 - DNA, 25 bp, Artificial
  probe
  misc_feature (1)..(25): SEQ ID NO: 5367; WAN024EWP_at; Start 122; Stop 146
catcaatgtttctgggacaaaacgt

SEQ ID NO: 185373 - DNA, 25 bp, Artificial
  probe
  misc_feature (1)..(25): SEQ ID NO: 5367; WAN024EWP_at; Start 56; Stop 80
ttcctcttggaaacttgggtctgcc

SEQ ID NO: 185374 - DNA, 25 bp, Artificial
  probe
  misc_feature (1)..(25): SEQ ID NO: 5367; WAN024EWP_at; Start 102; Stop 126
tccaactccaaaactgctgtcatca

SEQ ID NO: 185375 - DNA, 25 bp, Artificial
  probe
  misc_feature (1)..(25): SEQ ID NO: 5367; WAN024EWP_at; Start 58; Stop 82
cctcttggaaacttgggtctgcctg

SEQ ID NO: 185376 - DNA, 25 bp, Artificial
  probe
  misc_feature (1)..(25): SEQ ID NO: 5367; WAN024EWP_at; Start 93; Stop 117
taggccttctccaactccaaaactg

SEQ ID NO: 185377 - DNA, 25 bp, Artificial
  probe
  misc_feature (1)..(25): SEQ ID NO: 5367; WAN024EWP_at; Start 210; Stop 234
tataaatcttctaatcttttcatga

SEQ ID NO: 185378 - DNA, 25 bp, Artificial
  probe
  misc_feature (1)..(25): SEQ ID NO: 5612; WAN024EWQ_at; Start 216; Stop 240
acgaacgatttctggaaatggatga

SEQ ID NO: 185379 - DNA, 25 bp, Artificial
  probe
  misc_feature (1)..(25): SEQ ID NO: 5612; WAN024EWQ_at; Start 2; Stop 26
tggtcaaggtagctgcgtggtgctc

SEQ ID NO: 185380 - DNA, 25 bp, Artificial
  probe
  misc_feature (1)..(25): SEQ ID NO: 5612; WAN024EWQ_at; Start 183; Stop 207
tttagcctctcgaccgatgacactt

SEQ ID NO: 185381 - DNA, 25 bp, Artificial
  probe
  misc_feature (1)..(25): SEQ ID NO: 5612; WAN024EWQ_at; Start 210; Stop 234
gaagtcacgaacgatttctggaaat

SEQ ID NO: 185382 - DNA, 25 bp, Artificial
  probe
  misc_feature (1)..(25): SEQ ID NO: 5612; WAN024EWQ_at; Start 167; Stop 191
agtcacggtactgttgtttagcctc

SEQ ID NO: 185383 - DNA, 25 bp, Artificial
  probe
  misc_feature (1)..(25): SEQ ID NO: 5612; WAN024EWQ_at; Start 181; Stop 205
tgtttagcctctcgaccgatgacac

SEQ ID NO: 185384 - DNA, 25 bp, Artificial
  probe
  misc_feature (1)..(25): SEQ ID NO: 5612; WAN024EWQ_at; Start 73; Stop 97
gactcatcttctacaaagggatgga

SEQ ID NO: 185385 - DNA, 25 bp, Artificial
  probe
  misc_feature (1)..(25): SEQ ID NO: 5612; WAN024EWQ_at; Start 194; Stop 218
gaccgatgacactttggaagtcacg

SEQ ID NO: 185386 - DNA, 25 bp, Artificial
  probe
  misc_feature (1)..(25): SEQ ID NO: 5612; WAN024EWQ_at; Start 130; Stop 154
caggctactagggcatctggcagat

SEQ ID NO: 185387 - DNA, 25 bp, Artificial
  probe
  misc_feature (1)..(25): SEQ ID NO: 5612; WAN024EWQ_at; Start 172; Stop 196
cggtactgttgtttagcctctcgac

SEQ ID NO: 185388 - DNA, 25 bp, Artificial
  probe
  misc_feature (1)..(25): SEQ ID NO: 5612; WAN024EWQ_at; Start 125; Stop 149
caacacaggctactagggcatctgg

SEQ ID NO: 185389 - DNA, 25 bp, Artificial
  probe
  misc_feature (1)..(25): SEQ ID NO: 5612; WAN024EWQ_at; Start 179; Stop 203
gttgtttagcctctcgaccgatgac

SEQ ID NO: 185390 - DNA, 25 bp, Artificial
  probe
  misc_feature (1)..(25): SEQ ID NO: 5612; WAN024EWQ_at; Start 214; Stop 238
tcacgaacgatttctggaaatggat

SEQ ID NO: 185391 - DNA, 25 bp, Artificial
  probe
  misc_feature (1)..(25): SEQ ID NO: 5612; WAN024EWQ_at; Start 170; Stop 194
cacggtactgttgtttagcctctcg

SEQ ID NO: 185392 - DNA, 25 bp, Artificial
  probe
  misc_feature (1)..(25): SEQ ID NO: 5612; WAN024EWQ_at; Start 128; Stop 152
cacaggctactagggcatctggcag

SEQ ID NO: 185393 - DNA, 25 bp, Artificial
  probe
  misc_feature (1)..(25): SEQ ID NO: 5612; WAN024EWQ_at; Start 212; Stop 236
agtcacgaacgatttctggaaatgg

SEQ ID NO: 185394 - DNA, 25 bp, Artificial
  probe
  misc_feature (1)..(25): SEQ ID NO: 5612; WAN024EWQ_at; Start 203; Stop 227
cactttggaagtcacgaacgatttc

SEQ ID NO: 185395 - DNA, 25 bp, Artificial
  probe
  misc_feature (1)..(25): SEQ ID NO: 5612; WAN024EWQ_at; Start 165; Stop 189
caagtcacggtactgttgtttagcc

SEQ ID NO: 185396 - DNA, 25 bp, Artificial
  probe
  misc_feature (1)..(25): SEQ ID NO: 5612; WAN024EWQ_at; Start 208; Stop 232
tggaagtcacgaacgatttctggaa

SEQ ID NO: 185397 - DNA, 25 bp, Artificial
  probe
  misc_feature (1)..(25): SEQ ID NO: 5612; WAN024EWQ_at; Start 192; Stop 216
tcgaccgatgacactttggaagtca

SEQ ID NO: 185398 - DNA, 25 bp, Artificial
  probe
  misc_feature (1)..(25): SEQ ID NO: 5612; WAN024EWQ_at; Start 196; Stop 220
ccgatgacactttggaagtcacgaa

SEQ ID NO: 185399 - DNA, 25 bp, Artificial
  probe
  misc_feature (1)..(25): SEQ ID NO: 5612; WAN024EWQ_at; Start 160; Stop 184
cctgtcaagtcacggtactgttgtt

SEQ ID NO: 185400 - DNA, 25 bp, Artificial
  probe
  misc_feature (1)..(25): SEQ ID NO: 5612; WAN024EWQ_at; Start 190; Stop 214
tctcgaccgatgacactttggaagt

SEQ ID NO: 185401 - DNA, 25 bp, Artificial
  probe
  misc_feature (1)..(25): SEQ ID NO: 5612; WAN024EWQ_at; Start 186; Stop 210
agcctctcgaccgatgacactttgg

SEQ ID NO: 185402 - DNA, 25 bp, Artificial
  probe
  misc_feature (1)..(25): SEQ ID NO: 5612; WAN024EWQ_at; Start 175; Stop 199
tactgttgtttagcctctcgaccga

SEQ ID NO: 185403 - DNA, 25 bp, Artificial
  probe
  misc_feature (1)..(25): SEQ ID NO: 5612; WAN024EWQ_at; Start 109; Stop 133
gcattcgacccaccaccaacacagg

SEQ ID NO: 185404 - DNA, 25 bp, Artificial
  probe
  misc_feature (1)..(25): SEQ ID NO: 5612; WAN024EWQ_at; Start 77; Stop 101
catcttctacaaagggatggaagag

SEQ ID NO: 185405 - DNA, 25 bp, Artificial
  probe
  misc_feature (1)..(25): SEQ ID NO: 5612; WAN024EWQ_at; Start 122; Stop 146
caccaacacaggctactagggcatc

SEQ ID NO: 185406 - DNA, 25 bp, Artificial
  probe
  misc_feature (1)..(25): SEQ ID NO: 5612; WAN024EWQ_at; Start 126; Stop 150
aacacaggctactagggcatctggc

SEQ ID NO: 185407 - DNA, 25 bp, Artificial
  probe
  misc_feature (1)..(25): SEQ ID NO: 5612; WAN024EWQ_at; Start 206; Stop 230
tttggaagtcacgaacgatttctgg

SEQ ID NO: 185408 - DNA, 25 bp, Artificial
  probe
  misc_feature (1)..(25): SEQ ID NO: 5612; WAN024EWQ_at; Start 200; Stop 224
tgacactttggaagtcacgaacgat

SEQ ID NO: 185409 - DNA, 25 bp, Artificial
  probe
  misc_feature (1)..(25): SEQ ID NO: 5612; WAN024EWQ_at; Start 178; Stop 202
tgttgtttagcctctcgaccgatga

SEQ ID NO: 185410 - DNA, 25 bp, Artificial
  probe
  misc_feature (1)..(25): SEQ ID NO: 5612; WAN024EWQ_at; Start 188; Stop 212
cctctcgaccgatgacactttggaa

SEQ ID NO: 185411 - DNA, 25 bp, Artificial
  probe
  misc_feature (1)..(25): SEQ ID NO: 5612; WAN024EWQ_at; Start 198; Stop 222
gatgacactttggaagtcacgaacg

SEQ ID NO: 185412 - DNA, 25 bp, Artificial
  probe
  misc_feature (1)..(25): SEQ ID NO: 1627; WAN024EWR_at; Start 3; Stop 27
gagtcaggaatttttagcacgaatc

SEQ ID NO: 185413 - DNA, 25 bp, Artificial
  probe
  misc_feature (1)..(25): SEQ ID NO: 1627; WAN024EWR_at; Start 432; Stop 456
caaggaactgtatgactacgcgaca

SEQ ID NO: 185414 - DNA, 25 bp, Artificial
  probe
  misc_feature (1)..(25): SEQ ID NO: 1627; WAN024EWR_at; Start 514; Stop 538
cacagacttggtgctgagattatcg

SEQ ID NO: 185415 - DNA, 25 bp, Artificial
  probe
  misc_feature (1)..(25): SEQ ID NO: 1627; WAN024EWR_at; Start 90; Stop 114
gacctatcgcttggcagaatttttg

SEQ ID NO: 185416 - DNA, 25 bp, Artificial
  probe
  misc_feature (1)..(25): SEQ ID NO: 1627; WAN024EWR_at; Start 479; Stop 503
tggagactcacaatctagctgaact

SEQ ID NO: 185417 - DNA, 25 bp, Artificial
  probe
  misc_feature (1)..(25): SEQ ID NO: 1627; WAN024EWR_at; Start 375; Stop 399
caatgcaggtgcgacagttatcttg

SEQ ID NO: 185418 - DNA, 25 bp, Artificial
  probe
  misc_feature (1)..(25): SEQ ID NO: 1627; WAN024EWR_at; Start 445; Stop 469
gactacgcgacagagcttggtctgg

SEQ ID NO: 185419 - DNA, 25 bp, Artificial
  probe
  misc_feature (1)..(25): SEQ ID NO: 1627; WAN024EWR_at; Start 160; Stop 184
gctagccctagtttgggagatatca

SEQ ID NO: 185420 - DNA, 25 bp, Artificial
  probe
  misc_feature (1)..(25): SEQ ID NO: 1627; WAN024EWR_at; Start 236; Stop 260
cagtgatgatttcggtgttgacaga

SEQ ID NO: 185421 - DNA, 25 bp, Artificial
  probe
  misc_feature (1)..(25): SEQ ID NO: 1627; WAN024EWR_at; Start 405; Stop 429
tgtggcagccttgtccgaagaacgc

SEQ ID NO: 185422 - DNA, 25 bp, Artificial
  probe
  misc_feature (1)..(25): SEQ ID NO: 1627; WAN024EWR_at; Start 304; Stop 328
tccagtcaggtagagattccgacgc

SEQ ID NO: 185423 - DNA, 25 bp, Artificial
  probe
  misc_feature (1)..(25): SEQ ID NO: 1627; WAN024EWR_at; Start 561; Stop 585
tacctttgaggtcgacttgcagacc

SEQ ID NO: 185424 - DNA, 25 bp, Artificial
  probe
  misc_feature (1)..(25): SEQ ID NO: 1627; WAN024EWR_at; Start 499; Stop 523
gaactagaggtagcccacagacttg

SEQ ID NO: 185425 - DNA, 25 bp, Artificial
  probe
  misc_feature (1)..(25): SEQ ID NO: 1627; WAN024EWR_at; Start 20; Stop 44
cacgaatcttagagcagaaggcgcg

SEQ ID NO: 185426 - DNA, 25 bp, Artificial
  probe
  misc_feature (1)..(25): SEQ ID NO: 1627; WAN024EWR_at; Start 145; Stop 169
gctgaggtcaagaaagctagcccta

SEQ ID NO: 185427 - DNA, 25 bp, Artificial
  probe
  misc_feature (1)..(25): SEQ ID NO: 1627; WAN024EWR_at; Start 660; Stop 684
tgcggaacgactagccccatacttt

SEQ ID NO: 185428 - DNA, 25 bp, Artificial
  probe
  misc_feature (1)..(25): SEQ ID NO: 1627; WAN024EWR_at; Start 418; Stop 442
tccgaagaacgcctcaaggaactgt

SEQ ID NO: 185429 - DNA, 25 bp, Artificial
  probe
  misc_feature (1)..(25): SEQ ID NO: 1627; WAN024EWR_at; Start 289; Stop 313
tatctacgggaaatttccagtcagg

SEQ ID NO: 185430 - DNA, 25 bp, Artificial
  probe
  misc_feature (1)..(25): SEQ ID NO: 1627; WAN024EWR_at; Start 546; Stop 570
caaccgcaacttgactacctttgag

SEQ ID NO: 185431 - DNA, 25 bp, Artificial
  probe
  misc_feature (1)..(25): SEQ ID NO: 1627; WAN024EWR_at; Start 52; Stop 76
gagcagatgaagctggagcaaatcc

SEQ ID NO: 185432 - DNA, 25 bp, Artificial
  probe
  misc_feature (1)..(25): SEQ ID NO: 1627; WAN024EWR_at; Start 218; Stop 242
cttatgaagaaaacggagcagtgat

SEQ ID NO: 185433 - DNA, 25 bp, Artificial
  probe
  misc_feature (1)..(25): SEQ ID NO: 1627; WAN024EWR_at; Start 131; Stop 155
gcttgcaggtaatcgctgaggtcaa

SEQ ID NO: 185434 - DNA, 25 bp, Artificial
  probe
  misc_feature (1)..(25): SEQ ID NO: 1627; WAN024EWR_at; Start 204; Stop 228
gcaacaggcccagacttatgaagaa

SEQ ID NO: 185435 - DNA, 25 bp, Artificial
  probe
  misc_feature (1)..(25): SEQ ID NO: 1627; WAN024EWR_at; Start 273; Stop 297
taaagggcatttggattatctacgg

SEQ ID NO: 185436 - DNA, 25 bp, Artificial
  probe
  misc_feature (1)..(25): SEQ ID NO: 1627; WAN024EWR_at; Start 646; Stop 670
ttcacagggcaggatgcggaacgac

SEQ ID NO: 185437 - DNA, 25 bp, Artificial
  probe
  misc_feature (1)..(25): SEQ ID NO: 1627; WAN024EWR_at; Start 578; Stop 602
tgcagaccagtgtagatttagcccc

SEQ ID NO: 185438 - DNA, 25 bp, Artificial
  probe
  misc_feature (1)..(25): SEQ ID NO: 1627; WAN024EWR_at; Start 612; Stop 636
ggaaggtcgctattacatttctgaa

SEQ ID NO: 185439 - DNA, 25 bp, Artificial
  probe
  misc_feature (1)..(25): SEQ ID NO: 1627; WAN024EWR_at; Start 631; Stop 655
tctgaatctgccattttcacagggc

SEQ ID NO: 185440 - DNA, 25 bp, Artificial
  probe
  misc_feature (1)..(25): SEQ ID NO: 1627; WAN024EWR_at; Start 257; Stop 281
cagatgaggttttctttaaagggca

SEQ ID NO: 185441 - DNA, 25 bp, Artificial
  probe
  misc_feature (1)..(25): SEQ ID NO: 1627; WAN024EWR_at; Start 352; Stop 376
gaaaagcaaatcatccgcgctcgca

SEQ ID NO: 185442 - DNA, 25 bp, Artificial
  probe
  misc_feature (1)..(25): SEQ ID NO: 1627; WAN024EWR_at; Start 190; Stop 214
gatgtggatattgtgcaacaggccc

SEQ ID NO: 185443 - DNA, 25 bp, Artificial
  probe
  misc_feature (1)..(25): SEQ ID NO: 1627; WAN024EWR_at; Start 590; Stop 614
tagatttagccccttactttgagga

SEQ ID NO: 185444 - DNA, 25 bp, Artificial
  probe
  misc_feature (1)..(25): SEQ ID NO: 1627; WAN024EWR_at; Start 698; Stop 722
tagggacagctcttatgcaggcaga

SEQ ID NO: 185445 - DNA, 25 bp, Artificial
  probe
  misc_feature (1)..(25): SEQ ID NO: 1627; WAN024EWR_at; Start 318; Stop 342
gattccgacgctcaacaaagacttt

SEQ ID NO: 185446 - DNA, 25 bp, Artificial
  probe
  misc_feature (1)..(25): SEQ ID NO: 2962; WAN024EWS_at; Start 88; Stop 112
tcagcaggagccgactatatcggtt

SEQ ID NO: 185447 - DNA, 25 bp, Artificial
  probe
  misc_feature (1)..(25): SEQ ID NO: 2962; WAN024EWS_at; Start 40; Stop 64
gttaaaatttgtggactatcgacca

SEQ ID NO: 185448 - DNA, 25 bp, Artificial
  probe
  misc_feature (1)..(25): SEQ ID NO: 2962; WAN024EWS_at; Start 310; Stop 334
ccttgtgccagtattcaggctgtgc

SEQ ID NO: 185449 - DNA, 25 bp, Artificial
  probe
  misc_feature (1)..(25): SEQ ID NO: 2962; WAN024EWS_at; Start 259; Stop 283
gacttggttcaagttcacggtcagg

SEQ ID NO: 185450 - DNA, 25 bp, Artificial
  probe
  misc_feature (1)..(25): SEQ ID NO: 2962; WAN024EWS_at; Start 543; Stop 567
cggagtggagacagatggacaaaaa

SEQ ID NO: 185451 - DNA, 25 bp, Artificial
  probe
  misc_feature (1)..(25): SEQ ID NO: 2962; WAN024EWS_at; Start 198; Stop 222
tggagtatttgtttcaccaagtcgg

SEQ ID NO: 185452 - DNA, 25 bp, Artificial
  probe
  misc_feature (1)..(25): SEQ ID NO: 2962; WAN024EWS_at; Start 101; Stop 125
actatatcggttttgtctttgcacc

SEQ ID NO: 185453 - DNA, 25 bp, Artificial
  probe
  misc_feature (1)..(25): SEQ ID NO: 2962; WAN024EWS_at; Start 385; Stop 409
tttgatgcccctgtggcaggaagtg

SEQ ID NO: 185454 - DNA, 25 bp, Artificial
  probe
  misc_feature (1)..(25): SEQ ID NO: 2962; WAN024EWS_at; Start 515; Stop 539
ttactccctatgcagtagatgtatc

SEQ ID NO: 185455 - DNA, 25 bp, Artificial
  probe
  misc_feature (1)..(25): SEQ ID NO: 2962; WAN024EWS_at; Start 229; Stop 253
ctgctggaagcgattgacaaagttg

SEQ ID NO: 185456 - DNA, 25 bp, Artificial
  probe
  misc_feature (1)..(25): SEQ ID NO: 2962; WAN024EWS_at; Start 157; Stop 181
gctgagttggcaaagcttattcctg

SEQ ID NO: 185457 - DNA, 25 bp, Artificial
  probe
  misc_feature (1)..(25): SEQ ID NO: 2962; WAN024EWS_at; Start 321; Stop 345
tattcaggctgtgcaggtagatgga

SEQ ID NO: 185458 - DNA, 25 bp, Artificial
  probe
  misc_feature (1)..(25): SEQ ID NO: 2962; WAN024EWS_at; Start 296; Stop 320
tatttgagaatttgccttgtgccag

SEQ ID NO: 185459 - DNA, 25 bp, Artificial
  probe
  misc_feature (1)..(25): SEQ ID NO: 2962; WAN024EWS_at; Start 51; Stop 75
tggactatcgaccaaagaagcggtg

SEQ ID NO: 185460 - DNA, 25 bp, Artificial
  probe
  misc_feature (1)..(25): SEQ ID NO: 2962; WAN024EWS_at; Start 132; Stop 156
aagacaggtgactttagaagaggca

SEQ ID NO: 185461 - DNA, 25 bp, Artificial
  probe
  misc_feature (1)..(25): SEQ ID NO: 2962; WAN024EWS_at; Start 62; Stop 86
ccaaagaagcggtggaaacagccgt

SEQ ID NO: 185462 - DNA, 25 bp, Artificial
  probe
  misc_feature (1)..(25): SEQ ID NO: 2962; WAN024EWS_at; Start 244; Stop 268
gacaaagttggcttggacttggttc

SEQ ID NO: 185463 - DNA, 25 bp, Artificial
  probe
  misc_feature (1)..(25): SEQ ID NO: 2962; WAN024EWS_at; Start 167; Stop 191
caaagcttattcctgcagatgtgaa

SEQ ID NO: 185464 - DNA, 25 bp, Artificial
  probe
  misc_feature (1)..(25): SEQ ID NO: 2962; WAN024EWS_at; Start 215; Stop 239
caagtcgggtagaactgctggaagc

SEQ ID NO: 185465 - DNA, 25 bp, Artificial
  probe
  misc_feature (1)..(25): SEQ ID NO: 2962; WAN024EWS_at; Start 144; Stop 168
tttagaagaggcagctgagttggca

SEQ ID NO: 185466 - DNA, 25 bp, Artificial
  probe
  misc_feature (1)..(25): SEQ ID NO: 2962; WAN024EWS_at; Start 468; Stop 492
cgcaggtggccttaatgaagataat

SEQ ID NO: 185467 - DNA, 25 bp, Artificial
  probe
  misc_feature (1)..(25): SEQ ID NO: 2962; WAN024EWS_at; Start 177; Stop 201
tcctgcagatgtgaaaaaggttgga

SEQ ID NO: 185468 - DNA, 25 bp, Artificial
  probe
  misc_feature (1)..(25): SEQ ID NO: 2962; WAN024EWS_at; Start 211; Stop 235
tcaccaagtcgggtagaactgctgg

SEQ ID NO: 185469 - DNA, 25 bp, Artificial
  probe
  misc_feature (1)..(25): SEQ ID NO: 2962; WAN024EWS_at; Start 449; Stop 473
tagcacagcccttctttatcgcagg

SEQ ID NO: 185470 - DNA, 25 bp, Artificial
  probe
  misc_feature (1)..(25): SEQ ID NO: 2962; WAN024EWS_at; Start 436; Stop 460
gatacgactggactagcacagccct

SEQ ID NO: 185471 - DNA, 25 bp, Artificial
  probe
  misc_feature (1)..(25): SEQ ID NO: 2962; WAN024EWS_at; Start 458; Stop 482
ccttctttatcgcaggtggccttaa

SEQ ID NO: 185472 - DNA, 25 bp, Artificial
  probe
  misc_feature (1)..(25): SEQ ID NO: 2962; WAN024EWS_at; Start 376; Stop 400
tatctactctttgatgcccctgtgg

SEQ ID NO: 185473 - DNA, 25 bp, Artificial
  probe
  misc_feature (1)..(25): SEQ ID NO: 2962; WAN024EWS_at; Start 582; Stop 606
tagaagatttatagagagggtaaag

SEQ ID NO: 185474 - DNA, 25 bp, Artificial
  probe
  misc_feature (1)..(25): SEQ ID NO: 2962; WAN024EWS_at; Start 487; Stop 511
gataatgtagtaaaagcaattcaac

SEQ ID NO: 185475 - DNA, 25 bp, Artificial
  probe
  misc_feature (1)..(25): SEQ ID NO: 2962; WAN024EWS_at; Start 361; Stop 385
aattctcaggcagattatctactct

SEQ ID NO: 185476 - DNA, 25 bp, Artificial
  probe
  misc_feature (1)..(25): SEQ ID NO: 2962; WAN024EWS_at; Start 76; Stop 100
gaaacagccgtttcagcaggagccg

SEQ ID NO: 185477 - DNA, 25 bp, Artificial
  probe
  misc_feature (1)..(25): SEQ ID NO: 2962; WAN024EWS_at; Start 426; Stop 450
gggtcaactggatacgactggacta

SEQ ID NO: 185478 - DNA, 25 bp, Artificial
  probe
  misc_feature (1)..(25): SEQ ID NO: 2962; WAN024EWS_at; Start 116; Stop 140
tctttgcacctagtaaaagacaggt

SEQ ID NO: 185479 - DNA, 25 bp, Artificial
  probe
  misc_feature (1)..(25): SEQ ID NO: 2962; WAN024EWS_at; Start 334; Stop 358
caggtagatggaaatgggcatgtcc

SEQ ID NO: 185480 - DNA, 25 bp, Artificial
  probe
  misc_feature (1)..(25): SEQ ID NO: 2440; WAN024EWT_at; Start 589; Stop 613
gggcctcatccatttccagaaatcg

SEQ ID NO: 185481 - DNA, 25 bp, Artificial
  probe
  misc_feature (1)..(25): SEQ ID NO: 2440; WAN024EWT_at; Start 348; Stop 372
tggtcagcacggtgtggcaactgca

SEQ ID NO: 185482 - DNA, 25 bp, Artificial
  probe
  misc_feature (1)..(25): SEQ ID NO: 2440; WAN024EWT_at; Start 416; Stop 440
gtgaggaagatgtcaaacgccaagc

SEQ ID NO: 185483 - DNA, 25 bp, Artificial
  probe
  misc_feature (1)..(25): SEQ ID NO: 2440; WAN024EWT_at; Start 59; Stop 83
tcccagaaacattgatgacagcagt

SEQ ID NO: 185484 - DNA, 25 bp, Artificial
  probe
  misc_feature (1)..(25): SEQ ID NO: 2440; WAN024EWT_at; Start 80; Stop 104
cagttttggagttggagaaggccta

SEQ ID NO: 185485 - DNA, 25 bp, Artificial
  probe
  misc_feature (1)..(25): SEQ ID NO: 2440; WAN024EWT_at; Start 48; Stop 72
cggacgttttgtcccagaaacattg

SEQ ID NO: 185486 - DNA, 25 bp, Artificial
  probe
  misc_feature (1)..(25): SEQ ID NO: 2440; WAN024EWT_at; Start 889; Stop 913
ggtcaaattcttgaagccttctcta

SEQ ID NO: 185487 - DNA, 25 bp, Artificial
  probe
  misc_feature (1)..(25): SEQ ID NO: 2440; WAN024EWT_at; Start 276; Stop 300
taacaatgccttaggacaagtttgg

SEQ ID NO: 185488 - DNA, 25 bp, Artificial
  probe
  misc_feature (1)..(25): SEQ ID NO: 2440; WAN024EWT_at; Start 1203; Stop 1227
gaagggagaagctcatgcctaacta

SEQ ID NO: 185489 - DNA, 25 bp, Artificial
  probe
  misc_feature (1)..(25): SEQ ID NO: 2440; WAN024EWT_at; Start 494; Stop 518
atggttcgcgcgtgctcaaggatgc

SEQ ID NO: 185490 - DNA, 25 bp, Artificial
  probe
  misc_feature (1)..(25): SEQ ID NO: 2440; WAN024EWT_at; Start 303; Stop 327
tgccaaacgcatgggtaaaaagaaa

SEQ ID NO: 185491 - DNA, 25 bp, Artificial
  probe
  misc_feature (1)..(25): SEQ ID NO: 2440; WAN024EWT_at; Start 251; Stop 275
ttaaccatacaggagcccacaagat

SEQ ID NO: 185492 - DNA, 25 bp, Artificial
  probe
  misc_feature (1)..(25): SEQ ID NO: 2440; WAN024EWT_at; Start 117; Stop 141
ggcagacccaagtttccaagaggaa

SEQ ID NO: 185493 - DNA, 25 bp, Artificial
  probe
  misc_feature (1)..(25): SEQ ID NO: 2440; WAN024EWT_at; Start 1105; Stop 1129
gaacttggaccagaaaagtctatga

SEQ ID NO: 185494 - DNA, 25 bp, Artificial
  probe
  misc_feature (1)..(25): SEQ ID NO: 2440; WAN024EWT_at; Start 190; Stop 214
tacgcaaaaaacttgacccagcata

SEQ ID NO: 185495 - DNA, 25 bp, Artificial
  probe
  misc_feature (1)..(25): SEQ ID NO: 2440; WAN024EWT_at; Start 107; Stop 131
gtgaaagtcaggcagacccaagttt

SEQ ID NO: 185496 - DNA, 25 bp, Artificial
  probe
  misc_feature (1)..(25): SEQ ID NO: 2440; WAN024EWT_at; Start 1033; Stop 1057
tctcgtgtggaagggattatcccag

SEQ ID NO: 185497 - DNA, 25 bp, Artificial
  probe
  misc_feature (1)..(25): SEQ ID NO: 2440; WAN024EWT_at; Start 500; Stop 524
cgcgcgtgctcaaggatgcggtcaa

SEQ ID NO: 185498 - DNA, 25 bp, Artificial
  probe
  misc_feature (1)..(25): SEQ ID NO: 2440; WAN024EWT_at; Start 1091; Stop 1115
tgaaattggccaaagaacttggacc

SEQ ID NO: 185499 - DNA, 25 bp, Artificial
  probe
  misc_feature (1)..(25): SEQ ID NO: 2440; WAN024EWT_at; Start 283; Stop 307
gccttaggacaagtttggcttgcca

SEQ ID NO: 185500 - DNA, 25 bp, Artificial
  probe
  misc_feature (1)..(25): SEQ ID NO: 2440; WAN024EWT_at; Start 513; Stop 537
ggatgcggtcaatgcagcccttcgt

SEQ ID NO: 185501 - DNA, 25 bp, Artificial
  probe
  misc_feature (1)..(25): SEQ ID NO: 2440; WAN024EWT_at; Start 312; Stop 336
catgggtaaaaagaaaattatcgca

SEQ ID NO: 185502 - DNA, 25 bp, Artificial
  probe
  misc_feature (1)..(25): SEQ ID NO: 2440; WAN024EWT_at; Start 409; Stop 433
tacatgggtgaggaagatgtcaaac

SEQ ID NO: 185503 - DNA, 25 bp, Artificial
  probe
  misc_feature (1)..(25): SEQ ID NO: 2440; WAN024EWT_at; Start 1024; Stop 1048
caactcttgtctcgtgtggaaggga

SEQ ID NO: 185504 - DNA, 25 bp, Artificial
  probe
  misc_feature (1)..(25): SEQ ID NO: 2440; WAN024EWT_at; Start 617; Stop 641
gtgacttccaaagtgtcatcggtcg

SEQ ID NO: 185505 - DNA, 25 bp, Artificial
  probe
  misc_feature (1)..(25): SEQ ID NO: 2440; WAN024EWT_at; Start 241; Stop 265
cgggaagaccttaaccatacaggag

SEQ ID NO: 185506 - DNA, 25 bp, Artificial
  probe
  misc_feature (1)..(25): SEQ ID NO: 2440; WAN024EWT_at; Start 225; Stop 249
caagatttatctcaaacgggaagac

SEQ ID NO: 185507 - DNA, 25 bp, Artificial
  probe
  misc_feature (1)..(25): SEQ ID NO: 2440; WAN024EWT_at; Start 356; Stop 380
acggtgtggcaactgcaactgctgc

SEQ ID NO: 185508 - DNA, 25 bp, Artificial
  probe
  misc_feature (1)..(25): SEQ ID NO: 2440; WAN024EWT_at; Start 262; Stop 286
ggagcccacaagattaacaatgcct

SEQ ID NO: 185509 - DNA, 25 bp, Artificial
  probe
  misc_feature (1)..(25): SEQ ID NO: 2440; WAN024EWT_at; Start 604; Stop 628
ccagaaatcgttcgtgacttccaaa

SEQ ID NO: 185510 - DNA, 25 bp, Artificial
  probe
  misc_feature (1)..(25): SEQ ID NO: 2440; WAN024EWT_at; Start 68; Stop 92
cattgatgacagcagttttggagtt

SEQ ID NO: 185511 - DNA, 25 bp, Artificial
  probe
  misc_feature (1)..(25): SEQ ID NO: 2440; WAN024EWT_at; Start 297; Stop 321
ttggcttgccaaacgcatgggtaaa

SEQ ID NO: 185512 - DNA, 25 bp, Artificial
  probe
  misc_feature (1)..(25): SEQ ID NO: 2440; WAN024EWT_at; Start 521; Stop 545
tcaatgcagcccttcgttcatgggt

SEQ ID NO: 185513 - DNA, 25 bp, Artificial
  probe
  misc_feature (1)..(25): SEQ ID NO: 2440; WAN024EWT_at; Start 217; Stop 241
ggcggagccaagatttatctcaaac

SEQ ID NO: 185514 - DNA, 25 bp, Artificial
  probe
  misc_feature (1)..(25): SEQ ID NO: 1846; WAN024EWU_at; Start 57; Stop 81
ggtcattgaccgttttccagagcaa

SEQ ID NO: 185515 - DNA, 25 bp, Artificial
  probe
  misc_feature (1)..(25): SEQ ID NO: 1846; WAN024EWU_at; Start 233; Stop 257
gcttaggactcctctttctgcttta

SEQ ID NO: 185516 - DNA, 25 bp, Artificial
  probe
  misc_feature (1)..(25): SEQ ID NO: 1846; WAN024EWU_at; Start 629; Stop 653
tgattatttttggtaagctactgct

SEQ ID NO: 185517 - DNA, 25 bp, Artificial
  probe
  misc_feature (1)..(25): SEQ ID NO: 1846; WAN024EWU_at; Start 435; Stop 459
tttggctcattttatcgatatccgc

SEQ ID NO: 185518 - DNA, 25 bp, Artificial
  probe
  misc_feature (1)..(25): SEQ ID NO: 1846; WAN024EWU_at; Start 199; Stop 223
cgctatcctgtctggtatgccctct

SEQ ID NO: 185519 - DNA, 25 bp, Artificial
  probe
  misc_feature (1)..(25): SEQ ID NO: 1846; WAN024EWU_at; Start 347; Stop 371
ccttactggtctggatgactttcca

SEQ ID NO: 185520 - DNA, 25 bp, Artificial
  probe
  misc_feature (1)..(25): SEQ ID NO: 1846; WAN024EWU_at; Start 374; Stop 398
taatcctaatagcttcctctggctg

SEQ ID NO: 185521 - DNA, 25 bp, Artificial
  probe
  misc_feature (1)..(25): SEQ ID NO: 1846; WAN024EWU_at; Start 87; Stop 111
tatcagttcagccagtcactgcgat

SEQ ID NO: 185522 - DNA, 25 bp, Artificial
  probe
  misc_feature (1)..(25): SEQ ID NO: 1846; WAN024EWU_at; Start 512; Stop 536
taacggagttactgatcttgattca

SEQ ID NO: 185523 - DNA, 25 bp, Artificial
  probe
  misc_feature (1)..(25): SEQ ID NO: 1846; WAN024EWU_at; Start 381; Stop 405
aatagcttcctctggctggaatctg

SEQ ID NO: 185524 - DNA, 25 bp, Artificial
  probe
  misc_feature (1)..(25): SEQ ID NO: 1846; WAN024EWU_at; Start 420; Stop 444
cctcatacttggaattttggctcat

SEQ ID NO: 185525 - DNA, 25 bp, Artificial
  probe
  misc_feature (1)..(25): SEQ ID NO: 1846; WAN024EWU_at; Start 139; Stop 163
gatttgattccgattctctcacagg

SEQ ID NO: 185526 - DNA, 25 bp, Artificial
  probe
  misc_feature (1)..(25): SEQ ID NO: 1846; WAN024EWU_at; Start 64; Stop 88
gaccgttttccagagcaatccatta

SEQ ID NO: 185527 - DNA, 25 bp, Artificial
  probe
  misc_feature (1)..(25): SEQ ID NO: 1846; WAN024EWU_at; Start 400; Stop 424
aatctggtcatggtctccttcctca

SEQ ID NO: 185528 - DNA, 25 bp, Artificial
  probe
  misc_feature (1)..(25): SEQ ID NO: 1846; WAN024EWU_at; Start 496; Stop 520
gctctcgtctttagcgtaacggagt

SEQ ID NO: 185529 - DNA, 25 bp, Artificial
  probe
  misc_feature (1)..(25): SEQ ID NO: 1846; WAN024EWU_at; Start 13; Stop 37
tatttttttctcgtcgggagcattc

SEQ ID NO: 185530 - DNA, 25 bp, Artificial
  probe
  misc_feature (1)..(25): SEQ ID NO: 1846; WAN024EWU_at; Start 408; Stop 432
catggtctccttcctcatacttgga

SEQ ID NO: 185531 - DNA, 25 bp, Artificial
  probe
  misc_feature (1)..(25): SEQ ID NO: 1846; WAN024EWU_at; Start 241; Stop 265
ctcctctttctgctttactcttggg

SEQ ID NO: 185532 - DNA, 25 bp, Artificial
  probe
  misc_feature (1)..(25): SEQ ID NO: 1846; WAN024EWU_at; Start 530; Stop 554
tgattcagttcgcttctgcgacggg

SEQ ID NO: 185533 - DNA, 25 bp, Artificial
  probe
  misc_feature (1)..(25): SEQ ID NO: 1846; WAN024EWU_at; Start 537; Stop 561
gttcgcttctgcgacgggtatcctg

SEQ ID NO: 185534 - DNA, 25 bp, Artificial
  probe
  misc_feature (1)..(25): SEQ ID NO: 1846; WAN024EWU_at; Start 444; Stop 468
ttttatcgatatccgcatgggtgca

SEQ ID NO: 185535 - DNA, 25 bp, Artificial
  probe
  misc_feature (1)..(25): SEQ ID NO: 1846; WAN024EWU_at; Start 126; Stop 150
cttgcgtcccttagatttgattccg

SEQ ID NO: 185536 - DNA, 25 bp, Artificial
  probe
  misc_feature (1)..(25): SEQ ID NO: 1846; WAN024EWU_at; Start 97; Stop 121
gccagtcactgcgattcctgtcaga

SEQ ID NO: 185537 - DNA, 25 bp, Artificial
  probe
  misc_feature (1)..(25): SEQ ID NO: 1846; WAN024EWU_at; Start 391; Stop 415
tctggctggaatctggtcatggtct

SEQ ID NO: 185538 - DNA, 25 bp, Artificial
  probe
  misc_feature (1)..(25): SEQ ID NO: 1846; WAN024EWU_at; Start 525; Stop 549
gatcttgattcagttcgcttctgcg

SEQ ID NO: 185539 - DNA, 25 bp, Artificial
  probe
  misc_feature (1)..(25): SEQ ID NO: 1846; WAN024EWU_at; Start 80; Stop 104
aatccattatcagttcagccagtca

SEQ ID NO: 185540 - DNA, 25 bp, Artificial
  probe
  misc_feature (1)..(25): SEQ ID NO: 1846; WAN024EWU_at; Start 153; Stop 177
tctctcacaggtcttcaatcgcttt

SEQ ID NO: 185541 - DNA, 25 bp, Artificial
  probe
  misc_feature (1)..(25): SEQ ID NO: 1846; WAN024EWU_at; Start 74; Stop 98
cagagcaatccattatcagttcagc

SEQ ID NO: 185542 - DNA, 25 bp, Artificial
  probe
  misc_feature (1)..(25): SEQ ID NO: 1846; WAN024EWU_at; Start 44; Stop 68
cctttcttggtttggtcattgaccg

SEQ ID NO: 185543 - DNA, 25 bp, Artificial
  probe
  misc_feature (1)..(25): SEQ ID NO: 1846; WAN024EWU_at; Start 144; Stop 168
gattccgattctctcacaggtcttc

SEQ ID NO: 185544 - DNA, 25 bp, Artificial
  probe
  misc_feature (1)..(25): SEQ ID NO: 1846; WAN024EWU_at; Start 595; Stop 619
cctttcgtgcctttcctcttacttg

SEQ ID NO: 185545 - DNA, 25 bp, Artificial
  probe
  misc_feature (1)..(25): SEQ ID NO: 1846; WAN024EWU_at; Start 336; Stop 360
tcaggaatatcccttactggtctgg

SEQ ID NO: 185546 - DNA, 25 bp, Artificial
  probe
  misc_feature (1)..(25): SEQ ID NO: 1846; WAN024EWU_at; Start 501; Stop 525
cgtctttagcgtaacggagttactg

SEQ ID NO: 185547 - DNA, 25 bp, Artificial
  probe
  misc_feature (1)..(25): SEQ ID NO: 1846; WAN024EWU_at; Start 204; Stop 228
tcctgtctggtatgccctctttgaa

SEQ ID NO: 185548 - DNA, 25 bp, Artificial
  probe
  misc_feature (1)..(25): SEQ ID NO: 2990; WAN024EWV_at; Start 50; Stop 74
taacatcacgaacgacaccatcggc

SEQ ID NO: 185549 - DNA, 25 bp, Artificial
  probe
  misc_feature (1)..(25): SEQ ID NO: 2990; WAN024EWV_at; Start 240; Stop 264
catttcgtcaaggtctttgagggca

SEQ ID NO: 185550 - DNA, 25 bp, Artificial
  probe
  misc_feature (1)..(25): SEQ ID NO: 2990; WAN024EWV_at; Start 119; Stop 143
tgtctccaaagatagcgtgcaagag

SEQ ID NO: 185551 - DNA, 25 bp, Artificial
  probe
  misc_feature (1)..(25): SEQ ID NO: 2990; WAN024EWV_at; Start 157; Stop 181
gaaagatctttctcacccttaggtg

SEQ ID NO: 185552 - DNA, 25 bp, Artificial
  probe
  misc_feature (1)..(25): SEQ ID NO: 2990; WAN024EWV_at; Start 290; Stop 314
gagtgatttcttcaggcccaagctt

SEQ ID NO: 185553 - DNA, 25 bp, Artificial
  probe
  misc_feature (1)..(25): SEQ ID NO: 2990; WAN024EWV_at; Start 98; Stop 122
tatcacgcacttcacgagacttgtc

SEQ ID NO: 185554 - DNA, 25 bp, Artificial
  probe
  misc_feature (1)..(25): SEQ ID NO: 2990; WAN024EWV_at; Start 123; Stop 147
tccaaagatagcgtgcaagagacgt

SEQ ID NO: 185555 - DNA, 25 bp, Artificial
  probe
  misc_feature (1)..(25): SEQ ID NO: 2990; WAN024EWV_at; Start 301; Stop 325
tcaggcccaagctttgtatcgcgcg

SEQ ID NO: 185556 - DNA, 25 bp, Artificial
  probe
  misc_feature (1)..(25): SEQ ID NO: 2990; WAN024EWV_at; Start 269; Stop 293
caccaacgtttggaatttcgcgagt

SEQ ID NO: 185557 - DNA, 25 bp, Artificial
  probe
  misc_feature (1)..(25): SEQ ID NO: 2990; WAN024EWV_at; Start 17; Stop 41
gcaactcatctccatttacacgtgt

SEQ ID NO: 185558 - DNA, 25 bp, Artificial
  probe
  misc_feature (1)..(25): SEQ ID NO: 2990; WAN024EWV_at; Start 129; Stop 153
gatagcgtgcaagagacgttcttca

SEQ ID NO: 185559 - DNA, 25 bp, Artificial
  probe
  misc_feature (1)..(25): SEQ ID NO: 2990; WAN024EWV_at; Start 32; Stop 56
ttacacgtgtaaagatcttaacatc

SEQ ID NO: 185560 - DNA, 25 bp, Artificial
  probe
  misc_feature (1)..(25): SEQ ID NO: 2990; WAN024EWV_at; Start 89; Stop 113
gaagagaagtatcacgcacttcacg

SEQ ID NO: 185561 - DNA, 25 bp, Artificial
  probe
  misc_feature (1)..(25): SEQ ID NO: 2990; WAN024EWV_at; Start 281; Stop 305
gaatttcgcgagtgatttcttcagg

SEQ ID NO: 185562 - DNA, 25 bp, Artificial
  probe
  misc_feature (1)..(25): SEQ ID NO: 2990; WAN024EWV_at; Start 63; Stop 87
gacaccatcggcaccgtgtggtaca

SEQ ID NO: 185563 - DNA, 25 bp, Artificial
  probe
  misc_feature (1)..(25): SEQ ID NO: 2990; WAN024EWV_at; Start 217; Stop 241
tcagcaccaatacggataatcccca

SEQ ID NO: 185564 - DNA, 25 bp, Artificial
  probe
  misc_feature (1)..(25): SEQ ID NO: 2990; WAN024EWV_at; Start 286; Stop 310
tcgcgagtgatttcttcaggcccaa

SEQ ID NO: 185565 - DNA, 25 bp, Artificial
  probe
  misc_feature (1)..(25): SEQ ID NO: 2990; WAN024EWV_at; Start 248; Stop 272
caaggtctttgagggcatcttcacc

SEQ ID NO: 185566 - DNA, 25 bp, Artificial
  probe
  misc_feature (1)..(25): SEQ ID NO: 2990; WAN024EWV_at; Start 138; Stop 162
caagagacgttcttcagctgaaaga

SEQ ID NO: 185567 - DNA, 25 bp, Artificial
  probe
  misc_feature (1)..(25): SEQ ID NO: 2990; WAN024EWV_at; Start 327; Stop 351
ttctgattcgtattcttcaaggtga

SEQ ID NO: 185568 - DNA, 25 bp, Artificial
  probe
  misc_feature (1)..(25): SEQ ID NO: 2990; WAN024EWV_at; Start 2; Stop 26
tgttaacacctgattgcaactcatc

SEQ ID NO: 185569 - DNA, 25 bp, Artificial
  probe
  misc_feature (1)..(25): SEQ ID NO: 2990; WAN024EWV_at; Start 84; Stop 108
tacacgaagagaagtatcacgcact

SEQ ID NO: 185570 - DNA, 25 bp, Artificial
  probe
  misc_feature (1)..(25): SEQ ID NO: 2990; WAN024EWV_at; Start 308; Stop 332
caagctttgtatcgcgcgtttctga

SEQ ID NO: 185571 - DNA, 25 bp, Artificial
  probe
  misc_feature (1)..(25): SEQ ID NO: 2990; WAN024EWV_at; Start 208; Stop 232
tctttaacctcagcaccaatacgga

SEQ ID NO: 185572 - DNA, 25 bp, Artificial
  probe
  misc_feature (1)..(25): SEQ ID NO: 2990; WAN024EWV_at; Start 113; Stop 137
gagacttgtctccaaagatagcgtg

SEQ ID NO: 185573 - DNA, 25 bp, Artificial
  probe
  misc_feature (1)..(25): SEQ ID NO: 2990; WAN024EWV_at; Start 197; Stop 221
gaatatcaccttctttaacctcagc

SEQ ID NO: 185574 - DNA, 25 bp, Artificial
  probe
  misc_feature (1)..(25): SEQ ID NO: 2990; WAN024EWV_at; Start 317; Stop 341
tatcgcgcgtttctgattcgtattc

SEQ ID NO: 185575 - DNA, 25 bp, Artificial
  probe
  misc_feature (1)..(25): SEQ ID NO: 2990; WAN024EWV_at; Start 143; Stop 167
gacgttcttcagctgaaagatcttt

SEQ ID NO: 185576 - DNA, 25 bp, Artificial
  probe
  misc_feature (1)..(25): SEQ ID NO: 2990; WAN024EWV_at; Start 39; Stop 63
tgtaaagatcttaacatcacgaacg

SEQ ID NO: 185577 - DNA, 25 bp, Artificial
  probe
  misc_feature (1)..(25): SEQ ID NO: 2990; WAN024EWV_at; Start 70; Stop 94
tcggcaccgtgtggtacacgaagag

SEQ ID NO: 185578 - DNA, 25 bp, Artificial
  probe
  misc_feature (1)..(25): SEQ ID NO: 2990; WAN024EWV_at; Start 81; Stop 105
tggtacacgaagagaagtatcacgc

SEQ ID NO: 185579 - DNA, 25 bp, Artificial
  probe
  misc_feature (1)..(25): SEQ ID NO: 2990; WAN024EWV_at; Start 230; Stop 254
ggataatccccatttcgtcaaggtc

SEQ ID NO: 185580 - DNA, 25 bp, Artificial
  probe
  misc_feature (1)..(25): SEQ ID NO: 2990; WAN024EWV_at; Start 183; Stop 207
tactttacctacaagaatatcacct

SEQ ID NO: 185581 - DNA, 25 bp, Artificial
  probe
  misc_feature (1)..(25): SEQ ID NO: 2990; WAN024EWV_at; Start 258; Stop 282
gagggcatcttcaccaacgtttgga

SEQ ID NO: 185582 - DNA, 25 bp, Artificial
  probe
  misc_feature (1)..(25): SEQ ID NO: 5837; WAN024EWW_at; Start 195; Stop 219
caaggatatctgcaggagtcaccgt

SEQ ID NO: 185583 - DNA, 25 bp, Artificial
  probe
  misc_feature (1)..(25): SEQ ID NO: 5837; WAN024EWW_at; Start 178; Stop 202
gaagtagctcatctcagcaaggata

SEQ ID NO: 185584 - DNA, 25 bp, Artificial
  probe
  misc_feature (1)..(25): SEQ ID NO: 5837; WAN024EWW_at; Start 480; Stop 504
tgagcaaacgtgttttaacattgag

SEQ ID NO: 185585 - DNA, 25 bp, Artificial
  probe
  misc_feature (1)..(25): SEQ ID NO: 5837; WAN024EWW_at; Start 30; Stop 54
gaacagacatacgttcacggacatt

SEQ ID NO: 185586 - DNA, 25 bp, Artificial
  probe
  misc_feature (1)..(25): SEQ ID NO: 5837; WAN024EWW_at; Start 310; Stop 334
aacaggctcagtcacaacggctgca

SEQ ID NO: 185587 - DNA, 25 bp, Artificial
  probe
  misc_feature (1)..(25): SEQ ID NO: 5837; WAN024EWW_at; Start 419; Stop 443
ccagcttctaccaagatttctccag

SEQ ID NO: 185588 - DNA, 25 bp, Artificial
  probe
  misc_feature (1)..(25): SEQ ID NO: 5837; WAN024EWW_at; Start 404; Stop 428
cgagtcataatcgtaccagcttcta

SEQ ID NO: 185589 - DNA, 25 bp, Artificial
  probe
  misc_feature (1)..(25): SEQ ID NO: 5837; WAN024EWW_at; Start 385; Stop 409
aatgctttcaatcacgctacgagtc

SEQ ID NO: 185590 - DNA, 25 bp, Artificial
  probe
  misc_feature (1)..(25): SEQ ID NO: 5837; WAN024EWW_at; Start 243; Stop 267
cattaccaatgatcgttacgacgcg

SEQ ID NO: 185591 - DNA, 25 bp, Artificial
  probe
  misc_feature (1)..(25): SEQ ID NO: 5837; WAN024EWW_at; Start 514; Stop 538
gattttgtaacgaccaactgctgcc

SEQ ID NO: 185592 - DNA, 25 bp, Artificial
  probe
  misc_feature (1)..(25): SEQ ID NO: 5837; WAN024EWW_at; Start 357; Stop 381
tgttcaagtcgccatccaaatggct

SEQ ID NO: 185593 - DNA, 25 bp, Artificial
  probe
  misc_feature (1)..(25): SEQ ID NO: 5837; WAN024EWW_at; Start 324; Stop 348
caacggctgcatcgtttgggatgta

SEQ ID NO: 185594 - DNA, 25 bp, Artificial
  probe
  misc_feature (1)..(25): SEQ ID NO: 5837; WAN024EWW_at; Start 263; Stop 287
acgcgatctggatcagttggagcaa

SEQ ID NO: 185595 - DNA, 25 bp, Artificial
  probe
  misc_feature (1)..(25): SEQ ID NO: 5837; WAN024EWW_at; Start 209; Stop 233
ggagtcaccgtacgaaccttgtcat

SEQ ID NO: 185596 - DNA, 25 bp, Artificial
  probe
  misc_feature (1)..(25): SEQ ID NO: 5837; WAN024EWW_at; Start 371; Stop 395
tccaaatggctttcaatgctttcaa

SEQ ID NO: 185597 - DNA, 25 bp, Artificial
  probe
  misc_feature (1)..(25): SEQ ID NO: 5837; WAN024EWW_at; Start 464; Stop 488
tctgcaatggtttggttgagcaaac

SEQ ID NO: 185598 - DNA, 25 bp, Artificial
  probe
  misc_feature (1)..(25): SEQ ID NO: 5837; WAN024EWW_at; Start 228; Stop 252
tgtcatctgggttagcattaccaat

SEQ ID NO: 185599 - DNA, 25 bp, Artificial
  probe
  misc_feature (1)..(25): SEQ ID NO: 5837; WAN024EWW_at; Start 255; Stop 279
tcgttacgacgcgatctggatcagt

SEQ ID NO: 185600 - DNA, 25 bp, Artificial
  probe
  misc_feature (1)..(25): SEQ ID NO: 5837; WAN024EWW_at; Start 106; Stop 130
aaccgcacggatacgacgatttcca

SEQ ID NO: 185601 - DNA, 25 bp, Artificial
  probe
  misc_feature (1)..(25): SEQ ID NO: 5837; WAN024EWW_at; Start 3; Stop 27
gttgtggtgtcaagacttcattgtc

SEQ ID NO: 185602 - DNA, 25 bp, Artificial
  probe
  misc_feature (1)..(25): SEQ ID NO: 5837; WAN024EWW_at; Start 120; Stop 144
gacgatttccaaggtggtcgatatc

SEQ ID NO: 185603 - DNA, 25 bp, Artificial
  probe
  misc_feature (1)..(25): SEQ ID NO: 5837; WAN024EWW_at; Start 345; Stop 369
tgtagacaatcttgttcaagtcgcc

SEQ ID NO: 185604 - DNA, 25 bp, Artificial
  probe
  misc_feature (1)..(25): SEQ ID NO: 5837; WAN024EWW_at; Start 449; Stop 473
gggtctaccaatggctctgcaatgg

SEQ ID NO: 185605 - DNA, 25 bp, Artificial
  probe
  misc_feature (1)..(25): SEQ ID NO: 5837; WAN024EWW_at; Start 45; Stop 69
cacggacattacgttccatacgaga

SEQ ID NO: 185606 - DNA, 25 bp, Artificial
  probe
  misc_feature (1)..(25): SEQ ID NO: 5837; WAN024EWW_at; Start 75; Stop 99
ccaaacgtacttggttggcaagcaa

SEQ ID NO: 185607 - DNA, 25 bp, Artificial
  probe
  misc_feature (1)..(25): SEQ ID NO: 5837; WAN024EWW_at; Start 295; Stop 319
gaatttttgaagaacaacaggctca

SEQ ID NO: 185608 - DNA, 25 bp, Artificial
  probe
  misc_feature (1)..(25): SEQ ID NO: 5837; WAN024EWW_at; Start 163; Stop 187
ttcagccaagttgaggaagtagctc

SEQ ID NO: 185609 - DNA, 25 bp, Artificial
  probe
  misc_feature (1)..(25): SEQ ID NO: 5837; WAN024EWW_at; Start 59; Stop 83
tccatacgagaaagtcccaaacgta

SEQ ID NO: 185610 - DNA, 25 bp, Artificial
  probe
  misc_feature (1)..(25): SEQ ID NO: 5837; WAN024EWW_at; Start 521; Stop 545
taacgaccaactgctgccaagtcat

SEQ ID NO: 185611 - DNA, 25 bp, Artificial
  probe
  misc_feature (1)..(25): SEQ ID NO: 5837; WAN024EWW_at; Start 13; Stop 37
caagacttcattgtcctgaacagac

SEQ ID NO: 185612 - DNA, 25 bp, Artificial
  probe
  misc_feature (1)..(25): SEQ ID NO: 5837; WAN024EWW_at; Start 148; Stop 172
tacacggccaagtccttcagccaag

SEQ ID NO: 185613 - DNA, 25 bp, Artificial
  probe
  misc_feature (1)..(25): SEQ ID NO: 5837; WAN024EWW_at; Start 433; Stop 457
gatttctccagtttcagggtctacc

SEQ ID NO: 185614 - DNA, 25 bp, Artificial
  probe
  misc_feature (1)..(25): SEQ ID NO: 5837; WAN024EWW_at; Start 135; Stop 159
ggtcgatatcatctacacggccaag

SEQ ID NO: 185615 - DNA, 25 bp, Artificial
  probe
  misc_feature (1)..(25): SEQ ID NO: 5837; WAN024EWW_at; Start 94; Stop 118
aagcaattcaccaaccgcacggata

SEQ ID NO: 185616 - DNA, 25 bp, Artificial
  probe
  misc_feature (1)..(25): SEQ ID NO: 4714; WAN024EWX-3_at; Start 513; Stop 537
gaggatgccgttatcatgagcgaac

SEQ ID NO: 185617 - DNA, 25 bp, Artificial
  probe
  misc_feature (1)..(25): SEQ ID NO: 4714; WAN024EWX-3_at; Start 1121; Stop 1145
tcaccttggtatggcagctcgtact

SEQ ID NO: 185618 - DNA, 25 bp, Artificial
  probe
  misc_feature (1)..(25): SEQ ID NO: 4714; WAN024EWX-3_at; Start 962; Stop 986
cggagataaaatggccggacgtcac

SEQ ID NO: 185619 - DNA, 25 bp, Artificial
  probe
  misc_feature (1)..(25): SEQ ID NO: 4714; WAN024EWX-3_at; Start 781; Stop 805
tgcacgctatctttggagacaagtc

SEQ ID NO: 185620 - DNA, 25 bp, Artificial
  probe
  misc_feature (1)..(25): SEQ ID NO: 4714; WAN024EWX-3_at; Start 1100; Stop 1124
tatcggtcaggttatggagcttcac

SEQ ID NO: 185621 - DNA, 25 bp, Artificial
  probe
  misc_feature (1)..(25): SEQ ID NO: 4714; WAN024EWX-3_at; Start 343; Stop 367
tccgtcgttcaaactcaggtactgc

SEQ ID NO: 185622 - DNA, 25 bp, Artificial
  probe
  misc_feature (1)..(25): SEQ ID NO: 4714; WAN024EWX-3_at; Start 739; Stop 763
cacctaagggtgagaaagatctttc

SEQ ID NO: 185623 - DNA, 25 bp, Artificial
  probe
  misc_feature (1)..(25): SEQ ID NO: 4714; WAN024EWX-3_at; Start 591; Stop 615
gaaacgcgcgatacaaagcttgggc

SEQ ID NO: 185624 - DNA, 25 bp, Artificial
  probe
  misc_feature (1)..(25): SEQ ID NO: 4714; WAN024EWX-3_at; Start 1566; Stop 1590
ggtgttccagaatccttccgagttc

SEQ ID NO: 185625 - DNA, 25 bp, Artificial
  probe
  misc_feature (1)..(25): SEQ ID NO: 4714; WAN024EWX-3_at; Start 426; Stop 450
gctgacggaccttctatggaaaatg

SEQ ID NO: 185626 - DNA, 25 bp, Artificial
  probe
  misc_feature (1)..(25): SEQ ID NO: 4714; WAN024EWX-3_at; Start 1702; Stop 1726
tagatgaccttgaaaaagcccgcga

SEQ ID NO: 185627 - DNA, 25 bp, Artificial
  probe
  misc_feature (1)..(25): SEQ ID NO: 4714; WAN024EWX-3_at; Start 475; Stop 499
caatcgttgcctacatgacttggga

SEQ ID NO: 185628 - DNA, 25 bp, Artificial
  probe
  misc_feature (1)..(25): SEQ ID NO: 4714; WAN024EWX-3_at; Start 1026; Stop 1050
gacatgccttaccttccagacggaa

SEQ ID NO: 185629 - DNA, 25 bp, Artificial
  probe
  misc_feature (1)..(25): SEQ ID NO: 4714; WAN024EWX-3_at; Start 638; Stop 662
tccaaacgttggtgaagatgccctc

SEQ ID NO: 185630 - DNA, 25 bp, Artificial
  probe
  misc_feature (1)..(25): SEQ ID NO: 4714; WAN024EWX-3_at; Start 1401; Stop 1425
gctcagtttggtggacaacgtttcg

SEQ ID NO: 185631 - DNA, 25 bp, Artificial
  probe
  misc_feature (1)..(25): SEQ ID NO: 4714; WAN024EWX-3_at; Start 576; Stop 600
gaagaatacgaatcagaaacgcgcg

SEQ ID NO: 185632 - DNA, 25 bp, Artificial
  probe
  misc_feature (1)..(25): SEQ ID NO: 4714; WAN024EWX-3_at; Start 1442; Stop 1466
ggctcttgaagcctacggtgcgtca

SEQ ID NO: 185633 - DNA, 25 bp, Artificial
  probe
  misc_feature (1)..(25): SEQ ID NO: 4714; WAN024EWX-3_at; Start 1656; Stop 1680
gaacttcgcgacttggatgaaggaa

SEQ ID NO: 185634 - DNA, 25 bp, Artificial
  probe
  misc_feature (1)..(25): SEQ ID NO: 4714; WAN024EWX-3_at; Start 1455; Stop 1479
tacggtgcgtcaaatgtccttcaag

SEQ ID NO: 185635 - DNA, 25 bp, Artificial
  probe
  misc_feature (1)..(25): SEQ ID NO: 4714; WAN024EWX-3_at; Start 536; Stop 560
acgcttggtgaaggacgatgtctac

SEQ ID NO: 185636 - DNA, 25 bp, Artificial
  probe
  misc_feature (1)..(25): SEQ ID NO: 4714; WAN024EWX-3_at; Start 1010; Stop 1034
tatcgttcctgtagaagacatgcct

SEQ ID NO: 185637 - DNA, 25 bp, Artificial
  probe
  misc_feature (1)..(25): SEQ ID NO: 4714; WAN024EWX-3_at; Start 498; Stop 522
gaaggttacaacttcgaggatgccg

SEQ ID NO: 185638 - DNA, 25 bp, Artificial
  probe
  misc_feature (1)..(25): SEQ ID NO: 4714; WAN024EWX-3_at; Start 69; Stop 93
aaacaggtagttgccgttgcgacag

SEQ ID NO: 185639 - DNA, 25 bp, Artificial
  probe
  misc_feature (1)..(25): SEQ ID NO: 4714; WAN024EWX-3_at; Start 651; Stop 675
gaagatgccctcaaagaccttgacg

SEQ ID NO: 185640 - DNA, 25 bp, Artificial
  probe
  misc_feature (1)..(25): SEQ ID NO: 4714; WAN024EWX-3_at; Start 109; Stop 133
tggaaaacgatgactccaaccgtgc

SEQ ID NO: 185641 - DNA, 25 bp, Artificial
  probe
  misc_feature (1)..(25): SEQ ID NO: 4714; WAN024EWX-3_at; Start 451; Stop 475
gagaaatggcgcttggacaaaaccc

SEQ ID NO: 185642 - DNA, 25 bp, Artificial
  probe
  misc_feature (1)..(25): SEQ ID NO: 4714; WAN024EWX-3_at; Start 1630; Stop 1654
tcctagacgaagatgaccaagaagt

SEQ ID NO: 185643 - DNA, 25 bp, Artificial
  probe
  misc_feature (1)..(25): SEQ ID NO: 4714; WAN024EWX-3_at; Start 796; Stop 820
gagacaagtctcgtgaagtgcgtga

SEQ ID NO: 185644 - DNA, 25 bp, Artificial
  probe
  misc_feature (1)..(25): SEQ ID NO: 4714; WAN024EWX-3_at; Start 1771; Stop 1795
ctgagaaagcaacaaaagcggaagc

SEQ ID NO: 185645 - DNA, 25 bp, Artificial
  probe
  misc_feature (1)..(25): SEQ ID NO: 4714; WAN024EWX-3_at; Start 1047; Stop 1071
ggaactccagtcgacatcatgttga

SEQ ID NO: 185646 - DNA, 25 bp, Artificial
  probe
  misc_feature (1)..(25): SEQ ID NO: 4714; WAN024EWX-3_at; Start 1372; Stop 1396
ctgttacccaacaaccactcggagg

SEQ ID NO: 185647 - DNA, 25 bp, Artificial
  probe
  misc_feature (1)..(25): SEQ ID NO: 4714; WAN024EWX-3_at; Start 263; Stop 287
taaagttacttacgcagatgctgac

SEQ ID NO: 185648 - DNA, 25 bp, Artificial
  probe
  misc_feature (1)..(25): SEQ ID NO: 4714; WAN024EWX-3_at; Start 608; Stop 632
gcttgggcctgaagaaatcactcgc

SEQ ID NO: 185649 - DNA, 25 bp, Artificial
  probe
  misc_feature (1)..(25): SEQ ID NO: 4714; WAN024EWX-3_at; Start 830; Stop 854
tcgtgtaccacacggtgccgatggt

SEQ ID NO: 185650 - DNA, 25 bp, Artificial
  probe
  misc_feature (1)..(25): SEQ ID NO: 5019; WAN024EWX-5_at; Start 921; Stop 945
cattgcagagccattggtagaccct

SEQ ID NO: 185651 - DNA, 25 bp, Artificial
  probe
  misc_feature (1)..(25): SEQ ID NO: 5019; WAN024EWX-5_at; Start 501; Stop 525
taaggtgggctatggttcaactgtt

SEQ ID NO: 185652 - DNA, 25 bp, Artificial
  probe
  misc_feature (1)..(25): SEQ ID NO: 5019; WAN024EWX-5_at; Start 615; Stop 639
tacaaccttggttcgtgctcttggt

SEQ ID NO: 185653 - DNA, 25 bp, Artificial
  probe
  misc_feature (1)..(25): SEQ ID NO: 5019; WAN024EWX-5_at; Start 1579; Stop 1603
cactatggtcgtatgtgtccaatcg

SEQ ID NO: 185654 - DNA, 25 bp, Artificial
  probe
  misc_feature (1)..(25): SEQ ID NO: 5019; WAN024EWX-5_at; Start 458; Stop 482
gctcaccaggtgtttactttaacga

SEQ ID NO: 185655 - DNA, 25 bp, Artificial
  probe
  misc_feature (1)..(25): SEQ ID NO: 5019; WAN024EWX-5_at; Start 204; Stop 228
ttcaaacttcacagacacaatggag

SEQ ID NO: 185656 - DNA, 25 bp, Artificial
  probe
  misc_feature (1)..(25): SEQ ID NO: 5019; WAN024EWX-5_at; Start 41; Stop 65
tggcaggacatgacgttcaatacgg

SEQ ID NO: 185657 - DNA, 25 bp, Artificial
  probe
  misc_feature (1)..(25): SEQ ID NO: 5019; WAN024EWX-5_at; Start 720; Stop 744
gaatccaatggactctcgtacagac

SEQ ID NO: 185658 - DNA, 25 bp, Artificial
  probe
  misc_feature (1)..(25): SEQ ID NO: 5019; WAN024EWX-5_at; Start 1511; Stop 1535
cagccttaggacctggtggtttgac

SEQ ID NO: 185659 - DNA, 25 bp, Artificial
  probe
  misc_feature (1)..(25): SEQ ID NO: 5019; WAN024EWX-5_at; Start 1609; Stop 1633
cctgaaggacctaacatcggtttga

SEQ ID NO: 185660 - DNA, 25 bp, Artificial
  probe
  misc_feature (1)..(25): SEQ ID NO: 5019; WAN024EWX-5_at; Start 1438; Stop 1462
ggttcatcacagttgtcacagttca

SEQ ID NO: 185661 - DNA, 25 bp, Artificial
  probe
  misc_feature (1)..(25): SEQ ID NO: 5019; WAN024EWX-5_at; Start 522; Stop 546
tgttatccctaaccgtggagcttgg

SEQ ID NO: 185662 - DNA, 25 bp, Artificial
  probe
  misc_feature (1)..(25): SEQ ID NO: 5019; WAN024EWX-5_at; Start 25; Stop 49
caaaggagaatcatcttggcaggac

SEQ ID NO: 185663 - DNA, 25 bp, Artificial
  probe
  misc_feature (1)..(25): SEQ ID NO: 5019; WAN024EWX-5_at; Start 906; Stop 930
tttgctcaaccaaaccattgcagag

SEQ ID NO: 185664 - DNA, 25 bp, Artificial
  probe
  misc_feature (1)..(25): SEQ ID NO: 5019; WAN024EWX-5_at; Start 953; Stop 977
gagaaatcttggtagaagctggtac

SEQ ID NO: 185665 - DNA, 25 bp, Artificial
  probe
  misc_feature (1)..(25): SEQ ID NO: 5019; WAN024EWX-5_at; Start 272; Stop 296
tagaagaagctcgtatccacgatgc

SEQ ID NO: 185666 - DNA, 25 bp, Artificial
  probe
  misc_feature (1)..(25): SEQ ID NO: 5019; WAN024EWX-5_at; Start 1684; Stop 1708
acaccataccgtaaggttgaccgtg

SEQ ID NO: 185667 - DNA, 25 bp, Artificial
  probe
  misc_feature (1)..(25): SEQ ID NO: 5019; WAN024EWX-5_at; Start 767; Stop 791
aacgccttcgtccaggtgagcctaa

SEQ ID NO: 185668 - DNA, 25 bp, Artificial
  probe
  misc_feature (1)..(25): SEQ ID NO: 5019; WAN024EWX-5_at; Start 556; Stop 580
gaaagcgactcaaaagatatcacct

SEQ ID NO: 185669 - DNA, 25 bp, Artificial
  probe
  misc_feature (1)..(25): SEQ ID NO: 5019; WAN024EWX-5_at; Start 1201; Stop 1225
gagatgagctacttcctcaacttgg

SEQ ID NO: 185670 - DNA, 25 bp, Artificial
  probe
  misc_feature (1)..(25): SEQ ID NO: 5019; WAN024EWX-5_at; Start 542; Stop 566
cttggttggaacttgaaagcgactc

SEQ ID NO: 185671 - DNA, 25 bp, Artificial
  probe
  misc_feature (1)..(25): SEQ ID NO: 5019; WAN024EWX-5_at; Start 148; Stop 172
ttcaaagctttcctagaccacggtc

SEQ ID NO: 185672 - DNA, 25 bp, Artificial
  probe
  misc_feature (1)..(25): SEQ ID NO: 5019; WAN024EWX-5_at; Start 1156; Stop 1180
ccagatgacaaggttcgtacggtga

SEQ ID NO: 185673 - DNA, 25 bp, Artificial
  probe
  misc_feature (1)..(25): SEQ ID NO: 5019; WAN024EWX-5_at; Start 1497; Stop 1521
caaacgccgtttgtcagccttagga

SEQ ID NO: 185674 - DNA, 25 bp, Artificial
  probe
  misc_feature (1)..(25): SEQ ID NO: 5019; WAN024EWX-5_at; Start 588; Stop 612
tatcgaccgtactcgtaagattcca

SEQ ID NO: 185675 - DNA, 25 bp, Artificial
  probe
  misc_feature (1)..(25): SEQ ID NO: 5019; WAN024EWX-5_at; Start 735; Stop 759
tcgtacagacgaagccttgaaagaa

SEQ ID NO: 185676 - DNA, 25 bp, Artificial
  probe
  misc_feature (1)..(25): SEQ ID NO: 5019; WAN024EWX-5_at; Start 681; Stop 705
cgaattggttcgcaacactgttgaa

SEQ ID NO: 185677 - DNA, 25 bp, Artificial
  probe
  misc_feature (1)..(25): SEQ ID NO: 5019; WAN024EWX-5_at; Start 1171; Stop 1195
cgtacggtgactcctgcagatatcc

SEQ ID NO: 185678 - DNA, 25 bp, Artificial
  probe
  misc_feature (1)..(25): SEQ ID NO: 5019; WAN024EWX-5_at; Start 850; Stop 874
gacttggcagcagttggtcgttaca

SEQ ID NO: 185679 - DNA, 25 bp, Artificial
  probe
  misc_feature (1)..(25): SEQ ID NO: 5019; WAN024EWX-5_at; Start 936; Stop 960
ggtagaccctgaaactggagaaatc

SEQ ID NO: 185680 - DNA, 25 bp, Artificial
  probe
  misc_feature (1)..(25): SEQ ID NO: 5019; WAN024EWX-5_at; Start 1316; Stop 1340
tgggactttctcgtatggaacgtaa

SEQ ID NO: 185681 - DNA, 25 bp, Artificial
  probe
  misc_feature (1)..(25): SEQ ID NO: 5019; WAN024EWX-5_at; Start 1563; Stop 1587
tgacgtgcactacactcactatggt

SEQ ID NO: 185682 - DNA, 25 bp, Artificial
  probe
  misc_feature (1)..(25): SEQ ID NO: 5019; WAN024EWX-5_at; Start 404; Stop 428
tgggtactttcatcatcaatggtgg

SEQ ID NO: 185683 - DNA, 25 bp, Artificial
  probe
  misc_feature (1)..(25): SEQ ID NO: 5019; WAN024EWX-5_at; Start 435; Stop 459
tattatcgtttctcagttggtccgc

SEQ ID NO: 185684 - DNA, 25 bp, Artificial
  probe
  misc_feature (1)..(25): SEQ ID NO: 3892; WAN024EWY_at; Start 11; Stop 35
tgctcctcgctacgaagctgtgtcg

SEQ ID NO: 185685 - DNA, 25 bp, Artificial
  probe
  misc_feature (1)..(25): SEQ ID NO: 3892; WAN024EWY_at; Start 141; Stop 165
cattgatgacatcagacagaaagcc

SEQ ID NO: 185686 - DNA, 25 bp, Artificial
  probe
  misc_feature (1)..(25): SEQ ID NO: 3892; WAN024EWY_at; Start 32; Stop 56
gtcgtacgaattcccacactgacaa

SEQ ID NO: 185687 - DNA, 25 bp, Artificial
  probe
  misc_feature (1)..(25): SEQ ID NO: 3892; WAN024EWY_at; Start 111; Stop 135
ccagttgacgttcaaagaggatgaa

SEQ ID NO: 185688 - DNA, 25 bp, Artificial
  probe
  misc_feature (1)..(25): SEQ ID NO: 3892; WAN024EWY_at; Start 103; Stop 127
tcccacatccagttgacgttcaaag

SEQ ID NO: 185689 - DNA, 25 bp, Artificial
  probe
  misc_feature (1)..(25): SEQ ID NO: 3892; WAN024EWY_at; Start 144; Stop 168
tgatgacatcagacagaaagccttg

SEQ ID NO: 185690 - DNA, 25 bp, Artificial
  probe
  misc_feature (1)..(25): SEQ ID NO: 3892; WAN024EWY_at; Start 69; Stop 93
cagtaatcggtccatttgtcagaac

SEQ ID NO: 185691 - DNA, 25 bp, Artificial
  probe
  misc_feature (1)..(25): SEQ ID NO: 3892; WAN024EWY_at; Start 155; Stop 179
gacagaaagccttgggctcccatac

SEQ ID NO: 185692 - DNA, 25 bp, Artificial
  probe
  misc_feature (1)..(25): SEQ ID NO: 3892; WAN024EWY_at; Start 29; Stop 53
tgtgtcgtacgaattcccacactga

SEQ ID NO: 185693 - DNA, 25 bp, Artificial
  probe
  misc_feature (1)..(25): SEQ ID NO: 3892; WAN024EWY_at; Start 78; Stop 102
gtccatttgtcagaacgacctcatc

SEQ ID NO: 185694 - DNA, 25 bp, Artificial
  probe
  misc_feature (1)..(25): SEQ ID NO: 3892; WAN024EWY_at; Start 83; Stop 107
tttgtcagaacgacctcatctccca

SEQ ID NO: 185695 - DNA, 25 bp, Artificial
  probe
  misc_feature (1)..(25): SEQ ID NO: 3892; WAN024EWY_at; Start 213; Stop 237
gcaaactagaaactggcaaacctaa

SEQ ID NO: 185696 - DNA, 25 bp, Artificial
  probe
  misc_feature (1)..(25): SEQ ID NO: 3892; WAN024EWY_at; Start 47; Stop 71
acactgacaaccttacccgatacag

SEQ ID NO: 185697 - DNA, 25 bp, Artificial
  probe
  misc_feature (1)..(25): SEQ ID NO: 3892; WAN024EWY_at; Start 62; Stop 86
cccgatacagtaatcggtccatttg

SEQ ID NO: 185698 - DNA, 25 bp, Artificial
  probe
  misc_feature (1)..(25): SEQ ID NO: 3892; WAN024EWY_at; Start 150; Stop 174
catcagacagaaagccttgggctcc

SEQ ID NO: 185699 - DNA, 25 bp, Artificial
  probe
  misc_feature (1)..(25): SEQ ID NO: 3892; WAN024EWY_at; Start 147; Stop 171
tgacatcagacagaaagccttgggc

SEQ ID NO: 185700 - DNA, 25 bp, Artificial
  probe
  misc_feature (1)..(25): SEQ ID NO: 3892; WAN024EWY_at; Start 106; Stop 130
cacatccagttgacgttcaaagagg

SEQ ID NO: 185701 - DNA, 25 bp, Artificial
  probe
  misc_feature (1)..(25): SEQ ID NO: 3892; WAN024EWY_at; Start 24; Stop 48
gaagctgtgtcgtacgaattcccac

SEQ ID NO: 185702 - DNA, 25 bp, Artificial
  probe
  misc_feature (1)..(25): SEQ ID NO: 3892; WAN024EWY_at; Start 203; Stop 227
gctccagccagcaaactagaaactg

SEQ ID NO: 185703 - DNA, 25 bp, Artificial
  probe
  misc_feature (1)..(25): SEQ ID NO: 3892; WAN024EWY_at; Start 161; Stop 185
aagccttgggctcccataccaatcg

SEQ ID NO: 185704 - DNA, 25 bp, Artificial
  probe
  misc_feature (1)..(25): SEQ ID NO: 3892; WAN024EWY_at; Start 6; Stop 30
ggacttgctcctcgctacgaagctg

SEQ ID NO: 185705 - DNA, 25 bp, Artificial
  probe
  misc_feature (1)..(25): SEQ ID NO: 3892; WAN024EWY_at; Start 119; Stop 143
cgttcaaagaggatgaaaaagccat

SEQ ID NO: 185706 - DNA, 25 bp, Artificial
  probe
  misc_feature (1)..(25): SEQ ID NO: 3892; WAN024EWY_at; Start 54; Stop 78
caaccttacccgatacagtaatcgg

SEQ ID NO: 185707 - DNA, 25 bp, Artificial
  probe
  misc_feature (1)..(25): SEQ ID NO: 3892; WAN024EWY_at; Start 36; Stop 60
tacgaattcccacactgacaacctt

SEQ ID NO: 185708 - DNA, 25 bp, Artificial
  probe
  misc_feature (1)..(25): SEQ ID NO: 3892; WAN024EWY_at; Start 193; Stop 217
agcaataccagctccagccagcaaa

SEQ ID NO: 185709 - DNA, 25 bp, Artificial
  probe
  misc_feature (1)..(25): SEQ ID NO: 3892; WAN024EWY_at; Start 175; Stop 199
cataccaatcgctaccccagcaata

SEQ ID NO: 185710 - DNA, 25 bp, Artificial
  probe
  misc_feature (1)..(25): SEQ ID NO: 3892; WAN024EWY_at; Start 98; Stop 122
tcatctcccacatccagttgacgtt

SEQ ID NO: 185711 - DNA, 25 bp, Artificial
  probe
  misc_feature (1)..(25): SEQ ID NO: 3892; WAN024EWY_at; Start 1; Stop 25
gtgaaggacttgctcctcgctacga

SEQ ID NO: 185712 - DNA, 25 bp, Artificial
  probe
  misc_feature (1)..(25): SEQ ID NO: 3892; WAN024EWY_at; Start 126; Stop 150
agaggatgaaaaagccattgatgac

SEQ ID NO: 185713 - DNA, 25 bp, Artificial
  probe
  misc_feature (1)..(25): SEQ ID NO: 3892; WAN024EWY_at; Start 14; Stop 38
tcctcgctacgaagctgtgtcgtac

SEQ ID NO: 185714 - DNA, 25 bp, Artificial
  probe
  misc_feature (1)..(25): SEQ ID NO: 3892; WAN024EWY_at; Start 72; Stop 96
taatcggtccatttgtcagaacgac

SEQ ID NO: 185715 - DNA, 25 bp, Artificial
  probe
  misc_feature (1)..(25): SEQ ID NO: 3892; WAN024EWY_at; Start 196; Stop 220
aataccagctccagccagcaaacta

SEQ ID NO: 185716 - DNA, 25 bp, Artificial
  probe
  misc_feature (1)..(25): SEQ ID NO: 3892; WAN024EWY_at; Start 21; Stop 45
tacgaagctgtgtcgtacgaattcc

SEQ ID NO: 185717 - DNA, 25 bp, Artificial
  probe
  misc_feature (1)..(25): SEQ ID NO: 3892; WAN024EWY_at; Start 3; Stop 27
gaaggacttgctcctcgctacgaag

SEQ ID NO: 185718 - DNA, 25 bp, Artificial
  probe
  misc_feature (1)..(25): SEQ ID NO: 1531; WAN024EWZ_at; Start 326; Stop 350
cagtttctagtttgctggctggagc

SEQ ID NO: 185719 - DNA, 25 bp, Artificial
  probe
  misc_feature (1)..(25): SEQ ID NO: 1531; WAN024EWZ_at; Start 289; Stop 313
tttttactctactgcattttgtcga

SEQ ID NO: 185720 - DNA, 25 bp, Artificial
  probe
  misc_feature (1)..(25): SEQ ID NO: 1531; WAN024EWZ_at; Start 563; Stop 587
accgaaatatcacagttgttagcaa

SEQ ID NO: 185721 - DNA, 25 bp, Artificial
  probe
  misc_feature (1)..(25): SEQ ID NO: 1531; WAN024EWZ_at; Start 492; Stop 516
taaggttgtcagtgtgggaattcgt

SEQ ID NO: 185722 - DNA, 25 bp, Artificial
  probe
  misc_feature (1)..(25): SEQ ID NO: 1531; WAN024EWZ_at; Start 42; Stop 66
ttatatgcaaaaatttattcaggct

SEQ ID NO: 185723 - DNA, 25 bp, Artificial
  probe
  misc_feature (1)..(25): SEQ ID NO: 1531; WAN024EWZ_at; Start 203; Stop 227
ctctaaaaatgtctcgtcatgatgt

SEQ ID NO: 185724 - DNA, 25 bp, Artificial
  probe
  misc_feature (1)..(25): SEQ ID NO: 1531; WAN024EWZ_at; Start 459; Stop 483
cgttctgacaaatggaccgattact

SEQ ID NO: 185725 - DNA, 25 bp, Artificial
  probe
  misc_feature (1)..(25): SEQ ID NO: 1531; WAN024EWZ_at; Start 579; Stop 603
tgttagcaatttctcacgcacagac

SEQ ID NO: 185726 - DNA, 25 bp, Artificial
  probe
  misc_feature (1)..(25): SEQ ID NO: 1531; WAN024EWZ_at; Start 311; Stop 335
cgattttaggtttgccagtttctag

SEQ ID NO: 185727 - DNA, 25 bp, Artificial
  probe
  misc_feature (1)..(25): SEQ ID NO: 1531; WAN024EWZ_at; Start 336; Stop 360
tttgctggctggagctggtattgct

SEQ ID NO: 185728 - DNA, 25 bp, Artificial
  probe
  misc_feature (1)..(25): SEQ ID NO: 1531; WAN024EWZ_at; Start 467; Stop 491
caaatggaccgattactgtatcggg

SEQ ID NO: 185729 - DNA, 25 bp, Artificial
  probe
  misc_feature (1)..(25): SEQ ID NO: 1531; WAN024EWZ_at; Start 82; Stop 106
gatgtgacaaccattatcgagaata

SEQ ID NO: 185730 - DNA, 25 bp, Artificial
  probe
  misc_feature (1)..(25): SEQ ID NO: 1531; WAN024EWZ_at; Start 69; Stop 93
tattgaaaagctagatgtgacaacc

SEQ ID NO: 185731 - DNA, 25 bp, Artificial
  probe
  misc_feature (1)..(25): SEQ ID NO: 1531; WAN024EWZ_at; Start 446; Stop 470
tgggagatgaggtcgttctgacaaa

SEQ ID NO: 185732 - DNA, 25 bp, Artificial
  probe
  misc_feature (1)..(25): SEQ ID NO: 1531; WAN024EWZ_at; Start 162; Stop 186
aaaaatgcttcataccatggtgcag

SEQ ID NO: 185733 - DNA, 25 bp, Artificial
  probe
  misc_feature (1)..(25): SEQ ID NO: 1531; WAN024EWZ_at; Start 259; Stop 283
gaaaatgtgtttaattatacgctat

SEQ ID NO: 185734 - DNA, 25 bp, Artificial
  probe
  misc_feature (1)..(25): SEQ ID NO: 1531; WAN024EWZ_at; Start 397; Stop 421
tctgatgtcatcaatggctttttca

SEQ ID NO: 185735 - DNA, 25 bp, Artificial
  probe
  misc_feature (1)..(25): SEQ ID NO: 1531; WAN024EWZ_at; Start 519; Stop 543
gacacagcttcgtagcgaggagcaa

SEQ ID NO: 185736 - DNA, 25 bp, Artificial
  probe
  misc_feature (1)..(25): SEQ ID NO: 1531; WAN024EWZ_at; Start 172; Stop 196
cataccatggtgcagagaattgtca

SEQ ID NO: 185737 - DNA, 25 bp, Artificial
  probe
  misc_feature (1)..(25): SEQ ID NO: 1531; WAN024EWZ_at; Start 243; Stop 267
catctcacgtttactagaaaatgtg

SEQ ID NO: 185738 - DNA, 25 bp, Artificial
  probe
  misc_feature (1)..(25): SEQ ID NO: 1531; WAN024EWZ_at; Start 303; Stop 327
cattttgtcgattttaggtttgcca

SEQ ID NO: 185739 - DNA, 25 bp, Artificial
  probe
  misc_feature (1)..(25): SEQ ID NO: 1531; WAN024EWZ_at; Start 506; Stop 530
tgggaattcgtacgacacagcttcg

SEQ ID NO: 185740 - DNA, 25 bp, Artificial
  probe
  misc_feature (1)..(25): SEQ ID NO: 1531; WAN024EWZ_at; Start 2; Stop 26
tgagactgatgaaaatatggtataa

SEQ ID NO: 185741 - DNA, 25 bp, Artificial
  probe
  misc_feature (1)..(25): SEQ ID NO: 1531; WAN024EWZ_at; Start 368; Stop 392
cgattggtatgggagcccaaggctt

SEQ ID NO: 185742 - DNA, 25 bp, Artificial
  probe
  misc_feature (1)..(25): SEQ ID NO: 1531; WAN024EWZ_at; Start 194; Stop 218
tcaaaccttctctaaaaatgtctcg

SEQ ID NO: 185743 - DNA, 25 bp, Artificial
  probe
  misc_feature (1)..(25): SEQ ID NO: 1531; WAN024EWZ_at; Start 412; Stop 436
ggctttttcatcctctttgaacgtc

SEQ ID NO: 185744 - DNA, 25 bp, Artificial
  probe
  misc_feature (1)..(25): SEQ ID NO: 1531; WAN024EWZ_at; Start 426; Stop 450
ctttgaacgtcaactggatgtggga

SEQ ID NO: 185745 - DNA, 25 bp, Artificial
  probe
  misc_feature (1)..(25): SEQ ID NO: 1531; WAN024EWZ_at; Start 113; Stop 137
ccaaggtcatttctcttttactgct

SEQ ID NO: 185746 - DNA, 25 bp, Artificial
  probe
  misc_feature (1)..(25): SEQ ID NO: 1531; WAN024EWZ_at; Start 98; Stop 122
tcgagaatattctaaccaaggtcat

SEQ ID NO: 185747 - DNA, 25 bp, Artificial
  probe
  misc_feature (1)..(25): SEQ ID NO: 1531; WAN024EWZ_at; Start 550; Stop 574
cactttgtccctaaccgaaatatca

SEQ ID NO: 185748 - DNA, 25 bp, Artificial
  probe
  misc_feature (1)..(25): SEQ ID NO: 1531; WAN024EWZ_at; Start 479; Stop 503
ttactgtatcgggtaaggttgtcag

SEQ ID NO: 185749 - DNA, 25 bp, Artificial
  probe
  misc_feature (1)..(25): SEQ ID NO: 1531; WAN024EWZ_at; Start 382; Stop 406
gcccaaggctttctgtctgatgtca

SEQ ID NO: 185750 - DNA, 25 bp, Artificial
  probe
  misc_feature (1)..(25): SEQ ID NO: 1531; WAN024EWZ_at; Start 431; Stop 455
aacgtcaactggatgtgggagatga

SEQ ID NO: 185751 - DNA, 25 bp, Artificial
  probe
  misc_feature (1)..(25): SEQ ID NO: 1531; WAN024EWZ_at; Start 180; Stop 204
ggtgcagagaattgtcaaaccttct

SEQ ID NO: 185752 - DNA, 25 bp, Artificial
  probe
  misc_feature (1)..(25): SEQ ID NO: 3817; WAN024EX2_at; Start 192; Stop 216
caataaaggtcatgggaaaagtctc

SEQ ID NO: 185753 - DNA, 25 bp, Artificial
  probe
  misc_feature (1)..(25): SEQ ID NO: 3817; WAN024EX2_at; Start 146; Stop 170
taggcgttcttggtattactaatgg

SEQ ID NO: 185754 - DNA, 25 bp, Artificial
  probe
  misc_feature (1)..(25): SEQ ID NO: 3817; WAN024EX2_at; Start 94; Stop 118
aatcgaaagcgtgtcatggttctcc

SEQ ID NO: 185755 - DNA, 25 bp, Artificial
  probe
  misc_feature (1)..(25): SEQ ID NO: 3817; WAN024EX2_at; Start 18; Stop 42
tactcttgtccatctgctcaatgac

SEQ ID NO: 185756 - DNA, 25 bp, Artificial
  probe
  misc_feature (1)..(25): SEQ ID NO: 3817; WAN024EX2_at; Start 30; Stop 54
tctgctcaatgacaggatagtaggc

SEQ ID NO: 185757 - DNA, 25 bp, Artificial
  probe
  misc_feature (1)..(25): SEQ ID NO: 3817; WAN024EX2_at; Start 142; Stop 166
gacataggcgttcttggtattacta

SEQ ID NO: 185758 - DNA, 25 bp, Artificial
  probe
  misc_feature (1)..(25): SEQ ID NO: 3817; WAN024EX2_at; Start 1; Stop 25
gtcattgacctcatccctactcttg

SEQ ID NO: 185759 - DNA, 25 bp, Artificial
  probe
  misc_feature (1)..(25): SEQ ID NO: 3817; WAN024EX2_at; Start 110; Stop 134
tggttctccagataacgagtcatct

SEQ ID NO: 185760 - DNA, 25 bp, Artificial
  probe
  misc_feature (1)..(25): SEQ ID NO: 3817; WAN024EX2_at; Start 50; Stop 74
taggcattgctgatgatttccagac

SEQ ID NO: 185761 - DNA, 25 bp, Artificial
  probe
  misc_feature (1)..(25): SEQ ID NO: 3817; WAN024EX2_at; Start 88; Stop 112
cttataaatcgaaagcgtgtcatgg

SEQ ID NO: 185762 - DNA, 25 bp, Artificial
  probe
  misc_feature (1)..(25): SEQ ID NO: 3817; WAN024EX2_at; Start 195; Stop 219
taaaggtcatgggaaaagtctcata

SEQ ID NO: 185763 - DNA, 25 bp, Artificial
  probe
  misc_feature (1)..(25): SEQ ID NO: 3817; WAN024EX2_at; Start 168; Stop 192
tggtaatcaggcgacgatgctcgac

SEQ ID NO: 185764 - DNA, 25 bp, Artificial
  probe
  misc_feature (1)..(25): SEQ ID NO: 3817; WAN024EX2_at; Start 202; Stop 226
catgggaaaagtctcatagtaggcc

SEQ ID NO: 185765 - DNA, 25 bp, Artificial
  probe
  misc_feature (1)..(25): SEQ ID NO: 3817; WAN024EX2_at; Start 57; Stop 81
tgctgatgatttccagactggcaaa

SEQ ID NO: 185766 - DNA, 25 bp, Artificial
  probe
  misc_feature (1)..(25): SEQ ID NO: 3817; WAN024EX2_at; Start 70; Stop 94
cagactggcaaagagaaacttataa

SEQ ID NO: 185767 - DNA, 25 bp, Artificial
  probe
  misc_feature (1)..(25): SEQ ID NO: 3817; WAN024EX2_at; Start 162; Stop 186
tactaatggtaatcaggcgacgatg

SEQ ID NO: 185768 - DNA, 25 bp, Artificial
  probe
  misc_feature (1)..(25): SEQ ID NO: 3817; WAN024EX2_at; Start 99; Stop 123
aaagcgtgtcatggttctccagata

SEQ ID NO: 185769 - DNA, 25 bp, Artificial
  probe
  misc_feature (1)..(25): SEQ ID NO: 3817; WAN024EX2_at; Start 159; Stop 183
tattactaatggtaatcaggcgacg

SEQ ID NO: 185770 - DNA, 25 bp, Artificial
  probe
  misc_feature (1)..(25): SEQ ID NO: 3817; WAN024EX2_at; Start 33; Stop 57
gctcaatgacaggatagtaggcatt

SEQ ID NO: 185771 - DNA, 25 bp, Artificial
  probe
  misc_feature (1)..(25): SEQ ID NO: 3817; WAN024EX2_at; Start 82; Stop 106
gagaaacttataaatcgaaagcgtg

SEQ ID NO: 185772 - DNA, 25 bp, Artificial
  probe
  misc_feature (1)..(25): SEQ ID NO: 3817; WAN024EX2_at; Start 134; Stop 158
tgttcaatgacataggcgttcttgg

SEQ ID NO: 185773 - DNA, 25 bp, Artificial
  probe
  misc_feature (1)..(25): SEQ ID NO: 3817; WAN024EX2_at; Start 116; Stop 140
tccagataacgagtcatctgttcaa

SEQ ID NO: 185774 - DNA, 25 bp, Artificial
  probe
  misc_feature (1)..(25): SEQ ID NO: 3817; WAN024EX2_at; Start 130; Stop 154
catctgttcaatgacataggcgttc

SEQ ID NO: 185775 - DNA, 25 bp, Artificial
  probe
  misc_feature (1)..(25): SEQ ID NO: 3817; WAN024EX2_at; Start 215; Stop 239
tcatagtaggccttgtcctttttta

SEQ ID NO: 185776 - DNA, 25 bp, Artificial
  probe
  misc_feature (1)..(25): SEQ ID NO: 3817; WAN024EX2_at; Start 183; Stop 207
gatgctcgacaataaaggtcatggg

SEQ ID NO: 185777 - DNA, 25 bp, Artificial
  probe
  misc_feature (1)..(25): SEQ ID NO: 3817; WAN024EX2_at; Start 178; Stop 202
gcgacgatgctcgacaataaaggtc

SEQ ID NO: 185778 - DNA, 25 bp, Artificial
  probe
  misc_feature (1)..(25): SEQ ID NO: 3817; WAN024EX2_at; Start 208; Stop 232
aaaagtctcatagtaggccttgtcc

SEQ ID NO: 185779 - DNA, 25 bp, Artificial
  probe
  misc_feature (1)..(25): SEQ ID NO: 3817; WAN024EX2_at; Start 61; Stop 85
gatgatttccagactggcaaagaga

SEQ ID NO: 185780 - DNA, 25 bp, Artificial
  probe
  misc_feature (1)..(25): SEQ ID NO: 3817; WAN024EX2_at; Start 165; Stop 189
taatggtaatcaggcgacgatgctc

SEQ ID NO: 185781 - DNA, 25 bp, Artificial
  probe
  misc_feature (1)..(25): SEQ ID NO: 3817; WAN024EX2_at; Start 171; Stop 195
taatcaggcgacgatgctcgacaat

SEQ ID NO: 185782 - DNA, 25 bp, Artificial
  probe
  misc_feature (1)..(25): SEQ ID NO: 3817; WAN024EX2_at; Start 40; Stop 64
gacaggatagtaggcattgctgatg

SEQ ID NO: 185783 - DNA, 25 bp, Artificial
  probe
  misc_feature (1)..(25): SEQ ID NO: 3817; WAN024EX2_at; Start 67; Stop 91
ttccagactggcaaagagaaactta

SEQ ID NO: 185784 - DNA, 25 bp, Artificial
  probe
  misc_feature (1)..(25): SEQ ID NO: 3817; WAN024EX2_at; Start 25; Stop 49
gtccatctgctcaatgacaggatag

SEQ ID NO: 185785 - DNA, 25 bp, Artificial
  probe
  misc_feature (1)..(25): SEQ ID NO: 3817; WAN024EX2_at; Start 174; Stop 198
tcaggcgacgatgctcgacaataaa

SEQ ID NO: 185786 - DNA, 25 bp, Artificial
  probe
  misc_feature (1)..(25): SEQ ID NO: 5693; WAN024EX3_at; Start 143; Stop 167
tctcatcaaaactacgatacaaggc

SEQ ID NO: 185787 - DNA, 25 bp, Artificial
  probe
  misc_feature (1)..(25): SEQ ID NO: 5693; WAN024EX3_at; Start 51; Stop 75
tgaaagctgctgtaaaatctgagag

SEQ ID NO: 185788 - DNA, 25 bp, Artificial
  probe
  misc_feature (1)..(25): SEQ ID NO: 5693; WAN024EX3_at; Start 56; Stop 80
gctgctgtaaaatctgagagattag

SEQ ID NO: 185789 - DNA, 25 bp, Artificial
  probe
  misc_feature (1)..(25): SEQ ID NO: 5693; WAN024EX3_at; Start 68; Stop 92
tctgagagattaggtctgtcatgga

SEQ ID NO: 185790 - DNA, 25 bp, Artificial
  probe
  misc_feature (1)..(25): SEQ ID NO: 5693; WAN024EX3_at; Start 91; Stop 115
gataccagctgatgagcctcaatca

SEQ ID NO: 185791 - DNA, 25 bp, Artificial
  probe
  misc_feature (1)..(25): SEQ ID NO: 5693; WAN024EX3_at; Start 87; Stop 111
catggataccagctgatgagcctca

SEQ ID NO: 185792 - DNA, 25 bp, Artificial
  probe
  misc_feature (1)..(25): SEQ ID NO: 5693; WAN024EX3_at; Start 103; Stop 127
tgagcctcaatcatggcatcatcaa

SEQ ID NO: 185793 - DNA, 25 bp, Artificial
  probe
  misc_feature (1)..(25): SEQ ID NO: 5693; WAN024EX3_at; Start 63; Stop 87
taaaatctgagagattaggtctgtc

SEQ ID NO: 185794 - DNA, 25 bp, Artificial
  probe
  misc_feature (1)..(25): SEQ ID NO: 5693; WAN024EX3_at; Start 33; Stop 57
aatattgttgtaagaggctgaaagc

SEQ ID NO: 185795 - DNA, 25 bp, Artificial
  probe
  misc_feature (1)..(25): SEQ ID NO: 5693; WAN024EX3_at; Start 96; Stop 120
cagctgatgagcctcaatcatggca

SEQ ID NO: 185796 - DNA, 25 bp, Artificial
  probe
  misc_feature (1)..(25): SEQ ID NO: 5693; WAN024EX3_at; Start 127; Stop 151
aactgttctctctcaatctcatcaa

SEQ ID NO: 185797 - DNA, 25 bp, Artificial
  probe
  misc_feature (1)..(25): SEQ ID NO: 5693; WAN024EX3_at; Start 149; Stop 173
caaaactacgatacaaggcatgacc

SEQ ID NO: 185798 - DNA, 25 bp, Artificial
  probe
  misc_feature (1)..(25): SEQ ID NO: 5693; WAN024EX3_at; Start 155; Stop 179
tacgatacaaggcatgaccttgaat

SEQ ID NO: 185799 - DNA, 25 bp, Artificial
  probe
  misc_feature (1)..(25): SEQ ID NO: 5693; WAN024EX3_at; Start 93; Stop 117
taccagctgatgagcctcaatcatg

SEQ ID NO: 185800 - DNA, 25 bp, Artificial
  probe
  misc_feature (1)..(25): SEQ ID NO: 5693; WAN024EX3_at; Start 146; Stop 170
catcaaaactacgatacaaggcatg

SEQ ID NO: 185801 - DNA, 25 bp, Artificial
  probe
  misc_feature (1)..(25): SEQ ID NO: 5693; WAN024EX3_at; Start 107; Stop 131
cctcaatcatggcatcatcaaactg

SEQ ID NO: 185802 - DNA, 25 bp, Artificial
  probe
  misc_feature (1)..(25): SEQ ID NO: 5693; WAN024EX3_at; Start 98; Stop 122
gctgatgagcctcaatcatggcatc

SEQ ID NO: 185803 - DNA, 25 bp, Artificial
  probe
  misc_feature (1)..(25): SEQ ID NO: 5693; WAN024EX3_at; Start 39; Stop 63
gttgtaagaggctgaaagctgctgt

SEQ ID NO: 185804 - DNA, 25 bp, Artificial
  probe
  misc_feature (1)..(25): SEQ ID NO: 5693; WAN024EX3_at; Start 53; Stop 77
aaagctgctgtaaaatctgagagat

SEQ ID NO: 185805 - DNA, 25 bp, Artificial
  probe
  misc_feature (1)..(25): SEQ ID NO: 5693; WAN024EX3_at; Start 46; Stop 70
gaggctgaaagctgctgtaaaatct

SEQ ID NO: 185806 - DNA, 25 bp, Artificial
  probe
  misc_feature (1)..(25): SEQ ID NO: 5693; WAN024EX3_at; Start 36; Stop 60
attgttgtaagaggctgaaagctgc

SEQ ID NO: 185807 - DNA, 25 bp, Artificial
  probe
  misc_feature (1)..(25): SEQ ID NO: 5693; WAN024EX3_at; Start 84; Stop 108
tgtcatggataccagctgatgagcc

SEQ ID NO: 185808 - DNA, 25 bp, Artificial
  probe
  misc_feature (1)..(25): SEQ ID NO: 5693; WAN024EX3_at; Start 114; Stop 138
catggcatcatcaaactgttctctc

SEQ ID NO: 185809 - DNA, 25 bp, Artificial
  probe
  misc_feature (1)..(25): SEQ ID NO: 5693; WAN024EX3_at; Start 151; Stop 175
aaactacgatacaaggcatgacctt

SEQ ID NO: 185810 - DNA, 25 bp, Artificial
  probe
  misc_feature (1)..(25): SEQ ID NO: 5693; WAN024EX3_at; Start 80; Stop 104
ggtctgtcatggataccagctgatg

SEQ ID NO: 185811 - DNA, 25 bp, Artificial
  probe
  misc_feature (1)..(25): SEQ ID NO: 5693; WAN024EX3_at; Start 78; Stop 102
taggtctgtcatggataccagctga

SEQ ID NO: 185812 - DNA, 25 bp, Artificial
  probe
  misc_feature (1)..(25): SEQ ID NO: 5693; WAN024EX3_at; Start 43; Stop 67
taagaggctgaaagctgctgtaaaa

SEQ ID NO: 185813 - DNA, 25 bp, Artificial
  probe
  misc_feature (1)..(25): SEQ ID NO: 5693; WAN024EX3_at; Start 71; Stop 95
gagagattaggtctgtcatggatac

SEQ ID NO: 185814 - DNA, 25 bp, Artificial
  probe
  misc_feature (1)..(25): SEQ ID NO: 5693; WAN024EX3_at; Start 117; Stop 141
ggcatcatcaaactgttctctctca

SEQ ID NO: 185815 - DNA, 25 bp, Artificial
  probe
  misc_feature (1)..(25): SEQ ID NO: 5693; WAN024EX3_at; Start 135; Stop 159
tctctcaatctcatcaaaactacga

SEQ ID NO: 185816 - DNA, 25 bp, Artificial
  probe
  misc_feature (1)..(25): SEQ ID NO: 5693; WAN024EX3_at; Start 110; Stop 134
caatcatggcatcatcaaactgttc

SEQ ID NO: 185817 - DNA, 25 bp, Artificial
  probe
  misc_feature (1)..(25): SEQ ID NO: 5693; WAN024EX3_at; Start 160; Stop 184
tacaaggcatgaccttgaatatgct

SEQ ID NO: 185818 - DNA, 25 bp, Artificial
  probe
  misc_feature (1)..(25): SEQ ID NO: 5693; WAN024EX3_at; Start 75; Stop 99
gattaggtctgtcatggataccagc

SEQ ID NO: 185819 - DNA, 25 bp, Artificial
  probe
  misc_feature (1)..(25): SEQ ID NO: 5693; WAN024EX3_at; Start 89; Stop 113
tggataccagctgatgagcctcaat

SEQ ID NO: 185820 - DNA, 25 bp, Artificial
  probe
  misc_feature (1)..(25): SEQ ID NO: 2729; WAN024EX4_at; Start 43; Stop 67
gacctagacctaggaaagttgaata

SEQ ID NO: 185821 - DNA, 25 bp, Artificial
  probe
  misc_feature (1)..(25): SEQ ID NO: 2729; WAN024EX4_at; Start 285; Stop 309
caagaacgcctatgtcattgaacag

SEQ ID NO: 185822 - DNA, 25 bp, Artificial
  probe
  misc_feature (1)..(25): SEQ ID NO: 2729; WAN024EX4_at; Start 672; Stop 696
gcagctttcagcctcttacaacaat

SEQ ID NO: 185823 - DNA, 25 bp, Artificial
  probe
  misc_feature (1)..(25): SEQ ID NO: 2729; WAN024EX4_at; Start 823; Stop 847
catgcttggctctatatcagtttgg

SEQ ID NO: 185824 - DNA, 25 bp, Artificial
  probe
  misc_feature (1)..(25): SEQ ID NO: 2729; WAN024EX4_at; Start 207; Stop 231
aaaggacaaggcctactatgagact

SEQ ID NO: 185825 - DNA, 25 bp, Artificial
  probe
  misc_feature (1)..(25): SEQ ID NO: 2729; WAN024EX4_at; Start 388; Stop 412
gcctactatcctgtcattgagcaga

SEQ ID NO: 185826 - DNA, 25 bp, Artificial
  probe
  misc_feature (1)..(25): SEQ ID NO: 2729; WAN024EX4_at; Start 713; Stop 737
tgaatgacaatttgacaaccttgac

SEQ ID NO: 185827 - DNA, 25 bp, Artificial
  probe
  misc_feature (1)..(25): SEQ ID NO: 2729; WAN024EX4_at; Start 309; Stop 333
gatgactcgttatctggagaaccat

SEQ ID NO: 185828 - DNA, 25 bp, Artificial
  probe
  misc_feature (1)..(25): SEQ ID NO: 2729; WAN024EX4_at; Start 771; Stop 795
cgtgacaggctttttcggaatgaat

SEQ ID NO: 185829 - DNA, 25 bp, Artificial
  probe
  misc_feature (1)..(25): SEQ ID NO: 2729; WAN024EX4_at; Start 324; Stop 348
ggagaaccatgacacgctttcgatt

SEQ ID NO: 185830 - DNA, 25 bp, Artificial
  probe
  misc_feature (1)..(25): SEQ ID NO: 2729; WAN024EX4_at; Start 103; Stop 127
aaggaaaccattgaatacgcactgg

SEQ ID NO: 185831 - DNA, 25 bp, Artificial
  probe
  misc_feature (1)..(25): SEQ ID NO: 2729; WAN024EX4_at; Start 594; Stop 618
gagagaacagtttgatgatgccatg

SEQ ID NO: 185832 - DNA, 25 bp, Artificial
  probe
  misc_feature (1)..(25): SEQ ID NO: 2729; WAN024EX4_at; Start 118; Stop 142
tacgcactggatagaaacgagcgcg

SEQ ID NO: 185833 - DNA, 25 bp, Artificial
  probe
  misc_feature (1)..(25): SEQ ID NO: 2729; WAN024EX4_at; Start 145; Stop 169
cacatggactaccaccgtgaaagtg

SEQ ID NO: 185834 - DNA, 25 bp, Artificial
  probe
  misc_feature (1)..(25): SEQ ID NO: 2729; WAN024EX4_at; Start 431; Stop 455
aggtcaatgacctcttgcgccagcg

SEQ ID NO: 185835 - DNA, 25 bp, Artificial
  probe
  misc_feature (1)..(25): SEQ ID NO: 2729; WAN024EX4_at; Start 610; Stop 634
gatgccatgattgaggctcatcagc

SEQ ID NO: 185836 - DNA, 25 bp, Artificial
  probe
  misc_feature (1)..(25): SEQ ID NO: 2729; WAN024EX4_at; Start 542; Stop 566
tgttagagcatattcaaggtcatgc

SEQ ID NO: 185837 - DNA, 25 bp, Artificial
  probe
  misc_feature (1)..(25): SEQ ID NO: 2729; WAN024EX4_at; Start 253; Stop 277
gagcatcgtcgcctgattaccatta

SEQ ID NO: 185838 - DNA, 25 bp, Artificial
  probe
  misc_feature (1)..(25): SEQ ID NO: 2729; WAN024EX4_at; Start 351; Stop 375
taagtttctctttgccagtctggaa

SEQ ID NO: 185839 - DNA, 25 bp, Artificial
  probe
  misc_feature (1)..(25): SEQ ID NO: 2729; WAN024EX4_at; Start 837; Stop 861
tatcagtttggctagtgcaggtttg

SEQ ID NO: 185840 - DNA, 25 bp, Artificial
  probe
  misc_feature (1)..(25): SEQ ID NO: 2729; WAN024EX4_at; Start 559; Stop 583
ggtcatgccttgtatcgtagttttg

SEQ ID NO: 185841 - DNA, 25 bp, Artificial
  probe
  misc_feature (1)..(25): SEQ ID NO: 2729; WAN024EX4_at; Start 417; Stop 441
caagagtagggatgaggtcaatgac

SEQ ID NO: 185842 - DNA, 25 bp, Artificial
  probe
  misc_feature (1)..(25): SEQ ID NO: 2729; WAN024EX4_at; Start 516; Stop 540
ggcagctgccaaacaaaatcggatt

SEQ ID NO: 185843 - DNA, 25 bp, Artificial
  probe
  misc_feature (1)..(25): SEQ ID NO: 2729; WAN024EX4_at; Start 501; Stop 525
tatggtttatctgacggcagctgcc

SEQ ID NO: 185844 - DNA, 25 bp, Artificial
  probe
  misc_feature (1)..(25): SEQ ID NO: 2729; WAN024EX4_at; Start 802; Stop 826
ttacctttaacagatgagccccatg

SEQ ID NO: 185845 - DNA, 25 bp, Artificial
  probe
  misc_feature (1)..(25): SEQ ID NO: 2729; WAN024EX4_at; Start 270; Stop 294
taccattagtaataccaagaacgcc

SEQ ID NO: 185846 - DNA, 25 bp, Artificial
  probe
  misc_feature (1)..(25): SEQ ID NO: 2729; WAN024EX4_at; Start 369; Stop 393
tctggaaatcatcagcaatgcctac

SEQ ID NO: 185847 - DNA, 25 bp, Artificial
  probe
  misc_feature (1)..(25): SEQ ID NO: 2729; WAN024EX4_at; Start 27; Stop 51
tggttgtacctggatagacctagac

SEQ ID NO: 185848 - DNA, 25 bp, Artificial
  probe
  misc_feature (1)..(25): SEQ ID NO: 2729; WAN024EX4_at; Start 446; Stop 470
tgcgccagcgaactaccaagaaaaa

SEQ ID NO: 185849 - DNA, 25 bp, Artificial
  probe
  misc_feature (1)..(25): SEQ ID NO: 2729; WAN024EX4_at; Start 753; Stop 777
gctagctgttttggcagtcgtgaca

SEQ ID NO: 185850 - DNA, 25 bp, Artificial
  probe
  misc_feature (1)..(25): SEQ ID NO: 2729; WAN024EX4_at; Start 658; Stop 682
tctcagattttacagcagctttcag

SEQ ID NO: 185851 - DNA, 25 bp, Artificial
  probe
  misc_feature (1)..(25): SEQ ID NO: 2729; WAN024EX4_at; Start 402; Stop 426
cattgagcagatggacaagagtagg

SEQ ID NO: 185852 - DNA, 25 bp, Artificial
  probe
  misc_feature (1)..(25): SEQ ID NO: 2729; WAN024EX4_at; Start 628; Stop 652
catcagctggtatccatgacagacc

SEQ ID NO: 185853 - DNA, 25 bp, Artificial
  probe
  misc_feature (1)..(25): SEQ ID NO: 2729; WAN024EX4_at; Start 223; Stop 247
tatgagacttttcccatgaccttta

SEQ ID NO: 185854 - DNA, 25 bp, Artificial
  probe
  misc_feature (1)..(25): SEQ ID NO: 4151; WAN024EX5_at; Start 206; Stop 230
cgccagagatgaagcaatggctaca

SEQ ID NO: 185855 - DNA, 25 bp, Artificial
  probe
  misc_feature (1)..(25): SEQ ID NO: 4151; WAN024EX5_at; Start 221; Stop 245
aatggctacatgaccttcgggacgc

SEQ ID NO: 185856 - DNA, 25 bp, Artificial
  probe
  misc_feature (1)..(25): SEQ ID NO: 4151; WAN024EX5_at; Start 122; Stop 146
tcccaagcctgcaggcgcagggaat

SEQ ID NO: 185857 - DNA, 25 bp, Artificial
  probe
  misc_feature (1)..(25): SEQ ID NO: 4151; WAN024EX5_at; Start 109; Stop 133
tatgatctgacagtcccaagcctgc

SEQ ID NO: 185858 - DNA, 25 bp, Artificial
  probe
  misc_feature (1)..(25): SEQ ID NO: 4151; WAN024EX5_at; Start 422; Stop 446
tcatgacagatatacgagcagccca

SEQ ID NO: 185859 - DNA, 25 bp, Artificial
  probe
  misc_feature (1)..(25): SEQ ID NO: 4151; WAN024EX5_at; Start 344; Stop 368
ccttcacatttggtattgaccgtgc

SEQ ID NO: 185860 - DNA, 25 bp, Artificial
  probe
  misc_feature (1)..(25): SEQ ID NO: 4151; WAN024EX5_at; Start 292; Stop 316
caacgagcagttgagaaatttggga

SEQ ID NO: 185861 - DNA, 25 bp, Artificial
  probe
  misc_feature (1)..(25): SEQ ID NO: 4151; WAN024EX5_at; Start 148; Stop 172
aaggctgttttggtcgatttggata

SEQ ID NO: 185862 - DNA, 25 bp, Artificial
  probe
  misc_feature (1)..(25): SEQ ID NO: 4151; WAN024EX5_at; Start 312; Stop 336
tgggattgattacgtttactgggcc

SEQ ID NO: 185863 - DNA, 25 bp, Artificial
  probe
  misc_feature (1)..(25): SEQ ID NO: 4151; WAN024EX5_at; Start 45; Stop 69
gttaagaaaaggagccagaatggcg

SEQ ID NO: 185864 - DNA, 25 bp, Artificial
  probe
  misc_feature (1)..(25): SEQ ID NO: 4151; WAN024EX5_at; Start 84; Stop 108
accagattttgctgtggaagcagtc

SEQ ID NO: 185865 - DNA, 25 bp, Artificial
  probe
  misc_feature (1)..(25): SEQ ID NO: 4151; WAN024EX5_at; Start 237; Stop 261
tcgggacgcgggtattggcattatc

SEQ ID NO: 185866 - DNA, 25 bp, Artificial
  probe
  misc_feature (1)..(25): SEQ ID NO: 4151; WAN024EX5_at; Start 439; Stop 463
gcagcccaccgtgcagggattcggt

SEQ ID NO: 185867 - DNA, 25 bp, Artificial
  probe
  misc_feature (1)..(25): SEQ ID NO: 4151; WAN024EX5_at; Start 245; Stop 269
cgggtattggcattatcgtagtgtc

SEQ ID NO: 185868 - DNA, 25 bp, Artificial
  probe
  misc_feature (1)..(25): SEQ ID NO: 4151; WAN024EX5_at; Start 452; Stop 476
cagggattcggtcaattttagtcaa

SEQ ID NO: 185869 - DNA, 25 bp, Artificial
  probe
  misc_feature (1)..(25): SEQ ID NO: 4151; WAN024EX5_at; Start 278; Stop 302
ccaaaaaacgcgttcaacgagcagt

SEQ ID NO: 185870 - DNA, 25 bp, Artificial
  probe
  misc_feature (1)..(25): SEQ ID NO: 4151; WAN024EX5_at; Start 469; Stop 493
ttagtcaaacccttggtccaacatg

SEQ ID NO: 185871 - DNA, 25 bp, Artificial
  probe
  misc_feature (1)..(25): SEQ ID NO: 4151; WAN024EX5_at; Start 180; Stop 204
cattgcttggaacaaccctgatgga

SEQ ID NO: 185872 - DNA, 25 bp, Artificial
  probe
  misc_feature (1)..(25): SEQ ID NO: 4151; WAN024EX5_at; Start 95; Stop 119
ctgtggaagcagtctatgatctgac

SEQ ID NO: 185873 - DNA, 25 bp, Artificial
  probe
  misc_feature (1)..(25): SEQ ID NO: 4151; WAN024EX5_at; Start 189; Stop 213
gaacaaccctgatggaacgccagag

SEQ ID NO: 185874 - DNA, 25 bp, Artificial
  probe
  misc_feature (1)..(25): SEQ ID NO: 4151; WAN024EX5_at; Start 483; Stop 507
ggtccaacatgactcaatcaaaacg

SEQ ID NO: 185875 - DNA, 25 bp, Artificial
  probe
  misc_feature (1)..(25): SEQ ID NO: 4151; WAN024EX5_at; Start 510; Stop 534
gattaaccgaactcgtgagcgtcgt

SEQ ID NO: 185876 - DNA, 25 bp, Artificial
  probe
  misc_feature (1)..(25): SEQ ID NO: 4151; WAN024EX5_at; Start 199; Stop 223
gatggaacgccagagatgaagcaat

SEQ ID NO: 185877 - DNA, 25 bp, Artificial
  probe
  misc_feature (1)..(25): SEQ ID NO: 4151; WAN024EX5_at; Start 523; Stop 547
cgtgagcgtcgtgttatgagaaaaa

SEQ ID NO: 185878 - DNA, 25 bp, Artificial
  probe
  misc_feature (1)..(25): SEQ ID NO: 4151; WAN024EX5_at; Start 58; Stop 82
gccagaatggcgattgaaaattata

SEQ ID NO: 185879 - DNA, 25 bp, Artificial
  probe
  misc_feature (1)..(25): SEQ ID NO: 4151; WAN024EX5_at; Start 167; Stop 191
tggataataccctcattgcttggaa

SEQ ID NO: 185880 - DNA, 25 bp, Artificial
  probe
  misc_feature (1)..(25): SEQ ID NO: 4151; WAN024EX5_at; Start 548; Stop 572
tcactgaaaagtacggaccgattac

SEQ ID NO: 185881 - DNA, 25 bp, Artificial
  probe
  misc_feature (1)..(25): SEQ ID NO: 4151; WAN024EX5_at; Start 500; Stop 524
tcaaaacgcagattaaccgaactcg

SEQ ID NO: 185882 - DNA, 25 bp, Artificial
  probe
  misc_feature (1)..(25): SEQ ID NO: 4151; WAN024EX5_at; Start 319; Stop 343
gattacgtttactgggccttgaagc

SEQ ID NO: 185883 - DNA, 25 bp, Artificial
  probe
  misc_feature (1)..(25): SEQ ID NO: 4151; WAN024EX5_at; Start 372; Stop 396
gaaggaattccactatgacaaaaag

SEQ ID NO: 185884 - DNA, 25 bp, Artificial
  probe
  misc_feature (1)..(25): SEQ ID NO: 4151; WAN024EX5_at; Start 388; Stop 412
gacaaaaaggaagtggtcatggttg

SEQ ID NO: 185885 - DNA, 25 bp, Artificial
  probe
  misc_feature (1)..(25): SEQ ID NO: 4151; WAN024EX5_at; Start 539; Stop 563
tgagaaaaatcactgaaaagtacgg

SEQ ID NO: 185886 - DNA, 25 bp, Artificial
  probe
  misc_feature (1)..(25): SEQ ID NO: 4151; WAN024EX5_at; Start 328; Stop 352
tactgggccttgaagcccttcacat

SEQ ID NO: 185887 - DNA, 25 bp, Artificial
  probe
  misc_feature (1)..(25): SEQ ID NO: 4151; WAN024EX5_at; Start 258; Stop 282
tatcgtagtgtcaaataacaccaaa

SEQ ID NO: 185888 - DNA, 25 bp, Artificial
  probe
  misc_feature (1)..(25): SEQ ID NO: 5561; WAN024EX6_at; Start 82; Stop 106
taccttgtagcgtggacgctgaacc

SEQ ID NO: 185889 - DNA, 25 bp, Artificial
  probe
  misc_feature (1)..(25): SEQ ID NO: 5561; WAN024EX6_at; Start 199; Stop 223
cgtatctggattcttctctgtcaaa

SEQ ID NO: 185890 - DNA, 25 bp, Artificial
  probe
  misc_feature (1)..(25): SEQ ID NO: 5561; WAN024EX6_at; Start 126; Stop 150
caaccagttcatcaattcggtacca

SEQ ID NO: 185891 - DNA, 25 bp, Artificial
  probe
  misc_feature (1)..(25): SEQ ID NO: 5561; WAN024EX6_at; Start 109; Stop 133
cacaaactgaaccatgtcaaccagt

SEQ ID NO: 185892 - DNA, 25 bp, Artificial
  probe
  misc_feature (1)..(25): SEQ ID NO: 5561; WAN024EX6_at; Start 241; Stop 265
ggtgtaggaaatacccttgcgctcc

SEQ ID NO: 185893 - DNA, 25 bp, Artificial
  probe
  misc_feature (1)..(25): SEQ ID NO: 5561; WAN024EX6_at; Start 24; Stop 48
tgctggacgagatatccatgagcgg

SEQ ID NO: 185894 - DNA, 25 bp, Artificial
  probe
  misc_feature (1)..(25): SEQ ID NO: 5561; WAN024EX6_at; Start 78; Stop 102
tccctaccttgtagcgtggacgctg

SEQ ID NO: 185895 - DNA, 25 bp, Artificial
  probe
  misc_feature (1)..(25): SEQ ID NO: 5561; WAN024EX6_at; Start 210; Stop 234
tcttctctgtcaaaatcttcatggt

SEQ ID NO: 185896 - DNA, 25 bp, Artificial
  probe
  misc_feature (1)..(25): SEQ ID NO: 5561; WAN024EX6_at; Start 161; Stop 185
tagtcaaccatgtcggcaccgatga

SEQ ID NO: 185897 - DNA, 25 bp, Artificial
  probe
  misc_feature (1)..(25): SEQ ID NO: 5561; WAN024EX6_at; Start 47; Stop 71
ggtacgtccacccagataactggat

SEQ ID NO: 185898 - DNA, 25 bp, Artificial
  probe
  misc_feature (1)..(25): SEQ ID NO: 5561; WAN024EX6_at; Start 142; Stop 166
tcggtaccacttaggcagatagtca

SEQ ID NO: 185899 - DNA, 25 bp, Artificial
  probe
  misc_feature (1)..(25): SEQ ID NO: 5561; WAN024EX6_at; Start 7; Stop 31
aaggaagtcccgcaccatgctggac

SEQ ID NO: 185900 - DNA, 25 bp, Artificial
  probe
  misc_feature (1)..(25): SEQ ID NO: 5561; WAN024EX6_at; Start 184; Stop 208
gataaagtaataatccgtatctgga

SEQ ID NO: 185901 - DNA, 25 bp, Artificial
  probe
  misc_feature (1)..(25): SEQ ID NO: 5561; WAN024EX6_at; Start 171; Stop 195
tgtcggcaccgatgataaagtaata

SEQ ID NO: 185902 - DNA, 25 bp, Artificial
  probe
  misc_feature (1)..(25): SEQ ID NO: 5561; WAN024EX6_at; Start 121; Stop 145
catgtcaaccagttcatcaattcgg

SEQ ID NO: 185903 - DNA, 25 bp, Artificial
  probe
  misc_feature (1)..(25): SEQ ID NO: 5561; WAN024EX6_at; Start 264; Stop 288
ccaactcaatggtttcaatgactag

SEQ ID NO: 185904 - DNA, 25 bp, Artificial
  probe
  misc_feature (1)..(25): SEQ ID NO: 5561; WAN024EX6_at; Start 61; Stop 85
gataactggataggaagtccctacc

SEQ ID NO: 185905 - DNA, 25 bp, Artificial
  probe
  misc_feature (1)..(25): SEQ ID NO: 5561; WAN024EX6_at; Start 73; Stop 97
ggaagtccctaccttgtagcgtgga

SEQ ID NO: 185906 - DNA, 25 bp, Artificial
  probe
  misc_feature (1)..(25): SEQ ID NO: 5561; WAN024EX6_at; Start 137; Stop 161
tcaattcggtaccacttaggcagat

SEQ ID NO: 185907 - DNA, 25 bp, Artificial
  probe
  misc_feature (1)..(25): SEQ ID NO: 5561; WAN024EX6_at; Start 1; Stop 25
ttgggcaaggaagtcccgcaccatg

SEQ ID NO: 185908 - DNA, 25 bp, Artificial
  probe
  misc_feature (1)..(25): SEQ ID NO: 5561; WAN024EX6_at; Start 176; Stop 200
gcaccgatgataaagtaataatccg

SEQ ID NO: 185909 - DNA, 25 bp, Artificial
  probe
  misc_feature (1)..(25): SEQ ID NO: 5561; WAN024EX6_at; Start 43; Stop 67
gagcggtacgtccacccagataact

SEQ ID NO: 185910 - DNA, 25 bp, Artificial
  probe
  misc_feature (1)..(25): SEQ ID NO: 5561; WAN024EX6_at; Start 57; Stop 81
cccagataactggataggaagtccc

SEQ ID NO: 185911 - DNA, 25 bp, Artificial
  probe
  misc_feature (1)..(25): SEQ ID NO: 5561; WAN024EX6_at; Start 19; Stop 43
caccatgctggacgagatatccatg

SEQ ID NO: 185912 - DNA, 25 bp, Artificial
  probe
  misc_feature (1)..(25): SEQ ID NO: 5561; WAN024EX6_at; Start 236; Stop 260
tcgtaggtgtaggaaatacccttgc

SEQ ID NO: 185913 - DNA, 25 bp, Artificial
  probe
  misc_feature (1)..(25): SEQ ID NO: 5561; WAN024EX6_at; Start 32; Stop 56
gagatatccatgagcggtacgtcca

SEQ ID NO: 185914 - DNA, 25 bp, Artificial
  probe
  misc_feature (1)..(25): SEQ ID NO: 5561; WAN024EX6_at; Start 93; Stop 117
gtggacgctgaacccccacaaactg

SEQ ID NO: 185915 - DNA, 25 bp, Artificial
  probe
  misc_feature (1)..(25): SEQ ID NO: 5561; WAN024EX6_at; Start 146; Stop 170
taccacttaggcagatagtcaacca

SEQ ID NO: 185916 - DNA, 25 bp, Artificial
  probe
  misc_feature (1)..(25): SEQ ID NO: 5561; WAN024EX6_at; Start 153; Stop 177
taggcagatagtcaaccatgtcggc

SEQ ID NO: 185917 - DNA, 25 bp, Artificial
  probe
  misc_feature (1)..(25): SEQ ID NO: 5561; WAN024EX6_at; Start 14; Stop 38
tcccgcaccatgctggacgagatat

SEQ ID NO: 185918 - DNA, 25 bp, Artificial
  probe
  misc_feature (1)..(25): SEQ ID NO: 5561; WAN024EX6_at; Start 69; Stop 93
gataggaagtccctaccttgtagcg

SEQ ID NO: 185919 - DNA, 25 bp, Artificial
  probe
  misc_feature (1)..(25): SEQ ID NO: 5561; WAN024EX6_at; Start 245; Stop 269
taggaaatacccttgcgctccaact

SEQ ID NO: 185920 - DNA, 25 bp, Artificial
  probe
  misc_feature (1)..(25): SEQ ID NO: 5561; WAN024EX6_at; Start 256; Stop 280
cttgcgctccaactcaatggtttca

SEQ ID NO: 185921 - DNA, 25 bp, Artificial
  probe
  misc_feature (1)..(25): SEQ ID NO: 5561; WAN024EX6_at; Start 158; Stop 182
agatagtcaaccatgtcggcaccga

SEQ ID NO: 185922 - DNA, 25 bp, Artificial
  probe
  misc_feature (1)..(25): SEQ ID NO: 1331; WAN024EX7_at; Start 268; Stop 292
gacggcctagtcattgaaaccattg

SEQ ID NO: 185923 - DNA, 25 bp, Artificial
  probe
  misc_feature (1)..(25): SEQ ID NO: 1331; WAN024EX7_at; Start 415; Stop 439
taccgaattgatgaactggttgaca

SEQ ID NO: 185924 - DNA, 25 bp, Artificial
  probe
  misc_feature (1)..(25): SEQ ID NO: 1331; WAN024EX7_at; Start 14; Stop 38
tattgactccctttaccaaggtaga

SEQ ID NO: 185925 - DNA, 25 bp, Artificial
  probe
  misc_feature (1)..(25): SEQ ID NO: 1331; WAN024EX7_at; Start 93; Stop 117
gaattttaaccctgttcacaatgcc

SEQ ID NO: 185926 - DNA, 25 bp, Artificial
  probe
  misc_feature (1)..(25): SEQ ID NO: 1331; WAN024EX7_at; Start 223; Stop 247
gaacaccatcgtctcaagatgcttg

SEQ ID NO: 185927 - DNA, 25 bp, Artificial
  probe
  misc_feature (1)..(25): SEQ ID NO: 1331; WAN024EX7_at; Start 282; Stop 306
tgaaaccattgagttggagcgcaag

SEQ ID NO: 185928 - DNA, 25 bp, Artificial
  probe
  misc_feature (1)..(25): SEQ ID NO: 1331; WAN024EX7_at; Start 145; Stop 169
caacagttgggactggatcaagttc

SEQ ID NO: 185929 - DNA, 25 bp, Artificial
  probe
  misc_feature (1)..(25): SEQ ID NO: 1331; WAN024EX7_at; Start 593; Stop 617
cagtgctagactacatcgagaagga

SEQ ID NO: 185930 - DNA, 25 bp, Artificial
  probe
  misc_feature (1)..(25): SEQ ID NO: 1331; WAN024EX7_at; Start 180; Stop 204
tgaataccaacctcctcacgttgat

SEQ ID NO: 185931 - DNA, 25 bp, Artificial
  probe
  misc_feature (1)..(25): SEQ ID NO: 1331; WAN024EX7_at; Start 397; Stop 421
gactatctgcctaagtggtaccgaa

SEQ ID NO: 185932 - DNA, 25 bp, Artificial
  probe
  misc_feature (1)..(25): SEQ ID NO: 1331; WAN024EX7_at; Start 195; Stop 219
tcacgttgataaaaaggaaaccatc

SEQ ID NO: 185933 - DNA, 25 bp, Artificial
  probe
  misc_feature (1)..(25): SEQ ID NO: 1331; WAN024EX7_at; Start 481; Stop 505
gggacttcctatccagttatctggg

SEQ ID NO: 185934 - DNA, 25 bp, Artificial
  probe
  misc_feature (1)..(25): SEQ ID NO: 1331; WAN024EX7_at; Start 46; Stop 70
ccagaaatcaaggagaaaaaacgca

SEQ ID NO: 185935 - DNA, 25 bp, Artificial
  probe
  misc_feature (1)..(25): SEQ ID NO: 1331; WAN024EX7_at; Start 110; Stop 134
acaatgcccatctcattgttgcgga

SEQ ID NO: 185936 - DNA, 25 bp, Artificial
  probe
  misc_feature (1)..(25): SEQ ID NO: 1331; WAN024EX7_at; Start 382; Stop 406
ggtgccgacatggttgactatctgc

SEQ ID NO: 185937 - DNA, 25 bp, Artificial
  probe
  misc_feature (1)..(25): SEQ ID NO: 1331; WAN024EX7_at; Start 237; Stop 261
caagatgcttgagttggcaattgag

SEQ ID NO: 185938 - DNA, 25 bp, Artificial
  probe
  misc_feature (1)..(25): SEQ ID NO: 1331; WAN024EX7_at; Start 2; Stop 26
tgacaatcgaactattgactccctt

SEQ ID NO: 185939 - DNA, 25 bp, Artificial
  probe
  misc_feature (1)..(25): SEQ ID NO: 1331; WAN024EX7_at; Start 494; Stop 518
cagttatctgggtggacgtaccgct

SEQ ID NO: 185940 - DNA, 25 bp, Artificial
  probe
  misc_feature (1)..(25): SEQ ID NO: 1331; WAN024EX7_at; Start 577; Stop 601
tttctcctacctcagccagtgctag

SEQ ID NO: 185941 - DNA, 25 bp, Artificial
  probe
  misc_feature (1)..(25): SEQ ID NO: 1331; WAN024EX7_at; Start 405; Stop 429
gcctaagtggtaccgaattgatgaa

SEQ ID NO: 185942 - DNA, 25 bp, Artificial
  probe
  misc_feature (1)..(25): SEQ ID NO: 1331; WAN024EX7_at; Start 507; Stop 531
ggacgtaccgctcatggatatctcg

SEQ ID NO: 185943 - DNA, 25 bp, Artificial
  probe
  misc_feature (1)..(25): SEQ ID NO: 1331; WAN024EX7_at; Start 133; Stop 157
gatcaagtacggcaacagttgggac

SEQ ID NO: 185944 - DNA, 25 bp, Artificial
  probe
  misc_feature (1)..(25): SEQ ID NO: 1331; WAN024EX7_at; Start 521; Stop 545
tggatatctcgtccagcatggtgcg

SEQ ID NO: 185945 - DNA, 25 bp, Artificial
  probe
  misc_feature (1)..(25): SEQ ID NO: 1331; WAN024EX7_at; Start 455; Stop 479
gggttcagcgtccacgctacaaggt

SEQ ID NO: 185946 - DNA, 25 bp, Artificial
  probe
  misc_feature (1)..(25): SEQ ID NO: 1331; WAN024EX7_at; Start 430; Stop 454
ctggttgacatggttcagtttgtgg

SEQ ID NO: 185947 - DNA, 25 bp, Artificial
  probe
  misc_feature (1)..(25): SEQ ID NO: 1331; WAN024EX7_at; Start 302; Stop 326
gcaagggtatttcctacacctacga

SEQ ID NO: 185948 - DNA, 25 bp, Artificial
  probe
  misc_feature (1)..(25): SEQ ID NO: 1331; WAN024EX7_at; Start 123; Stop 147
cattgttgcggatcaagtacggcaa

SEQ ID NO: 185949 - DNA, 25 bp, Artificial
  probe
  misc_feature (1)..(25): SEQ ID NO: 1331; WAN024EX7_at; Start 209; Stop 233
aggaaaccatccctgaacaccatcg

SEQ ID NO: 185950 - DNA, 25 bp, Artificial
  probe
  misc_feature (1)..(25): SEQ ID NO: 1331; WAN024EX7_at; Start 329; Stop 353
ccatgaagattttgacagagaagaa

SEQ ID NO: 185951 - DNA, 25 bp, Artificial
  probe
  misc_feature (1)..(25): SEQ ID NO: 1331; WAN024EX7_at; Start 367; Stop 391
tattactttatcatcggtgccgaca

SEQ ID NO: 185952 - DNA, 25 bp, Artificial
  probe
  misc_feature (1)..(25): SEQ ID NO: 1331; WAN024EX7_at; Start 340; Stop 364
ttgacagagaagaatccagatacgg

SEQ ID NO: 185953 - DNA, 25 bp, Artificial
  probe
  misc_feature (1)..(25): SEQ ID NO: 1331; WAN024EX7_at; Start 292; Stop 316
gagttggagcgcaagggtatttcct

SEQ ID NO: 185954 - DNA, 25 bp, Artificial
  probe
  misc_feature (1)..(25): SEQ ID NO: 1331; WAN024EX7_at; Start 30; Stop 54
caaggtagagttggagccagaaatc

SEQ ID NO: 185955 - DNA, 25 bp, Artificial
  probe
  misc_feature (1)..(25): SEQ ID NO: 1331; WAN024EX7_at; Start 467; Stop 491
cacgctacaaggtagggacttccta

SEQ ID NO: 185956 - DNA, 25 bp, Artificial
  probe
  misc_feature (1)..(25): SEQ ID NO: 5341; WAN024EX8_at; Start 33; Stop 57
gcggatgagcttctgcctcttctgg

SEQ ID NO: 185957 - DNA, 25 bp, Artificial
  probe
  misc_feature (1)..(25): SEQ ID NO: 5341; WAN024EX8_at; Start 164; Stop 188
gcatagatagcctgattatcaataa

SEQ ID NO: 185958 - DNA, 25 bp, Artificial
  probe
  misc_feature (1)..(25): SEQ ID NO: 5341; WAN024EX8_at; Start 240; Stop 264
caagctggtgaatcttttgattttc

SEQ ID NO: 185959 - DNA, 25 bp, Artificial
  probe
  misc_feature (1)..(25): SEQ ID NO: 5341; WAN024EX8_at; Start 227; Stop 251
gcttcatcctgaccaagctggtgaa

SEQ ID NO: 185960 - DNA, 25 bp, Artificial
  probe
  misc_feature (1)..(25): SEQ ID NO: 5341; WAN024EX8_at; Start 83; Stop 107
tcattaaccaaggaatgatcgctcg

SEQ ID NO: 185961 - DNA, 25 bp, Artificial
  probe
  misc_feature (1)..(25): SEQ ID NO: 5341; WAN024EX8_at; Start 3; Stop 27
gcccaatagactgggtgataatatt

SEQ ID NO: 185962 - DNA, 25 bp, Artificial
  probe
  misc_feature (1)..(25): SEQ ID NO: 5341; WAN024EX8_at; Start 125; Stop 149
tctccacgaatcaagccgatacgcg

SEQ ID NO: 185963 - DNA, 25 bp, Artificial
  probe
  misc_feature (1)..(25): SEQ ID NO: 5341; WAN024EX8_at; Start 27; Stop 51
ttttttgcggatgagcttctgcctc

SEQ ID NO: 185964 - DNA, 25 bp, Artificial
  probe
  misc_feature (1)..(25): SEQ ID NO: 5341; WAN024EX8_at; Start 114; Stop 138
gatggtattcttctccacgaatcaa

SEQ ID NO: 185965 - DNA, 25 bp, Artificial
  probe
  misc_feature (1)..(25): SEQ ID NO: 5341; WAN024EX8_at; Start 109; Stop 133
caactgatggtattcttctccacga

SEQ ID NO: 185966 - DNA, 25 bp, Artificial
  probe
  misc_feature (1)..(25): SEQ ID NO: 5341; WAN024EX8_at; Start 159; Stop 183
tatgagcatagatagcctgattatc

SEQ ID NO: 185967 - DNA, 25 bp, Artificial
  probe
  misc_feature (1)..(25): SEQ ID NO: 5341; WAN024EX8_at; Start 139; Stop 163
gccgatacgcgaatcaccaatatga

SEQ ID NO: 185968 - DNA, 25 bp, Artificial
  probe
  misc_feature (1)..(25): SEQ ID NO: 5341; WAN024EX8_at; Start 87; Stop 111
taaccaaggaatgatcgctcgtcaa

SEQ ID NO: 185969 - DNA, 25 bp, Artificial
  probe
  misc_feature (1)..(25): SEQ ID NO: 5341; WAN024EX8_at; Start 75; Stop 99
tgagcaattcattaaccaaggaatg

SEQ ID NO: 185970 - DNA, 25 bp, Artificial
  probe
  misc_feature (1)..(25): SEQ ID NO: 5341; WAN024EX8_at; Start 196; Stop 220
gacttccaaagtagttcccatgcct

SEQ ID NO: 185971 - DNA, 25 bp, Artificial
  probe
  misc_feature (1)..(25): SEQ ID NO: 5341; WAN024EX8_at; Start 102; Stop 126
cgctcgtcaactgatggtattcttc

SEQ ID NO: 185972 - DNA, 25 bp, Artificial
  probe
  misc_feature (1)..(25): SEQ ID NO: 5341; WAN024EX8_at; Start 231; Stop 255
catcctgaccaagctggtgaatctt

SEQ ID NO: 185973 - DNA, 25 bp, Artificial
  probe
  misc_feature (1)..(25): SEQ ID NO: 5341; WAN024EX8_at; Start 207; Stop 231
tagttcccatgcctctgtaagcttc

SEQ ID NO: 185974 - DNA, 25 bp, Artificial
  probe
  misc_feature (1)..(25): SEQ ID NO: 5341; WAN024EX8_at; Start 56; Stop 80
ggtgtcaattgaccagccttgagca

SEQ ID NO: 185975 - DNA, 25 bp, Artificial
  probe
  misc_feature (1)..(25): SEQ ID NO: 5341; WAN024EX8_at; Start 142; Stop 166
gatacgcgaatcaccaatatgagca

SEQ ID NO: 185976 - DNA, 25 bp, Artificial
  probe
  misc_feature (1)..(25): SEQ ID NO: 5341; WAN024EX8_at; Start 44; Stop 68
tctgcctcttctggtgtcaattgac

SEQ ID NO: 185977 - DNA, 25 bp, Artificial
  probe
  misc_feature (1)..(25): SEQ ID NO: 5341; WAN024EX8_at; Start 189; Stop 213
tagcaaggacttccaaagtagttcc

SEQ ID NO: 185978 - DNA, 25 bp, Artificial
  probe
  misc_feature (1)..(25): SEQ ID NO: 5341; WAN024EX8_at; Start 39; Stop 63
gagcttctgcctcttctggtgtcaa

SEQ ID NO: 185979 - DNA, 25 bp, Artificial
  probe
  misc_feature (1)..(25): SEQ ID NO: 5341; WAN024EX8_at; Start 203; Stop 227
aaagtagttcccatgcctctgtaag

SEQ ID NO: 185980 - DNA, 25 bp, Artificial
  probe
  misc_feature (1)..(25): SEQ ID NO: 5341; WAN024EX8_at; Start 179; Stop 203
ttatcaataatagcaaggacttcca

SEQ ID NO: 185981 - DNA, 25 bp, Artificial
  probe
  misc_feature (1)..(25): SEQ ID NO: 5341; WAN024EX8_at; Start 222; Stop 246
tgtaagcttcatcctgaccaagctg

SEQ ID NO: 185982 - DNA, 25 bp, Artificial
  probe
  misc_feature (1)..(25): SEQ ID NO: 5341; WAN024EX8_at; Start 119; Stop 143
tattcttctccacgaatcaagccga

SEQ ID NO: 185983 - DNA, 25 bp, Artificial
  probe
  misc_feature (1)..(25): SEQ ID NO: 5341; WAN024EX8_at; Start 214; Stop 238
catgcctctgtaagcttcatcctga

SEQ ID NO: 185984 - DNA, 25 bp, Artificial
  probe
  misc_feature (1)..(25): SEQ ID NO: 5341; WAN024EX8_at; Start 236; Stop 260
tgaccaagctggtgaatcttttgat

SEQ ID NO: 185985 - DNA, 25 bp, Artificial
  probe
  misc_feature (1)..(25): SEQ ID NO: 5341; WAN024EX8_at; Start 65; Stop 89
tgaccagccttgagcaattcattaa

SEQ ID NO: 185986 - DNA, 25 bp, Artificial
  probe
  misc_feature (1)..(25): SEQ ID NO: 5341; WAN024EX8_at; Start 95; Stop 119
gaatgatcgctcgtcaactgatggt

SEQ ID NO: 185987 - DNA, 25 bp, Artificial
  probe
  misc_feature (1)..(25): SEQ ID NO: 5341; WAN024EX8_at; Start 146; Stop 170
cgcgaatcaccaatatgagcataga

SEQ ID NO: 185988 - DNA, 25 bp, Artificial
  probe
  misc_feature (1)..(25): SEQ ID NO: 5341; WAN024EX8_at; Start 132; Stop 156
gaatcaagccgatacgcgaatcacc

SEQ ID NO: 185989 - DNA, 25 bp, Artificial
  probe
  misc_feature (1)..(25): SEQ ID NO: 5341; WAN024EX8_at; Start 153; Stop 177
caccaatatgagcatagatagcctg

SEQ ID NO: 185990 - DNA, 25 bp, Artificial
  probe
  misc_feature (1)..(25): SEQ ID NO: 2306; WAN024EX9_at; Start 292; Stop 316
ggaactactttggaagtccttgcta

SEQ ID NO: 185991 - DNA, 25 bp, Artificial
  probe
  misc_feature (1)..(25): SEQ ID NO: 2306; WAN024EX9_at; Start 67; Stop 91
tatgtcaatagagctggacgtacca

SEQ ID NO: 185992 - DNA, 25 bp, Artificial
  probe
  misc_feature (1)..(25): SEQ ID NO: 2306; WAN024EX9_at; Start 342; Stop 366
tcatattggtgattcgcgtatcggc

SEQ ID NO: 185993 - DNA, 25 bp, Artificial
  probe
  misc_feature (1)..(25): SEQ ID NO: 2306; WAN024EX9_at; Start 379; Stop 403
gaagaataccatcagttgacgagcg

SEQ ID NO: 185994 - DNA, 25 bp, Artificial
  probe
  misc_feature (1)..(25): SEQ ID NO: 2306; WAN024EX9_at; Start 417; Stop 441
taatgaattgctcaaggctggtcaa

SEQ ID NO: 185995 - DNA, 25 bp, Artificial
  probe
  misc_feature (1)..(25): SEQ ID NO: 2306; WAN024EX9_at; Start 584; Stop 608
ccaacatgatttcaggcagtgagat

SEQ ID NO: 185996 - DNA, 25 bp, Artificial
  probe
  misc_feature (1)..(25): SEQ ID NO: 2306; WAN024EX9_at; Start 128; Stop 152
cagggaatatcgctagtgaaatggc

SEQ ID NO: 185997 - DNA, 25 bp, Artificial
  probe
  misc_feature (1)..(25): SEQ ID NO: 2306; WAN024EX9_at; Start 181; Stop 205
gatacccagatcgatacagtcaatg

SEQ ID NO: 185998 - DNA, 25 bp, Artificial
  probe
  misc_feature (1)..(25): SEQ ID NO: 2306; WAN024EX9_at; Start 660; Stop 684
tgttcgttttgctaacaatgcagga

SEQ ID NO: 185999 - DNA, 25 bp, Artificial
  probe
  misc_feature (1)..(25): SEQ ID NO: 2306; WAN024EX9_at; Start 688; Stop 712
ttagacaacattacggttgcccttg

SEQ ID NO: 186000 - DNA, 25 bp, Artificial
  probe
  misc_feature (1)..(25): SEQ ID NO: 2306; WAN024EX9_at; Start 17; Stop 41
taacagatgttggtcagaaacgaac

SEQ ID NO: 186001 - DNA, 25 bp, Artificial
  probe
  misc_feature (1)..(25): SEQ ID NO: 2306; WAN024EX9_at; Start 640; Stop 664
gcagataaaacggagacacttgttc

SEQ ID NO: 186002 - DNA, 25 bp, Artificial
  probe
  misc_feature (1)..(25): SEQ ID NO: 2306; WAN024EX9_at; Start 201; Stop 225
caatgaagtgcgtgaatggttcgcc

SEQ ID NO: 186003 - DNA, 25 bp, Artificial
  probe
  misc_feature (1)..(25): SEQ ID NO: 2306; WAN024EX9_at; Start 570; Stop 594
tagtgacggcttgaccaacatgatt

SEQ ID NO: 186004 - DNA, 25 bp, Artificial
  probe
  misc_feature (1)..(25): SEQ ID NO: 2306; WAN024EX9_at; Start 357; Stop 381
gcgtatcggcttgattcgtggagaa

SEQ ID NO: 186005 - DNA, 25 bp, Artificial
  probe
  misc_feature (1)..(25): SEQ ID NO: 2306; WAN024EX9_at; Start 707; Stop 731
cccttgtttctatgaacgaggagga

SEQ ID NO: 186006 - DNA, 25 bp, Artificial
  probe
  misc_feature (1)..(25): SEQ ID NO: 2306; WAN024EX9_at; Start 327; Stop 351
tcaggctatctatgctcatattggt

SEQ ID NO: 186007 - DNA, 25 bp, Artificial
  probe
  misc_feature (1)..(25): SEQ ID NO: 2306; WAN024EX9_at; Start 247; Stop 271
caaaagattcaccagcttggtcagg

SEQ ID NO: 186008 - DNA, 25 bp, Artificial
  probe
  misc_feature (1)..(25): SEQ ID NO: 2306; WAN024EX9_at; Start 162; Stop 186
cctgggtgtagcttgggttgatacc

SEQ ID NO: 186009 - DNA, 25 bp, Artificial
  probe
  misc_feature (1)..(25): SEQ ID NO: 2306; WAN024EX9_at; Start 264; Stop 288
tggtcaggatgaagcttacagaggc

SEQ ID NO: 186010 - DNA, 25 bp, Artificial
  probe
  misc_feature (1)..(25): SEQ ID NO: 2306; WAN024EX9_at; Start 396; Stop 420
gacgagcgatcattccttggttaat

SEQ ID NO: 186011 - DNA, 25 bp, Artificial
  probe
  misc_feature (1)..(25): SEQ ID NO: 2306; WAN024EX9_at; Start 604; Stop 628
gagattcgtgatattgtaaccagtg

SEQ ID NO: 186012 - DNA, 25 bp, Artificial
  probe
  misc_feature (1)..(25): SEQ ID NO: 2306; WAN024EX9_at; Start 512; Stop 536
aaattcagcctgattttgggacagt

SEQ ID NO: 186013 - DNA, 25 bp, Artificial
  probe
  misc_feature (1)..(25): SEQ ID NO: 2306; WAN024EX9_at; Start 52; Stop 76
gactatgtcaaccactatgtcaata

SEQ ID NO: 186014 - DNA, 25 bp, Artificial
  probe
  misc_feature (1)..(25): SEQ ID NO: 2306; WAN024EX9_at; Start 83; Stop 107
gacgtaccatgattattttagctga

SEQ ID NO: 186015 - DNA, 25 bp, Artificial
  probe
  misc_feature (1)..(25): SEQ ID NO: 2306; WAN024EX9_at; Start 436; Stop 460
ggtcaattgacaccagaagaggcag

SEQ ID NO: 186016 - DNA, 25 bp, Artificial
  probe
  misc_feature (1)..(25): SEQ ID NO: 2306; WAN024EX9_at; Start 277; Stop 301
gcttacagaggcatgggaactactt

SEQ ID NO: 186017 - DNA, 25 bp, Artificial
  probe
  misc_feature (1)..(25): SEQ ID NO: 2306; WAN024EX9_at; Start 480; Stop 504
tattatcacccagtctattgggcaa

SEQ ID NO: 186018 - DNA, 25 bp, Artificial
  probe
  misc_feature (1)..(25): SEQ ID NO: 2306; WAN024EX9_at; Start 527; Stop 551
ttgggacagttatccttgagtcagg

SEQ ID NO: 186019 - DNA, 25 bp, Artificial
  probe
  misc_feature (1)..(25): SEQ ID NO: 2306; WAN024EX9_at; Start 672; Stop 696
taacaatgcaggaggtttagacaac

SEQ ID NO: 186020 - DNA, 25 bp, Artificial
  probe
  misc_feature (1)..(25): SEQ ID NO: 2306; WAN024EX9_at; Start 497; Stop 521
ttgggcaaaaagatgaaattcagcc

SEQ ID NO: 186021 - DNA, 25 bp, Artificial
  probe
  misc_feature (1)..(25): SEQ ID NO: 2306; WAN024EX9_at; Start 218; Stop 242
ggttcgcccattacctagaaattga

SEQ ID NO: 186022 - DNA, 25 bp, Artificial
  probe
  misc_feature (1)..(25): SEQ ID NO: 2306; WAN024EX9_at; Start 451; Stop 475
gaagaggcagaagctcatccgcaaa

SEQ ID NO: 186023 - DNA, 25 bp, Artificial
  probe
  misc_feature (1)..(25): SEQ ID NO: 2306; WAN024EX9_at; Start 147; Stop 171
aatggcggtcacagacctgggtgta

SEQ ID NO: 186024 - DNA, 25 bp, Artificial
  probe
  misc_feature (1)..(25): SEQ ID NO: 5803; WAN024EXA_at; Start 129; Stop 153
tgtaactcggcatggcaacacttgt

SEQ ID NO: 186025 - DNA, 25 bp, Artificial
  probe
  misc_feature (1)..(25): SEQ ID NO: 5803; WAN024EXA_at; Start 71; Stop 95
tccttaatcccaacaatttgaatca

SEQ ID NO: 186026 - DNA, 25 bp, Artificial
  probe
  misc_feature (1)..(25): SEQ ID NO: 5803; WAN024EXA_at; Start 215; Stop 239
gcacctggactttgtttcataatcg

SEQ ID NO: 186027 - DNA, 25 bp, Artificial
  probe
  misc_feature (1)..(25): SEQ ID NO: 5803; WAN024EXA_at; Start 27; Stop 51
tacctgcaggcgctgtcgtcacttc

SEQ ID NO: 186028 - DNA, 25 bp, Artificial
  probe
  misc_feature (1)..(25): SEQ ID NO: 5803; WAN024EXA_at; Start 222; Stop 246
gactttgtttcataatcgttcctgg

SEQ ID NO: 186029 - DNA, 25 bp, Artificial
  probe
  misc_feature (1)..(25): SEQ ID NO: 5803; WAN024EXA_at; Start 122; Stop 146
gaaccaatgtaactcggcatggcaa

SEQ ID NO: 186030 - DNA, 25 bp, Artificial
  probe
  misc_feature (1)..(25): SEQ ID NO: 5803; WAN024EXA_at; Start 152; Stop 176
gtaacttttttagctactgtcaaga

SEQ ID NO: 186031 - DNA, 25 bp, Artificial
  probe
  misc_feature (1)..(25): SEQ ID NO: 5803; WAN024EXA_at; Start 200; Stop 224
tcataagtcgttccggcacctggac

SEQ ID NO: 186032 - DNA, 25 bp, Artificial
  probe
  misc_feature (1)..(25): SEQ ID NO: 5803; WAN024EXA_at; Start 50; Stop 74
tctacaacttctatattagcttcct

SEQ ID NO: 186033 - DNA, 25 bp, Artificial
  probe
  misc_feature (1)..(25): SEQ ID NO: 5803; WAN024EXA_at; Start 32; Stop 56
gcaggcgctgtcgtcacttctacaa

SEQ ID NO: 186034 - DNA, 25 bp, Artificial
  probe
  misc_feature (1)..(25): SEQ ID NO: 5803; WAN024EXA_at; Start 260; Stop 284
gactcttcttcctctatcttaatca

SEQ ID NO: 186035 - DNA, 25 bp, Artificial
  probe
  misc_feature (1)..(25): SEQ ID NO: 5803; WAN024EXA_at; Start 204; Stop 228
aagtcgttccggcacctggactttg

SEQ ID NO: 186036 - DNA, 25 bp, Artificial
  probe
  misc_feature (1)..(25): SEQ ID NO: 5803; WAN024EXA_at; Start 234; Stop 258
taatcgttcctggttcgctttcgct

SEQ ID NO: 186037 - DNA, 25 bp, Artificial
  probe
  misc_feature (1)..(25): SEQ ID NO: 5803; WAN024EXA_at; Start 96; Stop 120
aattgttcttagtaaactccaagct

SEQ ID NO: 186038 - DNA, 25 bp, Artificial
  probe
  misc_feature (1)..(25): SEQ ID NO: 5803; WAN024EXA_at; Start 132; Stop 156
aactcggcatggcaacacttgtaac

SEQ ID NO: 186039 - DNA, 25 bp, Artificial
  probe
  misc_feature (1)..(25): SEQ ID NO: 5803; WAN024EXA_at; Start 227; Stop 251
tgtttcataatcgttcctggttcgc

SEQ ID NO: 186040 - DNA, 25 bp, Artificial
  probe
  misc_feature (1)..(25): SEQ ID NO: 5803; WAN024EXA_at; Start 192; Stop 216
tactcacatcataagtcgttccggc

SEQ ID NO: 186041 - DNA, 25 bp, Artificial
  probe
  misc_feature (1)..(25): SEQ ID NO: 5803; WAN024EXA_at; Start 35; Stop 59
ggcgctgtcgtcacttctacaactt

SEQ ID NO: 186042 - DNA, 25 bp, Artificial
  probe
  misc_feature (1)..(25): SEQ ID NO: 5803; WAN024EXA_at; Start 274; Stop 298
tatcttaatcaaattctcaggaacc

SEQ ID NO: 186043 - DNA, 25 bp, Artificial
  probe
  misc_feature (1)..(25): SEQ ID NO: 5803; WAN024EXA_at; Start 161; Stop 185
ttagctactgtcaagacaatttgag

SEQ ID NO: 186044 - DNA, 25 bp, Artificial
  probe
  misc_feature (1)..(25): SEQ ID NO: 5803; WAN024EXA_at; Start 185; Stop 209
gtaggtttactcacatcataagtcg

SEQ ID NO: 186045 - DNA, 25 bp, Artificial
  probe
  misc_feature (1)..(25): SEQ ID NO: 5803; WAN024EXA_at; Start 246; Stop 270
gttcgctttcgctggactcttcttc

SEQ ID NO: 186046 - DNA, 25 bp, Artificial
  probe
  misc_feature (1)..(25): SEQ ID NO: 5803; WAN024EXA_at; Start 198; Stop 222
catcataagtcgttccggcacctgg

SEQ ID NO: 186047 - DNA, 25 bp, Artificial
  probe
  misc_feature (1)..(25): SEQ ID NO: 5803; WAN024EXA_at; Start 172; Stop 196
caagacaatttgagtaggtttactc

SEQ ID NO: 186048 - DNA, 25 bp, Artificial
  probe
  misc_feature (1)..(25): SEQ ID NO: 5803; WAN024EXA_at; Start 66; Stop 90
tagcttccttaatcccaacaatttg

SEQ ID NO: 186049 - DNA, 25 bp, Artificial
  probe
  misc_feature (1)..(25): SEQ ID NO: 5803; WAN024EXA_at; Start 237; Stop 261
tcgttcctggttcgctttcgctgga

SEQ ID NO: 186050 - DNA, 25 bp, Artificial
  probe
  misc_feature (1)..(25): SEQ ID NO: 5803; WAN024EXA_at; Start 283; Stop 307
caaattctcaggaaccttcttctgc

SEQ ID NO: 186051 - DNA, 25 bp, Artificial
  probe
  misc_feature (1)..(25): SEQ ID NO: 5803; WAN024EXA_at; Start 242; Stop 266
cctggttcgctttcgctggactctt

SEQ ID NO: 186052 - DNA, 25 bp, Artificial
  probe
  misc_feature (1)..(25): SEQ ID NO: 5803; WAN024EXA_at; Start 90; Stop 114
gaatcaaattgttcttagtaaactc

SEQ ID NO: 186053 - DNA, 25 bp, Artificial
  probe
  misc_feature (1)..(25): SEQ ID NO: 5803; WAN024EXA_at; Start 141; Stop 165
tggcaacacttgtaacttttttagc

SEQ ID NO: 186054 - DNA, 25 bp, Artificial
  probe
  misc_feature (1)..(25): SEQ ID NO: 5803; WAN024EXA_at; Start 41; Stop 65
gtcgtcacttctacaacttctatat

SEQ ID NO: 186055 - DNA, 25 bp, Artificial
  probe
  misc_feature (1)..(25): SEQ ID NO: 5803; WAN024EXA_at; Start 288; Stop 312
tctcaggaaccttcttctgcttgag

SEQ ID NO: 186056 - DNA, 25 bp, Artificial
  probe
  misc_feature (1)..(25): SEQ ID NO: 5803; WAN024EXA_at; Start 212; Stop 236
ccggcacctggactttgtttcataa

SEQ ID NO: 186057 - DNA, 25 bp, Artificial
  probe
  misc_feature (1)..(25): SEQ ID NO: 5803; WAN024EXA_at; Start 135; Stop 159
tcggcatggcaacacttgtaacttt

SEQ ID NO: 186058 - DNA, 25 bp, Artificial
  probe
  misc_feature (1)..(25): SEQ ID NO: 1721; WAN024EXB_at; Start 123; Stop 147
gaaggttctgaggaccaactaccag

SEQ ID NO: 186059 - DNA, 25 bp, Artificial
  probe
  misc_feature (1)..(25): SEQ ID NO: 1721; WAN024EXB_at; Start 1127; Stop 1151
caggtcagacagttgcagaggccaa

SEQ ID NO: 186060 - DNA, 25 bp, Artificial
  probe
  misc_feature (1)..(25): SEQ ID NO: 1721; WAN024EXB_at; Start 24; Stop 48
tgccggacgctatcggattgtcaaa

SEQ ID NO: 186061 - DNA, 25 bp, Artificial
  probe
  misc_feature (1)..(25): SEQ ID NO: 1721; WAN024EXB_at; Start 371; Stop 395
tgcgcttggcccatactcgaggaat

SEQ ID NO: 186062 - DNA, 25 bp, Artificial
  probe
  misc_feature (1)..(25): SEQ ID NO: 1721; WAN024EXB_at; Start 456; Stop 480
cacagactttgggattgctgtagcc

SEQ ID NO: 186063 - DNA, 25 bp, Artificial
  probe
  misc_feature (1)..(25): SEQ ID NO: 1721; WAN024EXB_at; Start 1144; Stop 1168
gaggccaaggcaacgctcaaaaaag

SEQ ID NO: 186064 - DNA, 25 bp, Artificial
  probe
  misc_feature (1)..(25): SEQ ID NO: 1721; WAN024EXB_at; Start 441; Stop 465
tgggactgccaaggtcacagacttt

SEQ ID NO: 186065 - DNA, 25 bp, Artificial
  probe
  misc_feature (1)..(25): SEQ ID NO: 1721; WAN024EXB_at; Start 471; Stop 495
tgctgtagcctttgcagagacaagt

SEQ ID NO: 186066 - DNA, 25 bp, Artificial
  probe
  misc_feature (1)..(25): SEQ ID NO: 1721; WAN024EXB_at; Start 39; Stop 63
gattgtcaaacagattggtcgagga

SEQ ID NO: 186067 - DNA, 25 bp, Artificial
  probe
  misc_feature (1)..(25): SEQ ID NO: 1721; WAN024EXB_at; Start 530; Stop 554
attacttgtcaccagagcaggcgcg

SEQ ID NO: 186068 - DNA, 25 bp, Artificial
  probe
  misc_feature (1)..(25): SEQ ID NO: 1721; WAN024EXB_at; Start 871; Stop 895
gcagataccaagaccttgccgaagg

SEQ ID NO: 186069 - DNA, 25 bp, Artificial
  probe
  misc_feature (1)..(25): SEQ ID NO: 1721; WAN024EXB_at; Start 1049; Stop 1073
ccagccttgtattggtggcagcttc

SEQ ID NO: 186070 - DNA, 25 bp, Artificial
  probe
  misc_feature (1)..(25): SEQ ID NO: 1721; WAN024EXB_at; Start 145; Stop 169
cagacggacccgatagctgtagctc

SEQ ID NO: 186071 - DNA, 25 bp, Artificial
  probe
  misc_feature (1)..(25): SEQ ID NO: 1721; WAN024EXB_at; Start 641; Stop 665
gggatagcgcggtgaccattgccct

SEQ ID NO: 186072 - DNA, 25 bp, Artificial
  probe
  misc_feature (1)..(25): SEQ ID NO: 1721; WAN024EXB_at; Start 970; Stop 994
caggctgtgacagaggaaacttacc

SEQ ID NO: 186073 - DNA, 25 bp, Artificial
  probe
  misc_feature (1)..(25): SEQ ID NO: 1721; WAN024EXB_at; Start 855; Stop 879
tgatgaaacgagcaaggcagatacc

SEQ ID NO: 186074 - DNA, 25 bp, Artificial
  probe
  misc_feature (1)..(25): SEQ ID NO: 1721; WAN024EXB_at; Start 384; Stop 408
tactcgaggaattgttcacagggac

SEQ ID NO: 186075 - DNA, 25 bp, Artificial
  probe
  misc_feature (1)..(25): SEQ ID NO: 1721; WAN024EXB_at; Start 201; Stop 225
tctagaccatcctcatatcgttcgg

SEQ ID NO: 186076 - DNA, 25 bp, Artificial
  probe
  misc_feature (1)..(25): SEQ ID NO: 1721; WAN024EXB_at; Start 1227; Stop 1251
gattatccgtacagatcctggcgct

SEQ ID NO: 186077 - DNA, 25 bp, Artificial
  probe
  misc_feature (1)..(25): SEQ ID NO: 1721; WAN024EXB_at; Start 884; Stop 908
ccttgccgaaggtttctcagagtac

SEQ ID NO: 186078 - DNA, 25 bp, Artificial
  probe
  misc_feature (1)..(25): SEQ ID NO: 1721; WAN024EXB_at; Start 954; Stop 978
aatcaaaaacccaagccaggctgtg

SEQ ID NO: 186079 - DNA, 25 bp, Artificial
  probe
  misc_feature (1)..(25): SEQ ID NO: 1721; WAN024EXB_at; Start 356; Stop 380
aaattctcttggctatgcgcttggc

SEQ ID NO: 186080 - DNA, 25 bp, Artificial
  probe
  misc_feature (1)..(25): SEQ ID NO: 1721; WAN024EXB_at; Start 618; Stop 642
gacaggccatatcccttatgacggg

SEQ ID NO: 186081 - DNA, 25 bp, Artificial
  probe
  misc_feature (1)..(25): SEQ ID NO: 1721; WAN024EXB_at; Start 1242; Stop 1266
tcctggcgctggaactggtcgaaaa

SEQ ID NO: 186082 - DNA, 25 bp, Artificial
  probe
  misc_feature (1)..(25): SEQ ID NO: 1721; WAN024EXB_at; Start 810; Stop 834
tagtagcttgtcctacaatcgtaga

SEQ ID NO: 186083 - DNA, 25 bp, Artificial
  probe
  misc_feature (1)..(25): SEQ ID NO: 1721; WAN024EXB_at; Start 495; Stop 519
tctgacccagactaactcgatgttg

SEQ ID NO: 186084 - DNA, 25 bp, Artificial
  probe
  misc_feature (1)..(25): SEQ ID NO: 1721; WAN024EXB_at; Start 567; Stop 591
gactgtgcagagtgatatctatgcc

SEQ ID NO: 186085 - DNA, 25 bp, Artificial
  probe
  misc_feature (1)..(25): SEQ ID NO: 1721; WAN024EXB_at; Start 174; Stop 198
tcagcgtgaagcgagagctatggca

SEQ ID NO: 186086 - DNA, 25 bp, Artificial
  probe
  misc_feature (1)..(25): SEQ ID NO: 1721; WAN024EXB_at; Start 683; Stop 707
ccctgccgtccgttattgcagaaaa

SEQ ID NO: 186087 - DNA, 25 bp, Artificial
  probe
  misc_feature (1)..(25): SEQ ID NO: 1721; WAN024EXB_at; Start 185; Stop 209
cgagagctatggcagatctagacca

SEQ ID NO: 186088 - DNA, 25 bp, Artificial
  probe
  misc_feature (1)..(25): SEQ ID NO: 1721; WAN024EXB_at; Start 714; Stop 738
tgtacctcaggctttagaaaatgtt

SEQ ID NO: 186089 - DNA, 25 bp, Artificial
  probe
  misc_feature (1)..(25): SEQ ID NO: 1721; WAN024EXB_at; Start 399; Stop 423
tcacagggacttgaaacctcaaaat

SEQ ID NO: 186090 - DNA, 25 bp, Artificial
  probe
  misc_feature (1)..(25): SEQ ID NO: 1721; WAN024EXB_at; Start 914; Stop 938
catctattcctaaggttcaagcgca

SEQ ID NO: 186091 - DNA, 25 bp, Artificial
  probe
  misc_feature (1)..(25): SEQ ID NO: 1721; WAN024EXB_at; Start 1030; Stop 1054
cgttacctgattttgttggccagcc

SEQ ID NO: 186092 - DNA, 25 bp, Artificial
  probe
  misc_feature (1)..(25): SEQ ID NO: 7482; WAN024EXC_at; Start 77; Stop 101
ttgctggcatagctggccgccgcaa

SEQ ID NO: 186093 - DNA, 25 bp, Artificial
  probe
  misc_feature (1)..(25): SEQ ID NO: 7482; WAN024EXC_at; Start 117; Stop 141
ctgtcacatagggaacggtgtattc

SEQ ID NO: 186094 - DNA, 25 bp, Artificial
  probe
  misc_feature (1)..(25): SEQ ID NO: 7482; WAN024EXC_at; Start 155; Stop 179
agtacctccggaaccagcgaataag

SEQ ID NO: 186095 - DNA, 25 bp, Artificial
  probe
  misc_feature (1)..(25): SEQ ID NO: 7482; WAN024EXC_at; Start 143; Stop 167
tgaccgttgacaagtacctccggaa

SEQ ID NO: 186096 - DNA, 25 bp, Artificial
  probe
  misc_feature (1)..(25): SEQ ID NO: 7482; WAN024EXC_at; Start 137; Stop 161
tattcctgaccgttgacaagtacct

SEQ ID NO: 186097 - DNA, 25 bp, Artificial
  probe
  misc_feature (1)..(25): SEQ ID NO: 7482; WAN024EXC_at; Start 92; Stop 116
gccgccgcaaccacagagggttctt

SEQ ID NO: 186098 - DNA, 25 bp, Artificial
  probe
  misc_feature (1)..(25): SEQ ID NO: 7482; WAN024EXC_at; Start 38; Stop 62
tggacttgtgcagtaaaaccacctg

SEQ ID NO: 186099 - DNA, 25 bp, Artificial
  probe
  misc_feature (1)..(25): SEQ ID NO: 7482; WAN024EXC_at; Start 208; Stop 232
actcagctggtctgccacagtcaca

SEQ ID NO: 186100 - DNA, 25 bp, Artificial
  probe
  misc_feature (1)..(25): SEQ ID NO: 7482; WAN024EXC_at; Start 17; Stop 41
tgcccaatcatctggcgctgatgga

SEQ ID NO: 186101 - DNA, 25 bp, Artificial
  probe
  misc_feature (1)..(25): SEQ ID NO: 7482; WAN024EXC_at; Start 185; Stop 209
gaaaaagttcccaccacattctcac

SEQ ID NO: 186102 - DNA, 25 bp, Artificial
  probe
  misc_feature (1)..(25): SEQ ID NO: 7482; WAN024EXC_at; Start 55; Stop 79
accacctgcacgcttgatgattttg

SEQ ID NO: 186103 - DNA, 25 bp, Artificial
  probe
  misc_feature (1)..(25): SEQ ID NO: 7482; WAN024EXC_at; Start 255; Stop 279
gactagcttgtctctcaggactaag

SEQ ID NO: 186104 - DNA, 25 bp, Artificial
  probe
  misc_feature (1)..(25): SEQ ID NO: 7482; WAN024EXC_at; Start 263; Stop 287
tgtctctcaggactaaggagcgcct

SEQ ID NO: 186105 - DNA, 25 bp, Artificial
  probe
  misc_feature (1)..(25): SEQ ID NO: 7482; WAN024EXC_at; Start 25; Stop 49
catctggcgctgatggacttgtgca

SEQ ID NO: 186106 - DNA, 25 bp, Artificial
  probe
  misc_feature (1)..(25): SEQ ID NO: 7482; WAN024EXC_at; Start 216; Stop 240
ggtctgccacagtcacactcatctg

SEQ ID NO: 186107 - DNA, 25 bp, Artificial
  probe
  misc_feature (1)..(25): SEQ ID NO: 7482; WAN024EXC_at; Start 133; Stop 157
ggtgtattcctgaccgttgacaagt

SEQ ID NO: 186108 - DNA, 25 bp, Artificial
  probe
  misc_feature (1)..(25): SEQ ID NO: 7482; WAN024EXC_at; Start 200; Stop 224
acattctcactcagctggtctgcca

SEQ ID NO: 186109 - DNA, 25 bp, Artificial
  probe
  misc_feature (1)..(25): SEQ ID NO: 7482; WAN024EXC_at; Start 225; Stop 249
cagtcacactcatctgttcatcctt

SEQ ID NO: 186110 - DNA, 25 bp, Artificial
  probe
  misc_feature (1)..(25): SEQ ID NO: 7482; WAN024EXC_at; Start 180; Stop 204
gcagagaaaaagttcccaccacatt

SEQ ID NO: 186111 - DNA, 25 bp, Artificial
  probe
  misc_feature (1)..(25): SEQ ID NO: 7482; WAN024EXC_at; Start 9; Stop 33
gggctacctgcccaatcatctggcg

SEQ ID NO: 186112 - DNA, 25 bp, Artificial
  probe
  misc_feature (1)..(25): SEQ ID NO: 7482; WAN024EXC_at; Start 1; Stop 25
ttgataaagggctacctgcccaatc

SEQ ID NO: 186113 - DNA, 25 bp, Artificial
  probe
  misc_feature (1)..(25): SEQ ID NO: 7482; WAN024EXC_at; Start 240; Stop 264
gttcatccttctccagactagcttg

SEQ ID NO: 186114 - DNA, 25 bp, Artificial
  probe
  misc_feature (1)..(25): SEQ ID NO: 7482; WAN024EXC_at; Start 270; Stop 294
caggactaaggagcgcctgagcttt

SEQ ID NO: 186115 - DNA, 25 bp, Artificial
  probe
  misc_feature (1)..(25): SEQ ID NO: 7482; WAN024EXC_at; Start 50; Stop 74
gtaaaaccacctgcacgcttgatga

SEQ ID NO: 186116 - DNA, 25 bp, Artificial
  probe
  misc_feature (1)..(25): SEQ ID NO: 7482; WAN024EXC_at; Start 123; Stop 147
catagggaacggtgtattcctgacc

SEQ ID NO: 186117 - DNA, 25 bp, Artificial
  probe
  misc_feature (1)..(25): SEQ ID NO: 7482; WAN024EXC_at; Start 161; Stop 185
tccggaaccagcgaataaggcagag

SEQ ID NO: 186118 - DNA, 25 bp, Artificial
  probe
  misc_feature (1)..(25): SEQ ID NO: 7482; WAN024EXC_at; Start 63; Stop 87
cacgcttgatgattttgctggcata

SEQ ID NO: 186119 - DNA, 25 bp, Artificial
  probe
  misc_feature (1)..(25): SEQ ID NO: 7482; WAN024EXC_at; Start 176; Stop 200
taaggcagagaaaaagttcccacca

SEQ ID NO: 186120 - DNA, 25 bp, Artificial
  probe
  misc_feature (1)..(25): SEQ ID NO: 7482; WAN024EXC_at; Start 73; Stop 97
gattttgctggcatagctggccgcc

SEQ ID NO: 186121 - DNA, 25 bp, Artificial
  probe
  misc_feature (1)..(25): SEQ ID NO: 7482; WAN024EXC_at; Start 249; Stop 273
tctccagactagcttgtctctcagg

SEQ ID NO: 186122 - DNA, 25 bp, Artificial
  probe
  misc_feature (1)..(25): SEQ ID NO: 7482; WAN024EXC_at; Start 105; Stop 129
cagagggttcttctgtcacataggg

SEQ ID NO: 186123 - DNA, 25 bp, Artificial
  probe
  misc_feature (1)..(25): SEQ ID NO: 7482; WAN024EXC_at; Start 113; Stop 137
tcttctgtcacatagggaacggtgt

SEQ ID NO: 186124 - DNA, 25 bp, Artificial
  probe
  misc_feature (1)..(25): SEQ ID NO: 7482; WAN024EXC_at; Start 33; Stop 57
gctgatggacttgtgcagtaaaacc

SEQ ID NO: 186125 - DNA, 25 bp, Artificial
  probe
  misc_feature (1)..(25): SEQ ID NO: 7482; WAN024EXC_at; Start 148; Stop 172
gttgacaagtacctccggaaccagc

SEQ ID NO: 186126 - DNA, 25 bp, Artificial
  probe
  misc_feature (1)..(25): SEQ ID NO: 1460; WAN024EXD_at; Start 192; Stop 216
tggcaatcaaaatcgcatcaatacc

SEQ ID NO: 186127 - DNA, 25 bp, Artificial
  probe
  misc_feature (1)..(25): SEQ ID NO: 1460; WAN024EXD_at; Start 61; Stop 85
gggcagggtcatctcaccgaccaat

SEQ ID NO: 186128 - DNA, 25 bp, Artificial
  probe
  misc_feature (1)..(25): SEQ ID NO: 1460; WAN024EXD_at; Start 226; Stop 250
tcctttattatgagtagcagctcgg

SEQ ID NO: 186129 - DNA, 25 bp, Artificial
  probe
  misc_feature (1)..(25): SEQ ID NO: 1460; WAN024EXD_at; Start 154; Stop 178
atgggccccagcttcgatggcacgc

SEQ ID NO: 186130 - DNA, 25 bp, Artificial
  probe
  misc_feature (1)..(25): SEQ ID NO: 1460; WAN024EXD_at; Start 258; Stop 282
cagcctgcgcaaactgactagccaa

SEQ ID NO: 186131 - DNA, 25 bp, Artificial
  probe
  misc_feature (1)..(25): SEQ ID NO: 1460; WAN024EXD_at; Start 288; Stop 312
ttttctccgcaatctctcgtccttg

SEQ ID NO: 186132 - DNA, 25 bp, Artificial
  probe
  misc_feature (1)..(25): SEQ ID NO: 1460; WAN024EXD_at; Start 206; Stop 230
gcatcaataccattaaaaattcctt

SEQ ID NO: 186133 - DNA, 25 bp, Artificial
  probe
  misc_feature (1)..(25): SEQ ID NO: 1460; WAN024EXD_at; Start 143; Stop 167
ctggcaaaggcatgggccccagctt

SEQ ID NO: 186134 - DNA, 25 bp, Artificial
  probe
  misc_feature (1)..(25): SEQ ID NO: 1460; WAN024EXD_at; Start 89; Stop 113
tctctttcaaggtccagcgtccagc

SEQ ID NO: 186135 - DNA, 25 bp, Artificial
  probe
  misc_feature (1)..(25): SEQ ID NO: 1460; WAN024EXD_at; Start 169; Stop 193
gatggcacgccagtcattaccagtg

SEQ ID NO: 186136 - DNA, 25 bp, Artificial
  probe
  misc_feature (1)..(25): SEQ ID NO: 1460; WAN024EXD_at; Start 240; Stop 264
tagcagctcggtaaggatcagcctg

SEQ ID NO: 186137 - DNA, 25 bp, Artificial
  probe
  misc_feature (1)..(25): SEQ ID NO: 1460; WAN024EXD_at; Start 126; Stop 150
gatagcgtccatctcgactggcaaa

SEQ ID NO: 186138 - DNA, 25 bp, Artificial
  probe
  misc_feature (1)..(25): SEQ ID NO: 1460; WAN024EXD_at; Start 343; Stop 367
gatgcgacagcttgcagtcaccaga

SEQ ID NO: 186139 - DNA, 25 bp, Artificial
  probe
  misc_feature (1)..(25): SEQ ID NO: 1460; WAN024EXD_at; Start 383; Stop 407
ttggacaggattcccatgagactct

SEQ ID NO: 186140 - DNA, 25 bp, Artificial
  probe
  misc_feature (1)..(25): SEQ ID NO: 1460; WAN024EXD_at; Start 105; Stop 129
gcgtccagcagctaagaccttgata

SEQ ID NO: 186141 - DNA, 25 bp, Artificial
  probe
  misc_feature (1)..(25): SEQ ID NO: 1460; WAN024EXD_at; Start 315; Stop 339
ccttttggcggctcaagtagcgaaa

SEQ ID NO: 186142 - DNA, 25 bp, Artificial
  probe
  misc_feature (1)..(25): SEQ ID NO: 1460; WAN024EXD_at; Start 332; Stop 356
tagcgaaaggcgatgcgacagcttg

SEQ ID NO: 186143 - DNA, 25 bp, Artificial
  probe
  misc_feature (1)..(25): SEQ ID NO: 1460; WAN024EXD_at; Start 135; Stop 159
catctcgactggcaaaggcatgggc

SEQ ID NO: 186144 - DNA, 25 bp, Artificial
  probe
  misc_feature (1)..(25): SEQ ID NO: 1460; WAN024EXD_at; Start 21; Stop 45
ggttgaggccgatagagccaccctt

SEQ ID NO: 186145 - DNA, 25 bp, Artificial
  probe
  misc_feature (1)..(25): SEQ ID NO: 1460; WAN024EXD_at; Start 12; Stop 36
ctacacgtgggttgaggccgataga

SEQ ID NO: 186146 - DNA, 25 bp, Artificial
  probe
  misc_feature (1)..(25): SEQ ID NO: 1460; WAN024EXD_at; Start 325; Stop 349
gctcaagtagcgaaaggcgatgcga

SEQ ID NO: 186147 - DNA, 25 bp, Artificial
  probe
  misc_feature (1)..(25): SEQ ID NO: 1460; WAN024EXD_at; Start 397; Stop 421
catgagactctgtccctgactgagt

SEQ ID NO: 186148 - DNA, 25 bp, Artificial
  probe
  misc_feature (1)..(25): SEQ ID NO: 1460; WAN024EXD_at; Start 76; Stop 100
accgaccaattcttctctttcaagg

SEQ ID NO: 186149 - DNA, 25 bp, Artificial
  probe
  misc_feature (1)..(25): SEQ ID NO: 1460; WAN024EXD_at; Start 183; Stop 207
cattaccagtggcaatcaaaatcgc

SEQ ID NO: 186150 - DNA, 25 bp, Artificial
  probe
  misc_feature (1)..(25): SEQ ID NO: 1460; WAN024EXD_at; Start 374; Stop 398
gtcgcgtagttggacaggattccca

SEQ ID NO: 186151 - DNA, 25 bp, Artificial
  probe
  misc_feature (1)..(25): SEQ ID NO: 1460; WAN024EXD_at; Start 251; Stop 275
taaggatcagcctgcgcaaactgac

SEQ ID NO: 186152 - DNA, 25 bp, Artificial
  probe
  misc_feature (1)..(25): SEQ ID NO: 1460; WAN024EXD_at; Start 405; Stop 429
tctgtccctgactgagttcttctaa

SEQ ID NO: 186153 - DNA, 25 bp, Artificial
  probe
  misc_feature (1)..(25): SEQ ID NO: 1460; WAN024EXD_at; Start 33; Stop 57
tagagccacccttagtcgctacagg

SEQ ID NO: 186154 - DNA, 25 bp, Artificial
  probe
  misc_feature (1)..(25): SEQ ID NO: 1460; WAN024EXD_at; Start 348; Stop 372
gacagcttgcagtcaccagagaatc

SEQ ID NO: 186155 - DNA, 25 bp, Artificial
  probe
  misc_feature (1)..(25): SEQ ID NO: 1460; WAN024EXD_at; Start 273; Stop 297
gactagccaacgcaattttctccgc

SEQ ID NO: 186156 - DNA, 25 bp, Artificial
  probe
  misc_feature (1)..(25): SEQ ID NO: 1460; WAN024EXD_at; Start 97; Stop 121
aaggtccagcgtccagcagctaaga

SEQ ID NO: 186157 - DNA, 25 bp, Artificial
  probe
  misc_feature (1)..(25): SEQ ID NO: 1460; WAN024EXD_at; Start 117; Stop 141
taagaccttgatagcgtccatctcg

SEQ ID NO: 186158 - DNA, 25 bp, Artificial
  probe
  misc_feature (1)..(25): SEQ ID NO: 1460; WAN024EXD_at; Start 302; Stop 326
tctcgtccttgatccttttggcggc

SEQ ID NO: 186159 - DNA, 25 bp, Artificial
  probe
  misc_feature (1)..(25): SEQ ID NO: 1460; WAN024EXD_at; Start 48; Stop 72
tcgctacaggcatgggcagggtcat

SEQ ID NO: 186160 - DNA, 25 bp, Artificial
  probe
  misc_feature (1)..(25): SEQ ID NO: 1091; WAN024EXE_at; Start 862; Stop 886
catgcctttgccagtcgagatggac

SEQ ID NO: 186161 - DNA, 25 bp, Artificial
  probe
  misc_feature (1)..(25): SEQ ID NO: 1091; WAN024EXE_at; Start 1108; Stop 1132
gtaagtacgggcatccagcaaggcc

SEQ ID NO: 186162 - DNA, 25 bp, Artificial
  probe
  misc_feature (1)..(25): SEQ ID NO: 1091; WAN024EXE_at; Start 1032; Stop 1056
tccttctgccagagaattagcccag

SEQ ID NO: 186163 - DNA, 25 bp, Artificial
  probe
  misc_feature (1)..(25): SEQ ID NO: 1091; WAN024EXE_at; Start 552; Stop 576
tatgctcaacaccatgctggaagcc

SEQ ID NO: 186164 - DNA, 25 bp, Artificial
  probe
  misc_feature (1)..(25): SEQ ID NO: 1091; WAN024EXE_at; Start 584; Stop 608
cagtcttagaagaactcagtcaggg

SEQ ID NO: 186165 - DNA, 25 bp, Artificial
  probe
  misc_feature (1)..(25): SEQ ID NO: 1091; WAN024EXE_at; Start 403; Stop 427
gagctcttggagcttgccaatcaag

SEQ ID NO: 186166 - DNA, 25 bp, Artificial
  probe
  misc_feature (1)..(25): SEQ ID NO: 1091; WAN024EXE_at; Start 689; Stop 713
tgagccgccaaaaggatcaaggacg

SEQ ID NO: 186167 - DNA, 25 bp, Artificial
  probe
  misc_feature (1)..(25): SEQ ID NO: 1091; WAN024EXE_at; Start 1224; Stop 1248
aacctttaacctagagacagcccag

SEQ ID NO: 186168 - DNA, 25 bp, Artificial
  probe
  misc_feature (1)..(25): SEQ ID NO: 1091; WAN024EXE_at; Start 384; Stop 408
gattgccagcaagaaagcggagctc

SEQ ID NO: 186169 - DNA, 25 bp, Artificial
  probe
  misc_feature (1)..(25): SEQ ID NO: 1091; WAN024EXE_at; Start 217; Stop 241
tacaccgttccctatgtgacagaag

SEQ ID NO: 186170 - DNA, 25 bp, Artificial
  probe
  misc_feature (1)..(25): SEQ ID NO: 1091; WAN024EXE_at; Start 516; Stop 540
tattcatgtcgatacccaggaagcc

SEQ ID NO: 186171 - DNA, 25 bp, Artificial
  probe
  misc_feature (1)..(25): SEQ ID NO: 1091; WAN024EXE_at; Start 1123; Stop 1147
cagcaaggccacatgaaactacagg

SEQ ID NO: 186172 - DNA, 25 bp, Artificial
  probe
  misc_feature (1)..(25): SEQ ID NO: 1091; WAN024EXE_at; Start 276; Stop 300
caaaatcatcaagcgtgcaggtggt

SEQ ID NO: 186173 - DNA, 25 bp, Artificial
  probe
  misc_feature (1)..(25): SEQ ID NO: 1091; WAN024EXE_at; Start 30; Stop 54
aaaatcataccaagagcgcctcgag

SEQ ID NO: 186174 - DNA, 25 bp, Artificial
  probe
  misc_feature (1)..(25): SEQ ID NO: 1091; WAN024EXE_at; Start 69; Stop 93
ggcgctccttagtcctgagagacaa

SEQ ID NO: 186175 - DNA, 25 bp, Artificial
  probe
  misc_feature (1)..(25): SEQ ID NO: 1091; WAN024EXE_at; Start 366; Stop 390
taaactagcgcaagagaagattgcc

SEQ ID NO: 186176 - DNA, 25 bp, Artificial
  probe
  misc_feature (1)..(25): SEQ ID NO: 1091; WAN024EXE_at; Start 957; Stop 981
catgcctgtagcgactaagggtggc

SEQ ID NO: 186177 - DNA, 25 bp, Artificial
  probe
  misc_feature (1)..(25): SEQ ID NO: 1091; WAN024EXE_at; Start 1089; Stop 1113
tgcagccctcaaagccttggtaagt

SEQ ID NO: 186178 - DNA, 25 bp, Artificial
  probe
  misc_feature (1)..(25): SEQ ID NO: 1091; WAN024EXE_at; Start 649; Stop 673
tctctggtgactgcaagctgtcgca

SEQ ID NO: 186179 - DNA, 25 bp, Artificial
  probe
  misc_feature (1)..(25): SEQ ID NO: 1091; WAN024EXE_at; Start 1243; Stop 1267
gcccagcgctatctcgaaaatttaa

SEQ ID NO: 186180 - DNA, 25 bp, Artificial
  probe
  misc_feature (1)..(25): SEQ ID NO: 1091; WAN024EXE_at; Start 889; Stop 913
tatcaaggtcttagctgctggacgc

SEQ ID NO: 186181 - DNA, 25 bp, Artificial
  probe
  misc_feature (1)..(25): SEQ ID NO: 1091; WAN024EXE_at; Start 972; Stop 996
taagggtggctctatcggcctcaac

SEQ ID NO: 186182 - DNA, 25 bp, Artificial
  probe
  misc_feature (1)..(25): SEQ ID NO: 1091; WAN024EXE_at; Start 599; Stop 623
tcagtcagggacagagtctcatggg

SEQ ID NO: 186183 - DNA, 25 bp, Artificial
  probe
  misc_feature (1)..(25): SEQ ID NO: 1091; WAN024EXE_at; Start 472; Stop 496
catgtcgagcagataaaaggcgaac

SEQ ID NO: 186184 - DNA, 25 bp, Artificial
  probe
  misc_feature (1)..(25): SEQ ID NO: 1091; WAN024EXE_at; Start 734; Stop 758
cgttggctagtcagtttgcgcaggc

SEQ ID NO: 186185 - DNA, 25 bp, Artificial
  probe
  misc_feature (1)..(25): SEQ ID NO: 1091; WAN024EXE_at; Start 189; Stop 213
tccggaggtacttgtcaacggtcag

SEQ ID NO: 186186 - DNA, 25 bp, Artificial
  probe
  misc_feature (1)..(25): SEQ ID NO: 1091; WAN024EXE_at; Start 1180; Stop 1204
gaatctgaagttgctcccctagtag

SEQ ID NO: 186187 - DNA, 25 bp, Artificial
  probe
  misc_feature (1)..(25): SEQ ID NO: 1091; WAN024EXE_at; Start 293; Stop 317
caggtggttttactgcacaagtcca

SEQ ID NO: 186188 - DNA, 25 bp, Artificial
  probe
  misc_feature (1)..(25): SEQ ID NO: 1091; WAN024EXE_at; Start 569; Stop 593
tggaagccttgaaaccagtcttaga

SEQ ID NO: 186189 - DNA, 25 bp, Artificial
  probe
  misc_feature (1)..(25): SEQ ID NO: 1091; WAN024EXE_at; Start 932; Stop 956
aattggtcggtgagatgaccctgcc

SEQ ID NO: 186190 - DNA, 25 bp, Artificial
  probe
  misc_feature (1)..(25): SEQ ID NO: 1091; WAN024EXE_at; Start 905; Stop 929
gctggacgctggaccttgaaagaga

SEQ ID NO: 186191 - DNA, 25 bp, Artificial
  probe
  misc_feature (1)..(25): SEQ ID NO: 1091; WAN024EXE_at; Start 535; Stop 559
gaagccatgggtgccaatatgctca

SEQ ID NO: 186192 - DNA, 25 bp, Artificial
  probe
  misc_feature (1)..(25): SEQ ID NO: 1091; WAN024EXE_at; Start 750; Stop 774
tgcgcaggctgatccttaccgagct

SEQ ID NO: 186193 - DNA, 25 bp, Artificial
  probe
  misc_feature (1)..(25): SEQ ID NO: 1091; WAN024EXE_at; Start 620; Stop 644
tgggaatcctgtccaactacgcgac

SEQ ID NO: 186194 - DNA, 25 bp, Artificial
  probe
  misc_feature (1)..(25): SEQ ID NO: 5742; WAN024EXF_at; Start 176; Stop 200
gctcccagatgaatcagagccttgg

SEQ ID NO: 186195 - DNA, 25 bp, Artificial
  probe
  misc_feature (1)..(25): SEQ ID NO: 5742; WAN024EXF_at; Start 159; Stop 183
gaatattttgtcgaatagctcccag

SEQ ID NO: 186196 - DNA, 25 bp, Artificial
  probe
  misc_feature (1)..(25): SEQ ID NO: 5742; WAN024EXF_at; Start 125; Stop 149
agcgttccttgagggatatgagccc

SEQ ID NO: 186197 - DNA, 25 bp, Artificial
  probe
  misc_feature (1)..(25): SEQ ID NO: 5742; WAN024EXF_at; Start 118; Stop 142
caacttgagcgttccttgagggata

SEQ ID NO: 186198 - DNA, 25 bp, Artificial
  probe
  misc_feature (1)..(25): SEQ ID NO: 5742; WAN024EXF_at; Start 16; Stop 40
ggcttcatcgatattggaaacgcaa

SEQ ID NO: 186199 - DNA, 25 bp, Artificial
  probe
  misc_feature (1)..(25): SEQ ID NO: 5742; WAN024EXF_at; Start 90; Stop 114
gaccataagcattggccttaaccac

SEQ ID NO: 186200 - DNA, 25 bp, Artificial
  probe
  misc_feature (1)..(25): SEQ ID NO: 5742; WAN024EXF_at; Start 216; Stop 240
tagctttcatgattttcctccaaaa

SEQ ID NO: 186201 - DNA, 25 bp, Artificial
  probe
  misc_feature (1)..(25): SEQ ID NO: 5742; WAN024EXF_at; Start 74; Stop 98
acggcaacagctccatgaccataag

SEQ ID NO: 186202 - DNA, 25 bp, Artificial
  probe
  misc_feature (1)..(25): SEQ ID NO: 5742; WAN024EXF_at; Start 56; Stop 80
tcttgaattgccttggcaacggcaa

SEQ ID NO: 186203 - DNA, 25 bp, Artificial
  probe
  misc_feature (1)..(25): SEQ ID NO: 5742; WAN024EXF_at; Start 155; Stop 179
tgctgaatattttgtcgaatagctc

SEQ ID NO: 186204 - DNA, 25 bp, Artificial
  probe
  misc_feature (1)..(25): SEQ ID NO: 5742; WAN024EXF_at; Start 27; Stop 51
tattggaaacgcaaaagccatcaac

SEQ ID NO: 186205 - DNA, 25 bp, Artificial
  probe
  misc_feature (1)..(25): SEQ ID NO: 5742; WAN024EXF_at; Start 4; Stop 28
tctgagttcaatggcttcatcgata

SEQ ID NO: 186206 - DNA, 25 bp, Artificial
  probe
  misc_feature (1)..(25): SEQ ID NO: 5742; WAN024EXF_at; Start 68; Stop 92
ttggcaacggcaacagctccatgac

SEQ ID NO: 186207 - DNA, 25 bp, Artificial
  probe
  misc_feature (1)..(25): SEQ ID NO: 5742; WAN024EXF_at; Start 60; Stop 84
gaattgccttggcaacggcaacagc

SEQ ID NO: 186208 - DNA, 25 bp, Artificial
  probe
  misc_feature (1)..(25): SEQ ID NO: 5742; WAN024EXF_at; Start 181; Stop 205
cagatgaatcagagccttggttggt

SEQ ID NO: 186209 - DNA, 25 bp, Artificial
  probe
  misc_feature (1)..(25): SEQ ID NO: 5742; WAN024EXF_at; Start 37; Stop 61
gcaaaagccatcaacatcatcttga

SEQ ID NO: 186210 - DNA, 25 bp, Artificial
  probe
  misc_feature (1)..(25): SEQ ID NO: 5742; WAN024EXF_at; Start 108; Stop 132
taaccacagccaacttgagcgttcc

SEQ ID NO: 186211 - DNA, 25 bp, Artificial
  probe
  misc_feature (1)..(25): SEQ ID NO: 5742; WAN024EXF_at; Start 102; Stop 126
tggccttaaccacagccaacttgag

SEQ ID NO: 186212 - DNA, 25 bp, Artificial
  probe
  misc_feature (1)..(25): SEQ ID NO: 5742; WAN024EXF_at; Start 203; Stop 227
ggtctatgtggactagctttcatga

SEQ ID NO: 186213 - DNA, 25 bp, Artificial
  probe
  misc_feature (1)..(25): SEQ ID NO: 5742; WAN024EXF_at; Start 139; Stop 163
gatatgagcccccatttgctgaata

SEQ ID NO: 186214 - DNA, 25 bp, Artificial
  probe
  misc_feature (1)..(25): SEQ ID NO: 5742; WAN024EXF_at; Start 81; Stop 105
cagctccatgaccataagcattggc

SEQ ID NO: 186215 - DNA, 25 bp, Artificial
  probe
  misc_feature (1)..(25): SEQ ID NO: 5742; WAN024EXF_at; Start 114; Stop 138
cagccaacttgagcgttccttgagg

SEQ ID NO: 186216 - DNA, 25 bp, Artificial
  probe
  misc_feature (1)..(25): SEQ ID NO: 5742; WAN024EXF_at; Start 31; Stop 55
ggaaacgcaaaagccatcaacatca

SEQ ID NO: 186217 - DNA, 25 bp, Artificial
  probe
  misc_feature (1)..(25): SEQ ID NO: 5742; WAN024EXF_at; Start 167; Stop 191
tgtcgaatagctcccagatgaatca

SEQ ID NO: 186218 - DNA, 25 bp, Artificial
  probe
  misc_feature (1)..(25): SEQ ID NO: 5742; WAN024EXF_at; Start 95; Stop 119
taagcattggccttaaccacagcca

SEQ ID NO: 186219 - DNA, 25 bp, Artificial
  probe
  misc_feature (1)..(25): SEQ ID NO: 5742; WAN024EXF_at; Start 186; Stop 210
gaatcagagccttggttggtctatg

SEQ ID NO: 186220 - DNA, 25 bp, Artificial
  probe
  misc_feature (1)..(25): SEQ ID NO: 5742; WAN024EXF_at; Start 12; Stop 36
caatggcttcatcgatattggaaac

SEQ ID NO: 186221 - DNA, 25 bp, Artificial
  probe
  misc_feature (1)..(25): SEQ ID NO: 5742; WAN024EXF_at; Start 162; Stop 186
tattttgtcgaatagctcccagatg

SEQ ID NO: 186222 - DNA, 25 bp, Artificial
  probe
  misc_feature (1)..(25): SEQ ID NO: 5742; WAN024EXF_at; Start 51; Stop 75
catcatcttgaattgccttggcaac

SEQ ID NO: 186223 - DNA, 25 bp, Artificial
  probe
  misc_feature (1)..(25): SEQ ID NO: 5742; WAN024EXF_at; Start 21; Stop 45
catcgatattggaaacgcaaaagcc

SEQ ID NO: 186224 - DNA, 25 bp, Artificial
  probe
  misc_feature (1)..(25): SEQ ID NO: 5742; WAN024EXF_at; Start 213; Stop 237
gactagctttcatgattttcctcca

SEQ ID NO: 186225 - DNA, 25 bp, Artificial
  probe
  misc_feature (1)..(25): SEQ ID NO: 5742; WAN024EXF_at; Start 171; Stop 195
gaatagctcccagatgaatcagagc

SEQ ID NO: 186226 - DNA, 25 bp, Artificial
  probe
  misc_feature (1)..(25): SEQ ID NO: 5742; WAN024EXF_at; Start 1; Stop 25
ttgtctgagttcaatggcttcatcg

SEQ ID NO: 186227 - DNA, 25 bp, Artificial
  probe
  misc_feature (1)..(25): SEQ ID NO: 5742; WAN024EXF_at; Start 86; Stop 110
ccatgaccataagcattggccttaa

SEQ ID NO: 186228 - DNA, 25 bp, Artificial
  probe
  misc_feature (1)..(25): SEQ ID NO: 5621; WAN024EXG_at; Start 88; Stop 112
tgcatacccgattggcacggtcgcg

SEQ ID NO: 186229 - DNA, 25 bp, Artificial
  probe
  misc_feature (1)..(25): SEQ ID NO: 5621; WAN024EXG_at; Start 266; Stop 290
tacatggcatctcccatacgaaccg

SEQ ID NO: 186230 - DNA, 25 bp, Artificial
  probe
  misc_feature (1)..(25): SEQ ID NO: 5621; WAN024EXG_at; Start 44; Stop 68
tctaccaagacagagaaattttgca

SEQ ID NO: 186231 - DNA, 25 bp, Artificial
  probe
  misc_feature (1)..(25): SEQ ID NO: 5621; WAN024EXG_at; Start 160; Stop 184
agctccagctggaactgtcttgaca

SEQ ID NO: 186232 - DNA, 25 bp, Artificial
  probe
  misc_feature (1)..(25): SEQ ID NO: 5621; WAN024EXG_at; Start 123; Stop 147
cgctatccgcttgataagttgctcc

SEQ ID NO: 186233 - DNA, 25 bp, Artificial
  probe
  misc_feature (1)..(25): SEQ ID NO: 5621; WAN024EXG_at; Start 272; Stop 296
gcatctcccatacgaaccgcattga

SEQ ID NO: 186234 - DNA, 25 bp, Artificial
  probe
  misc_feature (1)..(25): SEQ ID NO: 5621; WAN024EXG_at; Start 194; Stop 218
gcagactccaaggtcaaggccggta

SEQ ID NO: 186235 - DNA, 25 bp, Artificial
  probe
  misc_feature (1)..(25): SEQ ID NO: 5621; WAN024EXG_at; Start 38; Stop 62
tggccatctaccaagacagagaaat

SEQ ID NO: 186236 - DNA, 25 bp, Artificial
  probe
  misc_feature (1)..(25): SEQ ID NO: 5621; WAN024EXG_at; Start 333; Stop 357
tgctagcatgaaccagctctggaac

SEQ ID NO: 186237 - DNA, 25 bp, Artificial
  probe
  misc_feature (1)..(25): SEQ ID NO: 5621; WAN024EXG_at; Start 351; Stop 375
ctggaacttccttcatactagctaa

SEQ ID NO: 186238 - DNA, 25 bp, Artificial
  probe
  misc_feature (1)..(25): SEQ ID NO: 5621; WAN024EXG_at; Start 199; Stop 223
ctccaaggtcaaggccggtatcaaa

SEQ ID NO: 186239 - DNA, 25 bp, Artificial
  probe
  misc_feature (1)..(25): SEQ ID NO: 5621; WAN024EXG_at; Start 342; Stop 366
gaaccagctctggaacttccttcat

SEQ ID NO: 186240 - DNA, 25 bp, Artificial
  probe
  misc_feature (1)..(25): SEQ ID NO: 5621; WAN024EXG_at; Start 69; Stop 93
tgtctcttgtccatccatctgcata

SEQ ID NO: 186241 - DNA, 25 bp, Artificial
  probe
  misc_feature (1)..(25): SEQ ID NO: 5621; WAN024EXG_at; Start 305; Stop 329
tctacatgccaaagagtcgttgcag

SEQ ID NO: 186242 - DNA, 25 bp, Artificial
  probe
  misc_feature (1)..(25): SEQ ID NO: 5621; WAN024EXG_at; Start 213; Stop 237
ccggtatcaaatcataaggcaaatc

SEQ ID NO: 186243 - DNA, 25 bp, Artificial
  probe
  misc_feature (1)..(25): SEQ ID NO: 5621; WAN024EXG_at; Start 1; Stop 25
ttggtccatcgaaaccctgccgaca

SEQ ID NO: 186244 - DNA, 25 bp, Artificial
  probe
  misc_feature (1)..(25): SEQ ID NO: 5621; WAN024EXG_at; Start 282; Stop 306
tacgaaccgcattgaaaatagtctc

SEQ ID NO: 186245 - DNA, 25 bp, Artificial
  probe
  misc_feature (1)..(25): SEQ ID NO: 5621; WAN024EXG_at; Start 58; Stop 82
gaaattttgcatgtctcttgtccat

SEQ ID NO: 186246 - DNA, 25 bp, Artificial
  probe
  misc_feature (1)..(25): SEQ ID NO: 5621; WAN024EXG_at; Start 114; Stop 138
tgacttgctcgctatccgcttgata

SEQ ID NO: 186247 - DNA, 25 bp, Artificial
  probe
  misc_feature (1)..(25): SEQ ID NO: 5621; WAN024EXG_at; Start 237; Stop 261
ccaagaccgctccacttggattgag

SEQ ID NO: 186248 - DNA, 25 bp, Artificial
  probe
  misc_feature (1)..(25): SEQ ID NO: 5621; WAN024EXG_at; Start 11; Stop 35
gaaaccctgccgacaattgggcaag

SEQ ID NO: 186249 - DNA, 25 bp, Artificial
  probe
  misc_feature (1)..(25): SEQ ID NO: 5621; WAN024EXG_at; Start 149; Stop 173
tagcccatgcaagctccagctggaa

SEQ ID NO: 186250 - DNA, 25 bp, Artificial
  probe
  misc_feature (1)..(25): SEQ ID NO: 5621; WAN024EXG_at; Start 100; Stop 124
tggcacggtcgcgatgacttgctcg

SEQ ID NO: 186251 - DNA, 25 bp, Artificial
  probe
  misc_feature (1)..(25): SEQ ID NO: 5621; WAN024EXG_at; Start 183; Stop 207
catgaaccagagcagactccaaggt

SEQ ID NO: 186252 - DNA, 25 bp, Artificial
  probe
  misc_feature (1)..(25): SEQ ID NO: 5621; WAN024EXG_at; Start 82; Stop 106
tccatctgcatacccgattggcacg

SEQ ID NO: 186253 - DNA, 25 bp, Artificial
  probe
  misc_feature (1)..(25): SEQ ID NO: 5621; WAN024EXG_at; Start 207; Stop 231
tcaaggccggtatcaaatcataagg

SEQ ID NO: 186254 - DNA, 25 bp, Artificial
  probe
  misc_feature (1)..(25): SEQ ID NO: 5621; WAN024EXG_at; Start 135; Stop 159
gataagttgctccatagcccatgca

SEQ ID NO: 186255 - DNA, 25 bp, Artificial
  probe
  misc_feature (1)..(25): SEQ ID NO: 5621; WAN024EXG_at; Start 325; Stop 349
tgcagaattgctagcatgaaccagc

SEQ ID NO: 186256 - DNA, 25 bp, Artificial
  probe
  misc_feature (1)..(25): SEQ ID NO: 5621; WAN024EXG_at; Start 313; Stop 337
ccaaagagtcgttgcagaattgcta

SEQ ID NO: 186257 - DNA, 25 bp, Artificial
  probe
  misc_feature (1)..(25): SEQ ID NO: 5621; WAN024EXG_at; Start 295; Stop 319
gaaaatagtctctacatgccaaaga

SEQ ID NO: 186258 - DNA, 25 bp, Artificial
  probe
  misc_feature (1)..(25): SEQ ID NO: 5621; WAN024EXG_at; Start 177; Stop 201
tcttgacatgaaccagagcagactc

SEQ ID NO: 186259 - DNA, 25 bp, Artificial
  probe
  misc_feature (1)..(25): SEQ ID NO: 5621; WAN024EXG_at; Start 24; Stop 48
caattgggcaagcttggccatctac

SEQ ID NO: 186260 - DNA, 25 bp, Artificial
  probe
  misc_feature (1)..(25): SEQ ID NO: 5621; WAN024EXG_at; Start 225; Stop 249
cataaggcaaatccaagaccgctcc

SEQ ID NO: 186261 - DNA, 25 bp, Artificial
  probe
  misc_feature (1)..(25): SEQ ID NO: 5621; WAN024EXG_at; Start 170; Stop 194
ggaactgtcttgacatgaaccagag

SEQ ID NO: 186262 - DNA, 25 bp, Artificial
  probe
  misc_feature (1)..(25): SEQ ID NO: 2570; WAN024EXH_at; Start 156; Stop 180
cattattatcaagaacctggctggc

SEQ ID NO: 186263 - DNA, 25 bp, Artificial
  probe
  misc_feature (1)..(25): SEQ ID NO: 2570; WAN024EXH_at; Start 127; Stop 151
cacttgattaagaagctggttctga

SEQ ID NO: 186264 - DNA, 25 bp, Artificial
  probe
  misc_feature (1)..(25): SEQ ID NO: 2570; WAN024EXH_at; Start 157; Stop 181
attattatcaagaacctggctggcc

SEQ ID NO: 186265 - DNA, 25 bp, Artificial
  probe
  misc_feature (1)..(25): SEQ ID NO: 2570; WAN024EXH_at; Start 41; Stop 65
tcagaaaattaccaaaccaggcaat

SEQ ID NO: 186266 - DNA, 25 bp, Artificial
  probe
  misc_feature (1)..(25): SEQ ID NO: 2570; WAN024EXH_at; Start 117; Stop 141
gaaggatatgcacttgattaagaag

SEQ ID NO: 186267 - DNA, 25 bp, Artificial
  probe
  misc_feature (1)..(25): SEQ ID NO: 2570; WAN024EXH_at; Start 101; Stop 125
tgcctacctccctcaagaaggatat

SEQ ID NO: 186268 - DNA, 25 bp, Artificial
  probe
  misc_feature (1)..(25): SEQ ID NO: 2570; WAN024EXH_at; Start 125; Stop 149
tgcacttgattaagaagctggttct

SEQ ID NO: 186269 - DNA, 25 bp, Artificial
  probe
  misc_feature (1)..(25): SEQ ID NO: 2570; WAN024EXH_at; Start 83; Stop 107
agttaatctctgtcatcttgcctac

SEQ ID NO: 186270 - DNA, 25 bp, Artificial
  probe
  misc_feature (1)..(25): SEQ ID NO: 2570; WAN024EXH_at; Start 108; Stop 132
ctccctcaagaaggatatgcacttg

SEQ ID NO: 186271 - DNA, 25 bp, Artificial
  probe
  misc_feature (1)..(25): SEQ ID NO: 2570; WAN024EXH_at; Start 74; Stop 98
tatccttccagttaatctctgtcat

SEQ ID NO: 186272 - DNA, 25 bp, Artificial
  probe
  misc_feature (1)..(25): SEQ ID NO: 2570; WAN024EXH_at; Start 110; Stop 134
ccctcaagaaggatatgcacttgat

SEQ ID NO: 186273 - DNA, 25 bp, Artificial
  probe
  misc_feature (1)..(25): SEQ ID NO: 2570; WAN024EXH_at; Start 21; Stop 45
caaagaaatactggctcctgtcaga

SEQ ID NO: 186274 - DNA, 25 bp, Artificial
  probe
  misc_feature (1)..(25): SEQ ID NO: 2570; WAN024EXH_at; Start 13; Stop 37
ggtacaaccaaagaaatactggctc

SEQ ID NO: 186275 - DNA, 25 bp, Artificial
  probe
  misc_feature (1)..(25): SEQ ID NO: 2570; WAN024EXH_at; Start 17; Stop 41
caaccaaagaaatactggctcctgt

SEQ ID NO: 186276 - DNA, 25 bp, Artificial
  probe
  misc_feature (1)..(25): SEQ ID NO: 2570; WAN024EXH_at; Start 25; Stop 49
gaaatactggctcctgtcagaaaat

SEQ ID NO: 186277 - DNA, 25 bp, Artificial
  probe
  misc_feature (1)..(25): SEQ ID NO: 2570; WAN024EXH_at; Start 2; Stop 26
tgggcataaaaggtacaaccaaaga

SEQ ID NO: 186278 - DNA, 25 bp, Artificial
  probe
  misc_feature (1)..(25): SEQ ID NO: 2570; WAN024EXH_at; Start 29; Stop 53
tactggctcctgtcagaaaattacc

SEQ ID NO: 186279 - DNA, 25 bp, Artificial
  probe
  misc_feature (1)..(25): SEQ ID NO: 2570; WAN024EXH_at; Start 23; Stop 47
aagaaatactggctcctgtcagaaa

SEQ ID NO: 186280 - DNA, 25 bp, Artificial
  probe
  misc_feature (1)..(25): SEQ ID NO: 2570; WAN024EXH_at; Start 159; Stop 183
tattatcaagaacctggctggccaa

SEQ ID NO: 186281 - DNA, 25 bp, Artificial
  probe
  misc_feature (1)..(25): SEQ ID NO: 2570; WAN024EXH_at; Start 132; Stop 156
gattaagaagctggttctgattgcc

SEQ ID NO: 186282 - DNA, 25 bp, Artificial
  probe
  misc_feature (1)..(25): SEQ ID NO: 2570; WAN024EXH_at; Start 138; Stop 162
gaagctggttctgattgccattatt

SEQ ID NO: 186283 - DNA, 25 bp, Artificial
  probe
  misc_feature (1)..(25): SEQ ID NO: 2570; WAN024EXH_at; Start 67; Stop 91
cgcagattatccttccagttaatct

SEQ ID NO: 186284 - DNA, 25 bp, Artificial
  probe
  misc_feature (1)..(25): SEQ ID NO: 2570; WAN024EXH_at; Start 33; Stop 57
ggctcctgtcagaaaattaccaaac

SEQ ID NO: 186285 - DNA, 25 bp, Artificial
  probe
  misc_feature (1)..(25): SEQ ID NO: 2570; WAN024EXH_at; Start 121; Stop 145
gatatgcacttgattaagaagctgg

SEQ ID NO: 186286 - DNA, 25 bp, Artificial
  probe
  misc_feature (1)..(25): SEQ ID NO: 2570; WAN024EXH_at; Start 135; Stop 159
taagaagctggttctgattgccatt

SEQ ID NO: 186287 - DNA, 25 bp, Artificial
  probe
  misc_feature (1)..(25): SEQ ID NO: 2570; WAN024EXH_at; Start 105; Stop 129
tacctccctcaagaaggatatgcac

SEQ ID NO: 186288 - DNA, 25 bp, Artificial
  probe
  misc_feature (1)..(25): SEQ ID NO: 2570; WAN024EXH_at; Start 141; Stop 165
gctggttctgattgccattattatc

SEQ ID NO: 186289 - DNA, 25 bp, Artificial
  probe
  misc_feature (1)..(25): SEQ ID NO: 2570; WAN024EXH_at; Start 165; Stop 189
caagaacctggctggccaaatcttt

SEQ ID NO: 186290 - DNA, 25 bp, Artificial
  probe
  misc_feature (1)..(25): SEQ ID NO: 2570; WAN024EXH_at; Start 80; Stop 104
tccagttaatctctgtcatcttgcc

SEQ ID NO: 186291 - DNA, 25 bp, Artificial
  probe
  misc_feature (1)..(25): SEQ ID NO: 2570; WAN024EXH_at; Start 98; Stop 122
tcttgcctacctccctcaagaagga

SEQ ID NO: 186292 - DNA, 25 bp, Artificial
  probe
  misc_feature (1)..(25): SEQ ID NO: 2570; WAN024EXH_at; Start 171; Stop 195
cctggctggccaaatctttcttttt

SEQ ID NO: 186293 - DNA, 25 bp, Artificial
  probe
  misc_feature (1)..(25): SEQ ID NO: 2570; WAN024EXH_at; Start 39; Stop 63
tgtcagaaaattaccaaaccaggca

SEQ ID NO: 186294 - DNA, 25 bp, Artificial
  probe
  misc_feature (1)..(25): SEQ ID NO: 2570; WAN024EXH_at; Start 162; Stop 186
tatcaagaacctggctggccaaatc

SEQ ID NO: 186295 - DNA, 25 bp, Artificial
  probe
  misc_feature (1)..(25): SEQ ID NO: 2570; WAN024EXH_at; Start 86; Stop 110
taatctctgtcatcttgcctacctc

SEQ ID NO: 186296 - DNA, 25 bp, Artificial
  probe
  misc_feature (1)..(25): SEQ ID NO: 1362; WAN024EXI_at; Start 1045; Stop 1069
tatctgggaggtgttgttggtccca

SEQ ID NO: 186297 - DNA, 25 bp, Artificial
  probe
  misc_feature (1)..(25): SEQ ID NO: 1362; WAN024EXI_at; Start 969; Stop 993
ggttaatgccctactcagcaaaatg

SEQ ID NO: 186298 - DNA, 25 bp, Artificial
  probe
  misc_feature (1)..(25): SEQ ID NO: 1362; WAN024EXI_at; Start 762; Stop 786
gattgtgtccagtatgggcttttcc

SEQ ID NO: 186299 - DNA, 25 bp, Artificial
  probe
  misc_feature (1)..(25): SEQ ID NO: 1362; WAN024EXI_at; Start 425; Stop 449
caggcgtagttgcaggtactctaac

SEQ ID NO: 186300 - DNA, 25 bp, Artificial
  probe
  misc_feature (1)..(25): SEQ ID NO: 1362; WAN024EXI_at; Start 721; Stop 745
gacttagggcagacagagaatcttc

SEQ ID NO: 186301 - DNA, 25 bp, Artificial
  probe
  misc_feature (1)..(25): SEQ ID NO: 1362; WAN024EXI_at; Start 98; Stop 122
tcttcgtggaaaatctaggtgtagg

SEQ ID NO: 186302 - DNA, 25 bp, Artificial
  probe
  misc_feature (1)..(25): SEQ ID NO: 1362; WAN024EXI_at; Start 229; Stop 253
aaacccatgatgattcgggcaggtc

SEQ ID NO: 186303 - DNA, 25 bp, Artificial
  probe
  misc_feature (1)..(25): SEQ ID NO: 1362; WAN024EXI_at; Start 1111; Stop 1135
gtcttttatgcgacaagcctttgtg

SEQ ID NO: 186304 - DNA, 25 bp, Artificial
  probe
  misc_feature (1)..(25): SEQ ID NO: 1362; WAN024EXI_at; Start 410; Stop 434
taggtactttgtctacaggcgtagt

SEQ ID NO: 186305 - DNA, 25 bp, Artificial
  probe
  misc_feature (1)..(25): SEQ ID NO: 1362; WAN024EXI_at; Start 1078; Stop 1102
tctgcagtagcaggtcaatttggct

SEQ ID NO: 186306 - DNA, 25 bp, Artificial
  probe
  misc_feature (1)..(25): SEQ ID NO: 1362; WAN024EXI_at; Start 705; Stop 729
ggctctttatgtacgcgacttaggg

SEQ ID NO: 186307 - DNA, 25 bp, Artificial
  probe
  misc_feature (1)..(25): SEQ ID NO: 1362; WAN024EXI_at; Start 341; Stop 365
caggttttgttcctaatgcaacggc

SEQ ID NO: 186308 - DNA, 25 bp, Artificial
  probe
  misc_feature (1)..(25): SEQ ID NO: 1362; WAN024EXI_at; Start 81; Stop 105
tgtaccttttatgcccatcttcgtg

SEQ ID NO: 186309 - DNA, 25 bp, Artificial
  probe
  misc_feature (1)..(25): SEQ ID NO: 1362; WAN024EXI_at; Start 204; Stop 228
tattcttgctgacaaatacggccga

SEQ ID NO: 186310 - DNA, 25 bp, Artificial
  probe
  misc_feature (1)..(25): SEQ ID NO: 1362; WAN024EXI_at; Start 354; Stop 378
taatgcaacggcactgatagccagt

SEQ ID NO: 186311 - DNA, 25 bp, Artificial
  probe
  misc_feature (1)..(25): SEQ ID NO: 1362; WAN024EXI_at; Start 129; Stop 153
gcaagtcgctttttatgcaggctta

SEQ ID NO: 186312 - DNA, 25 bp, Artificial
  probe
  misc_feature (1)..(25): SEQ ID NO: 1362; WAN024EXI_at; Start 244; Stop 268
cgggcaggtcttgctatgactatca

SEQ ID NO: 186313 - DNA, 25 bp, Artificial
  probe
  misc_feature (1)..(25): SEQ ID NO: 1362; WAN024EXI_at; Start 454; Stop 478
ccctttattggtggctttatcgcag

SEQ ID NO: 186314 - DNA, 25 bp, Artificial
  probe
  misc_feature (1)..(25): SEQ ID NO: 1362; WAN024EXI_at; Start 1059; Stop 1083
tgttggtcccatggcaggttctgca

SEQ ID NO: 186315 - DNA, 25 bp, Artificial
  probe
  misc_feature (1)..(25): SEQ ID NO: 1362; WAN024EXI_at; Start 261; Stop 285
gactatcactatgggaggcttggcc

SEQ ID NO: 186316 - DNA, 25 bp, Artificial
  probe
  misc_feature (1)..(25): SEQ ID NO: 1362; WAN024EXI_at; Start 274; Stop 298
ggaggcttggcctttgtcccaaata

SEQ ID NO: 186317 - DNA, 25 bp, Artificial
  probe
  misc_feature (1)..(25): SEQ ID NO: 1362; WAN024EXI_at; Start 818; Stop 842
taggtgacaaggtgggcaatcatcg

SEQ ID NO: 186318 - DNA, 25 bp, Artificial
  probe
  misc_feature (1)..(25): SEQ ID NO: 1362; WAN024EXI_at; Start 162; Stop 186
tgtctctgctatttccgcggcgctc

SEQ ID NO: 186319 - DNA, 25 bp, Artificial
  probe
  misc_feature (1)..(25): SEQ ID NO: 1362; WAN024EXI_at; Start 369; Stop 393
gatagccagtcaggttccaaaggag

SEQ ID NO: 186320 - DNA, 25 bp, Artificial
  probe
  misc_feature (1)..(25): SEQ ID NO: 1362; WAN024EXI_at; Start 1014; Stop 1038
gagggtctttgccttcaatcaggta

SEQ ID NO: 186321 - DNA, 25 bp, Artificial
  probe
  misc_feature (1)..(25): SEQ ID NO: 1362; WAN024EXI_at; Start 998; Stop 1022
ccaaagccggcatttcgagggtctt

SEQ ID NO: 186322 - DNA, 25 bp, Artificial
  probe
  misc_feature (1)..(25): SEQ ID NO: 1362; WAN024EXI_at; Start 474; Stop 498
cgcagaattatttggcattcgtaca

SEQ ID NO: 186323 - DNA, 25 bp, Artificial
  probe
  misc_feature (1)..(25): SEQ ID NO: 1362; WAN024EXI_at; Start 562; Stop 586
gaagattttcaaccagtagccaagg

SEQ ID NO: 186324 - DNA, 25 bp, Artificial
  probe
  misc_feature (1)..(25): SEQ ID NO: 1362; WAN024EXI_at; Start 178; Stop 202
gcggcgctcttttctcctatttggg

SEQ ID NO: 186325 - DNA, 25 bp, Artificial
  probe
  misc_feature (1)..(25): SEQ ID NO: 1362; WAN024EXI_at; Start 384; Stop 408
tccaaaggagaaatcaggctctgcc

SEQ ID NO: 186326 - DNA, 25 bp, Artificial
  probe
  misc_feature (1)..(25): SEQ ID NO: 1362; WAN024EXI_at; Start 46; Stop 70
ggtaattttctgacaggagccagta

SEQ ID NO: 186327 - DNA, 25 bp, Artificial
  probe
  misc_feature (1)..(25): SEQ ID NO: 1362; WAN024EXI_at; Start 875; Stop 899
tcatctatctcctctgtgccaatgc

SEQ ID NO: 186328 - DNA, 25 bp, Artificial
  probe
  misc_feature (1)..(25): SEQ ID NO: 1362; WAN024EXI_at; Start 835; Stop 859
aatcatcgtctcttggttgtcgccc

SEQ ID NO: 186329 - DNA, 25 bp, Artificial
  probe
  misc_feature (1)..(25): SEQ ID NO: 1362; WAN024EXI_at; Start 216; Stop 240
caaatacggccgaaaacccatgatg

SEQ ID NO: 186330 - DNA, 25 bp, Artificial
  probe
  misc_feature (1)..(25): SEQ ID NO: 4258; WAN024EXJ_at; Start 621; Stop 645
tagcaattctgcaacgactctttgg

SEQ ID NO: 186331 - DNA, 25 bp, Artificial
  probe
  misc_feature (1)..(25): SEQ ID NO: 4258; WAN024EXJ_at; Start 601; Stop 625
gttccagagctggttcatgctagca

SEQ ID NO: 186332 - DNA, 25 bp, Artificial
  probe
  misc_feature (1)..(25): SEQ ID NO: 4258; WAN024EXJ_at; Start 801; Stop 825
catgggctatggagcaacttatcaa

SEQ ID NO: 186333 - DNA, 25 bp, Artificial
  probe
  misc_feature (1)..(25): SEQ ID NO: 4258; WAN024EXJ_at; Start 373; Stop 397
gaagtggacctaactggattgacag

SEQ ID NO: 186334 - DNA, 25 bp, Artificial
  probe
  misc_feature (1)..(25): SEQ ID NO: 4258; WAN024EXJ_at; Start 337; Stop 361
gctggactggagtggattcaagcac

SEQ ID NO: 186335 - DNA, 25 bp, Artificial
  probe
  misc_feature (1)..(25): SEQ ID NO: 4258; WAN024EXJ_at; Start 247; Stop 271
gctggactcagcaagccaatcctca

SEQ ID NO: 186336 - DNA, 25 bp, Artificial
  probe
  misc_feature (1)..(25): SEQ ID NO: 4258; WAN024EXJ_at; Start 1030; Stop 1054
gaaatcactgcaactcaggtagcga

SEQ ID NO: 186337 - DNA, 25 bp, Artificial
  probe
  misc_feature (1)..(25): SEQ ID NO: 4258; WAN024EXJ_at; Start 772; Stop 796
catgtcaagacagttccagctggag

SEQ ID NO: 186338 - DNA, 25 bp, Artificial
  probe
  misc_feature (1)..(25): SEQ ID NO: 4258; WAN024EXJ_at; Start 172; Stop 196
gttgccaaggcaattcaagatgatg

SEQ ID NO: 186339 - DNA, 25 bp, Artificial
  probe
  misc_feature (1)..(25): SEQ ID NO: 4258; WAN024EXJ_at; Start 28; Stop 52
gctagtccacatagaccaaccaagg

SEQ ID NO: 186340 - DNA, 25 bp, Artificial
  probe
  misc_feature (1)..(25): SEQ ID NO: 4258; WAN024EXJ_at; Start 44; Stop 68
caaccaaggctctgattcatctggg

SEQ ID NO: 186341 - DNA, 25 bp, Artificial
  probe
  misc_feature (1)..(25): SEQ ID NO: 4258; WAN024EXJ_at; Start 208; Stop 232
tgcgtttccaatatcgatgaagcca

SEQ ID NO: 186342 - DNA, 25 bp, Artificial
  probe
  misc_feature (1)..(25): SEQ ID NO: 4258; WAN024EXJ_at; Start 231; Stop 255
cattgaactcagacaagctggactc

SEQ ID NO: 186343 - DNA, 25 bp, Artificial
  probe
  misc_feature (1)..(25): SEQ ID NO: 4258; WAN024EXJ_at; Start 865; Stop 889
tatgcagatggatggacaagagaca

SEQ ID NO: 186344 - DNA, 25 bp, Artificial
  probe
  misc_feature (1)..(25): SEQ ID NO: 4258; WAN024EXJ_at; Start 389; Stop 413
gattgacagtccacctcaagattga

SEQ ID NO: 186345 - DNA, 25 bp, Artificial
  probe
  misc_feature (1)..(25): SEQ ID NO: 4258; WAN024EXJ_at; Start 105; Stop 129
tatccctcaaggaacgctcaagttg

SEQ ID NO: 186346 - DNA, 25 bp, Artificial
  probe
  misc_feature (1)..(25): SEQ ID NO: 4258; WAN024EXJ_at; Start 156; Stop 180
tcatggagctgttgccgttgccaag

SEQ ID NO: 186347 - DNA, 25 bp, Artificial
  probe
  misc_feature (1)..(25): SEQ ID NO: 4258; WAN024EXJ_at; Start 756; Stop 780
ggagtctgctctggttcatgtcaag

SEQ ID NO: 186348 - DNA, 25 bp, Artificial
  probe
  misc_feature (1)..(25): SEQ ID NO: 4258; WAN024EXJ_at; Start 935; Stop 959
tcggcagggtttcgatggaccaaat

SEQ ID NO: 186349 - DNA, 25 bp, Artificial
  probe
  misc_feature (1)..(25): SEQ ID NO: 4258; WAN024EXJ_at; Start 786; Stop 810
tccagctggagcttgcatgggctat

SEQ ID NO: 186350 - DNA, 25 bp, Artificial
  probe
  misc_feature (1)..(25): SEQ ID NO: 4258; WAN024EXJ_at; Start 1057; Stop 1081
taccgcgtaaccattaactatgagg

SEQ ID NO: 186351 - DNA, 25 bp, Artificial
  probe
  misc_feature (1)..(25): SEQ ID NO: 4258; WAN024EXJ_at; Start 895; Stop 919
aatttctctgtcttggtagatggcc

SEQ ID NO: 186352 - DNA, 25 bp, Artificial
  probe
  misc_feature (1)..(25): SEQ ID NO: 4258; WAN024EXJ_at; Start 513; Stop 537
ccactttgctactgctgatgaggaa

SEQ ID NO: 186353 - DNA, 25 bp, Artificial
  probe
  misc_feature (1)..(25): SEQ ID NO: 4258; WAN024EXJ_at; Start 913; Stop 937
gatggccaagcttgcccaattgtcg

SEQ ID NO: 186354 - DNA, 25 bp, Artificial
  probe
  misc_feature (1)..(25): SEQ ID NO: 4258; WAN024EXJ_at; Start 663; Stop 687
caatgcggttcgtatgggagatgcc

SEQ ID NO: 186355 - DNA, 25 bp, Artificial
  probe
  misc_feature (1)..(25): SEQ ID NO: 4258; WAN024EXJ_at; Start 466; Stop 490
caagatttgctccaacaacacggtg

SEQ ID NO: 186356 - DNA, 25 bp, Artificial
  probe
  misc_feature (1)..(25): SEQ ID NO: 4258; WAN024EXJ_at; Start 60; Stop 84
tcatctgggagctattcgacaaaat

SEQ ID NO: 186357 - DNA, 25 bp, Artificial
  probe
  misc_feature (1)..(25): SEQ ID NO: 4258; WAN024EXJ_at; Start 996; Stop 1020
caaggtaaccttgattggctccaat

SEQ ID NO: 186358 - DNA, 25 bp, Artificial
  probe
  misc_feature (1)..(25): SEQ ID NO: 4258; WAN024EXJ_at; Start 848; Stop 872
cgaccgtgccaatcgggtatgcaga

SEQ ID NO: 186359 - DNA, 25 bp, Artificial
  probe
  misc_feature (1)..(25): SEQ ID NO: 4258; WAN024EXJ_at; Start 730; Stop 754
tatgatttgataccggccttgacct

SEQ ID NO: 186360 - DNA, 25 bp, Artificial
  probe
  misc_feature (1)..(25): SEQ ID NO: 4258; WAN024EXJ_at; Start 704; Stop 728
caagtggagcggtcttggatttgcc

SEQ ID NO: 186361 - DNA, 25 bp, Artificial
  probe
  misc_feature (1)..(25): SEQ ID NO: 4258; WAN024EXJ_at; Start 1083; Stop 1107
ggtttgcctcctcagcgaccgtatt

SEQ ID NO: 186362 - DNA, 25 bp, Artificial
  probe
  misc_feature (1)..(25): SEQ ID NO: 4258; WAN024EXJ_at; Start 820; Stop 844
tatcaagcggatagcgagcaagtca

SEQ ID NO: 186363 - DNA, 25 bp, Artificial
  probe
  misc_feature (1)..(25): SEQ ID NO: 4258; WAN024EXJ_at; Start 319; Stop 343
gacttcaccttgacagtggctggac

SEQ ID NO: 186364 - DNA, 25 bp, Artificial
  probe
  misc_feature (1)..(25): SEQ ID NO: 2755; WAN024EXK_at; Start 180; Stop 204
tgaaaacggagaactcaatcgccct

SEQ ID NO: 186365 - DNA, 25 bp, Artificial
  probe
  misc_feature (1)..(25): SEQ ID NO: 2755; WAN024EXK_at; Start 5; Stop 29
gaaaaatcatcggaatcactggggg

SEQ ID NO: 186366 - DNA, 25 bp, Artificial
  probe
  misc_feature (1)..(25): SEQ ID NO: 2755; WAN024EXK_at; Start 424; Stop 448
cgcttaatgaaaagggaccagttgt

SEQ ID NO: 186367 - DNA, 25 bp, Artificial
  probe
  misc_feature (1)..(25): SEQ ID NO: 2755; WAN024EXK_at; Start 40; Stop 64
ggtaagtcaactgtgacaaattttc

SEQ ID NO: 186368 - DNA, 25 bp, Artificial
  probe
  misc_feature (1)..(25): SEQ ID NO: 2755; WAN024EXK_at; Start 301; Stop 325
gaacagttggctcagacagaagaga

SEQ ID NO: 186369 - DNA, 25 bp, Artificial
  probe
  misc_feature (1)..(25): SEQ ID NO: 2755; WAN024EXK_at; Start 551; Stop 575
ttcttaatcaagtgcatatccttct

SEQ ID NO: 186370 - DNA, 25 bp, Artificial
  probe
  misc_feature (1)..(25): SEQ ID NO: 2755; WAN024EXK_at; Start 559; Stop 583
caagtgcatatccttcttgagggag

SEQ ID NO: 186371 - DNA, 25 bp, Artificial
  probe
  misc_feature (1)..(25): SEQ ID NO: 2755; WAN024EXK_at; Start 322; Stop 346
gagattttcttcatggatattcccc

SEQ ID NO: 186372 - DNA, 25 bp, Artificial
  probe
  misc_feature (1)..(25): SEQ ID NO: 2755; WAN024EXK_at; Start 497; Stop 521
aaaagaaagatttggccagccaggt

SEQ ID NO: 186373 - DNA, 25 bp, Artificial
  probe
  misc_feature (1)..(25): SEQ ID NO: 2755; WAN024EXK_at; Start 122; Stop 146
aacctggtggtcgtctgtttgaggc

SEQ ID NO: 186374 - DNA, 25 bp, Artificial
  probe
  misc_feature (1)..(25): SEQ ID NO: 2755; WAN024EXK_at; Start 297; Stop 321
gagagaacagttggctcagacagaa

SEQ ID NO: 186375 - DNA, 25 bp, Artificial
  probe
  misc_feature (1)..(25): SEQ ID NO: 2755; WAN024EXK_at; Start 395; Stop 419
tctatgtggaccgagatgcccaagt

SEQ ID NO: 186376 - DNA, 25 bp, Artificial
  probe
  misc_feature (1)..(25): SEQ ID NO: 2755; WAN024EXK_at; Start 111; Stop 135
ccaactacagaaacctggtggtcgt

SEQ ID NO: 186377 - DNA, 25 bp, Artificial
  probe
  misc_feature (1)..(25): SEQ ID NO: 2755; WAN024EXK_at; Start 570; Stop 594
ccttcttgagggaggtaggcaagat

SEQ ID NO: 186378 - DNA, 25 bp, Artificial
  probe
  misc_feature (1)..(25): SEQ ID NO: 2755; WAN024EXK_at; Start 510; Stop 534
ggccagccaggttcttgataataat

SEQ ID NO: 186379 - DNA, 25 bp, Artificial
  probe
  misc_feature (1)..(25): SEQ ID NO: 2755; WAN024EXK_at; Start 446; Stop 470
tgtccaaagatgaagctgagtctcg

SEQ ID NO: 186380 - DNA, 25 bp, Artificial
  probe
  misc_feature (1)..(25): SEQ ID NO: 2755; WAN024EXK_at; Start 289; Stop 313
gctactttgagagaacagttggctc

SEQ ID NO: 186381 - DNA, 25 bp, Artificial
  probe
  misc_feature (1)..(25): SEQ ID NO: 2755; WAN024EXK_at; Start 391; Stop 415
ttggtctatgtggaccgagatgccc

SEQ ID NO: 186382 - DNA, 25 bp, Artificial
  probe
  misc_feature (1)..(25): SEQ ID NO: 2755; WAN024EXK_at; Start 583; Stop 607
ggtaggcaagatgacagagattaac

SEQ ID NO: 186383 - DNA, 25 bp, Artificial
  probe
  misc_feature (1)..(25): SEQ ID NO: 2755; WAN024EXK_at; Start 376; Stop 400
tttgctgagacttggttggtctatg

SEQ ID NO: 186384 - DNA, 25 bp, Artificial
  probe
  misc_feature (1)..(25): SEQ ID NO: 2755; WAN024EXK_at; Start 358; Stop 382
caggactacagcgattggtttgctg

SEQ ID NO: 186385 - DNA, 25 bp, Artificial
  probe
  misc_feature (1)..(25): SEQ ID NO: 2755; WAN024EXK_at; Start 183; Stop 207
aaacggagaactcaatcgccctctc

SEQ ID NO: 186386 - DNA, 25 bp, Artificial
  probe
  misc_feature (1)..(25): SEQ ID NO: 2755; WAN024EXK_at; Start 565; Stop 589
catatccttcttgagggaggtaggc

SEQ ID NO: 186387 - DNA, 25 bp, Artificial
  probe
  misc_feature (1)..(25): SEQ ID NO: 2755; WAN024EXK_at; Start 439; Stop 463
gaccagttgtccaaagatgaagctg

SEQ ID NO: 186388 - DNA, 25 bp, Artificial
  probe
  misc_feature (1)..(25): SEQ ID NO: 2755; WAN024EXK_at; Start 280; Stop 304
gaggaactggctactttgagagaac

SEQ ID NO: 186389 - DNA, 25 bp, Artificial
  probe
  misc_feature (1)..(25): SEQ ID NO: 2755; WAN024EXK_at; Start 525; Stop 549
tgataataatggcaatcagaaccag

SEQ ID NO: 186390 - DNA, 25 bp, Artificial
  probe
  misc_feature (1)..(25): SEQ ID NO: 2755; WAN024EXK_at; Start 307; Stop 331
ttggctcagacagaagagattttct

SEQ ID NO: 186391 - DNA, 25 bp, Artificial
  probe
  misc_feature (1)..(25): SEQ ID NO: 2755; WAN024EXK_at; Start 209; Stop 233
tagctagtctcatcttttcaaatcc

SEQ ID NO: 186392 - DNA, 25 bp, Artificial
  probe
  misc_feature (1)..(25): SEQ ID NO: 2755; WAN024EXK_at; Start 267; Stop 291
ggagattatccgtgaggaactggct

SEQ ID NO: 186393 - DNA, 25 bp, Artificial
  probe
  misc_feature (1)..(25): SEQ ID NO: 2755; WAN024EXK_at; Start 473; Stop 497
tggcagcccagtggcctttagaaaa

SEQ ID NO: 186394 - DNA, 25 bp, Artificial
  probe
  misc_feature (1)..(25): SEQ ID NO: 2755; WAN024EXK_at; Start 273; Stop 297
tatccgtgaggaactggctactttg

SEQ ID NO: 186395 - DNA, 25 bp, Artificial
  probe
  misc_feature (1)..(25): SEQ ID NO: 2755; WAN024EXK_at; Start 169; Stop 193
gaaatcattcttgaaaacggagaac

SEQ ID NO: 186396 - DNA, 25 bp, Artificial
  probe
  misc_feature (1)..(25): SEQ ID NO: 2755; WAN024EXK_at; Start 331; Stop 355
ttcatggatattcccctactttttg

SEQ ID NO: 186397 - DNA, 25 bp, Artificial
  probe
  misc_feature (1)..(25): SEQ ID NO: 2755; WAN024EXK_at; Start 369; Stop 393
cgattggtttgctgagacttggttg

SEQ ID NO: 186398 - DNA, 25 bp, Artificial
  probe
  misc_feature (1)..(25): SEQ ID NO: 5217; WAN024EXL_at; Start 189; Stop 213
ttccaaggctatgggaacgggcatt

SEQ ID NO: 186399 - DNA, 25 bp, Artificial
  probe
  misc_feature (1)..(25): SEQ ID NO: 5217; WAN024EXL_at; Start 322; Stop 346
gatcagtttgtgacagccagtgtca

SEQ ID NO: 186400 - DNA, 25 bp, Artificial
  probe
  misc_feature (1)..(25): SEQ ID NO: 5217; WAN024EXL_at; Start 137; Stop 161
gacgcaggcaaatagaatatttagc

SEQ ID NO: 186401 - DNA, 25 bp, Artificial
  probe
  misc_feature (1)..(25): SEQ ID NO: 5217; WAN024EXL_at; Start 87; Stop 111
taagcgtgtactgaccgctcaggaa

SEQ ID NO: 186402 - DNA, 25 bp, Artificial
  probe
  misc_feature (1)..(25): SEQ ID NO: 5217; WAN024EXL_at; Start 114; Stop 138
ggagcgcttcaccagtctcaaagga

SEQ ID NO: 186403 - DNA, 25 bp, Artificial
  probe
  misc_feature (1)..(25): SEQ ID NO: 5217; WAN024EXL_at; Start 38; Stop 62
aagaattggcttcgatagaaagcgc

SEQ ID NO: 186404 - DNA, 25 bp, Artificial
  probe
  misc_feature (1)..(25): SEQ ID NO: 5217; WAN024EXL_at; Start 121; Stop 145
ttcaccagtctcaaaggacgcaggc

SEQ ID NO: 186405 - DNA, 25 bp, Artificial
  probe
  misc_feature (1)..(25): SEQ ID NO: 5217; WAN024EXL_at; Start 24; Stop 48
cggaattgacatcgaagaattggct

SEQ ID NO: 186406 - DNA, 25 bp, Artificial
  probe
  misc_feature (1)..(25): SEQ ID NO: 5217; WAN024EXL_at; Start 318; Stop 342
caccgatcagtttgtgacagccagt

SEQ ID NO: 186407 - DNA, 25 bp, Artificial
  probe
  misc_feature (1)..(25): SEQ ID NO: 5217; WAN024EXL_at; Start 2; Stop 26
tgatgagaatgatagttggacacgg

SEQ ID NO: 186408 - DNA, 25 bp, Artificial
  probe
  misc_feature (1)..(25): SEQ ID NO: 5217; WAN024EXL_at; Start 290; Stop 314
caggaaagatttggctgtctatcag

SEQ ID NO: 186409 - DNA, 25 bp, Artificial
  probe
  misc_feature (1)..(25): SEQ ID NO: 5217; WAN024EXL_at; Start 47; Stop 71
cttcgatagaaagcgcagttacacg

SEQ ID NO: 186410 - DNA, 25 bp, Artificial
  probe
  misc_feature (1)..(25): SEQ ID NO: 5217; WAN024EXL_at; Start 216; Stop 240
caagctcggttttcaggatttggaa

SEQ ID NO: 186411 - DNA, 25 bp, Artificial
  probe
  misc_feature (1)..(25): SEQ ID NO: 5217; WAN024EXL_at; Start 62; Stop 86
cagttacacgacatgaaggatttgc

SEQ ID NO: 186412 - DNA, 25 bp, Artificial
  probe
  misc_feature (1)..(25): SEQ ID NO: 5217; WAN024EXL_at; Start 68; Stop 92
cacgacatgaaggatttgctaagcg

SEQ ID NO: 186413 - DNA, 25 bp, Artificial
  probe
  misc_feature (1)..(25): SEQ ID NO: 5217; WAN024EXL_at; Start 209; Stop 233
gcattagcaagctcggttttcagga

SEQ ID NO: 186414 - DNA, 25 bp, Artificial
  probe
  misc_feature (1)..(25): SEQ ID NO: 5217; WAN024EXL_at; Start 284; Stop 308
cattttcaggaaagatttggctgtc

SEQ ID NO: 186415 - DNA, 25 bp, Artificial
  probe
  misc_feature (1)..(25): SEQ ID NO: 5217; WAN024EXL_at; Start 93; Stop 117
tgtactgaccgctcaggaaatggag

SEQ ID NO: 186416 - DNA, 25 bp, Artificial
  probe
  misc_feature (1)..(25): SEQ ID NO: 5217; WAN024EXL_at; Start 80; Stop 104
gatttgctaagcgtgtactgaccgc

SEQ ID NO: 186417 - DNA, 25 bp, Artificial
  probe
  misc_feature (1)..(25): SEQ ID NO: 5217; WAN024EXL_at; Start 236; Stop 260
tggaagtcttgaacaatgaacgtgg

SEQ ID NO: 186418 - DNA, 25 bp, Artificial
  probe
  misc_feature (1)..(25): SEQ ID NO: 5217; WAN024EXL_at; Start 260; Stop 284
gggcgccttattttagtcaggcacc

SEQ ID NO: 186419 - DNA, 25 bp, Artificial
  probe
  misc_feature (1)..(25): SEQ ID NO: 5217; WAN024EXL_at; Start 228; Stop 252
tcaggatttggaagtcttgaacaat

SEQ ID NO: 186420 - DNA, 25 bp, Artificial
  probe
  misc_feature (1)..(25): SEQ ID NO: 5217; WAN024EXL_at; Start 331; Stop 355
gtgacagccagtgtcattttggagg

SEQ ID NO: 186421 - DNA, 25 bp, Artificial
  probe
  misc_feature (1)..(25): SEQ ID NO: 5217; WAN024EXL_at; Start 14; Stop 38
tagttggacacggaattgacatcga

SEQ ID NO: 186422 - DNA, 25 bp, Artificial
  probe
  misc_feature (1)..(25): SEQ ID NO: 5217; WAN024EXL_at; Start 273; Stop 297
tagtcaggcaccattttcaggaaag

SEQ ID NO: 186423 - DNA, 25 bp, Artificial
  probe
  misc_feature (1)..(25): SEQ ID NO: 5217; WAN024EXL_at; Start 305; Stop 329
tgtctatcagccacaccgatcagtt

SEQ ID NO: 186424 - DNA, 25 bp, Artificial
  probe
  misc_feature (1)..(25): SEQ ID NO: 5217; WAN024EXL_at; Start 165; Stop 189
tcgctggtcggctaaggaggccttt

SEQ ID NO: 186425 - DNA, 25 bp, Artificial
  probe
  misc_feature (1)..(25): SEQ ID NO: 5217; WAN024EXL_at; Start 55; Stop 79
gaaagcgcagttacacgacatgaag

SEQ ID NO: 186426 - DNA, 25 bp, Artificial
  probe
  misc_feature (1)..(25): SEQ ID NO: 5217; WAN024EXL_at; Start 129; Stop 153
tctcaaaggacgcaggcaaatagaa

SEQ ID NO: 186427 - DNA, 25 bp, Artificial
  probe
  misc_feature (1)..(25): SEQ ID NO: 5217; WAN024EXL_at; Start 245; Stop 269
tgaacaatgaacgtggggcgcctta

SEQ ID NO: 186428 - DNA, 25 bp, Artificial
  probe
  misc_feature (1)..(25): SEQ ID NO: 5217; WAN024EXL_at; Start 105; Stop 129
tcaggaaatggagcgcttcaccagt

SEQ ID NO: 186429 - DNA, 25 bp, Artificial
  probe
  misc_feature (1)..(25): SEQ ID NO: 5217; WAN024EXL_at; Start 199; Stop 223
atgggaacgggcattagcaagctcg

SEQ ID NO: 186430 - DNA, 25 bp, Artificial
  probe
  misc_feature (1)..(25): SEQ ID NO: 5217; WAN024EXL_at; Start 177; Stop 201
taaggaggccttttccaaggctatg

SEQ ID NO: 186431 - DNA, 25 bp, Artificial
  probe
  misc_feature (1)..(25): SEQ ID NO: 5217; WAN024EXL_at; Start 152; Stop 176
aatatttagctggtcgctggtcggc

SEQ ID NO: 186432 - DNA, 25 bp, Artificial
  probe
  misc_feature (1)..(25): SEQ ID NO: 6857; WAN024EXM_at; Start 206; Stop 230
actggttcacggtgaaggtagctag

SEQ ID NO: 186433 - DNA, 25 bp, Artificial
  probe
  misc_feature (1)..(25): SEQ ID NO: 6857; WAN024EXM_at; Start 203; Stop 227
acaactggttcacggtgaaggtagc

SEQ ID NO: 186434 - DNA, 25 bp, Artificial
  probe
  misc_feature (1)..(25): SEQ ID NO: 6857; WAN024EXM_at; Start 192; Stop 216
gagcagctttcacaactggttcacg

SEQ ID NO: 186435 - DNA, 25 bp, Artificial
  probe
  misc_feature (1)..(25): SEQ ID NO: 6857; WAN024EXM_at; Start 33; Stop 57
gagtaatcaattctttagcatggtg

SEQ ID NO: 186436 - DNA, 25 bp, Artificial
  probe
  misc_feature (1)..(25): SEQ ID NO: 6857; WAN024EXM_at; Start 76; Stop 100
catgatgtgaccagccataaagatg

SEQ ID NO: 186437 - DNA, 25 bp, Artificial
  probe
  misc_feature (1)..(25): SEQ ID NO: 6857; WAN024EXM_at; Start 162; Stop 186
gcttttcacaaaatacgtgtttgcc

SEQ ID NO: 186438 - DNA, 25 bp, Artificial
  probe
  misc_feature (1)..(25): SEQ ID NO: 6857; WAN024EXM_at; Start 44; Stop 68
tctttagcatggtgtacaccgttaa

SEQ ID NO: 186439 - DNA, 25 bp, Artificial
  probe
  misc_feature (1)..(25): SEQ ID NO: 6857; WAN024EXM_at; Start 73; Stop 97
gttcatgatgtgaccagccataaag

SEQ ID NO: 186440 - DNA, 25 bp, Artificial
  probe
  misc_feature (1)..(25): SEQ ID NO: 6857; WAN024EXM_at; Start 1; Stop 25
atggcaataaagaactttaccgatt

SEQ ID NO: 186441 - DNA, 25 bp, Artificial
  probe
  misc_feature (1)..(25): SEQ ID NO: 6857; WAN024EXM_at; Start 199; Stop 223
tttcacaactggttcacggtgaagg

SEQ ID NO: 186442 - DNA, 25 bp, Artificial
  probe
  misc_feature (1)..(25): SEQ ID NO: 6857; WAN024EXM_at; Start 171; Stop 195
aaaatacgtgtttgccatgttgagc

SEQ ID NO: 186443 - DNA, 25 bp, Artificial
  probe
  misc_feature (1)..(25): SEQ ID NO: 6857; WAN024EXM_at; Start 97; Stop 121
gatgacattattttctttacatgcg

SEQ ID NO: 186444 - DNA, 25 bp, Artificial
  probe
  misc_feature (1)..(25): SEQ ID NO: 6857; WAN024EXM_at; Start 186; Stop 210
catgttgagcagctttcacaactgg

SEQ ID NO: 186445 - DNA, 25 bp, Artificial
  probe
  misc_feature (1)..(25): SEQ ID NO: 6857; WAN024EXM_at; Start 127; Stop 151
catggctttacaatcttcataagac

SEQ ID NO: 186446 - DNA, 25 bp, Artificial
  probe
  misc_feature (1)..(25): SEQ ID NO: 6857; WAN024EXM_at; Start 110; Stop 134
tctttacatgcgtcaaccatggctt

SEQ ID NO: 186447 - DNA, 25 bp, Artificial
  probe
  misc_feature (1)..(25): SEQ ID NO: 6857; WAN024EXM_at; Start 58; Stop 82
tacaccgttaaagaagttcatgatg

SEQ ID NO: 186448 - DNA, 25 bp, Artificial
  probe
  misc_feature (1)..(25): SEQ ID NO: 6857; WAN024EXM_at; Start 149; Stop 173
gacaatgcaattggcttttcacaaa

SEQ ID NO: 186449 - DNA, 25 bp, Artificial
  probe
  misc_feature (1)..(25): SEQ ID NO: 6857; WAN024EXM_at; Start 121; Stop 145
gtcaaccatggctttacaatcttca

SEQ ID NO: 186450 - DNA, 25 bp, Artificial
  probe
  misc_feature (1)..(25): SEQ ID NO: 6857; WAN024EXM_at; Start 154; Stop 178
tgcaattggcttttcacaaaatacg

SEQ ID NO: 186451 - DNA, 25 bp, Artificial
  probe
  misc_feature (1)..(25): SEQ ID NO: 6857; WAN024EXM_at; Start 195; Stop 219
cagctttcacaactggttcacggtg

SEQ ID NO: 186452 - DNA, 25 bp, Artificial
  probe
  misc_feature (1)..(25): SEQ ID NO: 6857; WAN024EXM_at; Start 70; Stop 94
gaagttcatgatgtgaccagccata

SEQ ID NO: 186453 - DNA, 25 bp, Artificial
  probe
  misc_feature (1)..(25): SEQ ID NO: 6857; WAN024EXM_at; Start 107; Stop 131
ttttctttacatgcgtcaaccatgg

SEQ ID NO: 186454 - DNA, 25 bp, Artificial
  probe
  misc_feature (1)..(25): SEQ ID NO: 6857; WAN024EXM_at; Start 53; Stop 77
tggtgtacaccgttaaagaagttca

SEQ ID NO: 186455 - DNA, 25 bp, Artificial
  probe
  misc_feature (1)..(25): SEQ ID NO: 6857; WAN024EXM_at; Start 175; Stop 199
tacgtgtttgccatgttgagcagct

SEQ ID NO: 186456 - DNA, 25 bp, Artificial
  probe
  misc_feature (1)..(25): SEQ ID NO: 6857; WAN024EXM_at; Start 140; Stop 164
tcttcataagacaatgcaattggct

SEQ ID NO: 186457 - DNA, 25 bp, Artificial
  probe
  misc_feature (1)..(25): SEQ ID NO: 6857; WAN024EXM_at; Start 79; Stop 103
gatgtgaccagccataaagatgaca

SEQ ID NO: 186458 - DNA, 25 bp, Artificial
  probe
  misc_feature (1)..(25): SEQ ID NO: 6857; WAN024EXM_at; Start 114; Stop 138
tacatgcgtcaaccatggctttaca

SEQ ID NO: 186459 - DNA, 25 bp, Artificial
  probe
  misc_feature (1)..(25): SEQ ID NO: 6857; WAN024EXM_at; Start 40; Stop 64
caattctttagcatggtgtacaccg

SEQ ID NO: 186460 - DNA, 25 bp, Artificial
  probe
  misc_feature (1)..(25): SEQ ID NO: 6857; WAN024EXM_at; Start 66; Stop 90
taaagaagttcatgatgtgaccagc

SEQ ID NO: 186461 - DNA, 25 bp, Artificial
  probe
  misc_feature (1)..(25): SEQ ID NO: 6857; WAN024EXM_at; Start 18; Stop 42
taccgattttaccttgagtaatcaa

SEQ ID NO: 186462 - DNA, 25 bp, Artificial
  probe
  misc_feature (1)..(25): SEQ ID NO: 6857; WAN024EXM_at; Start 118; Stop 142
tgcgtcaaccatggctttacaatct

SEQ ID NO: 186463 - DNA, 25 bp, Artificial
  probe
  misc_feature (1)..(25): SEQ ID NO: 6857; WAN024EXM_at; Start 81; Stop 105
tgtgaccagccataaagatgacatt

SEQ ID NO: 186464 - DNA, 25 bp, Artificial
  probe
  misc_feature (1)..(25): SEQ ID NO: 6857; WAN024EXM_at; Start 84; Stop 108
gaccagccataaagatgacattatt

SEQ ID NO: 186465 - DNA, 25 bp, Artificial
  probe
  misc_feature (1)..(25): SEQ ID NO: 6857; WAN024EXM_at; Start 181; Stop 205
tttgccatgttgagcagctttcaca

SEQ ID NO: 186466 - DNA, 25 bp, Artificial
  probe
  misc_feature (1)..(25): SEQ ID NO: 7265; WAN024EXN_at; Start 79; Stop 103
gcagctacaccattgagaagttttt

SEQ ID NO: 186467 - DNA, 25 bp, Artificial
  probe
  misc_feature (1)..(25): SEQ ID NO: 7265; WAN024EXN_at; Start 89; Stop 113
cattgagaagtttttcaaattcttc

SEQ ID NO: 186468 - DNA, 25 bp, Artificial
  probe
  misc_feature (1)..(25): SEQ ID NO: 7265; WAN024EXN_at; Start 175; Stop 199
tgcaaccataatgggcaacgtactc

SEQ ID NO: 186469 - DNA, 25 bp, Artificial
  probe
  misc_feature (1)..(25): SEQ ID NO: 7265; WAN024EXN_at; Start 104; Stop 128
caaattcttctgtaatttctccacc

SEQ ID NO: 186470 - DNA, 25 bp, Artificial
  probe
  misc_feature (1)..(25): SEQ ID NO: 7265; WAN024EXN_at; Start 198; Stop 222
tcctggtttaccgtacgcaattgct

SEQ ID NO: 186471 - DNA, 25 bp, Artificial
  probe
  misc_feature (1)..(25): SEQ ID NO: 7265; WAN024EXN_at; Start 119; Stop 143
tttctccacctttaatgatgtcatg

SEQ ID NO: 186472 - DNA, 25 bp, Artificial
  probe
  misc_feature (1)..(25): SEQ ID NO: 7265; WAN024EXN_at; Start 206; Stop 230
taccgtacgcaattgctccatccat

SEQ ID NO: 186473 - DNA, 25 bp, Artificial
  probe
  misc_feature (1)..(25): SEQ ID NO: 7265; WAN024EXN_at; Start 180; Stop 204
ccataatgggcaacgtactcctggt

SEQ ID NO: 186474 - DNA, 25 bp, Artificial
  probe
  misc_feature (1)..(25): SEQ ID NO: 7265; WAN024EXN_at; Start 201; Stop 225
tggtttaccgtacgcaattgctcca

SEQ ID NO: 186475 - DNA, 25 bp, Artificial
  probe
  misc_feature (1)..(25): SEQ ID NO: 7265; WAN024EXN_at; Start 75; Stop 99
taaagcagctacaccattgagaagt

SEQ ID NO: 186476 - DNA, 25 bp, Artificial
  probe
  misc_feature (1)..(25): SEQ ID NO: 7265; WAN024EXN_at; Start 42; Stop 66
taaagtacatgcatcagcggtagcg

SEQ ID NO: 186477 - DNA, 25 bp, Artificial
  probe
  misc_feature (1)..(25): SEQ ID NO: 7265; WAN024EXN_at; Start 146; Stop 170
gatattccatttctttatcaataca

SEQ ID NO: 186478 - DNA, 25 bp, Artificial
  probe
  misc_feature (1)..(25): SEQ ID NO: 7265; WAN024EXN_at; Start 59; Stop 83
cggtagcgattgattctaaagcagc

SEQ ID NO: 186479 - DNA, 25 bp, Artificial
  probe
  misc_feature (1)..(25): SEQ ID NO: 7265; WAN024EXN_at; Start 123; Stop 147
tccacctttaatgatgtcatgtaga

SEQ ID NO: 186480 - DNA, 25 bp, Artificial
  probe
  misc_feature (1)..(25): SEQ ID NO: 7265; WAN024EXN_at; Start 210; Stop 234
gtacgcaattgctccatccatacca

SEQ ID NO: 186481 - DNA, 25 bp, Artificial
  probe
  misc_feature (1)..(25): SEQ ID NO: 7265; WAN024EXN_at; Start 82; Stop 106
gctacaccattgagaagtttttcaa

SEQ ID NO: 186482 - DNA, 25 bp, Artificial
  probe
  misc_feature (1)..(25): SEQ ID NO: 7265; WAN024EXN_at; Start 70; Stop 94
gattctaaagcagctacaccattga

SEQ ID NO: 186483 - DNA, 25 bp, Artificial
  probe
  misc_feature (1)..(25): SEQ ID NO: 7265; WAN024EXN_at; Start 114; Stop 138
tgtaatttctccacctttaatgatg

SEQ ID NO: 186484 - DNA, 25 bp, Artificial
  probe
  misc_feature (1)..(25): SEQ ID NO: 7265; WAN024EXN_at; Start 157; Stop 181
tctttatcaatacatgtttgcaacc

SEQ ID NO: 186485 - DNA, 25 bp, Artificial
  probe
  misc_feature (1)..(25): SEQ ID NO: 7265; WAN024EXN_at; Start 66; Stop 90
gattgattctaaagcagctacacca

SEQ ID NO: 186486 - DNA, 25 bp, Artificial
  probe
  misc_feature (1)..(25): SEQ ID NO: 7265; WAN024EXN_at; Start 167; Stop 191
tacatgtttgcaaccataatgggca

SEQ ID NO: 186487 - DNA, 25 bp, Artificial
  probe
  misc_feature (1)..(25): SEQ ID NO: 7265; WAN024EXN_at; Start 49; Stop 73
catgcatcagcggtagcgattgatt

SEQ ID NO: 186488 - DNA, 25 bp, Artificial
  probe
  misc_feature (1)..(25): SEQ ID NO: 7265; WAN024EXN_at; Start 25; Stop 49
cgatcttctttaactgataaagtac

SEQ ID NO: 186489 - DNA, 25 bp, Artificial
  probe
  misc_feature (1)..(25): SEQ ID NO: 7265; WAN024EXN_at; Start 55; Stop 79
tcagcggtagcgattgattctaaag

SEQ ID NO: 186490 - DNA, 25 bp, Artificial
  probe
  misc_feature (1)..(25): SEQ ID NO: 7265; WAN024EXN_at; Start 52; Stop 76
gcatcagcggtagcgattgattcta

SEQ ID NO: 186491 - DNA, 25 bp, Artificial
  probe
  misc_feature (1)..(25): SEQ ID NO: 7265; WAN024EXN_at; Start 171; Stop 195
tgtttgcaaccataatgggcaacgt

SEQ ID NO: 186492 - DNA, 25 bp, Artificial
  probe
  misc_feature (1)..(25): SEQ ID NO: 7265; WAN024EXN_at; Start 9; Stop 33
tgaaagacttacttttcgatcttct

SEQ ID NO: 186493 - DNA, 25 bp, Artificial
  probe
  misc_feature (1)..(25): SEQ ID NO: 7265; WAN024EXN_at; Start 2; Stop 26
tgatttctgaaagacttacttttcg

SEQ ID NO: 186494 - DNA, 25 bp, Artificial
  probe
  misc_feature (1)..(25): SEQ ID NO: 7265; WAN024EXN_at; Start 135; Stop 159
gatgtcatgtagatattccatttct

SEQ ID NO: 186495 - DNA, 25 bp, Artificial
  probe
  misc_feature (1)..(25): SEQ ID NO: 7265; WAN024EXN_at; Start 64; Stop 88
gcgattgattctaaagcagctacac

SEQ ID NO: 186496 - DNA, 25 bp, Artificial
  probe
  misc_feature (1)..(25): SEQ ID NO: 7265; WAN024EXN_at; Start 46; Stop 70
gtacatgcatcagcggtagcgattg

SEQ ID NO: 186497 - DNA, 25 bp, Artificial
  probe
  misc_feature (1)..(25): SEQ ID NO: 7265; WAN024EXN_at; Start 40; Stop 64
gataaagtacatgcatcagcggtag

SEQ ID NO: 186498 - DNA, 25 bp, Artificial
  probe
  misc_feature (1)..(25): SEQ ID NO: 7265; WAN024EXN_at; Start 183; Stop 207
taatgggcaacgtactcctggttta

SEQ ID NO: 186499 - DNA, 25 bp, Artificial
  probe
  misc_feature (1)..(25): SEQ ID NO: 7265; WAN024EXN_at; Start 222; Stop 246
tccatccataccacgaccggtatag

SEQ ID NO: 186500 - DNA, 25 bp, Artificial
  probe
  misc_feature (1)..(25): SEQ ID NO: 5239; WAN024EXO_at; Start 145; Stop 169
aacatttttaccatgctgtgcagcc

SEQ ID NO: 186501 - DNA, 25 bp, Artificial
  probe
  misc_feature (1)..(25): SEQ ID NO: 5239; WAN024EXO_at; Start 53; Stop 77
tgtcctgccataaaggttacattgt

SEQ ID NO: 186502 - DNA, 25 bp, Artificial
  probe
  misc_feature (1)..(25): SEQ ID NO: 5239; WAN024EXO_at; Start 177; Stop 201
ccggttccttatgaagattatttgg

SEQ ID NO: 186503 - DNA, 25 bp, Artificial
  probe
  misc_feature (1)..(25): SEQ ID NO: 5239; WAN024EXO_at; Start 40; Stop 64
gaaattcataatatgtcctgccata

SEQ ID NO: 186504 - DNA, 25 bp, Artificial
  probe
  misc_feature (1)..(25): SEQ ID NO: 5239; WAN024EXO_at; Start 10; Stop 34
gagttcttttgcatgatgaacacca

SEQ ID NO: 186505 - DNA, 25 bp, Artificial
  probe
  misc_feature (1)..(25): SEQ ID NO: 5239; WAN024EXO_at; Start 72; Stop 96
cattgttttctttacacgcatctac

SEQ ID NO: 186506 - DNA, 25 bp, Artificial
  probe
  misc_feature (1)..(25): SEQ ID NO: 5239; WAN024EXO_at; Start 6; Stop 30
taatgagttcttttgcatgatgaac

SEQ ID NO: 186507 - DNA, 25 bp, Artificial
  probe
  misc_feature (1)..(25): SEQ ID NO: 5239; WAN024EXO_at; Start 97; Stop 121
catctcgcgacaatcttgataagaa

SEQ ID NO: 186508 - DNA, 25 bp, Artificial
  probe
  misc_feature (1)..(25): SEQ ID NO: 5239; WAN024EXO_at; Start 90; Stop 114
catctaccatctcgcgacaatcttg

SEQ ID NO: 186509 - DNA, 25 bp, Artificial
  probe
  misc_feature (1)..(25): SEQ ID NO: 5239; WAN024EXO_at; Start 45; Stop 69
tcataatatgtcctgccataaaggt

SEQ ID NO: 186510 - DNA, 25 bp, Artificial
  probe
  misc_feature (1)..(25): SEQ ID NO: 5239; WAN024EXO_at; Start 82; Stop 106
tttacacgcatctaccatctcgcga

SEQ ID NO: 186511 - DNA, 25 bp, Artificial
  probe
  misc_feature (1)..(25): SEQ ID NO: 5239; WAN024EXO_at; Start 94; Stop 118
taccatctcgcgacaatcttgataa

SEQ ID NO: 186512 - DNA, 25 bp, Artificial
  probe
  misc_feature (1)..(25): SEQ ID NO: 5239; WAN024EXO_at; Start 158; Stop 182
tgctgtgcagccttaataaccggtt

SEQ ID NO: 186513 - DNA, 25 bp, Artificial
  probe
  misc_feature (1)..(25): SEQ ID NO: 5239; WAN024EXO_at; Start 16; Stop 40
ttttgcatgatgaacaccattaaag

SEQ ID NO: 186514 - DNA, 25 bp, Artificial
  probe
  misc_feature (1)..(25): SEQ ID NO: 5239; WAN024EXO_at; Start 67; Stop 91
ggttacattgttttctttacacgca

SEQ ID NO: 186515 - DNA, 25 bp, Artificial
  probe
  misc_feature (1)..(25): SEQ ID NO: 5239; WAN024EXO_at; Start 165; Stop 189
cagccttaataaccggttccttatg

SEQ ID NO: 186516 - DNA, 25 bp, Artificial
  probe
  misc_feature (1)..(25): SEQ ID NO: 5239; WAN024EXO_at; Start 110; Stop 134
tcttgataagaaagcgcaattggtt

SEQ ID NO: 186517 - DNA, 25 bp, Artificial
  probe
  misc_feature (1)..(25): SEQ ID NO: 5239; WAN024EXO_at; Start 21; Stop 45
catgatgaacaccattaaagaaatt

SEQ ID NO: 186518 - DNA, 25 bp, Artificial
  probe
  misc_feature (1)..(25): SEQ ID NO: 5239; WAN024EXO_at; Start 120; Stop 144
aaagcgcaattggtttttcacagaa

SEQ ID NO: 186519 - DNA, 25 bp, Artificial
  probe
  misc_feature (1)..(25): SEQ ID NO: 5239; WAN024EXO_at; Start 105; Stop 129
gacaatcttgataagaaagcgcaat

SEQ ID NO: 186520 - DNA, 25 bp, Artificial
  probe
  misc_feature (1)..(25): SEQ ID NO: 5239; WAN024EXO_at; Start 49; Stop 73
aatatgtcctgccataaaggttaca

SEQ ID NO: 186521 - DNA, 25 bp, Artificial
  probe
  misc_feature (1)..(25): SEQ ID NO: 5239; WAN024EXO_at; Start 189; Stop 213
gaagattatttggagttgcgacgat

SEQ ID NO: 186522 - DNA, 25 bp, Artificial
  probe
  misc_feature (1)..(25): SEQ ID NO: 5239; WAN024EXO_at; Start 194; Stop 218
ttatttggagttgcgacgataacac

SEQ ID NO: 186523 - DNA, 25 bp, Artificial
  probe
  misc_feature (1)..(25): SEQ ID NO: 5239; WAN024EXO_at; Start 36; Stop 60
taaagaaattcataatatgtcctgc

SEQ ID NO: 186524 - DNA, 25 bp, Artificial
  probe
  misc_feature (1)..(25): SEQ ID NO: 5239; WAN024EXO_at; Start 140; Stop 164
cagaaaacatttttaccatgctgtg

SEQ ID NO: 186525 - DNA, 25 bp, Artificial
  probe
  misc_feature (1)..(25): SEQ ID NO: 5239; WAN024EXO_at; Start 153; Stop 177
taccatgctgtgcagccttaataac

SEQ ID NO: 186526 - DNA, 25 bp, Artificial
  probe
  misc_feature (1)..(25): SEQ ID NO: 5239; WAN024EXO_at; Start 147; Stop 171
catttttaccatgctgtgcagcctt

SEQ ID NO: 186527 - DNA, 25 bp, Artificial
  probe
  misc_feature (1)..(25): SEQ ID NO: 5239; WAN024EXO_at; Start 221; Stop 245
tctacttcatcgctagaaaccaact

SEQ ID NO: 186528 - DNA, 25 bp, Artificial
  probe
  misc_feature (1)..(25): SEQ ID NO: 5239; WAN024EXO_at; Start 124; Stop 148
cgcaattggtttttcacagaaaaca

SEQ ID NO: 186529 - DNA, 25 bp, Artificial
  probe
  misc_feature (1)..(25): SEQ ID NO: 5239; WAN024EXO_at; Start 57; Stop 81
ctgccataaaggttacattgttttc

SEQ ID NO: 186530 - DNA, 25 bp, Artificial
  probe
  misc_feature (1)..(25): SEQ ID NO: 5239; WAN024EXO_at; Start 228; Stop 252
catcgctagaaaccaactcatctaa

SEQ ID NO: 186531 - DNA, 25 bp, Artificial
  probe
  misc_feature (1)..(25): SEQ ID NO: 5239; WAN024EXO_at; Start 101; Stop 125
tcgcgacaatcttgataagaaagcg

SEQ ID NO: 186532 - DNA, 25 bp, Artificial
  probe
  misc_feature (1)..(25): SEQ ID NO: 5239; WAN024EXO_at; Start 223; Stop 247
tacttcatcgctagaaaccaactca

SEQ ID NO: 186533 - DNA, 25 bp, Artificial
  probe
  misc_feature (1)..(25): SEQ ID NO: 5239; WAN024EXO_at; Start 161; Stop 185
tgtgcagccttaataaccggttcct

SEQ ID NO: 186534 - DNA, 25 bp, Artificial
  probe
  misc_feature (1)..(25): SEQ ID NO: 4878; WAN024EXP_at; Start 217; Stop 241
tgtgtgatcgtagcttcacctagct

SEQ ID NO: 186535 - DNA, 25 bp, Artificial
  probe
  misc_feature (1)..(25): SEQ ID NO: 4878; WAN024EXP_at; Start 993; Stop 1017
catcattaaaggtggagaaattaca

SEQ ID NO: 186536 - DNA, 25 bp, Artificial
  probe
  misc_feature (1)..(25): SEQ ID NO: 4878; WAN024EXP_at; Start 735; Stop 759
gggtgaacactacgtcttgattcaa

SEQ ID NO: 186537 - DNA, 25 bp, Artificial
  probe
  misc_feature (1)..(25): SEQ ID NO: 4878; WAN024EXP_at; Start 1027; Stop 1051
gaaaaacttctcaatggtgtagctg

SEQ ID NO: 186538 - DNA, 25 bp, Artificial
  probe
  misc_feature (1)..(25): SEQ ID NO: 4878; WAN024EXP_at; Start 372; Stop 396
tatggctggtcacatcatgaacttc

SEQ ID NO: 186539 - DNA, 25 bp, Artificial
  probe
  misc_feature (1)..(25): SEQ ID NO: 4878; WAN024EXP_at; Start 482; Stop 506
gggaagaacaacaaccaactgtatc

SEQ ID NO: 186540 - DNA, 25 bp, Artificial
  probe
  misc_feature (1)..(25): SEQ ID NO: 4878; WAN024EXP_at; Start 261; Stop 285
tgtgaaagctgctcaacatggcaaa

SEQ ID NO: 186541 - DNA, 25 bp, Artificial
  probe
  misc_feature (1)..(25): SEQ ID NO: 4878; WAN024EXP_at; Start 582; Stop 606
catgggaggacttcctgaaaaagcg

SEQ ID NO: 186542 - DNA, 25 bp, Artificial
  probe
  misc_feature (1)..(25): SEQ ID NO: 4878; WAN024EXP_at; Start 614; Stop 638
taggaggcaatgtatatcataaagg

SEQ ID NO: 186543 - DNA, 25 bp, Artificial
  probe
  misc_feature (1)..(25): SEQ ID NO: 4878; WAN024EXP_at; Start 106; Stop 130
gcaaaagtggttgcggtatttgacc

SEQ ID NO: 186544 - DNA, 25 bp, Artificial
  probe
  misc_feature (1)..(25): SEQ ID NO: 4878; WAN024EXP_at; Start 750; Stop 774
cttgattcaaggaactgaaggagct

SEQ ID NO: 186545 - DNA, 25 bp, Artificial
  probe
  misc_feature (1)..(25): SEQ ID NO: 4878; WAN024EXP_at; Start 1043; Stop 1067
gtgtagctgctttagaatcaatcgc

SEQ ID NO: 186546 - DNA, 25 bp, Artificial
  probe
  misc_feature (1)..(25): SEQ ID NO: 4878; WAN024EXP_at; Start 682; Stop 706
gaatactctgatgatcgttatgctg

SEQ ID NO: 186547 - DNA, 25 bp, Artificial
  probe
  misc_feature (1)..(25): SEQ ID NO: 4878; WAN024EXP_at; Start 765; Stop 789
tgaaggagctatcaaacttgacttg

SEQ ID NO: 186548 - DNA, 25 bp, Artificial
  probe
  misc_feature (1)..(25): SEQ ID NO: 4878; WAN024EXP_at; Start 847; Stop 871
catgaaactcaagaggaagatgatg

SEQ ID NO: 186549 - DNA, 25 bp, Artificial
  probe
  misc_feature (1)..(25): SEQ ID NO: 4878; WAN024EXP_at; Start 403; Stop 427
ggtgtacaccatgctaaagaattga

SEQ ID NO: 186550 - DNA, 25 bp, Artificial
  probe
  misc_feature (1)..(25): SEQ ID NO: 4878; WAN024EXP_at; Start 497; Stop 521
caactgtatcatggaagaaacttcg

SEQ ID NO: 186551 - DNA, 25 bp, Artificial
  probe
  misc_feature (1)..(25): SEQ ID NO: 4878; WAN024EXP_at; Start 513; Stop 537
gaaacttcgttctcaatctggagga

SEQ ID NO: 186552 - DNA, 25 bp, Artificial
  probe
  misc_feature (1)..(25): SEQ ID NO: 4878; WAN024EXP_at; Start 909; Stop 933
agcaattgcgtacggtaaaccagga

SEQ ID NO: 186553 - DNA, 25 bp, Artificial
  probe
  misc_feature (1)..(25): SEQ ID NO: 4878; WAN024EXP_at; Start 36; Stop 60
aaattacggtattgttggagctgga

SEQ ID NO: 186554 - DNA, 25 bp, Artificial
  probe
  misc_feature (1)..(25): SEQ ID NO: 4878; WAN024EXP_at; Start 322; Stop 346
gaagattgtaaagccatggttgacg

SEQ ID NO: 186555 - DNA, 25 bp, Artificial
  probe
  misc_feature (1)..(25): SEQ ID NO: 4878; WAN024EXP_at; Start 712; Stop 736
gaatatggtaatgctttccgttggg

SEQ ID NO: 186556 - DNA, 25 bp, Artificial
  probe
  misc_feature (1)..(25): SEQ ID NO: 4878; WAN024EXP_at; Start 129; Stop 153
cccaaatcatggagaagaagttgct

SEQ ID NO: 186557 - DNA, 25 bp, Artificial
  probe
  misc_feature (1)..(25): SEQ ID NO: 4878; WAN024EXP_at; Start 282; Stop 306
caaacacgtattttgtgaaaagcca

SEQ ID NO: 186558 - DNA, 25 bp, Artificial
  probe
  misc_feature (1)..(25): SEQ ID NO: 4878; WAN024EXP_at; Start 816; Stop 840
taaaggtgaaggagaatcacacttc

SEQ ID NO: 186559 - DNA, 25 bp, Artificial
  probe
  misc_feature (1)..(25): SEQ ID NO: 4878; WAN024EXP_at; Start 533; Stop 557
gaggacatttgtaccaccatattca

SEQ ID NO: 186560 - DNA, 25 bp, Artificial
  probe
  misc_feature (1)..(25): SEQ ID NO: 4878; WAN024EXP_at; Start 597; Stop 621
tgaaaaagcgacaatggtaggaggc

SEQ ID NO: 186561 - DNA, 25 bp, Artificial
  probe
  misc_feature (1)..(25): SEQ ID NO: 4878; WAN024EXP_at; Start 973; Stop 997
gaaatggaatatctacatgacatca

SEQ ID NO: 186562 - DNA, 25 bp, Artificial
  probe
  misc_feature (1)..(25): SEQ ID NO: 4878; WAN024EXP_at; Start 150; Stop 174
tgctcaagagttgggatcagatgtt

SEQ ID NO: 186563 - DNA, 25 bp, Artificial
  probe
  misc_feature (1)..(25): SEQ ID NO: 4878; WAN024EXP_at; Start 335; Stop 359
ccatggttgacgcatgtaaagaaaa

SEQ ID NO: 186564 - DNA, 25 bp, Artificial
  probe
  misc_feature (1)..(25): SEQ ID NO: 4878; WAN024EXP_at; Start 876; Stop 900
tacagctatctataccggtcgtggt

SEQ ID NO: 186565 - DNA, 25 bp, Artificial
  probe
  misc_feature (1)..(25): SEQ ID NO: 4878; WAN024EXP_at; Start 1061; Stop 1085
caatcgctaccgctgatgcatgtac

SEQ ID NO: 186566 - DNA, 25 bp, Artificial
  probe
  misc_feature (1)..(25): SEQ ID NO: 4878; WAN024EXP_at; Start 924; Stop 948
taaaccaggagtacgttgcccatta

SEQ ID NO: 186567 - DNA, 25 bp, Artificial
  probe
  misc_feature (1)..(25): SEQ ID NO: 4878; WAN024EXP_at; Start 185; Stop 209
tagatgaacttgtagcacgtgaaga

SEQ ID NO: 186568 - DNA, 25 bp, Artificial
  probe
  misc_feature (1)..(25): SEQ ID NO: 2692; WAN024EXQ_at; Start 157; Stop 181
gatgagttggtttctagcgatgaag

SEQ ID NO: 186569 - DNA, 25 bp, Artificial
  probe
  misc_feature (1)..(25): SEQ ID NO: 2692; WAN024EXQ_at; Start 261; Stop 285
tttctgtgaaaaaccaattgcgctt

SEQ ID NO: 186570 - DNA, 25 bp, Artificial
  probe
  misc_feature (1)..(25): SEQ ID NO: 2692; WAN024EXQ_at; Start 877; Stop 901
gcaattgcttatggtaaaccaggta

SEQ ID NO: 186571 - DNA, 25 bp, Artificial
  probe
  misc_feature (1)..(25): SEQ ID NO: 2692; WAN024EXQ_at; Start 131; Stop 155
tgggagcaaaagtagcaagttcctt

SEQ ID NO: 186572 - DNA, 25 bp, Artificial
  probe
  misc_feature (1)..(25): SEQ ID NO: 2692; WAN024EXQ_at; Start 997; Stop 1021
aaacttttgacaggtgaagctgccc

SEQ ID NO: 186573 - DNA, 25 bp, Artificial
  probe
  misc_feature (1)..(25): SEQ ID NO: 2692; WAN024EXQ_at; Start 970; Stop 994
ggagctccagtatcagaagaatttg

SEQ ID NO: 186574 - DNA, 25 bp, Artificial
  probe
  misc_feature (1)..(25): SEQ ID NO: 2692; WAN024EXQ_at; Start 809; Stop 833
tgattcacgaatcgcaagaagaaga

SEQ ID NO: 186575 - DNA, 25 bp, Artificial
  probe
  misc_feature (1)..(25): SEQ ID NO: 2692; WAN024EXQ_at; Start 512; Stop 536
tgtatcaccacatccatgaattgga

SEQ ID NO: 186576 - DNA, 25 bp, Artificial
  probe
  misc_feature (1)..(25): SEQ ID NO: 2692; WAN024EXQ_at; Start 188; Stop 212
gtgttatcgtcgcaactccaaataa

SEQ ID NO: 186577 - DNA, 25 bp, Artificial
  probe
  misc_feature (1)..(25): SEQ ID NO: 2692; WAN024EXQ_at; Start 1032; Stop 1056
tgctactgcagatgcttgtacccag

SEQ ID NO: 186578 - DNA, 25 bp, Artificial
  probe
  misc_feature (1)..(25): SEQ ID NO: 2692; WAN024EXQ_at; Start 495; Stop 519
aaaatcaggtggtcacttgtatcac

SEQ ID NO: 186579 - DNA, 25 bp, Artificial
  probe
  misc_feature (1)..(25): SEQ ID NO: 2692; WAN024EXQ_at; Start 712; Stop 736
cattatgtcttaatccaaggaagca

SEQ ID NO: 186580 - DNA, 25 bp, Artificial
  probe
  misc_feature (1)..(25): SEQ ID NO: 2692; WAN024EXQ_at; Start 1050; Stop 1074
tacccagtctatgtttgaagatcgc

SEQ ID NO: 186581 - DNA, 25 bp, Artificial
  probe
  misc_feature (1)..(25): SEQ ID NO: 2692; WAN024EXQ_at; Start 223; Stop 247
gaaccggttattaaggctgcacagc

SEQ ID NO: 186582 - DNA, 25 bp, Artificial
  probe
  misc_feature (1)..(25): SEQ ID NO: 2692; WAN024EXQ_at; Start 768; Stop 792
taaaggaactcttaagctagatggg

SEQ ID NO: 186583 - DNA, 25 bp, Artificial
  probe
  misc_feature (1)..(25): SEQ ID NO: 2692; WAN024EXQ_at; Start 435; Stop 459
tacagctcgtaatggttgggaagaa

SEQ ID NO: 186584 - DNA, 25 bp, Artificial
  probe
  misc_feature (1)..(25): SEQ ID NO: 2692; WAN024EXQ_at; Start 94; Stop 118
tatgatccagataatgcagaggcga

SEQ ID NO: 186585 - DNA, 25 bp, Artificial
  probe
  misc_feature (1)..(25): SEQ ID NO: 2692; WAN024EXQ_at; Start 559; Stop 583
ggcatgcctgaaactgtaaccatga

SEQ ID NO: 186586 - DNA, 25 bp, Artificial
  probe
  misc_feature (1)..(25): SEQ ID NO: 2692; WAN024EXQ_at; Start 578; Stop 602
ccatgacaggtggaaatgtggccca

SEQ ID NO: 186587 - DNA, 25 bp, Artificial
  probe
  misc_feature (1)..(25): SEQ ID NO: 2692; WAN024EXQ_at; Start 237; Stop 261
ggctgcacagcatggtaaaaatgtt

SEQ ID NO: 186588 - DNA, 25 bp, Artificial
  probe
  misc_feature (1)..(25): SEQ ID NO: 2692; WAN024EXQ_at; Start 856; Stop 880
catagtacagagatggatggagcaa

SEQ ID NO: 186589 - DNA, 25 bp, Artificial
  probe
  misc_feature (1)..(25): SEQ ID NO: 2692; WAN024EXQ_at; Start 400; Stop 424
aatcaaggagttatcggagacgttc

SEQ ID NO: 186590 - DNA, 25 bp, Artificial
  probe
  misc_feature (1)..(25): SEQ ID NO: 2692; WAN024EXQ_at; Start 416; Stop 440
gagacgttctatattgtcatacagc

SEQ ID NO: 186591 - DNA, 25 bp, Artificial
  probe
  misc_feature (1)..(25): SEQ ID NO: 2692; WAN024EXQ_at; Start 328; Stop 352
aacaatgtaacctttatggcaggac

SEQ ID NO: 186592 - DNA, 25 bp, Artificial
  probe
  misc_feature (1)..(25): SEQ ID NO: 2692; WAN024EXQ_at; Start 936; Stop 960
taaagaaatgcgctatctgcatgag

SEQ ID NO: 186593 - DNA, 25 bp, Artificial
  probe
  misc_feature (1)..(25): SEQ ID NO: 2692; WAN024EXQ_at; Start 286; Stop 310
tcttatcaagattgtcgcgagatgg

SEQ ID NO: 186594 - DNA, 25 bp, Artificial
  probe
  misc_feature (1)..(25): SEQ ID NO: 2692; WAN024EXQ_at; Start 26; Stop 50
cagggtattttggagctgaattggc

SEQ ID NO: 186595 - DNA, 25 bp, Artificial
  probe
  misc_feature (1)..(25): SEQ ID NO: 2692; WAN024EXQ_at; Start 206; Stop 230
caaataatcttcataaggaaccggt

SEQ ID NO: 186596 - DNA, 25 bp, Artificial
  probe
  misc_feature (1)..(25): SEQ ID NO: 2692; WAN024EXQ_at; Start 79; Stop 103
gagattactcttctctatgatccag

SEQ ID NO: 186597 - DNA, 25 bp, Artificial
  probe
  misc_feature (1)..(25): SEQ ID NO: 2692; WAN024EXQ_at; Start 838; Stop 862
gatcggactcgtatctatcatagta

SEQ ID NO: 186598 - DNA, 25 bp, Artificial
  probe
  misc_feature (1)..(25): SEQ ID NO: 2692; WAN024EXQ_at; Start 783; Stop 807
gctagatgggcaagaaagctatttc

SEQ ID NO: 186599 - DNA, 25 bp, Artificial
  probe
  misc_feature (1)..(25): SEQ ID NO: 2692; WAN024EXQ_at; Start 823; Stop 847
caagaagaagatgatgatcggactc

SEQ ID NO: 186600 - DNA, 25 bp, Artificial
  probe
  misc_feature (1)..(25): SEQ ID NO: 2692; WAN024EXQ_at; Start 1012; Stop 1036
gaagctgccctagaagcaattgcta

SEQ ID NO: 186601 - DNA, 25 bp, Artificial
  probe
  misc_feature (1)..(25): SEQ ID NO: 2692; WAN024EXQ_at; Start 896; Stop 920
caggtaaacgtactccattatggct

SEQ ID NO: 186602 - DNA, 25 bp, Artificial
  probe
  misc_feature (1)..(25): SEQ ID NO: 1952; WAN024EXR_at; Start 70; Stop 94
tataaaattgtaacagattcttgcg

SEQ ID NO: 186603 - DNA, 25 bp, Artificial
  probe
  misc_feature (1)..(25): SEQ ID NO: 1952; WAN024EXR_at; Start 8; Stop 32
actcacaccatctcctgctcgctgg

SEQ ID NO: 186604 - DNA, 25 bp, Artificial
  probe
  misc_feature (1)..(25): SEQ ID NO: 1952; WAN024EXR_at; Start 36; Stop 60
tataaggataagatattgttctcag

SEQ ID NO: 186605 - DNA, 25 bp, Artificial
  probe
  misc_feature (1)..(25): SEQ ID NO: 1952; WAN024EXR_at; Start 74; Stop 98
aaattgtaacagattcttgcggtgc

SEQ ID NO: 186606 - DNA, 25 bp, Artificial
  probe
  misc_feature (1)..(25): SEQ ID NO: 1952; WAN024EXR_at; Start 87; Stop 111
ttcttgcggtgcttcaaatcccggt

SEQ ID NO: 186607 - DNA, 25 bp, Artificial
  probe
  misc_feature (1)..(25): SEQ ID NO: 1952; WAN024EXR_at; Start 173; Stop 197
gttcttcatacattgggccaactgg

SEQ ID NO: 186608 - DNA, 25 bp, Artificial
  probe
  misc_feature (1)..(25): SEQ ID NO: 1952; WAN024EXR_at; Start 165; Stop 189
tacttctggttcttcatacattggg

SEQ ID NO: 186609 - DNA, 25 bp, Artificial
  probe
  misc_feature (1)..(25): SEQ ID NO: 1952; WAN024EXR_at; Start 85; Stop 109
gattcttgcggtgcttcaaatcccg

SEQ ID NO: 186610 - DNA, 25 bp, Artificial
  probe
  misc_feature (1)..(25): SEQ ID NO: 1952; WAN024EXR_at; Start 166; Stop 190
acttctggttcttcatacattgggc

SEQ ID NO: 186611 - DNA, 25 bp, Artificial
  probe
  misc_feature (1)..(25): SEQ ID NO: 1952; WAN024EXR_at; Start 115; Stop 139
gaatcaacagtttctgtagctggtg

SEQ ID NO: 186612 - DNA, 25 bp, Artificial
  probe
  misc_feature (1)..(25): SEQ ID NO: 1952; WAN024EXR_at; Start 41; Stop 65
ggataagatattgttctcagaatat

SEQ ID NO: 186613 - DNA, 25 bp, Artificial
  probe
  misc_feature (1)..(25): SEQ ID NO: 1952; WAN024EXR_at; Start 170; Stop 194
ctggttcttcatacattgggccaac

SEQ ID NO: 186614 - DNA, 25 bp, Artificial
  probe
  misc_feature (1)..(25): SEQ ID NO: 1952; WAN024EXR_at; Start 175; Stop 199
tcttcatacattgggccaactggat

SEQ ID NO: 186615 - DNA, 25 bp, Artificial
  probe
  misc_feature (1)..(25): SEQ ID NO: 1952; WAN024EXR_at; Start 83; Stop 107
cagattcttgcggtgcttcaaatcc

SEQ ID NO: 186616 - DNA, 25 bp, Artificial
  probe
  misc_feature (1)..(25): SEQ ID NO: 1952; WAN024EXR_at; Start 55; Stop 79
tctcagaatatttcttataaaattg

SEQ ID NO: 186617 - DNA, 25 bp, Artificial
  probe
  misc_feature (1)..(25): SEQ ID NO: 1952; WAN024EXR_at; Start 177; Stop 201
ttcatacattgggccaactggatga

SEQ ID NO: 186618 - DNA, 25 bp, Artificial
  probe
  misc_feature (1)..(25): SEQ ID NO: 1952; WAN024EXR_at; Start 2; Stop 26
tgcaggactcacaccatctcctgct

SEQ ID NO: 186619 - DNA, 25 bp, Artificial
  probe
  misc_feature (1)..(25): SEQ ID NO: 1952; WAN024EXR_at; Start 159; Stop 183
tggagctacttctggttcttcatac

SEQ ID NO: 186620 - DNA, 25 bp, Artificial
  probe
  misc_feature (1)..(25): SEQ ID NO: 1952; WAN024EXR_at; Start 47; Stop 71
gatattgttctcagaatatttctta

SEQ ID NO: 186621 - DNA, 25 bp, Artificial
  probe
  misc_feature (1)..(25): SEQ ID NO: 1952; WAN024EXR_at; Start 77; Stop 101
ttgtaacagattcttgcggtgcttc

SEQ ID NO: 186622 - DNA, 25 bp, Artificial
  probe
  misc_feature (1)..(25): SEQ ID NO: 1952; WAN024EXR_at; Start 167; Stop 191
cttctggttcttcatacattgggcc

SEQ ID NO: 186623 - DNA, 25 bp, Artificial
  probe
  misc_feature (1)..(25): SEQ ID NO: 1952; WAN024EXR_at; Start 79; Stop 103
gtaacagattcttgcggtgcttcaa

SEQ ID NO: 186624 - DNA, 25 bp, Artificial
  probe
  misc_feature (1)..(25): SEQ ID NO: 1952; WAN024EXR_at; Start 119; Stop 143
caacagtttctgtagctggtgttgg

SEQ ID NO: 186625 - DNA, 25 bp, Artificial
  probe
  misc_feature (1)..(25): SEQ ID NO: 1952; WAN024EXR_at; Start 116; Stop 140
aatcaacagtttctgtagctggtgt

SEQ ID NO: 186626 - DNA, 25 bp, Artificial
  probe
  misc_feature (1)..(25): SEQ ID NO: 1952; WAN024EXR_at; Start 123; Stop 147
agtttctgtagctggtgttggacct

SEQ ID NO: 186627 - DNA, 25 bp, Artificial
  probe
  misc_feature (1)..(25): SEQ ID NO: 1952; WAN024EXR_at; Start 122; Stop 146
cagtttctgtagctggtgttggacc

SEQ ID NO: 186628 - DNA, 25 bp, Artificial
  probe
  misc_feature (1)..(25): SEQ ID NO: 1952; WAN024EXR_at; Start 38; Stop 62
taaggataagatattgttctcagaa

SEQ ID NO: 186629 - DNA, 25 bp, Artificial
  probe
  misc_feature (1)..(25): SEQ ID NO: 1952; WAN024EXR_at; Start 80; Stop 104
taacagattcttgcggtgcttcaaa

SEQ ID NO: 186630 - DNA, 25 bp, Artificial
  probe
  misc_feature (1)..(25): SEQ ID NO: 1952; WAN024EXR_at; Start 114; Stop 138
tgaatcaacagtttctgtagctggt

SEQ ID NO: 186631 - DNA, 25 bp, Artificial
  probe
  misc_feature (1)..(25): SEQ ID NO: 1952; WAN024EXR_at; Start 75; Stop 99
aattgtaacagattcttgcggtgct

SEQ ID NO: 186632 - DNA, 25 bp, Artificial
  probe
  misc_feature (1)..(25): SEQ ID NO: 1952; WAN024EXR_at; Start 169; Stop 193
tctggttcttcatacattgggccaa

SEQ ID NO: 186633 - DNA, 25 bp, Artificial
  probe
  misc_feature (1)..(25): SEQ ID NO: 1952; WAN024EXR_at; Start 161; Stop 185
gagctacttctggttcttcatacat

SEQ ID NO: 186634 - DNA, 25 bp, Artificial
  probe
  misc_feature (1)..(25): SEQ ID NO: 1952; WAN024EXR_at; Start 172; Stop 196
ggttcttcatacattgggccaactg

SEQ ID NO: 186635 - DNA, 25 bp, Artificial
  probe
  misc_feature (1)..(25): SEQ ID NO: 1952; WAN024EXR_at; Start 160; Stop 184
ggagctacttctggttcttcataca

SEQ ID NO: 186636 - DNA, 25 bp, Artificial
  probe
  misc_feature (1)..(25): SEQ ID NO: 3972; WAN024EXS_at; Start 310; Stop 334
gcgcaacgcttgttggaagaagcta

SEQ ID NO: 186637 - DNA, 25 bp, Artificial
  probe
  misc_feature (1)..(25): SEQ ID NO: 3972; WAN024EXS_at; Start 259; Stop 283
caggcggcgcatgaacgttcaaaca

SEQ ID NO: 186638 - DNA, 25 bp, Artificial
  probe
  misc_feature (1)..(25): SEQ ID NO: 3972; WAN024EXS_at; Start 493; Stop 517
gatattctccgtccaacagctactt

SEQ ID NO: 186639 - DNA, 25 bp, Artificial
  probe
  misc_feature (1)..(25): SEQ ID NO: 3972; WAN024EXS_at; Start 534; Stop 558
tgaagcctttaaagaagtggttagc

SEQ ID NO: 186640 - DNA, 25 bp, Artificial
  probe
  misc_feature (1)..(25): SEQ ID NO: 3972; WAN024EXS_at; Start 738; Stop 762
tcctcaagttgaagaagagcctctg

SEQ ID NO: 186641 - DNA, 25 bp, Artificial
  probe
  misc_feature (1)..(25): SEQ ID NO: 3972; WAN024EXS_at; Start 67; Stop 91
ggttttgatccagaagaagtcgatg

SEQ ID NO: 186642 - DNA, 25 bp, Artificial
  probe
  misc_feature (1)..(25): SEQ ID NO: 3972; WAN024EXS_at; Start 400; Stop 424
gaagaattgaagaacaagagccgtg

SEQ ID NO: 186643 - DNA, 25 bp, Artificial
  probe
  misc_feature (1)..(25): SEQ ID NO: 3972; WAN024EXS_at; Start 595; Stop 619
gaagaaccaattgatatgacacgtc

SEQ ID NO: 186644 - DNA, 25 bp, Artificial
  probe
  misc_feature (1)..(25): SEQ ID NO: 3972; WAN024EXS_at; Start 39; Stop 63
ggacaagacttttggaactcgattc

SEQ ID NO: 186645 - DNA, 25 bp, Artificial
  probe
  misc_feature (1)..(25): SEQ ID NO: 3972; WAN024EXS_at; Start 375; Stop 399
tgctaagaaagtcgctgttgaaaca

SEQ ID NO: 186646 - DNA, 25 bp, Artificial
  probe
  misc_feature (1)..(25): SEQ ID NO: 3972; WAN024EXS_at; Start 53; Stop 77
gaactcgattcagaggttttgatcc

SEQ ID NO: 186647 - DNA, 25 bp, Artificial
  probe
  misc_feature (1)..(25): SEQ ID NO: 3972; WAN024EXS_at; Start 415; Stop 439
aagagccgtgtcttccaccaacgtc

SEQ ID NO: 186648 - DNA, 25 bp, Artificial
  probe
  misc_feature (1)..(25): SEQ ID NO: 3972; WAN024EXS_at; Start 647; Stop 671
tacaagctcgtattgaggtagccga

SEQ ID NO: 186649 - DNA, 25 bp, Artificial
  probe
  misc_feature (1)..(25): SEQ ID NO: 3972; WAN024EXS_at; Start 691; Stop 715
gaagctcagattaaacaggaagtgg

SEQ ID NO: 186650 - DNA, 25 bp, Artificial
  probe
  misc_feature (1)..(25): SEQ ID NO: 3972; WAN024EXS_at; Start 240; Stop 264
tacagctgagagagtgaaacaggcg

SEQ ID NO: 186651 - DNA, 25 bp, Artificial
  probe
  misc_feature (1)..(25): SEQ ID NO: 3972; WAN024EXS_at; Start 721; Stop 745
ccaactcctgtagtgagtcctcaag

SEQ ID NO: 186652 - DNA, 25 bp, Artificial
  probe
  misc_feature (1)..(25): SEQ ID NO: 3972; WAN024EXS_at; Start 349; Stop 373
gagattcttcgtcaagcaactgata

SEQ ID NO: 186653 - DNA, 25 bp, Artificial
  probe
  misc_feature (1)..(25): SEQ ID NO: 3972; WAN024EXS_at; Start 478; Stop 502
tcttcagattgggaagatattctcc

SEQ ID NO: 186654 - DNA, 25 bp, Artificial
  probe
  misc_feature (1)..(25): SEQ ID NO: 3972; WAN024EXS_at; Start 555; Stop 579
tagcgaagtacttggagaaccgatt

SEQ ID NO: 186655 - DNA, 25 bp, Artificial
  probe
  misc_feature (1)..(25): SEQ ID NO: 3972; WAN024EXS_at; Start 751; Stop 775
gaagagcctctgctcatccagttgg

SEQ ID NO: 186656 - DNA, 25 bp, Artificial
  probe
  misc_feature (1)..(25): SEQ ID NO: 3972; WAN024EXS_at; Start 175; Stop 199
gagcgtttgtcttactttgatgaaa

SEQ ID NO: 186657 - DNA, 25 bp, Artificial
  probe
  misc_feature (1)..(25): SEQ ID NO: 3972; WAN024EXS_at; Start 98; Stop 122
tagatattgtggttcgtgattacga

SEQ ID NO: 186658 - DNA, 25 bp, Artificial
  probe
  misc_feature (1)..(25): SEQ ID NO: 3972; WAN024EXS_at; Start 460; Stop 484
cagttggctattgttgaatcttcag

SEQ ID NO: 186659 - DNA, 25 bp, Artificial
  probe
  misc_feature (1)..(25): SEQ ID NO: 3972; WAN024EXS_at; Start 769; Stop 793
cagttggcccaatgtatgaagaacc

SEQ ID NO: 186660 - DNA, 25 bp, Artificial
  probe
  misc_feature (1)..(25): SEQ ID NO: 3972; WAN024EXS_at; Start 571; Stop 595
gaaccgattccagctccaattgaag

SEQ ID NO: 186661 - DNA, 25 bp, Artificial
  probe
  misc_feature (1)..(25): SEQ ID NO: 3972; WAN024EXS_at; Start 335; Stop 359
aatataaggcaaacgagattcttcg

SEQ ID NO: 186662 - DNA, 25 bp, Artificial
  probe
  misc_feature (1)..(25): SEQ ID NO: 3972; WAN024EXS_at; Start 445; Stop 469
tctacaattgagagtcagttggcta

SEQ ID NO: 186663 - DNA, 25 bp, Artificial
  probe
  misc_feature (1)..(25): SEQ ID NO: 3972; WAN024EXS_at; Start 118; Stop 142
tacgaagatcttgtgcgtgcgaatc

SEQ ID NO: 186664 - DNA, 25 bp, Artificial
  probe
  misc_feature (1)..(25): SEQ ID NO: 3972; WAN024EXS_at; Start 612; Stop 636
gacacgtcagttctctcaagcagaa

SEQ ID NO: 186665 - DNA, 25 bp, Artificial
  probe
  misc_feature (1)..(25): SEQ ID NO: 3972; WAN024EXS_at; Start 298; Stop 322
gcagagcaagatgcgcaacgcttgt

SEQ ID NO: 186666 - DNA, 25 bp, Artificial
  probe
  misc_feature (1)..(25): SEQ ID NO: 3972; WAN024EXS_at; Start 200; Stop 224
taaaagattcattgagccagtctgt

SEQ ID NO: 186667 - DNA, 25 bp, Artificial
  probe
  misc_feature (1)..(25): SEQ ID NO: 3972; WAN024EXS_at; Start 215; Stop 239
gccagtctgtattgattgctcagga

SEQ ID NO: 186668 - DNA, 25 bp, Artificial
  probe
  misc_feature (1)..(25): SEQ ID NO: 3972; WAN024EXS_at; Start 283; Stop 307
aatatcattcatcaagcagagcaag

SEQ ID NO: 186669 - DNA, 25 bp, Artificial
  probe
  misc_feature (1)..(25): SEQ ID NO: 3972; WAN024EXS_at; Start 661; Stop 685
gaggtagccgataaagaattgtctg

SEQ ID NO: 186670 - DNA, 25 bp, Artificial
  probe
  misc_feature (1)..(25): SEQ ID NO: 4183; WAN024EXT_at; Start 130; Stop 154
gatatagtcggcttcctgcaccaaa

SEQ ID NO: 186671 - DNA, 25 bp, Artificial
  probe
  misc_feature (1)..(25): SEQ ID NO: 4183; WAN024EXT_at; Start 193; Stop 217
cagttgactaatttgacgttcagcg

SEQ ID NO: 186672 - DNA, 25 bp, Artificial
  probe
  misc_feature (1)..(25): SEQ ID NO: 4183; WAN024EXT_at; Start 157; Stop 181
tctggcaatcaagacccgctggaat

SEQ ID NO: 186673 - DNA, 25 bp, Artificial
  probe
  misc_feature (1)..(25): SEQ ID NO: 4183; WAN024EXT_at; Start 76; Stop 100
catgatgatttcctcactgacagag

SEQ ID NO: 186674 - DNA, 25 bp, Artificial
  probe
  misc_feature (1)..(25): SEQ ID NO: 4183; WAN024EXT_at; Start 64; Stop 88
tctcagcgtattcatgatgatttcc

SEQ ID NO: 186675 - DNA, 25 bp, Artificial
  probe
  misc_feature (1)..(25): SEQ ID NO: 4183; WAN024EXT_at; Start 136; Stop 160
gtcggcttcctgcaccaaacatctg

SEQ ID NO: 186676 - DNA, 25 bp, Artificial
  probe
  misc_feature (1)..(25): SEQ ID NO: 4183; WAN024EXT_at; Start 163; Stop 187
aatcaagacccgctggaattgacct

SEQ ID NO: 186677 - DNA, 25 bp, Artificial
  probe
  misc_feature (1)..(25): SEQ ID NO: 4183; WAN024EXT_at; Start 20; Stop 44
tcgtggtgaacgatgagaaccgtct

SEQ ID NO: 186678 - DNA, 25 bp, Artificial
  probe
  misc_feature (1)..(25): SEQ ID NO: 4183; WAN024EXT_at; Start 120; Stop 144
catccaagaggatatagtcggcttc

SEQ ID NO: 186679 - DNA, 25 bp, Artificial
  probe
  misc_feature (1)..(25): SEQ ID NO: 4183; WAN024EXT_at; Start 45; Stop 69
tcccagcttttttcaaatctctcag

SEQ ID NO: 186680 - DNA, 25 bp, Artificial
  probe
  misc_feature (1)..(25): SEQ ID NO: 4183; WAN024EXT_at; Start 98; Stop 122
gagtcaatcccagcaaagggttcat

SEQ ID NO: 186681 - DNA, 25 bp, Artificial
  probe
  misc_feature (1)..(25): SEQ ID NO: 4183; WAN024EXT_at; Start 154; Stop 178
acatctggcaatcaagacccgctgg

SEQ ID NO: 186682 - DNA, 25 bp, Artificial
  probe
  misc_feature (1)..(25): SEQ ID NO: 4183; WAN024EXT_at; Start 96; Stop 120
cagagtcaatcccagcaaagggttc

SEQ ID NO: 186683 - DNA, 25 bp, Artificial
  probe
  misc_feature (1)..(25): SEQ ID NO: 4183; WAN024EXT_at; Start 50; Stop 74
gcttttttcaaatctctcagcgtat

SEQ ID NO: 186684 - DNA, 25 bp, Artificial
  probe
  misc_feature (1)..(25): SEQ ID NO: 4183; WAN024EXT_at; Start 201; Stop 225
taatttgacgttcagcgtagtcagc

SEQ ID NO: 186685 - DNA, 25 bp, Artificial
  probe
  misc_feature (1)..(25): SEQ ID NO: 4183; WAN024EXT_at; Start 93; Stop 117
tgacagagtcaatcccagcaaaggg

SEQ ID NO: 186686 - DNA, 25 bp, Artificial
  probe
  misc_feature (1)..(25): SEQ ID NO: 4183; WAN024EXT_at; Start 146; Stop 170
tgcaccaaacatctggcaatcaaga

SEQ ID NO: 186687 - DNA, 25 bp, Artificial
  probe
  misc_feature (1)..(25): SEQ ID NO: 4183; WAN024EXT_at; Start 103; Stop 127
aatcccagcaaagggttcatccaag

SEQ ID NO: 186688 - DNA, 25 bp, Artificial
  probe
  misc_feature (1)..(25): SEQ ID NO: 4183; WAN024EXT_at; Start 23; Stop 47
tggtgaacgatgagaaccgtcttcc

SEQ ID NO: 186689 - DNA, 25 bp, Artificial
  probe
  misc_feature (1)..(25): SEQ ID NO: 4183; WAN024EXT_at; Start 59; Stop 83
aaatctctcagcgtattcatgatga

SEQ ID NO: 186690 - DNA, 25 bp, Artificial
  probe
  misc_feature (1)..(25): SEQ ID NO: 4183; WAN024EXT_at; Start 111; Stop 135
caaagggttcatccaagaggatata

SEQ ID NO: 186691 - DNA, 25 bp, Artificial
  probe
  misc_feature (1)..(25): SEQ ID NO: 4183; WAN024EXT_at; Start 26; Stop 50
tgaacgatgagaaccgtcttcccag

SEQ ID NO: 186692 - DNA, 25 bp, Artificial
  probe
  misc_feature (1)..(25): SEQ ID NO: 4183; WAN024EXT_at; Start 139; Stop 163
ggcttcctgcaccaaacatctggca

SEQ ID NO: 186693 - DNA, 25 bp, Artificial
  probe
  misc_feature (1)..(25): SEQ ID NO: 4183; WAN024EXT_at; Start 178; Stop 202
gaattgacctccagacagttgacta

SEQ ID NO: 186694 - DNA, 25 bp, Artificial
  probe
  misc_feature (1)..(25): SEQ ID NO: 4183; WAN024EXT_at; Start 31; Stop 55
gatgagaaccgtcttcccagctttt

SEQ ID NO: 186695 - DNA, 25 bp, Artificial
  probe
  misc_feature (1)..(25): SEQ ID NO: 4183; WAN024EXT_at; Start 183; Stop 207
gacctccagacagttgactaatttg

SEQ ID NO: 186696 - DNA, 25 bp, Artificial
  probe
  misc_feature (1)..(25): SEQ ID NO: 4183; WAN024EXT_at; Start 79; Stop 103
gatgatttcctcactgacagagtca

SEQ ID NO: 186697 - DNA, 25 bp, Artificial
  probe
  misc_feature (1)..(25): SEQ ID NO: 4183; WAN024EXT_at; Start 6; Stop 30
gaatcttgctgaggtcgtggtgaac

SEQ ID NO: 186698 - DNA, 25 bp, Artificial
  probe
  misc_feature (1)..(25): SEQ ID NO: 4183; WAN024EXT_at; Start 124; Stop 148
caagaggatatagtcggcttcctgc

SEQ ID NO: 186699 - DNA, 25 bp, Artificial
  probe
  misc_feature (1)..(25): SEQ ID NO: 4183; WAN024EXT_at; Start 203; Stop 227
atttgacgttcagcgtagtcagcta

SEQ ID NO: 186700 - DNA, 25 bp, Artificial
  probe
  misc_feature (1)..(25): SEQ ID NO: 4183; WAN024EXT_at; Start 187; Stop 211
tccagacagttgactaatttgacgt

SEQ ID NO: 186701 - DNA, 25 bp, Artificial
  probe
  misc_feature (1)..(25): SEQ ID NO: 4183; WAN024EXT_at; Start 167; Stop 191
aagacccgctggaattgacctccag

SEQ ID NO: 186702 - DNA, 25 bp, Artificial
  probe
  misc_feature (1)..(25): SEQ ID NO: 4183; WAN024EXT_at; Start 108; Stop 132
cagcaaagggttcatccaagaggat

SEQ ID NO: 186703 - DNA, 25 bp, Artificial
  probe
  misc_feature (1)..(25): SEQ ID NO: 4183; WAN024EXT_at; Start 151; Stop 175
caaacatctggcaatcaagacccgc

SEQ ID NO: 186704 - DNA, 25 bp, Artificial
  probe
  misc_feature (1)..(25): SEQ ID NO: 1746; WAN024EXU_at; Start 101; Stop 125
tggcatctcccatgagtgacatccc

SEQ ID NO: 186705 - DNA, 25 bp, Artificial
  probe
  misc_feature (1)..(25): SEQ ID NO: 1746; WAN024EXU_at; Start 41; Stop 65
taaagaagtcaaggcccaagatgaa

SEQ ID NO: 186706 - DNA, 25 bp, Artificial
  probe
  misc_feature (1)..(25): SEQ ID NO: 1746; WAN024EXU_at; Start 206; Stop 230
ggaatttttgcaatccatcgataaa

SEQ ID NO: 186707 - DNA, 25 bp, Artificial
  probe
  misc_feature (1)..(25): SEQ ID NO: 1746; WAN024EXU_at; Start 212; Stop 236
tttgcaatccatcgataaattctgc

SEQ ID NO: 186708 - DNA, 25 bp, Artificial
  probe
  misc_feature (1)..(25): SEQ ID NO: 1746; WAN024EXU_at; Start 108; Stop 132
tcccatgagtgacatcccgcgtaga

SEQ ID NO: 186709 - DNA, 25 bp, Artificial
  probe
  misc_feature (1)..(25): SEQ ID NO: 1746; WAN024EXU_at; Start 29; Stop 53
caatggctccgataaagaagtcaag

SEQ ID NO: 186710 - DNA, 25 bp, Artificial
  probe
  misc_feature (1)..(25): SEQ ID NO: 1746; WAN024EXU_at; Start 9; Stop 33
ggcagctagcaatccaaagacaatg

SEQ ID NO: 186711 - DNA, 25 bp, Artificial
  probe
  misc_feature (1)..(25): SEQ ID NO: 1746; WAN024EXU_at; Start 2; Stop 26
tgatgatggcagctagcaatccaaa

SEQ ID NO: 186712 - DNA, 25 bp, Artificial
  probe
  misc_feature (1)..(25): SEQ ID NO: 1746; WAN024EXU_at; Start 227; Stop 251
taaattctgcaatcataggtcacct

SEQ ID NO: 186713 - DNA, 25 bp, Artificial
  probe
  misc_feature (1)..(25): SEQ ID NO: 1746; WAN024EXU_at; Start 197; Stop 221
gtaggaaatggaatttttgcaatcc

SEQ ID NO: 186714 - DNA, 25 bp, Artificial
  probe
  misc_feature (1)..(25): SEQ ID NO: 1746; WAN024EXU_at; Start 15; Stop 39
tagcaatccaaagacaatggctccg

SEQ ID NO: 186715 - DNA, 25 bp, Artificial
  probe
  misc_feature (1)..(25): SEQ ID NO: 1746; WAN024EXU_at; Start 21; Stop 45
tccaaagacaatggctccgataaag

SEQ ID NO: 186716 - DNA, 25 bp, Artificial
  probe
  misc_feature (1)..(25): SEQ ID NO: 1746; WAN024EXU_at; Start 170; Stop 194
cgacaatagctgttatcaaggcatt

SEQ ID NO: 186717 - DNA, 25 bp, Artificial
  probe
  misc_feature (1)..(25): SEQ ID NO: 1746; WAN024EXU_at; Start 159; Stop 183
tacaatcccgacgacaatagctgtt

SEQ ID NO: 186718 - DNA, 25 bp, Artificial
  probe
  misc_feature (1)..(25): SEQ ID NO: 1746; WAN024EXU_at; Start 167; Stop 191
cgacgacaatagctgttatcaaggc

SEQ ID NO: 186719 - DNA, 25 bp, Artificial
  probe
  misc_feature (1)..(25): SEQ ID NO: 1746; WAN024EXU_at; Start 75; Stop 99
tacacctggtaagacagcatgtgaa

SEQ ID NO: 186720 - DNA, 25 bp, Artificial
  probe
  misc_feature (1)..(25): SEQ ID NO: 1746; WAN024EXU_at; Start 94; Stop 118
tgtgaaatggcatctcccatgagtg

SEQ ID NO: 186721 - DNA, 25 bp, Artificial
  probe
  misc_feature (1)..(25): SEQ ID NO: 1746; WAN024EXU_at; Start 153; Stop 177
tccagctacaatcccgacgacaata

SEQ ID NO: 186722 - DNA, 25 bp, Artificial
  probe
  misc_feature (1)..(25): SEQ ID NO: 1746; WAN024EXU_at; Start 34; Stop 58
gctccgataaagaagtcaaggccca

SEQ ID NO: 186723 - DNA, 25 bp, Artificial
  probe
  misc_feature (1)..(25): SEQ ID NO: 1746; WAN024EXU_at; Start 5; Stop 29
tgatggcagctagcaatccaaagac

SEQ ID NO: 186724 - DNA, 25 bp, Artificial
  probe
  misc_feature (1)..(25): SEQ ID NO: 1746; WAN024EXU_at; Start 97; Stop 121
gaaatggcatctcccatgagtgaca

SEQ ID NO: 186725 - DNA, 25 bp, Artificial
  probe
  misc_feature (1)..(25): SEQ ID NO: 1746; WAN024EXU_at; Start 136; Stop 160
atgaaacatcccacagctccagcta

SEQ ID NO: 186726 - DNA, 25 bp, Artificial
  probe
  misc_feature (1)..(25): SEQ ID NO: 1746; WAN024EXU_at; Start 183; Stop 207
tatcaaggcattttgtaggaaatgg

SEQ ID NO: 186727 - DNA, 25 bp, Artificial
  probe
  misc_feature (1)..(25): SEQ ID NO: 1746; WAN024EXU_at; Start 122; Stop 146
tcccgcgtagaataatgaaacatcc

SEQ ID NO: 186728 - DNA, 25 bp, Artificial
  probe
  misc_feature (1)..(25): SEQ ID NO: 1746; WAN024EXU_at; Start 71; Stop 95
gggctacacctggtaagacagcatg

SEQ ID NO: 186729 - DNA, 25 bp, Artificial
  probe
  misc_feature (1)..(25): SEQ ID NO: 1746; WAN024EXU_at; Start 176; Stop 200
tagctgttatcaaggcattttgtag

SEQ ID NO: 186730 - DNA, 25 bp, Artificial
  probe
  misc_feature (1)..(25): SEQ ID NO: 1746; WAN024EXU_at; Start 116; Stop 140
gtgacatcccgcgtagaataatgaa

SEQ ID NO: 186731 - DNA, 25 bp, Artificial
  probe
  misc_feature (1)..(25): SEQ ID NO: 1746; WAN024EXU_at; Start 38; Stop 62
cgataaagaagtcaaggcccaagat

SEQ ID NO: 186732 - DNA, 25 bp, Artificial
  probe
  misc_feature (1)..(25): SEQ ID NO: 1746; WAN024EXU_at; Start 80; Stop 104
ctggtaagacagcatgtgaaatggc

SEQ ID NO: 186733 - DNA, 25 bp, Artificial
  probe
  misc_feature (1)..(25): SEQ ID NO: 1746; WAN024EXU_at; Start 133; Stop 157
ataatgaaacatcccacagctccag

SEQ ID NO: 186734 - DNA, 25 bp, Artificial
  probe
  misc_feature (1)..(25): SEQ ID NO: 1746; WAN024EXU_at; Start 125; Stop 149
cgcgtagaataatgaaacatcccac

SEQ ID NO: 186735 - DNA, 25 bp, Artificial
  probe
  misc_feature (1)..(25): SEQ ID NO: 1746; WAN024EXU_at; Start 87; Stop 111
gacagcatgtgaaatggcatctccc

SEQ ID NO: 186736 - DNA, 25 bp, Artificial
  probe
  misc_feature (1)..(25): SEQ ID NO: 1746; WAN024EXU_at; Start 129; Stop 153
tagaataatgaaacatcccacagct

SEQ ID NO: 186737 - DNA, 25 bp, Artificial
  probe
  misc_feature (1)..(25): SEQ ID NO: 1746; WAN024EXU_at; Start 111; Stop 135
catgagtgacatcccgcgtagaata

SEQ ID NO: 186738 - DNA, 25 bp, Artificial
  probe
  misc_feature (1)..(25): SEQ ID NO: 2517; WAN024EXV_at; Start 159; Stop 183
tgaacttttagcgacaccaatcaag

SEQ ID NO: 186739 - DNA, 25 bp, Artificial
  probe
  misc_feature (1)..(25): SEQ ID NO: 2517; WAN024EXV_at; Start 134; Stop 158
caaaaaggatatggaaaaggtcagt

SEQ ID NO: 186740 - DNA, 25 bp, Artificial
  probe
  misc_feature (1)..(25): SEQ ID NO: 2517; WAN024EXV_at; Start 102; Stop 126
catatccgtatcttggacggccagg

SEQ ID NO: 186741 - DNA, 25 bp, Artificial
  probe
  misc_feature (1)..(25): SEQ ID NO: 2517; WAN024EXV_at; Start 39; Stop 63
gagttgcttgaagaaaatccagatt

SEQ ID NO: 186742 - DNA, 25 bp, Artificial
  probe
  misc_feature (1)..(25): SEQ ID NO: 2517; WAN024EXV_at; Start 106; Stop 130
tccgtatcttggacggccaggatat

SEQ ID NO: 186743 - DNA, 25 bp, Artificial
  probe
  misc_feature (1)..(25): SEQ ID NO: 2517; WAN024EXV_at; Start 155; Stop 179
cagttgaacttttagcgacaccaat

SEQ ID NO: 186744 - DNA, 25 bp, Artificial
  probe
  misc_feature (1)..(25): SEQ ID NO: 2517; WAN024EXV_at; Start 171; Stop 195
gacaccaatcaagatgataccgagg

SEQ ID NO: 186745 - DNA, 25 bp, Artificial
  probe
  misc_feature (1)..(25): SEQ ID NO: 2517; WAN024EXV_at; Start 86; Stop 110
cacccatagtaataaacatatccgt

SEQ ID NO: 186746 - DNA, 25 bp, Artificial
  probe
  misc_feature (1)..(25): SEQ ID NO: 2517; WAN024EXV_at; Start 2; Stop 26
tggctttagccaagagttcatcaaa

SEQ ID NO: 186747 - DNA, 25 bp, Artificial
  probe
  misc_feature (1)..(25): SEQ ID NO: 2517; WAN024EXV_at; Start 36; Stop 60
caagagttgcttgaagaaaatccag

SEQ ID NO: 186748 - DNA, 25 bp, Artificial
  probe
  misc_feature (1)..(25): SEQ ID NO: 2517; WAN024EXV_at; Start 152; Stop 176
ggtcagttgaacttttagcgacacc

SEQ ID NO: 186749 - DNA, 25 bp, Artificial
  probe
  misc_feature (1)..(25): SEQ ID NO: 2517; WAN024EXV_at; Start 240; Stop 264
gataatcgagtttcctttgatgtag

SEQ ID NO: 186750 - DNA, 25 bp, Artificial
  probe
  misc_feature (1)..(25): SEQ ID NO: 2517; WAN024EXV_at; Start 230; Stop 254
tatcgcttttgataatcgagtttcc

SEQ ID NO: 186751 - DNA, 25 bp, Artificial
  probe
  misc_feature (1)..(25): SEQ ID NO: 2517; WAN024EXV_at; Start 98; Stop 122
taaacatatccgtatcttggacggc

SEQ ID NO: 186752 - DNA, 25 bp, Artificial
  probe
  misc_feature (1)..(25): SEQ ID NO: 2517; WAN024EXV_at; Start 22; Stop 46
tcaaaggaagttatcaagagttgct

SEQ ID NO: 186753 - DNA, 25 bp, Artificial
  probe
  misc_feature (1)..(25): SEQ ID NO: 2517; WAN024EXV_at; Start 186; Stop 210
gataccgagggctaagaaagaagaa

SEQ ID NO: 186754 - DNA, 25 bp, Artificial
  probe
  misc_feature (1)..(25): SEQ ID NO: 2517; WAN024EXV_at; Start 112; Stop 136
tcttggacggccaggatattaccaa

SEQ ID NO: 186755 - DNA, 25 bp, Artificial
  probe
  misc_feature (1)..(25): SEQ ID NO: 2517; WAN024EXV_at; Start 140; Stop 164
ggatatggaaaaggtcagttgaact

SEQ ID NO: 186756 - DNA, 25 bp, Artificial
  probe
  misc_feature (1)..(25): SEQ ID NO: 2517; WAN024EXV_at; Start 123; Stop 147
caggatattaccaaaaaggatatgg

SEQ ID NO: 186757 - DNA, 25 bp, Artificial
  probe
  misc_feature (1)..(25): SEQ ID NO: 2517; WAN024EXV_at; Start 180; Stop 204
caagatgataccgagggctaagaaa

SEQ ID NO: 186758 - DNA, 25 bp, Artificial
  probe
  misc_feature (1)..(25): SEQ ID NO: 2517; WAN024EXV_at; Start 119; Stop 143
cggccaggatattaccaaaaaggat

SEQ ID NO: 186759 - DNA, 25 bp, Artificial
  probe
  misc_feature (1)..(25): SEQ ID NO: 2517; WAN024EXV_at; Start 115; Stop 139
tggacggccaggatattaccaaaaa

SEQ ID NO: 186760 - DNA, 25 bp, Artificial
  probe
  misc_feature (1)..(25): SEQ ID NO: 2517; WAN024EXV_at; Start 203; Stop 227
aagaagaaaaggtaatgccgatggc

SEQ ID NO: 186761 - DNA, 25 bp, Artificial
  probe
  misc_feature (1)..(25): SEQ ID NO: 2517; WAN024EXV_at; Start 220; Stop 244
ccgatggcggtatcgcttttgataa

SEQ ID NO: 186762 - DNA, 25 bp, Artificial
  probe
  misc_feature (1)..(25): SEQ ID NO: 2517; WAN024EXV_at; Start 165; Stop 189
tttagcgacaccaatcaagatgata

SEQ ID NO: 186763 - DNA, 25 bp, Artificial
  probe
  misc_feature (1)..(25): SEQ ID NO: 2517; WAN024EXV_at; Start 81; Stop 105
ccccacacccatagtaataaacata

SEQ ID NO: 186764 - DNA, 25 bp, Artificial
  probe
  misc_feature (1)..(25): SEQ ID NO: 2517; WAN024EXV_at; Start 211; Stop 235
aaggtaatgccgatggcggtatcgc

SEQ ID NO: 186765 - DNA, 25 bp, Artificial
  probe
  misc_feature (1)..(25): SEQ ID NO: 2517; WAN024EXV_at; Start 176; Stop 200
caatcaagatgataccgagggctaa

SEQ ID NO: 186766 - DNA, 25 bp, Artificial
  probe
  misc_feature (1)..(25): SEQ ID NO: 2517; WAN024EXV_at; Start 8; Stop 32
tagccaagagttcatcaaaggaagt

SEQ ID NO: 186767 - DNA, 25 bp, Artificial
  probe
  misc_feature (1)..(25): SEQ ID NO: 2517; WAN024EXV_at; Start 206; Stop 230
aagaaaaggtaatgccgatggcggt

SEQ ID NO: 186768 - DNA, 25 bp, Artificial
  probe
  misc_feature (1)..(25): SEQ ID NO: 2517; WAN024EXV_at; Start 15; Stop 39
gagttcatcaaaggaagttatcaag

SEQ ID NO: 186769 - DNA, 25 bp, Artificial
  probe
  misc_feature (1)..(25): SEQ ID NO: 2517; WAN024EXV_at; Start 225; Stop 249
ggcggtatcgcttttgataatcgag

SEQ ID NO: 186770 - DNA, 25 bp, Artificial
  probe
  misc_feature (1)..(25): SEQ ID NO: 2517; WAN024EXV_at; Start 196; Stop 220
gctaagaaagaagaaaaggtaatgc

SEQ ID NO: 186771 - DNA, 25 bp, Artificial
  probe
  misc_feature (1)..(25): SEQ ID NO: 2517; WAN024EXV_at; Start 48; Stop 72
gaagaaaatccagattaacaagagg

SEQ ID NO: 186772 - DNA, 25 bp, Artificial
  probe
  misc_feature (1)..(25): SEQ ID NO: 1847; WAN024EXW_at; Start 131; Stop 155
tgggagatgccatttcacatgctgt

SEQ ID NO: 186773 - DNA, 25 bp, Artificial
  probe
  misc_feature (1)..(25): SEQ ID NO: 1847; WAN024EXW_at; Start 386; Stop 410
tggccgtccaagatacggatatgtt

SEQ ID NO: 186774 - DNA, 25 bp, Artificial
  probe
  misc_feature (1)..(25): SEQ ID NO: 1847; WAN024EXW_at; Start 476; Stop 500
taacttcctttgatgaactcttggc

SEQ ID NO: 186775 - DNA, 25 bp, Artificial
  probe
  misc_feature (1)..(25): SEQ ID NO: 1847; WAN024EXW_at; Start 66; Stop 90
tattgtcgtcgggattgtagctgga

SEQ ID NO: 186776 - DNA, 25 bp, Artificial
  probe
  misc_feature (1)..(25): SEQ ID NO: 1847; WAN024EXW_at; Start 555; Stop 579
gactctcgtgtctgtgacagccatg

SEQ ID NO: 186777 - DNA, 25 bp, Artificial
  probe
  misc_feature (1)..(25): SEQ ID NO: 1847; WAN024EXW_at; Start 204; Stop 228
cggagccattgtctttggattgcta

SEQ ID NO: 186778 - DNA, 25 bp, Artificial
  probe
  misc_feature (1)..(25): SEQ ID NO: 1847; WAN024EXW_at; Start 795; Stop 819
tatcgctcccaaacaacgatatttg

SEQ ID NO: 186779 - DNA, 25 bp, Artificial
  probe
  misc_feature (1)..(25): SEQ ID NO: 1847; WAN024EXW_at; Start 267; Stop 291
tatcaaaagcgataccgccatcggc

SEQ ID NO: 186780 - DNA, 25 bp, Artificial
  probe
  misc_feature (1)..(25): SEQ ID NO: 1847; WAN024EXW_at; Start 148; Stop 172
catgctgtcttaccaggtgtagccc

SEQ ID NO: 186781 - DNA, 25 bp, Artificial
  probe
  misc_feature (1)..(25): SEQ ID NO: 1847; WAN024EXW_at; Start 523; Stop 547
aatttctatcactaccttctcatgg

SEQ ID NO: 186782 - DNA, 25 bp, Artificial
  probe
  misc_feature (1)..(25): SEQ ID NO: 1847; WAN024EXW_at; Start 589; Stop 613
ggaactatcctgattgtagccatgc

SEQ ID NO: 186783 - DNA, 25 bp, Artificial
  probe
  misc_feature (1)..(25): SEQ ID NO: 1847; WAN024EXW_at; Start 57; Stop 81
gataacagctattgtcgtcgggatt

SEQ ID NO: 186784 - DNA, 25 bp, Artificial
  probe
  misc_feature (1)..(25): SEQ ID NO: 1847; WAN024EXW_at; Start 446; Stop 470
taatctggattttcttcaagcaact

SEQ ID NO: 186785 - DNA, 25 bp, Artificial
  probe
  misc_feature (1)..(25): SEQ ID NO: 1847; WAN024EXW_at; Start 540; Stop 564
tctcatggtactcctgactctcgtg

SEQ ID NO: 186786 - DNA, 25 bp, Artificial
  probe
  misc_feature (1)..(25): SEQ ID NO: 1847; WAN024EXW_at; Start 688; Stop 712
ggagctactgcttcagttttgggac

SEQ ID NO: 186787 - DNA, 25 bp, Artificial
  probe
  misc_feature (1)..(25): SEQ ID NO: 1847; WAN024EXW_at; Start 722; Stop 746
gctatagttttaatgttgcggcagg

SEQ ID NO: 186788 - DNA, 25 bp, Artificial
  probe
  misc_feature (1)..(25): SEQ ID NO: 1847; WAN024EXW_at; Start 220; Stop 244
ggattgctagctgccatcatcatta

SEQ ID NO: 186789 - DNA, 25 bp, Artificial
  probe
  misc_feature (1)..(25): SEQ ID NO: 1847; WAN024EXW_at; Start 572; Stop 596
cagccatgcaaagtgtcggaactat

SEQ ID NO: 186790 - DNA, 25 bp, Artificial
  probe
  misc_feature (1)..(25): SEQ ID NO: 1847; WAN024EXW_at; Start 490; Stop 514
gaactcttggctaaagccatgggaa

SEQ ID NO: 186791 - DNA, 25 bp, Artificial
  probe
  misc_feature (1)..(25): SEQ ID NO: 1847; WAN024EXW_at; Start 306; Stop 330
tttcttagccctcggtatcatcttg

SEQ ID NO: 186792 - DNA, 25 bp, Artificial
  probe
  misc_feature (1)..(25): SEQ ID NO: 1847; WAN024EXW_at; Start 185; Stop 209
tgggccttgacttctttatcggagc

SEQ ID NO: 186793 - DNA, 25 bp, Artificial
  probe
  misc_feature (1)..(25): SEQ ID NO: 1847; WAN024EXW_at; Start 240; Stop 264
cattacctacatcaaaggaaactcg

SEQ ID NO: 186794 - DNA, 25 bp, Artificial
  probe
  misc_feature (1)..(25): SEQ ID NO: 1847; WAN024EXW_at; Start 97; Stop 121
ggatgtttcattattctacgcggga

SEQ ID NO: 186795 - DNA, 25 bp, Artificial
  probe
  misc_feature (1)..(25): SEQ ID NO: 1847; WAN024EXW_at; Start 674; Stop 698
tttcctcaaccttcggagctactgc

SEQ ID NO: 186796 - DNA, 25 bp, Artificial
  probe
  misc_feature (1)..(25): SEQ ID NO: 1847; WAN024EXW_at; Start 623; Stop 647
cagctgcaactgcttatctgtatgc

SEQ ID NO: 186797 - DNA, 25 bp, Artificial
  probe
  misc_feature (1)..(25): SEQ ID NO: 1847; WAN024EXW_at; Start 321; Stop 345
tatcatcttgattggtgtcgctaaa

SEQ ID NO: 186798 - DNA, 25 bp, Artificial
  probe
  misc_feature (1)..(25): SEQ ID NO: 1847; WAN024EXW_at; Start 750; Stop 774
tagtatcgtgcttacagctgctagt

SEQ ID NO: 186799 - DNA, 25 bp, Artificial
  probe
  misc_feature (1)..(25): SEQ ID NO: 1847; WAN024EXW_at; Start 42; Stop 66
cctacaaaatgccttgataacagct

SEQ ID NO: 186800 - DNA, 25 bp, Artificial
  probe
  misc_feature (1)..(25): SEQ ID NO: 1847; WAN024EXW_at; Start 111; Stop 135
tctacgcgggatgtcactcatggga

SEQ ID NO: 186801 - DNA, 25 bp, Artificial
  probe
  misc_feature (1)..(25): SEQ ID NO: 1847; WAN024EXW_at; Start 14; Stop 38
ttatcgatggattgcaaaaattcca

SEQ ID NO: 186802 - DNA, 25 bp, Artificial
  probe
  misc_feature (1)..(25): SEQ ID NO: 1847; WAN024EXW_at; Start 501; Stop 525
taaagccatgggaatgcctgtcaat

SEQ ID NO: 186803 - DNA, 25 bp, Artificial
  probe
  misc_feature (1)..(25): SEQ ID NO: 1847; WAN024EXW_at; Start 334; Stop 358
ggtgtcgctaaaagttcaactgacc

SEQ ID NO: 186804 - DNA, 25 bp, Artificial
  probe
  misc_feature (1)..(25): SEQ ID NO: 1847; WAN024EXW_at; Start 701; Stop 725
cagttttgggactctttattggcta

SEQ ID NO: 186805 - DNA, 25 bp, Artificial
  probe
  misc_feature (1)..(25): SEQ ID NO: 1847; WAN024EXW_at; Start 736; Stop 760
gttgcggcaggttctagtatcgtgc

SEQ ID NO: 186806 - DNA, 25 bp, Artificial
  probe
  misc_feature (1)..(25): SEQ ID NO: 1694; WAN024EXX_at; Start 435; Stop 459
cagatgtttggtgcaggaagccgac

SEQ ID NO: 186807 - DNA, 25 bp, Artificial
  probe
  misc_feature (1)..(25): SEQ ID NO: 1694; WAN024EXX_at; Start 68; Stop 92
tgctccatggaccaacaattaccgg

SEQ ID NO: 186808 - DNA, 25 bp, Artificial
  probe
  misc_feature (1)..(25): SEQ ID NO: 1694; WAN024EXX_at; Start 166; Stop 190
caggcatttctcgatgacaaggaag

SEQ ID NO: 186809 - DNA, 25 bp, Artificial
  probe
  misc_feature (1)..(25): SEQ ID NO: 1694; WAN024EXX_at; Start 508; Stop 532
gaaatcatcatgaatacgctgagag

SEQ ID NO: 186810 - DNA, 25 bp, Artificial
  probe
  misc_feature (1)..(25): SEQ ID NO: 1694; WAN024EXX_at; Start 272; Stop 296
gcgtctcgttaggactatttccctc

SEQ ID NO: 186811 - DNA, 25 bp, Artificial
  probe
  misc_feature (1)..(25): SEQ ID NO: 1694; WAN024EXX_at; Start 478; Stop 502
ccctttgctgggattgactctgtca

SEQ ID NO: 186812 - DNA, 25 bp, Artificial
  probe
  misc_feature (1)..(25): SEQ ID NO: 1694; WAN024EXX_at; Start 450; Stop 474
ggaagccgactatatcctcttggat

SEQ ID NO: 186813 - DNA, 25 bp, Artificial
  probe
  misc_feature (1)..(25): SEQ ID NO: 1694; WAN024EXX_at; Start 95; Stop 119
tcattggtccaaacggcgctgggaa

SEQ ID NO: 186814 - DNA, 25 bp, Artificial
  probe
  misc_feature (1)..(25): SEQ ID NO: 1694; WAN024EXX_at; Start 604; Stop 628
caagtcttacttgtcaatcgagaag

SEQ ID NO: 186815 - DNA, 25 bp, Artificial
  probe
  misc_feature (1)..(25): SEQ ID NO: 1694; WAN024EXX_at; Start 524; Stop 548
cgctgagagatttgaaaaaagctgg

SEQ ID NO: 186816 - DNA, 25 bp, Artificial
  probe
  misc_feature (1)..(25): SEQ ID NO: 1694; WAN024EXX_at; Start 403; Stop 427
tctggaggtcaattccagcgggtct

SEQ ID NO: 186817 - DNA, 25 bp, Artificial
  probe
  misc_feature (1)..(25): SEQ ID NO: 1694; WAN024EXX_at; Start 328; Stop 352
cattggaagaaagtgcaagaggccc

SEQ ID NO: 186818 - DNA, 25 bp, Artificial
  probe
  misc_feature (1)..(25): SEQ ID NO: 1694; WAN024EXX_at; Start 416; Stop 440
tccagcgggtcttgattgccagatg

SEQ ID NO: 186819 - DNA, 25 bp, Artificial
  probe
  misc_feature (1)..(25): SEQ ID NO: 1694; WAN024EXX_at; Start 464; Stop 488
tcctcttggatgaaccctttgctgg

SEQ ID NO: 186820 - DNA, 25 bp, Artificial
  probe
  misc_feature (1)..(25): SEQ ID NO: 1694; WAN024EXX_at; Start 83; Stop 107
caattaccggcatcattggtccaaa

SEQ ID NO: 186821 - DNA, 25 bp, Artificial
  probe
  misc_feature (1)..(25): SEQ ID NO: 1694; WAN024EXX_at; Start 564; Stop 588
cgttcaccacgacctcagcaagatt

SEQ ID NO: 186822 - DNA, 25 bp, Artificial
  probe
  misc_feature (1)..(25): SEQ ID NO: 1694; WAN024EXX_at; Start 388; Stop 412
caaattagtcaactgtctggaggtc

SEQ ID NO: 186823 - DNA, 25 bp, Artificial
  probe
  misc_feature (1)..(25): SEQ ID NO: 1694; WAN024EXX_at; Start 244; Stop 268
tacaactttcccatcaaggtcaagg

SEQ ID NO: 186824 - DNA, 25 bp, Artificial
  probe
  misc_feature (1)..(25): SEQ ID NO: 1694; WAN024EXX_at; Start 258; Stop 282
caaggtcaaggaatgcgtctcgtta

SEQ ID NO: 186825 - DNA, 25 bp, Artificial
  probe
  misc_feature (1)..(25): SEQ ID NO: 1694; WAN024EXX_at; Start 103; Stop 127
ccaaacggcgctgggaaatcaacac

SEQ ID NO: 186826 - DNA, 25 bp, Artificial
  probe
  misc_feature (1)..(25): SEQ ID NO: 1694; WAN024EXX_at; Start 493; Stop 517
gactctgtcagtgaggaaatcatca

SEQ ID NO: 186827 - DNA, 25 bp, Artificial
  probe
  misc_feature (1)..(25): SEQ ID NO: 1694; WAN024EXX_at; Start 54; Stop 78
ggatatttcactagtgctccatgga

SEQ ID NO: 186828 - DNA, 25 bp, Artificial
  probe
  misc_feature (1)..(25): SEQ ID NO: 1694; WAN024EXX_at; Start 213; Stop 237
tgcctatgtcgaacaaaaaatcaat

SEQ ID NO: 186829 - DNA, 25 bp, Artificial
  probe
  misc_feature (1)..(25): SEQ ID NO: 1694; WAN024EXX_at; Start 622; Stop 646
cgagaagtgattgcctttggtccaa

SEQ ID NO: 186830 - DNA, 25 bp, Artificial
  probe
  misc_feature (1)..(25): SEQ ID NO: 1694; WAN024EXX_at; Start 356; Stop 380
aaatcgtcggcctagctgactacgc

SEQ ID NO: 186831 - DNA, 25 bp, Artificial
  probe
  misc_feature (1)..(25): SEQ ID NO: 1694; WAN024EXX_at; Start 550; Stop 574
aagacggttctcatcgttcaccacg

SEQ ID NO: 186832 - DNA, 25 bp, Artificial
  probe
  misc_feature (1)..(25): SEQ ID NO: 1694; WAN024EXX_at; Start 342; Stop 366
gcaagaggcccttgaaatcgtcggc

SEQ ID NO: 186833 - DNA, 25 bp, Artificial
  probe
  misc_feature (1)..(25): SEQ ID NO: 1694; WAN024EXX_at; Start 694; Stop 718
caactctttttcaatggaggtgacc

SEQ ID NO: 186834 - DNA, 25 bp, Artificial
  probe
  misc_feature (1)..(25): SEQ ID NO: 1694; WAN024EXX_at; Start 40; Stop 64
acgttggcacttaaggatatttcac

SEQ ID NO: 186835 - DNA, 25 bp, Artificial
  probe
  misc_feature (1)..(25): SEQ ID NO: 1694; WAN024EXX_at; Start 583; Stop 607
aagattccccactacttcgatcaag

SEQ ID NO: 186836 - DNA, 25 bp, Artificial
  probe
  misc_feature (1)..(25): SEQ ID NO: 1694; WAN024EXX_at; Start 678; Stop 702
agaagcttacggtaatcaactcttt

SEQ ID NO: 186837 - DNA, 25 bp, Artificial
  probe
  misc_feature (1)..(25): SEQ ID NO: 1694; WAN024EXX_at; Start 540; Stop 564
aaaagctgggaagacggttctcatc

SEQ ID NO: 186838 - DNA, 25 bp, Artificial
  probe
  misc_feature (1)..(25): SEQ ID NO: 1694; WAN024EXX_at; Start 372; Stop 396
tgactacgctgaacgtcaaattagt

SEQ ID NO: 186839 - DNA, 25 bp, Artificial
  probe
  misc_feature (1)..(25): SEQ ID NO: 1694; WAN024EXX_at; Start 199; Stop 223
tccttacaccgaattgcctatgtcg

SEQ ID NO: 186840 - DNA, 25 bp, Artificial
  probe
  misc_feature (1)..(25): SEQ ID NO: 3859; WAN024EXY_at; Start 232; Stop 256
tgtctgacgaatggcttcccaatga

SEQ ID NO: 186841 - DNA, 25 bp, Artificial
  probe
  misc_feature (1)..(25): SEQ ID NO: 3859; WAN024EXY_at; Start 45; Stop 69
ccatatcatcgtggcgagggagacc

SEQ ID NO: 186842 - DNA, 25 bp, Artificial
  probe
  misc_feature (1)..(25): SEQ ID NO: 3859; WAN024EXY_at; Start 24; Stop 48
caggttttgtgaccacatctgccat

SEQ ID NO: 186843 - DNA, 25 bp, Artificial
  probe
  misc_feature (1)..(25): SEQ ID NO: 3859; WAN024EXY_at; Start 273; Stop 297
cgatgaggtgcttttcgccttctag

SEQ ID NO: 186844 - DNA, 25 bp, Artificial
  probe
  misc_feature (1)..(25): SEQ ID NO: 3859; WAN024EXY_at; Start 240; Stop 264
gaatggcttcccaatgactaccagg

SEQ ID NO: 186845 - DNA, 25 bp, Artificial
  probe
  misc_feature (1)..(25): SEQ ID NO: 3859; WAN024EXY_at; Start 61; Stop 85
agggagaccggagagattatcgaca

SEQ ID NO: 186846 - DNA, 25 bp, Artificial
  probe
  misc_feature (1)..(25): SEQ ID NO: 3859; WAN024EXY_at; Start 228; Stop 252
cgattgtctgacgaatggcttccca

SEQ ID NO: 186847 - DNA, 25 bp, Artificial
  probe
  misc_feature (1)..(25): SEQ ID NO: 3859; WAN024EXY_at; Start 107; Stop 131
tcgctctctgcgatatagacaggag

SEQ ID NO: 186848 - DNA, 25 bp, Artificial
  probe
  misc_feature (1)..(25): SEQ ID NO: 3859; WAN024EXY_at; Start 18; Stop 42
gttctgcaggttttgtgaccacatc

SEQ ID NO: 186849 - DNA, 25 bp, Artificial
  probe
  misc_feature (1)..(25): SEQ ID NO: 3859; WAN024EXY_at; Start 68; Stop 92
ccggagagattatcgacaggagtgt

SEQ ID NO: 186850 - DNA, 25 bp, Artificial
  probe
  misc_feature (1)..(25): SEQ ID NO: 3859; WAN024EXY_at; Start 162; Stop 186
gactcatgatatggtcataatgggc

SEQ ID NO: 186851 - DNA, 25 bp, Artificial
  probe
  misc_feature (1)..(25): SEQ ID NO: 3859; WAN024EXY_at; Start 264; Stop 288
gatcgacgacgatgaggtgcttttc

SEQ ID NO: 186852 - DNA, 25 bp, Artificial
  probe
  misc_feature (1)..(25): SEQ ID NO: 3859; WAN024EXY_at; Start 31; Stop 55
tgtgaccacatctgccatatcatcg

SEQ ID NO: 186853 - DNA, 25 bp, Artificial
  probe
  misc_feature (1)..(25): SEQ ID NO: 3859; WAN024EXY_at; Start 84; Stop 108
caggagtgtagagccagctggcttc

SEQ ID NO: 186854 - DNA, 25 bp, Artificial
  probe
  misc_feature (1)..(25): SEQ ID NO: 3859; WAN024EXY_at; Start 268; Stop 292
gacgacgatgaggtgcttttcgcct

SEQ ID NO: 186855 - DNA, 25 bp, Artificial
  probe
  misc_feature (1)..(25): SEQ ID NO: 3859; WAN024EXY_at; Start 177; Stop 201
cataatgggcgtgggtcaagagaat

SEQ ID NO: 186856 - DNA, 25 bp, Artificial
  probe
  misc_feature (1)..(25): SEQ ID NO: 3859; WAN024EXY_at; Start 3; Stop 27
gaaagacaaaggtgtgttctgcagg

SEQ ID NO: 186857 - DNA, 25 bp, Artificial
  probe
  misc_feature (1)..(25): SEQ ID NO: 3859; WAN024EXY_at; Start 255; Stop 279
gactaccaggatcgacgacgatgag

SEQ ID NO: 186858 - DNA, 25 bp, Artificial
  probe
  misc_feature (1)..(25): SEQ ID NO: 3859; WAN024EXY_at; Start 113; Stop 137
tctgcgatatagacaggaggattgc

SEQ ID NO: 186859 - DNA, 25 bp, Artificial
  probe
  misc_feature (1)..(25): SEQ ID NO: 3859; WAN024EXY_at; Start 124; Stop 148
gacaggaggattgccaaacgtctcg

SEQ ID NO: 186860 - DNA, 25 bp, Artificial
  probe
  misc_feature (1)..(25): SEQ ID NO: 3859; WAN024EXY_at; Start 171; Stop 195
tatggtcataatgggcgtgggtcaa

SEQ ID NO: 186861 - DNA, 25 bp, Artificial
  probe
  misc_feature (1)..(25): SEQ ID NO: 3859; WAN024EXY_at; Start 192; Stop 216
tcaagagaatagcacagatcggttt

SEQ ID NO: 186862 - DNA, 25 bp, Artificial
  probe
  misc_feature (1)..(25): SEQ ID NO: 3859; WAN024EXY_at; Start 94; Stop 118
gagccagctggcttcgctctctgcg

SEQ ID NO: 186863 - DNA, 25 bp, Artificial
  probe
  misc_feature (1)..(25): SEQ ID NO: 3859; WAN024EXY_at; Start 154; Stop 178
caagtccagactcatgatatggtca

SEQ ID NO: 186864 - DNA, 25 bp, Artificial
  probe
  misc_feature (1)..(25): SEQ ID NO: 3859; WAN024EXY_at; Start 120; Stop 144
tatagacaggaggattgccaaacgt

SEQ ID NO: 186865 - DNA, 25 bp, Artificial
  probe
  misc_feature (1)..(25): SEQ ID NO: 3859; WAN024EXY_at; Start 37; Stop 61
cacatctgccatatcatcgtggcga

SEQ ID NO: 186866 - DNA, 25 bp, Artificial
  probe
  misc_feature (1)..(25): SEQ ID NO: 3859; WAN024EXY_at; Start 206; Stop 230
cagatcggtttgttgatcttctcga

SEQ ID NO: 186867 - DNA, 25 bp, Artificial
  probe
  misc_feature (1)..(25): SEQ ID NO: 3859; WAN024EXY_at; Start 78; Stop 102
tatcgacaggagtgtagagccagct

SEQ ID NO: 186868 - DNA, 25 bp, Artificial
  probe
  misc_feature (1)..(25): SEQ ID NO: 3859; WAN024EXY_at; Start 196; Stop 220
gagaatagcacagatcggtttgttg

SEQ ID NO: 186869 - DNA, 25 bp, Artificial
  probe
  misc_feature (1)..(25): SEQ ID NO: 3859; WAN024EXY_at; Start 216; Stop 240
tgttgatcttctcgattgtctgacg

SEQ ID NO: 186870 - DNA, 25 bp, Artificial
  probe
  misc_feature (1)..(25): SEQ ID NO: 3859; WAN024EXY_at; Start 251; Stop 275
caatgactaccaggatcgacgacga

SEQ ID NO: 186871 - DNA, 25 bp, Artificial
  probe
  misc_feature (1)..(25): SEQ ID NO: 3859; WAN024EXY_at; Start 99; Stop 123
agctggcttcgctctctgcgatata

SEQ ID NO: 186872 - DNA, 25 bp, Artificial
  probe
  misc_feature (1)..(25): SEQ ID NO: 3859; WAN024EXY_at; Start 188; Stop 212
tgggtcaagagaatagcacagatcg

SEQ ID NO: 186873 - DNA, 25 bp, Artificial
  probe
  misc_feature (1)..(25): SEQ ID NO: 3859; WAN024EXY_at; Start 244; Stop 268
ggcttcccaatgactaccaggatcg

SEQ ID NO: 186874 - DNA, 25 bp, Artificial
  probe
  misc_feature (1)..(25): SEQ ID NO: 763; WAN024EXZ_at; Start 97; Stop 121
tgggaagccattcgtcagacaatcg

SEQ ID NO: 186875 - DNA, 25 bp, Artificial
  probe
  misc_feature (1)..(25): SEQ ID NO: 763; WAN024EXZ_at; Start 497; Stop 521
cgactggtagcatggagcaactcct

SEQ ID NO: 186876 - DNA, 25 bp, Artificial
  probe
  misc_feature (1)..(25): SEQ ID NO: 763; WAN024EXZ_at; Start 307; Stop 331
gatgtggtcacaaaacctgcagaac

SEQ ID NO: 186877 - DNA, 25 bp, Artificial
  probe
  misc_feature (1)..(25): SEQ ID NO: 763; WAN024EXZ_at; Start 486; Stop 510
gaccgaccttccgactggtagcatg

SEQ ID NO: 186878 - DNA, 25 bp, Artificial
  probe
  misc_feature (1)..(25): SEQ ID NO: 763; WAN024EXZ_at; Start 594; Stop 618
tatcgctcacgaaaaggccttcaat

SEQ ID NO: 186879 - DNA, 25 bp, Artificial
  probe
  misc_feature (1)..(25): SEQ ID NO: 763; WAN024EXZ_at; Start 17; Stop 41
ccgtgaatcctgttgcctatgaaaa

SEQ ID NO: 186880 - DNA, 25 bp, Artificial
  probe
  misc_feature (1)..(25): SEQ ID NO: 763; WAN024EXZ_at; Start 248; Stop 272
gctggctctacactcctgtcgataa

SEQ ID NO: 186881 - DNA, 25 bp, Artificial
  probe
  misc_feature (1)..(25): SEQ ID NO: 763; WAN024EXZ_at; Start 68; Stop 92
acctcatcgtcgtcgatcctggtag

SEQ ID NO: 186882 - DNA, 25 bp, Artificial
  probe
  misc_feature (1)..(25): SEQ ID NO: 763; WAN024EXZ_at; Start 557; Stop 581
actacgatgtctatccaggacatgg

SEQ ID NO: 186883 - DNA, 25 bp, Artificial
  probe
  misc_feature (1)..(25): SEQ ID NO: 763; WAN024EXZ_at; Start 82; Stop 106
gatcctggtagtcattgggaagcca

SEQ ID NO: 186884 - DNA, 25 bp, Artificial
  probe
  misc_feature (1)..(25): SEQ ID NO: 763; WAN024EXZ_at; Start 294; Stop 318
cgatgatatggcagatgtggtcaca

SEQ ID NO: 186885 - DNA, 25 bp, Artificial
  probe
  misc_feature (1)..(25): SEQ ID NO: 763; WAN024EXZ_at; Start 226; Stop 250
tatatcgcagagagcgaagccagct

SEQ ID NO: 186886 - DNA, 25 bp, Artificial
  probe
  misc_feature (1)..(25): SEQ ID NO: 763; WAN024EXZ_at; Start 211; Stop 235
ggcaatcctcctgtctatatcgcag

SEQ ID NO: 186887 - DNA, 25 bp, Artificial
  probe
  misc_feature (1)..(25): SEQ ID NO: 763; WAN024EXZ_at; Start 542; Stop 566
tcttcaccctaccaaactacgatgt

SEQ ID NO: 186888 - DNA, 25 bp, Artificial
  probe
  misc_feature (1)..(25): SEQ ID NO: 763; WAN024EXZ_at; Start 510; Stop 534
ggagcaactccttcatagtatccag

SEQ ID NO: 186889 - DNA, 25 bp, Artificial
  probe
  misc_feature (1)..(25): SEQ ID NO: 763; WAN024EXZ_at; Start 137; Stop 161
cgatctgtgctattctcttgaccca

SEQ ID NO: 186890 - DNA, 25 bp, Artificial
  probe
  misc_feature (1)..(25): SEQ ID NO: 763; WAN024EXZ_at; Start 108; Stop 132
tcgtcagacaatcgagaagatcaac

SEQ ID NO: 186891 - DNA, 25 bp, Artificial
  probe
  misc_feature (1)..(25): SEQ ID NO: 763; WAN024EXZ_at; Start 400; Stop 424
cactctatcggtggtgtttccctag

SEQ ID NO: 186892 - DNA, 25 bp, Artificial
  probe
  misc_feature (1)..(25): SEQ ID NO: 763; WAN024EXZ_at; Start 443; Stop 467
tagtcttgacgggagatgctctatt

SEQ ID NO: 186893 - DNA, 25 bp, Artificial
  probe
  misc_feature (1)..(25): SEQ ID NO: 763; WAN024EXZ_at; Start 172; Stop 196
gaccatatcatgagtctggacttgg

SEQ ID NO: 186894 - DNA, 25 bp, Artificial
  probe
  misc_feature (1)..(25): SEQ ID NO: 763; WAN024EXZ_at; Start 523; Stop 547
catagtatccagacccaactcttca

SEQ ID NO: 186895 - DNA, 25 bp, Artificial
  probe
  misc_feature (1)..(25): SEQ ID NO: 763; WAN024EXZ_at; Start 280; Stop 304
ggtctccctcgccacgatgatatgg

SEQ ID NO: 186896 - DNA, 25 bp, Artificial
  probe
  misc_feature (1)..(25): SEQ ID NO: 763; WAN024EXZ_at; Start 328; Stop 352
gaacacacctttgtctttcacgaag

SEQ ID NO: 186897 - DNA, 25 bp, Artificial
  probe
  misc_feature (1)..(25): SEQ ID NO: 763; WAN024EXZ_at; Start 201; Stop 225
cgagacgtttggcaatcctcctgtc

SEQ ID NO: 186898 - DNA, 25 bp, Artificial
  probe
  misc_feature (1)..(25): SEQ ID NO: 763; WAN024EXZ_at; Start 343; Stop 367
tttcacgaagaataccaactagagg

SEQ ID NO: 186899 - DNA, 25 bp, Artificial
  probe
  misc_feature (1)..(25): SEQ ID NO: 763; WAN024EXZ_at; Start 390; Stop 414
gaccccagggcactctatcggtggt

SEQ ID NO: 186900 - DNA, 25 bp, Artificial
  probe
  misc_feature (1)..(25): SEQ ID NO: 763; WAN024EXZ_at; Start 2; Stop 26
tgaaaatccataaaaccgtgaatcc

SEQ ID NO: 186901 - DNA, 25 bp, Artificial
  probe
  misc_feature (1)..(25): SEQ ID NO: 763; WAN024EXZ_at; Start 121; Stop 145
gagaagatcaacaaaccgatctgtg

SEQ ID NO: 186902 - DNA, 25 bp, Artificial
  probe
  misc_feature (1)..(25): SEQ ID NO: 763; WAN024EXZ_at; Start 264; Stop 288
tgtcgataatctctccggtctccct

SEQ ID NO: 186903 - DNA, 25 bp, Artificial
  probe
  misc_feature (1)..(25): SEQ ID NO: 763; WAN024EXZ_at; Start 42; Stop 66
tacctattatctagaaggcgaaaag

SEQ ID NO: 186904 - DNA, 25 bp, Artificial
  probe
  misc_feature (1)..(25): SEQ ID NO: 763; WAN024EXZ_at; Start 454; Stop 478
ggagatgctctattccgcgaaacta

SEQ ID NO: 186905 - DNA, 25 bp, Artificial
  probe
  misc_feature (1)..(25): SEQ ID NO: 763; WAN024EXZ_at; Start 467; Stop 491
tccgcgaaactatcggacggaccga

SEQ ID NO: 186906 - DNA, 25 bp, Artificial
  probe
  misc_feature (1)..(25): SEQ ID NO: 763; WAN024EXZ_at; Start 412; Stop 436
ggtgtttccctagtctttcctgatg

SEQ ID NO: 186907 - DNA, 25 bp, Artificial
  probe
  misc_feature (1)..(25): SEQ ID NO: 763; WAN024EXZ_at; Start 241; Stop 265
gaagccagctggctctacactcctg

SEQ ID NO: 186908 - DNA, 25 bp, Artificial
  probe
  misc_feature (1)..(25): SEQ ID NO: 5344; WAN024EY2_at; Start 14; Stop 38
cctttcttataagcccagtgagccg

SEQ ID NO: 186909 - DNA, 25 bp, Artificial
  probe
  misc_feature (1)..(25): SEQ ID NO: 5344; WAN024EY2_at; Start 189; Stop 213
tccaaaattcatgcacgtaaccaag

SEQ ID NO: 186910 - DNA, 25 bp, Artificial
  probe
  misc_feature (1)..(25): SEQ ID NO: 5344; WAN024EY2_at; Start 136; Stop 160
accattggccttgcggttggcgata

SEQ ID NO: 186911 - DNA, 25 bp, Artificial
  probe
  misc_feature (1)..(25): SEQ ID NO: 5344; WAN024EY2_at; Start 153; Stop 177
tggcgatatagtctttgaagcgacc

SEQ ID NO: 186912 - DNA, 25 bp, Artificial
  probe
  misc_feature (1)..(25): SEQ ID NO: 5344; WAN024EY2_at; Start 164; Stop 188
tctttgaagcgacctggcatcggtt

SEQ ID NO: 186913 - DNA, 25 bp, Artificial
  probe
  misc_feature (1)..(25): SEQ ID NO: 5344; WAN024EY2_at; Start 169; Stop 193
gaagcgacctggcatcggtttccaa

SEQ ID NO: 186914 - DNA, 25 bp, Artificial
  probe
  misc_feature (1)..(25): SEQ ID NO: 5344; WAN024EY2_at; Start 128; Stop 152
gactgataaccattggccttgcggt

SEQ ID NO: 186915 - DNA, 25 bp, Artificial
  probe
  misc_feature (1)..(25): SEQ ID NO: 5344; WAN024EY2_at; Start 81; Stop 105
tctggaattcaatcggcccttttgg

SEQ ID NO: 186916 - DNA, 25 bp, Artificial
  probe
  misc_feature (1)..(25): SEQ ID NO: 5344; WAN024EY2_at; Start 194; Stop 218
aattcatgcacgtaaccaagcatgg

SEQ ID NO: 186917 - DNA, 25 bp, Artificial
  probe
  misc_feature (1)..(25): SEQ ID NO: 5344; WAN024EY2_at; Start 56; Stop 80
acctcgtgcatttccttggttcgaa

SEQ ID NO: 186918 - DNA, 25 bp, Artificial
  probe
  misc_feature (1)..(25): SEQ ID NO: 5344; WAN024EY2_at; Start 134; Stop 158
taaccattggccttgcggttggcga

SEQ ID NO: 186919 - DNA, 25 bp, Artificial
  probe
  misc_feature (1)..(25): SEQ ID NO: 5344; WAN024EY2_at; Start 50; Stop 74
tcagccacctcgtgcatttccttgg

SEQ ID NO: 186920 - DNA, 25 bp, Artificial
  probe
  misc_feature (1)..(25): SEQ ID NO: 5344; WAN024EY2_at; Start 68; Stop 92
tccttggttcgaatctggaattcaa

SEQ ID NO: 186921 - DNA, 25 bp, Artificial
  probe
  misc_feature (1)..(25): SEQ ID NO: 5344; WAN024EY2_at; Start 126; Stop 150
tagactgataaccattggccttgcg

SEQ ID NO: 186922 - DNA, 25 bp, Artificial
  probe
  misc_feature (1)..(25): SEQ ID NO: 5344; WAN024EY2_at; Start 98; Stop 122
ccttttggtccataaacagtcgtat

SEQ ID NO: 186923 - DNA, 25 bp, Artificial
  probe
  misc_feature (1)..(25): SEQ ID NO: 5344; WAN024EY2_at; Start 89; Stop 113
tcaatcggcccttttggtccataaa

SEQ ID NO: 186924 - DNA, 25 bp, Artificial
  probe
  misc_feature (1)..(25): SEQ ID NO: 5344; WAN024EY2_at; Start 30; Stop 54
agtgagccgcaaccccgtactcagc

SEQ ID NO: 186925 - DNA, 25 bp, Artificial
  probe
  misc_feature (1)..(25): SEQ ID NO: 5344; WAN024EY2_at; Start 172; Stop 196
gcgacctggcatcggtttccaaaat

SEQ ID NO: 186926 - DNA, 25 bp, Artificial
  probe
  misc_feature (1)..(25): SEQ ID NO: 5344; WAN024EY2_at; Start 162; Stop 186
agtctttgaagcgacctggcatcgg

SEQ ID NO: 186927 - DNA, 25 bp, Artificial
  probe
  misc_feature (1)..(25): SEQ ID NO: 5344; WAN024EY2_at; Start 200; Stop 224
tgcacgtaaccaagcatggcataaa

SEQ ID NO: 186928 - DNA, 25 bp, Artificial
  probe
  misc_feature (1)..(25): SEQ ID NO: 5344; WAN024EY2_at; Start 219; Stop 243
cataaacatcactttgggtatctaa

SEQ ID NO: 186929 - DNA, 25 bp, Artificial
  probe
  misc_feature (1)..(25): SEQ ID NO: 5344; WAN024EY2_at; Start 76; Stop 100
tcgaatctggaattcaatcggccct

SEQ ID NO: 186930 - DNA, 25 bp, Artificial
  probe
  misc_feature (1)..(25): SEQ ID NO: 5344; WAN024EY2_at; Start 157; Stop 181
gatatagtctttgaagcgacctggc

SEQ ID NO: 186931 - DNA, 25 bp, Artificial
  probe
  misc_feature (1)..(25): SEQ ID NO: 5344; WAN024EY2_at; Start 147; Stop 171
tgcggttggcgatatagtctttgaa

SEQ ID NO: 186932 - DNA, 25 bp, Artificial
  probe
  misc_feature (1)..(25): SEQ ID NO: 5344; WAN024EY2_at; Start 122; Stop 146
tggatagactgataaccattggcct

SEQ ID NO: 186933 - DNA, 25 bp, Artificial
  probe
  misc_feature (1)..(25): SEQ ID NO: 5344; WAN024EY2_at; Start 204; Stop 228
cgtaaccaagcatggcataaacatc

SEQ ID NO: 186934 - DNA, 25 bp, Artificial
  probe
  misc_feature (1)..(25): SEQ ID NO: 5344; WAN024EY2_at; Start 107; Stop 131
ccataaacagtcgtatggatagact

SEQ ID NO: 186935 - DNA, 25 bp, Artificial
  probe
  misc_feature (1)..(25): SEQ ID NO: 5344; WAN024EY2_at; Start 181; Stop 205
catcggtttccaaaattcatgcacg

SEQ ID NO: 186936 - DNA, 25 bp, Artificial
  probe
  misc_feature (1)..(25): SEQ ID NO: 5344; WAN024EY2_at; Start 62; Stop 86
tgcatttccttggttcgaatctgga

SEQ ID NO: 186937 - DNA, 25 bp, Artificial
  probe
  misc_feature (1)..(25): SEQ ID NO: 5344; WAN024EY2_at; Start 18; Stop 42
tcttataagcccagtgagccgcaac

SEQ ID NO: 186938 - DNA, 25 bp, Artificial
  probe
  misc_feature (1)..(25): SEQ ID NO: 5344; WAN024EY2_at; Start 10; Stop 34
tatacctttcttataagcccagtga

SEQ ID NO: 186939 - DNA, 25 bp, Artificial
  probe
  misc_feature (1)..(25): SEQ ID NO: 5344; WAN024EY2_at; Start 141; Stop 165
tggccttgcggttggcgatatagtc

SEQ ID NO: 186940 - DNA, 25 bp, Artificial
  probe
  misc_feature (1)..(25): SEQ ID NO: 5344; WAN024EY2_at; Start 213; Stop 237
gcatggcataaacatcactttgggt

SEQ ID NO: 186941 - DNA, 25 bp, Artificial
  probe
  misc_feature (1)..(25): SEQ ID NO: 5344; WAN024EY2_at; Start 20; Stop 44
ttataagcccagtgagccgcaaccc

SEQ ID NO: 186942 - DNA, 25 bp, Artificial
  probe
  misc_feature (1)..(25): SEQ ID NO: 2117; WAN024EY3_at; Start 360; Stop 384
tgaccatattgagccagtcacggct

SEQ ID NO: 186943 - DNA, 25 bp, Artificial
  probe
  misc_feature (1)..(25): SEQ ID NO: 2117; WAN024EY3_at; Start 142; Stop 166
gatttccccaaaaccaatggccgca

SEQ ID NO: 186944 - DNA, 25 bp, Artificial
  probe
  misc_feature (1)..(25): SEQ ID NO: 2117; WAN024EY3_at; Start 377; Stop 401
tcacggctaggtccaaaggagttcg

SEQ ID NO: 186945 - DNA, 25 bp, Artificial
  probe
  misc_feature (1)..(25): SEQ ID NO: 2117; WAN024EY3_at; Start 35; Stop 59
ttgacctcgccacctttgacaagct

SEQ ID NO: 186946 - DNA, 25 bp, Artificial
  probe
  misc_feature (1)..(25): SEQ ID NO: 2117; WAN024EY3_at; Start 22; Stop 46
tttattttcaaccttgacctcgcca

SEQ ID NO: 186947 - DNA, 25 bp, Artificial
  probe
  misc_feature (1)..(25): SEQ ID NO: 2117; WAN024EY3_at; Start 280; Stop 304
ctcacgacccttgttgacagacaat

SEQ ID NO: 186948 - DNA, 25 bp, Artificial
  probe
  misc_feature (1)..(25): SEQ ID NO: 2117; WAN024EY3_at; Start 339; Stop 363
tattgcgcgccttgctagtcttgac

SEQ ID NO: 186949 - DNA, 25 bp, Artificial
  probe
  misc_feature (1)..(25): SEQ ID NO: 2117; WAN024EY3_at; Start 229; Stop 253
cataaatttatttgccacatagcca

SEQ ID NO: 186950 - DNA, 25 bp, Artificial
  probe
  misc_feature (1)..(25): SEQ ID NO: 2117; WAN024EY3_at; Start 183; Stop 207
tcttgtaactggtcttttgcagaac

SEQ ID NO: 186951 - DNA, 25 bp, Artificial
  probe
  misc_feature (1)..(25): SEQ ID NO: 2117; WAN024EY3_at; Start 155; Stop 179
ccaatggccgcaaagagggagtctt

SEQ ID NO: 186952 - DNA, 25 bp, Artificial
  probe
  misc_feature (1)..(25): SEQ ID NO: 2117; WAN024EY3_at; Start 407; Stop 431
gcgataatttcaacctgatcccctg

SEQ ID NO: 186953 - DNA, 25 bp, Artificial
  probe
  misc_feature (1)..(25): SEQ ID NO: 2117; WAN024EY3_at; Start 252; Stop 276
cattttcttggaactgagccatcag

SEQ ID NO: 186954 - DNA, 25 bp, Artificial
  probe
  misc_feature (1)..(25): SEQ ID NO: 2117; WAN024EY3_at; Start 74; Stop 98
ttggccttggcacgctcttcctcac

SEQ ID NO: 186955 - DNA, 25 bp, Artificial
  probe
  misc_feature (1)..(25): SEQ ID NO: 2117; WAN024EY3_at; Start 127; Stop 151
gacggtaatcgcaccgatttcccca

SEQ ID NO: 186956 - DNA, 25 bp, Artificial
  probe
  misc_feature (1)..(25): SEQ ID NO: 2117; WAN024EY3_at; Start 274; Stop 298
cagcatctcacgacccttgttgaca

SEQ ID NO: 186957 - DNA, 25 bp, Artificial
  probe
  misc_feature (1)..(25): SEQ ID NO: 2117; WAN024EY3_at; Start 237; Stop 261
tatttgccacatagccattttcttg

SEQ ID NO: 186958 - DNA, 25 bp, Artificial
  probe
  misc_feature (1)..(25): SEQ ID NO: 2117; WAN024EY3_at; Start 114; Stop 138
tcagacggttaaagacggtaatcgc

SEQ ID NO: 186959 - DNA, 25 bp, Artificial
  probe
  misc_feature (1)..(25): SEQ ID NO: 2117; WAN024EY3_at; Start 214; Stop 238
catgtggcgcttgtccataaattta

SEQ ID NO: 186960 - DNA, 25 bp, Artificial
  probe
  misc_feature (1)..(25): SEQ ID NO: 2117; WAN024EY3_at; Start 161; Stop 185
gccgcaaagagggagtcttctgtct

SEQ ID NO: 186961 - DNA, 25 bp, Artificial
  probe
  misc_feature (1)..(25): SEQ ID NO: 2117; WAN024EY3_at; Start 295; Stop 319
gacagacaattccttatcttggttt

SEQ ID NO: 186962 - DNA, 25 bp, Artificial
  probe
  misc_feature (1)..(25): SEQ ID NO: 2117; WAN024EY3_at; Start 206; Stop 230
acttgatccatgtggcgcttgtcca

SEQ ID NO: 186963 - DNA, 25 bp, Artificial
  probe
  misc_feature (1)..(25): SEQ ID NO: 2117; WAN024EY3_at; Start 262; Stop 286
gaactgagccatcagcatctcacga

SEQ ID NO: 186964 - DNA, 25 bp, Artificial
  probe
  misc_feature (1)..(25): SEQ ID NO: 2117; WAN024EY3_at; Start 373; Stop 397
ccagtcacggctaggtccaaaggag

SEQ ID NO: 186965 - DNA, 25 bp, Artificial
  probe
  misc_feature (1)..(25): SEQ ID NO: 2117; WAN024EY3_at; Start 394; Stop 418
ggagttcgggttggcgataatttca

SEQ ID NO: 186966 - DNA, 25 bp, Artificial
  probe
  misc_feature (1)..(25): SEQ ID NO: 2117; WAN024EY3_at; Start 366; Stop 390
tattgagccagtcacggctaggtcc

SEQ ID NO: 186967 - DNA, 25 bp, Artificial
  probe
  misc_feature (1)..(25): SEQ ID NO: 2117; WAN024EY3_at; Start 331; Stop 355
gcgaatcttattgcgcgccttgcta

SEQ ID NO: 186968 - DNA, 25 bp, Artificial
  probe
  misc_feature (1)..(25): SEQ ID NO: 2117; WAN024EY3_at; Start 321; Stop 345
taaagaactggcgaatcttattgcg

SEQ ID NO: 186969 - DNA, 25 bp, Artificial
  probe
  misc_feature (1)..(25): SEQ ID NO: 2117; WAN024EY3_at; Start 198; Stop 222
tttgcagaacttgatccatgtggcg

SEQ ID NO: 186970 - DNA, 25 bp, Artificial
  probe
  misc_feature (1)..(25): SEQ ID NO: 2117; WAN024EY3_at; Start 246; Stop 270
catagccattttcttggaactgagc

SEQ ID NO: 186971 - DNA, 25 bp, Artificial
  probe
  misc_feature (1)..(25): SEQ ID NO: 2117; WAN024EY3_at; Start 354; Stop 378
tagtcttgaccatattgagccagtc

SEQ ID NO: 186972 - DNA, 25 bp, Artificial
  probe
  misc_feature (1)..(25): SEQ ID NO: 2117; WAN024EY3_at; Start 343; Stop 367
gcgcgccttgctagtcttgaccata

SEQ ID NO: 186973 - DNA, 25 bp, Artificial
  probe
  misc_feature (1)..(25): SEQ ID NO: 2117; WAN024EY3_at; Start 414; Stop 438
tttcaacctgatcccctgtctttaa

SEQ ID NO: 186974 - DNA, 25 bp, Artificial
  probe
  misc_feature (1)..(25): SEQ ID NO: 2117; WAN024EY3_at; Start 169; Stop 193
gagggagtcttctgtcttgtaactg

SEQ ID NO: 186975 - DNA, 25 bp, Artificial
  probe
  misc_feature (1)..(25): SEQ ID NO: 2117; WAN024EY3_at; Start 104; Stop 128
tccttttcagtcagacggttaaaga

SEQ ID NO: 186976 - DNA, 25 bp, Artificial
  probe
  misc_feature (1)..(25): SEQ ID NO: 5459; WAN024EY4_at; Start 475; Stop 499
tcttcgaaaagacaagcaggagcgt

SEQ ID NO: 186977 - DNA, 25 bp, Artificial
  probe
  misc_feature (1)..(25): SEQ ID NO: 5459; WAN024EY4_at; Start 2210; Stop 2234
tactctgtcaaacggaccaacggct

SEQ ID NO: 186978 - DNA, 25 bp, Artificial
  probe
  misc_feature (1)..(25): SEQ ID NO: 5459; WAN024EY4_at; Start 1382; Stop 1406
tcctttggacctagccgtgactggc

SEQ ID NO: 186979 - DNA, 25 bp, Artificial
  probe
  misc_feature (1)..(25): SEQ ID NO: 5459; WAN024EY4_at; Start 438; Stop 462
tgtctgaccgcttgcacaatatgcg

SEQ ID NO: 186980 - DNA, 25 bp, Artificial
  probe
  misc_feature (1)..(25): SEQ ID NO: 5459; WAN024EY4_at; Start 1555; Stop 1579
gcgccacatggatcaagttctgcaa

SEQ ID NO: 186981 - DNA, 25 bp, Artificial
  probe
  misc_feature (1)..(25): SEQ ID NO: 5459; WAN024EY4_at; Start 1504; Stop 1528
gatggctcagttccaagaaaatggc

SEQ ID NO: 186982 - DNA, 25 bp, Artificial
  probe
  misc_feature (1)..(25): SEQ ID NO: 5459; WAN024EY4_at; Start 965; Stop 989
ccaaaagggccgattgaattccaga

SEQ ID NO: 186983 - DNA, 25 bp, Artificial
  probe
  misc_feature (1)..(25): SEQ ID NO: 5459; WAN024EY4_at; Start 331; Stop 355
caagcttggcaaggtcgagtacaaa

SEQ ID NO: 186984 - DNA, 25 bp, Artificial
  probe
  misc_feature (1)..(25): SEQ ID NO: 5459; WAN024EY4_at; Start 382; Stop 406
tcatcgcaagatgctcatggccatg

SEQ ID NO: 186985 - DNA, 25 bp, Artificial
  probe
  misc_feature (1)..(25): SEQ ID NO: 5459; WAN024EY4_at; Start 1244; Stop 1268
ggaccgattgattttgcctacgaaa

SEQ ID NO: 186986 - DNA, 25 bp, Artificial
  probe
  misc_feature (1)..(25): SEQ ID NO: 5459; WAN024EY4_at; Start 2092; Stop 2116
ggtcaatgcccaaccaaccaaggat

SEQ ID NO: 186987 - DNA, 25 bp, Artificial
  probe
  misc_feature (1)..(25): SEQ ID NO: 5459; WAN024EY4_at; Start 1937; Stop 1961
tacgagcaacgtctccttgatgtgg

SEQ ID NO: 186988 - DNA, 25 bp, Artificial
  probe
  misc_feature (1)..(25): SEQ ID NO: 5459; WAN024EY4_at; Start 1920; Stop 1944
tgcgtgcccaagaaaactacgagca

SEQ ID NO: 186989 - DNA, 25 bp, Artificial
  probe
  misc_feature (1)..(25): SEQ ID NO: 5459; WAN024EY4_at; Start 697; Stop 721
tacgacagaacgtcacttgaaaggg

SEQ ID NO: 186990 - DNA, 25 bp, Artificial
  probe
  misc_feature (1)..(25): SEQ ID NO: 5459; WAN024EY4_at; Start 1414; Stop 1438
ggtcaagactagcaaggcgcgcaat

SEQ ID NO: 186991 - DNA, 25 bp, Artificial
  probe
  misc_feature (1)..(25): SEQ ID NO: 5459; WAN024EY4_at; Start 1540; Stop 1564
taaatttatggacaagcgccacatg

SEQ ID NO: 186992 - DNA, 25 bp, Artificial
  probe
  misc_feature (1)..(25): SEQ ID NO: 5459; WAN024EY4_at; Start 1200; Stop 1224
tttttaccccagatggagctgtccg

SEQ ID NO: 186993 - DNA, 25 bp, Artificial
  probe
  misc_feature (1)..(25): SEQ ID NO: 5459; WAN024EY4_at; Start 457; Stop 481
tatgcggaccctgaaacatcttcga

SEQ ID NO: 186994 - DNA, 25 bp, Artificial
  probe
  misc_feature (1)..(25): SEQ ID NO: 5459; WAN024EY4_at; Start 1599; Stop 1623
aagactccctctttgcggccattgg

SEQ ID NO: 186995 - DNA, 25 bp, Artificial
  probe
  misc_feature (1)..(25): SEQ ID NO: 5459; WAN024EY4_at; Start 988; Stop 1012
gattcgaaccaaggaaatgcacgag

SEQ ID NO: 186996 - DNA, 25 bp, Artificial
  probe
  misc_feature (1)..(25): SEQ ID NO: 5459; WAN024EY4_at; Start 1876; Stop 1900
caagggtcgtggtgtggctattcac

SEQ ID NO: 186997 - DNA, 25 bp, Artificial
  probe
  misc_feature (1)..(25): SEQ ID NO: 5459; WAN024EY4_at; Start 1262; Stop 1286
tacgaaatccataccaaggtcggtg

SEQ ID NO: 186998 - DNA, 25 bp, Artificial
  probe
  misc_feature (1)..(25): SEQ ID NO: 5459; WAN024EY4_at; Start 626; Stop 650
catatgatgaaggaaaagcgcaggg

SEQ ID NO: 186999 - DNA, 25 bp, Artificial
  probe
  misc_feature (1)..(25): SEQ ID NO: 5459; WAN024EY4_at; Start 1293; Stop 1317
caactggtgccaaggtcaatggccg

SEQ ID NO: 187000 - DNA, 25 bp, Artificial
  probe
  misc_feature (1)..(25): SEQ ID NO: 5459; WAN024EY4_at; Start 720; Stop 744
ggaagatttatggtcgtcccaagca

SEQ ID NO: 187001 - DNA, 25 bp, Artificial
  probe
  misc_feature (1)..(25): SEQ ID NO: 5459; WAN024EY4_at; Start 165; Stop 189
tcattcaccctatccaagtggcagg

SEQ ID NO: 187002 - DNA, 25 bp, Artificial
  probe
  misc_feature (1)..(25): SEQ ID NO: 5459; WAN024EY4_at; Start 316; Stop 340
tgttgacggagttaccaagcttggc

SEQ ID NO: 187003 - DNA, 25 bp, Artificial
  probe
  misc_feature (1)..(25): SEQ ID NO: 5459; WAN024EY4_at; Start 1116; Stop 1140
tgatggagctccaagaccaggctga

SEQ ID NO: 187004 - DNA, 25 bp, Artificial
  probe
  misc_feature (1)..(25): SEQ ID NO: 5459; WAN024EY4_at; Start 875; Stop 899
ttttggaaaccgatgccaggtcgct

SEQ ID NO: 187005 - DNA, 25 bp, Artificial
  probe
  misc_feature (1)..(25): SEQ ID NO: 5459; WAN024EY4_at; Start 1309; Stop 1333
caatggccgcatggttccactgaca

SEQ ID NO: 187006 - DNA, 25 bp, Artificial
  probe
  misc_feature (1)..(25): SEQ ID NO: 5459; WAN024EY4_at; Start 130; Stop 154
cagtggtcaatatcgcaaatcaggc

SEQ ID NO: 187007 - DNA, 25 bp, Artificial
  probe
  misc_feature (1)..(25): SEQ ID NO: 5459; WAN024EY4_at; Start 1480; Stop 1504
tgtcaacaagggtcgtgagatgctg

SEQ ID NO: 187008 - DNA, 25 bp, Artificial
  probe
  misc_feature (1)..(25): SEQ ID NO: 5459; WAN024EY4_at; Start 1029; Stop 1053
ttgcggctcactgggcttataagaa

SEQ ID NO: 187009 - DNA, 25 bp, Artificial
  probe
  misc_feature (1)..(25): SEQ ID NO: 5459; WAN024EY4_at; Start 149; Stop 173
tcaggcgagccttatatcattcacc

SEQ ID NO: 187010 - DNA, 25 bp, Artificial
  probe
  misc_feature (1)..(25): SEQ ID NO: 1692; WAN024EY5_at; Start 165; Stop 189
aaaggcgccacacatacgaatccac

SEQ ID NO: 187011 - DNA, 25 bp, Artificial
  probe
  misc_feature (1)..(25): SEQ ID NO: 1692; WAN024EY5_at; Start 119; Stop 143
taggatatttgatggctgaggcgct

SEQ ID NO: 187012 - DNA, 25 bp, Artificial
  probe
  misc_feature (1)..(25): SEQ ID NO: 1692; WAN024EY5_at; Start 184; Stop 208
atccaccaaccaaagatacggttgg

SEQ ID NO: 187013 - DNA, 25 bp, Artificial
  probe
  misc_feature (1)..(25): SEQ ID NO: 1692; WAN024EY5_at; Start 220; Stop 244
ttttttgccataaagatgaactgtt

SEQ ID NO: 187014 - DNA, 25 bp, Artificial
  probe
  misc_feature (1)..(25): SEQ ID NO: 1692; WAN024EY5_at; Start 2; Stop 26
tgatacggaccttggccattttggc

SEQ ID NO: 187015 - DNA, 25 bp, Artificial
  probe
  misc_feature (1)..(25): SEQ ID NO: 1692; WAN024EY5_at; Start 14; Stop 38
tggccattttggcaatcagtgctgc

SEQ ID NO: 187016 - DNA, 25 bp, Artificial
  probe
  misc_feature (1)..(25): SEQ ID NO: 1692; WAN024EY5_at; Start 148; Stop 172
ttttcacggtcgatgggaaaggcgc

SEQ ID NO: 187017 - DNA, 25 bp, Artificial
  probe
  misc_feature (1)..(25): SEQ ID NO: 1692; WAN024EY5_at; Start 50; Stop 74
catcgtttgagtggcggctaccact

SEQ ID NO: 187018 - DNA, 25 bp, Artificial
  probe
  misc_feature (1)..(25): SEQ ID NO: 1692; WAN024EY5_at; Start 61; Stop 85
tggcggctaccacttggaaacatga

SEQ ID NO: 187019 - DNA, 25 bp, Artificial
  probe
  misc_feature (1)..(25): SEQ ID NO: 1692; WAN024EY5_at; Start 237; Stop 261
gaactgttttggcttggtcgcaaag

SEQ ID NO: 187020 - DNA, 25 bp, Artificial
  probe
  misc_feature (1)..(25): SEQ ID NO: 1692; WAN024EY5_at; Start 175; Stop 199
cacatacgaatccaccaaccaaaga

SEQ ID NO: 187021 - DNA, 25 bp, Artificial
  probe
  misc_feature (1)..(25): SEQ ID NO: 1692; WAN024EY5_at; Start 63; Stop 87
gcggctaccacttggaaacatgatg

SEQ ID NO: 187022 - DNA, 25 bp, Artificial
  probe
  misc_feature (1)..(25): SEQ ID NO: 1692; WAN024EY5_at; Start 70; Stop 94
ccacttggaaacatgatgagagagc

SEQ ID NO: 187023 - DNA, 25 bp, Artificial
  probe
  misc_feature (1)..(25): SEQ ID NO: 1692; WAN024EY5_at; Start 48; Stop 72
gacatcgtttgagtggcggctacca

SEQ ID NO: 187024 - DNA, 25 bp, Artificial
  probe
  misc_feature (1)..(25): SEQ ID NO: 1692; WAN024EY5_at; Start 45; Stop 69
cttgacatcgtttgagtggcggcta

SEQ ID NO: 187025 - DNA, 25 bp, Artificial
  probe
  misc_feature (1)..(25): SEQ ID NO: 1692; WAN024EY5_at; Start 241; Stop 265
tgttttggcttggtcgcaaaggcca

SEQ ID NO: 187026 - DNA, 25 bp, Artificial
  probe
  misc_feature (1)..(25): SEQ ID NO: 1692; WAN024EY5_at; Start 102; Stop 126
ttttttgagaacgttgataggatat

SEQ ID NO: 187027 - DNA, 25 bp, Artificial
  probe
  misc_feature (1)..(25): SEQ ID NO: 1692; WAN024EY5_at; Start 161; Stop 185
tgggaaaggcgccacacatacgaat

SEQ ID NO: 187028 - DNA, 25 bp, Artificial
  probe
  misc_feature (1)..(25): SEQ ID NO: 1692; WAN024EY5_at; Start 246; Stop 270
tggcttggtcgcaaaggccatataa

SEQ ID NO: 187029 - DNA, 25 bp, Artificial
  probe
  misc_feature (1)..(25): SEQ ID NO: 1692; WAN024EY5_at; Start 134; Stop 158
ctgaggcgctgggattttcacggtc

SEQ ID NO: 187030 - DNA, 25 bp, Artificial
  probe
  misc_feature (1)..(25): SEQ ID NO: 1692; WAN024EY5_at; Start 19; Stop 43
attttggcaatcagtgctgcgcccc

SEQ ID NO: 187031 - DNA, 25 bp, Artificial
  probe
  misc_feature (1)..(25): SEQ ID NO: 1692; WAN024EY5_at; Start 58; Stop 82
gagtggcggctaccacttggaaaca

SEQ ID NO: 187032 - DNA, 25 bp, Artificial
  probe
  misc_feature (1)..(25): SEQ ID NO: 1692; WAN024EY5_at; Start 89; Stop 113
gagagcggtcactttttttgagaac

SEQ ID NO: 187033 - DNA, 25 bp, Artificial
  probe
  misc_feature (1)..(25): SEQ ID NO: 1692; WAN024EY5_at; Start 181; Stop 205
cgaatccaccaaccaaagatacggt

SEQ ID NO: 187034 - DNA, 25 bp, Artificial
  probe
  misc_feature (1)..(25): SEQ ID NO: 1692; WAN024EY5_at; Start 74; Stop 98
ttggaaacatgatgagagagcggtc

SEQ ID NO: 187035 - DNA, 25 bp, Artificial
  probe
  misc_feature (1)..(25): SEQ ID NO: 1692; WAN024EY5_at; Start 66; Stop 90
gctaccacttggaaacatgatgaga

SEQ ID NO: 187036 - DNA, 25 bp, Artificial
  probe
  misc_feature (1)..(25): SEQ ID NO: 1692; WAN024EY5_at; Start 234; Stop 258
gatgaactgttttggcttggtcgca

SEQ ID NO: 187037 - DNA, 25 bp, Artificial
  probe
  misc_feature (1)..(25): SEQ ID NO: 1692; WAN024EY5_at; Start 137; Stop 161
aggcgctgggattttcacggtcgat

SEQ ID NO: 187038 - DNA, 25 bp, Artificial
  probe
  misc_feature (1)..(25): SEQ ID NO: 1692; WAN024EY5_at; Start 156; Stop 180
gtcgatgggaaaggcgccacacata

SEQ ID NO: 187039 - DNA, 25 bp, Artificial
  probe
  misc_feature (1)..(25): SEQ ID NO: 1692; WAN024EY5_at; Start 77; Stop 101
gaaacatgatgagagagcggtcact

SEQ ID NO: 187040 - DNA, 25 bp, Artificial
  probe
  misc_feature (1)..(25): SEQ ID NO: 1692; WAN024EY5_at; Start 110; Stop 134
gaacgttgataggatatttgatggc

SEQ ID NO: 187041 - DNA, 25 bp, Artificial
  probe
  misc_feature (1)..(25): SEQ ID NO: 1692; WAN024EY5_at; Start 42; Stop 66
ccccttgacatcgtttgagtggcgg

SEQ ID NO: 187042 - DNA, 25 bp, Artificial
  probe
  misc_feature (1)..(25): SEQ ID NO: 1692; WAN024EY5_at; Start 81; Stop 105
catgatgagagagcggtcacttttt

SEQ ID NO: 187043 - DNA, 25 bp, Artificial
  probe
  misc_feature (1)..(25): SEQ ID NO: 1692; WAN024EY5_at; Start 150; Stop 174
ttcacggtcgatgggaaaggcgcca

SEQ ID NO: 187044 - DNA, 25 bp, Artificial
  probe
  misc_feature (1)..(25): SEQ ID NO: 3104; WAN024EY6_at; Start 25; Stop 49
ttagttgtattgctcttatggtcca

SEQ ID NO: 187045 - DNA, 25 bp, Artificial
  probe
  misc_feature (1)..(25): SEQ ID NO: 3104; WAN024EY6_at; Start 660; Stop 684
tgctattatcctcgctatcctaacc

SEQ ID NO: 187046 - DNA, 25 bp, Artificial
  probe
  misc_feature (1)..(25): SEQ ID NO: 3104; WAN024EY6_at; Start 41; Stop 65
tatggtccatcaatggcaatgctca

SEQ ID NO: 187047 - DNA, 25 bp, Artificial
  probe
  misc_feature (1)..(25): SEQ ID NO: 3104; WAN024EY6_at; Start 559; Stop 583
caaacagaattccaacgtctggacg

SEQ ID NO: 187048 - DNA, 25 bp, Artificial
  probe
  misc_feature (1)..(25): SEQ ID NO: 3104; WAN024EY6_at; Start 312; Stop 336
aaaaagtgaccgctctctcatcatg

SEQ ID NO: 187049 - DNA, 25 bp, Artificial
  probe
  misc_feature (1)..(25): SEQ ID NO: 3104; WAN024EY6_at; Start 159; Stop 183
tgcgaccaagccaaaacagttcatc

SEQ ID NO: 187050 - DNA, 25 bp, Artificial
  probe
  misc_feature (1)..(25): SEQ ID NO: 3104; WAN024EY6_at; Start 525; Stop 549
tgatgaaggcattgaaacagtcgcc

SEQ ID NO: 187051 - DNA, 25 bp, Artificial
  probe
  misc_feature (1)..(25): SEQ ID NO: 3104; WAN024EY6_at; Start 345; Stop 369
tggtagccgccactcaaacgatgtc

SEQ ID NO: 187052 - DNA, 25 bp, Artificial
  probe
  misc_feature (1)..(25): SEQ ID NO: 3104; WAN024EY6_at; Start 127; Stop 151
cgtacctggtgggatcctgtttata

SEQ ID NO: 187053 - DNA, 25 bp, Artificial
  probe
  misc_feature (1)..(25): SEQ ID NO: 3104; WAN024EY6_at; Start 144; Stop 168
tgtttatatggcctttgcgaccaag

SEQ ID NO: 187054 - DNA, 25 bp, Artificial
  probe
  misc_feature (1)..(25): SEQ ID NO: 3104; WAN024EY6_at; Start 459; Stop 483
tagccgtgaacgtgtcgatatgaac

SEQ ID NO: 187055 - DNA, 25 bp, Artificial
  probe
  misc_feature (1)..(25): SEQ ID NO: 3104; WAN024EY6_at; Start 104; Stop 128
attatattttagttgcgcctcaccg

SEQ ID NO: 187056 - DNA, 25 bp, Artificial
  probe
  misc_feature (1)..(25): SEQ ID NO: 3104; WAN024EY6_at; Start 405; Stop 429
ggtccgtatcatgccggttacctac

SEQ ID NO: 187057 - DNA, 25 bp, Artificial
  probe
  misc_feature (1)..(25): SEQ ID NO: 3104; WAN024EY6_at; Start 586; Stop 610
gaaacgaaacaatggcacaatgata

SEQ ID NO: 187058 - DNA, 25 bp, Artificial
  probe
  misc_feature (1)..(25): SEQ ID NO: 3104; WAN024EY6_at; Start 274; Stop 298
agcgcctcagccatcaaatatccta

SEQ ID NO: 187059 - DNA, 25 bp, Artificial
  probe
  misc_feature (1)..(25): SEQ ID NO: 3104; WAN024EY6_at; Start 606; Stop 630
tgataaaaaaccaaatccactctgg

SEQ ID NO: 187060 - DNA, 25 bp, Artificial
  probe
  misc_feature (1)..(25): SEQ ID NO: 3104; WAN024EY6_at; Start 330; Stop 354
catcatgtttccaagtggtagccgc

SEQ ID NO: 187061 - DNA, 25 bp, Artificial
  probe
  misc_feature (1)..(25): SEQ ID NO: 3104; WAN024EY6_at; Start 427; Stop 451
tacaccggtcccatgactttgaagg

SEQ ID NO: 187062 - DNA, 25 bp, Artificial
  probe
  misc_feature (1)..(25): SEQ ID NO: 3104; WAN024EY6_at; Start 683; Stop 707
ccatcatctttagctttatcgcaag

SEQ ID NO: 187063 - DNA, 25 bp, Artificial
  probe
  misc_feature (1)..(25): SEQ ID NO: 3104; WAN024EY6_at; Start 55; Stop 79
ggcaatgctcactatcataatactg

SEQ ID NO: 187064 - DNA, 25 bp, Artificial
  probe
  misc_feature (1)..(25): SEQ ID NO: 3104; WAN024EY6_at; Start 574; Stop 598
cgtctggacgaagaaacgaaacaat

SEQ ID NO: 187065 - DNA, 25 bp, Artificial
  probe
  misc_feature (1)..(25): SEQ ID NO: 3104; WAN024EY6_at; Start 472; Stop 496
gtcgatatgaactttggaaatccaa

SEQ ID NO: 187066 - DNA, 25 bp, Artificial
  probe
  misc_feature (1)..(25): SEQ ID NO: 3104; WAN024EY6_at; Start 256; Stop 280
atcgaccgtgaaaatcccagcgcct

SEQ ID NO: 187067 - DNA, 25 bp, Artificial
  probe
  misc_feature (1)..(25): SEQ ID NO: 3104; WAN024EY6_at; Start 391; Stop 415
gccaaaatggccaaggtccgtatca

SEQ ID NO: 187068 - DNA, 25 bp, Artificial
  probe
  misc_feature (1)..(25): SEQ ID NO: 3104; WAN024EY6_at; Start 542; Stop 566
cagtcgccaatcgtattcaaacaga

SEQ ID NO: 187069 - DNA, 25 bp, Artificial
  probe
  misc_feature (1)..(25): SEQ ID NO: 3104; WAN024EY6_at; Start 443; Stop 467
ctttgaagggcttgattagccgtga

SEQ ID NO: 187070 - DNA, 25 bp, Artificial
  probe
  misc_feature (1)..(25): SEQ ID NO: 3104; WAN024EY6_at; Start 715; Stop 739
tggaacccagataagaaaagagaag

SEQ ID NO: 187071 - DNA, 25 bp, Artificial
  probe
  misc_feature (1)..(25): SEQ ID NO: 3104; WAN024EY6_at; Start 487; Stop 511
ggaaatccaatcgatatctcagata

SEQ ID NO: 187072 - DNA, 25 bp, Artificial
  probe
  misc_feature (1)..(25): SEQ ID NO: 3104; WAN024EY6_at; Start 623; Stop 647
cactctggtggtttatccgcatccc

SEQ ID NO: 187073 - DNA, 25 bp, Artificial
  probe
  misc_feature (1)..(25): SEQ ID NO: 3104; WAN024EY6_at; Start 288; Stop 312
caaatatcctatcaacgttctcaaa

SEQ ID NO: 187074 - DNA, 25 bp, Artificial
  probe
  misc_feature (1)..(25): SEQ ID NO: 3104; WAN024EY6_at; Start 172; Stop 196
aaacagttcatctttatggcaaaaa

SEQ ID NO: 187075 - DNA, 25 bp, Artificial
  probe
  misc_feature (1)..(25): SEQ ID NO: 3104; WAN024EY6_at; Start 699; Stop 723
tatcgcaagcttcatctggaaccca

SEQ ID NO: 187076 - DNA, 25 bp, Artificial
  probe
  misc_feature (1)..(25): SEQ ID NO: 3104; WAN024EY6_at; Start 113; Stop 137
tagttgcgcctcaccgtacctggtg

SEQ ID NO: 187077 - DNA, 25 bp, Artificial
  probe
  misc_feature (1)..(25): SEQ ID NO: 3104; WAN024EY6_at; Start 237; Stop 261
tatgtgtggcgcctttcccatcgac

SEQ ID NO: 187078 - DNA, 25 bp, Artificial
  probe
  misc_feature (1)..(25): SEQ ID NO: 7236; WAN024EY7_at; Start 201; Stop 225
tcatgacaccataaacaggcaacgt

SEQ ID NO: 187079 - DNA, 25 bp, Artificial
  probe
  misc_feature (1)..(25): SEQ ID NO: 7236; WAN024EY7_at; Start 151; Stop 175
tctagcttgatagcgactagtcagg

SEQ ID NO: 187080 - DNA, 25 bp, Artificial
  probe
  misc_feature (1)..(25): SEQ ID NO: 7236; WAN024EY7_at; Start 204; Stop 228
tgacaccataaacaggcaacgtttg

SEQ ID NO: 187081 - DNA, 25 bp, Artificial
  probe
  misc_feature (1)..(25): SEQ ID NO: 7236; WAN024EY7_at; Start 196; Stop 220
caacatcatgacaccataaacaggc

SEQ ID NO: 187082 - DNA, 25 bp, Artificial
  probe
  misc_feature (1)..(25): SEQ ID NO: 7236; WAN024EY7_at; Start 3; Stop 27
gacacaaaggaagctaccaattcta

SEQ ID NO: 187083 - DNA, 25 bp, Artificial
  probe
  misc_feature (1)..(25): SEQ ID NO: 7236; WAN024EY7_at; Start 112; Stop 136
aaaaaactgcaatccacagattgca

SEQ ID NO: 187084 - DNA, 25 bp, Artificial
  probe
  misc_feature (1)..(25): SEQ ID NO: 7236; WAN024EY7_at; Start 219; Stop 243
gcaacgtttgttctgtcaaggttga

SEQ ID NO: 187085 - DNA, 25 bp, Artificial
  probe
  misc_feature (1)..(25): SEQ ID NO: 7236; WAN024EY7_at; Start 172; Stop 196
caggatgaaaatcactgtaaagacc

SEQ ID NO: 187086 - DNA, 25 bp, Artificial
  probe
  misc_feature (1)..(25): SEQ ID NO: 7236; WAN024EY7_at; Start 64; Stop 88
tctattacctcttattataccacat

SEQ ID NO: 187087 - DNA, 25 bp, Artificial
  probe
  misc_feature (1)..(25): SEQ ID NO: 7236; WAN024EY7_at; Start 178; Stop 202
gaaaatcactgtaaagaccaacatc

SEQ ID NO: 187088 - DNA, 25 bp, Artificial
  probe
  misc_feature (1)..(25): SEQ ID NO: 7236; WAN024EY7_at; Start 164; Stop 188
cgactagtcaggatgaaaatcactg

SEQ ID NO: 187089 - DNA, 25 bp, Artificial
  probe
  misc_feature (1)..(25): SEQ ID NO: 7236; WAN024EY7_at; Start 216; Stop 240
caggcaacgtttgttctgtcaaggt

SEQ ID NO: 187090 - DNA, 25 bp, Artificial
  probe
  misc_feature (1)..(25): SEQ ID NO: 7236; WAN024EY7_at; Start 125; Stop 149
ccacagattgcagtctttctttatt

SEQ ID NO: 187091 - DNA, 25 bp, Artificial
  probe
  misc_feature (1)..(25): SEQ ID NO: 7236; WAN024EY7_at; Start 7; Stop 31
caaaggaagctaccaattctaatct

SEQ ID NO: 187092 - DNA, 25 bp, Artificial
  probe
  misc_feature (1)..(25): SEQ ID NO: 7236; WAN024EY7_at; Start 83; Stop 107
ccacatttcggctggcaatcttgta

SEQ ID NO: 187093 - DNA, 25 bp, Artificial
  probe
  misc_feature (1)..(25): SEQ ID NO: 7236; WAN024EY7_at; Start 184; Stop 208
cactgtaaagaccaacatcatgaca

SEQ ID NO: 187094 - DNA, 25 bp, Artificial
  probe
  misc_feature (1)..(25): SEQ ID NO: 7236; WAN024EY7_at; Start 86; Stop 110
catttcggctggcaatcttgtacct

SEQ ID NO: 187095 - DNA, 25 bp, Artificial
  probe
  misc_feature (1)..(25): SEQ ID NO: 7236; WAN024EY7_at; Start 12; Stop 36
gaagctaccaattctaatctctttg

SEQ ID NO: 187096 - DNA, 25 bp, Artificial
  probe
  misc_feature (1)..(25): SEQ ID NO: 7236; WAN024EY7_at; Start 92; Stop 116
ggctggcaatcttgtacctaaaaaa

SEQ ID NO: 187097 - DNA, 25 bp, Artificial
  probe
  misc_feature (1)..(25): SEQ ID NO: 7236; WAN024EY7_at; Start 79; Stop 103
tataccacatttcggctggcaatct

SEQ ID NO: 187098 - DNA, 25 bp, Artificial
  probe
  misc_feature (1)..(25): SEQ ID NO: 7236; WAN024EY7_at; Start 26; Stop 50
taatctctttgaaatcatcttctct

SEQ ID NO: 187099 - DNA, 25 bp, Artificial
  probe
  misc_feature (1)..(25): SEQ ID NO: 7236; WAN024EY7_at; Start 175; Stop 199
gatgaaaatcactgtaaagaccaac

SEQ ID NO: 187100 - DNA, 25 bp, Artificial
  probe
  misc_feature (1)..(25): SEQ ID NO: 7236; WAN024EY7_at; Start 36; Stop 60
gaaatcatcttctctcactttccaa

SEQ ID NO: 187101 - DNA, 25 bp, Artificial
  probe
  misc_feature (1)..(25): SEQ ID NO: 7236; WAN024EY7_at; Start 51; Stop 75
cactttccaaaactctattacctct

SEQ ID NO: 187102 - DNA, 25 bp, Artificial
  probe
  misc_feature (1)..(25): SEQ ID NO: 7236; WAN024EY7_at; Start 104; Stop 128
tgtacctaaaaaaactgcaatccac

SEQ ID NO: 187103 - DNA, 25 bp, Artificial
  probe
  misc_feature (1)..(25): SEQ ID NO: 7236; WAN024EY7_at; Start 143; Stop 167
ctttattttctagcttgatagcgac

SEQ ID NO: 187104 - DNA, 25 bp, Artificial
  probe
  misc_feature (1)..(25): SEQ ID NO: 7236; WAN024EY7_at; Start 90; Stop 114
tcggctggcaatcttgtacctaaaa

SEQ ID NO: 187105 - DNA, 25 bp, Artificial
  probe
  misc_feature (1)..(25): SEQ ID NO: 7236; WAN024EY7_at; Start 1; Stop 25
gtgacacaaaggaagctaccaattc

SEQ ID NO: 187106 - DNA, 25 bp, Artificial
  probe
  misc_feature (1)..(25): SEQ ID NO: 7236; WAN024EY7_at; Start 188; Stop 212
gtaaagaccaacatcatgacaccat

SEQ ID NO: 187107 - DNA, 25 bp, Artificial
  probe
  misc_feature (1)..(25): SEQ ID NO: 7236; WAN024EY7_at; Start 15; Stop 39
gctaccaattctaatctctttgaaa

SEQ ID NO: 187108 - DNA, 25 bp, Artificial
  probe
  misc_feature (1)..(25): SEQ ID NO: 7236; WAN024EY7_at; Start 121; Stop 145
caatccacagattgcagtctttctt

SEQ ID NO: 187109 - DNA, 25 bp, Artificial
  probe
  misc_feature (1)..(25): SEQ ID NO: 7236; WAN024EY7_at; Start 209; Stop 233
ccataaacaggcaacgtttgttctg

SEQ ID NO: 187110 - DNA, 25 bp, Artificial
  probe
  misc_feature (1)..(25): SEQ ID NO: 7236; WAN024EY7_at; Start 161; Stop 185
tagcgactagtcaggatgaaaatca

SEQ ID NO: 187111 - DNA, 25 bp, Artificial
  probe
  misc_feature (1)..(25): SEQ ID NO: 7236; WAN024EY7_at; Start 155; Stop 179
gcttgatagcgactagtcaggatga

SEQ ID NO: 187112 - DNA, 25 bp, Artificial
  probe
  misc_feature (1)..(25): SEQ ID NO: 2730; WAN024EY8_at; Start 22; Stop 46
gtcatgagattgagcttgtccacca

SEQ ID NO: 187113 - DNA, 25 bp, Artificial
  probe
  misc_feature (1)..(25): SEQ ID NO: 2730; WAN024EY8_at; Start 247; Stop 271
aaaccctcagcctgtctttccttga

SEQ ID NO: 187114 - DNA, 25 bp, Artificial
  probe
  misc_feature (1)..(25): SEQ ID NO: 2730; WAN024EY8_at; Start 57; Stop 81
tcgtagctcggtcacaatcccagaa

SEQ ID NO: 187115 - DNA, 25 bp, Artificial
  probe
  misc_feature (1)..(25): SEQ ID NO: 2730; WAN024EY8_at; Start 94; Stop 118
cagataacagcaaagaagaccagat

SEQ ID NO: 187116 - DNA, 25 bp, Artificial
  probe
  misc_feature (1)..(25): SEQ ID NO: 2730; WAN024EY8_at; Start 32; Stop 56
tgagcttgtccaccatgtgtttggc

SEQ ID NO: 187117 - DNA, 25 bp, Artificial
  probe
  misc_feature (1)..(25): SEQ ID NO: 2730; WAN024EY8_at; Start 186; Stop 210
gacatttcgtttaacgatttgccaa

SEQ ID NO: 187118 - DNA, 25 bp, Artificial
  probe
  misc_feature (1)..(25): SEQ ID NO: 2730; WAN024EY8_at; Start 49; Stop 73
tgtttggctcgtagctcggtcacaa

SEQ ID NO: 187119 - DNA, 25 bp, Artificial
  probe
  misc_feature (1)..(25): SEQ ID NO: 2730; WAN024EY8_at; Start 45; Stop 69
catgtgtttggctcgtagctcggtc

SEQ ID NO: 187120 - DNA, 25 bp, Artificial
  probe
  misc_feature (1)..(25): SEQ ID NO: 2730; WAN024EY8_at; Start 119; Stop 143
tgctccaagcctgcacaaaggcaag

SEQ ID NO: 187121 - DNA, 25 bp, Artificial
  probe
  misc_feature (1)..(25): SEQ ID NO: 2730; WAN024EY8_at; Start 223; Stop 247
gctgatgcggtaaagtcattgacca

SEQ ID NO: 187122 - DNA, 25 bp, Artificial
  probe
  misc_feature (1)..(25): SEQ ID NO: 2730; WAN024EY8_at; Start 60; Stop 84
tagctcggtcacaatcccagaaaaa

SEQ ID NO: 187123 - DNA, 25 bp, Artificial
  probe
  misc_feature (1)..(25): SEQ ID NO: 2730; WAN024EY8_at; Start 115; Stop 139
agattgctccaagcctgcacaaagg

SEQ ID NO: 187124 - DNA, 25 bp, Artificial
  probe
  misc_feature (1)..(25): SEQ ID NO: 2730; WAN024EY8_at; Start 17; Stop 41
ccttggtcatgagattgagcttgtc

SEQ ID NO: 187125 - DNA, 25 bp, Artificial
  probe
  misc_feature (1)..(25): SEQ ID NO: 2730; WAN024EY8_at; Start 27; Stop 51
gagattgagcttgtccaccatgtgt

SEQ ID NO: 187126 - DNA, 25 bp, Artificial
  probe
  misc_feature (1)..(25): SEQ ID NO: 2730; WAN024EY8_at; Start 71; Stop 95
caatcccagaaaaagcgttaaagca

SEQ ID NO: 187127 - DNA, 25 bp, Artificial
  probe
  misc_feature (1)..(25): SEQ ID NO: 2730; WAN024EY8_at; Start 75; Stop 99
cccagaaaaagcgttaaagcagata

SEQ ID NO: 187128 - DNA, 25 bp, Artificial
  probe
  misc_feature (1)..(25): SEQ ID NO: 2730; WAN024EY8_at; Start 146; Stop 170
ccaaagcaatggcaaagttcaaagc

SEQ ID NO: 187129 - DNA, 25 bp, Artificial
  probe
  misc_feature (1)..(25): SEQ ID NO: 2730; WAN024EY8_at; Start 108; Stop 132
gaagaccagattgctccaagcctgc

SEQ ID NO: 187130 - DNA, 25 bp, Artificial
  probe
  misc_feature (1)..(25): SEQ ID NO: 2730; WAN024EY8_at; Start 9; Stop 33
gaccttttccttggtcatgagattg

SEQ ID NO: 187131 - DNA, 25 bp, Artificial
  probe
  misc_feature (1)..(25): SEQ ID NO: 2730; WAN024EY8_at; Start 216; Stop 240
ggtactggctgatgcggtaaagtca

SEQ ID NO: 187132 - DNA, 25 bp, Artificial
  probe
  misc_feature (1)..(25): SEQ ID NO: 2730; WAN024EY8_at; Start 65; Stop 89
cggtcacaatcccagaaaaagcgtt

SEQ ID NO: 187133 - DNA, 25 bp, Artificial
  probe
  misc_feature (1)..(25): SEQ ID NO: 2730; WAN024EY8_at; Start 85; Stop 109
gcgttaaagcagataacagcaaaga

SEQ ID NO: 187134 - DNA, 25 bp, Artificial
  probe
  misc_feature (1)..(25): SEQ ID NO: 2730; WAN024EY8_at; Start 259; Stop 283
tgtctttccttgacttctctttggg

SEQ ID NO: 187135 - DNA, 25 bp, Artificial
  probe
  misc_feature (1)..(25): SEQ ID NO: 2730; WAN024EY8_at; Start 289; Stop 313
cccataatcttatttttatccataa

SEQ ID NO: 187136 - DNA, 25 bp, Artificial
  probe
  misc_feature (1)..(25): SEQ ID NO: 2730; WAN024EY8_at; Start 42; Stop 66
caccatgtgtttggctcgtagctcg

SEQ ID NO: 187137 - DNA, 25 bp, Artificial
  probe
  misc_feature (1)..(25): SEQ ID NO: 2730; WAN024EY8_at; Start 268; Stop 292
ttgacttctctttgggttaatccca

SEQ ID NO: 187138 - DNA, 25 bp, Artificial
  probe
  misc_feature (1)..(25): SEQ ID NO: 2730; WAN024EY8_at; Start 274; Stop 298
tctctttgggttaatcccataatct

SEQ ID NO: 187139 - DNA, 25 bp, Artificial
  probe
  misc_feature (1)..(25): SEQ ID NO: 2730; WAN024EY8_at; Start 199; Stop 223
acgatttgccaagtgctggtactgg

SEQ ID NO: 187140 - DNA, 25 bp, Artificial
  probe
  misc_feature (1)..(25): SEQ ID NO: 2730; WAN024EY8_at; Start 231; Stop 255
ggtaaagtcattgaccaaaccctca

SEQ ID NO: 187141 - DNA, 25 bp, Artificial
  probe
  misc_feature (1)..(25): SEQ ID NO: 2730; WAN024EY8_at; Start 152; Stop 176
caatggcaaagttcaaagcgttaaa

SEQ ID NO: 187142 - DNA, 25 bp, Artificial
  probe
  misc_feature (1)..(25): SEQ ID NO: 2730; WAN024EY8_at; Start 104; Stop 128
caaagaagaccagattgctccaagc

SEQ ID NO: 187143 - DNA, 25 bp, Artificial
  probe
  misc_feature (1)..(25): SEQ ID NO: 2730; WAN024EY8_at; Start 193; Stop 217
cgtttaacgatttgccaagtgctgg

SEQ ID NO: 187144 - DNA, 25 bp, Artificial
  probe
  misc_feature (1)..(25): SEQ ID NO: 2730; WAN024EY8_at; Start 207; Stop 231
ccaagtgctggtactggctgatgcg

SEQ ID NO: 187145 - DNA, 25 bp, Artificial
  probe
  misc_feature (1)..(25): SEQ ID NO: 2730; WAN024EY8_at; Start 237; Stop 261
gtcattgaccaaaccctcagcctgt

SEQ ID NO: 187146 - DNA, 25 bp, Artificial
  probe
  misc_feature (1)..(25): SEQ ID NO: 5564; WAN024EY9_at; Start 2; Stop 26
tgggcagttggattcttatcctcac

SEQ ID NO: 187147 - DNA, 25 bp, Artificial
  probe
  misc_feature (1)..(25): SEQ ID NO: 5564; WAN024EY9_at; Start 249; Stop 273
tcaaaagggcaattcccttaggcaa

SEQ ID NO: 187148 - DNA, 25 bp, Artificial
  probe
  misc_feature (1)..(25): SEQ ID NO: 5564; WAN024EY9_at; Start 11; Stop 35
ggattcttatcctcactatgggcca

SEQ ID NO: 187149 - DNA, 25 bp, Artificial
  probe
  misc_feature (1)..(25): SEQ ID NO: 5564; WAN024EY9_at; Start 147; Stop 171
agagcatatccacgcgcgccaaggt

SEQ ID NO: 187150 - DNA, 25 bp, Artificial
  probe
  misc_feature (1)..(25): SEQ ID NO: 5564; WAN024EY9_at; Start 357; Stop 381
ccagaccaaagggaatgataatctt

SEQ ID NO: 187151 - DNA, 25 bp, Artificial
  probe
  misc_feature (1)..(25): SEQ ID NO: 5564; WAN024EY9_at; Start 293; Stop 317
gacgagtttacaacggatgacttga

SEQ ID NO: 187152 - DNA, 25 bp, Artificial
  probe
  misc_feature (1)..(25): SEQ ID NO: 5564; WAN024EY9_at; Start 405; Stop 429
ccagcgatttcatgatacgggagtt

SEQ ID NO: 187153 - DNA, 25 bp, Artificial
  probe
  misc_feature (1)..(25): SEQ ID NO: 5564; WAN024EY9_at; Start 104; Stop 128
acctgcatctttccttgggtgatgg

SEQ ID NO: 187154 - DNA, 25 bp, Artificial
  probe
  misc_feature (1)..(25): SEQ ID NO: 5564; WAN024EY9_at; Start 162; Stop 186
gcgccaaggtctcaacagagtacat

SEQ ID NO: 187155 - DNA, 25 bp, Artificial
  probe
  misc_feature (1)..(25): SEQ ID NO: 5564; WAN024EY9_at; Start 450; Stop 474
cctcaagcatgagtttggcagcata

SEQ ID NO: 187156 - DNA, 25 bp, Artificial
  probe
  misc_feature (1)..(25): SEQ ID NO: 5564; WAN024EY9_at; Start 395; Stop 419
gccaacttgtccagcgatttcatga

SEQ ID NO: 187157 - DNA, 25 bp, Artificial
  probe
  misc_feature (1)..(25): SEQ ID NO: 5564; WAN024EY9_at; Start 46; Stop 70
caagatgctggcaatagcctcttca

SEQ ID NO: 187158 - DNA, 25 bp, Artificial
  probe
  misc_feature (1)..(25): SEQ ID NO: 5564; WAN024EY9_at; Start 34; Stop 58
catgtagctagtcaagatgctggca

SEQ ID NO: 187159 - DNA, 25 bp, Artificial
  probe
  misc_feature (1)..(25): SEQ ID NO: 5564; WAN024EY9_at; Start 274; Stop 298
cattcccaaaagagctgtcgacgag

SEQ ID NO: 187160 - DNA, 25 bp, Artificial
  probe
  misc_feature (1)..(25): SEQ ID NO: 5564; WAN024EY9_at; Start 138; Stop 162
tgtccagacagagcatatccacgcg

SEQ ID NO: 187161 - DNA, 25 bp, Artificial
  probe
  misc_feature (1)..(25): SEQ ID NO: 5564; WAN024EY9_at; Start 417; Stop 441
tgatacgggagttgatgggtttaac

SEQ ID NO: 187162 - DNA, 25 bp, Artificial
  probe
  misc_feature (1)..(25): SEQ ID NO: 5564; WAN024EY9_at; Start 386; Stop 410
gtaaaaccagccaacttgtccagcg

SEQ ID NO: 187163 - DNA, 25 bp, Artificial
  probe
  misc_feature (1)..(25): SEQ ID NO: 5564; WAN024EY9_at; Start 24; Stop 48
cactatgggccatgtagctagtcaa

SEQ ID NO: 187164 - DNA, 25 bp, Artificial
  probe
  misc_feature (1)..(25): SEQ ID NO: 5564; WAN024EY9_at; Start 206; Stop 230
ttcaagcccaacttaatcactgcag

SEQ ID NO: 187165 - DNA, 25 bp, Artificial
  probe
  misc_feature (1)..(25): SEQ ID NO: 5564; WAN024EY9_at; Start 131; Stop 155
cccgtcttgtccagacagagcatat

SEQ ID NO: 187166 - DNA, 25 bp, Artificial
  probe
  misc_feature (1)..(25): SEQ ID NO: 5564; WAN024EY9_at; Start 285; Stop 309
gagctgtcgacgagtttacaacgga

SEQ ID NO: 187167 - DNA, 25 bp, Artificial
  probe
  misc_feature (1)..(25): SEQ ID NO: 5564; WAN024EY9_at; Start 434; Stop 458
ggtttaacggtcttagcctcaagca

SEQ ID NO: 187168 - DNA, 25 bp, Artificial
  probe
  misc_feature (1)..(25): SEQ ID NO: 5564; WAN024EY9_at; Start 192; Stop 216
gcaccaagacctttttcaagcccaa

SEQ ID NO: 187169 - DNA, 25 bp, Artificial
  probe
  misc_feature (1)..(25): SEQ ID NO: 5564; WAN024EY9_at; Start 333; Stop 357
aaagcaaggcttccagcaagagagc

SEQ ID NO: 187170 - DNA, 25 bp, Artificial
  probe
  misc_feature (1)..(25): SEQ ID NO: 5564; WAN024EY9_at; Start 219; Stop 243
taatcactgcagtcaagagcgaagt

SEQ ID NO: 187171 - DNA, 25 bp, Artificial
  probe
  misc_feature (1)..(25): SEQ ID NO: 5564; WAN024EY9_at; Start 90; Stop 114
gaagaacagcctccacctgcatctt

SEQ ID NO: 187172 - DNA, 25 bp, Artificial
  probe
  misc_feature (1)..(25): SEQ ID NO: 5564; WAN024EY9_at; Start 227; Stop 251
gcagtcaagagcgaagtaatggtca

SEQ ID NO: 187173 - DNA, 25 bp, Artificial
  probe
  misc_feature (1)..(25): SEQ ID NO: 5564; WAN024EY9_at; Start 348; Stop 372
gcaagagagccagaccaaagggaat

SEQ ID NO: 187174 - DNA, 25 bp, Artificial
  probe
  misc_feature (1)..(25): SEQ ID NO: 5564; WAN024EY9_at; Start 303; Stop 327
caacggatgacttgagaggcaggcc

SEQ ID NO: 187175 - DNA, 25 bp, Artificial
  probe
  misc_feature (1)..(25): SEQ ID NO: 5564; WAN024EY9_at; Start 177; Stop 201
cagagtacatctcctgcaccaagac

SEQ ID NO: 187176 - DNA, 25 bp, Artificial
  probe
  misc_feature (1)..(25): SEQ ID NO: 5564; WAN024EY9_at; Start 266; Stop 290
ttaggcaacattcccaaaagagctg

SEQ ID NO: 187177 - DNA, 25 bp, Artificial
  probe
  misc_feature (1)..(25): SEQ ID NO: 5564; WAN024EY9_at; Start 237; Stop 261
gcgaagtaatggtcaaaagggcaat

SEQ ID NO: 187178 - DNA, 25 bp, Artificial
  probe
  misc_feature (1)..(25): SEQ ID NO: 5564; WAN024EY9_at; Start 373; Stop 397
gataatcttcccagtaaaaccagcc

SEQ ID NO: 187179 - DNA, 25 bp, Artificial
  probe
  misc_feature (1)..(25): SEQ ID NO: 5564; WAN024EY9_at; Start 318; Stop 342
gaggcaggccttttaaaagcaaggc

SEQ ID NO: 187180 - DNA, 25 bp, Artificial
  probe
  misc_feature (1)..(25): SEQ ID NO: 2307; WAN024EYA_at; Start 295; Stop 319
gaaaaggtcaaaaccatccgtgatg

SEQ ID NO: 187181 - DNA, 25 bp, Artificial
  probe
  misc_feature (1)..(25): SEQ ID NO: 2307; WAN024EYA_at; Start 1422; Stop 1446
gaaggctggttttgcggactatcac

SEQ ID NO: 187182 - DNA, 25 bp, Artificial
  probe
  misc_feature (1)..(25): SEQ ID NO: 2307; WAN024EYA_at; Start 361; Stop 385
gatgtcattcgtttgtctgcaggag

SEQ ID NO: 187183 - DNA, 25 bp, Artificial
  probe
  misc_feature (1)..(25): SEQ ID NO: 2307; WAN024EYA_at; Start 1735; Stop 1759
ggtcgtcgcgtggtcaataacattg

SEQ ID NO: 187184 - DNA, 25 bp, Artificial
  probe
  misc_feature (1)..(25): SEQ ID NO: 2307; WAN024EYA_at; Start 177; Stop 201
tgtgcaggcttggagcaatctggtc

SEQ ID NO: 187185 - DNA, 25 bp, Artificial
  probe
  misc_feature (1)..(25): SEQ ID NO: 2307; WAN024EYA_at; Start 1397; Stop 1421
cagttacggtgtccagcattgccca

SEQ ID NO: 187186 - DNA, 25 bp, Artificial
  probe
  misc_feature (1)..(25): SEQ ID NO: 2307; WAN024EYA_at; Start 1602; Stop 1626
taatgatatcttggcccttcgtgag

SEQ ID NO: 187187 - DNA, 25 bp, Artificial
  probe
  misc_feature (1)..(25): SEQ ID NO: 2307; WAN024EYA_at; Start 499; Stop 523
ggaagtttcctagccagtgggtcag

SEQ ID NO: 187188 - DNA, 25 bp, Artificial
  probe
  misc_feature (1)..(25): SEQ ID NO: 2307; WAN024EYA_at; Start 1290; Stop 1314
tctagccttgctggaaatcttggac

SEQ ID NO: 187189 - DNA, 25 bp, Artificial
  probe
  misc_feature (1)..(25): SEQ ID NO: 2307; WAN024EYA_at; Start 1517; Stop 1541
gacgtgtttcccctcatcaaaagaa

SEQ ID NO: 187190 - DNA, 25 bp, Artificial
  probe
  misc_feature (1)..(25): SEQ ID NO: 2307; WAN024EYA_at; Start 733; Stop 757
aactcgtcgacagctcttttgggaa

SEQ ID NO: 187191 - DNA, 25 bp, Artificial
  probe
  misc_feature (1)..(25): SEQ ID NO: 2307; WAN024EYA_at; Start 850; Stop 874
tactctgttgagaccttggcgcgcg

SEQ ID NO: 187192 - DNA, 25 bp, Artificial
  probe
  misc_feature (1)..(25): SEQ ID NO: 2307; WAN024EYA_at; Start 755; Stop 779
gaatgttgcctaagggaattgccct

SEQ ID NO: 187193 - DNA, 25 bp, Artificial
  probe
  misc_feature (1)..(25): SEQ ID NO: 2307; WAN024EYA_at; Start 1333; Stop 1357
gcagagacgctggactatctccgtt

SEQ ID NO: 187194 - DNA, 25 bp, Artificial
  probe
  misc_feature (1)..(25): SEQ ID NO: 2307; WAN024EYA_at; Start 559; Stop 583
tatgctgccaaactcatgcttgagg

SEQ ID NO: 187195 - DNA, 25 bp, Artificial
  probe
  misc_feature (1)..(25): SEQ ID NO: 2307; WAN024EYA_at; Start 615; Stop 639
catgaaatcgctggacaagttggct

SEQ ID NO: 187196 - DNA, 25 bp, Artificial
  probe
  misc_feature (1)..(25): SEQ ID NO: 2307; WAN024EYA_at; Start 232; Stop 256
tctgggattgtgaccgagctacgag

SEQ ID NO: 187197 - DNA, 25 bp, Artificial
  probe
  misc_feature (1)..(25): SEQ ID NO: 2307; WAN024EYA_at; Start 1199; Stop 1223
ccttggagagaggatcacgtgtctt

SEQ ID NO: 187198 - DNA, 25 bp, Artificial
  probe
  misc_feature (1)..(25): SEQ ID NO: 2307; WAN024EYA_at; Start 1011; Stop 1035
ggataagaatccaactgcccaagcc

SEQ ID NO: 187199 - DNA, 25 bp, Artificial
  probe
  misc_feature (1)..(25): SEQ ID NO: 2307; WAN024EYA_at; Start 1469; Stop 1493
tcaccgatgaggaattgatggccat

SEQ ID NO: 187200 - DNA, 25 bp, Artificial
  probe
  misc_feature (1)..(25): SEQ ID NO: 2307; WAN024EYA_at; Start 1826; Stop 1850
ccagtgctttactaggtcggtcaga

SEQ ID NO: 187201 - DNA, 25 bp, Artificial
  probe
  misc_feature (1)..(25): SEQ ID NO: 2307; WAN024EYA_at; Start 1491; Stop 1515
catggcggaggagacagctattttc

SEQ ID NO: 187202 - DNA, 25 bp, Artificial
  probe
  misc_feature (1)..(25): SEQ ID NO: 2307; WAN024EYA_at; Start 871; Stop 895
cgcgtggatatgctctgtctggaca

SEQ ID NO: 187203 - DNA, 25 bp, Artificial
  probe
  misc_feature (1)..(25): SEQ ID NO: 2307; WAN024EYA_at; Start 718; Stop 742
aagtcatccgttgtaaactcgtcga

SEQ ID NO: 187204 - DNA, 25 bp, Artificial
  probe
  misc_feature (1)..(25): SEQ ID NO: 2307; WAN024EYA_at; Start 1720; Stop 1744
gagattctcttcgagggtcgtcgcg

SEQ ID NO: 187205 - DNA, 25 bp, Artificial
  probe
  misc_feature (1)..(25): SEQ ID NO: 2307; WAN024EYA_at; Start 262; Stop 286
cacatggtggacaagctcaatctca

SEQ ID NO: 187206 - DNA, 25 bp, Artificial
  probe
  misc_feature (1)..(25): SEQ ID NO: 2307; WAN024EYA_at; Start 247; Stop 271
gagctacgagccaaacacatggtgg

SEQ ID NO: 187207 - DNA, 25 bp, Artificial
  probe
  misc_feature (1)..(25): SEQ ID NO: 2307; WAN024EYA_at; Start 575; Stop 599
tgcttgaggctaagaccgttaaacc

SEQ ID NO: 187208 - DNA, 25 bp, Artificial
  probe
  misc_feature (1)..(25): SEQ ID NO: 2307; WAN024EYA_at; Start 1896; Stop 1920
tgaccagtttgtggaaggtttccca

SEQ ID NO: 187209 - DNA, 25 bp, Artificial
  probe
  misc_feature (1)..(25): SEQ ID NO: 2307; WAN024EYA_at; Start 2120; Stop 2144
tatccgtatttagagcctgcatgcc

SEQ ID NO: 187210 - DNA, 25 bp, Artificial
  probe
  misc_feature (1)..(25): SEQ ID NO: 2307; WAN024EYA_at; Start 1220; Stop 1244
tcttggtcttagctctcagtcagga

SEQ ID NO: 187211 - DNA, 25 bp, Artificial
  probe
  misc_feature (1)..(25): SEQ ID NO: 2307; WAN024EYA_at; Start 983; Stop 1007
tcttgactagctacatggcccatag

SEQ ID NO: 187212 - DNA, 25 bp, Artificial
  probe
  misc_feature (1)..(25): SEQ ID NO: 2307; WAN024EYA_at; Start 65; Stop 89
tggtcaatgactttaccgcatcagc

SEQ ID NO: 187213 - DNA, 25 bp, Artificial
  probe
  misc_feature (1)..(25): SEQ ID NO: 2307; WAN024EYA_at; Start 312; Stop 336
ccgtgatggtcaggaagttgctctt

SEQ ID NO: 187214 - DNA, 25 bp, Artificial
  probe
  misc_feature (1)..(25): SEQ ID NO: 1863; WAN024EYB_at; Start 383; Stop 407
tctggctacaggatcatggattcca

SEQ ID NO: 187215 - DNA, 25 bp, Artificial
  probe
  misc_feature (1)..(25): SEQ ID NO: 1863; WAN024EYB_at; Start 651; Stop 675
caaggaggtgctccatgttagcaag

SEQ ID NO: 187216 - DNA, 25 bp, Artificial
  probe
  misc_feature (1)..(25): SEQ ID NO: 1863; WAN024EYB_at; Start 526; Stop 550
gaagtcagtccagtatttgtccaaa

SEQ ID NO: 187217 - DNA, 25 bp, Artificial
  probe
  misc_feature (1)..(25): SEQ ID NO: 1863; WAN024EYB_at; Start 492; Stop 516
cagtgatgttcgctttggtcccttc

SEQ ID NO: 187218 - DNA, 25 bp, Artificial
  probe
  misc_feature (1)..(25): SEQ ID NO: 1863; WAN024EYB_at; Start 143; Stop 167
tggaaggtccctatcagtctgcggt

SEQ ID NO: 187219 - DNA, 25 bp, Artificial
  probe
  misc_feature (1)..(25): SEQ ID NO: 1863; WAN024EYB_at; Start 266; Stop 290
ccattgctggcatgggtggtcgttt

SEQ ID NO: 187220 - DNA, 25 bp, Artificial
  probe
  misc_feature (1)..(25): SEQ ID NO: 1863; WAN024EYB_at; Start 222; Stop 246
tggcttggcagcttttgaagagact

SEQ ID NO: 187221 - DNA, 25 bp, Artificial
  probe
  misc_feature (1)..(25): SEQ ID NO: 1863; WAN024EYB_at; Start 475; Stop 499
caaatgaagctatcagccagtgatg

SEQ ID NO: 187222 - DNA, 25 bp, Artificial
  probe
  misc_feature (1)..(25): SEQ ID NO: 1863; WAN024EYB_at; Start 553; Stop 577
tggcaaaaagaagctgagaagctag

SEQ ID NO: 187223 - DNA, 25 bp, Artificial
  probe
  misc_feature (1)..(25): SEQ ID NO: 1863; WAN024EYB_at; Start 209; Stop 233
tccgtttagccaatggcttggcagc

SEQ ID NO: 187224 - DNA, 25 bp, Artificial
  probe
  misc_feature (1)..(25): SEQ ID NO: 1863; WAN024EYB_at; Start 430; Stop 454
gaagaagctggaaagttttatgaga

SEQ ID NO: 187225 - DNA, 25 bp, Artificial
  probe
  misc_feature (1)..(25): SEQ ID NO: 1863; WAN024EYB_at; Start 345; Stop 369
gatcctccagcccaataatcgtgaa

SEQ ID NO: 187226 - DNA, 25 bp, Artificial
  probe
  misc_feature (1)..(25): SEQ ID NO: 1863; WAN024EYB_at; Start 102; Stop 126
tgagagaggccaaatcaaaagcgct

SEQ ID NO: 187227 - DNA, 25 bp, Artificial
  probe
  misc_feature (1)..(25): SEQ ID NO: 1863; WAN024EYB_at; Start 196; Stop 220
gagaaaatccaagtccgtttagcca

SEQ ID NO: 187228 - DNA, 25 bp, Artificial
  probe
  misc_feature (1)..(25): SEQ ID NO: 1863; WAN024EYB_at; Start 370; Stop 394
gacgacttgcgtatctggctacagg

SEQ ID NO: 187229 - DNA, 25 bp, Artificial
  probe
  misc_feature (1)..(25): SEQ ID NO: 1863; WAN024EYB_at; Start 515; Stop 539
tcttgtccaaagaagtcagtccagt

SEQ ID NO: 187230 - DNA, 25 bp, Artificial
  probe
  misc_feature (1)..(25): SEQ ID NO: 1863; WAN024EYB_at; Start 151; Stop 175
ccctatcagtctgcggttaaaaatg

SEQ ID NO: 187231 - DNA, 25 bp, Artificial
  probe
  misc_feature (1)..(25): SEQ ID NO: 1863; WAN024EYB_at; Start 8; Stop 32
caaagagattagaattggtagcttc

SEQ ID NO: 187232 - DNA, 25 bp, Artificial
  probe
  misc_feature (1)..(25): SEQ ID NO: 1863; WAN024EYB_at; Start 117; Stop 141
caaaagcgctattgcaggtgaggtg

SEQ ID NO: 187233 - DNA, 25 bp, Artificial
  probe
  misc_feature (1)..(25): SEQ ID NO: 1863; WAN024EYB_at; Start 357; Stop 381
caataatcgtgaagacgacttgcgt

SEQ ID NO: 187234 - DNA, 25 bp, Artificial
  probe
  misc_feature (1)..(25): SEQ ID NO: 1863; WAN024EYB_at; Start 23; Stop 47
tggtagcttcctttgtgtcacaggg

SEQ ID NO: 187235 - DNA, 25 bp, Artificial
  probe
  misc_feature (1)..(25): SEQ ID NO: 1863; WAN024EYB_at; Start 636; Stop 660
taagattcaagctatcaaggaggtg

SEQ ID NO: 187236 - DNA, 25 bp, Artificial
  probe
  misc_feature (1)..(25): SEQ ID NO: 1863; WAN024EYB_at; Start 237; Stop 261
tgaagagactgaccaagtgtctgtc

SEQ ID NO: 187237 - DNA, 25 bp, Artificial
  probe
  misc_feature (1)..(25): SEQ ID NO: 1863; WAN024EYB_at; Start 397; Stop 421
catggattccagattgtagcagaaa

SEQ ID NO: 187238 - DNA, 25 bp, Artificial
  probe
  misc_feature (1)..(25): SEQ ID NO: 1863; WAN024EYB_at; Start 181; Stop 205
gctcacggcctaaaggagaaaatcc

SEQ ID NO: 187239 - DNA, 25 bp, Artificial
  probe
  misc_feature (1)..(25): SEQ ID NO: 1863; WAN024EYB_at; Start 616; Stop 640
gaacgtcaagttctagtagataaga

SEQ ID NO: 187240 - DNA, 25 bp, Artificial
  probe
  misc_feature (1)..(25): SEQ ID NO: 1863; WAN024EYB_at; Start 72; Stop 96
tgaccatgcttatctgcctatcgag

SEQ ID NO: 187241 - DNA, 25 bp, Artificial
  probe
  misc_feature (1)..(25): SEQ ID NO: 1863; WAN024EYB_at; Start 461; Stop 485
tggtggaagcaggacaaatgaagct

SEQ ID NO: 187242 - DNA, 25 bp, Artificial
  probe
  misc_feature (1)..(25): SEQ ID NO: 1863; WAN024EYB_at; Start 88; Stop 112
cctatcgagttggttgagagaggcc

SEQ ID NO: 187243 - DNA, 25 bp, Artificial
  probe
  misc_feature (1)..(25): SEQ ID NO: 1863; WAN024EYB_at; Start 581; Stop 605
tcgccctcggacaaatcccagaaaa

SEQ ID NO: 187244 - DNA, 25 bp, Artificial
  probe
  misc_feature (1)..(25): SEQ ID NO: 1863; WAN024EYB_at; Start 166; Stop 190
gttaaaaatgttgaggctcacggcc

SEQ ID NO: 187245 - DNA, 25 bp, Artificial
  probe
  misc_feature (1)..(25): SEQ ID NO: 1863; WAN024EYB_at; Start 567; Stop 591
tgagaagctagagttcgccctcgga

SEQ ID NO: 187246 - DNA, 25 bp, Artificial
  probe
  misc_feature (1)..(25): SEQ ID NO: 1863; WAN024EYB_at; Start 251; Stop 275
aagtgtctgtcattaccattgctgg

SEQ ID NO: 187247 - DNA, 25 bp, Artificial
  probe
  misc_feature (1)..(25): SEQ ID NO: 1863; WAN024EYB_at; Start 56; Stop 80
tactagatgtgggaagtgaccatgc

SEQ ID NO: 187248 - DNA, 25 bp, Artificial
  probe
  misc_feature (1)..(25): SEQ ID NO: 2370; WAN024EYC_at; Start 346; Stop 370
gacaaaaatgtagacttggactgcg

SEQ ID NO: 187249 - DNA, 25 bp, Artificial
  probe
  misc_feature (1)..(25): SEQ ID NO: 2370; WAN024EYC_at; Start 780; Stop 804
cattttgggcaatccgacatctggt

SEQ ID NO: 187250 - DNA, 25 bp, Artificial
  probe
  misc_feature (1)..(25): SEQ ID NO: 2370; WAN024EYC_at; Start 221; Stop 245
gaaattttggcaaagaagcagccct

SEQ ID NO: 187251 - DNA, 25 bp, Artificial
  probe
  misc_feature (1)..(25): SEQ ID NO: 2370; WAN024EYC_at; Start 67; Stop 91
cctcttttttatcaggctctggaag

SEQ ID NO: 187252 - DNA, 25 bp, Artificial
  probe
  misc_feature (1)..(25): SEQ ID NO: 2370; WAN024EYC_at; Start 601; Stop 625
tatccaaatgtcgaaaggcaggctg

SEQ ID NO: 187253 - DNA, 25 bp, Artificial
  probe
  misc_feature (1)..(25): SEQ ID NO: 2370; WAN024EYC_at; Start 421; Stop 445
tgtgctgttctcttttatcgcctca

SEQ ID NO: 187254 - DNA, 25 bp, Artificial
  probe
  misc_feature (1)..(25): SEQ ID NO: 2370; WAN024EYC_at; Start 766; Stop 790
gtggttcggaccctcattttgggca

SEQ ID NO: 187255 - DNA, 25 bp, Artificial
  probe
  misc_feature (1)..(25): SEQ ID NO: 2370; WAN024EYC_at; Start 298; Stop 322
gacctccaagatcctcctagtatgt

SEQ ID NO: 187256 - DNA, 25 bp, Artificial
  probe
  misc_feature (1)..(25): SEQ ID NO: 2370; WAN024EYC_at; Start 178; Stop 202
tatcgggagcaaaatccggcagtcc

SEQ ID NO: 187257 - DNA, 25 bp, Artificial
  probe
  misc_feature (1)..(25): SEQ ID NO: 2370; WAN024EYC_at; Start 820; Stop 844
gctgttattctctttcttggaggca

SEQ ID NO: 187258 - DNA, 25 bp, Artificial
  probe
  misc_feature (1)..(25): SEQ ID NO: 2370; WAN024EYC_at; Start 247; Stop 271
tatgcaggcttgcaatatgcgacag

SEQ ID NO: 187259 - DNA, 25 bp, Artificial
  probe
  misc_feature (1)..(25): SEQ ID NO: 2370; WAN024EYC_at; Start 120; Stop 144
cgagtatgtctttgtcgatgatgga

SEQ ID NO: 187260 - DNA, 25 bp, Artificial
  probe
  misc_feature (1)..(25): SEQ ID NO: 2370; WAN024EYC_at; Start 482; Stop 506
tccgtgattttcgtatgatgagaag

SEQ ID NO: 187261 - DNA, 25 bp, Artificial
  probe
  misc_feature (1)..(25): SEQ ID NO: 2370; WAN024EYC_at; Start 467; Stop 491
ctctgccgtcgggtgtccgtgattt

SEQ ID NO: 187262 - DNA, 25 bp, Artificial
  probe
  misc_feature (1)..(25): SEQ ID NO: 2370; WAN024EYC_at; Start 705; Stop 729
tatagcctttgtagctggtctccta

SEQ ID NO: 187263 - DNA, 25 bp, Artificial
  probe
  misc_feature (1)..(25): SEQ ID NO: 2370; WAN024EYC_at; Start 436; Stop 460
tatcgcctcatgcaaaaaatcagcc

SEQ ID NO: 187264 - DNA, 25 bp, Artificial
  probe
  misc_feature (1)..(25): SEQ ID NO: 2370; WAN024EYC_at; Start 312; Stop 336
tcctagtatgttgtttgagatgaaa

SEQ ID NO: 187265 - DNA, 25 bp, Artificial
  probe
  misc_feature (1)..(25): SEQ ID NO: 2370; WAN024EYC_at; Start 450; Stop 474
aaaaatcagcccagtagctctgccg

SEQ ID NO: 187266 - DNA, 25 bp, Artificial
  probe
  misc_feature (1)..(25): SEQ ID NO: 2370; WAN024EYC_at; Start 135; Stop 159
cgatgatggatcaagtgatgggacc

SEQ ID NO: 187267 - DNA, 25 bp, Artificial
  probe
  misc_feature (1)..(25): SEQ ID NO: 2370; WAN024EYC_at; Start 87; Stop 111
ggaagctttacttccagatttggaa

SEQ ID NO: 187268 - DNA, 25 bp, Artificial
  probe
  misc_feature (1)..(25): SEQ ID NO: 2370; WAN024EYC_at; Start 733; Stop 757
tgttttctttctctgctgatgacct

SEQ ID NO: 187269 - DNA, 25 bp, Artificial
  probe
  misc_feature (1)..(25): SEQ ID NO: 2370; WAN024EYC_at; Start 33; Stop 57
catcgtcccttgtttaaacgaagag

SEQ ID NO: 187270 - DNA, 25 bp, Artificial
  probe
  misc_feature (1)..(25): SEQ ID NO: 2370; WAN024EYC_at; Start 364; Stop 388
gactgcgttgggacacggagaacta

SEQ ID NO: 187271 - DNA, 25 bp, Artificial
  probe
  misc_feature (1)..(25): SEQ ID NO: 2370; WAN024EYC_at; Start 282; Stop 306
ggtggtgatggatgcagacctccaa

SEQ ID NO: 187272 - DNA, 25 bp, Artificial
  probe
  misc_feature (1)..(25): SEQ ID NO: 2370; WAN024EYC_at; Start 834; Stop 858
tcttggaggcattcaactcttgacc

SEQ ID NO: 187273 - DNA, 25 bp, Artificial
  probe
  misc_feature (1)..(25): SEQ ID NO: 2370; WAN024EYC_at; Start 106; Stop 130
ttggaaacagaaatcgagtatgtct

SEQ ID NO: 187274 - DNA, 25 bp, Artificial
  probe
  misc_feature (1)..(25): SEQ ID NO: 2370; WAN024EYC_at; Start 259; Stop 283
caatatgcgacaggagatttggtgg

SEQ ID NO: 187275 - DNA, 25 bp, Artificial
  probe
  misc_feature (1)..(25): SEQ ID NO: 2370; WAN024EYC_at; Start 165; Stop 189
actcttaaaggcctatcgggagcaa

SEQ ID NO: 187276 - DNA, 25 bp, Artificial
  probe
  misc_feature (1)..(25): SEQ ID NO: 2370; WAN024EYC_at; Start 848; Stop 872
aactcttgaccattgggattctcgg

SEQ ID NO: 187277 - DNA, 25 bp, Artificial
  probe
  misc_feature (1)..(25): SEQ ID NO: 2370; WAN024EYC_at; Start 400; Stop 424
gaacccttctttcgcagtttctgtg

SEQ ID NO: 187278 - DNA, 25 bp, Artificial
  probe
  misc_feature (1)..(25): SEQ ID NO: 2370; WAN024EYC_at; Start 150; Stop 174
tgatgggaccttggaactcttaaag

SEQ ID NO: 187279 - DNA, 25 bp, Artificial
  probe
  misc_feature (1)..(25): SEQ ID NO: 2370; WAN024EYC_at; Start 799; Stop 823
tctggttggacctctctgatggctg

SEQ ID NO: 187280 - DNA, 25 bp, Artificial
  probe
  misc_feature (1)..(25): SEQ ID NO: 2370; WAN024EYC_at; Start 235; Stop 259
gaagcagccctttatgcaggcttgc

SEQ ID NO: 187281 - DNA, 25 bp, Artificial
  probe
  misc_feature (1)..(25): SEQ ID NO: 2370; WAN024EYC_at; Start 935; Stop 959
aaagtgaccttcctgattttacaga

SEQ ID NO: 187282 - DNA, 25 bp, Artificial
  probe
  misc_feature (1)..(25): SEQ ID NO: 5576; WAN024EYD_at; Start 49; Stop 73
aatttttctaagattgcatcccaag

SEQ ID NO: 187283 - DNA, 25 bp, Artificial
  probe
  misc_feature (1)..(25): SEQ ID NO: 5576; WAN024EYD_at; Start 192; Stop 216
gtccgccttggtcgccacaatgatg

SEQ ID NO: 187284 - DNA, 25 bp, Artificial
  probe
  misc_feature (1)..(25): SEQ ID NO: 5576; WAN024EYD_at; Start 186; Stop 210
aatcttgtccgccttggtcgccaca

SEQ ID NO: 187285 - DNA, 25 bp, Artificial
  probe
  misc_feature (1)..(25): SEQ ID NO: 5576; WAN024EYD_at; Start 198; Stop 222
cttggtcgccacaatgatgactgga

SEQ ID NO: 187286 - DNA, 25 bp, Artificial
  probe
  misc_feature (1)..(25): SEQ ID NO: 5576; WAN024EYD_at; Start 176; Stop 200
taccacgaggaatcttgtccgcctt

SEQ ID NO: 187287 - DNA, 25 bp, Artificial
  probe
  misc_feature (1)..(25): SEQ ID NO: 5576; WAN024EYD_at; Start 154; Stop 178
gctgattcatgcttgttccatttac

SEQ ID NO: 187288 - DNA, 25 bp, Artificial
  probe
  misc_feature (1)..(25): SEQ ID NO: 5576; WAN024EYD_at; Start 42; Stop 66
tcctcacaatttttctaagattgca

SEQ ID NO: 187289 - DNA, 25 bp, Artificial
  probe
  misc_feature (1)..(25): SEQ ID NO: 5576; WAN024EYD_at; Start 59; Stop 83
agattgcatcccaagcctcatccat

SEQ ID NO: 187290 - DNA, 25 bp, Artificial
  probe
  misc_feature (1)..(25): SEQ ID NO: 5576; WAN024EYD_at; Start 29; Stop 53
tgccattttcttttcctcacaattt

SEQ ID NO: 187291 - DNA, 25 bp, Artificial
  probe
  misc_feature (1)..(25): SEQ ID NO: 5576; WAN024EYD_at; Start 98; Stop 122
cagatgaaaagaggatgaaatcgtc

SEQ ID NO: 187292 - DNA, 25 bp, Artificial
  probe
  misc_feature (1)..(25): SEQ ID NO: 5576; WAN024EYD_at; Start 200; Stop 224
tggtcgccacaatgatgactggaat

SEQ ID NO: 187293 - DNA, 25 bp, Artificial
  probe
  misc_feature (1)..(25): SEQ ID NO: 5576; WAN024EYD_at; Start 164; Stop 188
gcttgttccatttaccacgaggaat

SEQ ID NO: 187294 - DNA, 25 bp, Artificial
  probe
  misc_feature (1)..(25): SEQ ID NO: 5576; WAN024EYD_at; Start 149; Stop 173
tgattgctgattcatgcttgttcca

SEQ ID NO: 187295 - DNA, 25 bp, Artificial
  probe
  misc_feature (1)..(25): SEQ ID NO: 5576; WAN024EYD_at; Start 53; Stop 77
tttctaagattgcatcccaagcctc

SEQ ID NO: 187296 - DNA, 25 bp, Artificial
  probe
  misc_feature (1)..(25): SEQ ID NO: 5576; WAN024EYD_at; Start 207; Stop 231
cacaatgatgactggaatctcataa

SEQ ID NO: 187297 - DNA, 25 bp, Artificial
  probe
  misc_feature (1)..(25): SEQ ID NO: 5576; WAN024EYD_at; Start 4; Stop 28
gggccttatctgtatgaattgtttt

SEQ ID NO: 187298 - DNA, 25 bp, Artificial
  probe
  misc_feature (1)..(25): SEQ ID NO: 5576; WAN024EYD_at; Start 179; Stop 203
cacgaggaatcttgtccgccttggt

SEQ ID NO: 187299 - DNA, 25 bp, Artificial
  probe
  misc_feature (1)..(25): SEQ ID NO: 5576; WAN024EYD_at; Start 161; Stop 185
catgcttgttccatttaccacgagg

SEQ ID NO: 187300 - DNA, 25 bp, Artificial
  probe
  misc_feature (1)..(25): SEQ ID NO: 5576; WAN024EYD_at; Start 174; Stop 198
tttaccacgaggaatcttgtccgcc

SEQ ID NO: 187301 - DNA, 25 bp, Artificial
  probe
  misc_feature (1)..(25): SEQ ID NO: 5576; WAN024EYD_at; Start 58; Stop 82
aagattgcatcccaagcctcatcca

SEQ ID NO: 187302 - DNA, 25 bp, Artificial
  probe
  misc_feature (1)..(25): SEQ ID NO: 5576; WAN024EYD_at; Start 182; Stop 206
gaggaatcttgtccgccttggtcgc

SEQ ID NO: 187303 - DNA, 25 bp, Artificial
  probe
  misc_feature (1)..(25): SEQ ID NO: 5576; WAN024EYD_at; Start 134; Stop 158
agtttaatttctttttgattgctga

SEQ ID NO: 187304 - DNA, 25 bp, Artificial
  probe
  misc_feature (1)..(25): SEQ ID NO: 5576; WAN024EYD_at; Start 170; Stop 194
tccatttaccacgaggaatcttgtc

SEQ ID NO: 187305 - DNA, 25 bp, Artificial
  probe
  misc_feature (1)..(25): SEQ ID NO: 5576; WAN024EYD_at; Start 55; Stop 79
tctaagattgcatcccaagcctcat

SEQ ID NO: 187306 - DNA, 25 bp, Artificial
  probe
  misc_feature (1)..(25): SEQ ID NO: 5576; WAN024EYD_at; Start 203; Stop 227
tcgccacaatgatgactggaatctc

SEQ ID NO: 187307 - DNA, 25 bp, Artificial
  probe
  misc_feature (1)..(25): SEQ ID NO: 5576; WAN024EYD_at; Start 51; Stop 75
tttttctaagattgcatcccaagcc

SEQ ID NO: 187308 - DNA, 25 bp, Artificial
  probe
  misc_feature (1)..(25): SEQ ID NO: 5576; WAN024EYD_at; Start 190; Stop 214
ttgtccgccttggtcgccacaatga

SEQ ID NO: 187309 - DNA, 25 bp, Artificial
  probe
  misc_feature (1)..(25): SEQ ID NO: 5576; WAN024EYD_at; Start 94; Stop 118
ctgacagatgaaaagaggatgaaat

SEQ ID NO: 187310 - DNA, 25 bp, Artificial
  probe
  misc_feature (1)..(25): SEQ ID NO: 5576; WAN024EYD_at; Start 196; Stop 220
gccttggtcgccacaatgatgactg

SEQ ID NO: 187311 - DNA, 25 bp, Artificial
  probe
  misc_feature (1)..(25): SEQ ID NO: 5576; WAN024EYD_at; Start 101; Stop 125
atgaaaagaggatgaaatcgtcact

SEQ ID NO: 187312 - DNA, 25 bp, Artificial
  probe
  misc_feature (1)..(25): SEQ ID NO: 5576; WAN024EYD_at; Start 205; Stop 229
gccacaatgatgactggaatctcat

SEQ ID NO: 187313 - DNA, 25 bp, Artificial
  probe
  misc_feature (1)..(25): SEQ ID NO: 5576; WAN024EYD_at; Start 172; Stop 196
catttaccacgaggaatcttgtccg

SEQ ID NO: 187314 - DNA, 25 bp, Artificial
  probe
  misc_feature (1)..(25): SEQ ID NO: 5576; WAN024EYD_at; Start 8; Stop 32
cttatctgtatgaattgtttttgcc

SEQ ID NO: 187315 - DNA, 25 bp, Artificial
  probe
  misc_feature (1)..(25): SEQ ID NO: 5576; WAN024EYD_at; Start 23; Stop 47
tgtttttgccattttcttttcctca

SEQ ID NO: 187316 - DNA, 25 bp, Artificial
  probe
  misc_feature (1)..(25): SEQ ID NO: 2377; WAN024EYE_at; Start 154; Stop 178
gagcaagtcttgaaaaacatcggtg

SEQ ID NO: 187317 - DNA, 25 bp, Artificial
  probe
  misc_feature (1)..(25): SEQ ID NO: 2377; WAN024EYE_at; Start 46; Stop 70
ccctatgttcaaggaaaaatcgttg

SEQ ID NO: 187318 - DNA, 25 bp, Artificial
  probe
  misc_feature (1)..(25): SEQ ID NO: 2377; WAN024EYE_at; Start 285; Stop 309
cttcaaagaggaattcccagctcgt

SEQ ID NO: 187319 - DNA, 25 bp, Artificial
  probe
  misc_feature (1)..(25): SEQ ID NO: 2377; WAN024EYE_at; Start 344; Stop 368
taaaagtcgaaattgaagtcatcgc

SEQ ID NO: 187320 - DNA, 25 bp, Artificial
  probe
  misc_feature (1)..(25): SEQ ID NO: 2377; WAN024EYE_at; Start 138; Stop 162
tatccaagaacagacagagcaagtc

SEQ ID NO: 187321 - DNA, 25 bp, Artificial
  probe
  misc_feature (1)..(25): SEQ ID NO: 2377; WAN024EYE_at; Start 80; Stop 104
tgtttgctagcggtcaagttcccct

SEQ ID NO: 187322 - DNA, 25 bp, Artificial
  probe
  misc_feature (1)..(25): SEQ ID NO: 2377; WAN024EYE_at; Start 196; Stop 220
ggaacagactttgaccatgttgtca

SEQ ID NO: 187323 - DNA, 25 bp, Artificial
  probe
  misc_feature (1)..(25): SEQ ID NO: 2377; WAN024EYE_at; Start 295; Stop 319
gaattcccagctcgttcagctgtgg

SEQ ID NO: 187324 - DNA, 25 bp, Artificial
  probe
  misc_feature (1)..(25): SEQ ID NO: 2377; WAN024EYE_at; Start 236; Stop 260
tgagcgatatgaacgactttgttcc

SEQ ID NO: 187325 - DNA, 25 bp, Artificial
  probe
  misc_feature (1)..(25): SEQ ID NO: 2377; WAN024EYE_at; Start 305; Stop 329
ctcgttcagctgtggaggtagctcg

SEQ ID NO: 187326 - DNA, 25 bp, Artificial
  probe
  misc_feature (1)..(25): SEQ ID NO: 2377; WAN024EYE_at; Start 51; Stop 75
tgttcaaggaaaaatcgttggcaac

SEQ ID NO: 187327 - DNA, 25 bp, Artificial
  probe
  misc_feature (1)..(25): SEQ ID NO: 2377; WAN024EYE_at; Start 119; Stop 143
gggaaattgtaggagagaatatcca

SEQ ID NO: 187328 - DNA, 25 bp, Artificial
  probe
  misc_feature (1)..(25): SEQ ID NO: 2377; WAN024EYE_at; Start 157; Stop 181
caagtcttgaaaaacatcggtgcta

SEQ ID NO: 187329 - DNA, 25 bp, Artificial
  probe
  misc_feature (1)..(25): SEQ ID NO: 2377; WAN024EYE_at; Start 358; Stop 382
gaagtcatcgcagagattggataac

SEQ ID NO: 187330 - DNA, 25 bp, Artificial
  probe
  misc_feature (1)..(25): SEQ ID NO: 2377; WAN024EYE_at; Start 72; Stop 96
caaccttttgtttgctagcggtcaa

SEQ ID NO: 187331 - DNA, 25 bp, Artificial
  probe
  misc_feature (1)..(25): SEQ ID NO: 2377; WAN024EYE_at; Start 171; Stop 195
catcggtgctattttggcagaagca

SEQ ID NO: 187332 - DNA, 25 bp, Artificial
  probe
  misc_feature (1)..(25): SEQ ID NO: 2377; WAN024EYE_at; Start 167; Stop 191
aaaacatcggtgctattttggcaga

SEQ ID NO: 187333 - DNA, 25 bp, Artificial
  probe
  misc_feature (1)..(25): SEQ ID NO: 2377; WAN024EYE_at; Start 207; Stop 231
tgaccatgttgtcaaaacaacttgc

SEQ ID NO: 187334 - DNA, 25 bp, Artificial
  probe
  misc_feature (1)..(25): SEQ ID NO: 2377; WAN024EYE_at; Start 63; Stop 87
aatcgttggcaaccttttgtttgct

SEQ ID NO: 187335 - DNA, 25 bp, Artificial
  probe
  misc_feature (1)..(25): SEQ ID NO: 2377; WAN024EYE_at; Start 145; Stop 169
gaacagacagagcaagtcttgaaaa

SEQ ID NO: 187336 - DNA, 25 bp, Artificial
  probe
  misc_feature (1)..(25): SEQ ID NO: 2377; WAN024EYE_at; Start 188; Stop 212
cagaagcaggaacagactttgacca

SEQ ID NO: 187337 - DNA, 25 bp, Artificial
  probe
  misc_feature (1)..(25): SEQ ID NO: 2377; WAN024EYE_at; Start 362; Stop 386
tcatcgcagagattggataactaat

SEQ ID NO: 187338 - DNA, 25 bp, Artificial
  probe
  misc_feature (1)..(25): SEQ ID NO: 2377; WAN024EYE_at; Start 311; Stop 335
cagctgtggaggtagctcgtcttcc

SEQ ID NO: 187339 - DNA, 25 bp, Artificial
  probe
  misc_feature (1)..(25): SEQ ID NO: 2377; WAN024EYE_at; Start 219; Stop 243
caaaacaacttgcttcttgagcgat

SEQ ID NO: 187340 - DNA, 25 bp, Artificial
  probe
  misc_feature (1)..(25): SEQ ID NO: 2377; WAN024EYE_at; Start 133; Stop 157
gagaatatccaagaacagacagagc

SEQ ID NO: 187341 - DNA, 25 bp, Artificial
  probe
  misc_feature (1)..(25): SEQ ID NO: 2377; WAN024EYE_at; Start 245; Stop 269
tgaacgactttgttccttttaatga

SEQ ID NO: 187342 - DNA, 25 bp, Artificial
  probe
  misc_feature (1)..(25): SEQ ID NO: 2377; WAN024EYE_at; Start 229; Stop 253
tgcttcttgagcgatatgaacgact

SEQ ID NO: 187343 - DNA, 25 bp, Artificial
  probe
  misc_feature (1)..(25): SEQ ID NO: 2377; WAN024EYE_at; Start 321; Stop 345
ggtagctcgtcttcctcgtgatgta

SEQ ID NO: 187344 - DNA, 25 bp, Artificial
  probe
  misc_feature (1)..(25): SEQ ID NO: 2377; WAN024EYE_at; Start 180; Stop 204
tattttggcagaagcaggaacagac

SEQ ID NO: 187345 - DNA, 25 bp, Artificial
  probe
  misc_feature (1)..(25): SEQ ID NO: 2377; WAN024EYE_at; Start 280; Stop 304
acggccttcaaagaggaattcccag

SEQ ID NO: 187346 - DNA, 25 bp, Artificial
  probe
  misc_feature (1)..(25): SEQ ID NO: 2377; WAN024EYE_at; Start 84; Stop 108
tgctagcggtcaagttcccctatcc

SEQ ID NO: 187347 - DNA, 25 bp, Artificial
  probe
  misc_feature (1)..(25): SEQ ID NO: 2377; WAN024EYE_at; Start 330; Stop 354
tcttcctcgtgatgtaaaagtcgaa

SEQ ID NO: 187348 - DNA, 25 bp, Artificial
  probe
  misc_feature (1)..(25): SEQ ID NO: 2377; WAN024EYE_at; Start 290; Stop 314
aagaggaattcccagctcgttcagc

SEQ ID NO: 187349 - DNA, 25 bp, Artificial
  probe
  misc_feature (1)..(25): SEQ ID NO: 2377; WAN024EYE_at; Start 350; Stop 374
tcgaaattgaagtcatcgcagagat

SEQ ID NO: 187350 - DNA, 25 bp, Artificial
  probe
  misc_feature (1)..(25): SEQ ID NO: 1620; WAN024EYF_at; Start 102; Stop 126
ggatccttttgagtctgagtcagaa

SEQ ID NO: 187351 - DNA, 25 bp, Artificial
  probe
  misc_feature (1)..(25): SEQ ID NO: 1620; WAN024EYF_at; Start 581; Stop 605
gcatccactcagttcgtttgccagg

SEQ ID NO: 187352 - DNA, 25 bp, Artificial
  probe
  misc_feature (1)..(25): SEQ ID NO: 1620; WAN024EYF_at; Start 622; Stop 646
gaagtcatctttggcaatcagggag

SEQ ID NO: 187353 - DNA, 25 bp, Artificial
  probe
  misc_feature (1)..(25): SEQ ID NO: 1620; WAN024EYF_at; Start 407; Stop 431
tcccaaatgtggagattattgagct

SEQ ID NO: 187354 - DNA, 25 bp, Artificial
  probe
  misc_feature (1)..(25): SEQ ID NO: 1620; WAN024EYF_at; Start 451; Stop 475
gatgctccgagtggaacagccatta

SEQ ID NO: 187355 - DNA, 25 bp, Artificial
  probe
  misc_feature (1)..(25): SEQ ID NO: 1620; WAN024EYF_at; Start 338; Stop 362
tgattgcccctaactttgccttggg

SEQ ID NO: 187356 - DNA, 25 bp, Artificial
  probe
  misc_feature (1)..(25): SEQ ID NO: 1620; WAN024EYF_at; Start 646; Stop 670
gaagggttgaccctccgtcatgact

SEQ ID NO: 187357 - DNA, 25 bp, Artificial
  probe
  misc_feature (1)..(25): SEQ ID NO: 1620; WAN024EYF_at; Start 162; Stop 186
tttagctggttttgaagcggatgtc

SEQ ID NO: 187358 - DNA, 25 bp, Artificial
  probe
  misc_feature (1)..(25): SEQ ID NO: 1620; WAN024EYF_at; Start 636; Stop 660
caatcagggagaagggttgaccctc

SEQ ID NO: 187359 - DNA, 25 bp, Artificial
  probe
  misc_feature (1)..(25): SEQ ID NO: 1620; WAN024EYF_at; Start 208; Stop 232
gctgttgcctacgaaaatacacgtt

SEQ ID NO: 187360 - DNA, 25 bp, Artificial
  probe
  misc_feature (1)..(25): SEQ ID NO: 1620; WAN024EYF_at; Start 661; Stop 685
cgtcatgactcctatgatcgcatct

SEQ ID NO: 187361 - DNA, 25 bp, Artificial
  probe
  misc_feature (1)..(25): SEQ ID NO: 1620; WAN024EYF_at; Start 474; Stop 498
taaaacagctgagttgatggcagag

SEQ ID NO: 187362 - DNA, 25 bp, Artificial
  probe
  misc_feature (1)..(25): SEQ ID NO: 1620; WAN024EYF_at; Start 275; Stop 299
gtttcacgagtgaagaaattgcaga

SEQ ID NO: 187363 - DNA, 25 bp, Artificial
  probe
  misc_feature (1)..(25): SEQ ID NO: 1620; WAN024EYF_at; Start 2; Stop 26
tgagtattcgagtaattattgccgg

SEQ ID NO: 187364 - DNA, 25 bp, Artificial
  probe
  misc_feature (1)..(25): SEQ ID NO: 1620; WAN024EYF_at; Start 715; Stop 739
aaagaagttgtcaagcgtcatgagc

SEQ ID NO: 187365 - DNA, 25 bp, Artificial
  probe
  misc_feature (1)..(25): SEQ ID NO: 1620; WAN024EYF_at; Start 356; Stop 380
ccttgggtgctgtcttactcatgca

SEQ ID NO: 187366 - DNA, 25 bp, Artificial
  probe
  misc_feature (1)..(25): SEQ ID NO: 1620; WAN024EYF_at; Start 293; Stop 317
ttgcagagctaaaagaattttctcg

SEQ ID NO: 187367 - DNA, 25 bp, Artificial
  probe
  misc_feature (1)..(25): SEQ ID NO: 1620; WAN024EYF_at; Start 241; Stop 265
gaaaatggctttgctccagtagttg

SEQ ID NO: 187368 - DNA, 25 bp, Artificial
  probe
  misc_feature (1)..(25): SEQ ID NO: 1620; WAN024EYF_at; Start 196; Stop 220
tttactactccagctgttgcctacg

SEQ ID NO: 187369 - DNA, 25 bp, Artificial
  probe
  misc_feature (1)..(25): SEQ ID NO: 1620; WAN024EYF_at; Start 423; Stop 447
tattgagctccatcatgacaagaaa

SEQ ID NO: 187370 - DNA, 25 bp, Artificial
  probe
  misc_feature (1)..(25): SEQ ID NO: 1620; WAN024EYF_at; Start 524; Stop 548
cagcagatgaggaagagctgattgc

SEQ ID NO: 187371 - DNA, 25 bp, Artificial
  probe
  misc_feature (1)..(25): SEQ ID NO: 1620; WAN024EYF_at; Start 733; Stop 757
catgagcttgtctatggattagaac

SEQ ID NO: 187372 - DNA, 25 bp, Artificial
  probe
  misc_feature (1)..(25): SEQ ID NO: 1620; WAN024EYF_at; Start 387; Stop 411
gacgcaggctgccaaatatttccca

SEQ ID NO: 187373 - DNA, 25 bp, Artificial
  probe
  misc_feature (1)..(25): SEQ ID NO: 1620; WAN024EYF_at; Start 139; Stop 163
cctgttttcaaggataaggctgatt

SEQ ID NO: 187374 - DNA, 25 bp, Artificial
  probe
  misc_feature (1)..(25): SEQ ID NO: 1620; WAN024EYF_at; Start 690; Stop 714
catgacaggagtcaatttgggaatt

SEQ ID NO: 187375 - DNA, 25 bp, Artificial
  probe
  misc_feature (1)..(25): SEQ ID NO: 1620; WAN024EYF_at; Start 371; Stop 395
tactcatgcaatttgcgacgcaggc

SEQ ID NO: 187376 - DNA, 25 bp, Artificial
  probe
  misc_feature (1)..(25): SEQ ID NO: 1620; WAN024EYF_at; Start 260; Stop 284
tagttggaacgactggtttcacgag

SEQ ID NO: 187377 - DNA, 25 bp, Artificial
  probe
  misc_feature (1)..(25): SEQ ID NO: 1620; WAN024EYF_at; Start 307; Stop 331
gaattttctcgtgcccaagacttgg

SEQ ID NO: 187378 - DNA, 25 bp, Artificial
  probe
  misc_feature (1)..(25): SEQ ID NO: 1620; WAN024EYF_at; Start 322; Stop 346
caagacttgggtggcctgattgccc

SEQ ID NO: 187379 - DNA, 25 bp, Artificial
  probe
  misc_feature (1)..(25): SEQ ID NO: 1620; WAN024EYF_at; Start 225; Stop 249
tacacgttttgctcttgaaaatggc

SEQ ID NO: 187380 - DNA, 25 bp, Artificial
  probe
  misc_feature (1)..(25): SEQ ID NO: 1620; WAN024EYF_at; Start 548; Stop 572
ctggtgctcgtggtgctgactttga

SEQ ID NO: 187381 - DNA, 25 bp, Artificial
  probe
  misc_feature (1)..(25): SEQ ID NO: 1620; WAN024EYF_at; Start 564; Stop 588
tgactttgatggtatgcgcatccac

SEQ ID NO: 187382 - DNA, 25 bp, Artificial
  probe
  misc_feature (1)..(25): SEQ ID NO: 1620; WAN024EYF_at; Start 675; Stop 699
tgatcgcatctccttcatgacagga

SEQ ID NO: 187383 - DNA, 25 bp, Artificial
  probe
  misc_feature (1)..(25): SEQ ID NO: 1620; WAN024EYF_at; Start 435; Stop 459
tcatgacaagaaaaaggatgctccg

SEQ ID NO: 187384 - DNA, 25 bp, Artificial
  probe
  misc_feature (1)..(25): SEQ ID NO: 3832; WAN024EYG_at; Start 154; Stop 178
ttagctcagcagtatgcaggattag

SEQ ID NO: 187385 - DNA, 25 bp, Artificial
  probe
  misc_feature (1)..(25): SEQ ID NO: 3832; WAN024EYG_at; Start 124; Stop 148
tatcaaacagctaaaagtgaaggag

SEQ ID NO: 187386 - DNA, 25 bp, Artificial
  probe
  misc_feature (1)..(25): SEQ ID NO: 3832; WAN024EYG_at; Start 109; Stop 133
cttagcatgaaaccctatcaaacag

SEQ ID NO: 187387 - DNA, 25 bp, Artificial
  probe
  misc_feature (1)..(25): SEQ ID NO: 3832; WAN024EYG_at; Start 293; Stop 317
tttacgtttatcagctaaatcaggg

SEQ ID NO: 187388 - DNA, 25 bp, Artificial
  probe
  misc_feature (1)..(25): SEQ ID NO: 3832; WAN024EYG_at; Start 156; Stop 180
agctcagcagtatgcaggattagag

SEQ ID NO: 187389 - DNA, 25 bp, Artificial
  probe
  misc_feature (1)..(25): SEQ ID NO: 3832; WAN024EYG_at; Start 441; Stop 465
tctagtagattttgaaacaggagca

SEQ ID NO: 187390 - DNA, 25 bp, Artificial
  probe
  misc_feature (1)..(25): SEQ ID NO: 3832; WAN024EYG_at; Start 448; Stop 472
gattttgaaacaggagcattggtca

SEQ ID NO: 187391 - DNA, 25 bp, Artificial
  probe
  misc_feature (1)..(25): SEQ ID NO: 3832; WAN024EYG_at; Start 28; Stop 52
aataatctactgtggcagtatggtc

SEQ ID NO: 187392 - DNA, 25 bp, Artificial
  probe
  misc_feature (1)..(25): SEQ ID NO: 3832; WAN024EYG_at; Start 116; Stop 140
tgaaaccctatcaaacagctaaaag

SEQ ID NO: 187393 - DNA, 25 bp, Artificial
  probe
  misc_feature (1)..(25): SEQ ID NO: 3832; WAN024EYG_at; Start 205; Stop 229
aatggcttggaatcttattacagcg

SEQ ID NO: 187394 - DNA, 25 bp, Artificial
  probe
  misc_feature (1)..(25): SEQ ID NO: 3832; WAN024EYG_at; Start 95; Stop 119
tgtatatggtttctcttagcatgaa

SEQ ID NO: 187395 - DNA, 25 bp, Artificial
  probe
  misc_feature (1)..(25): SEQ ID NO: 3832; WAN024EYG_at; Start 113; Stop 137
gcatgaaaccctatcaaacagctaa

SEQ ID NO: 187396 - DNA, 25 bp, Artificial
  probe
  misc_feature (1)..(25): SEQ ID NO: 3832; WAN024EYG_at; Start 149; Stop 173
aaaaattagctcagcagtatgcagg

SEQ ID NO: 187397 - DNA, 25 bp, Artificial
  probe
  misc_feature (1)..(25): SEQ ID NO: 3832; WAN024EYG_at; Start 187; Stop 211
gatcaggttgatttatacaatggct

SEQ ID NO: 187398 - DNA, 25 bp, Artificial
  probe
  misc_feature (1)..(25): SEQ ID NO: 3832; WAN024EYG_at; Start 146; Stop 170
gagaaaaattagctcagcagtatgc

SEQ ID NO: 187399 - DNA, 25 bp, Artificial
  probe
  misc_feature (1)..(25): SEQ ID NO: 3832; WAN024EYG_at; Start 425; Stop 449
caggatctgatttttatctagtaga

SEQ ID NO: 187400 - DNA, 25 bp, Artificial
  probe
  misc_feature (1)..(25): SEQ ID NO: 3832; WAN024EYG_at; Start 215; Stop 239
aatcttattacagcgttcttggtcg

SEQ ID NO: 187401 - DNA, 25 bp, Artificial
  probe
  misc_feature (1)..(25): SEQ ID NO: 3832; WAN024EYG_at; Start 35; Stop 59
tactgtggcagtatggtctagggat

SEQ ID NO: 187402 - DNA, 25 bp, Artificial
  probe
  misc_feature (1)..(25): SEQ ID NO: 3832; WAN024EYG_at; Start 218; Stop 242
cttattacagcgttcttggtcgtaa

SEQ ID NO: 187403 - DNA, 25 bp, Artificial
  probe
  misc_feature (1)..(25): SEQ ID NO: 3832; WAN024EYG_at; Start 131; Stop 155
cagctaaaagtgaaggagaaaaatt

SEQ ID NO: 187404 - DNA, 25 bp, Artificial
  probe
  misc_feature (1)..(25): SEQ ID NO: 3832; WAN024EYG_at; Start 202; Stop 226
tacaatggcttggaatcttattaca

SEQ ID NO: 187405 - DNA, 25 bp, Artificial
  probe
  misc_feature (1)..(25): SEQ ID NO: 3832; WAN024EYG_at; Start 60; Stop 84
gacgattttgtttgtggttatcagt

SEQ ID NO: 187406 - DNA, 25 bp, Artificial
  probe
  misc_feature (1)..(25): SEQ ID NO: 3832; WAN024EYG_at; Start 209; Stop 233
gcttggaatcttattacagcgttct

SEQ ID NO: 187407 - DNA, 25 bp, Artificial
  probe
  misc_feature (1)..(25): SEQ ID NO: 3832; WAN024EYG_at; Start 23; Stop 47
caaaaaataatctactgtggcagta

SEQ ID NO: 187408 - DNA, 25 bp, Artificial
  probe
  misc_feature (1)..(25): SEQ ID NO: 3832; WAN024EYG_at; Start 286; Stop 310
cataagatttacgtttatcagctaa

SEQ ID NO: 187409 - DNA, 25 bp, Artificial
  probe
  misc_feature (1)..(25): SEQ ID NO: 3832; WAN024EYG_at; Start 46; Stop 70
tatggtctagggatgacgattttgt

SEQ ID NO: 187410 - DNA, 25 bp, Artificial
  probe
  misc_feature (1)..(25): SEQ ID NO: 3832; WAN024EYG_at; Start 19; Stop 43
aaagcaaaaaataatctactgtggc

SEQ ID NO: 187411 - DNA, 25 bp, Artificial
  probe
  misc_feature (1)..(25): SEQ ID NO: 3832; WAN024EYG_at; Start 105; Stop 129
ttctcttagcatgaaaccctatcaa

SEQ ID NO: 187412 - DNA, 25 bp, Artificial
  probe
  misc_feature (1)..(25): SEQ ID NO: 3832; WAN024EYG_at; Start 127; Stop 151
caaacagctaaaagtgaaggagaaa

SEQ ID NO: 187413 - DNA, 25 bp, Artificial
  probe
  misc_feature (1)..(25): SEQ ID NO: 3832; WAN024EYG_at; Start 344; Stop 368
tttctaaggaaaagggagctggcga

SEQ ID NO: 187414 - DNA, 25 bp, Artificial
  probe
  misc_feature (1)..(25): SEQ ID NO: 3832; WAN024EYG_at; Start 192; Stop 216
ggttgatttatacaatggcttggaa

SEQ ID NO: 187415 - DNA, 25 bp, Artificial
  probe
  misc_feature (1)..(25): SEQ ID NO: 3832; WAN024EYG_at; Start 89; Stop 113
cctttctgtatatggtttctcttag

SEQ ID NO: 187416 - DNA, 25 bp, Artificial
  probe
  misc_feature (1)..(25): SEQ ID NO: 3832; WAN024EYG_at; Start 42; Stop 66
gcagtatggtctagggatgacgatt

SEQ ID NO: 187417 - DNA, 25 bp, Artificial
  probe
  misc_feature (1)..(25): SEQ ID NO: 3832; WAN024EYG_at; Start 121; Stop 145
ccctatcaaacagctaaaagtgaag

SEQ ID NO: 187418 - DNA, 25 bp, Artificial
  probe
  misc_feature (1)..(25): SEQ ID NO: 2574; WAN024EYH_at; Start 322; Stop 346
catgtagaaggccttgatggctgct

SEQ ID NO: 187419 - DNA, 25 bp, Artificial
  probe
  misc_feature (1)..(25): SEQ ID NO: 2574; WAN024EYH_at; Start 354; Stop 378
tcatgacaaatgttggcacaccaaa

SEQ ID NO: 187420 - DNA, 25 bp, Artificial
  probe
  misc_feature (1)..(25): SEQ ID NO: 2574; WAN024EYH_at; Start 53; Stop 77
ggaatagcttcacggatatgttttg

SEQ ID NO: 187421 - DNA, 25 bp, Artificial
  probe
  misc_feature (1)..(25): SEQ ID NO: 2574; WAN024EYH_at; Start 118; Stop 142
aaatcctccgtgtggaactgtaccg

SEQ ID NO: 187422 - DNA, 25 bp, Artificial
  probe
  misc_feature (1)..(25): SEQ ID NO: 2574; WAN024EYH_at; Start 25; Stop 49
tttgatacggtgcaacatacgtggg

SEQ ID NO: 187423 - DNA, 25 bp, Artificial
  probe
  misc_feature (1)..(25): SEQ ID NO: 2574; WAN024EYH_at; Start 288; Stop 312
aaagcacgcgctctggatttccagg

SEQ ID NO: 187424 - DNA, 25 bp, Artificial
  probe
  misc_feature (1)..(25): SEQ ID NO: 2574; WAN024EYH_at; Start 332; Stop 356
gccttgatggctgctggatagttca

SEQ ID NO: 187425 - DNA, 25 bp, Artificial
  probe
  misc_feature (1)..(25): SEQ ID NO: 2574; WAN024EYH_at; Start 191; Stop 215
agttcatccatcttagcgacaaggg

SEQ ID NO: 187426 - DNA, 25 bp, Artificial
  probe
  misc_feature (1)..(25): SEQ ID NO: 2574; WAN024EYH_at; Start 79; Stop 103
tcctgctgcgaaggttaccatacgt

SEQ ID NO: 187427 - DNA, 25 bp, Artificial
  probe
  misc_feature (1)..(25): SEQ ID NO: 2574; WAN024EYH_at; Start 273; Stop 297
caagcaagtctgcacaaagcacgcg

SEQ ID NO: 187428 - DNA, 25 bp, Artificial
  probe
  misc_feature (1)..(25): SEQ ID NO: 2574; WAN024EYH_at; Start 124; Stop 148
tccgtgtggaactgtaccgtattta

SEQ ID NO: 187429 - DNA, 25 bp, Artificial
  probe
  misc_feature (1)..(25): SEQ ID NO: 2574; WAN024EYH_at; Start 309; Stop 333
caggaactggtttcatgtagaaggc

SEQ ID NO: 187430 - DNA, 25 bp, Artificial
  probe
  misc_feature (1)..(25): SEQ ID NO: 2574; WAN024EYH_at; Start 17; Stop 41
tcttatggtttgatacggtgcaaca

SEQ ID NO: 187431 - DNA, 25 bp, Artificial
  probe
  misc_feature (1)..(25): SEQ ID NO: 2574; WAN024EYH_at; Start 67; Stop 91
gatatgttttgttcctgctgcgaag

SEQ ID NO: 187432 - DNA, 25 bp, Artificial
  probe
  misc_feature (1)..(25): SEQ ID NO: 2574; WAN024EYH_at; Start 231; Stop 255
cacgcatagacccaccgataatttc

SEQ ID NO: 187433 - DNA, 25 bp, Artificial
  probe
  misc_feature (1)..(25): SEQ ID NO: 2574; WAN024EYH_at; Start 220; Stop 244
gtaatcttcctcacgcatagaccca

SEQ ID NO: 187434 - DNA, 25 bp, Artificial
  probe
  misc_feature (1)..(25): SEQ ID NO: 2574; WAN024EYH_at; Start 149; Stop 173
cgaaggtcaaggtagaattcatatt

SEQ ID NO: 187435 - DNA, 25 bp, Artificial
  probe
  misc_feature (1)..(25): SEQ ID NO: 2574; WAN024EYH_at; Start 30; Stop 54
tacggtgcaacatacgtgggaatgg

SEQ ID NO: 187436 - DNA, 25 bp, Artificial
  probe
  misc_feature (1)..(25): SEQ ID NO: 2574; WAN024EYH_at; Start 362; Stop 386
aatgttggcacaccaaagtggtttg

SEQ ID NO: 187437 - DNA, 25 bp, Artificial
  probe
  misc_feature (1)..(25): SEQ ID NO: 2574; WAN024EYH_at; Start 175; Stop 199
tgtacgatccatgccaagttcatcc

SEQ ID NO: 187438 - DNA, 25 bp, Artificial
  probe
  misc_feature (1)..(25): SEQ ID NO: 2574; WAN024EYH_at; Start 281; Stop 305
tctgcacaaagcacgcgctctggat

SEQ ID NO: 187439 - DNA, 25 bp, Artificial
  probe
  misc_feature (1)..(25): SEQ ID NO: 2574; WAN024EYH_at; Start 299; Stop 323
tctggatttccaggaactggtttca

SEQ ID NO: 187440 - DNA, 25 bp, Artificial
  probe
  misc_feature (1)..(25): SEQ ID NO: 2574; WAN024EYH_at; Start 106; Stop 130
gataccgataccaaatcctccgtgt

SEQ ID NO: 187441 - DNA, 25 bp, Artificial
  probe
  misc_feature (1)..(25): SEQ ID NO: 2574; WAN024EYH_at; Start 258; Stop 282
catagccttctggagcaagcaagtc

SEQ ID NO: 187442 - DNA, 25 bp, Artificial
  probe
  misc_feature (1)..(25): SEQ ID NO: 2574; WAN024EYH_at; Start 5; Stop 29
gcgttttcctgttcttatggtttga

SEQ ID NO: 187443 - DNA, 25 bp, Artificial
  probe
  misc_feature (1)..(25): SEQ ID NO: 2574; WAN024EYH_at; Start 40; Stop 64
catacgtgggaatggaatagcttca

SEQ ID NO: 187444 - DNA, 25 bp, Artificial
  probe
  misc_feature (1)..(25): SEQ ID NO: 2574; WAN024EYH_at; Start 208; Stop 232
gacaagggcatcgtaatcttcctca

SEQ ID NO: 187445 - DNA, 25 bp, Artificial
  probe
  misc_feature (1)..(25): SEQ ID NO: 2574; WAN024EYH_at; Start 264; Stop 288
cttctggagcaagcaagtctgcaca

SEQ ID NO: 187446 - DNA, 25 bp, Artificial
  probe
  misc_feature (1)..(25): SEQ ID NO: 2574; WAN024EYH_at; Start 340; Stop 364
ggctgctggatagttcatgacaaat

SEQ ID NO: 187447 - DNA, 25 bp, Artificial
  probe
  misc_feature (1)..(25): SEQ ID NO: 2574; WAN024EYH_at; Start 199; Stop 223
catcttagcgacaagggcatcgtaa

SEQ ID NO: 187448 - DNA, 25 bp, Artificial
  probe
  misc_feature (1)..(25): SEQ ID NO: 2574; WAN024EYH_at; Start 91; Stop 115
ggttaccatacgttcgataccgata

SEQ ID NO: 187449 - DNA, 25 bp, Artificial
  probe
  misc_feature (1)..(25): SEQ ID NO: 2574; WAN024EYH_at; Start 163; Stop 187
gaattcatattctgtacgatccatg

SEQ ID NO: 187450 - DNA, 25 bp, Artificial
  probe
  misc_feature (1)..(25): SEQ ID NO: 2574; WAN024EYH_at; Start 135; Stop 159
ctgtaccgtatttacgaaggtcaag

SEQ ID NO: 187451 - DNA, 25 bp, Artificial
  probe
  misc_feature (1)..(25): SEQ ID NO: 2574; WAN024EYH_at; Start 247; Stop 271
gataatttctccatagccttctgga

SEQ ID NO: 187452 - DNA, 25 bp, Artificial
  probe
  misc_feature (1)..(25): SEQ ID NO: 2506; WAN024EYI_at; Start 102; Stop 126
taagcttcttgcaagtcaagcgact

SEQ ID NO: 187453 - DNA, 25 bp, Artificial
  probe
  misc_feature (1)..(25): SEQ ID NO: 2506; WAN024EYI_at; Start 63; Stop 87
ggcgcgcggtcaagaacaccttgta

SEQ ID NO: 187454 - DNA, 25 bp, Artificial
  probe
  misc_feature (1)..(25): SEQ ID NO: 2506; WAN024EYI_at; Start 195; Stop 219
gatttttcagcacggaaaactggac

SEQ ID NO: 187455 - DNA, 25 bp, Artificial
  probe
  misc_feature (1)..(25): SEQ ID NO: 2506; WAN024EYI_at; Start 24; Stop 48
aagagttctgtatcacgttccaagg

SEQ ID NO: 187456 - DNA, 25 bp, Artificial
  probe
  misc_feature (1)..(25): SEQ ID NO: 2506; WAN024EYI_at; Start 9; Stop 33
gcaatgtagcgtttcaagagttctg

SEQ ID NO: 187457 - DNA, 25 bp, Artificial
  probe
  misc_feature (1)..(25): SEQ ID NO: 2506; WAN024EYI_at; Start 161; Stop 185
catccagaactcagtcaagtgacgg

SEQ ID NO: 187458 - DNA, 25 bp, Artificial
  probe
  misc_feature (1)..(25): SEQ ID NO: 2506; WAN024EYI_at; Start 15; Stop 39
tagcgtttcaagagttctgtatcac

SEQ ID NO: 187459 - DNA, 25 bp, Artificial
  probe
  misc_feature (1)..(25): SEQ ID NO: 2506; WAN024EYI_at; Start 59; Stop 83
ttgaggcgcgcggtcaagaacacct

SEQ ID NO: 187460 - DNA, 25 bp, Artificial
  probe
  misc_feature (1)..(25): SEQ ID NO: 2506; WAN024EYI_at; Start 111; Stop 135
tgcaagtcaagcgactcatcatgtg

SEQ ID NO: 187461 - DNA, 25 bp, Artificial
  probe
  misc_feature (1)..(25): SEQ ID NO: 2506; WAN024EYI_at; Start 76; Stop 100
gaacaccttgtagaagagctttcac

SEQ ID NO: 187462 - DNA, 25 bp, Artificial
  probe
  misc_feature (1)..(25): SEQ ID NO: 2506; WAN024EYI_at; Start 116; Stop 140
gtcaagcgactcatcatgtgtcaag

SEQ ID NO: 187463 - DNA, 25 bp, Artificial
  probe
  misc_feature (1)..(25): SEQ ID NO: 2506; WAN024EYI_at; Start 225; Stop 249
tcaaagacacgaccaagagccatag

SEQ ID NO: 187464 - DNA, 25 bp, Artificial
  probe
  misc_feature (1)..(25): SEQ ID NO: 2506; WAN024EYI_at; Start 156; Stop 180
tccatcatccagaactcagtcaagt

SEQ ID NO: 187465 - DNA, 25 bp, Artificial
  probe
  misc_feature (1)..(25): SEQ ID NO: 2506; WAN024EYI_at; Start 150; Stop 174
tcagcatccatcatccagaactcag

SEQ ID NO: 187466 - DNA, 25 bp, Artificial
  probe
  misc_feature (1)..(25): SEQ ID NO: 2506; WAN024EYI_at; Start 49; Stop 73
tttccaaggcttgaggcgcgcggtc

SEQ ID NO: 187467 - DNA, 25 bp, Artificial
  probe
  misc_feature (1)..(25): SEQ ID NO: 2506; WAN024EYI_at; Start 34; Stop 58
tatcacgttccaaggtttccaaggc

SEQ ID NO: 187468 - DNA, 25 bp, Artificial
  probe
  misc_feature (1)..(25): SEQ ID NO: 2506; WAN024EYI_at; Start 204; Stop 228
gcacggaaaactggaccaaagtcaa

SEQ ID NO: 187469 - DNA, 25 bp, Artificial
  probe
  misc_feature (1)..(25): SEQ ID NO: 2506; WAN024EYI_at; Start 97; Stop 121
tcacataagcttcttgcaagtcaag

SEQ ID NO: 187470 - DNA, 25 bp, Artificial
  probe
  misc_feature (1)..(25): SEQ ID NO: 2506; WAN024EYI_at; Start 201; Stop 225
tcagcacggaaaactggaccaaagt

SEQ ID NO: 187471 - DNA, 25 bp, Artificial
  probe
  misc_feature (1)..(25): SEQ ID NO: 2506; WAN024EYI_at; Start 2; Stop 26
tggctctgcaatgtagcgtttcaag

SEQ ID NO: 187472 - DNA, 25 bp, Artificial
  probe
  misc_feature (1)..(25): SEQ ID NO: 2506; WAN024EYI_at; Start 211; Stop 235
aaactggaccaaagtcaaagacacg

SEQ ID NO: 187473 - DNA, 25 bp, Artificial
  probe
  misc_feature (1)..(25): SEQ ID NO: 2506; WAN024EYI_at; Start 181; Stop 205
gacggcgtgtttttgatttttcagc

SEQ ID NO: 187474 - DNA, 25 bp, Artificial
  probe
  misc_feature (1)..(25): SEQ ID NO: 2506; WAN024EYI_at; Start 136; Stop 160
tcaagtatgagtactcagcatccat

SEQ ID NO: 187475 - DNA, 25 bp, Artificial
  probe
  misc_feature (1)..(25): SEQ ID NO: 2506; WAN024EYI_at; Start 130; Stop 154
catgtgtcaagtatgagtactcagc

SEQ ID NO: 187476 - DNA, 25 bp, Artificial
  probe
  misc_feature (1)..(25): SEQ ID NO: 2506; WAN024EYI_at; Start 121; Stop 145
gcgactcatcatgtgtcaagtatga

SEQ ID NO: 187477 - DNA, 25 bp, Artificial
  probe
  misc_feature (1)..(25): SEQ ID NO: 2506; WAN024EYI_at; Start 70; Stop 94
ggtcaagaacaccttgtagaagagc

SEQ ID NO: 187478 - DNA, 25 bp, Artificial
  probe
  misc_feature (1)..(25): SEQ ID NO: 2506; WAN024EYI_at; Start 167; Stop 191
gaactcagtcaagtgacggcgtgtt

SEQ ID NO: 187479 - DNA, 25 bp, Artificial
  probe
  misc_feature (1)..(25): SEQ ID NO: 2506; WAN024EYI_at; Start 105; Stop 129
gcttcttgcaagtcaagcgactcat

SEQ ID NO: 187480 - DNA, 25 bp, Artificial
  probe
  misc_feature (1)..(25): SEQ ID NO: 2506; WAN024EYI_at; Start 144; Stop 168
gagtactcagcatccatcatccaga

SEQ ID NO: 187481 - DNA, 25 bp, Artificial
  probe
  misc_feature (1)..(25): SEQ ID NO: 2506; WAN024EYI_at; Start 217; Stop 241
gaccaaagtcaaagacacgaccaag

SEQ ID NO: 187482 - DNA, 25 bp, Artificial
  probe
  misc_feature (1)..(25): SEQ ID NO: 2506; WAN024EYI_at; Start 37; Stop 61
cacgttccaaggtttccaaggcttg

SEQ ID NO: 187483 - DNA, 25 bp, Artificial
  probe
  misc_feature (1)..(25): SEQ ID NO: 2506; WAN024EYI_at; Start 171; Stop 195
tcagtcaagtgacggcgtgtttttg

SEQ ID NO: 187484 - DNA, 25 bp, Artificial
  probe
  misc_feature (1)..(25): SEQ ID NO: 2506; WAN024EYI_at; Start 43; Stop 67
ccaaggtttccaaggcttgaggcgc

SEQ ID NO: 187485 - DNA, 25 bp, Artificial
  probe
  misc_feature (1)..(25): SEQ ID NO: 2506; WAN024EYI_at; Start 88; Stop 112
gaagagctttcacataagcttcttg

SEQ ID NO: 187486 - DNA, 25 bp, Artificial
  probe
  misc_feature (1)..(25): SEQ ID NO: 3941; WAN024EYJ_at; Start 62; Stop 86
gattcaccgatcacttcgatgtctg

SEQ ID NO: 187487 - DNA, 25 bp, Artificial
  probe
  misc_feature (1)..(25): SEQ ID NO: 3941; WAN024EYJ_at; Start 111; Stop 135
tagaacgttcgtcctctttgacaat

SEQ ID NO: 187488 - DNA, 25 bp, Artificial
  probe
  misc_feature (1)..(25): SEQ ID NO: 3941; WAN024EYJ_at; Start 234; Stop 258
taaaagccacaccttgaaagaaggc

SEQ ID NO: 187489 - DNA, 25 bp, Artificial
  probe
  misc_feature (1)..(25): SEQ ID NO: 3941; WAN024EYJ_at; Start 117; Stop 141
gttcgtcctctttgacaatacctgt

SEQ ID NO: 187490 - DNA, 25 bp, Artificial
  probe
  misc_feature (1)..(25): SEQ ID NO: 3941; WAN024EYJ_at; Start 99; Stop 123
catagccaaatttagaacgttcgtc

SEQ ID NO: 187491 - DNA, 25 bp, Artificial
  probe
  misc_feature (1)..(25): SEQ ID NO: 3941; WAN024EYJ_at; Start 85; Stop 109
tgtgatgtccaactcatagccaaat

SEQ ID NO: 187492 - DNA, 25 bp, Artificial
  probe
  misc_feature (1)..(25): SEQ ID NO: 3941; WAN024EYJ_at; Start 28; Stop 52
tccgtgttcttttggtgtgattggg

SEQ ID NO: 187493 - DNA, 25 bp, Artificial
  probe
  misc_feature (1)..(25): SEQ ID NO: 3941; WAN024EYJ_at; Start 132; Stop 156
caatacctgtcacataaacagacgt

SEQ ID NO: 187494 - DNA, 25 bp, Artificial
  probe
  misc_feature (1)..(25): SEQ ID NO: 3941; WAN024EYJ_at; Start 152; Stop 176
gacgtttcttggctcaagcgtttga

SEQ ID NO: 187495 - DNA, 25 bp, Artificial
  probe
  misc_feature (1)..(25): SEQ ID NO: 3941; WAN024EYJ_at; Start 46; Stop 70
gattgggtagtcttgagattcaccg

SEQ ID NO: 187496 - DNA, 25 bp, Artificial
  probe
  misc_feature (1)..(25): SEQ ID NO: 3941; WAN024EYJ_at; Start 253; Stop 277
gaaggctgttccatcacgcaattgt

SEQ ID NO: 187497 - DNA, 25 bp, Artificial
  probe
  misc_feature (1)..(25): SEQ ID NO: 3941; WAN024EYJ_at; Start 174; Stop 198
tgataacatcaaacttctcaagtcc

SEQ ID NO: 187498 - DNA, 25 bp, Artificial
  probe
  misc_feature (1)..(25): SEQ ID NO: 3941; WAN024EYJ_at; Start 5; Stop 29
cggttatccatcaaaaagtctgttc

SEQ ID NO: 187499 - DNA, 25 bp, Artificial
  probe
  misc_feature (1)..(25): SEQ ID NO: 3941; WAN024EYJ_at; Start 2; Stop 26
tgacggttatccatcaaaaagtctg

SEQ ID NO: 187500 - DNA, 25 bp, Artificial
  probe
  misc_feature (1)..(25): SEQ ID NO: 3941; WAN024EYJ_at; Start 51; Stop 75
ggtagtcttgagattcaccgatcac

SEQ ID NO: 187501 - DNA, 25 bp, Artificial
  probe
  misc_feature (1)..(25): SEQ ID NO: 3941; WAN024EYJ_at; Start 159; Stop 183
cttggctcaagcgtttgataacatc

SEQ ID NO: 187502 - DNA, 25 bp, Artificial
  probe
  misc_feature (1)..(25): SEQ ID NO: 3941; WAN024EYJ_at; Start 55; Stop 79
gtcttgagattcaccgatcacttcg

SEQ ID NO: 187503 - DNA, 25 bp, Artificial
  probe
  misc_feature (1)..(25): SEQ ID NO: 3941; WAN024EYJ_at; Start 78; Stop 102
cgatgtctgtgatgtccaactcata

SEQ ID NO: 187504 - DNA, 25 bp, Artificial
  probe
  misc_feature (1)..(25): SEQ ID NO: 3941; WAN024EYJ_at; Start 255; Stop 279
aggctgttccatcacgcaattgtaa

SEQ ID NO: 187505 - DNA, 25 bp, Artificial
  probe
  misc_feature (1)..(25): SEQ ID NO: 3941; WAN024EYJ_at; Start 90; Stop 114
tgtccaactcatagccaaatttaga

SEQ ID NO: 187506 - DNA, 25 bp, Artificial
  probe
  misc_feature (1)..(25): SEQ ID NO: 3941; WAN024EYJ_at; Start 249; Stop 273
gaaagaaggctgttccatcacgcaa

SEQ ID NO: 187507 - DNA, 25 bp, Artificial
  probe
  misc_feature (1)..(25): SEQ ID NO: 3941; WAN024EYJ_at; Start 199; Stop 223
cacttcttcaccaaatttttcgaca

SEQ ID NO: 187508 - DNA, 25 bp, Artificial
  probe
  misc_feature (1)..(25): SEQ ID NO: 3941; WAN024EYJ_at; Start 146; Stop 170
taaacagacgtttcttggctcaagc

SEQ ID NO: 187509 - DNA, 25 bp, Artificial
  probe
  misc_feature (1)..(25): SEQ ID NO: 3941; WAN024EYJ_at; Start 73; Stop 97
cacttcgatgtctgtgatgtccaac

SEQ ID NO: 187510 - DNA, 25 bp, Artificial
  probe
  misc_feature (1)..(25): SEQ ID NO: 3941; WAN024EYJ_at; Start 191; Stop 215
tcaagtcccacttcttcaccaaatt

SEQ ID NO: 187511 - DNA, 25 bp, Artificial
  probe
  misc_feature (1)..(25): SEQ ID NO: 3941; WAN024EYJ_at; Start 162; Stop 186
ggctcaagcgtttgataacatcaaa

SEQ ID NO: 187512 - DNA, 25 bp, Artificial
  probe
  misc_feature (1)..(25): SEQ ID NO: 3941; WAN024EYJ_at; Start 241; Stop 265
cacaccttgaaagaaggctgttcca

SEQ ID NO: 187513 - DNA, 25 bp, Artificial
  probe
  misc_feature (1)..(25): SEQ ID NO: 3941; WAN024EYJ_at; Start 13; Stop 37
catcaaaaagtctgttccgtgttct

SEQ ID NO: 187514 - DNA, 25 bp, Artificial
  probe
  misc_feature (1)..(25): SEQ ID NO: 3941; WAN024EYJ_at; Start 9; Stop 33
tatccatcaaaaagtctgttccgtg

SEQ ID NO: 187515 - DNA, 25 bp, Artificial
  probe
  misc_feature (1)..(25): SEQ ID NO: 3941; WAN024EYJ_at; Start 184; Stop 208
aaacttctcaagtcccacttcttca

SEQ ID NO: 187516 - DNA, 25 bp, Artificial
  probe
  misc_feature (1)..(25): SEQ ID NO: 3941; WAN024EYJ_at; Start 59; Stop 83
tgagattcaccgatcacttcgatgt

SEQ ID NO: 187517 - DNA, 25 bp, Artificial
  probe
  misc_feature (1)..(25): SEQ ID NO: 3941; WAN024EYJ_at; Start 81; Stop 105
tgtctgtgatgtccaactcatagcc

SEQ ID NO: 187518 - DNA, 25 bp, Artificial
  probe
  misc_feature (1)..(25): SEQ ID NO: 3941; WAN024EYJ_at; Start 35; Stop 59
tcttttggtgtgattgggtagtctt

SEQ ID NO: 187519 - DNA, 25 bp, Artificial
  probe
  misc_feature (1)..(25): SEQ ID NO: 3941; WAN024EYJ_at; Start 20; Stop 44
aagtctgttccgtgttcttttggtg

SEQ ID NO: 187520 - DNA, 25 bp, Artificial
  probe
  misc_feature (1)..(25): SEQ ID NO: 1302; WAN024EYK_at; Start 1263; Stop 1287
tatggtaaccttcgcagcaggaaca

SEQ ID NO: 187521 - DNA, 25 bp, Artificial
  probe
  misc_feature (1)..(25): SEQ ID NO: 1302; WAN024EYK_at; Start 283; Stop 307
tatgagttggacatcacagacatcg

SEQ ID NO: 187522 - DNA, 25 bp, Artificial
  probe
  misc_feature (1)..(25): SEQ ID NO: 1302; WAN024EYK_at; Start 1217; Stop 1241
aatacggtacagttccacacggagg

SEQ ID NO: 187523 - DNA, 25 bp, Artificial
  probe
  misc_feature (1)..(25): SEQ ID NO: 1302; WAN024EYK_at; Start 356; Stop 380
gaacagactttttgatggataaccg

SEQ ID NO: 187524 - DNA, 25 bp, Artificial
  probe
  misc_feature (1)..(25): SEQ ID NO: 1302; WAN024EYK_at; Start 1007; Stop 1031
tgaactatccagcagccatcaaggc

SEQ ID NO: 187525 - DNA, 25 bp, Artificial
  probe
  misc_feature (1)..(25): SEQ ID NO: 1302; WAN024EYK_at; Start 472; Stop 496
ggttttatgaagtttgacagcccaa

SEQ ID NO: 187526 - DNA, 25 bp, Artificial
  probe
  misc_feature (1)..(25): SEQ ID NO: 1302; WAN024EYK_at; Start 64; Stop 88
gcttgggttgccaacaaatcaggaa

SEQ ID NO: 187527 - DNA, 25 bp, Artificial
  probe
  misc_feature (1)..(25): SEQ ID NO: 1302; WAN024EYK_at; Start 109; Stop 133
caattgcgtgatggaacagccttct

SEQ ID NO: 187528 - DNA, 25 bp, Artificial
  probe
  misc_feature (1)..(25): SEQ ID NO: 1302; WAN024EYK_at; Start 1314; Stop 1338
cccacgtatgttgcaccgtatcaaa

SEQ ID NO: 187529 - DNA, 25 bp, Artificial
  probe
  misc_feature (1)..(25): SEQ ID NO: 1302; WAN024EYK_at; Start 553; Stop 577
ggaacgccagcctacttgagccaat

SEQ ID NO: 187530 - DNA, 25 bp, Artificial
  probe
  misc_feature (1)..(25): SEQ ID NO: 1302; WAN024EYK_at; Start 844; Stop 868
gcagagccattcaaacgtatcactt

SEQ ID NO: 187531 - DNA, 25 bp, Artificial
  probe
  misc_feature (1)..(25): SEQ ID NO: 1302; WAN024EYK_at; Start 806; Stop 830
ccttggaacgtgatacagaactctt

SEQ ID NO: 187532 - DNA, 25 bp, Artificial
  probe
  misc_feature (1)..(25): SEQ ID NO: 1302; WAN024EYK_at; Start 1025; Stop 1049
tcaaggccttctacatgaaaccagt

SEQ ID NO: 187533 - DNA, 25 bp, Artificial
  probe
  misc_feature (1)..(25): SEQ ID NO: 1302; WAN024EYK_at; Start 1141; Stop 1165
tacgatgcccttgtcgctaagatgg

SEQ ID NO: 187534 - DNA, 25 bp, Artificial
  probe
  misc_feature (1)..(25): SEQ ID NO: 1302; WAN024EYK_at; Start 1125; Stop 1149
tatgcgtgaggaagattacgatgcc

SEQ ID NO: 187535 - DNA, 25 bp, Artificial
  probe
  misc_feature (1)..(25): SEQ ID NO: 1302; WAN024EYK_at; Start 493; Stop 517
ccaattctttcaggaaatgcggcag

SEQ ID NO: 187536 - DNA, 25 bp, Artificial
  probe
  misc_feature (1)..(25): SEQ ID NO: 1302; WAN024EYK_at; Start 1077; Stop 1101
tgcagacttgcttgctccagaaggc

SEQ ID NO: 187537 - DNA, 25 bp, Artificial
  probe
  misc_feature (1)..(25): SEQ ID NO: 1302; WAN024EYK_at; Start 686; Stop 710
tctggatgatggatgctgagtactc

SEQ ID NO: 187538 - DNA, 25 bp, Artificial
  probe
  misc_feature (1)..(25): SEQ ID NO: 1302; WAN024EYK_at; Start 789; Stop 813
gcctcaagccttggaaaccttggaa

SEQ ID NO: 187539 - DNA, 25 bp, Artificial
  probe
  misc_feature (1)..(25): SEQ ID NO: 1302; WAN024EYK_at; Start 1051; Stop 1075
cctggaaatccagagcgcgtgcttt

SEQ ID NO: 187540 - DNA, 25 bp, Artificial
  probe
  misc_feature (1)..(25): SEQ ID NO: 1302; WAN024EYK_at; Start 871; Stop 895
gatcaagccattgacctcttgcaag

SEQ ID NO: 187541 - DNA, 25 bp, Artificial
  probe
  misc_feature (1)..(25): SEQ ID NO: 1302; WAN024EYK_at; Start 392; Stop 416
tacgctctcgtaagcaagtagctgt

SEQ ID NO: 187542 - DNA, 25 bp, Artificial
  probe
  misc_feature (1)..(25): SEQ ID NO: 1302; WAN024EYK_at; Start 1248; Stop 1272
tatcggtatcgaacgtatggtaacc

SEQ ID NO: 187543 - DNA, 25 bp, Artificial
  probe
  misc_feature (1)..(25): SEQ ID NO: 1302; WAN024EYK_at; Start 919; Stop 943
gactacgagcatcttgagcatggtg

SEQ ID NO: 187544 - DNA, 25 bp, Artificial
  probe
  misc_feature (1)..(25): SEQ ID NO: 1302; WAN024EYK_at; Start 578; Stop 602
caggtcagctttacctagaagcagg

SEQ ID NO: 187545 - DNA, 25 bp, Artificial
  probe
  misc_feature (1)..(25): SEQ ID NO: 1302; WAN024EYK_at; Start 649; Stop 673
gctgaaaaatcaaaaacacgccgtc

SEQ ID NO: 187546 - DNA, 25 bp, Artificial
  probe
  misc_feature (1)..(25): SEQ ID NO: 1302; WAN024EYK_at; Start 827; Stop 851
tcttgaaacgctacattgcagagcc

SEQ ID NO: 187547 - DNA, 25 bp, Artificial
  probe
  misc_feature (1)..(25): SEQ ID NO: 1302; WAN024EYK_at; Start 303; Stop 327
catcgaagtgatcggtgaatctcaa

SEQ ID NO: 187548 - DNA, 25 bp, Artificial
  probe
  misc_feature (1)..(25): SEQ ID NO: 1302; WAN024EYK_at; Start 949; Stop 973
tttgggtcaccacacgaaacttgga

SEQ ID NO: 187549 - DNA, 25 bp, Artificial
  probe
  misc_feature (1)..(25): SEQ ID NO: 1302; WAN024EYK_at; Start 249; Stop 273
tattgtcaaagaggacgaacgttct

SEQ ID NO: 187550 - DNA, 25 bp, Artificial
  probe
  misc_feature (1)..(25): SEQ ID NO: 1302; WAN024EYK_at; Start 901; Stop 925
gaaaatgatgaagatgctgactacg

SEQ ID NO: 187551 - DNA, 25 bp, Artificial
  probe
  misc_feature (1)..(25): SEQ ID NO: 1302; WAN024EYK_at; Start 1167; Stop 1191
tgaacttggcatggatcgtacagaa

SEQ ID NO: 187552 - DNA, 25 bp, Artificial
  probe
  misc_feature (1)..(25): SEQ ID NO: 1302; WAN024EYK_at; Start 538; Stop 562
gaaactgactacttcggaacgccag

SEQ ID NO: 187553 - DNA, 25 bp, Artificial
  probe
  misc_feature (1)..(25): SEQ ID NO: 1302; WAN024EYK_at; Start 719; Stop 743
cacatgatgagtcgcttgacttgca

SEQ ID NO: 187554 - DNA, 25 bp, Artificial
  probe
  misc_feature (1)..(25): SEQ ID NO: 5512; WAN024EYL_at; Start 93; Stop 117
tccgttgagttcaaaagtcttagca

SEQ ID NO: 187555 - DNA, 25 bp, Artificial
  probe
  misc_feature (1)..(25): SEQ ID NO: 5512; WAN024EYL_at; Start 309; Stop 333
tgcaatctctttaggcacagctaca

SEQ ID NO: 187556 - DNA, 25 bp, Artificial
  probe
  misc_feature (1)..(25): SEQ ID NO: 5512; WAN024EYL_at; Start 19; Stop 43
gcttcaatttctgcttggcgttcca

SEQ ID NO: 187557 - DNA, 25 bp, Artificial
  probe
  misc_feature (1)..(25): SEQ ID NO: 5512; WAN024EYL_at; Start 246; Stop 270
tgggtgtgttgttggtgatttcaaa

SEQ ID NO: 187558 - DNA, 25 bp, Artificial
  probe
  misc_feature (1)..(25): SEQ ID NO: 5512; WAN024EYL_at; Start 59; Stop 83
caactgtgttcacttgggcaacacg

SEQ ID NO: 187559 - DNA, 25 bp, Artificial
  probe
  misc_feature (1)..(25): SEQ ID NO: 5512; WAN024EYL_at; Start 124; Stop 148
tcaatcaattcttcagcagatttgc

SEQ ID NO: 187560 - DNA, 25 bp, Artificial
  probe
  misc_feature (1)..(25): SEQ ID NO: 5512; WAN024EYL_at; Start 139; Stop 163
gcagatttgctagccaagttggtac

SEQ ID NO: 187561 - DNA, 25 bp, Artificial
  probe
  misc_feature (1)..(25): SEQ ID NO: 5512; WAN024EYL_at; Start 203; Stop 227
caccagccaattcagccaattcagg

SEQ ID NO: 187562 - DNA, 25 bp, Artificial
  probe
  misc_feature (1)..(25): SEQ ID NO: 5512; WAN024EYL_at; Start 259; Stop 283
ggtgatttcaaaagaagggtatctg

SEQ ID NO: 187563 - DNA, 25 bp, Artificial
  probe
  misc_feature (1)..(25): SEQ ID NO: 5512; WAN024EYL_at; Start 149; Stop 173
tagccaagttggtaccagctttcaa

SEQ ID NO: 187564 - DNA, 25 bp, Artificial
  probe
  misc_feature (1)..(25): SEQ ID NO: 5512; WAN024EYL_at; Start 84; Stop 108
gacattatttccgttgagttcaaaa

SEQ ID NO: 187565 - DNA, 25 bp, Artificial
  probe
  misc_feature (1)..(25): SEQ ID NO: 5512; WAN024EYL_at; Start 129; Stop 153
caattcttcagcagatttgctagcc

SEQ ID NO: 187566 - DNA, 25 bp, Artificial
  probe
  misc_feature (1)..(25): SEQ ID NO: 5512; WAN024EYL_at; Start 218; Stop 242
ccaattcaggagcaatgattttatc

SEQ ID NO: 187567 - DNA, 25 bp, Artificial
  probe
  misc_feature (1)..(25): SEQ ID NO: 5512; WAN024EYL_at; Start 73; Stop 97
tgggcaacacggacattatttccgt

SEQ ID NO: 187568 - DNA, 25 bp, Artificial
  probe
  misc_feature (1)..(25): SEQ ID NO: 5512; WAN024EYL_at; Start 68; Stop 92
tcacttgggcaacacggacattatt

SEQ ID NO: 187569 - DNA, 25 bp, Artificial
  probe
  misc_feature (1)..(25): SEQ ID NO: 5512; WAN024EYL_at; Start 98; Stop 122
tgagttcaaaagtcttagcatcgat

SEQ ID NO: 187570 - DNA, 25 bp, Artificial
  probe
  misc_feature (1)..(25): SEQ ID NO: 5512; WAN024EYL_at; Start 42; Stop 66
caaaacttcagcgatgtcaactgtg

SEQ ID NO: 187571 - DNA, 25 bp, Artificial
  probe
  misc_feature (1)..(25): SEQ ID NO: 5512; WAN024EYL_at; Start 316; Stop 340
tctttaggcacagctacaccatgtt

SEQ ID NO: 187572 - DNA, 25 bp, Artificial
  probe
  misc_feature (1)..(25): SEQ ID NO: 5512; WAN024EYL_at; Start 159; Stop 183
ggtaccagctttcaacattgccaaa

SEQ ID NO: 187573 - DNA, 25 bp, Artificial
  probe
  misc_feature (1)..(25): SEQ ID NO: 5512; WAN024EYL_at; Start 36; Stop 60
gcgttccaaaacttcagcgatgtca

SEQ ID NO: 187574 - DNA, 25 bp, Artificial
  probe
  misc_feature (1)..(25): SEQ ID NO: 5512; WAN024EYL_at; Start 287; Stop 311
tcaaacctgaaagcatcaaacctgc

SEQ ID NO: 187575 - DNA, 25 bp, Artificial
  probe
  misc_feature (1)..(25): SEQ ID NO: 5512; WAN024EYL_at; Start 30; Stop 54
tgcttggcgttccaaaacttcagcg

SEQ ID NO: 187576 - DNA, 25 bp, Artificial
  probe
  misc_feature (1)..(25): SEQ ID NO: 5512; WAN024EYL_at; Start 7; Stop 31
gcttgcattgcagcttcaatttctg

SEQ ID NO: 187577 - DNA, 25 bp, Artificial
  probe
  misc_feature (1)..(25): SEQ ID NO: 5512; WAN024EYL_at; Start 1; Stop 25
ttggcagcttgcattgcagcttcaa

SEQ ID NO: 187578 - DNA, 25 bp, Artificial
  probe
  misc_feature (1)..(25): SEQ ID NO: 5512; WAN024EYL_at; Start 211; Stop 235
aattcagccaattcaggagcaatga

SEQ ID NO: 187579 - DNA, 25 bp, Artificial
  probe
  misc_feature (1)..(25): SEQ ID NO: 5512; WAN024EYL_at; Start 272; Stop 296
gaagggtatctgaaatcaaacctga

SEQ ID NO: 187580 - DNA, 25 bp, Artificial
  probe
  misc_feature (1)..(25): SEQ ID NO: 5512; WAN024EYL_at; Start 330; Stop 354
tacaccatgttctttgaacatacgg

SEQ ID NO: 187581 - DNA, 25 bp, Artificial
  probe
  misc_feature (1)..(25): SEQ ID NO: 5512; WAN024EYL_at; Start 303; Stop 327
caaacctgcaatctctttaggcaca

SEQ ID NO: 187582 - DNA, 25 bp, Artificial
  probe
  misc_feature (1)..(25): SEQ ID NO: 5512; WAN024EYL_at; Start 174; Stop 198
cattgccaaaccatattcttccaag

SEQ ID NO: 187583 - DNA, 25 bp, Artificial
  probe
  misc_feature (1)..(25): SEQ ID NO: 5512; WAN024EYL_at; Start 280; Stop 304
tctgaaatcaaacctgaaagcatca

SEQ ID NO: 187584 - DNA, 25 bp, Artificial
  probe
  misc_feature (1)..(25): SEQ ID NO: 5512; WAN024EYL_at; Start 229; Stop 253
gcaatgattttatctgttgggtgtg

SEQ ID NO: 187585 - DNA, 25 bp, Artificial
  probe
  misc_feature (1)..(25): SEQ ID NO: 5512; WAN024EYL_at; Start 53; Stop 77
cgatgtcaactgtgttcacttgggc

SEQ ID NO: 187586 - DNA, 25 bp, Artificial
  probe
  misc_feature (1)..(25): SEQ ID NO: 5512; WAN024EYL_at; Start 294; Stop 318
tgaaagcatcaaacctgcaatctct

SEQ ID NO: 187587 - DNA, 25 bp, Artificial
  probe
  misc_feature (1)..(25): SEQ ID NO: 5512; WAN024EYL_at; Start 322; Stop 346
ggcacagctacaccatgttctttga

SEQ ID NO: 187588 - DNA, 25 bp, Artificial
  probe
  misc_feature (1)..(25): SEQ ID NO: 2883; WAN024EYM_at; Start 772; Stop 796
gatatcgtcaactcaaactcagaaa

SEQ ID NO: 187589 - DNA, 25 bp, Artificial
  probe
  misc_feature (1)..(25): SEQ ID NO: 2883; WAN024EYM_at; Start 495; Stop 519
aatcattgctcctgaattggctgaa

SEQ ID NO: 187590 - DNA, 25 bp, Artificial
  probe
  misc_feature (1)..(25): SEQ ID NO: 2883; WAN024EYM_at; Start 738; Stop 762
aaacggctactctgactttgtcttg

SEQ ID NO: 187591 - DNA, 25 bp, Artificial
  probe
  misc_feature (1)..(25): SEQ ID NO: 2883; WAN024EYM_at; Start 91; Stop 115
tacggtttggatacggaagctgttg

SEQ ID NO: 187592 - DNA, 25 bp, Artificial
  probe
  misc_feature (1)..(25): SEQ ID NO: 2883; WAN024EYM_at; Start 6; Stop 30
caagattctagtatttggtcaccaa

SEQ ID NO: 187593 - DNA, 25 bp, Artificial
  probe
  misc_feature (1)..(25): SEQ ID NO: 2883; WAN024EYM_at; Start 211; Stop 235
gagcaagttatcttgactgaccaca

SEQ ID NO: 187594 - DNA, 25 bp, Artificial
  probe
  misc_feature (1)..(25): SEQ ID NO: 2883; WAN024EYM_at; Start 181; Stop 205
gttatcacttctgccaaagcagagg

SEQ ID NO: 187595 - DNA, 25 bp, Artificial
  probe
  misc_feature (1)..(25): SEQ ID NO: 2883; WAN024EYM_at; Start 121; Stop 145
ggaactccaaatgaagaaacagcct

SEQ ID NO: 187596 - DNA, 25 bp, Artificial
  probe
  misc_feature (1)..(25): SEQ ID NO: 2883; WAN024EYM_at; Start 285; Stop 309
tgttgtagaccaccaccgtgtggct

SEQ ID NO: 187597 - DNA, 25 bp, Artificial
  probe
  misc_feature (1)..(25): SEQ ID NO: 2883; WAN024EYM_at; Start 688; Stop 712
ttggaacgccaagcagaaattgaag

SEQ ID NO: 187598 - DNA, 25 bp, Artificial
  probe
  misc_feature (1)..(25): SEQ ID NO: 2883; WAN024EYM_at; Start 705; Stop 729
aattgaagctgcaatgcaagctgcc

SEQ ID NO: 187599 - DNA, 25 bp, Artificial
  probe
  misc_feature (1)..(25): SEQ ID NO: 2883; WAN024EYM_at; Start 816; Stop 840
tatggacaaggtcgaagcggctttc

SEQ ID NO: 187600 - DNA, 25 bp, Artificial
  probe
  misc_feature (1)..(25): SEQ ID NO: 2883; WAN024EYM_at; Start 106; Stop 130
gaagctgttgcccttggaactccaa

SEQ ID NO: 187601 - DNA, 25 bp, Artificial
  probe
  misc_feature (1)..(25): SEQ ID NO: 2883; WAN024EYM_at; Start 887; Stop 911
cacgtaagaaacaagtggtacctca

SEQ ID NO: 187602 - DNA, 25 bp, Artificial
  probe
  misc_feature (1)..(25): SEQ ID NO: 2883; WAN024EYM_at; Start 345; Stop 369
ggagccagttggatcagcgtcttca

SEQ ID NO: 187603 - DNA, 25 bp, Artificial
  probe
  misc_feature (1)..(25): SEQ ID NO: 2883; WAN024EYM_at; Start 152; Stop 176
tgaactattttggtgtggaagcacc

SEQ ID NO: 187604 - DNA, 25 bp, Artificial
  probe
  misc_feature (1)..(25): SEQ ID NO: 2883; WAN024EYM_at; Start 638; Stop 662
gaaataatgtccgtgttgcccaagt

SEQ ID NO: 187605 - DNA, 25 bp, Artificial
  probe
  misc_feature (1)..(25): SEQ ID NO: 2883; WAN024EYM_at; Start 257; Stop 281
cagatatcgctgaagtagaagttta

SEQ ID NO: 187606 - DNA, 25 bp, Artificial
  probe
  misc_feature (1)..(25): SEQ ID NO: 2883; WAN024EYM_at; Start 360; Stop 384
agcgtcttcaatcgtttaccgtatg

SEQ ID NO: 187607 - DNA, 25 bp, Artificial
  probe
  misc_feature (1)..(25): SEQ ID NO: 2883; WAN024EYM_at; Start 873; Stop 897
tgctggtgccgtttcacgtaagaaa

SEQ ID NO: 187608 - DNA, 25 bp, Artificial
  probe
  misc_feature (1)..(25): SEQ ID NO: 2883; WAN024EYM_at; Start 409; Stop 433
cctaaagagattgcaggtttgatgc

SEQ ID NO: 187609 - DNA, 25 bp, Artificial
  probe
  misc_feature (1)..(25): SEQ ID NO: 2883; WAN024EYM_at; Start 801; Stop 825
ggctcttggtgccaatatggacaag

SEQ ID NO: 187610 - DNA, 25 bp, Artificial
  probe
  misc_feature (1)..(25): SEQ ID NO: 2883; WAN024EYM_at; Start 329; Stop 353
cactttacatgcgtttggagccagt

SEQ ID NO: 187611 - DNA, 25 bp, Artificial
  probe
  misc_feature (1)..(25): SEQ ID NO: 2883; WAN024EYM_at; Start 572; Stop 596
ccaacttggctagcaaatctgctga

SEQ ID NO: 187612 - DNA, 25 bp, Artificial
  probe
  misc_feature (1)..(25): SEQ ID NO: 2883; WAN024EYM_at; Start 673; Stop 697
gacatcgctgaagttttggaacgcc

SEQ ID NO: 187613 - DNA, 25 bp, Artificial
  probe
  misc_feature (1)..(25): SEQ ID NO: 2883; WAN024EYM_at; Start 167; Stop 191
tggaagcaccacgtgttatcacttc

SEQ ID NO: 187614 - DNA, 25 bp, Artificial
  probe
  misc_feature (1)..(25): SEQ ID NO: 2883; WAN024EYM_at; Start 300; Stop 324
ccgtgtggctaactttgaaactgca

SEQ ID NO: 187615 - DNA, 25 bp, Artificial
  probe
  misc_feature (1)..(25): SEQ ID NO: 2883; WAN024EYM_at; Start 383; Stop 407
tgttcaaagaacatggtgtagctgt

SEQ ID NO: 187616 - DNA, 25 bp, Artificial
  probe
  misc_feature (1)..(25): SEQ ID NO: 2883; WAN024EYM_at; Start 557; Stop 581
tgttgaaagctggtaccaacttggc

SEQ ID NO: 187617 - DNA, 25 bp, Artificial
  probe
  misc_feature (1)..(25): SEQ ID NO: 2883; WAN024EYM_at; Start 859; Stop 883
aatcatgccttccttgctggtgccg

SEQ ID NO: 187618 - DNA, 25 bp, Artificial
  probe
  misc_feature (1)..(25): SEQ ID NO: 2883; WAN024EYM_at; Start 70; Stop 94
gcctaccttgcaaaagaagcttacg

SEQ ID NO: 187619 - DNA, 25 bp, Artificial
  probe
  misc_feature (1)..(25): SEQ ID NO: 2883; WAN024EYM_at; Start 616; Stop 640
gctaagacttttgaactcaacggaa

SEQ ID NO: 187620 - DNA, 25 bp, Artificial
  probe
  misc_feature (1)..(25): SEQ ID NO: 2883; WAN024EYM_at; Start 719; Stop 743
tgcaagctgccaacgaatcaaacgg

SEQ ID NO: 187621 - DNA, 25 bp, Artificial
  probe
  misc_feature (1)..(25): SEQ ID NO: 2883; WAN024EYM_at; Start 657; Stop 681
ccaagtgaacacagttgacatcgct

SEQ ID NO: 187622 - DNA, 25 bp, Artificial
  probe
  misc_feature (1)..(25): SEQ ID NO: 101; WAN024EYN_at; Start 118; Stop 142
tcttctacaacgtcttttgccttag

SEQ ID NO: 187623 - DNA, 25 bp, Artificial
  probe
  misc_feature (1)..(25): SEQ ID NO: 101; WAN024EYN_at; Start 168; Stop 192
aagttctgtcttgctgtctccagta

SEQ ID NO: 187624 - DNA, 25 bp, Artificial
  probe
  misc_feature (1)..(25): SEQ ID NO: 101; WAN024EYN_at; Start 215; Stop 239
cagcgcctgttgcttgttccaattt

SEQ ID NO: 187625 - DNA, 25 bp, Artificial
  probe
  misc_feature (1)..(25): SEQ ID NO: 101; WAN024EYN_at; Start 156; Stop 180
aacagctccttcaagttctgtcttg

SEQ ID NO: 187626 - DNA, 25 bp, Artificial
  probe
  misc_feature (1)..(25): SEQ ID NO: 101; WAN024EYN_at; Start 114; Stop 138
tgcgtcttctacaacgtcttttgcc

SEQ ID NO: 187627 - DNA, 25 bp, Artificial
  probe
  misc_feature (1)..(25): SEQ ID NO: 101; WAN024EYN_at; Start 105; Stop 129
agcaccttttgcgtcttctacaacg

SEQ ID NO: 187628 - DNA, 25 bp, Artificial
  probe
  misc_feature (1)..(25): SEQ ID NO: 101; WAN024EYN_at; Start 79; Stop 103
ttcaaaccttcaacggcaccttcta

SEQ ID NO: 187629 - DNA, 25 bp, Artificial
  probe
  misc_feature (1)..(25): SEQ ID NO: 101; WAN024EYN_at; Start 93; Stop 117
ggcaccttctacagcaccttttgcg

SEQ ID NO: 187630 - DNA, 25 bp, Artificial
  probe
  misc_feature (1)..(25): SEQ ID NO: 101; WAN024EYN_at; Start 217; Stop 241
gcgcctgttgcttgttccaatttgt

SEQ ID NO: 187631 - DNA, 25 bp, Artificial
  probe
  misc_feature (1)..(25): SEQ ID NO: 101; WAN024EYN_at; Start 212; Stop 236
tgacagcgcctgttgcttgttccaa

SEQ ID NO: 187632 - DNA, 25 bp, Artificial
  probe
  misc_feature (1)..(25): SEQ ID NO: 101; WAN024EYN_at; Start 160; Stop 184
gctccttcaagttctgtcttgctgt

SEQ ID NO: 187633 - DNA, 25 bp, Artificial
  probe
  misc_feature (1)..(25): SEQ ID NO: 101; WAN024EYN_at; Start 180; Stop 204
gctgtctccagtaactttaccaaaa

SEQ ID NO: 187634 - DNA, 25 bp, Artificial
  probe
  misc_feature (1)..(25): SEQ ID NO: 101; WAN024EYN_at; Start 166; Stop 190
tcaagttctgtcttgctgtctccag

SEQ ID NO: 187635 - DNA, 25 bp, Artificial
  probe
  misc_feature (1)..(25): SEQ ID NO: 101; WAN024EYN_at; Start 91; Stop 115
acggcaccttctacagcaccttttg

SEQ ID NO: 187636 - DNA, 25 bp, Artificial
  probe
  misc_feature (1)..(25): SEQ ID NO: 101; WAN024EYN_at; Start 213; Stop 237
gacagcgcctgttgcttgttccaat

SEQ ID NO: 187637 - DNA, 25 bp, Artificial
  probe
  misc_feature (1)..(25): SEQ ID NO: 101; WAN024EYN_at; Start 205; Stop 229
ccttctttgacagcgcctgttgctt

SEQ ID NO: 187638 - DNA, 25 bp, Artificial
  probe
  misc_feature (1)..(25): SEQ ID NO: 101; WAN024EYN_at; Start 229; Stop 253
tgttccaatttgttttcaagtgaca

SEQ ID NO: 187639 - DNA, 25 bp, Artificial
  probe
  misc_feature (1)..(25): SEQ ID NO: 101; WAN024EYN_at; Start 109; Stop 133
ccttttgcgtcttctacaacgtctt

SEQ ID NO: 187640 - DNA, 25 bp, Artificial
  probe
  misc_feature (1)..(25): SEQ ID NO: 101; WAN024EYN_at; Start 26; Stop 50
atcaagggaaaatgaaacccttgat

SEQ ID NO: 187641 - DNA, 25 bp, Artificial
  probe
  misc_feature (1)..(25): SEQ ID NO: 101; WAN024EYN_at; Start 124; Stop 148
acaacgtcttttgccttagcaactg

SEQ ID NO: 187642 - DNA, 25 bp, Artificial
  probe
  misc_feature (1)..(25): SEQ ID NO: 101; WAN024EYN_at; Start 135; Stop 159
tgccttagcaactgttttttcaaca

SEQ ID NO: 187643 - DNA, 25 bp, Artificial
  probe
  misc_feature (1)..(25): SEQ ID NO: 101; WAN024EYN_at; Start 151; Stop 175
ttttcaacagctccttcaagttctg

SEQ ID NO: 187644 - DNA, 25 bp, Artificial
  probe
  misc_feature (1)..(25): SEQ ID NO: 101; WAN024EYN_at; Start 140; Stop 164
tagcaactgttttttcaacagctcc

SEQ ID NO: 187645 - DNA, 25 bp, Artificial
  probe
  misc_feature (1)..(25): SEQ ID NO: 101; WAN024EYN_at; Start 219; Stop 243
gcctgttgcttgttccaatttgttt

SEQ ID NO: 187646 - DNA, 25 bp, Artificial
  probe
  misc_feature (1)..(25): SEQ ID NO: 101; WAN024EYN_at; Start 10; Stop 34
tataagaatagaaaaaatcaaggga

SEQ ID NO: 187647 - DNA, 25 bp, Artificial
  probe
  misc_feature (1)..(25): SEQ ID NO: 101; WAN024EYN_at; Start 197; Stop 221
taccaaaaccttctttgacagcgcc

SEQ ID NO: 187648 - DNA, 25 bp, Artificial
  probe
  misc_feature (1)..(25): SEQ ID NO: 101; WAN024EYN_at; Start 172; Stop 196
tctgtcttgctgtctccagtaactt

SEQ ID NO: 187649 - DNA, 25 bp, Artificial
  probe
  misc_feature (1)..(25): SEQ ID NO: 101; WAN024EYN_at; Start 234; Stop 258
caatttgttttcaagtgacatatga

SEQ ID NO: 187650 - DNA, 25 bp, Artificial
  probe
  misc_feature (1)..(25): SEQ ID NO: 101; WAN024EYN_at; Start 96; Stop 120
accttctacagcaccttttgcgtct

SEQ ID NO: 187651 - DNA, 25 bp, Artificial
  probe
  misc_feature (1)..(25): SEQ ID NO: 101; WAN024EYN_at; Start 122; Stop 146
ctacaacgtcttttgccttagcaac

SEQ ID NO: 187652 - DNA, 25 bp, Artificial
  probe
  misc_feature (1)..(25): SEQ ID NO: 101; WAN024EYN_at; Start 176; Stop 200
tcttgctgtctccagtaactttacc

SEQ ID NO: 187653 - DNA, 25 bp, Artificial
  probe
  misc_feature (1)..(25): SEQ ID NO: 101; WAN024EYN_at; Start 200; Stop 224
caaaaccttctttgacagcgcctgt

SEQ ID NO: 187654 - DNA, 25 bp, Artificial
  probe
  misc_feature (1)..(25): SEQ ID NO: 101; WAN024EYN_at; Start 102; Stop 126
tacagcaccttttgcgtcttctaca

SEQ ID NO: 187655 - DNA, 25 bp, Artificial
  probe
  misc_feature (1)..(25): SEQ ID NO: 101; WAN024EYN_at; Start 202; Stop 226
aaaccttctttgacagcgcctgttg

SEQ ID NO: 187656 - DNA, 25 bp, Artificial
  probe
  misc_feature (1)..(25): SEQ ID NO: 2856; WAN024EYO_at; Start 22; Stop 46
gaacaagcaacaggcgctgtcaaag

SEQ ID NO: 187657 - DNA, 25 bp, Artificial
  probe
  misc_feature (1)..(25): SEQ ID NO: 2856; WAN024EYO_at; Start 129; Stop 153
tgtagaagacgcaaaaggtgctgta

SEQ ID NO: 187658 - DNA, 25 bp, Artificial
  probe
  misc_feature (1)..(25): SEQ ID NO: 2856; WAN024EYO_at; Start 15; Stop 39
caaattggaacaagcaacaggcgct

SEQ ID NO: 187659 - DNA, 25 bp, Artificial
  probe
  misc_feature (1)..(25): SEQ ID NO: 2856; WAN024EYO_at; Start 35; Stop 59
gcgctgtcaaagaaggttttggtaa

SEQ ID NO: 187660 - DNA, 25 bp, Artificial
  probe
  misc_feature (1)..(25): SEQ ID NO: 2856; WAN024EYO_at; Start 152; Stop 176
tagaaggtgccgttgaaggtttgaa

SEQ ID NO: 187661 - DNA, 25 bp, Artificial
  probe
  misc_feature (1)..(25): SEQ ID NO: 2856; WAN024EYO_at; Start 65; Stop 89
ctggagacagcaagacagaacttga

SEQ ID NO: 187662 - DNA, 25 bp, Artificial
  probe
  misc_feature (1)..(25): SEQ ID NO: 2856; WAN024EYO_at; Start 72; Stop 96
cagcaagacagaacttgaaggagct

SEQ ID NO: 187663 - DNA, 25 bp, Artificial
  probe
  misc_feature (1)..(25): SEQ ID NO: 2856; WAN024EYO_at; Start 2; Stop 26
tgtcacttgaaaacaaattggaaca

SEQ ID NO: 187664 - DNA, 25 bp, Artificial
  probe
  misc_feature (1)..(25): SEQ ID NO: 2856; WAN024EYO_at; Start 51; Stop 75
ttttggtaaagttactggagacagc

SEQ ID NO: 187665 - DNA, 25 bp, Artificial
  probe
  misc_feature (1)..(25): SEQ ID NO: 2856; WAN024EYO_at; Start 13; Stop 37
aacaaattggaacaagcaacaggcg

SEQ ID NO: 187666 - DNA, 25 bp, Artificial
  probe
  misc_feature (1)..(25): SEQ ID NO: 2856; WAN024EYO_at; Start 63; Stop 87
tactggagacagcaagacagaactt

SEQ ID NO: 187667 - DNA, 25 bp, Artificial
  probe
  misc_feature (1)..(25): SEQ ID NO: 2856; WAN024EYO_at; Start 109; Stop 133
gttgctaaggcaaaagacgttgtag

SEQ ID NO: 187668 - DNA, 25 bp, Artificial
  probe
  misc_feature (1)..(25): SEQ ID NO: 2856; WAN024EYO_at; Start 103; Stop 127
aaaacagttgctaaggcaaaagacg

SEQ ID NO: 187669 - DNA, 25 bp, Artificial
  probe
  misc_feature (1)..(25): SEQ ID NO: 2856; WAN024EYO_at; Start 126; Stop 150
cgttgtagaagacgcaaaaggtgct

SEQ ID NO: 187670 - DNA, 25 bp, Artificial
  probe
  misc_feature (1)..(25): SEQ ID NO: 2856; WAN024EYO_at; Start 119; Stop 143
caaaagacgttgtagaagacgcaaa

SEQ ID NO: 187671 - DNA, 25 bp, Artificial
  probe
  misc_feature (1)..(25): SEQ ID NO: 2856; WAN024EYO_at; Start 68; Stop 92
gagacagcaagacagaacttgaagg

SEQ ID NO: 187672 - DNA, 25 bp, Artificial
  probe
  misc_feature (1)..(25): SEQ ID NO: 2856; WAN024EYO_at; Start 84; Stop 108
acttgaaggagctgttgaaaaaaca

SEQ ID NO: 187673 - DNA, 25 bp, Artificial
  probe
  misc_feature (1)..(25): SEQ ID NO: 2856; WAN024EYO_at; Start 133; Stop 157
gaagacgcaaaaggtgctgtagaag

SEQ ID NO: 187674 - DNA, 25 bp, Artificial
  probe
  misc_feature (1)..(25): SEQ ID NO: 2856; WAN024EYO_at; Start 96; Stop 120
tgttgaaaaaacagttgctaaggca

SEQ ID NO: 187675 - DNA, 25 bp, Artificial
  probe
  misc_feature (1)..(25): SEQ ID NO: 2856; WAN024EYO_at; Start 117; Stop 141
ggcaaaagacgttgtagaagacgca

SEQ ID NO: 187676 - DNA, 25 bp, Artificial
  probe
  misc_feature (1)..(25): SEQ ID NO: 2856; WAN024EYO_at; Start 19; Stop 43
ttggaacaagcaacaggcgctgtca

SEQ ID NO: 187677 - DNA, 25 bp, Artificial
  probe
  misc_feature (1)..(25): SEQ ID NO: 2856; WAN024EYO_at; Start 91; Stop 115
ggagctgttgaaaaaacagttgcta

SEQ ID NO: 187678 - DNA, 25 bp, Artificial
  probe
  misc_feature (1)..(25): SEQ ID NO: 2856; WAN024EYO_at; Start 29; Stop 53
caacaggcgctgtcaaagaaggttt

SEQ ID NO: 187679 - DNA, 25 bp, Artificial
  probe
  misc_feature (1)..(25): SEQ ID NO: 2856; WAN024EYO_at; Start 107; Stop 131
cagttgctaaggcaaaagacgttgt

SEQ ID NO: 187680 - DNA, 25 bp, Artificial
  probe
  misc_feature (1)..(25): SEQ ID NO: 2856; WAN024EYO_at; Start 80; Stop 104
cagaacttgaaggagctgttgaaaa

SEQ ID NO: 187681 - DNA, 25 bp, Artificial
  probe
  misc_feature (1)..(25): SEQ ID NO: 2856; WAN024EYO_at; Start 26; Stop 50
aagcaacaggcgctgtcaaagaagg

SEQ ID NO: 187682 - DNA, 25 bp, Artificial
  probe
  misc_feature (1)..(25): SEQ ID NO: 2856; WAN024EYO_at; Start 54; Stop 78
tggtaaagttactggagacagcaag

SEQ ID NO: 187683 - DNA, 25 bp, Artificial
  probe
  misc_feature (1)..(25): SEQ ID NO: 2856; WAN024EYO_at; Start 122; Stop 146
aagacgttgtagaagacgcaaaagg

SEQ ID NO: 187684 - DNA, 25 bp, Artificial
  probe
  misc_feature (1)..(25): SEQ ID NO: 2856; WAN024EYO_at; Start 17; Stop 41
aattggaacaagcaacaggcgctgt

SEQ ID NO: 187685 - DNA, 25 bp, Artificial
  probe
  misc_feature (1)..(25): SEQ ID NO: 2856; WAN024EYO_at; Start 75; Stop 99
caagacagaacttgaaggagctgtt

SEQ ID NO: 187686 - DNA, 25 bp, Artificial
  probe
  misc_feature (1)..(25): SEQ ID NO: 2856; WAN024EYO_at; Start 114; Stop 138
taaggcaaaagacgttgtagaagac

SEQ ID NO: 187687 - DNA, 25 bp, Artificial
  probe
  misc_feature (1)..(25): SEQ ID NO: 2856; WAN024EYO_at; Start 57; Stop 81
taaagttactggagacagcaagaca

SEQ ID NO: 187688 - DNA, 25 bp, Artificial
  probe
  misc_feature (1)..(25): SEQ ID NO: 2856; WAN024EYO_at; Start 32; Stop 56
caggcgctgtcaaagaaggttttgg

SEQ ID NO: 187689 - DNA, 25 bp, Artificial
  probe
  misc_feature (1)..(25): SEQ ID NO: 2856; WAN024EYO_at; Start 59; Stop 83
aagttactggagacagcaagacaga

SEQ ID NO: 187690 - DNA, 25 bp, Artificial
  probe
  misc_feature (1)..(25): SEQ ID NO: 1651; WAN024EYP_at; Start 55; Stop 79
gtcgatgaagaccttggctccattt

SEQ ID NO: 187691 - DNA, 25 bp, Artificial
  probe
  misc_feature (1)..(25): SEQ ID NO: 1651; WAN024EYP_at; Start 91; Stop 115
gacttccatacgaccaggaacgcgg

SEQ ID NO: 187692 - DNA, 25 bp, Artificial
  probe
  misc_feature (1)..(25): SEQ ID NO: 1651; WAN024EYP_at; Start 36; Stop 60
tatccccattgtgggcatagtcgat

SEQ ID NO: 187693 - DNA, 25 bp, Artificial
  probe
  misc_feature (1)..(25): SEQ ID NO: 1651; WAN024EYP_at; Start 26; Stop 50
tttttcagactatccccattgtggg

SEQ ID NO: 187694 - DNA, 25 bp, Artificial
  probe
  misc_feature (1)..(25): SEQ ID NO: 1651; WAN024EYP_at; Start 98; Stop 122
atacgaccaggaacgcgggttgcag

SEQ ID NO: 187695 - DNA, 25 bp, Artificial
  probe
  misc_feature (1)..(25): SEQ ID NO: 1651; WAN024EYP_at; Start 109; Stop 133
aacgcgggttgcagcgatgcctttt

SEQ ID NO: 187696 - DNA, 25 bp, Artificial
  probe
  misc_feature (1)..(25): SEQ ID NO: 1651; WAN024EYP_at; Start 11; Stop 35
accacattgatgagttttttcagac

SEQ ID NO: 187697 - DNA, 25 bp, Artificial
  probe
  misc_feature (1)..(25): SEQ ID NO: 1651; WAN024EYP_at; Start 122; Stop 146
gcgatgccttttttgatgtcctcaa

SEQ ID NO: 187698 - DNA, 25 bp, Artificial
  probe
  misc_feature (1)..(25): SEQ ID NO: 1651; WAN024EYP_at; Start 2; Stop 26
tgagtttcaaccacattgatgagtt

SEQ ID NO: 187699 - DNA, 25 bp, Artificial
  probe
  misc_feature (1)..(25): SEQ ID NO: 1651; WAN024EYP_at; Start 64; Stop 88
gaccttggctccatttttctgagtg

SEQ ID NO: 187700 - DNA, 25 bp, Artificial
  probe
  misc_feature (1)..(25): SEQ ID NO: 1651; WAN024EYP_at; Start 118; Stop 142
tgcagcgatgccttttttgatgtcc

SEQ ID NO: 187701 - DNA, 25 bp, Artificial
  probe
  misc_feature (1)..(25): SEQ ID NO: 1651; WAN024EYP_at; Start 222; Stop 246
tatcataatctccagcgagtttacc

SEQ ID NO: 187702 - DNA, 25 bp, Artificial
  probe
  misc_feature (1)..(25): SEQ ID NO: 1651; WAN024EYP_at; Start 51; Stop 75
catagtcgatgaagaccttggctcc

SEQ ID NO: 187703 - DNA, 25 bp, Artificial
  probe
  misc_feature (1)..(25): SEQ ID NO: 1651; WAN024EYP_at; Start 156; Stop 180
cgagacggagacaagcaagtccagc

SEQ ID NO: 187704 - DNA, 25 bp, Artificial
  probe
  misc_feature (1)..(25): SEQ ID NO: 1651; WAN024EYP_at; Start 140; Stop 164
tcctcaagacttgctccgagacgga

SEQ ID NO: 187705 - DNA, 25 bp, Artificial
  probe
  misc_feature (1)..(25): SEQ ID NO: 1651; WAN024EYP_at; Start 231; Stop 255
ctccagcgagtttacccgtagctga

SEQ ID NO: 187706 - DNA, 25 bp, Artificial
  probe
  misc_feature (1)..(25): SEQ ID NO: 1651; WAN024EYP_at; Start 84; Stop 108
gagtgaggacttccatacgaccagg

SEQ ID NO: 187707 - DNA, 25 bp, Artificial
  probe
  misc_feature (1)..(25): SEQ ID NO: 1651; WAN024EYP_at; Start 40; Stop 64
cccattgtgggcatagtcgatgaag

SEQ ID NO: 187708 - DNA, 25 bp, Artificial
  probe
  misc_feature (1)..(25): SEQ ID NO: 1651; WAN024EYP_at; Start 81; Stop 105
tctgagtgaggacttccatacgacc

SEQ ID NO: 187709 - DNA, 25 bp, Artificial
  probe
  misc_feature (1)..(25): SEQ ID NO: 1651; WAN024EYP_at; Start 227; Stop 251
taatctccagcgagtttacccgtag

SEQ ID NO: 187710 - DNA, 25 bp, Artificial
  probe
  misc_feature (1)..(25): SEQ ID NO: 1651; WAN024EYP_at; Start 177; Stop 201
cagcagcaactgcattttcttggtt

SEQ ID NO: 187711 - DNA, 25 bp, Artificial
  probe
  misc_feature (1)..(25): SEQ ID NO: 1651; WAN024EYP_at; Start 188; Stop 212
gcattttcttggttgaagttgccaa

SEQ ID NO: 187712 - DNA, 25 bp, Artificial
  probe
  misc_feature (1)..(25): SEQ ID NO: 1651; WAN024EYP_at; Start 95; Stop 119
tccatacgaccaggaacgcgggttg

SEQ ID NO: 187713 - DNA, 25 bp, Artificial
  probe
  misc_feature (1)..(25): SEQ ID NO: 1651; WAN024EYP_at; Start 74; Stop 98
ccatttttctgagtgaggacttcca

SEQ ID NO: 187714 - DNA, 25 bp, Artificial
  probe
  misc_feature (1)..(25): SEQ ID NO: 1651; WAN024EYP_at; Start 152; Stop 176
gctccgagacggagacaagcaagtc

SEQ ID NO: 187715 - DNA, 25 bp, Artificial
  probe
  misc_feature (1)..(25): SEQ ID NO: 1651; WAN024EYP_at; Start 30; Stop 54
tcagactatccccattgtgggcata

SEQ ID NO: 187716 - DNA, 25 bp, Artificial
  probe
  misc_feature (1)..(25): SEQ ID NO: 1651; WAN024EYP_at; Start 19; Stop 43
gatgagttttttcagactatcccca

SEQ ID NO: 187717 - DNA, 25 bp, Artificial
  probe
  misc_feature (1)..(25): SEQ ID NO: 1651; WAN024EYP_at; Start 113; Stop 137
cgggttgcagcgatgccttttttga

SEQ ID NO: 187718 - DNA, 25 bp, Artificial
  probe
  misc_feature (1)..(25): SEQ ID NO: 1651; WAN024EYP_at; Start 195; Stop 219
cttggttgaagttgccaatgagttg

SEQ ID NO: 187719 - DNA, 25 bp, Artificial
  probe
  misc_feature (1)..(25): SEQ ID NO: 1651; WAN024EYP_at; Start 170; Stop 194
gcaagtccagcagcaactgcatttt

SEQ ID NO: 187720 - DNA, 25 bp, Artificial
  probe
  misc_feature (1)..(25): SEQ ID NO: 1651; WAN024EYP_at; Start 45; Stop 69
tgtgggcatagtcgatgaagacctt

SEQ ID NO: 187721 - DNA, 25 bp, Artificial
  probe
  misc_feature (1)..(25): SEQ ID NO: 1651; WAN024EYP_at; Start 143; Stop 167
tcaagacttgctccgagacggagac

SEQ ID NO: 187722 - DNA, 25 bp, Artificial
  probe
  misc_feature (1)..(25): SEQ ID NO: 1651; WAN024EYP_at; Start 87; Stop 111
tgaggacttccatacgaccaggaac

SEQ ID NO: 187723 - DNA, 25 bp, Artificial
  probe
  misc_feature (1)..(25): SEQ ID NO: 1651; WAN024EYP_at; Start 136; Stop 160
gatgtcctcaagacttgctccgaga

SEQ ID NO: 187724 - DNA, 25 bp, Artificial
  probe
  misc_feature (1)..(25): SEQ ID NO: 1889; WAN024EYQ_at; Start 916; Stop 940
ggacttgcttgtctccgtctcggag

SEQ ID NO: 187725 - DNA, 25 bp, Artificial
  probe
  misc_feature (1)..(25): SEQ ID NO: 1889; WAN024EYQ_at; Start 730; Stop 754
gacatggaccacttctcagtcttga

SEQ ID NO: 187726 - DNA, 25 bp, Artificial
  probe
  misc_feature (1)..(25): SEQ ID NO: 1889; WAN024EYQ_at; Start 643; Stop 667
ggcccgattgaacaccctagctttg

SEQ ID NO: 187727 - DNA, 25 bp, Artificial
  probe
  misc_feature (1)..(25): SEQ ID NO: 1889; WAN024EYQ_at; Start 838; Stop 862
tcagctacgggtaaactcgctggag

SEQ ID NO: 187728 - DNA, 25 bp, Artificial
  probe
  misc_feature (1)..(25): SEQ ID NO: 1889; WAN024EYQ_at; Start 1127; Stop 1151
caggaaacaagggagaaagtcgtcg

SEQ ID NO: 187729 - DNA, 25 bp, Artificial
  probe
  misc_feature (1)..(25): SEQ ID NO: 1889; WAN024EYQ_at; Start 948; Stop 972
tgaggacatcaaaaaaggcatcgct

SEQ ID NO: 187730 - DNA, 25 bp, Artificial
  probe
  misc_feature (1)..(25): SEQ ID NO: 1889; WAN024EYQ_at; Start 435; Stop 459
gaacacaactcttgatggcgagact

SEQ ID NO: 187731 - DNA, 25 bp, Artificial
  probe
  misc_feature (1)..(25): SEQ ID NO: 1889; WAN024EYQ_at; Start 1218; Stop 1242
taactatgaagacccaatggccatt

SEQ ID NO: 187732 - DNA, 25 bp, Artificial
  probe
  misc_feature (1)..(25): SEQ ID NO: 1889; WAN024EYQ_at; Start 266; Stop 290
tgaacgatataaagaaagccatgag

SEQ ID NO: 187733 - DNA, 25 bp, Artificial
  probe
  misc_feature (1)..(25): SEQ ID NO: 1889; WAN024EYQ_at; Start 1014; Stop 1038
aaatggagccaaggtcttcatcgac

SEQ ID NO: 187734 - DNA, 25 bp, Artificial
  probe
  misc_feature (1)..(25): SEQ ID NO: 1889; WAN024EYQ_at; Start 465; Stop 489
taagtcagcgttgacaacccctgag

SEQ ID NO: 187735 - DNA, 25 bp, Artificial
  probe
  misc_feature (1)..(25): SEQ ID NO: 1889; WAN024EYQ_at; Start 1110; Stop 1134
tctggttctgggatcaacaggaaac

SEQ ID NO: 187736 - DNA, 25 bp, Artificial
  probe
  misc_feature (1)..(25): SEQ ID NO: 1889; WAN024EYQ_at; Start 707; Stop 731
gccgagcagtcatcattaacagtga

SEQ ID NO: 187737 - DNA, 25 bp, Artificial
  probe
  misc_feature (1)..(25): SEQ ID NO: 1889; WAN024EYQ_at; Start 1305; Stop 1329
catcaaggcggcaatggctatcaca

SEQ ID NO: 187738 - DNA, 25 bp, Artificial
  probe
  misc_feature (1)..(25): SEQ ID NO: 1889; WAN024EYQ_at; Start 810; Stop 834
aatcgagaattccaaagcctttagc

SEQ ID NO: 187739 - DNA, 25 bp, Artificial
  probe
  misc_feature (1)..(25): SEQ ID NO: 1889; WAN024EYQ_at; Start 1146; Stop 1170
tcgtcgtaaggactttggcctcctc

SEQ ID NO: 187740 - DNA, 25 bp, Artificial
  probe
  misc_feature (1)..(25): SEQ ID NO: 1889; WAN024EYQ_at; Start 1203; Stop 1227
gactgctgatgaccctaactatgaa

SEQ ID NO: 187741 - DNA, 25 bp, Artificial
  probe
  misc_feature (1)..(25): SEQ ID NO: 1889; WAN024EYQ_at; Start 532; Stop 556
gaccgtacccacctcatcatggaag

SEQ ID NO: 187742 - DNA, 25 bp, Artificial
  probe
  misc_feature (1)..(25): SEQ ID NO: 1889; WAN024EYQ_at; Start 1090; Stop 1114
catcaaaccggaaagattgctctgg

SEQ ID NO: 187743 - DNA, 25 bp, Artificial
  probe
  misc_feature (1)..(25): SEQ ID NO: 1889; WAN024EYQ_at; Start 348; Stop 372
tactggtactaagggtaagacaaca

SEQ ID NO: 187744 - DNA, 25 bp, Artificial
  probe
  misc_feature (1)..(25): SEQ ID NO: 1889; WAN024EYQ_at; Start 1029; Stop 1053
cttcatcgactatgcccacaatggg

SEQ ID NO: 187745 - DNA, 25 bp, Artificial
  probe
  misc_feature (1)..(25): SEQ ID NO: 1889; WAN024EYQ_at; Start 1282; Stop 1306
aagattgcggatcgccaagaagcca

SEQ ID NO: 187746 - DNA, 25 bp, Artificial
  probe
  misc_feature (1)..(25): SEQ ID NO: 1889; WAN024EYQ_at; Start 1372; Stop 1396
gattgttaccaaatcatccagggca

SEQ ID NO: 187747 - DNA, 25 bp, Artificial
  probe
  misc_feature (1)..(25): SEQ ID NO: 1889; WAN024EYQ_at; Start 995; Stop 1019
tggaagtcctcactcagaaaaatgg

SEQ ID NO: 187748 - DNA, 25 bp, Artificial
  probe
  misc_feature (1)..(25): SEQ ID NO: 1889; WAN024EYQ_at; Start 666; Stop 690
tgaagactatttctaccacaagcgt

SEQ ID NO: 187749 - DNA, 25 bp, Artificial
  probe
  misc_feature (1)..(25): SEQ ID NO: 1889; WAN024EYQ_at; Start 106; Stop 130
gatagcatcagctacgacagccgaa

SEQ ID NO: 187750 - DNA, 25 bp, Artificial
  probe
  misc_feature (1)..(25): SEQ ID NO: 1889; WAN024EYQ_at; Start 974; Stop 998
caacccgcgttcctggtcgtatgga

SEQ ID NO: 187751 - DNA, 25 bp, Artificial
  probe
  misc_feature (1)..(25): SEQ ID NO: 1889; WAN024EYQ_at; Start 933; Stop 957
tctcggagcaagtcttgaggacatc

SEQ ID NO: 187752 - DNA, 25 bp, Artificial
  probe
  misc_feature (1)..(25): SEQ ID NO: 1889; WAN024EYQ_at; Start 1402; Stop 1426
gaatcctacccaggagatacagccg

SEQ ID NO: 187753 - DNA, 25 bp, Artificial
  probe
  misc_feature (1)..(25): SEQ ID NO: 1889; WAN024EYQ_at; Start 1386; Stop 1410
catccagggcaagaaagaatcctac

SEQ ID NO: 187754 - DNA, 25 bp, Artificial
  probe
  misc_feature (1)..(25): SEQ ID NO: 1889; WAN024EYQ_at; Start 1350; Stop 1374
tattattgcgggtaagggagccgat

SEQ ID NO: 187755 - DNA, 25 bp, Artificial
  probe
  misc_feature (1)..(25): SEQ ID NO: 1889; WAN024EYQ_at; Start 125; Stop 149
gccgaaaagtaacagaagacactct

SEQ ID NO: 187756 - DNA, 25 bp, Artificial
  probe
  misc_feature (1)..(25): SEQ ID NO: 1889; WAN024EYQ_at; Start 413; Stop 437
gacctgctatgttgtcgaccatgaa

SEQ ID NO: 187757 - DNA, 25 bp, Artificial
  probe
  misc_feature (1)..(25): SEQ ID NO: 1889; WAN024EYQ_at; Start 895; Stop 919
caagaaaatgcagttgctgctggac

SEQ ID NO: 187758 - DNA, 25 bp, Artificial
  probe
  misc_feature (1)..(25): SEQ ID NO: 3644; WAN024EYR_at; Start 312; Stop 336
tgagtatactttggtacgcccagaa

SEQ ID NO: 187759 - DNA, 25 bp, Artificial
  probe
  misc_feature (1)..(25): SEQ ID NO: 3644; WAN024EYR_at; Start 297; Stop 321
tgacaaccagactgttgagtatact

SEQ ID NO: 187760 - DNA, 25 bp, Artificial
  probe
  misc_feature (1)..(25): SEQ ID NO: 3644; WAN024EYR_at; Start 59; Stop 83
ggtctgtttcgagcgacggtctgac

SEQ ID NO: 187761 - DNA, 25 bp, Artificial
  probe
  misc_feature (1)..(25): SEQ ID NO: 3644; WAN024EYR_at; Start 343; Stop 367
tggaactcaaaaacaaccaacagta

SEQ ID NO: 187762 - DNA, 25 bp, Artificial
  probe
  misc_feature (1)..(25): SEQ ID NO: 3644; WAN024EYR_at; Start 160; Stop 184
gattttgtgacaggtatcaagtacg

SEQ ID NO: 187763 - DNA, 25 bp, Artificial
  probe
  misc_feature (1)..(25): SEQ ID NO: 3644; WAN024EYR_at; Start 101; Stop 125
gaaaagatgccaaatggttcacagc

SEQ ID NO: 187764 - DNA, 25 bp, Artificial
  probe
  misc_feature (1)..(25): SEQ ID NO: 3644; WAN024EYR_at; Start 204; Stop 228
ggctattgacttgattcaaaactcg

SEQ ID NO: 187765 - DNA, 25 bp, Artificial
  probe
  misc_feature (1)..(25): SEQ ID NO: 3644; WAN024EYR_at; Start 13; Stop 37
gaaaatgacaatcacggaaacctag

SEQ ID NO: 187766 - DNA, 25 bp, Artificial
  probe
  misc_feature (1)..(25): SEQ ID NO: 3644; WAN024EYR_at; Start 285; Stop 309
gatgaaggccattgacaaccagact

SEQ ID NO: 187767 - DNA, 25 bp, Artificial
  probe
  misc_feature (1)..(25): SEQ ID NO: 3644; WAN024EYR_at; Start 247; Stop 271
tatattacaggagcggattctgact

SEQ ID NO: 187768 - DNA, 25 bp, Artificial
  probe
  misc_feature (1)..(25): SEQ ID NO: 3644; WAN024EYR_at; Start 322; Stop 346
ttggtacgcccagaaccttactgga

SEQ ID NO: 187769 - DNA, 25 bp, Artificial
  probe
  misc_feature (1)..(25): SEQ ID NO: 3644; WAN024EYR_at; Start 4; Stop 28
ggtttgcttgaaaatgacaatcacg

SEQ ID NO: 187770 - DNA, 25 bp, Artificial
  probe
  misc_feature (1)..(25): SEQ ID NO: 3644; WAN024EYR_at; Start 216; Stop 240
gattcaaaactcgatcaaaggtttg

SEQ ID NO: 187771 - DNA, 25 bp, Artificial
  probe
  misc_feature (1)..(25): SEQ ID NO: 3644; WAN024EYR_at; Start 106; Stop 130
gatgccaaatggttcacagctgacg

SEQ ID NO: 187772 - DNA, 25 bp, Artificial
  probe
  misc_feature (1)..(25): SEQ ID NO: 3644; WAN024EYR_at; Start 73; Stop 97
gacggtctgacttatacttacaaat

SEQ ID NO: 187773 - DNA, 25 bp, Artificial
  probe
  misc_feature (1)..(25): SEQ ID NO: 3644; WAN024EYR_at; Start 239; Stop 263
tgaatgattatattacaggagcgga

SEQ ID NO: 187774 - DNA, 25 bp, Artificial
  probe
  misc_feature (1)..(25): SEQ ID NO: 3644; WAN024EYR_at; Start 51; Stop 75
agaggactggtctgtttcgagcgac

SEQ ID NO: 187775 - DNA, 25 bp, Artificial
  probe
  misc_feature (1)..(25): SEQ ID NO: 3644; WAN024EYR_at; Start 19; Stop 43
gacaatcacggaaacctagttccat

SEQ ID NO: 187776 - DNA, 25 bp, Artificial
  probe
  misc_feature (1)..(25): SEQ ID NO: 3644; WAN024EYR_at; Start 68; Stop 92
cgagcgacggtctgacttatactta

SEQ ID NO: 187777 - DNA, 25 bp, Artificial
  probe
  misc_feature (1)..(25): SEQ ID NO: 3644; WAN024EYR_at; Start 168; Stop 192
gacaggtatcaagtacgtagtggat

SEQ ID NO: 187778 - DNA, 25 bp, Artificial
  probe
  misc_feature (1)..(25): SEQ ID NO: 3644; WAN024EYR_at; Start 256; Stop 280
ggagcggattctgacttttctaagg

SEQ ID NO: 187779 - DNA, 25 bp, Artificial
  probe
  misc_feature (1)..(25): SEQ ID NO: 3644; WAN024EYR_at; Start 122; Stop 146
cagctgacggtgaagagtactcccc

SEQ ID NO: 187780 - DNA, 25 bp, Artificial
  probe
  misc_feature (1)..(25): SEQ ID NO: 3644; WAN024EYR_at; Start 220; Stop 244
caaaactcgatcaaaggtttgaatg

SEQ ID NO: 187781 - DNA, 25 bp, Artificial
  probe
  misc_feature (1)..(25): SEQ ID NO: 3644; WAN024EYR_at; Start 29; Stop 53
gaaacctagttccatctttgccaga

SEQ ID NO: 187782 - DNA, 25 bp, Artificial
  probe
  misc_feature (1)..(25): SEQ ID NO: 3644; WAN024EYR_at; Start 110; Stop 134
ccaaatggttcacagctgacggtga

SEQ ID NO: 187783 - DNA, 25 bp, Artificial
  probe
  misc_feature (1)..(25): SEQ ID NO: 3644; WAN024EYR_at; Start 271; Stop 295
ttttctaaggttgggatgaaggcca

SEQ ID NO: 187784 - DNA, 25 bp, Artificial
  probe
  misc_feature (1)..(25): SEQ ID NO: 3644; WAN024EYR_at; Start 183; Stop 207
cgtagtggataataaatcacaggct

SEQ ID NO: 187785 - DNA, 25 bp, Artificial
  probe
  misc_feature (1)..(25): SEQ ID NO: 3644; WAN024EYR_at; Start 329; Stop 353
gcccagaaccttactggaactcaaa

SEQ ID NO: 187786 - DNA, 25 bp, Artificial
  probe
  misc_feature (1)..(25): SEQ ID NO: 3644; WAN024EYR_at; Start 87; Stop 111
tacttacaaattgagaaaagatgcc

SEQ ID NO: 187787 - DNA, 25 bp, Artificial
  probe
  misc_feature (1)..(25): SEQ ID NO: 3644; WAN024EYR_at; Start 41; Stop 65
catctttgccagaggactggtctgt

SEQ ID NO: 187788 - DNA, 25 bp, Artificial
  probe
  misc_feature (1)..(25): SEQ ID NO: 3644; WAN024EYR_at; Start 140; Stop 164
actccccagtcaaggcccaggattt

SEQ ID NO: 187789 - DNA, 25 bp, Artificial
  probe
  misc_feature (1)..(25): SEQ ID NO: 3644; WAN024EYR_at; Start 130; Stop 154
ggtgaagagtactccccagtcaagg

SEQ ID NO: 187790 - DNA, 25 bp, Artificial
  probe
  misc_feature (1)..(25): SEQ ID NO: 3644; WAN024EYR_at; Start 291; Stop 315
ggccattgacaaccagactgttgag

SEQ ID NO: 187791 - DNA, 25 bp, Artificial
  probe
  misc_feature (1)..(25): SEQ ID NO: 3644; WAN024EYR_at; Start 192; Stop 216
taataaatcacaggctattgacttg

SEQ ID NO: 187792 - DNA, 25 bp, Artificial
  probe
  misc_feature (1)..(25): SEQ ID NO: 5861; WAN024EYS_at; Start 164; Stop 188
gcaaagttgataccttgccattcct

SEQ ID NO: 187793 - DNA, 25 bp, Artificial
  probe
  misc_feature (1)..(25): SEQ ID NO: 5861; WAN024EYS_at; Start 115; Stop 139
aaacttagccttggctttctcagga

SEQ ID NO: 187794 - DNA, 25 bp, Artificial
  probe
  misc_feature (1)..(25): SEQ ID NO: 5861; WAN024EYS_at; Start 135; Stop 159
caggattgtagtaagggtcttgacc

SEQ ID NO: 187795 - DNA, 25 bp, Artificial
  probe
  misc_feature (1)..(25): SEQ ID NO: 5861; WAN024EYS_at; Start 246; Stop 270
tgacaaagtttggaggaaccactag

SEQ ID NO: 187796 - DNA, 25 bp, Artificial
  probe
  misc_feature (1)..(25): SEQ ID NO: 5861; WAN024EYS_at; Start 11; Stop 35
gaactaactccttgtatgcctactt

SEQ ID NO: 187797 - DNA, 25 bp, Artificial
  probe
  misc_feature (1)..(25): SEQ ID NO: 5861; WAN024EYS_at; Start 172; Stop 196
gataccttgccattccttaccatag

SEQ ID NO: 187798 - DNA, 25 bp, Artificial
  probe
  misc_feature (1)..(25): SEQ ID NO: 5861; WAN024EYS_at; Start 73; Stop 97
gaattgaacaccctttgcttcgagt

SEQ ID NO: 187799 - DNA, 25 bp, Artificial
  probe
  misc_feature (1)..(25): SEQ ID NO: 5861; WAN024EYS_at; Start 94; Stop 118
gagttctttcttagcttccgcaaac

SEQ ID NO: 187800 - DNA, 25 bp, Artificial
  probe
  misc_feature (1)..(25): SEQ ID NO: 5861; WAN024EYS_at; Start 121; Stop 145
agccttggctttctcaggattgtag

SEQ ID NO: 187801 - DNA, 25 bp, Artificial
  probe
  misc_feature (1)..(25): SEQ ID NO: 5861; WAN024EYS_at; Start 202; Stop 226
catcttagaggctacaacttcacca

SEQ ID NO: 187802 - DNA, 25 bp, Artificial
  probe
  misc_feature (1)..(25): SEQ ID NO: 5861; WAN024EYS_at; Start 107; Stop 131
gcttccgcaaacttagccttggctt

SEQ ID NO: 187803 - DNA, 25 bp, Artificial
  probe
  misc_feature (1)..(25): SEQ ID NO: 5861; WAN024EYS_at; Start 40; Stop 64
tgttacttccacagtcttatccaag

SEQ ID NO: 187804 - DNA, 25 bp, Artificial
  probe
  misc_feature (1)..(25): SEQ ID NO: 5861; WAN024EYS_at; Start 49; Stop 73
cacagtcttatccaagtggattggg

SEQ ID NO: 187805 - DNA, 25 bp, Artificial
  probe
  misc_feature (1)..(25): SEQ ID NO: 5861; WAN024EYS_at; Start 7; Stop 31
gatagaactaactccttgtatgcct

SEQ ID NO: 187806 - DNA, 25 bp, Artificial
  probe
  misc_feature (1)..(25): SEQ ID NO: 5861; WAN024EYS_at; Start 104; Stop 128
ttagcttccgcaaacttagccttgg

SEQ ID NO: 187807 - DNA, 25 bp, Artificial
  probe
  misc_feature (1)..(25): SEQ ID NO: 5861; WAN024EYS_at; Start 194; Stop 218
tagttgaccatcttagaggctacaa

SEQ ID NO: 187808 - DNA, 25 bp, Artificial
  probe
  misc_feature (1)..(25): SEQ ID NO: 5861; WAN024EYS_at; Start 243; Stop 267
tactgacaaagtttggaggaaccac

SEQ ID NO: 187809 - DNA, 25 bp, Artificial
  probe
  misc_feature (1)..(25): SEQ ID NO: 5861; WAN024EYS_at; Start 83; Stop 107
ccctttgcttcgagttctttcttag

SEQ ID NO: 187810 - DNA, 25 bp, Artificial
  probe
  misc_feature (1)..(25): SEQ ID NO: 5861; WAN024EYS_at; Start 66; Stop 90
ggattgggaattgaacaccctttgc

SEQ ID NO: 187811 - DNA, 25 bp, Artificial
  probe
  misc_feature (1)..(25): SEQ ID NO: 5861; WAN024EYS_at; Start 224; Stop 248
ccaaagtcttttcccttgatactga

SEQ ID NO: 187812 - DNA, 25 bp, Artificial
  probe
  misc_feature (1)..(25): SEQ ID NO: 5861; WAN024EYS_at; Start 1; Stop 25
ttgtttgatagaactaactccttgt

SEQ ID NO: 187813 - DNA, 25 bp, Artificial
  probe
  misc_feature (1)..(25): SEQ ID NO: 5861; WAN024EYS_at; Start 77; Stop 101
tgaacaccctttgcttcgagttctt

SEQ ID NO: 187814 - DNA, 25 bp, Artificial
  probe
  misc_feature (1)..(25): SEQ ID NO: 5861; WAN024EYS_at; Start 236; Stop 260
cccttgatactgacaaagtttggag

SEQ ID NO: 187815 - DNA, 25 bp, Artificial
  probe
  misc_feature (1)..(25): SEQ ID NO: 5861; WAN024EYS_at; Start 129; Stop 153
ctttctcaggattgtagtaagggtc

SEQ ID NO: 187816 - DNA, 25 bp, Artificial
  probe
  misc_feature (1)..(25): SEQ ID NO: 5861; WAN024EYS_at; Start 189; Stop 213
taccatagttgaccatcttagaggc

SEQ ID NO: 187817 - DNA, 25 bp, Artificial
  probe
  misc_feature (1)..(25): SEQ ID NO: 5861; WAN024EYS_at; Start 146; Stop 170
taagggtcttgaccatccgcaaagt

SEQ ID NO: 187818 - DNA, 25 bp, Artificial
  probe
  misc_feature (1)..(25): SEQ ID NO: 5861; WAN024EYS_at; Start 156; Stop 180
gaccatccgcaaagttgataccttg

SEQ ID NO: 187819 - DNA, 25 bp, Artificial
  probe
  misc_feature (1)..(25): SEQ ID NO: 5861; WAN024EYS_at; Start 150; Stop 174
ggtcttgaccatccgcaaagttgat

SEQ ID NO: 187820 - DNA, 25 bp, Artificial
  probe
  misc_feature (1)..(25): SEQ ID NO: 5861; WAN024EYS_at; Start 141; Stop 165
tgtagtaagggtcttgaccatccgc

SEQ ID NO: 187821 - DNA, 25 bp, Artificial
  probe
  misc_feature (1)..(25): SEQ ID NO: 5861; WAN024EYS_at; Start 25; Stop 49
tatgcctactttatctgttacttcc

SEQ ID NO: 187822 - DNA, 25 bp, Artificial
  probe
  misc_feature (1)..(25): SEQ ID NO: 5861; WAN024EYS_at; Start 179; Stop 203
tgccattccttaccatagttgacca

SEQ ID NO: 187823 - DNA, 25 bp, Artificial
  probe
  misc_feature (1)..(25): SEQ ID NO: 5861; WAN024EYS_at; Start 61; Stop 85
caagtggattgggaattgaacaccc

SEQ ID NO: 187824 - DNA, 25 bp, Artificial
  probe
  misc_feature (1)..(25): SEQ ID NO: 5861; WAN024EYS_at; Start 70; Stop 94
tgggaattgaacaccctttgcttcg

SEQ ID NO: 187825 - DNA, 25 bp, Artificial
  probe
  misc_feature (1)..(25): SEQ ID NO: 5861; WAN024EYS_at; Start 209; Stop 233
gaggctacaacttcaccaaagtctt

SEQ ID NO: 187826 - DNA, 25 bp, Artificial
  probe
  misc_feature (1)..(25): SEQ ID NO: 3406; WAN024EYT_at; Start 1055; Stop 1079
tcagtatcaagggaaaagactttgg

SEQ ID NO: 187827 - DNA, 25 bp, Artificial
  probe
  misc_feature (1)..(25): SEQ ID NO: 3406; WAN024EYT_at; Start 1214; Stop 1238
caaagggtgttcaattcccaatcca

SEQ ID NO: 187828 - DNA, 25 bp, Artificial
  probe
  misc_feature (1)..(25): SEQ ID NO: 3406; WAN024EYT_at; Start 1186; Stop 1210
tttgcggaagctaagaaagaactcg

SEQ ID NO: 187829 - DNA, 25 bp, Artificial
  probe
  misc_feature (1)..(25): SEQ ID NO: 3406; WAN024EYT_at; Start 1857; Stop 1881
taaaaaagcccaagaagaattggca

SEQ ID NO: 187830 - DNA, 25 bp, Artificial
  probe
  misc_feature (1)..(25): SEQ ID NO: 3406; WAN024EYT_at; Start 1131; Stop 1155
caactttgcggatggtcaagaccct

SEQ ID NO: 187831 - DNA, 25 bp, Artificial
  probe
  misc_feature (1)..(25): SEQ ID NO: 3406; WAN024EYT_at; Start 1664; Stop 1688
tagttcttccaagtgtttcgcgtgg

SEQ ID NO: 187832 - DNA, 25 bp, Artificial
  probe
  misc_feature (1)..(25): SEQ ID NO: 3406; WAN024EYT_at; Start 1700; Stop 1724
cattgagaagaaccgtaccatttgc

SEQ ID NO: 187833 - DNA, 25 bp, Artificial
  probe
  misc_feature (1)..(25): SEQ ID NO: 3406; WAN024EYT_at; Start 663; Stop 687
ctttgtagacgatgtgaaattgacc

SEQ ID NO: 187834 - DNA, 25 bp, Artificial
  probe
  misc_feature (1)..(25): SEQ ID NO: 3406; WAN024EYT_at; Start 389; Stop 413
aaacaagcgacttttcaactgtcgg

SEQ ID NO: 187835 - DNA, 25 bp, Artificial
  probe
  misc_feature (1)..(25): SEQ ID NO: 3406; WAN024EYT_at; Start 1388; Stop 1412
ttgctcaaacagctgctcagaaaga

SEQ ID NO: 187836 - DNA, 25 bp, Artificial
  probe
  misc_feature (1)..(25): SEQ ID NO: 3406; WAN024EYT_at; Start 222; Stop 246
caaacttcgtaaggatgccaagtgg

SEQ ID NO: 187837 - DNA, 25 bp, Artificial
  probe
  misc_feature (1)..(25): SEQ ID NO: 3406; WAN024EYT_at; Start 1147; Stop 1171
caagacccttactacaatcctgaga

SEQ ID NO: 187838 - DNA, 25 bp, Artificial
  probe
  misc_feature (1)..(25): SEQ ID NO: 3406; WAN024EYT_at; Start 239; Stop 263
ccaagtggtttacttctgagggaga

SEQ ID NO: 187839 - DNA, 25 bp, Artificial
  probe
  misc_feature (1)..(25): SEQ ID NO: 3406; WAN024EYT_at; Start 1103; Stop 1127
tcaactatggtaaggaatggcaagg

SEQ ID NO: 187840 - DNA, 25 bp, Artificial
  probe
  misc_feature (1)..(25): SEQ ID NO: 3406; WAN024EYT_at; Start 990; Stop 1014
tcagtctgaagggaaagaaggtgca

SEQ ID NO: 187841 - DNA, 25 bp, Artificial
  probe
  misc_feature (1)..(25): SEQ ID NO: 3406; WAN024EYT_at; Start 1791; Stop 1815
gattgtcacaacagacgaatatgca

SEQ ID NO: 187842 - DNA, 25 bp, Artificial
  probe
  misc_feature (1)..(25): SEQ ID NO: 3406; WAN024EYT_at; Start 1088; Stop 1112
tagcctctaagatggtcaactatgg

SEQ ID NO: 187843 - DNA, 25 bp, Artificial
  probe
  misc_feature (1)..(25): SEQ ID NO: 3406; WAN024EYT_at; Start 1273; Stop 1297
ggcatacaaggagttagttctatca

SEQ ID NO: 187844 - DNA, 25 bp, Artificial
  probe
  misc_feature (1)..(25): SEQ ID NO: 3406; WAN024EYT_at; Start 1161; Stop 1185
caatcctgagaaagccaaggctaag

SEQ ID NO: 187845 - DNA, 25 bp, Artificial
  probe
  misc_feature (1)..(25): SEQ ID NO: 3406; WAN024EYT_at; Start 1034; Stop 1058
tagtggttcctccaaactttgtcag

SEQ ID NO: 187846 - DNA, 25 bp, Artificial
  probe
  misc_feature (1)..(25): SEQ ID NO: 3406; WAN024EYT_at; Start 1072; Stop 1096
gactttggtgaagttgtagcctcta

SEQ ID NO: 187847 - DNA, 25 bp, Artificial
  probe
  misc_feature (1)..(25): SEQ ID NO: 3406; WAN024EYT_at; Start 1259; Stop 1283
taacagataaagtaggcatacaagg

SEQ ID NO: 187848 - DNA, 25 bp, Artificial
  probe
  misc_feature (1)..(25): SEQ ID NO: 3406; WAN024EYT_at; Start 1232; Stop 1256
caatccacttggataagactgtgga

SEQ ID NO: 187849 - DNA, 25 bp, Artificial
  probe
  misc_feature (1)..(25): SEQ ID NO: 3406; WAN024EYT_at; Start 1342; Stop 1366
gacattcagcaattaacatcagatg

SEQ ID NO: 187850 - DNA, 25 bp, Artificial
  probe
  misc_feature (1)..(25): SEQ ID NO: 3406; WAN024EYT_at; Start 936; Stop 960
taaaaacttccgtcaggctatcaat

SEQ ID NO: 187851 - DNA, 25 bp, Artificial
  probe
  misc_feature (1)..(25): SEQ ID NO: 3406; WAN024EYT_at; Start 373; Stop 397
gactatatcactggtaaaacaagcg

SEQ ID NO: 187852 - DNA, 25 bp, Artificial
  probe
  misc_feature (1)..(25): SEQ ID NO: 3406; WAN024EYT_at; Start 338; Stop 362
tgtatctagtgcaggactctgttgc

SEQ ID NO: 187853 - DNA, 25 bp, Artificial
  probe
  misc_feature (1)..(25): SEQ ID NO: 3406; WAN024EYT_at; Start 1016; Stop 1040
caaagattttgcgtaacctagtggt

SEQ ID NO: 187854 - DNA, 25 bp, Artificial
  probe
  misc_feature (1)..(25): SEQ ID NO: 3406; WAN024EYT_at; Start 1117; Stop 1141
gaatggcaaggtatcaactttgcgg

SEQ ID NO: 187855 - DNA, 25 bp, Artificial
  probe
  misc_feature (1)..(25): SEQ ID NO: 3406; WAN024EYT_at; Start 1199; Stop 1223
agaaagaactcgaagcaaagggtgt

SEQ ID NO: 187856 - DNA, 25 bp, Artificial
  probe
  misc_feature (1)..(25): SEQ ID NO: 3406; WAN024EYT_at; Start 1; Stop 25
ttgagcgcgtgtggaaattctagca

SEQ ID NO: 187857 - DNA, 25 bp, Artificial
  probe
  misc_feature (1)..(25): SEQ ID NO: 3406; WAN024EYT_at; Start 1358; Stop 1382
catcagatgagtttgacagttcagg

SEQ ID NO: 187858 - DNA, 25 bp, Artificial
  probe
  misc_feature (1)..(25): SEQ ID NO: 3406; WAN024EYT_at; Start 74; Stop 98
tgaactatctagcagaaaaccgcgc

SEQ ID NO: 187859 - DNA, 25 bp, Artificial
  probe
  misc_feature (1)..(25): SEQ ID NO: 3406; WAN024EYT_at; Start 1372; Stop 1396
gacagttcaggctactttgctcaaa

SEQ ID NO: 187860 - DNA, 25 bp, Artificial
  probe
  misc_feature (1)..(25): SEQ ID NO: 604; WAN024EYU_at; Start 113; Stop 137
gctatgtttatacagcagacccaga

SEQ ID NO: 187861 - DNA, 25 bp, Artificial
  probe
  misc_feature (1)..(25): SEQ ID NO: 604; WAN024EYU_at; Start 770; Stop 794
gatcagatcaggagtcgctagagcg

SEQ ID NO: 187862 - DNA, 25 bp, Artificial
  probe
  misc_feature (1)..(25): SEQ ID NO: 604; WAN024EYU_at; Start 1005; Stop 1029
taacaaagatttccgtcaagccttg

SEQ ID NO: 187863 - DNA, 25 bp, Artificial
  probe
  misc_feature (1)..(25): SEQ ID NO: 604; WAN024EYU_at; Start 1286; Stop 1310
cagacggcgttcagtttcctattca

SEQ ID NO: 187864 - DNA, 25 bp, Artificial
  probe
  misc_feature (1)..(25): SEQ ID NO: 604; WAN024EYU_at; Start 417; Stop 441
tgaaaattcggttaaaggcttggca

SEQ ID NO: 187865 - DNA, 25 bp, Artificial
  probe
  misc_feature (1)..(25): SEQ ID NO: 604; WAN024EYU_at; Start 469; Stop 493
ttttcaacagttggtgtcaaggcgg

SEQ ID NO: 187866 - DNA, 25 bp, Artificial
  probe
  misc_feature (1)..(25): SEQ ID NO: 604; WAN024EYU_at; Start 1227; Stop 1251
tttattcaatgctgacaaggccaag

SEQ ID NO: 187867 - DNA, 25 bp, Artificial
  probe
  misc_feature (1)..(25): SEQ ID NO: 604; WAN024EYU_at; Start 26; Stop 50
cagcaggtcttgttttattagcagc

SEQ ID NO: 187868 - DNA, 25 bp, Artificial
  probe
  misc_feature (1)..(25): SEQ ID NO: 604; WAN024EYU_at; Start 219; Stop 243
taattacggtaatcttgctcctgca

SEQ ID NO: 187869 - DNA, 25 bp, Artificial
  probe
  misc_feature (1)..(25): SEQ ID NO: 604; WAN024EYU_at; Start 855; Stop 879
taaggttgcagaagaatacaaggac

SEQ ID NO: 187870 - DNA, 25 bp, Artificial
  probe
  misc_feature (1)..(25): SEQ ID NO: 604; WAN024EYU_at; Start 569; Stop 593
tctggcctctgaatgaagaattcga

SEQ ID NO: 187871 - DNA, 25 bp, Artificial
  probe
  misc_feature (1)..(25): SEQ ID NO: 604; WAN024EYU_at; Start 1029; Stop 1053
gaattttgctcttgatcgctcagct

SEQ ID NO: 187872 - DNA, 25 bp, Artificial
  probe
  misc_feature (1)..(25): SEQ ID NO: 604; WAN024EYU_at; Start 1127; Stop 1151
tttcagctggtgagaagacctttgg

SEQ ID NO: 187873 - DNA, 25 bp, Artificial
  probe
  misc_feature (1)..(25): SEQ ID NO: 604; WAN024EYU_at; Start 1689; Stop 1713
tgtccgttatgaaaaatatgcagcg

SEQ ID NO: 187874 - DNA, 25 bp, Artificial
  probe
  misc_feature (1)..(25): SEQ ID NO: 604; WAN024EYU_at; Start 41; Stop 65
tattagcagcaggtgtacttgcagc

SEQ ID NO: 187875 - DNA, 25 bp, Artificial
  probe
  misc_feature (1)..(25): SEQ ID NO: 604; WAN024EYU_at; Start 1755; Stop 1779
tatggcttcttctggtgcagcacca

SEQ ID NO: 187876 - DNA, 25 bp, Artificial
  probe
  misc_feature (1)..(25): SEQ ID NO: 604; WAN024EYU_at; Start 1459; Stop 1483
tatgctgccaatgcttcatctgagg

SEQ ID NO: 187877 - DNA, 25 bp, Artificial
  probe
  misc_feature (1)..(25): SEQ ID NO: 604; WAN024EYU_at; Start 1153; Stop 1177
gatttagtcgctgctcaacttcctg

SEQ ID NO: 187878 - DNA, 25 bp, Artificial
  probe
  misc_feature (1)..(25): SEQ ID NO: 604; WAN024EYU_at; Start 1078; Stop 1102
gatggagcagctttagcagttcgta

SEQ ID NO: 187879 - DNA, 25 bp, Artificial
  probe
  misc_feature (1)..(25): SEQ ID NO: 604; WAN024EYU_at; Start 1242; Stop 1266
caaggccaaggcagagtttgcgaaa

SEQ ID NO: 187880 - DNA, 25 bp, Artificial
  probe
  misc_feature (1)..(25): SEQ ID NO: 604; WAN024EYU_at; Start 1314; Stop 1338
ggacgttccagtagaccaagcatca

SEQ ID NO: 187881 - DNA, 25 bp, Artificial
  probe
  misc_feature (1)..(25): SEQ ID NO: 604; WAN024EYU_at; Start 318; Stop 342
tacctctgatggagaagaatatgca

SEQ ID NO: 187882 - DNA, 25 bp, Artificial
  probe
  misc_feature (1)..(25): SEQ ID NO: 604; WAN024EYU_at; Start 366; Stop 390
gaacggtttaaaacacgcagcagat

SEQ ID NO: 187883 - DNA, 25 bp, Artificial
  probe
  misc_feature (1)..(25): SEQ ID NO: 604; WAN024EYU_at; Start 886; Stop 910
tattacacacaatcaggctctggga

SEQ ID NO: 187884 - DNA, 25 bp, Artificial
  probe
  misc_feature (1)..(25): SEQ ID NO: 604; WAN024EYU_at; Start 604; Stop 628
ggaagcgattttgctaaaccaacag

SEQ ID NO: 187885 - DNA, 25 bp, Artificial
  probe
  misc_feature (1)..(25): SEQ ID NO: 604; WAN024EYU_at; Start 1803; Stop 1827
tactggagcttctgcgcaaacaggc

SEQ ID NO: 187886 - DNA, 25 bp, Artificial
  probe
  misc_feature (1)..(25): SEQ ID NO: 604; WAN024EYU_at; Start 1269; Stop 1293
taagaaagctttagaagcagacggc

SEQ ID NO: 187887 - DNA, 25 bp, Artificial
  probe
  misc_feature (1)..(25): SEQ ID NO: 604; WAN024EYU_at; Start 334; Stop 358
gaatatgcagaggtgacggctaaag

SEQ ID NO: 187888 - DNA, 25 bp, Artificial
  probe
  misc_feature (1)..(25): SEQ ID NO: 604; WAN024EYU_at; Start 514; Stop 538
tacactttgaaccagcctgaaccgt

SEQ ID NO: 187889 - DNA, 25 bp, Artificial
  probe
  misc_feature (1)..(25): SEQ ID NO: 604; WAN024EYU_at; Start 263; Stop 287
tctctaaggatggtttgacctacac

SEQ ID NO: 187890 - DNA, 25 bp, Artificial
  probe
  misc_feature (1)..(25): SEQ ID NO: 604; WAN024EYU_at; Start 1705; Stop 1729
tatgcagcggctcaagcatggttga

SEQ ID NO: 187891 - DNA, 25 bp, Artificial
  probe
  misc_feature (1)..(25): SEQ ID NO: 604; WAN024EYU_at; Start 130; Stop 154
gacccagaaaccttggactacctga

SEQ ID NO: 187892 - DNA, 25 bp, Artificial
  probe
  misc_feature (1)..(25): SEQ ID NO: 604; WAN024EYU_at; Start 1644; Stop 1668
cgataaattagttgatgaagctgcc

SEQ ID NO: 187893 - DNA, 25 bp, Artificial
  probe
  misc_feature (1)..(25): SEQ ID NO: 604; WAN024EYU_at; Start 1597; Stop 1621
gataatccaaatagcccttcagtag

SEQ ID NO: 187894 - DNA, 25 bp, Artificial
  probe
  misc_feature (1)..(25): SEQ ID NO: 5594; WAN024EYV_at; Start 500; Stop 524
aagttatgagtttggtcaaggatac

SEQ ID NO: 187895 - DNA, 25 bp, Artificial
  probe
  misc_feature (1)..(25): SEQ ID NO: 5594; WAN024EYV_at; Start 188; Stop 212
ggaagcccctccattatctgattaa

SEQ ID NO: 187896 - DNA, 25 bp, Artificial
  probe
  misc_feature (1)..(25): SEQ ID NO: 5594; WAN024EYV_at; Start 601; Stop 625
gttcctatgttcttggcaggagcca

SEQ ID NO: 187897 - DNA, 25 bp, Artificial
  probe
  misc_feature (1)..(25): SEQ ID NO: 5594; WAN024EYV_at; Start 558; Stop 582
tatcttggctagtcgaacagctgct

SEQ ID NO: 187898 - DNA, 25 bp, Artificial
  probe
  misc_feature (1)..(25): SEQ ID NO: 5594; WAN024EYV_at; Start 444; Stop 468
gcgctatattatcttgccccaagtg

SEQ ID NO: 187899 - DNA, 25 bp, Artificial
  probe
  misc_feature (1)..(25): SEQ ID NO: 5594; WAN024EYV_at; Start 83; Stop 107
cgagtttactgaatggtgcgagcac

SEQ ID NO: 187900 - DNA, 25 bp, Artificial
  probe
  misc_feature (1)..(25): SEQ ID NO: 5594; WAN024EYV_at; Start 266; Stop 290
tctattatgtgctcccaagtattgg

SEQ ID NO: 187901 - DNA, 25 bp, Artificial
  probe
  misc_feature (1)..(25): SEQ ID NO: 5594; WAN024EYV_at; Start 32; Stop 56
gaacaattacttttaggaggtgcag

SEQ ID NO: 187902 - DNA, 25 bp, Artificial
  probe
  misc_feature (1)..(25): SEQ ID NO: 5594; WAN024EYV_at; Start 145; Stop 169
attcccttgggcgttttgattgcct

SEQ ID NO: 187903 - DNA, 25 bp, Artificial
  probe
  misc_feature (1)..(25): SEQ ID NO: 5594; WAN024EYV_at; Start 530; Stop 554
tggtctatgctctcggaatttcaga

SEQ ID NO: 187904 - DNA, 25 bp, Artificial
  probe
  misc_feature (1)..(25): SEQ ID NO: 5594; WAN024EYV_at; Start 113; Stop 137
tacaggtctttgcactggtcttgct

SEQ ID NO: 187905 - DNA, 25 bp, Artificial
  probe
  misc_feature (1)..(25): SEQ ID NO: 5594; WAN024EYV_at; Start 383; Stop 407
ctattccaagaggacagtatgaggc

SEQ ID NO: 187906 - DNA, 25 bp, Artificial
  probe
  misc_feature (1)..(25): SEQ ID NO: 5594; WAN024EYV_at; Start 217; Stop 241
tacatctgggttatgcgaggaaccc

SEQ ID NO: 187907 - DNA, 25 bp, Artificial
  probe
  misc_feature (1)..(25): SEQ ID NO: 5594; WAN024EYV_at; Start 374; Stop 398
gaattgacactattccaagaggaca

SEQ ID NO: 187908 - DNA, 25 bp, Artificial
  probe
  misc_feature (1)..(25): SEQ ID NO: 5594; WAN024EYV_at; Start 301; Stop 325
gaccgccttcctgcagctattattg

SEQ ID NO: 187909 - DNA, 25 bp, Artificial
  probe
  misc_feature (1)..(25): SEQ ID NO: 5594; WAN024EYV_at; Start 241; Stop 265
cccttactcttgcaactgattttta

SEQ ID NO: 187910 - DNA, 25 bp, Artificial
  probe
  misc_feature (1)..(25): SEQ ID NO: 5594; WAN024EYV_at; Start 474; Stop 498
gatcgttcttcctagtgtctttaat

SEQ ID NO: 187911 - DNA, 25 bp, Artificial
  probe
  misc_feature (1)..(25): SEQ ID NO: 5594; WAN024EYV_at; Start 175; Stop 199
ttgcaagtccattggaagcccctcc

SEQ ID NO: 187912 - DNA, 25 bp, Artificial
  probe
  misc_feature (1)..(25): SEQ ID NO: 5594; WAN024EYV_at; Start 344; Stop 368
cagcttactttgcagaaattttccg

SEQ ID NO: 187913 - DNA, 25 bp, Artificial
  probe
  misc_feature (1)..(25): SEQ ID NO: 5594; WAN024EYV_at; Start 129; Stop 153
ggtcttgctattttcgattcccttg

SEQ ID NO: 187914 - DNA, 25 bp, Artificial
  probe
  misc_feature (1)..(25): SEQ ID NO: 5594; WAN024EYV_at; Start 281; Stop 305
caagtattgggattcgtttagaccg

SEQ ID NO: 187915 - DNA, 25 bp, Artificial
  probe
  misc_feature (1)..(25): SEQ ID NO: 5594; WAN024EYV_at; Start 41; Stop 65
cttttaggaggtgcagtatgtctta

SEQ ID NO: 187916 - DNA, 25 bp, Artificial
  probe
  misc_feature (1)..(25): SEQ ID NO: 5594; WAN024EYV_at; Start 324; Stop 348
tgcctttgttctcaactatgcagct

SEQ ID NO: 187917 - DNA, 25 bp, Artificial
  probe
  misc_feature (1)..(25): SEQ ID NO: 5594; WAN024EYV_at; Start 416; Stop 440
tcttgaagtttagcccttttgacag

SEQ ID NO: 187918 - DNA, 25 bp, Artificial
  probe
  misc_feature (1)..(25): SEQ ID NO: 5594; WAN024EYV_at; Start 428; Stop 452
gcccttttgacagagtgcgctatat

SEQ ID NO: 187919 - DNA, 25 bp, Artificial
  probe
  misc_feature (1)..(25): SEQ ID NO: 5594; WAN024EYV_at; Start 68; Stop 92
tatttgagatattaccgagtttact

SEQ ID NO: 187920 - DNA, 25 bp, Artificial
  probe
  misc_feature (1)..(25): SEQ ID NO: 5594; WAN024EYV_at; Start 458; Stop 482
tgccccaagtgaccaagatcgttct

SEQ ID NO: 187921 - DNA, 25 bp, Artificial
  probe
  misc_feature (1)..(25): SEQ ID NO: 5594; WAN024EYV_at; Start 202; Stop 226
tatctgattaacatttacatctggg

SEQ ID NO: 187922 - DNA, 25 bp, Artificial
  probe
  misc_feature (1)..(25): SEQ ID NO: 5594; WAN024EYV_at; Start 160; Stop 184
ttgattgcctttgccttgcaagtcc

SEQ ID NO: 187923 - DNA, 25 bp, Artificial
  probe
  misc_feature (1)..(25): SEQ ID NO: 5594; WAN024EYV_at; Start 291; Stop 315
gattcgtttagaccgccttcctgca

SEQ ID NO: 187924 - DNA, 25 bp, Artificial
  probe
  misc_feature (1)..(25): SEQ ID NO: 5594; WAN024EYV_at; Start 97; Stop 121
ggtgcgagcacgactgtacaggtct

SEQ ID NO: 187925 - DNA, 25 bp, Artificial
  probe
  misc_feature (1)..(25): SEQ ID NO: 5594; WAN024EYV_at; Start 572; Stop 596
gaacagctgctaaccgcgatgctag

SEQ ID NO: 187926 - DNA, 25 bp, Artificial
  probe
  misc_feature (1)..(25): SEQ ID NO: 5594; WAN024EYV_at; Start 515; Stop 539
tcaaggatacttctttggtctatgc

SEQ ID NO: 187927 - DNA, 25 bp, Artificial
  probe
  misc_feature (1)..(25): SEQ ID NO: 5594; WAN024EYV_at; Start 545; Stop 569
gaatttcagaccttatcttggctag

SEQ ID NO: 187928 - DNA, 25 bp, Artificial
  probe
  misc_feature (1)..(25): SEQ ID NO: 7674; WAN024EYW_at; Start 54; Stop 78
agcttctcggactttttccaaatct

SEQ ID NO: 187929 - DNA, 25 bp, Artificial
  probe
  misc_feature (1)..(25): SEQ ID NO: 7674; WAN024EYW_at; Start 14; Stop 38
cactttcattgatggtccaagtgga

SEQ ID NO: 187930 - DNA, 25 bp, Artificial
  probe
  misc_feature (1)..(25): SEQ ID NO: 7674; WAN024EYW_at; Start 307; Stop 331
gccatcttcgtaacgagtttctggg

SEQ ID NO: 187931 - DNA, 25 bp, Artificial
  probe
  misc_feature (1)..(25): SEQ ID NO: 7674; WAN024EYW_at; Start 227; Stop 251
tatctccagatagagctaacttttc

SEQ ID NO: 187932 - DNA, 25 bp, Artificial
  probe
  misc_feature (1)..(25): SEQ ID NO: 7674; WAN024EYW_at; Start 260; Stop 284
tcttaccaacctcagaatccttatt

SEQ ID NO: 187933 - DNA, 25 bp, Artificial
  probe
  misc_feature (1)..(25): SEQ ID NO: 7674; WAN024EYW_at; Start 199; Stop 223
gaaatttcggtgagtttggcttcag

SEQ ID NO: 187934 - DNA, 25 bp, Artificial
  probe
  misc_feature (1)..(25): SEQ ID NO: 7674; WAN024EYW_at; Start 175; Stop 199
ttttcaaaagctaatagagctgagg

SEQ ID NO: 187935 - DNA, 25 bp, Artificial
  probe
  misc_feature (1)..(25): SEQ ID NO: 7674; WAN024EYW_at; Start 311; Stop 335
tcttcgtaacgagtttctgggtctc

SEQ ID NO: 187936 - DNA, 25 bp, Artificial
  probe
  misc_feature (1)..(25): SEQ ID NO: 7674; WAN024EYW_at; Start 286; Stop 310
tctactctttcgaagtctgatgcca

SEQ ID NO: 187937 - DNA, 25 bp, Artificial
  probe
  misc_feature (1)..(25): SEQ ID NO: 7674; WAN024EYW_at; Start 1; Stop 25
ttgtcacgaaccacactttcattga

SEQ ID NO: 187938 - DNA, 25 bp, Artificial
  probe
  misc_feature (1)..(25): SEQ ID NO: 7674; WAN024EYW_at; Start 210; Stop 234
gagtttggcttcagtaatatctcca

SEQ ID NO: 187939 - DNA, 25 bp, Artificial
  probe
  misc_feature (1)..(25): SEQ ID NO: 7674; WAN024EYW_at; Start 132; Stop 156
caatttttccttttccgcatctagg

SEQ ID NO: 187940 - DNA, 25 bp, Artificial
  probe
  misc_feature (1)..(25): SEQ ID NO: 7674; WAN024EYW_at; Start 42; Stop 66
cattttcttaaaagcttctcggact

SEQ ID NO: 187941 - DNA, 25 bp, Artificial
  probe
  misc_feature (1)..(25): SEQ ID NO: 7674; WAN024EYW_at; Start 189; Stop 213
tagagctgaggaaatttcggtgagt

SEQ ID NO: 187942 - DNA, 25 bp, Artificial
  probe
  misc_feature (1)..(25): SEQ ID NO: 7674; WAN024EYW_at; Start 250; Stop 274
tccttaacaatcttaccaacctcag

SEQ ID NO: 187943 - DNA, 25 bp, Artificial
  probe
  misc_feature (1)..(25): SEQ ID NO: 7674; WAN024EYW_at; Start 274; Stop 298
gaatccttattttctactctttcga

SEQ ID NO: 187944 - DNA, 25 bp, Artificial
  probe
  misc_feature (1)..(25): SEQ ID NO: 7674; WAN024EYW_at; Start 235; Stop 259
gatagagctaacttttccttaacaa

SEQ ID NO: 187945 - DNA, 25 bp, Artificial
  probe
  misc_feature (1)..(25): SEQ ID NO: 7674; WAN024EYW_at; Start 76; Stop 100
tctttggaggcaatggcctgttcta

SEQ ID NO: 187946 - DNA, 25 bp, Artificial
  probe
  misc_feature (1)..(25): SEQ ID NO: 7674; WAN024EYW_at; Start 317; Stop 341
taacgagtttctgggtctcagtctg

SEQ ID NO: 187947 - DNA, 25 bp, Artificial
  probe
  misc_feature (1)..(25): SEQ ID NO: 7674; WAN024EYW_at; Start 63; Stop 87
gactttttccaaatctttggaggca

SEQ ID NO: 187948 - DNA, 25 bp, Artificial
  probe
  misc_feature (1)..(25): SEQ ID NO: 7674; WAN024EYW_at; Start 19; Stop 43
tcattgatggtccaagtggaattca

SEQ ID NO: 187949 - DNA, 25 bp, Artificial
  probe
  misc_feature (1)..(25): SEQ ID NO: 7674; WAN024EYW_at; Start 216; Stop 240
ggcttcagtaatatctccagataga

SEQ ID NO: 187950 - DNA, 25 bp, Artificial
  probe
  misc_feature (1)..(25): SEQ ID NO: 7674; WAN024EYW_at; Start 149; Stop 173
catctaggtcaacaggattttgttc

SEQ ID NO: 187951 - DNA, 25 bp, Artificial
  probe
  misc_feature (1)..(25): SEQ ID NO: 7674; WAN024EYW_at; Start 86; Stop 110
caatggcctgttctaaggtttcaaa

SEQ ID NO: 187952 - DNA, 25 bp, Artificial
  probe
  misc_feature (1)..(25): SEQ ID NO: 7674; WAN024EYW_at; Start 157; Stop 181
tcaacaggattttgttctttttcaa

SEQ ID NO: 187953 - DNA, 25 bp, Artificial
  probe
  misc_feature (1)..(25): SEQ ID NO: 7674; WAN024EYW_at; Start 8; Stop 32
gaaccacactttcattgatggtcca

SEQ ID NO: 187954 - DNA, 25 bp, Artificial
  probe
  misc_feature (1)..(25): SEQ ID NO: 7674; WAN024EYW_at; Start 301; Stop 325
tctgatgccatcttcgtaacgagtt

SEQ ID NO: 187955 - DNA, 25 bp, Artificial
  probe
  misc_feature (1)..(25): SEQ ID NO: 7674; WAN024EYW_at; Start 146; Stop 170
ccgcatctaggtcaacaggattttg

SEQ ID NO: 187956 - DNA, 25 bp, Artificial
  probe
  misc_feature (1)..(25): SEQ ID NO: 7674; WAN024EYW_at; Start 297; Stop 321
gaagtctgatgccatcttcgtaacg

SEQ ID NO: 187957 - DNA, 25 bp, Artificial
  probe
  misc_feature (1)..(25): SEQ ID NO: 7674; WAN024EYW_at; Start 254; Stop 278
taacaatcttaccaacctcagaatc

SEQ ID NO: 187958 - DNA, 25 bp, Artificial
  probe
  misc_feature (1)..(25): SEQ ID NO: 7674; WAN024EYW_at; Start 184; Stop 208
gctaatagagctgaggaaatttcgg

SEQ ID NO: 187959 - DNA, 25 bp, Artificial
  probe
  misc_feature (1)..(25): SEQ ID NO: 7674; WAN024EYW_at; Start 141; Stop 165
cttttccgcatctaggtcaacagga

SEQ ID NO: 187960 - DNA, 25 bp, Artificial
  probe
  misc_feature (1)..(25): SEQ ID NO: 7674; WAN024EYW_at; Start 288; Stop 312
tactctttcgaagtctgatgccatc

SEQ ID NO: 187961 - DNA, 25 bp, Artificial
  probe
  misc_feature (1)..(25): SEQ ID NO: 7674; WAN024EYW_at; Start 27; Stop 51
ggtccaagtggaattcattttctta

SEQ ID NO: 187962 - DNA, 25 bp, Artificial
  probe
  misc_feature (1)..(25): SEQ ID NO: 7619; WAN024EYX_at; Start 7; Stop 31
gcatctgtgattttcacaaagaaaa

SEQ ID NO: 187963 - DNA, 25 bp, Artificial
  probe
  misc_feature (1)..(25): SEQ ID NO: 7619; WAN024EYX_at; Start 48; Stop 72
ggcacctgctggggaaagaattaaa

SEQ ID NO: 187964 - DNA, 25 bp, Artificial
  probe
  misc_feature (1)..(25): SEQ ID NO: 7619; WAN024EYX_at; Start 8; Stop 32
catctgtgattttcacaaagaaaaa

SEQ ID NO: 187965 - DNA, 25 bp, Artificial
  probe
  misc_feature (1)..(25): SEQ ID NO: 7619; WAN024EYX_at; Start 1; Stop 25
ttggatgcatctgtgattttcacaa

SEQ ID NO: 187966 - DNA, 25 bp, Artificial
  probe
  misc_feature (1)..(25): SEQ ID NO: 7619; WAN024EYX_at; Start 2; Stop 26
tggatgcatctgtgattttcacaaa

SEQ ID NO: 187967 - DNA, 25 bp, Artificial
  probe
  misc_feature (1)..(25): SEQ ID NO: 7619; WAN024EYX_at; Start 75; Stop 99
tgacaaagctaaaactagtaaccag

SEQ ID NO: 187968 - DNA, 25 bp, Artificial
  probe
  misc_feature (1)..(25): SEQ ID NO: 7619; WAN024EYX_at; Start 6; Stop 30
tgcatctgtgattttcacaaagaaa

SEQ ID NO: 187969 - DNA, 25 bp, Artificial
  probe
  misc_feature (1)..(25): SEQ ID NO: 7619; WAN024EYX_at; Start 45; Stop 69
ttgggcacctgctggggaaagaatt

SEQ ID NO: 187970 - DNA, 25 bp, Artificial
  probe
  misc_feature (1)..(25): SEQ ID NO: 7619; WAN024EYX_at; Start 77; Stop 101
acaaagctaaaactagtaaccagct

SEQ ID NO: 187971 - DNA, 25 bp, Artificial
  probe
  misc_feature (1)..(25): SEQ ID NO: 7619; WAN024EYX_at; Start 39; Stop 63
gctttcttgggcacctgctggggaa

SEQ ID NO: 187972 - DNA, 25 bp, Artificial
  probe
  misc_feature (1)..(25): SEQ ID NO: 7619; WAN024EYX_at; Start 36; Stop 60
caagctttcttgggcacctgctggg

SEQ ID NO: 187973 - DNA, 25 bp, Artificial
  probe
  misc_feature (1)..(25): SEQ ID NO: 7619; WAN024EYX_at; Start 43; Stop 67
tcttgggcacctgctggggaaagaa

SEQ ID NO: 187974 - DNA, 25 bp, Artificial
  probe
  misc_feature (1)..(25): SEQ ID NO: 7619; WAN024EYX_at; Start 49; Stop 73
gcacctgctggggaaagaattaaaa

SEQ ID NO: 187975 - DNA, 25 bp, Artificial
  probe
  misc_feature (1)..(25): SEQ ID NO: 7619; WAN024EYX_at; Start 5; Stop 29
atgcatctgtgattttcacaaagaa

SEQ ID NO: 187976 - DNA, 25 bp, Artificial
  probe
  misc_feature (1)..(25): SEQ ID NO: 7619; WAN024EYX_at; Start 37; Stop 61
aagctttcttgggcacctgctgggg

SEQ ID NO: 187977 - DNA, 25 bp, Artificial
  probe
  misc_feature (1)..(25): SEQ ID NO: 7619; WAN024EYX_at; Start 33; Stop 57
actcaagctttcttgggcacctgct

SEQ ID NO: 187978 - DNA, 25 bp, Artificial
  probe
  misc_feature (1)..(25): SEQ ID NO: 7619; WAN024EYX_at; Start 90; Stop 114
tagtaaccagcttttagccttccaa

SEQ ID NO: 187979 - DNA, 25 bp, Artificial
  probe
  misc_feature (1)..(25): SEQ ID NO: 7619; WAN024EYX_at; Start 89; Stop 113
ctagtaaccagcttttagccttcca

SEQ ID NO: 187980 - DNA, 25 bp, Artificial
  probe
  misc_feature (1)..(25): SEQ ID NO: 7619; WAN024EYX_at; Start 41; Stop 65
tttcttgggcacctgctggggaaag

SEQ ID NO: 187981 - DNA, 25 bp, Artificial
  probe
  misc_feature (1)..(25): SEQ ID NO: 7619; WAN024EYX_at; Start 78; Stop 102
caaagctaaaactagtaaccagctt

SEQ ID NO: 187982 - DNA, 25 bp, Artificial
  probe
  misc_feature (1)..(25): SEQ ID NO: 7619; WAN024EYX_at; Start 46; Stop 70
tgggcacctgctggggaaagaatta

SEQ ID NO: 187983 - DNA, 25 bp, Artificial
  probe
  misc_feature (1)..(25): SEQ ID NO: 7619; WAN024EYX_at; Start 14; Stop 38
tgattttcacaaagaaaaaactcaa

SEQ ID NO: 187984 - DNA, 25 bp, Artificial
  probe
  misc_feature (1)..(25): SEQ ID NO: 7619; WAN024EYX_at; Start 31; Stop 55
aaactcaagctttcttgggcacctg

SEQ ID NO: 187985 - DNA, 25 bp, Artificial
  probe
  misc_feature (1)..(25): SEQ ID NO: 7619; WAN024EYX_at; Start 47; Stop 71
gggcacctgctggggaaagaattaa

SEQ ID NO: 187986 - DNA, 25 bp, Artificial
  probe
  misc_feature (1)..(25): SEQ ID NO: 7619; WAN024EYX_at; Start 34; Stop 58
ctcaagctttcttgggcacctgctg

SEQ ID NO: 187987 - DNA, 25 bp, Artificial
  probe
  misc_feature (1)..(25): SEQ ID NO: 7619; WAN024EYX_at; Start 40; Stop 64
ctttcttgggcacctgctggggaaa

SEQ ID NO: 187988 - DNA, 25 bp, Artificial
  probe
  misc_feature (1)..(25): SEQ ID NO: 7619; WAN024EYX_at; Start 35; Stop 59
tcaagctttcttgggcacctgctgg

SEQ ID NO: 187989 - DNA, 25 bp, Artificial
  probe
  misc_feature (1)..(25): SEQ ID NO: 7619; WAN024EYX_at; Start 32; Stop 56
aactcaagctttcttgggcacctgc

SEQ ID NO: 187990 - DNA, 25 bp, Artificial
  probe
  misc_feature (1)..(25): SEQ ID NO: 7619; WAN024EYX_at; Start 4; Stop 28
gatgcatctgtgattttcacaaaga

SEQ ID NO: 187991 - DNA, 25 bp, Artificial
  probe
  misc_feature (1)..(25): SEQ ID NO: 7619; WAN024EYX_at; Start 30; Stop 54
aaaactcaagctttcttgggcacct

SEQ ID NO: 187992 - DNA, 25 bp, Artificial
  probe
  misc_feature (1)..(25): SEQ ID NO: 7619; WAN024EYX_at; Start 76; Stop 100
gacaaagctaaaactagtaaccagc

SEQ ID NO: 187993 - DNA, 25 bp, Artificial
  probe
  misc_feature (1)..(25): SEQ ID NO: 7619; WAN024EYX_at; Start 27; Stop 51
gaaaaaactcaagctttcttgggca

SEQ ID NO: 187994 - DNA, 25 bp, Artificial
  probe
  misc_feature (1)..(25): SEQ ID NO: 7619; WAN024EYX_at; Start 42; Stop 66
ttcttgggcacctgctggggaaaga

SEQ ID NO: 187995 - DNA, 25 bp, Artificial
  probe
  misc_feature (1)..(25): SEQ ID NO: 7619; WAN024EYX_at; Start 3; Stop 27
ggatgcatctgtgattttcacaaag

SEQ ID NO: 187996 - DNA, 25 bp, Artificial
  probe
  misc_feature (1)..(25): SEQ ID NO: 1904; WAN024EYY_at; Start 333; Stop 357
tcatgcttgtgcagatgatgagcaa

SEQ ID NO: 187997 - DNA, 25 bp, Artificial
  probe
  misc_feature (1)..(25): SEQ ID NO: 1904; WAN024EYY_at; Start 518; Stop 542
actttgaccgcgttatctgggctga

SEQ ID NO: 187998 - DNA, 25 bp, Artificial
  probe
  misc_feature (1)..(25): SEQ ID NO: 1904; WAN024EYY_at; Start 811; Stop 835
actggtcagtttgatacgggattgc

SEQ ID NO: 187999 - DNA, 25 bp, Artificial
  probe
  misc_feature (1)..(25): SEQ ID NO: 1904; WAN024EYY_at; Start 395; Stop 419
ggagaaatgcggtgccccttcgttg

SEQ ID NO: 188000 - DNA, 25 bp, Artificial
  probe
  misc_feature (1)..(25): SEQ ID NO: 1904; WAN024EYY_at; Start 755; Stop 779
tggataagccacttttacgtcgttc

SEQ ID NO: 188001 - DNA, 25 bp, Artificial
  probe
  misc_feature (1)..(25): SEQ ID NO: 1904; WAN024EYY_at; Start 131; Stop 155
gacagaatgctctctttcctccgag

SEQ ID NO: 188002 - DNA, 25 bp, Artificial
  probe
  misc_feature (1)..(25): SEQ ID NO: 1904; WAN024EYY_at; Start 594; Stop 618
gatgtttttagagacctgggaccgc

SEQ ID NO: 188003 - DNA, 25 bp, Artificial
  probe
  misc_feature (1)..(25): SEQ ID NO: 1904; WAN024EYY_at; Start 281; Stop 305
tatttcctaaggagcaattacgtga

SEQ ID NO: 188004 - DNA, 25 bp, Artificial
  probe
  misc_feature (1)..(25): SEQ ID NO: 1904; WAN024EYY_at; Start 63; Stop 87
ccagctattcaaggattggacggat

SEQ ID NO: 188005 - DNA, 25 bp, Artificial
  probe
  misc_feature (1)..(25): SEQ ID NO: 1904; WAN024EYY_at; Start 711; Stop 735
gagtctcttacctgatgattcgcat

SEQ ID NO: 188006 - DNA, 25 bp, Artificial
  probe
  misc_feature (1)..(25): SEQ ID NO: 1904; WAN024EYY_at; Start 423; Stop 447
tcagtctggatttgcagctatcggg

SEQ ID NO: 188007 - DNA, 25 bp, Artificial
  probe
  misc_feature (1)..(25): SEQ ID NO: 1904; WAN024EYY_at; Start 249; Stop 273
caagcgccctcgactgttcagggat

SEQ ID NO: 188008 - DNA, 25 bp, Artificial
  probe
  misc_feature (1)..(25): SEQ ID NO: 1904; WAN024EYY_at; Start 349; Stop 373
gatgagcaaattgcctttcacgcta

SEQ ID NO: 188009 - DNA, 25 bp, Artificial
  probe
  misc_feature (1)..(25): SEQ ID NO: 1904; WAN024EYY_at; Start 26; Stop 50
tcttggacctgcatacgacggatag

SEQ ID NO: 188010 - DNA, 25 bp, Artificial
  probe
  misc_feature (1)..(25): SEQ ID NO: 1904; WAN024EYY_at; Start 610; Stop 634
tgggaccgcactagtctcgaagaac

SEQ ID NO: 188011 - DNA, 25 bp, Artificial
  probe
  misc_feature (1)..(25): SEQ ID NO: 1904; WAN024EYY_at; Start 234; Stop 258
gatgaacttggaaaacaagcgccct

SEQ ID NO: 188012 - DNA, 25 bp, Artificial
  probe
  misc_feature (1)..(25): SEQ ID NO: 1904; WAN024EYY_at; Start 503; Stop 527
caaccaaggagcaagactttgaccg

SEQ ID NO: 188013 - DNA, 25 bp, Artificial
  probe
  misc_feature (1)..(25): SEQ ID NO: 1904; WAN024EYY_at; Start 487; Stop 511
gatggaacagcaaatccaaccaagg

SEQ ID NO: 188014 - DNA, 25 bp, Artificial
  probe
  misc_feature (1)..(25): SEQ ID NO: 1904; WAN024EYY_at; Start 727; Stop 751
gattcgcatgtttgtttggccaaag

SEQ ID NO: 188015 - DNA, 25 bp, Artificial
  probe
  misc_feature (1)..(25): SEQ ID NO: 1904; WAN024EYY_at; Start 885; Stop 909
taacctaggtgctactgataagatg

SEQ ID NO: 188016 - DNA, 25 bp, Artificial
  probe
  misc_feature (1)..(25): SEQ ID NO: 1904; WAN024EYY_at; Start 793; Stop 817
gatggcattgatgaaaagactggtc

SEQ ID NO: 188017 - DNA, 25 bp, Artificial
  probe
  misc_feature (1)..(25): SEQ ID NO: 1904; WAN024EYY_at; Start 546; Stop 570
taaggactggatggaaaatggttct

SEQ ID NO: 188018 - DNA, 25 bp, Artificial
  probe
  misc_feature (1)..(25): SEQ ID NO: 1904; WAN024EYY_at; Start 147; Stop 171
tcctccgagcgatactggtgagaca

SEQ ID NO: 188019 - DNA, 25 bp, Artificial
  probe
  misc_feature (1)..(25): SEQ ID NO: 1904; WAN024EYY_at; Start 648; Stop 672
tggtcgttacaaggaaagcggtgcc

SEQ ID NO: 188020 - DNA, 25 bp, Artificial
  probe
  misc_feature (1)..(25): SEQ ID NO: 1904; WAN024EYY_at; Start 571; Stop 595
tatatggcagttcgtcggattcaga

SEQ ID NO: 188021 - DNA, 25 bp, Artificial
  probe
  misc_feature (1)..(25): SEQ ID NO: 1904; WAN024EYY_at; Start 455; Stop 479
tggagactccgtggaacctctttgg

SEQ ID NO: 188022 - DNA, 25 bp, Artificial
  probe
  misc_feature (1)..(25): SEQ ID NO: 1904; WAN024EYY_at; Start 916; Stop 940
tacatcactcacataggtagtggac

SEQ ID NO: 188023 - DNA, 25 bp, Artificial
  probe
  misc_feature (1)..(25): SEQ ID NO: 1904; WAN024EYY_at; Start 945; Stop 969
tacttgctttggtggtgtggagaaa

SEQ ID NO: 188024 - DNA, 25 bp, Artificial
  probe
  misc_feature (1)..(25): SEQ ID NO: 1904; WAN024EYY_at; Start 408; Stop 432
gccccttcgttggagtcagtctgga

SEQ ID NO: 188025 - DNA, 25 bp, Artificial
  probe
  misc_feature (1)..(25): SEQ ID NO: 1904; WAN024EYY_at; Start 966; Stop 990
gaaaggaggctacattggtcagaaa

SEQ ID NO: 188026 - DNA, 25 bp, Artificial
  probe
  misc_feature (1)..(25): SEQ ID NO: 1904; WAN024EYY_at; Start 195; Stop 219
gacgctgacttttggtgtatctgca

SEQ ID NO: 188027 - DNA, 25 bp, Artificial
  probe
  misc_feature (1)..(25): SEQ ID NO: 1904; WAN024EYY_at; Start 844; Stop 868
tctttccagaaggatcctgataact

SEQ ID NO: 188028 - DNA, 25 bp, Artificial
  probe
  misc_feature (1)..(25): SEQ ID NO: 1904; WAN024EYY_at; Start 370; Stop 394
gctattcgcaatctcatccgtaagg

SEQ ID NO: 188029 - DNA, 25 bp, Artificial
  probe
  misc_feature (1)..(25): SEQ ID NO: 1904; WAN024EYY_at; Start 168; Stop 192
gacagttgggctcaatcctcatcgt

SEQ ID NO: 188030 - DNA, 25 bp, Artificial
  probe
  misc_feature (1)..(25): SEQ ID NO: 5617; WAN024EYZ_at; Start 249; Stop 273
tctatctggagatattactgaagcc

SEQ ID NO: 188031 - DNA, 25 bp, Artificial
  probe
  misc_feature (1)..(25): SEQ ID NO: 5617; WAN024EYZ_at; Start 319; Stop 343
caaaatcctgttgacctagatgcgg

SEQ ID NO: 188032 - DNA, 25 bp, Artificial
  probe
  misc_feature (1)..(25): SEQ ID NO: 5617; WAN024EYZ_at; Start 146; Stop 170
gtcagactgagacccagaaactcgt

SEQ ID NO: 188033 - DNA, 25 bp, Artificial
  probe
  misc_feature (1)..(25): SEQ ID NO: 5617; WAN024EYZ_at; Start 228; Stop 252
gattgttaaggaaaagttagctcta

SEQ ID NO: 188034 - DNA, 25 bp, Artificial
  probe
  misc_feature (1)..(25): SEQ ID NO: 5617; WAN024EYZ_at; Start 13; Stop 37
tattggaaggctaaaagctggttac

SEQ ID NO: 188035 - DNA, 25 bp, Artificial
  probe
  misc_feature (1)..(25): SEQ ID NO: 5617; WAN024EYZ_at; Start 102; Stop 126
ctttgtgaaaatcacagatgcatcc

SEQ ID NO: 188036 - DNA, 25 bp, Artificial
  probe
  misc_feature (1)..(25): SEQ ID NO: 5617; WAN024EYZ_at; Start 411; Stop 435
agatttggaaaaagtccgagaagct

SEQ ID NO: 188037 - DNA, 25 bp, Artificial
  probe
  misc_feature (1)..(25): SEQ ID NO: 5617; WAN024EYZ_at; Start 29; Stop 53
gctggttactagttttagctttgtc

SEQ ID NO: 188038 - DNA, 25 bp, Artificial
  probe
  misc_feature (1)..(25): SEQ ID NO: 5617; WAN024EYZ_at; Start 259; Stop 283
gatattactgaagccaaactcaccg

SEQ ID NO: 188039 - DNA, 25 bp, Artificial
  probe
  misc_feature (1)..(25): SEQ ID NO: 5617; WAN024EYZ_at; Start 238; Stop 262
gaaaagttagctctatctggagata

SEQ ID NO: 188040 - DNA, 25 bp, Artificial
  probe
  misc_feature (1)..(25): SEQ ID NO: 5617; WAN024EYZ_at; Start 267; Stop 291
tgaagccaaactcaccgaaatttcc

SEQ ID NO: 188041 - DNA, 25 bp, Artificial
  probe
  misc_feature (1)..(25): SEQ ID NO: 5617; WAN024EYZ_at; Start 168; Stop 192
cgttacgaagatggcatcagacttc

SEQ ID NO: 188042 - DNA, 25 bp, Artificial
  probe
  misc_feature (1)..(25): SEQ ID NO: 5617; WAN024EYZ_at; Start 114; Stop 138
cacagatgcatccaaaacggttaaa

SEQ ID NO: 188043 - DNA, 25 bp, Artificial
  probe
  misc_feature (1)..(25): SEQ ID NO: 5617; WAN024EYZ_at; Start 514; Stop 538
gaaacagctatttccttcctgccta

SEQ ID NO: 188044 - DNA, 25 bp, Artificial
  probe
  misc_feature (1)..(25): SEQ ID NO: 5617; WAN024EYZ_at; Start 56; Stop 80
ttttaattctttccccagcaggtgc

SEQ ID NO: 188045 - DNA, 25 bp, Artificial
  probe
  misc_feature (1)..(25): SEQ ID NO: 5617; WAN024EYZ_at; Start 423; Stop 447
agtccgagaagcttttaagaaaatg

SEQ ID NO: 188046 - DNA, 25 bp, Artificial
  probe
  misc_feature (1)..(25): SEQ ID NO: 5617; WAN024EYZ_at; Start 309; Stop 333
tgaaaaagaacaaaatcctgttgac

SEQ ID NO: 188047 - DNA, 25 bp, Artificial
  probe
  misc_feature (1)..(25): SEQ ID NO: 5617; WAN024EYZ_at; Start 180; Stop 204
ggcatcagacttcgaaagagtagaa

SEQ ID NO: 188048 - DNA, 25 bp, Artificial
  probe
  misc_feature (1)..(25): SEQ ID NO: 5617; WAN024EYZ_at; Start 454; Stop 478
acttggaccatcaatgaaagtgtgg

SEQ ID NO: 188049 - DNA, 25 bp, Artificial
  probe
  misc_feature (1)..(25): SEQ ID NO: 5617; WAN024EYZ_at; Start 526; Stop 550
tccttcctgcctagtagcatggaaa

SEQ ID NO: 188050 - DNA, 25 bp, Artificial
  probe
  misc_feature (1)..(25): SEQ ID NO: 5617; WAN024EYZ_at; Start 281; Stop 305
ccgaaatttcctcagctctattagc

SEQ ID NO: 188051 - DNA, 25 bp, Artificial
  probe
  misc_feature (1)..(25): SEQ ID NO: 5617; WAN024EYZ_at; Start 85; Stop 109
gaaagcttgagttttttctttgtga

SEQ ID NO: 188052 - DNA, 25 bp, Artificial
  probe
  misc_feature (1)..(25): SEQ ID NO: 5617; WAN024EYZ_at; Start 154; Stop 178
gagacccagaaactcgttacgaaga

SEQ ID NO: 188053 - DNA, 25 bp, Artificial
  probe
  misc_feature (1)..(25): SEQ ID NO: 5617; WAN024EYZ_at; Start 469; Stop 493
gaaagtgtggttcgtgacaatagta

SEQ ID NO: 188054 - DNA, 25 bp, Artificial
  probe
  misc_feature (1)..(25): SEQ ID NO: 5617; WAN024EYZ_at; Start 498; Stop 522
tcattatggacgtgttgaaacagct

SEQ ID NO: 188055 - DNA, 25 bp, Artificial
  probe
  misc_feature (1)..(25): SEQ ID NO: 5617; WAN024EYZ_at; Start 292; Stop 316
tcagctctattagcttttgaaaaag

SEQ ID NO: 188056 - DNA, 25 bp, Artificial
  probe
  misc_feature (1)..(25): SEQ ID NO: 5617; WAN024EYZ_at; Start 191; Stop 215
tcgaaagagtagaaaataaggattc

SEQ ID NO: 188057 - DNA, 25 bp, Artificial
  probe
  misc_feature (1)..(25): SEQ ID NO: 5617; WAN024EYZ_at; Start 131; Stop 155
cggttaaaaatggtggtcagactga

SEQ ID NO: 188058 - DNA, 25 bp, Artificial
  probe
  misc_feature (1)..(25): SEQ ID NO: 5617; WAN024EYZ_at; Start 211; Stop 235
gattctgaggttggtaagattgtta

SEQ ID NO: 188059 - DNA, 25 bp, Artificial
  probe
  misc_feature (1)..(25): SEQ ID NO: 5617; WAN024EYZ_at; Start 552; Stop 576
cgaacctacagatgagtctggaaca

SEQ ID NO: 188060 - DNA, 25 bp, Artificial
  probe
  misc_feature (1)..(25): SEQ ID NO: 5617; WAN024EYZ_at; Start 70; Stop 94
ccagcaggtgcccaagaaagcttga

SEQ ID NO: 188061 - DNA, 25 bp, Artificial
  probe
  misc_feature (1)..(25): SEQ ID NO: 5617; WAN024EYZ_at; Start 402; Stop 426
tgcctccaaagatttggaaaaagtc

SEQ ID NO: 188062 - DNA, 25 bp, Artificial
  probe
  misc_feature (1)..(25): SEQ ID NO: 5617; WAN024EYZ_at; Start 334; Stop 358
ctagatgcggaaaaggaaaaattgg

SEQ ID NO: 188063 - DNA, 25 bp, Artificial
  probe
  misc_feature (1)..(25): SEQ ID NO: 5617; WAN024EYZ_at; Start 438; Stop 462
taagaaaatgaattccacttggacc

SEQ ID NO: 188064 - DNA, 25 bp, Artificial
  probe
  misc_feature (1)..(25): SEQ ID NO: 5044; WAN024EZ2_at; Start 233; Stop 257
cactcgcgagaaaaactttattagc

SEQ ID NO: 188065 - DNA, 25 bp, Artificial
  probe
  misc_feature (1)..(25): SEQ ID NO: 5044; WAN024EZ2_at; Start 345; Stop 369
gacggacatactggatttcttcaaa

SEQ ID NO: 188066 - DNA, 25 bp, Artificial
  probe
  misc_feature (1)..(25): SEQ ID NO: 5044; WAN024EZ2_at; Start 93; Stop 117
gatcttacgaggttctttaaaagca

SEQ ID NO: 188067 - DNA, 25 bp, Artificial
  probe
  misc_feature (1)..(25): SEQ ID NO: 5044; WAN024EZ2_at; Start 219; Stop 243
ttcacggtccgggtcactcgcgaga

SEQ ID NO: 188068 - DNA, 25 bp, Artificial
  probe
  misc_feature (1)..(25): SEQ ID NO: 5044; WAN024EZ2_at; Start 138; Stop 162
gatttcattgaagaccacacggttg

SEQ ID NO: 188069 - DNA, 25 bp, Artificial
  probe
  misc_feature (1)..(25): SEQ ID NO: 5044; WAN024EZ2_at; Start 15; Stop 39
caaaataggcgaaatcgaataccct

SEQ ID NO: 188070 - DNA, 25 bp, Artificial
  probe
  misc_feature (1)..(25): SEQ ID NO: 5044; WAN024EZ2_at; Start 162; Stop 186
ggcatcattttcatccaagttgaga

SEQ ID NO: 188071 - DNA, 25 bp, Artificial
  probe
  misc_feature (1)..(25): SEQ ID NO: 5044; WAN024EZ2_at; Start 42; Stop 66
caagcgatccaagatccgacgagct

SEQ ID NO: 188072 - DNA, 25 bp, Artificial
  probe
  misc_feature (1)..(25): SEQ ID NO: 5044; WAN024EZ2_at; Start 115; Stop 139
gcatttttgactgcatccttggtga

SEQ ID NO: 188073 - DNA, 25 bp, Artificial
  probe
  misc_feature (1)..(25): SEQ ID NO: 5044; WAN024EZ2_at; Start 81; Stop 105
caagtccatatcgatcttacgaggt

SEQ ID NO: 188074 - DNA, 25 bp, Artificial
  probe
  misc_feature (1)..(25): SEQ ID NO: 5044; WAN024EZ2_at; Start 142; Stop 166
tcattgaagaccacacggttggcat

SEQ ID NO: 188075 - DNA, 25 bp, Artificial
  probe
  misc_feature (1)..(25): SEQ ID NO: 5044; WAN024EZ2_at; Start 334; Stop 358
ttttcaatatcgacggacatactgg

SEQ ID NO: 188076 - DNA, 25 bp, Artificial
  probe
  misc_feature (1)..(25): SEQ ID NO: 5044; WAN024EZ2_at; Start 192; Stop 216
ggccaaatgccaagaaatcgcttct

SEQ ID NO: 188077 - DNA, 25 bp, Artificial
  probe
  misc_feature (1)..(25): SEQ ID NO: 5044; WAN024EZ2_at; Start 173; Stop 197
catccaagttgagaatatgggccaa

SEQ ID NO: 188078 - DNA, 25 bp, Artificial
  probe
  misc_feature (1)..(25): SEQ ID NO: 5044; WAN024EZ2_at; Start 58; Stop 82
cgacgagcttgttgggcatcgacca

SEQ ID NO: 188079 - DNA, 25 bp, Artificial
  probe
  misc_feature (1)..(25): SEQ ID NO: 5044; WAN024EZ2_at; Start 123; Stop 147
gactgcatccttggtgatttcattg

SEQ ID NO: 188080 - DNA, 25 bp, Artificial
  probe
  misc_feature (1)..(25): SEQ ID NO: 5044; WAN024EZ2_at; Start 188; Stop 212
tatgggccaaatgccaagaaatcgc

SEQ ID NO: 188081 - DNA, 25 bp, Artificial
  probe
  misc_feature (1)..(25): SEQ ID NO: 5044; WAN024EZ2_at; Start 23; Stop 47
gcgaaatcgaataccctaccaagcg

SEQ ID NO: 188082 - DNA, 25 bp, Artificial
  probe
  misc_feature (1)..(25): SEQ ID NO: 5044; WAN024EZ2_at; Start 275; Stop 299
tcaagtcattgataagagggccttt

SEQ ID NO: 188083 - DNA, 25 bp, Artificial
  probe
  misc_feature (1)..(25): SEQ ID NO: 5044; WAN024EZ2_at; Start 300; Stop 324
tcctcggatattaatatattgcggt

SEQ ID NO: 188084 - DNA, 25 bp, Artificial
  probe
  misc_feature (1)..(25): SEQ ID NO: 5044; WAN024EZ2_at; Start 206; Stop 230
aaatcgcttctccttcacggtccgg

SEQ ID NO: 188085 - DNA, 25 bp, Artificial
  probe
  misc_feature (1)..(25): SEQ ID NO: 5044; WAN024EZ2_at; Start 285; Stop 309
gataagagggccttttcctcggata

SEQ ID NO: 188086 - DNA, 25 bp, Artificial
  probe
  misc_feature (1)..(25): SEQ ID NO: 5044; WAN024EZ2_at; Start 360; Stop 384
tttcttcaaatcacggatatgcccg

SEQ ID NO: 188087 - DNA, 25 bp, Artificial
  probe
  misc_feature (1)..(25): SEQ ID NO: 5044; WAN024EZ2_at; Start 7; Stop 31
ttcttccacaaaataggcgaaatcg

SEQ ID NO: 188088 - DNA, 25 bp, Artificial
  probe
  misc_feature (1)..(25): SEQ ID NO: 5044; WAN024EZ2_at; Start 368; Stop 392
aatcacggatatgcccgacactggc

SEQ ID NO: 188089 - DNA, 25 bp, Artificial
  probe
  misc_feature (1)..(25): SEQ ID NO: 5044; WAN024EZ2_at; Start 70; Stop 94
tgggcatcgaccaagtccatatcga

SEQ ID NO: 188090 - DNA, 25 bp, Artificial
  probe
  misc_feature (1)..(25): SEQ ID NO: 5044; WAN024EZ2_at; Start 316; Stop 340
tattgcggttcataattattttcaa

SEQ ID NO: 188091 - DNA, 25 bp, Artificial
  probe
  misc_feature (1)..(25): SEQ ID NO: 5044; WAN024EZ2_at; Start 1; Stop 25
ttgaccttcttccacaaaataggcg

SEQ ID NO: 188092 - DNA, 25 bp, Artificial
  probe
  misc_feature (1)..(25): SEQ ID NO: 5044; WAN024EZ2_at; Start 31; Stop 55
gaataccctaccaagcgatccaaga

SEQ ID NO: 188093 - DNA, 25 bp, Artificial
  probe
  misc_feature (1)..(25): SEQ ID NO: 5044; WAN024EZ2_at; Start 150; Stop 174
gaccacacggttggcatcattttca

SEQ ID NO: 188094 - DNA, 25 bp, Artificial
  probe
  misc_feature (1)..(25): SEQ ID NO: 5044; WAN024EZ2_at; Start 108; Stop 132
tttaaaagcatttttgactgcatcc

SEQ ID NO: 188095 - DNA, 25 bp, Artificial
  probe
  misc_feature (1)..(25): SEQ ID NO: 5044; WAN024EZ2_at; Start 262; Stop 286
ttagcttcttttttcaagtcattga

SEQ ID NO: 188096 - DNA, 25 bp, Artificial
  probe
  misc_feature (1)..(25): SEQ ID NO: 5044; WAN024EZ2_at; Start 64; Stop 88
gcttgttgggcatcgaccaagtcca

SEQ ID NO: 188097 - DNA, 25 bp, Artificial
  probe
  misc_feature (1)..(25): SEQ ID NO: 5044; WAN024EZ2_at; Start 51; Stop 75
caagatccgacgagcttgttgggca

SEQ ID NO: 188098 - DNA, 25 bp, Artificial
  probe
  misc_feature (1)..(25): SEQ ID NO: 2884; WAN024EZ3_at; Start 27; Stop 51
ggaccttgtcaagctgattttcgta

SEQ ID NO: 188099 - DNA, 25 bp, Artificial
  probe
  misc_feature (1)..(25): SEQ ID NO: 2884; WAN024EZ3_at; Start 274; Stop 298
aaggatcaaaaagtgcctgggcttc

SEQ ID NO: 188100 - DNA, 25 bp, Artificial
  probe
  misc_feature (1)..(25): SEQ ID NO: 2884; WAN024EZ3_at; Start 42; Stop 66
gattttcgtacttatgaaaggccga

SEQ ID NO: 188101 - DNA, 25 bp, Artificial
  probe
  misc_feature (1)..(25): SEQ ID NO: 2884; WAN024EZ3_at; Start 132; Stop 156
gatttctcttcaaacgatctcgcaa

SEQ ID NO: 188102 - DNA, 25 bp, Artificial
  probe
  misc_feature (1)..(25): SEQ ID NO: 2884; WAN024EZ3_at; Start 250; Stop 274
caccgtcatttaattttctactcaa

SEQ ID NO: 188103 - DNA, 25 bp, Artificial
  probe
  misc_feature (1)..(25): SEQ ID NO: 2884; WAN024EZ3_at; Start 54; Stop 78
tatgaaaggccgacaagagcatacc

SEQ ID NO: 188104 - DNA, 25 bp, Artificial
  probe
  misc_feature (1)..(25): SEQ ID NO: 2884; WAN024EZ3_at; Start 69; Stop 93
agagcataccatccccgccaatgga

SEQ ID NO: 188105 - DNA, 25 bp, Artificial
  probe
  misc_feature (1)..(25): SEQ ID NO: 2884; WAN024EZ3_at; Start 84; Stop 108
cgccaatggaaatgacaatatccgg

SEQ ID NO: 188106 - DNA, 25 bp, Artificial
  probe
  misc_feature (1)..(25): SEQ ID NO: 2884; WAN024EZ3_at; Start 159; Stop 183
catacaaaaccctttgactctgcgg

SEQ ID NO: 188107 - DNA, 25 bp, Artificial
  probe
  misc_feature (1)..(25): SEQ ID NO: 2884; WAN024EZ3_at; Start 280; Stop 304
caaaaagtgcctgggcttcttggat

SEQ ID NO: 188108 - DNA, 25 bp, Artificial
  probe
  misc_feature (1)..(25): SEQ ID NO: 2884; WAN024EZ3_at; Start 174; Stop 198
gactctgcggttttctattggctat

SEQ ID NO: 188109 - DNA, 25 bp, Artificial
  probe
  misc_feature (1)..(25): SEQ ID NO: 2884; WAN024EZ3_at; Start 78; Stop 102
catccccgccaatggaaatgacaat

SEQ ID NO: 188110 - DNA, 25 bp, Artificial
  probe
  misc_feature (1)..(25): SEQ ID NO: 2884; WAN024EZ3_at; Start 181; Stop 205
cggttttctattggctatcagatca

SEQ ID NO: 188111 - DNA, 25 bp, Artificial
  probe
  misc_feature (1)..(25): SEQ ID NO: 2884; WAN024EZ3_at; Start 199; Stop 223
cagatcaattcgtttacctgtattc

SEQ ID NO: 188112 - DNA, 25 bp, Artificial
  probe
  misc_feature (1)..(25): SEQ ID NO: 2884; WAN024EZ3_at; Start 209; Stop 233
cgtttacctgtattcttcatctgta

SEQ ID NO: 188113 - DNA, 25 bp, Artificial
  probe
  misc_feature (1)..(25): SEQ ID NO: 2884; WAN024EZ3_at; Start 99; Stop 123
caatatccggattggtatcattgag

SEQ ID NO: 188114 - DNA, 25 bp, Artificial
  probe
  misc_feature (1)..(25): SEQ ID NO: 2884; WAN024EZ3_at; Start 218; Stop 242
gtattcttcatctgtatcgtcactg

SEQ ID NO: 188115 - DNA, 25 bp, Artificial
  probe
  misc_feature (1)..(25): SEQ ID NO: 2884; WAN024EZ3_at; Start 111; Stop 135
tggtatcattgagtataaactgatt

SEQ ID NO: 188116 - DNA, 25 bp, Artificial
  probe
  misc_feature (1)..(25): SEQ ID NO: 2884; WAN024EZ3_at; Start 57; Stop 81
gaaaggccgacaagagcataccatc

SEQ ID NO: 188117 - DNA, 25 bp, Artificial
  probe
  misc_feature (1)..(25): SEQ ID NO: 2884; WAN024EZ3_at; Start 289; Stop 313
cctgggcttcttggatatcatcacg

SEQ ID NO: 188118 - DNA, 25 bp, Artificial
  probe
  misc_feature (1)..(25): SEQ ID NO: 2884; WAN024EZ3_at; Start 47; Stop 71
tcgtacttatgaaaggccgacaaga

SEQ ID NO: 188119 - DNA, 25 bp, Artificial
  probe
  misc_feature (1)..(25): SEQ ID NO: 2884; WAN024EZ3_at; Start 9; Stop 33
tatgaagaccgataaagcggacctt

SEQ ID NO: 188120 - DNA, 25 bp, Artificial
  probe
  misc_feature (1)..(25): SEQ ID NO: 2884; WAN024EZ3_at; Start 192; Stop 216
tggctatcagatcaattcgtttacc

SEQ ID NO: 188121 - DNA, 25 bp, Artificial
  probe
  misc_feature (1)..(25): SEQ ID NO: 2884; WAN024EZ3_at; Start 271; Stop 295
tcaaaggatcaaaaagtgcctgggc

SEQ ID NO: 188122 - DNA, 25 bp, Artificial
  probe
  misc_feature (1)..(25): SEQ ID NO: 2884; WAN024EZ3_at; Start 147; Stop 171
gatctcgcaattcatacaaaaccct

SEQ ID NO: 188123 - DNA, 25 bp, Artificial
  probe
  misc_feature (1)..(25): SEQ ID NO: 2884; WAN024EZ3_at; Start 142; Stop 166
caaacgatctcgcaattcatacaaa

SEQ ID NO: 188124 - DNA, 25 bp, Artificial
  probe
  misc_feature (1)..(25): SEQ ID NO: 2884; WAN024EZ3_at; Start 104; Stop 128
tccggattggtatcattgagtataa

SEQ ID NO: 188125 - DNA, 25 bp, Artificial
  probe
  misc_feature (1)..(25): SEQ ID NO: 2884; WAN024EZ3_at; Start 238; Stop 262
cactgtttcctacaccgtcatttaa

SEQ ID NO: 188126 - DNA, 25 bp, Artificial
  probe
  misc_feature (1)..(25): SEQ ID NO: 2884; WAN024EZ3_at; Start 2; Stop 26
tgtccagtatgaagaccgataaagc

SEQ ID NO: 188127 - DNA, 25 bp, Artificial
  probe
  misc_feature (1)..(25): SEQ ID NO: 2884; WAN024EZ3_at; Start 19; Stop 43
gataaagcggaccttgtcaagctga

SEQ ID NO: 188128 - DNA, 25 bp, Artificial
  probe
  misc_feature (1)..(25): SEQ ID NO: 2884; WAN024EZ3_at; Start 231; Stop 255
gtatcgtcactgtttcctacaccgt

SEQ ID NO: 188129 - DNA, 25 bp, Artificial
  probe
  misc_feature (1)..(25): SEQ ID NO: 2884; WAN024EZ3_at; Start 266; Stop 290
tctactcaaaggatcaaaaagtgcc

SEQ ID NO: 188130 - DNA, 25 bp, Artificial
  probe
  misc_feature (1)..(25): SEQ ID NO: 2884; WAN024EZ3_at; Start 126; Stop 150
taaactgatttctcttcaaacgatc

SEQ ID NO: 188131 - DNA, 25 bp, Artificial
  probe
  misc_feature (1)..(25): SEQ ID NO: 2884; WAN024EZ3_at; Start 90; Stop 114
tggaaatgacaatatccggattggt

SEQ ID NO: 188132 - DNA, 25 bp, Artificial
  probe
  misc_feature (1)..(25): SEQ ID NO: 5489; WAN024EZ4_at; Start 83; Stop 107
tcatctgggaaatccccttggtact

SEQ ID NO: 188133 - DNA, 25 bp, Artificial
  probe
  misc_feature (1)..(25): SEQ ID NO: 5489; WAN024EZ4_at; Start 200; Stop 224
gtatcaaccgtatattctactacca

SEQ ID NO: 188134 - DNA, 25 bp, Artificial
  probe
  misc_feature (1)..(25): SEQ ID NO: 5489; WAN024EZ4_at; Start 210; Stop 234
tatattctactaccacatgatagga

SEQ ID NO: 188135 - DNA, 25 bp, Artificial
  probe
  misc_feature (1)..(25): SEQ ID NO: 5489; WAN024EZ4_at; Start 97; Stop 121
cccttggtacttgtagttgagagaa

SEQ ID NO: 188136 - DNA, 25 bp, Artificial
  probe
  misc_feature (1)..(25): SEQ ID NO: 5489; WAN024EZ4_at; Start 220; Stop 244
taccacatgataggaacgatagcct

SEQ ID NO: 188137 - DNA, 25 bp, Artificial
  probe
  misc_feature (1)..(25): SEQ ID NO: 5489; WAN024EZ4_at; Start 222; Stop 246
ccacatgataggaacgatagcctga

SEQ ID NO: 188138 - DNA, 25 bp, Artificial
  probe
  misc_feature (1)..(25): SEQ ID NO: 5489; WAN024EZ4_at; Start 205; Stop 229
aaccgtatattctactaccacatga

SEQ ID NO: 188139 - DNA, 25 bp, Artificial
  probe
  misc_feature (1)..(25): SEQ ID NO: 5489; WAN024EZ4_at; Start 173; Stop 197
gccaaaatagtcttagctccattga

SEQ ID NO: 188140 - DNA, 25 bp, Artificial
  probe
  misc_feature (1)..(25): SEQ ID NO: 5489; WAN024EZ4_at; Start 178; Stop 202
aatagtcttagctccattgatggta

SEQ ID NO: 188141 - DNA, 25 bp, Artificial
  probe
  misc_feature (1)..(25): SEQ ID NO: 5489; WAN024EZ4_at; Start 102; Stop 126
ggtacttgtagttgagagaatgttc

SEQ ID NO: 188142 - DNA, 25 bp, Artificial
  probe
  misc_feature (1)..(25): SEQ ID NO: 5489; WAN024EZ4_at; Start 215; Stop 239
tctactaccacatgataggaacgat

SEQ ID NO: 188143 - DNA, 25 bp, Artificial
  probe
  misc_feature (1)..(25): SEQ ID NO: 5489; WAN024EZ4_at; Start 195; Stop 219
tgatggtatcaaccgtatattctac

SEQ ID NO: 188144 - DNA, 25 bp, Artificial
  probe
  misc_feature (1)..(25): SEQ ID NO: 5489; WAN024EZ4_at; Start 127; Stop 151
tatcgttgcccagaaattcatggcc

SEQ ID NO: 188145 - DNA, 25 bp, Artificial
  probe
  misc_feature (1)..(25): SEQ ID NO: 5489; WAN024EZ4_at; Start 45; Stop 69
gggcgattctagctgtaatttccag

SEQ ID NO: 188146 - DNA, 25 bp, Artificial
  probe
  misc_feature (1)..(25): SEQ ID NO: 5489; WAN024EZ4_at; Start 115; Stop 139
gagagaatgttctatcgttgcccag

SEQ ID NO: 188147 - DNA, 25 bp, Artificial
  probe
  misc_feature (1)..(25): SEQ ID NO: 5489; WAN024EZ4_at; Start 117; Stop 141
gagaatgttctatcgttgcccagaa

SEQ ID NO: 188148 - DNA, 25 bp, Artificial
  probe
  misc_feature (1)..(25): SEQ ID NO: 5489; WAN024EZ4_at; Start 119; Stop 143
gaatgttctatcgttgcccagaaat

SEQ ID NO: 188149 - DNA, 25 bp, Artificial
  probe
  misc_feature (1)..(25): SEQ ID NO: 5489; WAN024EZ4_at; Start 68; Stop 92
agtcgcttcttaatctcatctggga

SEQ ID NO: 188150 - DNA, 25 bp, Artificial
  probe
  misc_feature (1)..(25): SEQ ID NO: 5489; WAN024EZ4_at; Start 165; Stop 189
gaatttctgccaaaatagtcttagc

SEQ ID NO: 188151 - DNA, 25 bp, Artificial
  probe
  misc_feature (1)..(25): SEQ ID NO: 5489; WAN024EZ4_at; Start 131; Stop 155
gttgcccagaaattcatggccaaag

SEQ ID NO: 188152 - DNA, 25 bp, Artificial
  probe
  misc_feature (1)..(25): SEQ ID NO: 5489; WAN024EZ4_at; Start 188; Stop 212
gctccattgatggtatcaaccgtat

SEQ ID NO: 188153 - DNA, 25 bp, Artificial
  probe
  misc_feature (1)..(25): SEQ ID NO: 5489; WAN024EZ4_at; Start 49; Stop 73
gattctagctgtaatttccagtcgc

SEQ ID NO: 188154 - DNA, 25 bp, Artificial
  probe
  misc_feature (1)..(25): SEQ ID NO: 5489; WAN024EZ4_at; Start 125; Stop 149
tctatcgttgcccagaaattcatgg

SEQ ID NO: 188155 - DNA, 25 bp, Artificial
  probe
  misc_feature (1)..(25): SEQ ID NO: 5489; WAN024EZ4_at; Start 56; Stop 80
gctgtaatttccagtcgcttcttaa

SEQ ID NO: 188156 - DNA, 25 bp, Artificial
  probe
  misc_feature (1)..(25): SEQ ID NO: 5489; WAN024EZ4_at; Start 93; Stop 117
aatccccttggtacttgtagttgag

SEQ ID NO: 188157 - DNA, 25 bp, Artificial
  probe
  misc_feature (1)..(25): SEQ ID NO: 5489; WAN024EZ4_at; Start 79; Stop 103
aatctcatctgggaaatccccttgg

SEQ ID NO: 188158 - DNA, 25 bp, Artificial
  probe
  misc_feature (1)..(25): SEQ ID NO: 5489; WAN024EZ4_at; Start 170; Stop 194
tctgccaaaatagtcttagctccat

SEQ ID NO: 188159 - DNA, 25 bp, Artificial
  probe
  misc_feature (1)..(25): SEQ ID NO: 5489; WAN024EZ4_at; Start 143; Stop 167
ttcatggccaaagtacgaatttgaa

SEQ ID NO: 188160 - DNA, 25 bp, Artificial
  probe
  misc_feature (1)..(25): SEQ ID NO: 5489; WAN024EZ4_at; Start 61; Stop 85
aatttccagtcgcttcttaatctca

SEQ ID NO: 188161 - DNA, 25 bp, Artificial
  probe
  misc_feature (1)..(25): SEQ ID NO: 5489; WAN024EZ4_at; Start 136; Stop 160
ccagaaattcatggccaaagtacga

SEQ ID NO: 188162 - DNA, 25 bp, Artificial
  probe
  misc_feature (1)..(25): SEQ ID NO: 5489; WAN024EZ4_at; Start 186; Stop 210
tagctccattgatggtatcaaccgt

SEQ ID NO: 188163 - DNA, 25 bp, Artificial
  probe
  misc_feature (1)..(25): SEQ ID NO: 5489; WAN024EZ4_at; Start 75; Stop 99
tcttaatctcatctgggaaatcccc

SEQ ID NO: 188164 - DNA, 25 bp, Artificial
  probe
  misc_feature (1)..(25): SEQ ID NO: 5489; WAN024EZ4_at; Start 42; Stop 66
gatgggcgattctagctgtaatttc

SEQ ID NO: 188165 - DNA, 25 bp, Artificial
  probe
  misc_feature (1)..(25): SEQ ID NO: 5489; WAN024EZ4_at; Start 152; Stop 176
aaagtacgaatttgaatttctgcca

SEQ ID NO: 188166 - DNA, 25 bp, Artificial
  probe
  misc_feature (1)..(25): SEQ ID NO: 1415; WAN024EZ5_at; Start 429; Stop 453
tactttggccatgaatttctgggca
